United States Patent Application Publication US 2015/0240253 A1 - sequence listing, part 11

SEQ ID NO: 50201 - DNA, 495 bp, Zea Mays
gggatcagaataagaatcgcagaggaggcgaagacgaatgtcgctactacttgtagtgggtgccgcggcggcggcgggcggaccggaccggaccgagccggacccaaccacggagagagagtggaagagaaagaggcggtgataaaccgtacgaatcacgcaagcgcggggcggggcggggcgagggtgggaagggagtggagagtggaaagcggtggtgcgatggaggggtggcgatggcgatgctggattccgatgcgatatggggggtgcggtggggcggagggagggtctcgattcgattcgacggtgtatcaacgctactctttctcttcactctctctctctctctgtccttcccagctctcctctcgccgtccctctcgctctgatgatatgatttgagggaggaggagggagggagacggggcgagccgacgggactcgacggagcaggtggggctttggcctttgtgggagaggcgggttgggact

SEQ ID NO: 50202 - DNA, 523 bp, Zea Mays
gttggctgcttgcaacaaactgggtgtggaaggaactttgactaggctggtcgagacttgatggagcggatcatgctgacttgctgaagtttgaccccttggaagggaacccaaaagatcgaaccctctggtgcctgtcctgttgttgagctcggagaacttgaaattttctcttgagatgacctttttcctcttctcgtgctctttccacctggatggccttgttcgagaggtgcgagaaactgaggaagtcttggctggcaaggatggtcttaaccctttcaagaaacgggccatcttcttggcttccgtgctaacgtcatcaggtgcatagtgagcaagttctgtgaatttatggatgtattcactggtggatcgccctccttgagttaactcccgaaattcctcctccttgagctggacgattcccaagggcacatgatgctctcggaaagcaacctcaaactctgcctaggtagcatctcttactgcagcgctgaaggtgtcccaccaggatagagcc

SEQ ID NO: 50203 - DNA, 705 bp, Zea Mays
tgggccccagcaagcgtcgaggcaagctcaaagttggcctgttcgcaagcatacgtggctctgaacgacgtggcggccatgatgattccgtgcggcctcggcatcttgagcttcaagtacatgtagtttggtatgccatgaatttataggaccctaggaagtctaccacctctaactgcagtcgttcggtgtgaaaattggtggggttctcgaaggtgacgagcagagtgatctgcccgagtgggtaggcctggtggcctagaatgacgccgaactaagatgcagcgctgagcgtgtgaatgtgatccccaaaccatcgaaaatctcaatgtacatgatgttgggactgcttctctcatccatcagcaccttggtgaggcactttgagcctatgattggcttgacgatgaggggataggacccaggatgtgggattctatcttggtggtcgcggcggtcaaagacgaccgggaactccaaccaccgaggtatcgcggcatggtgggttctaccgcgaacacttctcgtcgagcctccttgaggcaacgcttgtcgtcatatgttcctgccccgccaaaaatcatgaggcacctcgcgggttcgaggaagtcctccatgggggtctcttgctccgttggcttcatcggctcttcctgcttcgccttcttggccagtggcttggagatgaagcgctttaagagtttg

SEQ ID NO: 50204 - DNA, 312 bp, Zea Mays
catggttgaacgggaacgcgagctcgtggtcacggtttccgccgtgcacgtgggcagaccgttctcagtgtgttcatgccaaattggcgagtgttcctaggtcacccttggtcggttatgtcctcccggtagctagacgaggtagccgtcgccggccatggccggcatgggccgcgtcggtgatgatcagcgagcgcaccatggtcaggaacttatttagtgaagaaacgaagttccagggacccctgtgtaaactgtcagtgacccttaaactattctgtagagcgttttacaaattagttaagacctcag

SEQ ID NO: 50205 - DNA, 493 bp, Zea Mays
gacgattgttggcatggcagttacgtggattagccgataacgaattgagttggttagcgagtctccggactataaatatgtaccttaagtcgctcattagggtaatcataaatcttcatatgttttgtgactacatgctttggcgcatcgtcgtccctattctcagggttttccacgggtaagtgtcatgccaccctaatcgtgtctcgcgatcagagtggtgtcgtacttgtttgttaaatcgttgtgttctctcgtactgaagcgtttttatggagagaaacactagttatcgtagcatttataagaaagtatcggcgagttcgtcatgtgtgcatgatgtcaaccgattatgaatgtttcgtcgtcctcgcgcgagttcacgagcgtgagggtggcgcctcgctttgcttcacctaggagatacgatctgtcacagttaagtctttgatttatcaacgatccatctaatatctgcatagttaggccttgc

SEQ ID NO: 50206 - DNA, 380 bp, Zea Mays
aatctcaccaatttcattgtctatggcatcgcatcgatcaccactgttttgtgacatgctctttttgtccttggacttggtataaaatgtgattccactaatgtcataggttttccatatcatgacctagtgtgatggttcagatgccaaccccttgatggtttgttcatctatcgtttctccatgtggaatgtccttcaacagtagccatgtgttgaatcgctgcttgtgttgcttcattacccaatcattcgtatgcccaagattttgctcgtgaagctcattgatgtggttgttggataaatggctccgttatcactagctgatgtaggatgttgtgatgtgcctcaagtattgtattgtaatctgatgggatgaaa

SEQ ID NO: 50207 - DNA, 525 bp, Zea Mays
gcaaccgcaaatcggcgccgccatcattcaaggcccggtggtgaagtgttgtgcatcgcccgtgctggtagaggccagccgcgacatcgctcaactttgtggcgactcgtcttcgccgtaattcctcgtcggaatccggaatcggccgtggatccgcaccgcatcggaccgacctatttccatcgccatcctctggtgaggtatcccctacctagttcatcgtgttctgttctctctattacgtggggtcatgcaagggttggaacccggtggcatgggttgggcaagctcacgacgagcggattgctgtgtcgcgcgcgcaccgccgtactgcggcgccaaggaagaaggggagggcgacattgattagcgtacgaacggtcaggattaattctgggcatcccccttgccccgtcctatgtgaaccgtagatcctcaaaccaggggtggtgattgcgtaccgattcatgtgggtgtccgatctaatcagcgtcgtatgcattggatcggacagctgagattaaa

SEQ ID NO: 50208 - DNA, 314 bp, Zea Mays
tgaagagcaagttttgaacattttgaagtgaacaaaggtggaactcttgtgggaagtaaaagtggtttttcacaaaggcattcatgatctagaaaagtgttctctaagatgatttgaaggattttgaacttagctcattgcacaacttacttaaccattgtggatccctcttaactgaacgatgattcttataactcaagaattatcaaatgaacactgccgttgtttccaagcacttggagcacgccgtatgatgtagaatttaaatccgctgtgcttttcatttttatactcataagatctgtgcttctcct

SEQ ID NO: 50209 - DNA, 684 bp, Zea Mays
aagaaatccaggacttagtgcaaagtcacaaaggatggcgggctagtttctaataaagctgggggttctttagcaaggttacgcggccgaaggggtatcgggctaccagggccgtccgatcagagaagaatgacactaatcaaattggctaatgaacgaatcggtacgctacgctaaccgttagatcagagatctacggtgagtactcaatgatgcgtggtctaattcaagccgccagatcccgatcgtgcggctcccaaagactcagatcgatcgaaacctgagatctaatcctaaccataggtttgggatcctacggccaaggtactttccccaccttgacgccgcaggacggcggcatcaccggccaaacacgatggcaaccccaccagtgcgcgtgaactaagcaaaataatacccaatccgaccccccgaacgacgctatacgtacagcagaaagtagtgaaggcgatgaggtactacttaccggcggtcaagcggtgaagaaagcaggccacggcgcgagtggttctgaggcggagctacgacttccgacgaggaattccgctagcgcagcgacaccaacggagaaattagtggctgccaaagtgtctaggggtcacgacgcaacactagagtgctccacggatgtcccagtgcccgtggttcacgtcttctatggca

SEQ ID NO: 50210 - DNA, 1879 bp, Zea Mays
agtggccaaggatttatagtttttgagttgcatggccaaaaacaaactcgggcaataattggatggccaaaaatagacttctacctaaataaaaataagaaaatcaccaacagcagatttattgtggtacctgtggtattcccactgtattgtgacatgcctcaatttgctgagtaacaagaggacgtgaagggcaggtaaatattatttttcctgaatttccattgtaaataaaaacaatgtttcagcaagcaatttccacaaagttcataaaatacagcatcagagaagaaaacggttacaatgcaatgtgaaacattaccttcgggaaaccatcgaaagtagttgtacatcactaccgcagcaataaaagttttgccaagtccagttggcaaagctattaacgtattggtaaacagagccttttcaaccatatacttctggtactctcggacttctacattagctgcagcgcgtataaaaatagccaaaataaattactaaggcaagatgtgctgcttggattgcatataacaacatagttatctagtgcagtgtatttaagaagcaaacatggttctataagaactgaacaataaccattatccagaaaaaataaacagaaactttgacaggaattttccattgtctattttccaaatcgcttaatgtcgtctagtcatttgcatctgaggaatgaaactttgtgcatccatgttgaaatctgggtgtttccctatggtgtttaggcagctactgctaaaaaatcaaggatttccttcaacagataaaagaaactggaaaaaattgaagtgttgcgcattaacaattcacaatcaagatatcatttagtagaatgcatatatccatctcataccactatactaaaatagtgcaatttaacagttgttagcagatgcaatgggcggagcaatagaatcaaccatgtgagcaacaaacatgtaatccagttgtactaaagaatacgacaaccacagtgcactcaatacttaatctgcaactaaaagtggaaaccctgacagtggttcgggaactcatgtgaaggcctagtaaaacctgcattctaaagacatgaataatcaagccaagatatcccaaaatccaaataaccaagctaagaagttgcaacaataacatcctcaaaaatgacatttgtttgatacaacaaaaacatattgcaaagggtggacaagctcctagtccatctctatctgcttcaactaaaagaggtgcatgcttctatgggtgcagtgctactccagcaaactaaaccacttatccttatgttatagttttttgcttgatttcctgatgcaatcgtctacctaatatggctgctcaagtgcttaacaaaacaaagtttagagtcagtttccgcattcccaagcatcttgtacacttcagtaccagcaagaactgctggaatgtatcctcaagcaagatggctgccattattaactaataaagtgccagcattcactaaagatgtctattttccaagacaactccacccataagctgaatcccagcatgaaaaccagaacaaagaacagttattggcaaaatgctgtagaaactcaaaccccctcacttggatagatccatgtcttgacagcctcgtggtccagggagacagcgcagagaccatactcaatctccatactgggccgacgagagcatcccttgccagcacgattgccccgacccgagcatcccttgccagcacgagctgcagggcgcccctgaccaccagccagtgccggtgccacctccgacgcagccctctccttctcctgctgcctcctggtgaaggattcgatgaaccggtcctccacagctctctcgttcgcctgtcccg

SEQ ID NO: 50211 - DNA, 347 bp, Zea Mays
ggaagaaaaagaagaagagacgtcttcgccgagtgtcaagcttggatcaggatgctggtccttctgctcctgctgctgaggaagtgcccgtgccagtttttgctaaagctgaccccaatgggtgtgacccgactgatgctgaacccaatgggtgtgacctagatgatgctgaacccaatgggtgtgccgtccgcgttattgatgaagatgaggaagaggaggatgaaatccctctagttcagaagaacagccgacgctacatagtcagcggggaaagtagtggtgttccttctccagccttgtctgctctcattggtctgcaagaattgtctctggcaaactttgat

SEQ ID NO: 50212 - DNA, 411 bp, Zea Mays
gctccggcaagcgtgtagactggccgaacagggcaacgactggcgctgccgagcgactgtcacccaattgaaccctccccggtcattttccccaaccaaatttcatggttggcgatctgccaagctctgcccgcgaggacagcgatggccatggacctttgttcatgttcccggtgattggtgagctctcagtccaatttggtggttcggcaagcatcacggagttatgagaatgctcaaacaagggagcagaaggcgggggctgacctggattacgctagccgcggtgagactggtttcacggtggcggaaacccgaattggggagactccaaaattcgtgagctctggcgaacgatcgaggctaattcatggtagctggatacttcactgtcttatggagctcgcgacg

SEQ ID NO: 50213 - DNA, 504 bp, Zea Mays
gggaaacacgatccgcgacggcctccctactccagtgatcaatttgctccaagcctgccacgatctcccacaccgctgtccccgcacacgccccacgccaccacccaaagcccccgatcccttttccttagctcgattggcggcgcaaccacggaatgccctccctctcacccttttccttgcgaatgctcgatacctctctgctacccacagtctcgaaggattccgggacaccaaggtcgacgggcacctccacagacatatataggcacaaagaggaggatcgaggtccaccaaatcccaaccaccacgatcgattcacaacaacatcggctttctgcttaagctcggactcgaacgactgacatcaaggtcccaccggtagaggcgcgcgtggcgcgcgtaggactgatgaatggggtccgtctgtcagtggcaccgcgtgcacggtttatgcacttcccagtgaaggcgtgttgtcggagtacgctatcgacgtcatcc

SEQ ID NO: 50214 - DNA, 2246 bp, Zea Mays
gttgattagctgtcattagctgttttctgttatctgttgattagctgtcatcagctgtaatggtgattactctgtaatgggttagccttagtagagatctataaatactgtaaagactagctggcaaagatatgaaataacagaaccaaatccacatacctcgtgtgcacctgagtctgtcaggtgttcgtcggagaacctcacgtcgcggtgactctgccgcggccacggggaaacgtcacagtggtatcaaagccgacgatcttcggagaccgtcactacggcgccgtcaacaaaaccgtccgtgcagacccgtttgctgctggaagctatggccggagcggagctgaagggagaggagcgttgggataagatgatgcgggtgttggagagggtggatcggcgattggaggcgctggaatcagggcaacagtctgcaaacgaggctgcgcgaaaggcggaggaggaacgtgtcatcctggcacgacaggtggacgagacagggaagacggtttcgcgtcttcgactggaatggatggcgcaggaaatggaaggtatggagtctgatcctgagagggagaatcgtggtcgacgagagtttggtagaagaaatttggaggagagggagcagtatcagtttggagggaatagaaatttggaagagagggagcagaaccagtttaggggaaatagaaatttggaggagagggagcagtatcagtttgaagggaatagaaatttggaagagagggagcagaaccagtttagggggaatagatatttggaggagagggagcagtatcagtttggagggaacaggaattttcgttccattgatttgccaaagatgtccttcccaaagtttcaaggaattgaaccagggatatggatcactaagtgtcttgagtacttcatgatctaccaaattccagagttcatgtgggcatcttctgcttctttacacatggagggaagggctggtaggtggatgcaggtgtacaaaatgagacaggggttgggtgactggtctcattttgttcgagctgtacaggacaagtttggttctgaagagtattctcagtgtatgagggaattggttcatatgacacagagagctagcttggatgaatatattcaggagtttgaggacagtcgatatgcaacaatggtgcataatccaaggctggatgagactttctttgtgtcccagtttattaaagggttgaggggagaaactaagggatatgtgatgtctcagttgcctagaacagttgacagggccatagctctagcccagatccatcaagaggttttggagaagggaggatacaaatttcagaaaggtctacagtcaaacaaaggtctgggaggtactgtcaagttagatgtcaaaatgggtggaggatcgtcagatatgactaaggaaagacaattgagggacttcagaagattgaatggtttgtgctttggatgtggggagaaatatgaacctgggcatcaagccaagtgtcctaaaagggtgggtcctcagctgcatagtttgactgtggaagatatgggactgctgttatcagatgaagttctgcacaatttggatcaggaggaccaaacgttggaggaatcctacaagctctcactaaatgctatcagtgggacggatcaggaggggtgtatgagagtgagagcactgatcaagaatcaggtgatggtgattttggtggactctggtagttccacaacttttgtcagccagaagatggtgaacaagttgaatttgcaaactgaaagctgtcaagctattagggtgaaagtggctaatggggagatgatgcagagttcaaagaaggtgccatgtttgtcctggtgggctggtggacatacttatagtacagatatgagagtgcttgagttggaagcatatgatgctattctgggttatgattggttaaaggtccacagtcccatggagtgtgattggaacaataaggtattgacctttgtggacagaggggtgcaggtgcagttaaaaggggatgggaatgaacttagggaggtttcccaggtgacagcgctgcagttgacaaaatggatgaagggtaatgaggtatgggctctagtgatgctagagcaagttccagtggagaaagatgacaaggtgcaagaatctttggagttgttgctaaaagagttcgaagatgtgtttgcagtaccctctggattgccttcttctagagtgtatgatcacc

SEQ ID NO: 50215 - DNA, 301 bp, Zea Mays
acagagtttactttgcttttgggatatctggattaggcaacctatgatgtaggttaggttgttgtttacggtcgagttagtccaaggtattaatttaggataagatatgtttatagaattagggcctaatttatatcgccaacattatctaacttatttaagtatctcaatttggattagatcatgttagatttggtgggatctaaatcaccggtataactagataagatctatttattttaggctagatcatggttgttactgtagagtgggataggtatgcctattagaacaagataaa

SEQ ID NO: 50216 - DNA, 359 bp, Zea Mays
atagagcaagtctgaggggtcgaatctgtttcccttttttgtaactaggtaacgcatacgtgtacgacaatccggtgggatctgtccccgttagcccggtctattggtctgcacacatgcatgacgagttataaagaaaaactgcccccctcagttgtgcccctatgatagatccacctcactgctccatggtcttaccttgcagtttttcagataatactttttatctaacccacccgtatggttccaaatccaatctgtcctaacgttacgacgtctaaattgagtagccaggcttgcagtctagggcccccgatacgaaagttgggaggtccgacagcctaggagccggccctaaa

SEQ ID NO: 50217 - DNA, 337 bp, Zea Mays
gatgaagtcccctgggaaactatttagaagaatttgtgtggaggaagtagaaaggacgccactaataatatctctccacacacttccaaaacccatcttttccataacctccaaaagaaagggccaagacacggtgtcaaaggccttagaaatgtccaatttaaggaggattctaggctgcttctgagtataaagatatctagcagtttgttgcaccatcataaagttgtcttgcataaatcctcccttaatgaaacactttggttttttgaaattaaactgtccaatcttgcactaagcctattggctagaatctttgtcacgagcttagcaaaac

SEQ ID NO: 50218 - DNA, 934 bp, Zea Mays
gttcaccttgtttacctgtgacagacacttagttgatctcatgcttaccatatgcctagtgatatctttagtggtgaacttctcttttgaactgcttaaaactaaatcaaaatgcttacacttcacatatcttgtgcatatgatcagtttgagtatttgctagcacatgcatttattgttgcacacatatcacaacaccacctagagcatttttacaatctgactggtgtactcctaaagcacctgcaatttctccattttctcctcttttttgcatttctgcattttcttagggggagttctcttgtcaagggggagtttctgtttctaccctcatttgtgcttgatgagtccacttgtcaacaagggggagagacttcgagattttcggcctcctattaagggggaaagtctttgttcatttcaggcttctgctattcccatcatcaaagggagagatttctgctttgggagagtgctttcacaagggagagattctcaagggggagagactctggattttggagatttgctagttgtgttgagccatttgcctctttctggatgaactagctttgatttcagcttttgtgctgattttgtgctccgatgtgtttttgtcagctggctagtggtgttgatccctgcttttgcctcttcttgaggactagccttttctgcttggtcgtgttgagccattgcccatgtctttggggaccaagctttgcatactcaaaaagacttgttttggcttttggtcacttgagtgagtttcttttctttcttccttttctacttttatatgctcatgtggtggtgttgacaatgcaatcatcaatggggagatagcgaacacaaagttcacttgtcccttgttgttcaggttgatgatgagtgattctcaatgggttgcactctggggtagtcagtggat

SEQ ID NO: 50219 - DNA, 462 bp, Zea Mays
gtttgtttgagaaaacccaaacaaaaccaaaaacaagattttgaatcttttttgtgagatgttgatttgttctagttgaaacttcataaaacatgtttcttccatttgcggttactgtctgcatactttgagaggattctatgcagtttggaagacgtgacactaccacgtcgggcactgtcagccagcagagcaacattgccgcttgacctgttctatgatttttcttctggttttttgcagacagttgagttggttcttctctagtattttggtgtagtcaatcgacactagattgatttgcatagtgctttgttgcttttggaatcccttgggtttttgggttgaaatttgggttcaagtcacggtgctctcgagtggagaaaggtttatggatcccattcacccctcctctggtctgccctgctgaaagatctaggaccttattttggttttggtaat

SEQ ID NO: 50220 - DNA, 420 bp, Zea Mays
ccaaagctcaccaatttcaaacttcccccaaatcagccgaagaacaccgtgaaactaagttcaccgtggtcagccctccacaggtcagcccctgtcccctgcttcctcgtttgagtactctcatggctctgtgatgcttaccgaaccctcaatttgcatggagtagccttagatcgccgggaacaccttcatctgtccgccatgctctcggtcaccgtggccagagctcattagttggtcattcgtgcaattaagttaggggaaacgttctccaggtagtgaatttggtttaggccgaggctgagcacccgtcttggcctccttcggccggtctacatgctcgccggagcgcggccgtgctccacgccgtcgtggacttccccctgtaaagaaatagaaacccagggaccatactgcaaa

SEQ ID NO: 50221 - DNA, 581 bp, Zea Mays
taggggtgaaagacggaccgaaaaaacatttcacccttttcacccgtatcaaaaaaaactgaaaagttgaaaacagattacggcaggtaaatttgaacaaaatatgtcggaattggtcgacaaataataacttaaatcgtaaaaactcacaacaaattagttctaaccacacacaacttttcgtttacattcataaacggtcagtggaagccggtgcgggccccgacgtgcaagtgcaactagcttgactgcttgatccatcatccatctccatggctcatcctttaaagcaaggaaaaaaactgtgttactagcgtcgtcgcctcgtcggtagggactacagtctacaatagactagggagcgagtctttttttgctttgccctgctgcggggctgccgctgtcccttgccgcggcagcagcgtcttctgtctcccccttgccgctgcccacagtccgcagcaaggtggccccttcctgacactctgtcgcatgaaacgggaaaggaactgagggagggggcgcggaatcccaaaagattggcaaagatatcggaggcgctttattttatcttggtaatg

SEQ ID NO: 50222 - DNA, 414 bp, Zea Mays
cagtgtcgagctcggatctctgttcttcccttctcgccaggtgaggctcccaatgactcagtgcagcttcgaattggtggacggaggggagggggtcgcagtgctacgacttttatgcaccacagcgaagtccgactgagggcgatgttgccagaattttcgggcggaacatgccgaccaatacgcaccataatcagaacagaggttggtgggatctggaggggataaatacgacagcttgggcccatgaatcagtgagcagaggtgaatgacacaggacccgcgcggtcagtcagtggagagctgcgaggacgtgaggtgcgcgcggcgaggtcagctgacggcaggggccccctgatcagtgagaccgcgcgcaggtggtctggccgaggcaacatgcgaagtgggccgttt

SEQ ID NO: 50223 - DNA, 733 bp, Zea Mays
aagccactaaaagttattccatatatattttcacagttccatctgaaagatgttaaaacaggttcagaggtgcttttattgtactgtgaaagagtcggctttaaaaagtttgtttcttggattgagccctttgatttagcttgtcttttagggacaaagtcaaagataaaaaccaaaccaaacgcacccttttgtcttgtggtgcgtatctatatgaagcatatagacaatcaatggcgacggtgaagattaagcgggtttgtgtacatggactaggacgatgaaggaaagacgccatgaggtttgatcgagggatcaagtggaccaggaggctaaatatgagtggctaatacctggtaacatcaataagtgccaaagaatatggagtagattgtgttggtcaagtcaaaacgacggctgaccaagctaagcggaggtgctggatgactttgtcttgaacgatcaatggctgggcaatccacgactagaggtgatacatgtcgagatcgcggaaggagcatagagaatacactaccctagagtggtttgagtcgtttggtggtttaggtctcaaaatttgattggagtttccacgggaacggagtggcacgtgccatcattgtgaagcttgtgttgagaggaagcgaagtcatagaaagctcgtggcctcatacgctcagatcttaagttacaccatttcgcccctagtcttaagtggtctaaccaaaatatc

SEQ ID NO: 50224 - DNA, 304 bp, Zea Mays
ccaaccttgagcggcatcagaccatacgatcaagcaaagcctagaggggtgatcataggatcgtcagacttgtcatcaaaccaagataggaaaagggtgtctgaccaaatcacattgtccatgttcaatttagtgttagatcgatacaacacaaaagcgtcaaacctgtggatagagaggttttcagtgatcaaaaaggtcttcaagtaggatttggggtgtcgaactatgcttcaagatgggtgccccaacggttgataacagctaacactaacatagtagccattaagagtcatcgaactct

SEQ ID NO: 50225 - DNA, 1325 bp, Zea Mays
agggatgcacacacattgatatatacaacgcggacagtgcttgtaccgtagcgttttgtccagagttgtgtaactgtagtagttctctccggtctctgatagatgatgcatggatcaggattcagcagtacaaggacgaagctcgcttgcaacgggacaaacgctaggtgcccagtgttcctgcggcagagttctcaaaggctaggagagcaacaggagcaagccgacaagtgttcctgctgcatagcttcactactgtagaatgtagacgccatgaacaggaatgtgcatgtggtcttagattatttattggcaaggctgtgactgatcgattgtggttggttatgacaagcagatcagttagaggcttgcatctataaaactgaggcacaacccgtgtaaaatcctaaccatttatcccaccttctatcctatctgaaaccctcagcagcaattctctctctcacacaccttcaccatgtgtgtttctcccctgcaggattttttaagaaaactattaatttcataaaaatttacaagaccactacgtcaaaatcacctaaagggggcatgattgttgcaacactagctaaaaacacatcactgattttcactatgacgactttttgaatccttcaacccttgatttattaccaaccactgatttaagatactcaagggctctttcaatgtgatatatctacctataccacactggaccagtttatctagcatattagcaatttctgatccacttagatgcttcggtagtctctttgtcacaatgggggtgtgtgtcctttttgaagatgttcttctatttcctaaagatatgattcgaaggcaaccaacattgatggcaatcaaattaacaaatttttcccctatgagtaaagtaaaaactacatgtatcgaaaccacatatcagacaatgcactacaaccagaaaaaattccataggccatgaaatcatgtatcgaccacaagtacatggctcaaaggttgaatttctactaaatataaaatttgttcgcatcgaatcctatccacaactattttaactcctcaatcaatgatttcaacatcacattgaggcatgtactatgatgatctaggctaggtataatgaggcaaagaaacataaaggaacatagactcaaatttcgtgcaaatagaaggtggtaggttatatggattaacaatgacaggacaacaagagtaggctgcaacatttgtatcgaacggagtgatgccatctatcgccaactcgatgcgaacatttctcgcatcaccggcaaaatattcatcgtaattcttcaattact

SEQ ID NO: 50226 - DNA, 586 bp, Zea Mays
agtggtttggattcgctaggtgtgagcgaggtagggtttcaaatgccatcgactctgtgtgcctctaatatgtgcacccgacccgatcccagggaacaattggcttcttatagccgatatgactcgtggagccgaacacggcttggactgacgtttgcatgtgactatttgtgcaggaaaccaactcggagcacatcgacaccttactgaccaggtggcatgccaggtgaatttcaaagccaggtcatgtgccaagaaccggaccgttgatcaaggggctgaagcccaccagccgctccagaggcatcccaactcctcgtgttgcatgtcgtctctcgccgatgggtttcgagggacaacacattctggcacgcctggtgggacaatctgagagcccatagagggggcgaataggtgatcctacaaaaaacaactctaaacaacacaaacttggtttataatgaatgttagtgaaagctaaaaccaagttggtatgagtagagatggaggagaggagaactcttccattgattgctcctttgagatgtgtatcaaacataggagcaatacacaagtgaaatatgag

SEQ ID NO: 50227 - DNA, 884 bp, Zea Mays
gagaacagtccagagcagtatggtaggtggtgttataccaaaactctgctaaagccaaccactgcctccatttgtgaggatgatgatggactgcacacctaagatattgttccaaacaccgattcgccctctcattatgcccatctgtttgaggatgatatgcagtagaaaatagcaacttcactcccataagctgaaacaaatgtgtccagaaagaacttgtaaacactttatctctgtctgacacaatagttttaggagccccatgaagcttaaccacagtgtctagaaacacctgagctaccccttgagcagtgtatggatgtttgagggaaataaaatgaacatatttggagaatctgtccaccactaccaaaatagtgtcaaaaccttcagacttaggcagcccctccacaaaatccatagaaacgtcctcccaagcacctgtagggataggcagaggctataacagtcctggtggatgcactctttcacttttagcctgctgacatacttggcactgccccacgaactgagtaacatcattcttaagtcccttcgaccaaaacattttttcaccctgtgataagtagcatgcactcctgaatgccctccaatagcactgtcatgcaaagttgtgatcaacttagtccttagagcagagttgtctccaatccaaatcaccccattcctccttataattccctgatgcaaactgtagccctgctcattaggactttgaatcaaaagctgagtcttcaactcttgagcctccatatcagtttcatatgaatctaaaacctcctgaacccaaagaggttgtacctcagacacttgggataaggccatgagataactcactctggacagagcatctgccacaa

SEQ ID NO: 50228 - DNA, 1641 bp, Zea Mays
gaaggtagctggttcttcggctagggagaagaagacgggctcagctcgggttgtggtgcacgacagcgagttgaggaggtgccaggcatcacggtgcggcgtcgggctcgctttatagacggggaaaggcggttcgcctgagaaaaatctcagcagacgactgtgcgcgacgacccgacacagtgtggcggtgtcttcccgaggctggtcggcaacttgcacggagctgggcacgacttcggtggtgattgaggtgagtggctggtcttcgattcggctgagcgcgcaggggcttgccgggctactgctttcactgcttgttgcgtcgtttcaggtcttctcagctcgacaacatggtctcaactcccagaccagcatcatggcgtgtgcgtgtattggttctggtcgggggaggtagaagacaacttgttttacttgagcaaggaagcatgtgggctagccggactgcacgaagaatcatctcaagattagcagtgaggctgcttgcctcggcaactgacttctagaacaaggtcgagttatggcgatggaggttggtgcagcctactggttcacatgaacgtcgagtgggccggagacaaccttacagttcccacacggaagcttcttgccatggatgtgtgtccttatcgtcggggtgtcagtaatggtgagtaggtgctactaccagttgactgtgagttattgaggtacggcttgctcgagaggcttccgaggcaaggaacagatagctagcttatcttctggaatcactgtgtcaaggcgtgtgttgctcctgggaagaggagatagtttgctagcaagtgcaatgttacgaaggtgggatccttgtgcaaaagttgcattggagtagagtgttgacgttagtacttgagatggattaatttatagctagcgagaaaggaggtgaaatacttgtaaatagtttgcctagtcacttgtttactaacatcatgcgtgtaaaagttaatatatcaggatgattgcgaaataaaacaagattttacttagcggcgaaaatcagggtgttacaaacctaccccacttaggtcaaatctcgtcctcgagattcggctaattactaaagagattagggaactcggctcgtaatgcgtcttctctctcccacgttgcttctgcttcagaatgcctgctccactgaactcgacagattctgacttctgagttgcgggtccttctagtctgagtatccaaaatcttcactggcacctcctgatatctaagatcatcttgcagatcgatcatctctggggtcacttgttcttctggcattcgcagacatttcctgagttgggacacgtggaacacatcatgcacatctgacatgtctgctggcaattgaagcttgtaggctacgactcccactttcttgattatcggaaaaggtccaatgtaacgtggggccaacttcccacgcacctggaatctgcgtgtgccacgaattggggaaactttaaggtacacatagtctccaacttcaaagctgagggcacgccttctcttatcagcataacttttttggcgtgattgagctacctttagattatctctgatctctgctaccttgtcttctgccttcttaataaagtctgggccttc

SEQ ID NO: 50229 - DNA, 834 bp, Zea Mays
gctttcccaaatttggcaacttcacaattgacttgtgcccaaattgtcctaacatggcagtaggatccaatgattgtgggttttatgttatgggatacattctcttttatgactgcgtcgaaggatctctgcggtcagacatagaagcagtacgtataattttatcagttaattctatagttggcacaaagcaacatatggtacacatgtataactaacacaattttattgtcttgcagggcaacactagtgagatacagtctcttgcgctgcattatatcacattccatccgaagaacaaagcattatcgctgcttgaagacatcaaaagattcaaggtctaatggatgcagtttagtttagatatgtaatatattgtgtatacaatggttccataaacttcagatgagtcatgtgtgtataatatgggcaaagacggtagacgtttcttatgttatgtcaatgacaacttggacaacttggggatcagcgatgtctaaactggattattgtaccccatgttattgatcttcatgtgtgtttcatgcatttaattctgccaatttcctgtacaattttatgttgtcaacaacctcgtgttaagcatgcctgtacaatttttatgttgtcaacaacttcgtgttatgcttgttgtctctcaagtttatgatataagtatcaccgatgtacaaccataagcttcactgtgtgaccagtttatgcaataaacaacgtcgtgttatgcattattgcccttacatttattatacaattatcaccgttatatgccatacattatgattgttttgtctcaagtttatgatacaattatca

SEQ ID NO: 50230 - DNA, 642 bp, Zea Mays
agatggggatgcatggaaggctctcgacacgtttgatcccgactttgcagctgatccgaggaatgtttgaatcggcctcgcgaccgatggcttcacatcttttggtcaaatggcatcatcatactcatgttggctcgtctttgttattccatacaaccttccaccttctctttgtatgaaatatgaatttatatttctttgcttaatcattcctggcccagactatcctagaaagaacctcaatgtcatgttaaaacccttgattgaagagttgaaggagctttggaaaggtgttgaagcatacgatgtttttacaaaacagatattcaaacttcgagttgcatatttgtggtcggtgcatgacttcatggcgtatgctatttttaccggttggagtacacatggtaggttgacatgtccatattgcggttcagatacagattgcttccgtcttgctcatggtggaaagatcacttacttcgattgtcatcgacgctggttgcctaggaaacacccctttaggagcgataaggaaaactttataaagaacactatggtcaccaaaggaccgcctaaacgtcttaacgcagcagaaatatatgctcagctgaacaaccttgtcctaaatgaaatggggacaag

SEQ ID NO: 50231 - DNA, 357 bp, Zea Mays
aatgatctgtattcatattcatatacttaacatattttttgtacaatggatacacctttatttacatctgacacaaatgtgatgagattaaaagtcgaagtgaacaagtagaaatggatacactttagatggcttccccatggtgttttctttgagcgtgcatagagttttgcttcggtttacatagtattctttgatgagttttgcttcggtttacatagtattctttgatgctgctaatgccaatattgttttcgaatatatttatgtacaatgggtactgatggtgctaattcaataggaacaaatgagttatgagtcatcttctgatacatctgggtcatcaacttcaaaaac

SEQ ID NO: 50232 - DNA, 1143 bp, Zea Mays
gttctttatccagtaatcaaagggtttttcctggtacctgactgagcagatcgcaccttttgaaggtgtgtgtgcagggtggtgacctctctcccacaccacttgggtgctagctgatcggaactcctgcactttgaggcgattgtctgtaagagtgtgaccgtacgtcgtccggcattaattgtgccatgcagaggtaaagctatagcctcagcctatctttcccggccggaggaatccaaccaaaaggaatggcatccgtatatacgttcacgtggatagtagaccaatgggggcatgcatgcgatagcagcagggtgtgtgtactgcctgcgcgtactagtagttatggcactagcttggtcctagcgtgctagctggtagcaacctagctcctccatgtgcattgcgcgcaacagatgtatacataggaaaatattttattatctcatctcctattttaaactctacaatgctatctataaacaatgtcagctggttgacatccatcagtgttgtagctgttcggattactacaactgaaatccagagagacaaaacactgtagccgtagcggcagccagattaaagccccagcaagccacactgccacagcgaatatatctgtcaacattatatccttgtcaattgctatccaacatgcaggaagggtcaatattcccgaatgggcacacttgagctgttgctatcatcccttgtgtgatcccgtccagcagccatcgcaaatctcggaccatccgggacaagcagctaggatgcatgtccctcttgtaaagttgtaattgctcgttctactatatcgatgtctctgaacaaataaaaaaaaatcaagctgactgtttcccttctcaaccgtaccaaacagaaaacaaaatcatcccgttccactaatcaaagaaaggactgtcctatattaccttgtgtctcttaattaaacgctaccgaaaacgcccagtggcagacatagacaccggagttgaaaagaacatccttgtaagttgtaactaacacacactgcacacactaagctaccgaacaacagtgacagcagcagagctgcggcgtgccgcgcatacgctagccctgccaaactccgtccgcgtgctcaaatccacagaccac

SEQ ID NO: 50233 - DNA, 1157 bp, Zea Mays
ttcacgaaagatgaacaaggcacactatggtttaaaaagagaatatgtgtaccggaaatcgaacacctacgccaacttattttgagagaagctcatgattcgacttactctattcaccctggaagcacaaagatgtaccaggatctaaagaagagtatttgtggtacggtttgaaaagagatgtggctactcatgttgcactatgtgatgtgtgtcaacgagttaaagtcgaacaccaaagaccagcaggattgctacaacctctaagagtaccagaatggaaatgggaagaaatcggtatggatttcatagttggactaccccgtactcgggatggctatgattcaatatgggtcatagtagataggttgactaaagtggcacactttatacctgtgaagacaacttactcaggagcccagttagtagagttatacatgtcgaggattatttgtctacatggactaccgaagaagatcgtattggaccgaggaactcaatttaccttgcgcttttggaaaaaactacatgagtccatggataccaagctaaactttagttcagcttatcatccgcaaacggatgggaaaacggaaagaacaaaccaagtgttggaagatatgctaagagcttgcgctctaaagcatggtagaagctgggataaaagtttgccttatgtagagttctcgtataacaatagttaccaggcaagtctaaaaatggcaccatttgaagcactttatggacgaaagtgtagaacatcgcttaattggaatcagaccagagaaagtcaagtatttggtccagaaattctccaagaagcagaaaagcgagtacatattatcagagagaatctgaagacaacacagtctagacagaaaagttatgctgataatagaagaagagagttgatctttgaagtaggagacttcgtataccttaaggtttcactaatgagaggaatgaaaatatttaaggttaagggaaaactatctcctcgctacattggcctgttcaagattttggaaagaaaaggtgaagtagcgtaccagttagagctacctaatagtttgtcgtatgtgcatgacgtatttcacgtgtcacaactcaagaagtgcttaagagtaccggaggaacagttacctatggaagaactg

SEQ ID NO: 50234 - DNA, 441 bp, Zea Mays
gacgggtgggacccgcacgtcagaagcttcttctcccccccagttttcggatccaccgcttccactgcactctgttgaccgaatcacagggccggatttctcgggcaagccgtttcaaccaccgttacctggtattgcggctcggtctgcggaccataaagagcagtgccaagagaccccatctccctcaatctattcgagccggtagccattgccaagccaccatcgcagggagataggaaaaaaaggccaccgacaacacctggatactaccttgcccgtgctcagtctcggatctgggaaggttcgcgggtgctcgtggatcaactccctgaccgcctgtaagctgccgcgcttagaacccagagaacactgccgccgtgcgccattagcgaatgggagaattcgccgtcgctgctgatccgcacaggagccacgccg

SEQ ID NO: 50235 - DNA, 604 bp, Zea Mays
gggccgttcgacccccaacaacgtcgagtactcggacaagggagtggaatgggacgacttcaaaggctaatttgggagccacaaaaccggagaggattggagaagctaaaatcctctccttattcaattttaaataattttagatccttcaatcctcttcagtatttggactaacaaactagccccaagagccacctcctaaaaggacgaggggtttaccacgctcgccgcgcggaaagagccacctgtgagcgctggcaggaaagaaatgcactgcaagcattgttctcttgttcttttaagaccgtttcatctgcgtccgactgttcaggagcatgcagtagttgtccgaacccaaatatattgagcccacttaaaaaatattttattttagaacttgtttggatgttgttcatgtatctacctcaattcatgtgttgtgggatagattgatgtgaaatttgaattaaattctacaccaacaaatatgcatttaagatgagatggatccacggacatctaaacaaagccttagggaaggaaatacccatctgaaccccgtgcaccgcaaaaggctaccaggattttttttggaatacaaacg

SEQ ID NO: 50236 - DNA, 396 bp, Zea Mays
gaaagagtggttaaatggaacaccactcaactccctattacaatgatgttgtaaataagagggggagaagtatggtcacaaattaggattaagatgcttgcaagcagctgaaggctagaccttctgagatagtaaatgcagaccatctattcattggtaaccaacatggtgttggtggacacctaaaggatattgattatcctgtgaatggaagacattcacaacctagctcagtgcgcactgatgaggctaggttatcgaaatcccttgattctcgttttgagatttcacgaggaatcataagggtacataaaaaatgactttatgtcaactggagaattgtgttatttgaaagctacaagtgtcgacacatacatctcagcaattgtatatgcg

SEQ ID NO: 50237 - DNA, 627 bp, Zea Mays
gggagctccaggcgacggtgaatcggcagcagggcactgggtatacttcagcgcagtggcttcgtgggctcaagaatgactacgacaaaagaagaagagacaggcagggaatggtgttgtgcgctagacaggactacaggagaggagctggagccagtggcgcttatatagccacaaaggaggggctcgacgaacggcagcgttgaccgccgcttaatcaccaataaattaatgtccacgccataacgtcgggaggaaatgtcacgggaaacggtaatgggcgaggagaacgggaaatggccgagcgtgggtgtgcgctgcgtgcagctcgggcgacgtgtttcctttatgaagaaacggcgacaacgttcgctgtatttttatttttcaaacgtacagaatagtgacggctgagttatagtatagcatgaacagtgtccgggggtggggcccatctgccagccagtcacgaggggtgaggtgctgggagtgcggtacatgagttgtggtcgagcggccaaccaggtgagtcgtgagagcgtgaggttggatttatttgttttttatttcaaaattctttttttcttttctatttttttaaataggtgtatctaagaaatagatata

SEQ ID NO: 50238 - DNA, 532 bp, Zea Mays
aaagccaacactcttcgatagagtgctgacaaccttcgctccagtccagtcccggaggcatcctaagctctcttcgtcaaccccaccgaagagcagtgctcctggctggtagccgcaagatatagcataatctcttagttcttctttttcagccttggataactcctgaccaatcatatttcgaaaattgaagtccccttcctccgaaatatcttcggtaatcttcttctctttgttaaacaccttctccccttttccagacattatggccagggttgcctcggtagttgcaacagtttcttccgtggccatatccaaaatcatcttaacaatatcagaaaatacgccctcaagatttgtagcttcagccgccacagcttcggcagttgtagctttggttggagcagcttcggcagctggtatttttgacgctgaagccgacggtggcatttcttcaatagcatcaataacagtaataatccttcgccttttctcagtaggtttcttgattgccacaggctcctccttcttt

SEQ ID NO: 50239 - DNA, 541 bp, Zea Mays
ccccctcgctgtcggtgacctctgcgcaaggattcgcgctgatcatggcgattcgtgctggactcaggcaggatagtaccaggcgggtgaaaagatcgaaggggagcggatttggtcgcggggtgaagcttatcaatcgcgtctgtagccgtgcgacggggccggaccgccagtgtcgtcttggaaactccggcgacctcaattatgccacaccgtggctctttactatgcagtagtaactgtggcacgcctagacttaccatctcagaaccgctgcaccggtgaacgccacgactgagccaccagtgaccttcttcctctctggccgccagcacgccatgcccaaattaggagccgtcgcccttggatactataaattggtgccctagcctgctccgctaagtagttgtgcacccagtgaaccaaccctcaccttcaatcgtcccccacaactcgctaatttgagatttcccccaaatcagtcaagaattccaccgtgtgtgagctcgccatagccagctctccacaggtccgatcacgc

SEQ ID NO: 50240 - DNA, 399 bp, Zea Mays
gtcgcagtaggagaggtcgagcgtccccctttctcgtggacccagagcagaatgaatgcggaaaatgcgggagacttggccacaactcacgtacatgcatttggacacttagtcaggtgtgatacattttaatattttattgtacacaacttttattctaatatgtcaaactttttgttacactttgtacacaacttatattctaatatgttgacatcttaatttgcaggatggcgtagttccacttgctggaccctcactacgacgagcaccacaggggtcgtctcaccgtagagggagaggtaatattttgcacaaatattaaattttcgaattaatatatgcgacgtatatttgactaatgaatttcttttgattgctaggtgttgtccgttctac

SEQ ID NO: 50241 - DNA, 573 bp, Zea Mays
catggctgcatgcattaaaaatctcccaggtcccacttgcatgtcgtattctcctccccacccccttgcttcgtgcgaccagagaggaaatcgtacaaaccccactcacgtagcttggctttttcctatagggtatttgctgcaaaggatcttctgtggctgctctccgtgtggtccaatatgtggcgagcctctggccagtaggttttcaccatgattgtcgcatcctgcttttcttttgcataaaagacatcgttctctatcaaaattaatatatcattttatgagtcacacaaaaaatcatttgctacctcttggggtatatgtttaatcacgaaaataggcctctcatttagtagataagcgatatcttttgcattagaaaatttctgtttcgatccgtataagttgcgttacctttttaataatattgtctaggcgttagaatgtgatttcatcatgacacatgtttttaattaattaattagttgattatttatttatttatccgagtcattaaagtagtagtttacttaaactaatttataattttagccacactttatttatatc

SEQ ID NO: 50242 - DNA, 1028 bp, Zea Mays
agagaacccacaacaagacaagcactgggacaagaggccaagagacgaagtccatgccatggggccgccgttgactcgggcttgaggtgcccctcacaccaacaacgtgcgaacgctagacgagattctcgacagcccatgtccttatcagaagaagatgtgacatactctgcgtaactgcagagacttcaataactcgattggccatggccaaccaatccaggtgctccctttgcctcctccttgatgggaccaaggtccacaacctcaacaacaaggaggcaacagttgggtgttccctgcattgacagggaggtcaacatcatcttcagagtccatggccctcaagaaaacaggaggcaacaaaagttgtgtgaccgacaagtcttggtgacgatgaacaactcgtcggtgctatacaggtggtcagaaaccccgataaccttcagtcaagcagaccaatggttcaacttcgaccatttgggcaagtacccccattcattgatcccatgatccaaggacccgagtcaagaaattcctgatgaatgtggcaacagcatcaatgtcaccttccccaggaccctttaggcactgggatctcgacaaccgaccaccatgagtcggacttccccttctttggtatcatcctgaccgatagagtaccctctaagtcatgtctaaatgctagtaaccttcggcacacccaacaactaccacaccgagttcctgctcttcgagctggctcgtttcaactgcggctacaacgccattattaggagactaaggctggccaaattcatggccatcccacattactcctacatgacgctcaatatgcctagactctagggcatcatcaccgtgaaggccgacttctatcgaagtgctattctgacggctctcatggcgggcacctcggtggcaccacaatggcccatgacggacatagacgcacccatgaagaatgacctcctaatcctgacctcagaggcagtcctaactttggctatttgaccgactaaagagac

SEQ ID NO: 50243 - DNA, 520 bp, Zea Mays
acccaattgaatttctaaattcaatagatggcaacaatttcccacagcacaagttgttactaaaaagggagtgcctattatgttgcttcgaaatctaaatcaatctgaaggattatgtaatggtacaaggctcattataaccgctctaggagacatgatcttagaggctcagataataactggaacgcatattggaaaaattgttctcattccaaggatatgtctaccgctgaaaacaatcagagttccttttgtgctagaaagaagacaatatcctataaaaatttgttatgctatgacaatcaacaaaagtcaaggtcaaacactatcacaagtaggtatctacctcaaaaaacctgtattcacccatgggcagctttatgtagctatatctcgagtgacttccaaagaaggtttgaaaatattgattgaagatgacgatggaaggtcaagcaaagagacaaagaatatagtttacaaagaaatattcagtcgcattgccactgatgctactatcacg

SEQ ID NO: 50244 - DNA, 607 bp, Zea Mays
gtgattcatgcttggcacgcagtggatatccacggggaggtaaaatgatctcgcgggggagcggatttggtcgcggcggaagcttatcaccgcgcctgtagccgtgcgacgtggccggaccgccggtgttgccgtggaaattccggtgacctcggttatgccatgtcgtggctcgctactgtgtggtagtaaccgtggcacacttagaattacaatcgttgagccgttgcaccggtgaatgccatgattaagccactagtgctctgccctctctccagtcgccagcgcgtgattccaaattcaggcgccaccgccctcgggtcctataaattgagcgtgccattggctccgctaggtattcagacacccaatacaccagcccatgcctcggatcgtccaccagaacgccccaatttgagatttcctccaaatcggtcaagaacaccgcgtgtgtgagctcaccgcggtcagcccttcacaggtccggtcacgccctcctcgctcttgttttagcatccctgtgtgcttgtgatgcttctcgacccaaccaattgagctagaacatggaggatcaccgggaacgctttgggttgtccgttgattgcac

SEQ ID NO: 50245 - DNA, 462 bp, Zea Mays
cgagctttggcgcttctgcttgcggttgagacggtttaatcttgtacccaaacatttttctggtcctcttgttgttcttcattccattcagcagatatctatgtgactcatccttccttttcaccactattggggtcggaatcatgtcgttgacctcatccactttatcttcattgggattcatcatctaggtaggggaaaaagggagagtgagacaagatttcacaaggttcatgatatacacaaagggcaaatatgaaacaaggacatttagacatttatactagaaaggaagtgacagcgagcgtgaaacaaggatggtgttgtattttgacagggataggttgatggtattgtgtttcaagggaagactagcaataaaacaaggttggaacatagattctttgattcgactcagactctgccaactgagcaggtacaagaggaaacaggtagagagag

SEQ ID NO: 50246 - DNA, 445 bp, Zea Mays
atttggtcttatttgcttgatataaatataccataaggttttgcaaaagtgtgaatatattaattctaaaccgcctaagacaaaccactatattatgtgcaagttacttgcatagagacaaagcgaatctatttgagtgatttagtattggttttatcaacattcaacagcacatgttcaatttcatgttcaacaattcagtttcaacattgcctgtgcatgttcagtttcaacaacgattcaacatccgttttttctggacacaggcatgcaccaacaaatgttcaacaacaaaatctgtccaagatacaaataacaaatgttcagtttcaactagcagtctcagtttcaactagctaatttagcagcacatgcaacaacagtctcagtttacagcacatgttcaacatcaaattctgtacaagatacaaacaatgtcctctgc

SEQ ID NO: 50247 - DNA, 377 bp, Zea Mays
cgggattaagtaccgttgatccacgagtggacggggtgttacactttccctctttgatgcttatggcaacatgaacatagagctcatatgtgttcttggttcgagcttgagcaaggatagagtttataaagtaggaacatttgtaccagtactaaagccttgatattagtacgggttggaaccaccgacctgtactaaagtttcggacaattaaaataatcggtactaaaactattgacatggcttccttcccttaatttcagtaccgattcttaagaaactgatactaaaactaagggatggaagccatcatgttctccactagtgtaagctatatgaatagaagatcgatggtcgggatgtgtaccccctgcgcg

SEQ ID NO: 50248 - DNA, 311 bp, Zea Mays
ggcagcttctctagcgcggcccagcgaagcgcctcctcgtcgtcctcctccctggaggagcgcgagaacacgtcgtcaccgcgccgccaaatggagccgctgtcgccccgccgcatactcgccaccttctgaatgtcccccgccgcgtccatctcgccgtccctcctccttccctctgctgccgcctcctgctccccctaccaatccgcaccacaagtccacaacgccgagcaggcaccgggttaccaacgagattccgttgtgttggaggcttggagccttggaggggatggggcgtgcgcttgccacgc

SEQ ID NO: 50249 - DNA, 545 bp, Zea Mays
gcagagctctgggttcgccggagacagagaaaggggaaatcggtgtcgcggcggctctaggtgaaattgggagttgggatcggggctatagggccgtaagaggctgtgttttcattgtgcgcaatcaatttgggcgaagatggagagggcagtgcgaatttgacttcgactgagcttcactggtggagatgaaagcacctcgccgtggtccatggtgccatttatagccacggtgagtcagctaatgatcggcggccacggatagcatggtaagcgcatgactaccacgtagaggaaatgcacagtaagggagatcgaagtatggcgacagcgcggcggacaacgctgagtcacggcgaccgccggtgaggtaactccggccacatgcggctgggttcgcggagtcgtgccacgtacgagttatccttttcccgacgttatccatccgatcttgcgcacgaatgggacggcgatcaacgacggcgagcttagctggcgttctgatccacccagaacactgtaccatggcacaccttcatcagtca

SEQ ID NO: 50250 - DNA, 674 bp, Zea Mays
gagcatgttgcaccgccttaagtcgttgccgacttaagtcgattgctccgttagcagggcatagtggtcaccccaagttaagtgagcgtgagcatgttgcaccgccttaattcgttgccgacttaagtcgattgctccgttagcagggcatagtggtcaccccgagttaagtaagaatgcaagtcaatcgtcgatgaactgagtatctttgaaaacctctttttttattgatgacatatttccactttacagattacatcattgccccagcagttttgagatacagctagggataaaactttctgaggtgttctatattccaggagttcccaacttctgtgccatccatctgagtgagacgatacgatccgggccgagtgacctctgatactatgaaaggcccttcccataagggtgataatttgtgccgtccctcccccgttagaattcggcggaggacgaggtcccctatcgaaaaggaacgttgccgcacagccttgtcgtgatagcgcctcagagtctgctggtaccgtggagattggatcactgcgttcagtcgttcttcctcaagtacgtcaatatcctccagcctggtggcctcggcttctgctatgctttcgaagatcaatcttggcgccccgaatttgagatcagcaggcagcactgcctccgac

SEQ ID NO: 50251 - DNA, 661 bp, Zea Mays
taggggatcttttgagcacctctgtcatgcttgtcagttaggtcgccatgttcggctcccattccctacctcctcttctagggcagcagacatttttgatctgatacactgtgatgtatggacatcccctgtaatcaacatttttggctataagtactatttactcatactccatgatttctctcattatttgtggacttttcctcttcgtcagaaattggacacttttcccaccctgtctcatttcttcgcttgggtctccactcagttcggtagcaccatccgaagcatccagtgtgacaacgaccgcgagttctataacaatgcgtcccgtgctttcttcctctctcgtggcgtccaccactgtatgtcgtgtccctacacgtctcctcagaatggtagggctgagcgcatgatatgcacagcgaacgatgtcacgcgctccctgctctttcaggcttcccttcctcctcactactaggctaaggccctcaccactgccacctaccttctcaaccgcctgccaaccaaggcggttgcccaccccactccttacttcgctctttttggcatccacccctcctatgatcatcttcgtgtctttgggtgcgcttgctaccctaatctcgcttccactgcccctcataaatcagcgccccgc

SEQ ID NO: 50252 - DNA, 977 bp, Zea Mays
attctagccattattttcatattaaaaatccatttctaattactttttccctggtttttatagtttcctggactggcgcacattgaacagagagctcgggggctaactcgcaattgtttccaagactcagtataaccctcgagtggacggcgggttaattacgaaaaagagcaagggctcttctgcaaaacggctcggccgaaggggcacggtttactatcagccgtccgatcacacttgggtggaccagatttaaatcgatccgcatccggtatgcaccgaagaccatcagatctcgatcctacgacgcacagggatggacccgaactgttattgcctattcccgcattgtcacgatccaacggtcgcgatgccatttagccgaacaagtacgcccagctcgatccgagccgttagcggctggatcaacgacagtcgaaacgtcttcctcccacggccgagggggagcggtagcgcgcgtacgggagcggtggcaccatgccaggatccccccacatagcgcacccccgattgttaactggcccaaaacaaagaggaggagcgggtgaactcggtagtaatttacctaccggtgctaagggcaggagaggtgtcgccccacagcaaagggcggatccacggcaaaactggtgcgacggcgagaaattgctagagcatcggtcgtccaattgccaaattagtggtaggggcagcatctttgtatctccatgattcttcagagacaccgccgaggacccattgatgcccaccagcaagaacgatgatggcgacacaagctcatctctcactcccaatcgcgaggtcatctctcactcccaatcgcaacaacccagagatccccatgtgcttcgtgattctgacgtcgggttccgcgcgtgtggttgagccatggagctcgaaaatcccgggacgccgagcgggttgttgaggagggggataagcctgacgagtgggcc

SEQ ID NO: 50253 - DNA, 804 bp, Zea Mays
caggtcgtcagtgtcatctggtaatggttgagcacttgagctgccgtagttgccagttcgacttcatgcctgaaaaggccaagtagtatgaagattcattcagggtcaacagatgagtgagaaattatggtttccgagcacttactttgagaggatttcagcagcattataattataaatcaataaaataacacaatatgcagagaacaagtgaggtatttgtatgaacaggaaggttcaaccatggctggtcatggttatgcatggtcatgaactggtacacactatgaactaattgataaacataactcatgcacagacattctatttttttataacttaattacagtaaagggagaacttaatttacatttgcatatctgggaatgagaactgaatttacatttgcagatcgataaaagattgcagtaaagggagttttattagtccagaacactaatatgtacagggagaatgcaaggtattttaactgtattcattggaggcaatgatttgcaatcattttgagaggatttctgcagcattataaataaataaaagaacacaatatgcagagaacaggtcaggtgtttttgaattttaaaagatcacaatatgcagagatcaggtcaagtatttttgaattttaaaagatcacaatatgaatacaaagcataactaatagataaacatagctagaattttccagttagcattgtatgatttcacttgatcgaccatggctggttttgagaggatttctgaaacattatattagtcttaagaaatatggtcgctcatgaa

SEQ ID NO: 50254 - DNA, 892 bp, Zea Mays
ctgagctcccgacgatgctctgaagtccgaggacgaccccaagtcaggtgaccaacttcaccccgttttttatgatgtatggttttgacgcattcttgccaactgaccttgactacggagccccgagggtcaaagcatacaacgagcagggagccgaatcatccctttaggatgccttagatcaactcgacgaggtacgcgacatcaccctcatgaagtcagccaagtaccagcaggccctacgtcgatatcacaattgtcgggtaaggggttgggcgttcagcgttggagacatggtaccgcgccttgtctagagcaacaaggatcgccacaagctatcacaggtatgggaaggcccctacatcatcacataggtacttcgaccgggtacgtacagactgcaaacggttgataagcaaattttctccaatgcatggaacatcgagcaactgtgtcgtttctatccctagaaatattatgagttttgtgctgtcgagatgtatgactaaccaaaaacgtaaaggttcacgtctcagcgctcggcttactcaagaatgaaatggtcgaccccatcgcccaacttggtacacccatgccacttttttctataggacatctaaagcaggactcggcctcccgactgaccattccttgaagagaggatcaaagggttcccatccacgagatggaactgaccaggtaagggatatggagctgtaatacgcccctatgtcccattaacagcataagggtttgaaggttggcgtgtcgaagggttcgatagcctccctaggacacaccttgagtgagagacagaaaggatgggtcctagtagtcagtacctaggcacccaaagcgccaaggccatcttgttttgtgttcgagtcctgac

SEQ ID NO: 50255 - DNA, 1026 bp, Zea Mays
gcgagaaccaccagcgatcggatggagcgggcaactgcgatggcgctgcctccggcgtgacagagaagatgaagacctagctgcgatggcgacgcgaaagaacgcatgcaacagtcatcgggcacaagtaacaacagagatcgcgacattaagaaacgatgtaagggtataaatatccattataataggtaattagtgcagtggggtattttagttaggaaaggggtttaagtggggtaattagacgagcgcaaagaataccggtgtattttggcgagcggctagggatgaaaccgggacggaaaaatcccgtaccgaccgacgtcgtataccgcgttaaccgatcgtatatcggattttcgggaaaaacaggaaacaggaaaaaatacgggaaatacggacggtaacaggaacggaatcaggaagagttgtttcccgaccggattaacggttcccgtattgtatccggaataatcctgtatgtgttcccgtttacacttggcccaaatgcgtgcttcagcttggcccaaatgcgtgcttggcccaaagccccaaatggccaaatgtaaccctagcttatgtgcgggatgtgcctgtgtgtgctgtgtggcgtggtgcgtgcgtgctaccgctagggatgaaaccgggacggaaaaatctcgtaccgaccggcgtcgtataccgcgttaaccgatcgtatatcggattttcgggaaaaacaggaaacaggaaaaaatacgggaaatacggacggtaacaggaacggaatcaggaagagttgtttcccgaccggattaacggttctcgtattgtatccggaataatcctgtatgtgttcccgtttacacttggcccaaatgcgtgcttcagcttggcccaaatgcgtgcttggcccaaagccccaaatggccaaatgtaaccctagcttatgtgcgggatgtgcctgtgtgtgctgcgtggcgtggtgcgtgcgtgctaccgctcagccgcaagccgctgtgcccctgtcggcgctgtgcctgctgc

SEQ ID NO: 50256 - DNA, 451 bp, Zea Mays
tagatggaaaaccacttgagatatttttctaagtcataggatctctctcaagtttagccaaagcaacttggagaagattgttcaaagatcaacgggaagtcagaaactcaagttctgaaattgcctagcgcggaccgtccgaccccttctggcggatcgtccgcgataccgttttgacttcggccaggaactgaatatcgtggatagtctgactaaatcgcggactgtccgactatacagcgcggaccgtccggctataattcacggaccgtccgcatgtgaagacctggttcagcccgaaggtgacaagttgagcaaaaggaattatagagctggcgcggaccgtccgggaccaagggcggaccgtccgcgtgggttcaccgaggcagatagctgttgatctgtcagagatattcgttggagatgtcagattcgaccgttggaaggtttc

SEQ ID NO: 50257 - DNA, 737 bp, Zea Mays
tttccagggtttcttttagggtttttggcacttctagggtttggatgttacttaggtccattcctagtgacatttcatgactattttatttgagttttaagttttccctcctcaagccttgtttactctattatgcccaatctagggttaaatattgtaccctagggtttcactagtaacatgtcacttcaatacaacttgtttgaaatttttgcctagtgaatgcattctaggtgtgacaaacacatggaatgccaaagcttatgatgttatgctcaaattttagtaacagtaacaccacgggtgttacatccttccccccataaaagaatctcgtcctgagattagaagtcctgggcaagtaatggaaaggaaacacagcacgtctttatttccttatttttggtacaaggcaggggtggtttggggctcacttctttattacaacaattttatacactttacaaattacatgaggctaaaaggcataggaaattcttttcttaaaagtcctgagtttcccatgtagcctcatcttctgaatgttggttccactgtatcttgtaaaacttgagagttttcctttgggtaattctgtccttttgatccaagactcgaacaggatgcttggaatatgtcatgtctggttctagggcaacatctgttacttcaatggttcgatcgggaacccgaagacacttcttcaattgagacacgtggaacacattatgtactgc

SEQ ID NO: 50258 - DNA, 349 bp, Zea Mays
cttttatgtttggtgagaagtctagatttagaaattttttgaaggtagctgccccgcgttggactccaccatctcgaaggacgtgcacaagggacatagttaaaacttattttgaaggagactttatgctccacctgatgcaatagcaccagccaatgattctcaagaagtaagacagtccaaaggcggaaggatgaagtccttaattgcacaaaaactaaaacaacacaactatggcggtggcaacaacaaatctgaacttgaaaaataccttgctgaagatactgaactagaagataataagtttgatattttaggatggtggaaggtgaattcctcaagattcccg

SEQ ID NO: 50259 - DNA, 1632 bp, Zea Mays
cactgacccaaagaaggtggaagtcattcagaactggcccataccaaaatcaaccaaagatgtccgcagttttttgggaatggcaggttactatagaaaatttgttgcccattttggaatcatcagtaggcccctcactactttattaaagaaggatactatatttgtgtggactgaattagcagacaagtcattcaatactttaaaaacagctttggcacaggcgccagttttggccataccaaatttttctaaatcattcaccatcgagactgatgccagtgggggtggagttggggccgttttgcagcaggaaggacatccagtggcctatatcagtcgagctttgtgtccaaagaacatgggattatctatctatgaaaaagaatgtttagccattctttttgctgtcgagcactggcgtccctaccttcagcatggtgaatttatcatcaaaacagatcaccaaagcttgactcatttggatgatcagaggttgtctacaccatggcagcagaaagccttgactaaactgctggggttacagtataaaatccagtacaagcaaggcagtgaaaatcgggttgctgatgctctgtccagaagacccaatatggatcaagatacagccaatgctcatttgaacacagtatccatgtctactattacacccgactggttgctgcaggttactcaagggtatgatcaagacccgacggcaaagaaaatattaactcagctagctgtgggtggtcaactggcacactatacaatcacccaaggtgttattcggtacaaaggaaggatctggctgggaaataatcaagagatgcatcagaaggtgatgtcgacattacatgatagcgcagttggcggtcattctggatttccagttacctatcgaagaattaaatctaattttgcctggccaggaatgaagcaccaaatccgtgaatttgttcaagggtgtcagatctgtcaacaggctaaaccggaaagggttaaatacccaggattactattgccgcttccagtccctaaacaagcatggcaaacggttagccttgattttatttctggacttcctccaacaggcaaaggaaattgtattctggtggttgtggacaagctatccaagtatgcccactttatggttttgaaacaccctttcactgctttaacggtggctaaaacatttttgtccgaagtatacagactgcatgggttgccaacagctattatttcagaccgtgatcctatttttaccagtcgcttgtggcaagaacttttcagactaactggtactcagctgtgtcttagcagctcctatcatccacaatcggacggacaaacagagagagtcaatcagtgtcttgaaacctatcttcgctgttttgttcactcatgtcctcgacaatggcccatgtggttatcgctggcggaattttggtacaacacctgccatcactcatcccttggtaagtctccatttgaagtgctttatggccatgtgccaacacagttgggactggtagctgctgaacagtgtgaggttctagatcttcagcagtttttggaggacagacagaaggtgctgcaacaggtacgcatgcatctccaacgagctcaagc

SEQ ID NO: 50260 - DNA, 730 bp, Zea Mays
ctggcggtgtgcttgatgaggaagaagaggaagaagaagaaattccgctaatccgcaagaatagccgtcactatagggcagcgacattcccatgcaaaccttgtcagcactcgtcagtcttcaatggttgtcaatatcagattttgaccaagcgctggaagaggtcgtccccgaagacatttcacagagcctcctgaagataacaatcccactatcagtttagaggtcccagatgatggtcttctgccgcatgactctgctgggcaagaggtaacccgggtggtttctcgtgcctcgtcgaccttagagggcggtcttccttgcgaaaatgctgatctgagtcactcggttcctattggcatggctgagggatcttcagccctaaaggtggctgacgtggagggcccagcccccaagggtggtgctggtagcgacccagcccccgagggtgctagggcgggctccctctctactgcttctatggacgttcacgttggatcgcccccagtccggtccgaggatgctgcggtgacgcatctttctacgactcttgctggtctggtcactttagaaggcagtgaaccagacgccaggagcctgccgcctgctgatggggtcgaaattcctctgactcatgcctttgatattattcccgctgatctcccctcgtcaagcaatgcaccaactcttcctactttgggtcttcccctgttcctctccaatcttcagg

SEQ ID NO: 50261 - DNA, 841 bp, Zea Mays
ggagaaaaatggacctaaagttgggctgtcagtcacccctgatactgaaactcgactgacaatgtgttttgatgaactttgagaacaatttgcgcatgattgagtgagaatctaatcaagaaccctataataaagtcaaaggtggtatattaggcaacaactttgatacaggcgggttagtgggttgtcacacaaaaatttgagaatgaggccctgcaagttgctctgtcagaatgactgaataggatcgcgatggtacagtggactggacaagatcacgggttcagtgcatctgtcaccgccggtgatctccgcgcggcgattcacgccaaccgccgcgattcgtgctctgtgtgaagtggataaccgtggcgggtgaaaagatcttgggtgagaagaacataggcctgagctagatcatcatcgtgcccacttgccgcgcggtcagtgaaatatcaccatcagtgtttgccgtgatcgcagtggaagacacgtagtcgcctgtttaaccatactgtcatggtcatggcaagcaaccggttaccatcactgaaccatttccctctctcgcgcgccacggtgagcaggtcaccatagaaatatcctggccgcggtgaactcgatcccaatccaaaattcgtgataagcttagtcggggtctataaattggaggcaccccctgctccgcctacttgttacgcgcccagtacaacacttctcacctcaaatcatccaccctagcgtccgaatttggttccccccccaaatcggtcatatgtgtcgtcgtgaggcaccgcgccgcggccagccacccacaggtccgctttagtccttttcgttc

SEQ ID NO: 50262 - DNA, 735 bp, Zea Mays
cctgcgtagaggcagacggcagcgaggaccccgccgctctaggttccgtacgaccgaccctagcgagcgatgactgctcctcgatacctacatctgcatcatcatcttgtgtggccactgagctctccaggctagcaaggtcttcaacgtcttcgtccctcatcgcctgcgaagacaacataccgacgcatgagaaaaacaaaaaaaaagaatatcccctcaacaatagagtaatcgcatacttgcgccagctcctggttggccctctctcggacgactccgtgactgtgaggaccccacatccgatcatacagcgctccggctgagtgctttagcaccttgtcttcgatttagaaagctccttggtcgaagtcctcgtcacacacgggacaaggcattcgctgccccttcgtaggtgacaagcgacgcgtaggacatgagccccattatgatagatgggagggactccaactcctcctgcagccacccgaggaatcgggtccccacctccccttctaacttgtcgaagggggatgtctatgcgccatgtcacgataagcatcaacagaaagtgtatgtgcctggtctacaccaacccacgttgcggcatccacattctcgtggtaggcacgcatattcttaacttcgacctccaactcagcagttcacttctaggcggcttaggcctccacgcgagtagcctgggcctccgtcttcgcctgatcggtagcatcc

SEQ ID NO: 50263 - DNA, 652 bp, Zea Mays
gaattatagaaattggaatggactcatttgaacttaatatgaattttctatggattcaacaagattctgaattgtttttaaataataaattcattttataaatcaaattctctgatcttctatttccctggactgtgcgccaatttctgggaagggcaggggtctccacgcaaattatcctaagactcagactaccagcgctaggacgaagggtttattctgtaaaaaccaaagggatcataagcaaaattgccacgccgaaggggtatcgggtggcatcaaccgtccgatctatatcagacgtcccggattagactcatctcaaaccgaaacggtacacaatctattccactggatctgaaagcaacggtctagattttattatagcccgatctattatcactcctccgatctcatctcgatggctcggattcatcacggtcttagatctaatctccaccgtaggcaccaggatcaacgacccatagctattttctccagatcgaacctagctgtcaatctccaatctaacggccagcggcccttcttccctctccaccaatcctaacgctggcgcggcagcacccctgttcacccgcacggcggcgctacaccggtgatgtagtcaattcgcgcacaacctacaagtctc

SEQ ID NO: 50264 - DNA, 632 bp, Zea Mays
agcaagtcaatttttagaatagttcatagccatcagttcaaaactttatgcgaaagaatgttggctctatgtctgcttatacgaaagaatattgtatcttccctttgctataggagggtgaaataagttttactagcagcgtcgtatcgtaggtgccagtagcctcagtgtgccagtcgcttctcaagatggcctcactggcagcaaaatgttctctgatgagttgactcgcgtgcttgactaggattgtactttatctctctgtcagctaagctctggtgaattcctccggcatcaacattagcacgatggttcgcccaaccgaggatgtccccgattcacaaaactatatagttgggaacctcataggtagattcatagtagttaacagtttgcttaaacaaactgacgtggttgtttgatctatgcaaaagatggcactgggtgttggttttaatagtgaaatgtcatcctaaccatttaactagctatgtccaacatattatgtatttatttctctaaatattgcctgctgctctccaatacaaattacatggttgcctcactatccgtttccaaaaaactttttgggggtaaaatcaaactgaaattcggcgatggcccgtcccctt

SEQ ID NO: 50265 - DNA, 480 bp, Zea Mays
cgcgcatggggttctctggctttggtcggctgcttcggttgcatcgcctagagccttgtgattccacgccggtgcgaactcattgtcgcgcctggagagagatgagattgagggagacggtggatgcttctgtgcgactgaagttatgattgcacgatggcgacatgcgcccgaccgcacccacgctgcagggtcgtgaagactggtcaggtgtggagtcctcttcctgggacggtgaccccgggttcacccaccgttgagccttgctgcgtggtcagaccccccaccattaatcatttcttcggtaagacgccatatctagttcattataaattctgtgtcgcgtagctagaggttgcggtatagttggggcgcttggttgcggaaccgtgtgtttgctggtgggaaaacgtcgagtgctttggcgtcgctgctgtgccggcgttcgagggtgggagacgccagtcgccggcgagcgca

SEQ ID NO: 50266 - DNA, 763 bp, Zea Mays
tttttgagtgtccgatccatatcaaacagcccgcgttaggtctggccaaaccagtatacgtgaatcaatccggggcgtctgttccgcgatcagcgatcacacaactttctccccaaccctctaatctctatcgttcatctagatccaacggtatccacaccatcttcttcctacagctgaccgagcggcggcgggcaaccccacgatggccccaccccggtgagccggcagaccgacgccttccctactctgatatgaacccgacgacaggcaatagagagcgaattatatggcgaagactacagagcggatccttaccggggatcaatgacatgggcgagcggactgggacgcggcaccacggcggcatcgggtcgaaggcgagaaattgtgtgagcactggtggtccctacttggtaataaagctacagccaccctcgccgtgccacaggtaagctgtttgacccacatgccaaagtattgacgatagtagaatggtgaatcggtgatggcggattatcatgcattccgtcaccagtggggtctccgtcgatgcacccacgtgatgagccatgatggagttggtcaggggcggcccggatttatagccccaaggtagagtctgtgatagcgtttggtcgggaagacccgtgttcttcgcccggtcatttgcaatcatcccaaggttgtttgcgggcacgacccaacgaggaagaaatccgacgaccagggctcatgtgccagggaaacagcgacacggctc

SEQ ID NO: 50267 - DNA, 639 bp, Zea Mays
gaatgagctgaaagaatcctaggaggaggtgtcagcgcttagtaggtctctgtcttccaaagattctaccatcaaggaccttcgtgcctcaaaaaagtttgtcacagaagttggaaactgcttatcgaaatatcaaggtcttagaaagcgaccgtgaaatcatgaaggtgtggtgtgacaagacggtccgtgctggccgtattttgatgaagagacccggtgtcattgttcctgatgatattgttgcggatgttcttactgcatcagggactttgacctaggctctagcctctagtgatcctgtgatcgatgcccctcttgaaaatgctcctacatgacacatttaatggaaagtagaatgatggctggttaagcaaggaggtgcttcctcctttgataagtgtacttgagattttactttgaatctgagatatggaactactttgtttgtgttttgtgatgagttgtggggaaaaaagaaacttaatgtttgtccctatattttgctatgtttcctttgctgggattttgcgtgcatcctttttatgtataagtgtatgtgtgtgtatgaggcgtcgattgaaccacttcttaatttgagccattatccttgttggtagggtatagtacgcatgcttt

SEQ ID NO: 50268 - DNA, 1233 bp, Zea Mays
gtagctttcaaaataatgagaattcatattaggtgaccacaacaagtttgtagcccaattataggagaacaactttgtttaaggattcaagccatgttcttataagaaatgtggagaaaatctcaacccaagttggactgtcaggctgttatggtctgaattttcagactgacagtgacattggatcatctttggaaacagtttatgactaatctagtaagaatttgcccatggctgctgtaccaaagatgaagatggtataatagacaacaactttgctgcagaacctcggataggttgccatggaaatttgagagaaaatcaagctcaaactatggctgtcaggcgactgaatcaagttttagccatggtacagtgctctgttgaagatcagaccgccagcgtcaaaaatctcaccgccgacgacctcttcgccgggattcgtgccgcgggcgtgtggagttcgctcaccatgaaaagatctagtcacggatgtgtatgaactactgtggcctcgctgttccctgcccctcgcaccggcgacgtggtcgtatggccgtcatcggagttgtcgtgcttcaccacggttgtgccacgctccgagcttttcaccacgtcgtcactagccacaccagctcagcggtaaccgccgtagctcctcaaccggtgatcaccggaggaagcgccacggtgaaggccacctatcccttgctccagtatccctgtcccctccggccgccagcacaaccttgcgaaattggacacccaccgtcgatgggatctataaattgagcctccccttggcttcgctatgtattccacccagctactgcacccacctacatcccaaaccccccactagagaacactaatttcggattctccccaaacctgttcgaatacaccgcgaagaacacctcgccgcggccagcgcaaatcaggtccgatactatcatcctcagtcttgttataacattctcatgtgcccttgatgctctccaaaccatccaattgaactagaccgccatgaatcgacgggaacacattcatctgcccgcaaggtccacggtcactgcggccagagcaaacctagtagccattcgtgaaattgaatgaggggaaatactcgggaggggttcaattcggtgaaagccgctcgagagcgccagtctttgcataaattggcctgtacacgagctcgccggagctctgcacaacgttgctcgccgtgag

SEQ ID NO: 50269 - DNA, 1018 bp, Zea Mays
cacccggcgggcgatggagctcgaaggcgcgagtccgagccacgcgtgacagcaacggtgtggaggcctgtcgtcgctacggatgagttgcattagggttaagatttttttaccatggatatctagttgggctgggtcaaggtattgcttgggcaatactaagccatactaagcccttcgcccctgctccctaaggcggatactccgagtgagcaaaatactcatcaagagatctgagaccttctcagcctcgctgtgcgatagcaagctgagagatccatgtcacgacgtcgcaagccgagaatcaactagtgttctgcatctacactgatgacgaaatatgccatgtcacagcaaccccctagctcaaagaaagcacgacatgggtcccacctcactggtgcctaaggacggactgaagtgcaagaagcacgcctaatcatgggtctggagaggtgggatgagataggttgggtgatgcccatcggtacaactagcactatgggggctgcttcaatcctgatgaggactgaagcctgagcccaccaccattatggccttgggtctttagccgccgcatccattgagcaccagtgccacagcgatacagggcacccatcgacattgtgaagtattcaggagaatcaaacaccaacctctagcttggagactactgactggcgtgccttgcgggaggggcagaccacgatgatttcataatacacaacctcccctgtatttggcggagtcaccacatgcatggctcgagaacctaaggccaggttgtatccaaaactggaccaacctcgaggatttttttgtcgaaaatttccagggcatgtacgtttgcctaggcaacccatgggatctcaagaattgccgacaaaagccagacaagaccctgagggactacatctgacgcttctcgcgatagtgcaatgagctgaccagcttcgccgacattgacgttatctacgcttttgtcttgggaagcacgagcgagaccctagtgcacaag

SEQ ID NO: 50270 - DNA, 581 bp, Zea Mays
gtcaagacaaaatatgtatagagagtcgtatagctcgtctcttgatttttttacttacccctaaataatggggttgtacatgctcttagggcgtagtccctgatggtcaccacccaacccatgccaccaccatccgccgtttggtgctagcggccccttcgccatcttcttcctttcttcttccaattcatctccaataatttgtgccttcattgttgtctcctgtcgtggatttgcaatagatggatgcatcaccccctccatgatgacaccattgtacgtcgttgtcacgacgacagtagcctcctcatcatcatcatcactttccttcctctgtcatggttgcccccaccaaacttgcatgcctcagcacaccgcacacttacactaacacctagagacttggtggctcgaccgcccggacactaacgctgcaagtggagcccataccaactcaatcaatggttacaggggcactgcccccttggtccctagcctctgtgcatgcccttgcatcctcccatatcaaggtggcttggcagaactagatctagggccacatggcccactataaggacgac

SEQ ID NO: 50271 - DNA, 576 bp, Zea Mays
gaaggaggatggtaaatgtattagatattttggaaacaaccgattccataagccccgctcccacagggaaggttgctgaagctgacaaaatgcaacccaaagctgatactaagcaaatagaagttgaagctacaataacccaggttcaaaccaaggttgggcccgcaatgcctgttgatacgaagcttgccccaatcgagcagggggcgaaggaataatatagtttttgagaaaagtgtggccaaagaagccaaatcccttactccggaagcaccctccaaaggttttgattatattgttagacatgcttcgggaaaaagactatccgaagaagaaatttttgaagccaaacattatgcccgggaattgcaatatccaaagggagtcctagtatttaatggtacaaccgaggatgactttttgtactgcctcccggacaacaaagaattatccatctgccgggagatgggcagaagtatggatttcccaaagctcgaagctggcctttgcaccatgacgaaggccggtctcgtagatagtcttgcatacaacagtctgaaggtacagaaattgtga

SEQ ID NO: 50272 - DNA, 592 bp, Zea Mays
agaattcaacaaccaaaagactagtgttatgagaccagatgacaccgaatgcctagtgttatgaacgcacttgtgacaaatgacacacaatgtagtgtttcagctgcctaaaagcataaatagtacaactgaattcaatctagtcagaggcttcatggtgacgatcatagctgaatctccttatatcagttggaagtggtttgatcttgttcagactgtggaatgtcaagtagtgtagaagagtagcatcgttctcaagggataggtcctgcaagacaagtatacgtgtcagaataaaattaaagttttaaatggatgtatattaagtgttaaaatatcagttagaataccgtgtcaatctcatcagccatatacccttctgcatattcattaaagataatgaatctggtgataaagaagccacaatcatttaagcctactggcatagttggatagtctttaacaagatcgatcttgaaattcccaaatttaggaagcattgacttcggcctagctagctgcattcccacgctgagtcgagacatcatcagtctggaccaagtatactttttcttctagaaggttatggttt

SEQ ID NO: 50273 - DNA, 322 bp, Zea Mays
cttcggtactgttgcctctgttggagggttcaaaatctccagcatcttcattatttcttcagtttttggctcttcagccttatcaaccttcgtttcagccagcttgactgtaggcaccttcggcattacggccggctcttcagtgctctgtgaaggcagcacagtttctcttgtttcggcagctgaagaggccccttcgccaaattcaggtatcacggccggttcaatgtaacgcggccggtgagtcagaaccttcatcttcttgcccttcggctcagctatgatggccgaagcagcaacctttccagaagcagcaatcttt

SEQ ID NO: 50274 - DNA, 578 bp, Zea Mays
gaaaaagaccgctccaacggccttcggcattcgaccgatacgaagtcaccgcaacaggtagcatagactaccctcgcgtgcgacaaaatctgggcaaaagtcacctaagggtgcagccggacaagcacaataagtgcacgttacgaggtctttactaaaagacaaatccgcgcaaaagtcgcctaagggtgtagctggacaagcacaataagtgcacgatacaaagtctttactgaaagacaaatccacgcaaaagtcgcctaagggtgcagccggacaagcacaataagtgcacgatacaaagtctttactaaaagacaaatccgtgcaaaagtcgcccaagggtgcagccggacaatcatagcaaccacgaagtccccatctcattcaacaacatcgcataaacaaataagtacaaatcacactttgttgcccctccctctttatacaaacaacaatgttgtcacagattacatacacacaacgaaggatcaccaaccacaccgcacaaataagtacaaatcgcactttgttgcccctccctctttattgcgcgcgggggagggcagcgtttttat

SEQ ID NO: 50275 - DNA, 339 bp, Zea Mays
caggcagattcttgcatctcgcactcacggtggtcgggggccgccgagccggccatccttcttcacctttagcaagcatagttggctgttcaattcatcagggtccccagtcccacccacaccataaagatgcaaaaagcgagctatcgtctctttcgtccttcaaaaggtgaccagacacgccactagactaaaacattacgactatatcaactctttaacttattctctatttcaaactctactctacaaacactctacagtacaaaacaatattttgcacaatccacggtctggtggagatggccttagttactatgcaatagcgagcatattaac

SEQ ID NO: 50276 - DNA, 569 bp, Zea Mays
caaaatgttatcgaaacatgttaaaatatctcgaggatgttcccgagagtttttggaatcttcggaactttcttcgggtattaaatatgaatttcagcctttctaatatttaaatgcctacatttagtattttgagaactcaacaatacatatttataaatatagatatatttcttcctctcgtcgagcctgttccagatctcatatcctttttacgggatcgttaaaacatctctcttctcaaatgtcatgctgctagcatctaccccaccgtccatccaggcgattaacctcgtttgccctagcgtctatccctgtctacctctccaccgtttacccaagacatctacccatcggcactaccttcatctacctccatcaactccgcctcgcctctgtgcccgaagtacctcgtccacgttctcccgcaaaccatttcgtgtgttcctgaattgtcacgcaataacctctctgatgatctcatgttctctatcctccacctcagatcctctcacgctactgcgcacacctggaaatcagtgggacccacctgtcatcactccccttat

SEQ ID NO: 50277 - DNA, 427 bp, Zea Mays
tctgacgttaccgaacccatctgcacgatcaaatctgaaccgtttggtatgatccaacgatcaaaactctatcttccccaactcaccagaatcacggcggccacccccgcccgcgcgctgagctcacggcggtgcatgccggagctcccgcataggtgctctatccctcaatccaaaatgttctacaccattctcagaccatagcgattcacagggaagaggtctcaccagcgttttcgttgtgcagattcccgcccacggtgagacacgcacccacgatggtcatcaattccgacgagaaattgagtctggctcgggagaggatccttcactgggtggccacggtaaccattcccgagcaatggcgaagaactccctccggcaatccagtggacccggctgttggcatcggcgacgacgtcaggcc

SEQ ID NO: 50278 - DNA, 827 bp, Zea Mays
gaaaggacgccgagctgcctgaatctaataaaaccagaatttcaatatctccacccaaaaaccggatggttttaggagtatctttcctagacgtggtggccagggataatgacagcatttgtaattcttctgcaggatcagatgtgggtggctccacttcgccggggagttgaaggaattgccaaatctcatcgaccaagtgtagttgaacaatatcaacacatttgtgaccacgggtatatgctaagccacacttataacagaggccttttgctttcctgtaggcataaagggcagcaagcttgtcatctatagctggaggcttggacactggcatagttggtcggtcgtcatttggaacagctttactgaatgctcgatcggatctttttaaatcccgctgcttggtcgtcttagccacctcttcctgcaattgagcgagcacataggcagtatcgaggtctcgtgggcgttgaatcaagacaatagatttaatatcactcctcaagccatcaatgaatttggttgtgtaatatagcgggtcagaaggcaaattgtatgcattcaactgatctaccaattgagaaaagtgctctacatactcagtgacagaggagtgttgtctaatgtgtaagagctgtctaaggaggtactcattggttttttccaaaactctcactgatcaacccaccaaatttagaccaggtaaggctgggtaatttgtactctatagattggagccaacgagcggctgaacctgaaaaatgcatagtagcgacttggatccaaaccattgggtcaactccgtacatagcaaaatatttttc

SEQ ID NO: 50279 - DNA, 1219 bp, Zea Mays
ggaaaagatagccttcctcttgggcatatcttgaccgtggaaggaatagaagtagacccttccaaggtggaagcagtatcaaaatggaggcagccatccaacctcagtgaagttcgaagctttctgggaatggcaggatattaccgccgctttatcaagggattctctagcatagcaagacctatgaccgagcttctcaagaaagatcataaatttgtgtggaccccaaaatgtgaaggaagtttccagatcataaaggagaagctcacgaccgcacccgttttgacactaccagatatacatcaggattttgtcgtcttctgtgatgccgtcgtcttctgtgatgcctcgaggcaaggcttagggtgtgtgctaatgcaaaacgagaaagtcattgcttatgcatcatgcctacttaagccgcatgagcagaattaccccacccatgatttggaattggcagccatagtgcatgctttgaagatatggaggcattacctaattgggaacaaatgtcacatcttcaccgatcacaagagtctgaggtatatcttcactcagccaaatctcaatctccgtcaacgaagatggttggaattgatcaaagactatgaccttgagattcattatcaccccggaaaggccaacatggtagcagacgccctcagtcgaaaacctttcggaataaagggaaacaactttttagaagattggaagaaggaatcagctcaactgaatacatgtttgggaaacaacgatagtctcaaagtcaaaccaatgctagaagacctcatatgcaaagctcaaagcctagactcagagacagcaagacttgtggaaaaagcttgcaaggaacaactcccggacctcaagacagatgaacaaggagccctttggttcaagaatcgtctatgtgtaccaaaaggagaggcacgagaagtcctgctcgaggaagctcacaactcagcctactccatccacccaggaactaccaagatgtacctagacctcaaaaccagatactggtggagagggatgaagaaagagatagcacaatatgtggcccggtgtgacacctgccaacgaacgaaggccgagcaccaaaaacatgcaggcctattacaacccctcccagtgccgaaatggaaatgggaagaaataggcatggattttgtaaccggactaccctggacgcaaaaagggaatgactctatctggg

SEQ ID NO: 50280 - DNA, 726 bp, Zea Mays
cgactgaaggggtacaaataactcagagccatccaatcatcgaccgacgacccacattagaagcttgttaattcaaccggtaagtattagcagccattcgatccccatcccacggttgacgctgcccctgatttggtacactcccgagatcgtagaatcactcattaatggctaagattcaccacggaagggttatcccttatctcaaatcctagccatatatgcacggatccacgacccatgcatcctgttcttcgtcccacggacagagcccggcggtgcacgcccggcacgacggagggcccctagagtccaacatgcaccatgatcctgtgccagatatccccttggaagttcctacatggagaggatgctatattgaacagggtgggtgacaccttaccatttatcgcacagtgaggatctacttcccgtggtgaggcgtggaaccgaggcatcaatccacttcgacgagcaattgtagcgatctcggcaatgaatgtccaccacctctaccatggacaccttcgtcgtgtcatggcgaagctcctagggcactttgttggtccctgagcggccatgtgggtaggatccactacggcggattccctttggtctttgttcgttcgatagaggtggctgatcctcgtggcgcgtggtgccccggctcacataagttggagaggaggtgtggctagagctttatattgggcgcaaaggagtccg

SEQ ID NO: 50281 - DNA, 382 bp, Zea Mays
gaaggttattcagagccattgtatagccttcgtcttcaatattcttctgtgccctcagggcattgctaagaatcaggccctgtaaaaaagaagaaagatttgagtatgacaatgaaatacgttagtttccaatttaaaagttaacttttatacctttatactgttgtatgctaggctgtcagcaagaccatccttcgacaaaattgaaaggccatcttctagcttcgggaatcccatgcttttacctatctcccggcaaacggatatttctttgttgtctgggagacagtataagaaatcatctccattccttccgttaaaaactaaggctcctttcagatatttcagtttttgagcataatgccttgcttcaacgatttca

SEQ ID NO: 50282 - DNA, 472 bp, Zea Mays
aaaaaagaaaaaaacaacaaatattctttgcagtgtcaaagaaaaacactcggcaaagtattcgtttctatgccgaatgttatatgccgaatgttctgtctttggcaaacaaggtatgtaccacttggcaaataaggtctgtgccgtggagagtcttagttcgtcgagagtggcactcgataaagttcgataaattatactcagcaaagcgtcgagcatttggcaaagaactcaattccggtaatagtgctgatcgagctccggatcatggagtctcggtgtaccctccccgctccgacgttctgctatactacgcgcggcacgttaattataggtagtgcacagtgctccgtcacgacaagtatgtatacgacgtatactcgctggcgccagcaagcgctgttccacgtcacactgacctgctggctttcactacaccaagatcgatccaccagccgcccggccagcgtcg

SEQ ID NO: 50283 - DNA, 947 bp, Zea Mays
ggctgctgcgtagcgtgcgtagcagccctaggcgtagggcggatcaaactcgtggcatggatgacgccactccctcccacatcaggaagtcatcggaggaggagttgagatgctcgacaatccaaaccatcatgacaagaagaaaaatcaagcgcaaaagctaagctaaaccccctacctggcgtgccaaatgtcaaagagtaaactccagccgggtgcaggaaaacacttgcctaatcctaagaataggggacaaccaaaggtttgcctgatgagatggacgaacacaagaacacacatgtgtttagagtggtttgggtcataggggcataataccctactccactatgagttgtattaatgagagcttgagtgagtctaagtaagcttgtccccttgcaatgcatgtgccgcttttatatcccaagggaggaacatacaagggagctgagcaccaacatgtgggcccagacaatctggtattaaatatattctacatggagcagtaagtgcacggtggacagggatgtcttcttcgtctgccgtgcgaataaccatatcaggcgtgtcttgcgcccaattgtcggcatgtttctaccacgatgtgtacctgatatgttgatgtatgtaggggtcgggcatactgacgtgctcggaagtcaatgtgatgggagtgcatgctctgctcgagcaaacagtcactcatgatggtgccacccatgcgtagtgccaagacacaaccgcctgccatggtgtcacgcggtgcactatgcaaggcctgcatgtggcgctaacacacaactgcctgcatcggtaacgagcggagcggtcatttgtgcctgtgtggtctgacaaaagcctgcccacgccttgtgtagaataggacacacctcaaccgctcacattgaatgtgggtggcgagcttgcttctagtcgaaggcttccac

SEQ ID NO: 50284 - DNA, 322 bp, Zea Mays
gtaacgagctccaccagatcttgctcgacacgagttggtgtcggagtggacaagcccagaggtcttatcattggtgctggagtgcgtggtggcgaagagttcgtcgtagtcggtgtcgtggttggagagcatgtcacttgaattggtggagacttgggggctggggtagacctgctcggtgaagaagagttgcctactcactcagctccctcgaagtggacgtactcgacggtgaagttgtcatacgtcggagtcgagtcgtcgtccaccgccttgtcccttgcccatcctcgtcctttgtcgaacactacgtcgcgcaccg

SEQ ID NO: 50285 - DNA, 353 bp, Zea Mays
ttcaagtgcttgggaacaacgacaatttactttttacaattcttgagtcataggaatcgccgttcaattaagagggatccgcaatagttgagtaagtaattgcgatgagctcagtccaaacctttttcaaatcctctaagaaaacattttactagatcatgaatgctcttgggaaaaccactttcacttcccactaagatttccccatggtcctcttcagttttctaaaaatctgttcgccagtttcaaaaaccggctcaaccggactaaaaaccggctcaaccggtttttgcactgttccctctctcactttctgacctaccagtctgcctgtcagtcctatcagaaaaaag

SEQ ID NO: 50286 - DNA, 1097 bp, Zea Mays
catttggaacccaggaaaaagagtggttcaaagtggtgctgctgtgtttctgaattttcagattggaaacagtaactgaatttcagtgttgatagcagttttggagctggtttgtggctgttctgtaatgttttgtgctggggtgtttatagagaagttgaagcctatgcgatagtgaacaaatctactaaagtgtctttgacttgatcccacataaaaagtggagtaaaacttgctcaaggttggactgtcttgtgactgaaactgaaattttgttcagttcactaaaactgaaattcagtaaaaaggtactgattttggggctcaattgtgcctaatccatgaggttttgggctgtagaatatatagaggaattaaagaccatatgatggcgaataagtctccttaagtgacttttgtttgatcctacacaaaagttggacagaaagcttgctcaaggttggactgacaggttttatttcagacttagtctatggctgattgagacctgaatttcagataaaagtgtcaagtttggagctccttggtggtcaatccctttgtttttaggctataatttctatagcaaacttggagaccaatgttgggggagtaatccctagtgagggacatacccttgaaactgcttagaaatgagagaaaacactgcacaaagttgtgctgtcagataaaagagtattgactgttgtgcagtagcctaagtctgaaatatgtgtgtctggttaaactttggagctttgtggtgcttgatctatatggttttggactgaagttattgtgaaaagtttgaataccatatgttagtgaataagtttctttaagtgtgttaggcgtgaccctacacaaaaagtggtgtaaatactgcccaaagtgggactgtcagtcacacaaactgaatttcattcagtccaatgaaaactgaatttcagtgcaatttgttgaacttcagagctcttttgtggctaatccataaagtgttggaccatggtgtctatagtgaagtggtaaaccataaaaagatgaacaaatctcttaaagagagtttgtcctagtgctatacagaaattggagtaaag

SEQ ID NO: 50287 - DNA, 575 bp, Zea Mays
gaagaatatggatgctgaccgttcgattgtagttggacgatggagattgggtctggagaacggctcggccaggagtgctgtgggtcgtagatcaagggagggacggcacggattaaatctcgcgtaccggttcggccaagtcggtagtggccattgatccttgatcggatggctggaagatcgtgtagttcattatcttttatgggccgttggatcgggatccgatgaccccggtcgcgtactgatttgagctaggcgtgatctaatctggatcgtttaaattggatcggacgactcctgtttcgggataccctttcgtgcgggaacatttgcagaagagccccttctcttttcacaaatcaacctgccgtctatcggtaggttaatctgtgtctagggaatctttcaagctatcccctggtcttttgtttattcatgcacccagttcagaagcttagaaaattcaggaaaataatttaggaaatggtttttatgtataaaaatatatccagaacttatttaattcatagaaattccatttttactcctttttaacccattccagttgcaataat

SEQ ID NO: 50288 - DNA, 346 bp, Zea Mays
aaacccatgggtgtgttcgggtagcctccgtgatggtgtccgtgcactcgacaccaccggaacaggtcattgtcgatgagtattcgcgtctccgtccaggtattcgattggtacgaagtcaaggaccaaaaccgtgaagaaaaagaaatgggaggacgtttgtgtaattatcaatgagatataggaatagtgttcatggattctttattggttattcaaatgcctaggggtcccgatgcaaatttgctagagcaggcgcaggcgcgcttggtttcggcgcaggtttgggccggtcgggctgaattgggcccgttactattcatgttttcttcttttctttttattg

SEQ ID NO: 50289 - DNA, 450 bp, Zea Mays
aaaaaatgagagtatgagagatttcaaggagatgagcataccaataccaagggacaagaaattgccgaaagatatcaacttaacaacataagaggaaagggtctcaaaagataggaaggtcatggatatataaactgaaatgtttaagtaagcgatagaaatttagaggcaagtatttgaaacaagagtattgaagaatctaggagtacgagcatgtcaatactaagggaatacatatagttaaagggttgaaattcaatgacgagagagggaagaatcccaacagacaaaaaggttatggtcagggggcatctacaaagatgtcgcaagcagaagactgagatcagatctaacagattgagagaagtatagatcatactagaataaaatacttttggcaaggggcatataggagcacaacatagaattagtcgaggtgactaatatttt

SEQ ID NO: 50290 - DNA, 272 bp, Zea Mays
gcaaatcatgttcttgtactcaaaaagaataaagtggattggcgcatgtgcgtcgactatatagatctcaataaacattgtccgaaggatcccttcggacttcctataatagatcaggtggtagattcaaccgtcggatgttctatactgtcattcttggattgctactcaggataccatcaaatcagcttggcaaaagaagacgaggaaaaaacagcattcattaccccatttggagctttctgctatacctccatgccgttcggcctcaa

SEQ ID NO: 50291 - DNA, 1238 bp, Zea Mays
cttcactagccatgatgacggcggatcgacgagctccggtgaggtgtaccgaggtttctagcacgatagggttcaatccaaggccactacgagtaccagtaatatatcagacatacgatgctcacctaggtttgtgaggaggaggtatgggttggtcggtcgacatggacactgccttcagcggcgttcaccgaacgacatgatggtgcagttaatcctgtgcggtagagttcaaacgggcaagcgcatgagcttcaccatgatcgatagactgcaaaacacaagttaaacaactatgactaaccttagaaaaggctgaccacatggttgcactgctcggcggcgctggtgaccatcgaggggggaaaaccggtgttcttggctatcgaaggtggaacggcggaaacaaagggtggcttgggtgtgtaatgaagaggtgggactgagcgtaggctcaatttaaaggaagtcaccatgatggtgggtaatttgatcgatgactcacggcggcgatgatatcccgaggagctccacgttagcctcaacggtgtccacaggccagtaacgtggcggacttactgcgaaccctttacggcggttcaatacgcgagcctccaactagctgcatggatggccggagcgtccggtggctagctacggtggcggtggatgattcacagtgaggacatgtggtgttcgtggctagagcagtaattcgatcatcgaatccgagcctgagatctttttaccacacattgatccacgtctcggcggcaccaatcgtggcgcaagctcgaatcacggtggcgggacgtcgacggcgagcacacgacacataatctttttcagttcactgtaccatggcgatgttcgttcaactcgcctgacagagcgatttgaggagctcctttctccaatttttatgtgacaatatgcttatctgactacatcaaagttgttgtccgtcatgctagcttcaattttttataaggttctttctcatacctccactcgatcaagcacaattcagctctaaagttgatccaatgccactgtcagtctaaccttcaggccaacatccgactgcagcccaacttccaggccattttactccaatttctgtacagctctagggcttaatcacttaatcaaacttggactactttaatagctctacaaatttgttgcaatgacccatgaaaaaatctccatggatcaagagatataggggtcaaaag

SEQ ID NO: 50292 - DNA, 566 bp, Zea Mays
ccacttcattacccaagccgaaacaaatttctagccacatcaaccaaacttctaattgagtaaaacccacacctccttgtcatgaatacatccatacactatgtgcgacgtgaaatttaatgaatgcctaatgggtatcgtctcgacttataaacatagggaagcgatgactactttggtatgtcaccacctcaccttacacgcaaaacattcttaattggactgaccaatttgaacgactgttcttccaattattattattaatccacacacttagataagcataatttcaactcaaattgcccatattttaaatctcggcataagcttggctattggctaacgtcgtgactattttctacttaccaacatacaccaactttcaccatttttggatacccgtacgatacgcagttattctaatacatcacaagtacattcaaccccatcagtaaagcaccagcacatttccgaaaattccccgagactacgacgacaaggcatcgatccgccatacaacaaaaatcatgacgaagccgataggtgctatcaactaatcgtttaaa

SEQ ID NO: 50293 - DNA, 540 bp, Zea Mays
tgatgactgcagtccatgctgcattgataggcagtaacccttttcttggaaacgcacgagtaatggtgagtcattgccctcgctatggtaacgtgtgagtaactacacggcccatgcaatgtggactgggcacgccgtctatcactggaatggacagacacacgtcttatccgtaatgaatgcaaagatgcacgtagtccagaggatttatgccaggctcgacccgttggcttacgtcgtgtgtagtaggccacgtggcagcatcgggtctccgcctgggcagggagcaggagtgtatgtgataaggtgcggatcccaccatatcaggtctagacacgtgtcggctctggaccccgtctgagtcttgattaaggcccgggtatgttctgtcctagaaccctgggacctcactgtgggcggcccgaaccccatacggggggtccagatcccattctaggggtccggttggcacacgtggaggttggaccaaacatgggggcccggactgtatatacaggggtccggcgccttcccatgggg

SEQ ID NO: 50294 - DNA, 710 bp, Zea Mays
acctgaggacatgaaattgacgaagggttaaacatacaccttgtataaaaataaaaaacacttttcttgttaaagaaaaaaatttatatctgttttggcaaacaatgctagactagttcacgaagtcagacctgtacaaggcactagtcttctaagtagcataactgaaaacttaaattcgtgaacctgggtgagtgaaggtgtcctagatgctttggatcgtcgcactaccaatgaagcattctcgatatttacctggaaacaagaaaaagaattaatcattctcatactcaacatattatgaggaatgaagcccgaattttacactgagccagaagtcttacaactttaagaagataaaatcatacatgtatcatcgcactactacaataatgaaatagatgcacgattatttgaatcacttatgtcttgttttatcttgtatggtatctaaaaattgtgggccagtggtccaataatagacttttagcatggcttcaacataagcctacatgttatagattttattgatttgttgtacctttaagttggtttctttccaagtttattagctaatagattagcaaagaactgattctattatgttgttaggggcatctgttttaaacctgctgatcacctcctgagattaagcgataatagactaaggaacacccctataatttatacctctcatgtttctccatttt

SEQ ID NO: 50295 - DNA, 805 bp, Zea Mays
ccaccatgggtccccaatgattgggcagaaatggattgacacactaaatctatccactctcgaagcttggacaagacctatcgacgacatccagggcaccaaaatgccgccactagcacaaactgctggatggaatatgaggttgttatcaaaatctgtccctaacatggagaggatgcagcgtctagaacagattggcattttttattcttgtaaacagactacatcaataccatttgaaacaaccaggttcctgaccgagtcctgatgggacgaggaatttaatcccctcacattacaaaataaaatacgcctacaatccataaaggcataaagctttctgacaatagaaaataacaaccacaacccatgcacagactaatcagcagcccagatggaaccaagctggcgcctccaggtctggcactgtccagccgaacagtgccgccaaggccctgaccagctcttgattaagcggttgaaggaacagcttggcataagcatcaagggcattttgagagaggagatcaaagccatccgaaatcttcagagccttcatgacatttttcttgggtctagcaggtccaatatgagctaaatcagtgcttagccctgctagtcttatgttgtgcctcaacttctccttcgaacggggatcccttgacactctcgtcctgccagccccctcaccttgtttagctcattggccaaggaatttagtggttccttagccaattcctgctgagtcattgcattgccatgtatccagtgccattttcgctaaggcattgaaatgtgcgttcaa

SEQ ID NO: 50296 - DNA, 381 bp, Zea Mays
ttttagtataagatcctttgctggtgagattcttttcgcagtctcttacagggccagcctttgcgtggtatacctcgctaggcgcagtatcgatctgaaaatggaagcaactagaggactagttccacatccagtacactctgaagctgctgaagctggaatcgccgatttagcacaagttaggcagaaatgtggagaaactatcgtagagttcgtccagcggtttggagtagtcaataccgatgctactcatcccgcattacagagaaggaggtcaccgagctagcaaccctcggcctcacaaagtcgatcaaagatctggcttcttagttggagtttagctccttggcacatctagtacagaagctagcaacctatgag

SEQ ID NO: 50297 - DNA, 534 bp, Zea Mays
ctctaacattgaaccctacaagctatggctatcaagagactagaacacaccaagctccaaagttaggagaaaaacactggaccatagtgacagtaactaaagctggtctgcattgtacatgtgtgatagagccagttaggacaccacttacttcaaaatttgtgtagtaccaagtcaagcttccacaagtaaacttgcttactaatacttggtctacaattttgctacacaaagcatatctcctaattgtacagaacaaccccaatgaaactccaatgttgagctaacatactgaaatgtccaatttcagatgtttggaacaccctaacatcaacctgacagcctgactttgagcaagatttacacctagttctgtagagctctaaggtcaactagcttaatcaagtctgtgctcctataacagatatacaaggttgctataatgaccaacaactaaagactcatggattcaatgctatagtgcttcaaagttgaccccattcactgcaaccagtttcagttaactgaaacaag

SEQ ID NO: 50298 - DNA, 710 bp, Zea Mays
caatgaccggcgctctagcttggctgacacctaattccacccctggtgaccttaatccctcaactaattgcactagtccgggtcggaatctttctgtccatgacaacggcgaaaaccgggaacaatccgacgtgttctgggtgatctagggcagtctagtttaattaaacgggtctacgagtagcaggggattcaagggaggctagaacatcaagcaaagaagcttgaactgacctgcagaaggctggccacggcgaggcgttcacggtggcgcgggaagtagatttggggaagaaagaaattagggcgctatggtggctaatcggaagcaggggcgagtgctctggcttcgtgacgacctggcagagttctctaaggcttcaatttatagagctcaacggcggtggcacccaatttgaaagaagtgtgctggcggccgaagagatggactgagtcactgcggtgttctaccgtggcattcactggttgaggagctacgacagtcactagtgagctattacggctagcagcgatggggtgaaagagtcacggcgtggcgcgatcacggcgaatgacgtatacctcgacgacggcgctcgacatcgccggcgcaagtggataggcgacagagcggccacagtgctccgagttcatccacggcgagatcttttcaccaggagtcgttatccgcgcgttactggacgcgaatc

SEQ ID NO: 50299 - DNA, 562 bp, Zea Mays
tttgtgcatgacgtccgcccttgcctttgtctggtaatgaagctcatgtactcggcagaagccttcggcgttagcgctctttccttggcatcggagagcccaaatttatacgctgagcctaacaatggcgttcggggtcagctgatggaggtagatctcaaatttcttcaaaacctcacctatcatctcataaagagggaaccaaagtctcaccctaaaaaagctcttgaatacaacaacttcatcttccttcggctctggaattttgtcctctccagcaaagcgaactagttcatcatcattttctccaaaatatcctagcttcttcattagaattaaatcttcagccttaactgtggatctaccaaattcaacatggctaggcttagttggacatagaatgctatcgtcatcttcactttcattatcactctcaacttcagtcacggcttgttcaacttcagcattaggggtactttcgtcaatagctccttcctgcacaaccagcccgaccacctcatcatttctgagatgggtgctgtctcagtcgtcttagtttcat

SEQ ID NO: 50300 - DNA, 442 bp, Zea Mays
ctctagcgaaggtgatttggcccggctgaagtatacattcaggtttggggataagttcgatgaaccaaacgatgactggctgaagtgtatcgaagctacaagtgatgaactgcttggagcatattccaaggcagaagataatgcactgtccgcacccttcggaggtcggggaaagaagagactgaatagagtttttgacgccattggcatcgtttaccccgactaccgctatccgctgcggggacaggggaaaaagaggaaagctgctactttggacaccccagttgggcttgtgccgaagggaaaaaagctgaaggttctgactcaccggccgcgttacatcgaaccagccgtgattcctgaatttggcgaaggggcctcttcggcttccgaaacaaaagaaactgttccgcctgcgcagaacactggagagccggccata

SEQ ID NO: 50301 - DNA, 453 bp, Zea Mays
gacttaagccaattgctccgtttgtagggcatagtggtcaccccgagttgagtaagtatgcccattgacagcgaacagtttgagtgccttcgaagcctttttattgatgatatatttctcaatttacagaatacatcgtcatcccaatagcttctaggatgtagctaggggtaaaacttcctgaggtgttctatgttccatgagttcccaatttccgtgccgtccatctgagcgagacgatatgatcccggctgagtgacttctgatactatgaatggtccttcccatagaggtgacaatttatgccgtccctcccccgttagaattcgacggaggacgagatatcccactgcgaaggatcgacgccgtatggccttatcatgatagcgcctcagagtttgctgataccgtgctgattgaatcaccgtattcagtcgctcttcttcaagtaca

SEQ ID NO: 50302 - DNA, 325 bp, Zea Mays
gagtgaggcgaaagggtcatgacggaaaatctgcagggtgggaaggctcaaggttgcccttgttgtcaaccgcatgctgcagaaggaggagacgcccttgttcacatggggctgattggttcgctgcacgccgtttatccaggcccaccggatgttggtttagggccttcagatacagcatgattggttggcttctctactcatgcacttgaacccgcggaatctcaaagcatggtttgtttggtttccgtatctcctcaaacaggctccatacatgcaagccgtacgccgcagccaggctccgcgcgaacaaccggcgggagca

SEQ ID NO: 50303 - DNA, 508 bp, Zea Mays
aagctctgtcactatttttgacgaccacaaagtcatagtagtcattgggtttccaataggggatattctccacaacaaagaagccattggaagaatagccaagagggcctgcgagctgggagctcacgacattgagtttcagcctcgcactgcgataaagactcaagcgctagttgactttgtatcagagtggaccgagcaacaagtaccagataacccagaggctgcagaagtgtggcggatgtacttcgatggttcgctgaaactgcagggagcaggcgcagggatccttttcattgcccctggaggcgaacaactcaaatatgctcttcagttgttatttttagcatccaacaacgcagcagaatatgaagctcttatccacggattgaacattgccatatctctgggcattaagaggttgatggtatacggagattcacttgtggtcataagtcagataaataaagaatgggattgctcgaatgattctatgggcaagtattgt

SEQ ID NO: 50304 - DNA, 902 bp, Zea Mays
cggagacaagcttataaaaatagagttggacgactcaatggatgatacgatggagtccacatcataccgtcaatattgataagtaaggtgtaaacgtatctctgctgactatcaaagcgatgagtggtacccacctaatattaaattaacttactcaacaaaaaatgatttgtcagttgaatatatatttgagttctttggttttgcatcacccaagtacccaacacatactaggcaagaacctagcaaacgggtgagcaccggtgctgcggcctgtgttgactaggagacatcacacgacacgacatcacacgagaccatgtggatttggagttggactgttggtgaatggttttcctgtgccttcgtctccaagaacgggccggggaacggattggtggagcctttctttgacttctctctggctggacggacggacaggagcagtttacgttccttgcatgccaagcaggaaatagcgaagtagcgagctagctaagtagaagtagcgagctagtttccgcacatggtgagagacttcaccggaacaaggcgagaaagaaggttgatacggatgattgagtatgcatgaaatcgaatatacgaaattgttacggacatcagaagcctagcaggaggtaaggagaagcgaaagggtatatagcttaatggttagtacaagggtttcagtggcacttgagattctagatttaattttacgtagctagtccgggggagatgagttcacttggggtctatctaagtcacgaaatttctcagttagatcgctctatcaggccaaagatcaaaatcaacatcccaaatcacaatacaataatttggaagttaaaggcctcccaaagatcaaatgtttcctgtggtatttaaaaaggaggtcatgc

SEQ ID NO: 50305 - DNA, 502 bp, Zea Mays
gggatccggacctatccgcatacactcctactccccgctcaggcggagacccgatgctaccacgtggcatactgcacgcgggataagccaacgggcggaacctggcatgacgcctctgggctacacgcgccttcgtattcattacggataaggcgtgcacctgtccattccactgataggcggcgtgccaagtccacgatacgtgggccgcgcaattactcacacgttaccatatcgagggcaatgactcaccattactcgtgcgggttactgcctatcaatgttgcatggaatgcagccatcatgactgccgttgattacccatacgttactctgtcagcattagttattcccataatgtatttcttccattatgctcctaggcccgcatgtcggggctcagcatccttgtatgggcctcccttaaactataaaagggaaggcacacaacgttacaaaggacacgctctacatactcaatacaacttacacatagtggagg

SEQ ID NO: 50306 - DNA, 419 bp, Zea Mays
gctccgattagatcactaaaatacctcttcgagatattgaaatctggttgtagcatcaagatcgggcggtggtgatattatactcgttcgctatctaatggagtctgttgatctacggatggatggctctgatcaatccctcattaaagtcgttgtggcagatatgctaaagagcccttgggatttataacatttaacccatagtcctcccacgtgtaagaatcctaacaaaatagccttagaattcccaggtttgaccctaagttattgaaaattatcaaccgcggctcaggaatttggataattatgaaattaaatatagaaaatgatttctaagtataaaataattccagaaaacttagaaaatccataactcctatgtattaactctgatttgatccattcaagttgtgttagct

SEQ ID NO: 50307 - DNA, 321 bp, Zea Mays
tcccagttaatatatctctgatgcaggattggctgatgcttcttgggaagaatcacagaattataaaaatcgacatgttggagggtccagaaccgattaccatcgatcctagcatcacaaatacgtaatgtaggattttggaagcagatgtcctggagaagggcagaccctccgctggcagtgaaatctatgactggctcatttgtagatcgacgggcctccgccctgtgaagaaccaacccccggataatgggtgcgttggcagaagggagatcaacttcatcatctttgcctccgtcatcatcgctagttggctcccat

SEQ ID NO: 50308 - DNA, 1462 bp, Zea Mays
cgtccctcgaagaaaaccaaggaggggaaagagtttctcgagggggcacgtcatcacactgaaatgatagaagaggtgagcacgtgtcagtcacataatcacaaaggcatatgaaaatgtgaaacacacatgacacaaggattgaaaggtttgagaatgacaaggaggttggcataagactttggagtatctttgacacaagatatagattttgaaatgaaaatgtggaatctagcatagccattttagagttttcagcatagatacgaggtttggcatatgaggtgcttaagggcataattatggctagaagcacaatatttatggcatagaagcaatttgggacatgagtagatagtgagtattgaggtaagcatttcgaagaagatttgacactgatagctttgttgtgaataggcataggagtggcatatggagtgattcttcttatgtagagaatgttggctttgatttcgacactcgtttaaggcattgggaatttgacacacaatattttggagttgattaggtggattggcataagggatatgagatttgcatatagtatgaggtacttgagaggaatttttgaaaaggacacatgatattggataggagaatatatttgtttgaattatagcttgaaatgaaggtgaaaacctaagagataagctcacaagagactaagatgatacccccgagatgatttattgatcccttaattcaatcgagttagggaatatgtgtacttaggttgactctgatgccattgttagatttaacggaaactctagatcttcctaagtcctagaaagacaatctaaaaaccaaaacctcaatgatgtaaggatcctaaactaactgagtggaatggatctacataccttcgttttgttgttcatggtgaggatcggttgctgatgagcctacaccagtagcgccccctcctcctatcatgtcttgtcacgatatggtggctcctggtcgccgtcgccgagaatgttgccaccgccactgacatcctgtagagaaaaaaaatgggatccattccagttggggcgttggaatccatcaccattgcaactcatccgatcactacaagcacctaggtgatggggccgttggggttagggtttaagtgtggctaatcgtgctggcataccaaccgaccccttaatcccttttatatgatgattgtgtgaacagggctgcaagcatggttaaggtggcccccgatcaaggacgcgtggttaagttaggttaaatccaattatatcatgttgactgactgtagaggacatatctaacactacacacaaccaagcatatgtaaacgtcgatggatccattgtgaatcatggatacatcagaaatgaccggtaccttcgatttacgggttacctagctctcataatcttttccaagcagataaaggtgggacctatttgatctacccgaaaat

SEQ ID NO: 50309 - DNA, 948 bp, Zea Mays
tccgccctcaaggcccggacggtccgcgcatcccaagactttgcacttttcaaacaagcttttgaaaagatttttaactcatgaaatttgaagcgctgttagtcctcatgcaagtgcaaccactatatgctctatgaggcactaagttttacacagatcaaagtcattgacccctcttaatagtacggctatctaacctactaatccggtcaagtatcttctctaaactcctgaagactggcaaaaacaaaacctatgttatacctttgccttcacttgatccacaaccaatgcttatgaatctccaagatttcctgttctatgtggtccaaccctgcattcttatttctccaagaaccgttagtccacaagcaattgtcattaattaccaaaacatcactaaggggcctagataattcacaatcttcccctttttggtaattgatgacaacactacataatatattcaagagaaattttgtttttccaaatctccctcataccttaggtataagaaggattttggagatgagtttcgtaggacttatcttgatttgaagttctgtccgagagatagataaatcctaattaaaactcagaatgtaagaaaagctccccctatgtgtgtgcaggatatttcaagctgaagatacaacacacataatagatcggagttttgatggagaccttcctacagtcatggttatcgagacgtacaagagataatatgtaaagtaaacgcagcaattataatcactcctcgattaaccattcacagagtaatttgaactaaacatggttcaacccacagaatattacaaatagttgtccacaagcataagacatagagttcaaagttcaaacaatagccaataccaagtgcataagacataaaataatgcatgcgacataaaatggtaaacatgcacatgcacggtctcaatgtcc

SEQ ID NO: 50310 - DNA, 734 bp, Zea Mays
acggtgaccgagggtgttgcggacagatgagtgcgttcccggtgatctaaggctacccagtgcaattgagtgggtcgatgggcatcacgggtatatgagagcactcaaacgagggagaaggcggcatgaactgacctgaacggtgttggccacgacgagctcggttcttgcggtgcggcggatcgatttgggggcaaacagcgattctccggctggggtggctaatcggggacgggagtggttgctatggcttcgcaatgacctagcgcagcaggttcggccatcaatttatagagggcttaggcggtggcgcgtgatttgatcgggcagtgcgggcggccggagacagagaagaacacggtggctgtaaccgtggcagtcgccggtgtaacggcgcaaggagaatactcctaagggtgccacgcttgctaacccgcagtaacaagcttcagtcgtggcacaaccgaggtcaccggcgcttccacggcgactccggtagtccggccacgtcgtagcggctataatcacggcgataactcccactcgcgatcctatccaatccccgtcgcgagatcttttctttgtcgtggttatccacccaccagtgagcacgaatcacgatggcagcgtaaatcacggcgtagaggccgtcggcggcgaagtatactgcgctggcggtctgatccatacacgacactgtaccatggcaagtgcttcttcagtaagcctgacag

SEQ ID NO: 50311 - DNA, 682 bp, Zea Mays
atacgatctccattgagtcactgcaatgaggatggctaagtactccttcacgtacgtggagaggccttgatttttgggtcccagtgccttgctcaagaattccaagggatgcccgttctgcatgagcacagccctgattcccgtcttgcatgcattggtgtgaaaacaaaaaggaagagaaaaatagagaagcgccaacactggtgctgaactcagagcttgtttgagtagatcaaatgtcatctggtggtccggtgtccaaatgaacaatacatttttcttcaaaagactagtcaatggtcgactaagcatgctaaagtgtcacacaaattttctgtaaaatccggccaatcccaaaaaactgcgtagttccttggcgttgactagagcgggccattgttgcaccacttgaatcttcatcgggtccgtggccacaccttcaacactaatgatatgcctcagataagcgatgctagactcaacaaaggcacatttgttcagatttactttccactgatcctgctgcaataatcgaagaaccgtggccaaatgagtgaggtgatcctcgatcgacttactataaataagaatgtcatcaaagaaaaccaatgtgtaacacccctggtgttactattactaaaacatgagcataacatcataagcattggcatttcatgtgatt

SEQ ID NO: 50312 - DNA, 1019 bp, Zea Mays
tgcatgattgatgaccaatggagagatttgttgaacaagtggctacctagagaacaaggtatttggaatcaagttccacttcatccctttgtataaataatgtttcatccttccatgtgactagtattacatagcctcctctttattttgtttcagtccatatactggggtcatgtgggttgttgcctgcagagccgccggtatcttgcctcttggagagaggtacagtcaaaggaattagcactaccttcgcagtttacattaactgtaagaagttatgttaagaatgttttctttttgtgagatcatttgtggtcaaacctaaaaatgctaatcaccatttacaactactaaagctcacatacaaagcaaccaaaatcaaggaaataggttacttcctctattccaaattataaaatgttttagtttctttagtacaaagttttgttgtgtacttaaaaaagtttaaaagcgttgtaatttgaattacaattacttgtttggtgatactaatacacgacaataaagattgcatgctgctaaaagctgcagtttgacatacctatgagtttgtggtactttgcgcctgaagcaaaggtcatctccttgtttctttctattagcccatttctctttatttagtaatcttagaggaaagaaaaatatcccatgatttattggagctctgtcgttactgaactagttgaagcacatgttattgaagtgtcttgtattctctcaattgctctatcttagagacttacttttttatatagaacaattttatctagaacaaacttaatcgtgagaaaatacattttccacagtgcatgggatcttagtcatacattgccaaatcttatgcaatggtaagaaactaatcatgtgatgtctggttgaatttgttgcatatctacatacttgattattgtttcaagtggtagtgctgctaagatagctaggtgaacatctcttatatctcgacaataactttctatgttaacttgtatattgcttcc

SEQ ID NO: 50313 - DNA, 1040 bp, Zea Mays
cacctatacttcagaccaggataaatgagctggaatgtggcatggtgattttggcctggtctaggcacgacacgacccgaagcatggtaggatgtgctaggaacgacatagtgtgcatgatgggctatgggtgagcttcgagtccaacgggcggcacaacatggctcacttaaatgttagctcgccaaggcatgtcgggcgacatggcctagtagagttttgacctattaaagcatgacccattcaatctgtccccactagttcactatataaacttggtcgaccacatgctcgcccgcacgaccgcactccacaggccgcagctgcaactacttatcccttctaccctaacgaatgcctaaccctaatccctaatcgcattgacatccccattccccaaacaatccccatcttgaaccacatctactaccacatcatcgcccttccctagtcccctactccatgtccgccaatgccaatttgcctacccctcggcccttgcctagtattcattcctcgtggcctcgcccaaggaggcatggactgcagtcatctgtgacatgtcctctctctacttcccactcgcatagaactaagatgtcattatcatcggggtcacgagcgatgtagaaggctccctcgagctcgcggtttcctccacctccacatcggttcatattgcaaggggatgatgacgatgatcccagtcttagagtcatggacctatttggtcacaatcttgctgaggtttcacctttgccttcaaaaaatgtgagtccaacttcaactccatcgacaccgactatgactctgatgccgacgccaagcagtaacatgagctttgacatggcaacacaatggggtggggtgaagaagaccaggagaatggcacaaaccacacatttttggaatgatttagaggaactcttcaaggcagtgaaatggtaagagcatcaagaatggttctaaatgcaacatctgtaagaaggtttttgctgcctcatctattggtggtactggtcatttgattagacatcttg

SEQ ID NO: 50314 - DNA, 680 bp, Zea Mays
ggacaaaaccaagtcgactttgttctgcatatacataagctagcgctgtacatcgtacaagtggctttcccggttttccccttcaacattatggcccatggttgactgccgtttgcatcatccatgcaaggttttagttccaaaccgcttcgattagcaggcagaggttgtacgcgtcgtacctgcccagtttatataacaacgctctctgctctcgtcaacgacaagcatcacattagctgtattcatcaatacatgccgactagctagctagttgccctaaagaaacattctcaagccacccgtccagaaaccctatcaagaattcgagctataaataggagcggcggcaagcaaacagcgcctcaccaccactcagcttcttctcacttgagttgagagacacatgcagttaagtttgtgatattgtggctagagcaagcgcgatggcgagcaaggtgcctgctgcactgctctcatgtgctttcttgctcctaggagccgtattccaagcagcagctggtcactacagtcctccgagtcctgcttcgtgcgggctcaaggtggggtactacgaccacaagtgtccgcccgccgaggccatcgtcaagagcgtcgtcagagccgccgtccggcggaaccccggcatcggcgccggcctcatccgcatgctcttccac

SEQ ID NO: 50315 - DNA, 382 bp, Zea Mays
ctttaaactacttttcaaacttgaaacgataagctagtcaaacaagttcatgcttcttcttcatttcattcatcttcggcattccccagccgcttgatgttggatatgtctggttagctagatattcttgcatcaggtccctggtactgatttgctcagctaccactctgaactccactttagtcagctgacatggcgaccccagcagcatgttgcatagaggcctagtcatttcgaagctgagagacagcagactcatgatcatcgtcatcagtttccctctctttttctcatcagcttttatgtaaaaccacatttttccagccagtcggccactttgtacggtagctgacgactagtgccttcgtatacttgcgatacg

SEQ ID NO: 50316 - DNA, 676 bp, Zea Mays
gtgcatactcatcggagcaaaaatttattcaaggcgaccccgaaggagtcattcaatggatcggcgaagaggttgaagcttttgaagaaatacttagtgaccgttgggatttttgtgccttcgtcggtgcccgaggggttgcagtagttttggagaaaattagatgtgaacatgttaaagctgtagcccaagcagaagtcatcttctccatagatgatacgaaggaaccttcagccgaagctactctgatgggcgagaaattctattccgatgtttggatgaagggtggctgcgagatagtcgacgaagcaataaagaagagtgaaaaagaatcccatgatgcccgactagaggaaaaggaagctgaagaagctactgaacgttcattgattataggtacctctatttaatgcccttttgctttattatttgtttctagcttcaaatccttattatcatatactttgctgcagtcggcctttcgccactaccggagccattcaatcctgaggttgaccccatcatgaaagaagctttagatgtgatgaagttcgccaatacaatcgttgacgaagttgttgacatgctactgaatgaagttgccgaaagagtactaaaagaagactagattcttgttaattaggaaatgtaatatttatgtatgagtcaaacattg

SEQ ID NO: 50317 - DNA, 451 bp, Zea Mays
cccggattagatccccgaaggtcttactcatcgcccgaacaaatgttggcagggcgtttttcagaccataaggcatcacaacataacagtatagcccatctaccgttacaaaagcagtgtgcttcctgtcctccctagacatccggatttgatgaaaatcggagtaggcatccaggaaagacaaaaagtcacaccccgaggtagagtttcacgatctgatctatacgtggaagtggatatgggtccttggggcatgccttattcaggctggtgtagtcgatgcacatctggagtttcccgttcgcttttggcacgatgaccgggttagccagccacacagggtgatggacctcttcgatgaagccgacgtgcaacagcttccgaacctcctcacggatgaagtcctgccgctccacggactgcctccaaggcttctggcttaccggcttgg

SEQ ID NO: 50318 - DNA, 939 bp, Zea Mays
ggccatatgatcgcgatgaaacttccatgcaaaagatgatggatgcactatacatgacaccaacatgagaccaccccaactaacatgtgttaaacatatacttccactccttcaaaataataatcaacatgtgtaacatgctcgaaaaacatcctcaacatatgtaaatagtagaacattaataacttcaagcaacaattctcaaaatggaatacgaggatgaacacatttgacatggatataatcaagtataggacacataaatcgaccaacggtataaatcatcactattttacttgccttcaccggggaatttggacaaagccctaagtatgatccggaagtccaccacatgtttttgacacacttcttagttcacaaatccacataacaaacgctcataaacaatgccacacctacgcacaattccaaacccgttgcgagcgacatctctccccatcacccaccaaactgcagcggcgctgcttgacaatttcacatctttaaaattatgacagcagtagtaacaaacaaaaactccagaagcatctatataaaattgcccacaagttttatattcaaatgataattaaattccaaaatctaaatggccccaaacagcccacaaaatacaccctgcttcagtttttggacagcaacctaggtgagttcaaaatgcaatatctcataaaatatacctccgaatcgagcgcataagtactttttggaaatatataacaaagctctacatgatttttacaatgattaccactaattacccatgcaaaatccccagaaactaataatactactgttgttcgtccaccaacaaaattcttgacagcacctctaccgaatcacatagatgaacggatgaccaattggattgcagcataaataaaaaagataaccacaagatcaccttgagttctttctttc

SEQ ID NO: 50319 - DNA, 682 bp, Zea Mays
agccagtcccgcgcggccagtcaggcccgcgagcttcgccggtgagccgccgttgcccgaagtcctagcctgtgtacctgctttttgcatggaagaaaaaaactacctgagtcaagtgcgagtgctaactgccaagagaagaaaccgtctgcatggctgcatgcacttgatgatttcttcgcttcgtgcctaaaaaatctcctgggtcccacttgcatgtcgtattctcctccccacccccttgcttcgtgcgaatagagaggaaaacgtacgaaccccactgacgtagctattctaggtggctttttcctatagggtatttactacaaaggatcttctgtggctgctctccgtgtggtcctatatgtgacgagcctctggccagtaggtttttgccatgattgccgcagcctggcttttcttttacataaaagccaccattctcttccaaaaataatatatcattttatgagttacacaaaaatcatttgctacctcttggagtatatgtttaatcacgaaaataggtctctcatttagtagataagcgatatcttttgcgttagaaaatttctatttcgatccgtataagttgcgttagctttttaataatattgtctaggcgttagaatgtgacttcatcatgacacatgttttatttacttaattaattgttggtttg

SEQ ID NO: 50320 - DNA, 654 bp, Zea Mays
aggtgggggggaacggggaggggaagggaaggaagaagaagcgagcgaggtgggaagaggggattggcctggggctggctgcgccgtagcgggcaggtctccacgactcgtcacgccgctggggagggtccgcgtggcgcttgatattatttgtcttgtaccgtaccagtgcttgctcgcgtgcgcgcctcccctcgtctctgctacctgttgcgctcccattcgctcgcatgtgggtcgctgttcctgtgcgactgactgactgaccacttcgtgccggtttgtcagtgactcagtgtagcagtggcactgctctgctctggccctgcgtgtccgatcttcacgagaagcctgacactcggagggggtacggattttttcctgacttttttcctggtacgcagggcacgtactgtacgggtatgcagccaactgttccgttgctcacgtacgcaggatctatttacgacaccaaataaataaatgaatatttggtgtcgtaaattttagttaaatcttacgtaagttcatgggtacacgaaaaaagatcaggatggagcggttttgagctggttgaccagttcgtcgtctccagaccataagtagggcggcctcgtagtgtcatccattccatatactatacgtagtacagta

SEQ ID NO: 50321 - DNA, 550 bp, Zea Mays
tacgacagtcccaagctctatcgcgtcaacgggaaataaggtctgttatccagatgatgacattgcaaggcctgtggcatgaacactggttataagatatggtattaacaatcatcgtacgaataaagtgggcacaagccttgcgatcccaggacgcaagttccatggaagcgacattccttatgattattgcagggtagaagtgacgacagtcatccaaggatccaaggatgacatgctagacatccctagggacaaaggtattgagacacttggacaagccatcaagaatttcatccgttggcctcaaaaggatgtcgaattggttgatccaccactgtcgtcgtcgtcgcatccccaaccgtctccgcctcctcaaattgtagttcttattgtacatccatcatcacctcctcaaacttcacatgctgctcctcatcctctttctgacccaccgtctccaccacaagcatcgccatttagagctccaccaccttctcctcctcatcctcttggagacccattgcctatgccaccagcaagggatcca

SEQ ID NO: 50322 - DNA, 356 bp, Zea Mays
cgaccgttggatctccttttgatggccggatttggtgactgtgtaacgtttcgggtaggagtaacgagaaccgtccgatcgggatcggatgatggtcatcaccctgggattcattaaatcggtaccgtagatcctagatcgggcggaccacgtcgcgtaccgcttcgcaggcagctggatttaatctggctcgttcgcatctaatccaacggctaggatctgtccataccccttcggccttggcgttttgcttaagagccctcgggcttccagagaatcaacccgccatccacgagagctgtgctctgtgtctgcggagttttactctgaagcccctgtagttcacagaaatggag

SEQ ID NO: 50323 - DNA, 784 bp, Zea Mays
gcctgattggcattgtttgaagaattacgaagacacttgggccttggatcttaaataaagaatttgtgcaggttatctatgttccacgaatgctctagctcttcgccagatgatgtggcgagcctgtaagcgtttggtgatgcttttgccttgacgatgtatggtccttcccacttcggctcgagcttgccccgtgactctgtcctgacggttcttgtgagtactagtctccttcttcgaattctctcggacgacattgttgtcacgccatgccttggtctgagcataatacttattcagggcctgtagggcaaggacatggtctccgtcgatgagatctttggacgttgatcatcgacgtcgggggtggctaattggtttgtttgtggggatccatgctttaactcttgtggtgtcattgcctcggatccgtacatcagacggaaaggtgtgaacccggttgctctgcactctgttgtgttcggcgcccatatgacttcgggtagttggcccacccatttgccctttttgtcgtcgagtggtctcttcttgatagcgctgaagatcttgtcgttggcgcgttcgatgacaccgttggactgtcggtgatagacagaggcgaacactgccttggtgccaatggagttgcagaactctcggaaatcctggttgtcgaactgcttgtcgttgtcgactgtcagctcggatgggactccgaaccggtggacgatgttctgccagaagaatttctgcgtggtctttgctgttattgtggagactgctc

SEQ ID NO: 50324 - DNA, 640 bp, Zea Mays
cagaggactcatgaccatggtcatcagcttctccctgtttttctcatcagccttcatataaaaccattcatttttccaaccaattggccactttgtgctgttgctgaggactggtgccttcgaatcctttcgatacgcaaaattgtaacaaccaaaattttcgtgaagaccatctgccctggccttcgtctgatagtgcaactcatgcacgcgacagaaagcttcggcatctgggctcatcccttggctttgaagggcccaaataaagatgatgagcctagcaatagcgttaggagttagctgatgaagatatatttcgaagttctttaggacttcccctatcatctcattcaggggaaatcacagccccgctctaaagaagctcttgaaaaccacaacttcatccttcttcggcactagggtagtctcttctctagcaaatcgaacaagtttgctttcaacttctccaaaatagcccagtttcatcatcataggcatgtcgtcttcagacacagtagatttttcaaaatctagatgactaggcttcgttgggatcagaaaactgtagtcttcttcgctctcaacatcttcaccctcaatcacagtctgctcagcttcgacattagaagtaccttcgtca

SEQ ID NO: 50325 - DNA, 291 bp, Zea Mays
agtgcgctcaaacatggctacagggttaatggcatctatcgaatagtagttgttgagtacggttattgcttatgtcgtggcactaatgtgcttatcaggctgtaacattgcacatcaaagatgttgggagtagatcttgaacatggcattgtgtcttcaaaggtcatcctacccttggggtagtggtctgctatattctcttggcttacaactactcccatacttagttgatttaggaaccccttgtcctctcgggaagccctaggccccaaggggccctcgagacctggc

SEQ ID NO: 50326 - DNA, 476 bp, Zea Mays
gtgagttccaagtgaagatatggtcgggtgtgggagatatggtggcgccaagtcaggtctgtctggactgttcagcccgagacaaaacccatgtcaactcatgtcaaatggttttggttttagttcaatttttccagagtgttcctagggtattttggcgcccttttgtcaattggaccatgttgatttggcgtttgcaactaagtgaacacatgtgatctttagaagagggctgaaattagacttagagaaaaagggggttttcttttgtgcttcccacatgagtgattaatttgaggattttgtgggacctttttgggaaaaactccttactatttcttgtaagtatttgggtatcctacaactttggtaaatgggtcaagtcatgatttggtgatttatatagttctaccactaatcctttcttggtgctctaatggcttaaggagggtagtcctagggtttgagcatttttc

SEQ ID NO: 50327 - DNA, 958 bp, Zea Mays
tttctcactgtctggactgctcctcaaattccagatacaacatgggctaatctactaaaattcacgagactcagactcaacctgcgcgggactgtgggttaaattctatctcattcggggtctcttatgtaaaagatttcggctgaaggggaatcctaaagcttgggccctccgatctaaaatgaacatccacgattacaacacactaactccgaaccggtatttaacccaggccacaggattcgggatctacggccgaaaactgcccgaggcaatgttccaccatggtcgttggatggacgatcgatgatccgagttcaatgggtgaaagggtaatcagccgacttaaccctagccgcccacagaagatctagcggcccacggctaaagcggacgaaggggtatcacccggtctaatctggaccgttcattcacggatcaacggcccacgctacttcttcttcccccggcggcagaacacgaccggcggtggcgcagaagcgcccacggtggcgctcgcaacccgaatcgccccgagcactaccacgacctaaaattatctggtacaaaacctagcggggaaaatggcgaacacgtggagagggatcataccggcaattaagtcacgcagccccctgacgacggtggatggcggaacggcaattcccctgcgctccgatgagcaatccgtgcgacccggcgacaatacagagctccgattcgcccgatacacaagcgatggtgtggtccgaagctctcgaaccaagccctaggcactaatgacgacgggagcgcgagatgactgtggcggcggacctcccttcctctcgactcgcgacggtggtcggtgggtgatgattgctcggccatggattcagagaggcgaggcttggttccccataatataccatgggcgtgagagactaggaggtcagttaccccgagacgtggaccgggc

SEQ ID NO: 50328 - DNA, 841 bp, Zea Mays
tctatcgaaaaaagctttttaaaactaaattattgaaaaactatttgagatctgtaattatgtgttcataagttcctttctatatagaagtacatattatatatacacataagtagatgagagggggcttcatattagtattcgctcaggacccaaaaatgacaggacgaaccctggcagcgtccatctatgtgagattagtggcgccgcccacgccctgcgccccgtggttcttgagctcagcggcccgcgacggcacccctctagccgccttgagctcgccccaccggccatgagcccatgagactgagaagaccaccgctgctcgagagacgacgaggctatggtttagtttagtgcaaggccacaggctagttgttatctgaggccaaatttcattcacccaacaatactatttaaggtctttgcctatcctttttcgttgtccaagctaccagcagctatgcgtatcgcttttggtgatgcctgtatgcatagttgttgggtttttttgtacaaagcttgttcatcatcacccagcaaatgattggggaataataagaaccaaaaaaaaaaagagatggtactataattctggtggccactgccgcctcttgctttattactctccaaatctcggacggaatgattgtaggcttgagaaagtttgtgccctttccttctacggactacaatatccgctccgtatgacacccatttcctaaaacgggttataataataatccagtacttgattcccaatgggttttaaacaagcatccgccgctacatttgaaccctaacctttctctctctgaagacatgattattgcttttttaa

SEQ ID NO: 50329 - DNA, 342 bp, Zea Mays
ttggggtcagcaacaggcggagcacacccattgggatcaatgtcagcaagacccgttgcagtcatttcttcggaagcaggagccaaggtactggcaccctcgtcaaagctggacactcgccggaggcgtcttcttttcttcttctgctcatcaggagaaggctcgggctggctggttcggctagggcgcctcgggcgagtactgacaggtttcgagacacccaaggttgcatcaacctctggaaggggcaccactgccaatgcaccatcaggagcaacatcagatgaatcctcagctagcagatcgagcatgtcatttatatctgcgtcactagggttcagg

SEQ ID NO: 50330 - DNA, 862 bp, Zea Mays
gactaagcaagaatagaagagcaggtcgacagagagggtgtctgcggcgacgttctatgggacgactaggtgttccggagggtgggctttggtaaagttcaattggccggctccgagagcaatagaaagccaaagacaagctagaacatgaatcaatttggtaggtactgacccgaggagtgctggccacagaggggtccttcactgtggtgctaagaacagggcggaggggatttgtggactgtgtgagttctccagtgagattgagtcgattgcacaagtgctcgtgtgtgtgatgtggtgaagaagcagtgctcgggctcaatttataggcagatggccggagatggatgaggttcacggagttgtaaacgcgctggcgagctcacctgcgcgggcagagccacggcgagggtccggtgaccgccgattaaccgagcagcgccacctcaatactttagtgccacatcgcagaagatttttaccgcggccgcagacccatccccagtcgcggtggtggtcttatccccggtgatatttttctgaactccggtgaacagtacgccaatcagcccgatttcaaacggcaatttcttcaaattttatgtgacaacctcatcacccatctgcatcaaagttatagacctataaaccatattcacttttgctatagcaaccctagtcgaattcctactgaatcaaacccaaatttgaacctcaagtgtggccaatgtcactggtggccatacttttctgaaactagtgttcagaactgtccaactggcttctgacagcacaacttcacactcatttatcttcaatttctattcagcaccagtgcttagtcacttaatcaaaattg

SEQ ID NO: 50331 - DNA, 321 bp, Zea Mays
gtggaaggcggacgacatgtgcagcttagtgcccatgagccgcatgagctcacgccagaacgtcgaggtgaacaccgggtcgcggttggacaccatggattgcggcatgccatggaggcgtacaatgtcggcgaagaaggcctgcgccaccgactcgacagtgtacgggtggccgagggcgatgaagtggcagtacttgctgaagtggtcgacgacagagaggatcaccgacttcccgttgacacggggcagtgcttcaatgaagtcgaggccgatgtctgcccaaacgacggtgagaatcggtagtggcatgaggagacc

SEQ ID NO: 50332 - DNA, 442 bp, Zea Mays
ctcgggcccggcgatgagcaggtggcggcgacaggtgtaggctctagcggcgacgagaacagcgttcggcgagggcagctgcagactggaacgatgtcggcgtcgactccaatggtggcttcgtggtccttctacgagaagccaatgagtctggtctgtttgccgtttggggaagaaggagagcgtggggtttttgcaagaaacaatccacatcacatgacaggctgcggggggttaagtgttaaagtagcggtgaccatcggatcgtggttggagggacaggatgggagatgtgcatatgtgcacagccgtaggcatgtgcataagatacgctgccaaagatgaagggtcccaaagatgaacgggagatgaatcggaggcggaggccgaggcctcgctgctgtggcgccgttgtcaattgtcattgaatagctgtcccgga

SEQ ID NO: 50333 - DNA, 824 bp, Zea Mays
agacaatattaatacaaaattattgcaactggaatgggttaaaaaggagtaaaaatagaatttctatgaattaaataagttctggatatatttttatacacaaaaaccatttcctaaatttttttctgaatttcctaagcttctgggctgggcgcaaataacagagagacacaggggttattatgcaaaaattcatgagactcaggattcccacagataggactgcgggttgtttttgaacaaagacaggggcactattgcaaagtttctcgacgaagggttatcggacgaccctggtcgttagattccaaagcgagggctctgattagatcgttatttaaaatgaaacggcaagagattgtgatcgcaggatcatggatcaacggtccgaaatcctcccacgatacgagttggccccagccctaggatcatgaagcaacagcatggatcaaaagggccaaccggtcacatcccagatctaatcgtgaccgcccctggctagatcaatggaccatattttaaataaccgcgatcactctaggtccgtctgatcagatccaaccactcagatccaaccggctaagggggtacgaatcgttcaatctgagccatccaccaaaaatcaacgcttctcccatcgccttcaccactcgactggcgtgggcggcgccgcccgtcttcctcgcagcggagcacaccagagttgtagggattctcccacaggtgtactattctcccaactgtaagatgctacgcgcggaggagatgatagcaaactcaacagaggcgttcttaccggtagggcgaaagctacggggctccca

SEQ ID NO: 50334 - DNA, 474 bp, Zea Mays
gttgagccttgaagtatggccgtatgggtgtgcttgaagtatggccgtatgctgtgttgtcctggcctcctgggctcctggcgacatgtgctggacagctagagtgtataagtgtatttgttgttgtgctatgtatacgtgtatttgctggtgtgctagatatagctatatggttctatggataatcaatgttggtctgtatttggtgccgtactgccgtgtgatgtatttgtgtgcacttgtattctcatggggtgctttatatatttgtaatttgtggactattgtcactactagcatgtgtattgctgtttttttctgacttccaattatatttttgctgaacatgctatattgctatgtaatggaaaacccgacggggacccgaaacccacccgaaacccgatgggtgcgggtgcggctgcgggcgggtttggtcacatttcgcgggtgcggtcgcgggcgggtttttgc

SEQ ID NO: 50335 - DNA, 974 bp, Zea Mays
tggatgtcgaggtattcttggggccattcaccgagttggagtaggcgggtactggtaccttcagctgtggacagttgttcttgaagtgactgggatcaccacagtgccaacatgcatttgccgggggttggttgcttgccactgagggggaatgaaaagagctctgactctgctggctgaatcgcgacggagtgggtccagctggcctactgaagtttggccccttgggtggaaacccaaatgatcgagtcttctggtgccggtcctgctgctgtgcccggagaacctggaacttccttttaagatgccctttttcttcctcctttgccctttcaacttgcatggccttgttggaaaggtgagagaagttgaggaagtcttggctagccagaattgtcttgagttcaggcctgagtcctttcaggaaacgggccatcttcttgctctcggtactgacatcatctggcgcgtagcgggctaattctgtgaacttgtgcacatattcgctgacagatcttccgtcttgagtcaattctcggaactcgtcctccttaagttgtacaagtccttggggcacatggtgctcccggaaagctgcttcaaattccgcccaggtagcatctctgatggtgacgttgaaggtgtcccaccaggctaagccatcccagaaagttggtgggcagccagttgaacacgctgattttctgggcaaccaatggcttccagttttcttttgatcgtgcgcatccaatcatctgcatcgagggggttgcttgatccggcgaatgtgggaggtttgagtctcaggaagacccccattctgtcttgtggtcttccaccattcggccgttgattttccagatttcgagtgaggacctcgatgagtcgggtttgattggctagaacttgggctaggtctaagggtagtggtggaggtgcggggaggtgggtttcactttcttctctaacggctt

SEQ ID NO: 50336 - DNA, 629 bp, Zea Mays
gggcaagcgcccagcgcggatgaggggatttttcggccggttagttgcacctgcccagcgagatttgcgcagcgaccaggaggaatcccgtcgcgagccatgagatgcgcgagttgttgaagatgacgcttctagacagtgggccccacttgtaagcggtgaggttggcgcggcctgagacaagagcgaggctgtccaacgggacccagctgtcggcaccaacacacgagtgggctgcgcgggatgggaatgaagatgggccgcgagcgtaaggtagaggaggtgggccagaatgaaggtagccggcccaggcgccatgtcttcttcttttctaatattttctatttttgttcccctttcaattccaattccatttagctccaaattcaaattcaaaggttttgtggcaatttctttatccacagattacattatgccatgacaagttctaatttgtggatattatttatgtttttatttccctaatatttgtttgtttctctcttctaaatttttgaatctcttctagttttaaattccactttgtactttaacatatttcttttcacattatcttatgttgtcacaaaatgcacacaaaaataaaatcccagcatgatgcaagtttt

SEQ ID NO: 50337 - DNA, 294 bp, Zea Mays
ttagagttgttttgttaattttgcttctatgataaagtgatgcttgctttaatagttgcatcgtgtgatatcccataggtcgaattataggttatgtgaagaatatttcggtggatgtttttgtcacgtatgtttagatgagttatatgcaagcaaaggtggtgtattggttagacgaaaagtagtgtggtagacgggtgtagtgtttctaaggagttagctaataagtcccgtaagattgcttatgatgatttttatgtatgaggtgaagtcgatatcttgccataatagccg

SEQ ID NO: 50338 - DNA, 2233 bp, Zea Mays
attctttcagagtcaagctgggcaatgagggatgaattcaaagagcgtgcaccgtccaaagaagcagaggtctgggccaagtcggcttgacttgaagaatatttctcctcaaggttagagcaccgttgtgccatatcctacaacacaactgaaaggggatgcatagctaagaacaagttgaccaataaaacaactagataagctgcaagatcactaaccagcatttgacgccttcaagtcgtcgatctatttctggagcagcaatgggttccactgcatcagagacagagcttatttgggaacagcagcaccgcaggatctcagctaggcagatattccatcaacaaaagcctgtgatcatagacagatgagcagaagaaagataattcgctaatatgaacaacataaagcaagaggccaactcacctaaagcttggagaggaacagtggtagacccagggcaggaggagttgagtcatggctcgacgagggaagatcaataggaacgatctacagggcactatccagggtaacctcagccccaccagcagacagcaaactccttgcatctagctcgacgacctctaaggtgacttgtccggttgaaactgtggaagcacgaatcaccgtcgccccatctgaccgaggtggggatgacccaatgtggacgtccatggaggcgtgggaaagagagcccacctaaacaccctcgagggctgggttgtagcttgcactacccaccagagctagatcactaccagaaacaccctctggggctgggtaactgccagcaccaccttccagggctgggccttctacagtagccacctctaaggctgaaggctcctcagccacctccatgggagtcaggtgactcagaccaacgtatcggcatggaaggctgccctccaaagtcgatgatgcgcgggacaccgctcgggttacctcttgcccagcagaatcaagcaaggaaagcccactgtctgggacctctgaactgacgaccgggatatcatctgcaggtggctcggatagcatatctttggggacgacttcctccaatacttgatcaaagtctaatattgaatgaagactaacaggagccgacaaagctggagaaggaatatcactacctcctcgctacctctatagtgccgactgttcttgcggatcagcgggacttcttcttcttcttcctcttcgtccttgtcaaatatgcaaacaacaacctgtgcacgagcacaacccttggcatcaaccttaggaagggcctctaccactacatcatcaagagccggagcagaagggcctgcaccctggtccaagcatgacagtcgccgaagtcgcttcttcttcctttttcctcaacaggtgcagtcgggtggctcactcggcatggacgctttggacgggcaccctcgggtttccgagtctccacctcttcaccaagttcttgcccagctgtgatagccattagctcggcgtgggtcgagtcagatgattccccagccagcaaactaagcacaacatctatctccacgtcgtcagtgctagctggcatctcaaaatgagtccgcttctcatcctctagaagactccgaagtggggcaatcagagcctcaatgtcctcaggagagggtcgtaatctaagacacaggataccatcacaagcaggagggttggacacaaactcagaaaatgacctaagtggtggcaggttcctggcagaataggccacaggagcaccagcatttgaaactctacccctcaagatcatgtccagtcggctcatcagatcttcagtgagaattttcctgttcgtcacccgggtagaatcattgacaccactgtacaaataagcagggtacgccctatccttcaagggttggatgttcttgaaaatgaaatcagcaaccacagcctcagcagtcagacctctatccttcagcaagcagacctcggcaagtagtacgttagcctctgctatctttgaaggagtcggagattctatctagctcggtgtgcgaacatctggctgcctccctgaccagggcggagggacttgcagtaattctccacaatgaaccactcaaggcaccaccctttaatgttgtccttgaggggaatgtcgaggtactctgctttcctcccgtgacgaagttccagacttgcgccaccaacaagctagtgctgtcccccagccattccgtgccgataatgataaaggtatttc

SEQ ID NO: 50339 - DNA, 456 bp, Zea Mays
aaacgaatcattttctgacaatgattccaccgaatttctaggcaactttaagccagcaacattcagacaacaccagacaagtactccaggctttcatcgaaacaggccaatagtgcagctgtttactgtagttgacgcctgctaaaattttgttggccagctaagctaaactttattagttctagtccaaactgtagccatttttttaggataagccgaaatttggctttggcaaacactggttggtaaccatgcatgctccaaactactacatctagtccacccgagcaggataggctgaagccactgttacgaatcaacggcacaaaaagattaaacacacaaaaagattaaacacagagaaggcatagatttaacgtgaaaaatctctccaaaacgaaggagaaaaaaccataagtaccggccagcaacgatatcatttttttcgggtggtta

SEQ ID NO: 50340 - DNA, 615 bp, Zea Mays
gccgtggacatccgccgccttcgattcggaaggccgatagggagcctgggcgcagtaggagcttctggtacatgcgggcagggcaaagaggcgggactcggcgattctctgtaccgcacagaggcgatttcggtcggggcatcactgcgcgccattgaaccgcacacttcactagcgacatcgttggtcgtgttcacttcaccggtggtgagactccttttcacgctccgttttattcgtttctttggttgtgcgcggggcgacgatctgtgcactgtcggggagaggggctggccgctgcgagaggtgcgcagcctgggaggcttgaggttgaagaaggatggcgagtcgttgatcttttaagcaacgattgcgattagatagagcgatatcccttcgatggattggaactgggccataagtgcagatcggacggccttgtgcgctcgcgggttcataatggacgagattcgatcctggctctcggatctgatctaaacggtctgaatcttcccataccccttcgcccgagaacacttgcaaaagaacccctctgttttagagtaatcaacccgcagtccgcagaactgttttatgtgtcttaggcaaacttac

SEQ ID NO: 50341 - DNA, 798 bp, Zea Mays
atgaagtctaaaatcatataaaaggccaatggatgagcttgatcaacatggtatctgtaatatgttaatttgataatggatattgtatctttgggcgccagaaacatactataatttatttctttgtgcttcttctaatgaactatctattagcaatgtctgtcatactatataaaatactaatatattagtcatcacataaaagcacacttgttaatattggcgtcacatatacatatatttgtgtcccaaaaagcaccagagtgattcgatatagtttgcaacccacactctctactcaccactaaacactccctccattccagtcatccaggtaatatagattaccttgttaagaaggctcaaagtgttgtctcattcgtctccgtgtggacaaaaacgcttcatgtaacgagagatatattaagcaacatcctcgcttgacctggatcagcaaacaaaaattctcagcggacaactgatgacatagaaaaatgtgtatctctaataaatctgtgaaaatgtaagaacctaagagagaataatgggagccgacaaagagtatgaactacgaagctacaagtacaaactttgcccaaaatctgaatccaggaaaccctagacctcagatccagttcacctgaccataaactaaatgaaatagcacgctgacacaggtagaagaagaagaagaaatcacctcatccgacgatgtatcattggagctgaaggagagacttaccgcaaccgacagtgagtaggtctaccgccaccgccgccgtcgtttctacgcgcgaa

SEQ ID NO: 50342 - DNA, 317 bp, Zea Mays
cgaagtcagaagaggaaagctactactccaacaccacaagacgaggagctagaccaagaaatcagcaacctggaagctattcatcaacatgtgggaaagaggagggaaaagatgcttcagctggttgagctccaaaagaagattgataaagcagccgaggaaatgcgacatattacataggatactgagcaagggcacaaaacgcaacaaagagaccttcgtcaagaaggccccaaccatgatgacatgtggtatgatgattttcaccatgataacattgcttttgatgatgcttccccctagctacagagttgcag

SEQ ID NO: 50343 - DNA, 2570 bp, Zea Mays
ggggggcggcggccaaggcctaggggaaatgggggggcggctgcacaaagaggggaaattagggggagggcagctagggttaatgggagactaatggaccggatcaaggttcaaggcccaactcgcccatgttacagctcccgaccccgtcgcaagcaactaaccaaagaaattctactgtcttaaaggggaatgttttccacaaattccaaattcccaaagcacatcacccgaattaggaaaaagaacaaaaagaataacctccacttctcctctttgctaaccgggtatcacactaccccccttaaaagaatttgacctcgaattctgacgcttctatcggaatgacaaaaggaaaaattaacgaatcaacaacacttacccacaacgaaaagttctggatacttctgccgcatcagctcctcaagttcccacgtagactcgcgcttagactgattagtccataagaccttgatatacttaattgatctcttcctcaaaacacgctccgaggattccaagatacgcaccggacgacactccaaagtcagatcctgctgcaccgcaattggttccatctcaatctgatggtccggatcccgcaagaacttcctcagcatagagacatgaaaaactgggtgtacccctgccatggaatccggcaattgcaagcgataagccaagctgcccacccgggccaagatagtgaacggtccaatatatctcgggctaagctttccagagacactgaaccgaacaactcctttagtgggtgatacccctgagaaggacttggtcacccactgcgaattccaaatcccacctcctcacatcagcataactcttctgacggctctgagcggccaaaatattctgacaaatttttcgaaccttctctgaagtctgctgaacccaatcaggaccaaccagggatctctctcccaaggtctcccagcacaaaggggagatacactgcctgccatataaagcctcaaatggtgccatcttgatgctagtctggtagttgttgttataagcaaactctgccaatgcaagatgatcttcccagctacccttccaagacagtacacaagcacgcaacatatcttccaaggtttgcatcgttcgctctgactgaccatcagtctgaggatgaaaagcgacactaagggaaagcttggtgcccaatgcactgtgaagactctcctagaatttggatacaaatttggagtctcgatcagaaacaatggacttaggcaccccgtgaagcctgattacttccttcatatacaaggggaccaattctgaagctgaattggtggtcttcatgggaataaagtgcgcagacttagtcaagcgatccactaccacccaaatagcatccctgccccgaggaaaacgaggtaagcccaccacaaaatccatggtgatatgctcccacttccactccgaaatttccaatggcttcagcatacctgcaggcctcttatgctcggccttcacgcgctgacatacttcacaggcgaccacgtacttagaaacgtcaacattcatccgcttccaccagaagttttgcttcagatctcggtacattttggtttcaccagggtgaacggtgtaaggcgttttatgagcttctctcaagatatccatcttcacctctgatttctgaggcacataaaggcgacccctgaaacgaaccaaatcattctcatcaatggagaactcccggggtttaccatcgccaaccctctttcgagcttcctgcaataaacgatcctgctgctgagccgcacacactctctccatgagggaagattgaataagcatacgagtctcctcactagcggtgccgacatagcaaacagcgatccccaaacggtccagaccagcaatcaactgcaaggccacttttggaaccccagacctgctaagggcatcagcgaccacattgccttcccggggtgataatgaatagacaaatcataatctttaatcaattcgagtcaccgacgctgcctcaaattcagctccttccgagtgaaaatatacttgagacttttatgatcggtgtaaatgtcacaagcctcgccataaagataatgcctccacgactttagagcaaaaaccaccgcggccaattcgagatcatgagttggataattcccctcatgcttcctcaactgccttgagccataagcaatcactctgtcttcctgcatcaacacacagccaagaccaattcgcgaagcatccgtataaactgtgaaacgcttaccgctcttaggcaaagctaggataggggcgtccaccaacttgctcttcaatgtctgataactaacctcgcaatcgctggaccagacgaagagaacacccttctccaaaagtctagtcaaaggcttagcaatgctggaaaaatttggtacgaagcgccgataatatccagtgagccccaagaaactttgaatttcagagacaccagagggtctcttccactccaccacagccgcaacattcttgggatcaaccgcaatgccctgctgattaatcacatgccccaggaaagccac

SEQ ID NO: 50344 - DNA, 752 bp, Zea Mays
ttaaatttggacaatacatatggctccagccgtattgacctggtcgcgacacgcaggtcatgaataattcattaatatgcatcatatacacacaatagccataccaccgatcacaagatgttctacaaaaacaggttagacaaacatgtttctatatgttcgccactacaacagatagccacggcggtcccagggcagcgccctgaaaacctcacatgattccatgcatcgtatgtatggaaattccactgaaaatatcatgcgattgatcaaatcaacccaaatccgagactttcgacccgaaggagattacactcatgacgtcgatctattacgtcaatttgctggttgtgtatgcagttagccccgatggtgattccagccggtaggggcaagtcacacacataacagagaaggatgaactaatctctttagtcatataagatgtaatctactccaaccccttagaaccaaatgatctaatcacaccgtgcatcaagtagatccatctcatgaacctagatccagaactaaaactacgcagaacctggctccgataccactgtaggattatggggaggctacgctagcaaaaaaacaaattttttgaccccataaaccaagaactactgcggttataggtcatggaattaccactagacgcgcagggcagcggaagacgtctcgatgttgacgaacacgtcgagcagtgccgtgcagtcgtcggcgtccttcacgtcctagcgtggttc

SEQ ID NO: 50345 - DNA, 499 bp, Zea Mays
ggtaattgtttatgcaactctctataagtaaaccaataatgttgagagcttgtctatatcttaaaccaacattaaaatctagtttactgtaactattgatgaagtcatatttagatcttctaacaaactcctatatttgataatcttggtttccacaaaaacaaacaaaatgagtattgttacataacagtaccatggtacatagggtaccagaaaaaagagaacgttaggagggagtatgacacatatcaatggtcacaatgaacgtaggaacaagtgggggccaatttgtgggcagttagtaaggtttttttactgcggtgtatgtatgtttttttgctacttatcgataaataaacacaggggatgaaaagattaaaaaactcgaactctagtgagcatcaagaccttatagctccctctcaacttttggctatggtgggcctaacggtcctaatgcacctttatatcgacccttataacaaaaaatctagtgcaa

SEQ ID NO: 50346 - DNA, 612 bp, Zea Mays
gcagcagcaagcaaaggatagaaaacagacaacacaagtaattcatgcagccaggcatggaggatacacatatctagcgcctctcagtttcaggagtatactcagctaagtcgggttatgaaggcctattcaggcgggctgtcctgtttatttaggccatgggaggcccatagagaaatcatgggcaactcacaaatgtcatttcttcatgtagttagttgcacataacaagtgctggactgcttatctacttacaggacggggtctaatacaccatcctcgatgctcacactgatcaggctgaagagatgatcaccagtgtttttgcataactaaagagctgctacatcagtttgagattgctcaagatagtagacctttctcccttttggaagtatggctaataaatttgttgaagacacatagccttgccttggcttctttttatgcaaaatatggccagaatgaaatcttgtattgcgtggcttgagggtgataccaacactcgcttgttccatgctcaggccagtgaaaaaactatattgccaatattatcgtggatgatggtcaagtgctcgcggcccatgaaaataaggctcaggcattctttag

SEQ ID NO: 50347 - DNA, 323 bp, Zea Mays
tcaaaactgcacgcttaaatgattgcaagaggttgcacacactttcttctcaagtattctcacaaggcactatcgctcaacgcacacaagtagcttctctagcttaatcttctcttttgtggcacttgtgaggctttgatgtgtatggaagtgttgctctagtgtataggagtgaatacccagctcttgtattgaatggataggagttcttcttgtgaatgggctagttgagatggattttgtagccctcaaccacccatatagtcgttatggcacatctgccaaatatgtgcactagcggacggtccgcaaccctccaacgg

SEQ ID NO: 50348 - DNA, 923 bp, Zea Mays
ggcaggcggtgtatctcccctctgtgctgggagactttgggagagagatccctagttggtcctgattgggttcagcagatttctgaaaaggttcgagaaattcgtcagaatattttggcagctcagagccgtcagaagagttatgctgatgtgaggaggcgggatctggaatttgctgtgggtgaccaagtccttctcagggtatcacctactaaaggagttgttcggttcggtgtctctagaaagctcagcctgagatacattggaccgttcactatcttggcccaagtgggcatcctggcttatcgcttgctactgccggattccatggcaggggtacacccggtttttcatgtctctatgttgaggaagttcttgcgggatctggaccatcagattgagatggaaccaattgctgtgcaacaggatctgactttggagtgtcgtccagtgcgtatattggaattctcggagcgtgtattgaggaagagatcaattaagtatgtcaaggtcttatggactaatcagtctgagtgcgaggctacatgggaacttgaggagctgatgcggcagaagtatccagaactttttgttgtgggtaagtgttgttgattcattaatctttccttttgttgtttcgatagaagcgtctgaattcgaggtcgaatttttttaaggggggtagagtgtgatacccggtttgcaaagagaagttggaggttattctttttgtttttttctcattcagttgttgtgttttggggatttggaatttgtggaaaatcattcaccagtagggcagtagaatttgtttggttaggcgcttgcgacggggtcgggagctgtcgcgtgggcgagttgggccgcaattcgtgattcggcccactaaccttccctaaccctagccgcccttttcccctaac

SEQ ID NO: 50349 - DNA, 582 bp, Zea Mays
cgaaaaaaggctcaccaattttccacccttcgaagaccacgacccgaagtctgattccctcgacacattaccactaagagacatcacatttgcatccatcaaaatatcatcactcatagcatcatcagggtttgcttgcgcaagctcggacgtcggaacttgcgcaacaaccgatcttcagtatcatacaaaactaacactatcagtctacccccattacattctctcaacctgcgtcgaagcatctgccgtcgtaggaccctcaacgacacctcctggaagcgtcgtttgctcttcggctcccgcctccgtcgaagcatccctctaggtcaccgagctttcaaggccagcgagttcctccacatcttcttcgttcatcacctgtgaagacagcacaacaacattttcaaacaacgaacacacacaacacccctcgcaaaaccaacaacatacctgcgcagcgctcggtctgccctttcccggacaatgtcgcggccgtggggaccccacatcctatcataaagcgccccagcggagcgcttcagcacgtcatcttcaatctagaatactccacgatcgaag

SEQ ID NO: 50350 - DNA, 466 bp, Zea Mays
cgggaagatgaattataaaatgagtaggatatagataggttagaggacacgccttcaccaaccagcttttgctcagggttttctcctgcaacttcctcgggctccgccaacggaccattacctatatgagttcaaacatacattccacattcttaacatagaaatgaacaatgcaccacacaataaaatagaacaactaaacagacgcatggcgtagagctcgcatttacgactatgcaagaaaaagaaactacgacggtcgaagctacgaccgagagacatagcgattatgttaagcagttatgcactaaaatatttatctcaacataattatattaattgatattcgtgcaccgcgtaaataaaattagcactagatcctatttagttcggtaggggagccaaacaaaattgtccacggttattggctatctctggcagatcttctatctcatttcctattcaa

SEQ ID NO: 50351 - DNA, 471 bp, Zea Mays
aagaagcaggcctcatcattttgggcttggtccaggccggcggcccgtattgcaagacacagacctatagttttcgctggagcccatcttacttcaatctaccggccggcctgctcagatcaggttttcagcctagacagaaaataaggcatttcaggtgtccgagcatttctttgttgattcacggatcttgagatgatcctacgtaataagtaaccaccgaaaaatatatatagatcgctagtgcatttacatagatcgcgtctttataagaacatatatatgtcatgtcacaaggtgatcacatgttccacgtataaagtcagattattcccgagatgccaatactggtgattgcacgagtagtctgtttcacttgtcatttcagaggtgggctagaccgctagagtgtctcacatatgtatattgttcattgactgatttgattgagacaactagagaagatcagac

SEQ ID NO: 50352 - DNA, 322 bp, Zea Mays
ctagatcgagctatcaagcctattttatcttggaaaacaaggaggagtgtgtgggtgtggctagctactaaacaatccattctcattcctcgttctcaaacaagtaagggtacaacaattaacttgttcttcggcgtgcagctgctgctaggatgaggtgcttccgcatctgctcagtctggtagttggacaggaacttcatgcacataggcggctccaccttgaagatggccagcagcgaagacggcagcgcccagagcccatcgccacagatcaaaccagacgccaccacgaccgacagcaggttcgctgcctgcttgtt

SEQ ID NO: 50353 - DNA, 399 bp, Zea Mays
ggagagatgggcctcatccaatattttcttcttgagatccttatttttaggaaccaccaatcttctttcaaaccacaatataccctttccatcttggcggaaacatttatacttctcagtcttctgatggaggttctccttaatgatttgtactcccttgtcactgagctgggccatgatgatctgttcttgcaaagctggctcaacggaaatgtgagacaaagcaccagaaggaatcacttcaatctttattttgctcaactcatcacatagggtgtcaatgcgagaatccatcctgacacagttgcattgcaatttccgactcaaggcatctgccaccacattggcctttcttgggtgataatgtacctccaggtcatagtccttgatcagttctag

SEQ ID NO: 50354 - DNA, 883 bp, Zea Mays
gttcaatcagaggggtcgaggagcttgaggagaacttaaggacgctagaacaaacgaccagagagcttgaactaacctggagtaagctggtcgcggcgagggtgtctctgcagtggcggaaacaggtttgggggaagcaagaaattcgcggtctctggtgaacgatttgaggcaatagctggtgcgttggcttcgtgataacatggcgcaacagacccgaccatcaatttatagtatcgctaagcagtggccggggatttggatgaagacgcgcagcggtcggaggaagaggaggtcactggcgcacgggattagtggatgtacccgtggcaaccttaccggcaaccgctggataggccagcacgagtcacggcggcgtggttaaagtgctgaggcatatggcatcagaccgtgagatgtctaacattggcgaggggtgattcaaggtgatcgggattgagcggacatggtggccggaccaaaagtgcccaagactcatctgggggaaagaagatctttttacccatgagcgttatccgagcgccggtgagcacgaatctcccaggagaaacccggatcccagcacgagctcaccagcgatgggtgcactgcacctacgatcttcttcagaccactattcattctaaatctcccttcgaagttgcttgacaacccatgtttgagccacaattactccctgctctaggcagtaacacacctacctttctttgacaaagttgtactccaatatatggtctccaaccttgtcatagtgacccaagtcttaacttcactggattagtcacaacttgactccaaagttgatccaatgtcactgatcatccaattttcagactgttttagtctgacagcccatctttgg

SEQ ID NO: 50355 - DNA, 326 bp, Zea Mays
gacaacacaacaagccttcgtaataagcgcaacaggcacaattatggctcggtaatcggggtacacgataagtccacgcaacatgcgcaacaggcgcaattgtggctcaatgatcacggcagacagacagtgcctacatggcatgcgaaaaatacgcgactcagcgatggcggttcgactcaaggggagctgtccgattaaacgagagtgctatatagcaatcacatgacgcagccaagttcgtacgacacaaatattgcgacgcgttgccaaggcgcagtcaatattcagctaatgtcataactcagccgataataacatagttt

SEQ ID NO: 50356 - DNA, 637 bp, Zea Mays
gaggagccgagctaggcacccttggaggctaggtcatcctcggcagcaccctctggggctgggttgtcctaagtggcaccctcgggagctgaaacaccctcgaccatacccacaggagccggttaaccctaacctgcaacgtcaggagccgatgtgtccccatgaactaggccaacctcaaaggtcgaggaagcgtgagaaactgtctgggttatttcttgcccgactagattattagctaaagggatgtcgtacgggacctctatacgggtgatagcaccctcagtttcaagaagctccaataaaagatcttcagggataatctcctctagtgcatggtcaatggcaaacatcatcatcctttggagactaaccagtcctaatggagcctaaattgggatgtcgtcgctgtttttgctatgactgttcctacgaatcaaaggggaacttcttcttcatcctcttcatcctcatcaagcacacgtctaccgactctggcaccaacacaactctcaatatcatcctcaaggttggcactcgctaagccaccatcgaggactgggatagtagaatcagtacccaactccaagtcagatgaccgtcgaagtcttttctttctttccttcccctcagtagg

SEQ ID NO: 50357 - DNA, 341 bp, Zea Mays
gtgtgatgttgttgactcctccctagtacctggccccccacctgggatgcaggcttgatgtgtcgaggttggataccagcatatctgaaagggttgtcaacaactctcgggaggcagcctcggtcgggatctagatctgtacacagcttcagctagggagcgttagtagtacacccttagggtcccctgtctgatattagccatcctttgatacatgctcgggactcgcagggtttagtccgggtggccaagttgcatgtccagacccccttgggtcacggctctaaatactaggactcctgtcgcagggtggtggagtgtgtaggcttacggtatgggac

SEQ ID NO: 50358 - DNA, 756 bp, Zea Mays
ctcggaaggaggtaactcttgagatattattttccgattgttctaactacgattcatggtcatctagtgtactaaatgcttttagaactctagatcctcgattagaacaaattatagacaagagtatcattccctctgattatgatgcttccgaggaagatcaaagatgtatacgcttaaatcatctagctattgacatcttaggtaattctcttagcgaagaagattatcatgccttcattacaaattatgatgaacatattcctaatgcgcatgatatttggactagaattaaaaataaatttgatgagtccaaaaatgtaacacccaaacttgtatatcatatgataagaggttattcccttgaatattttgtctctatttaatggagcatgtgaacaccacgtttaaaaacaaataattaataaaagatataccacaaaattttgcatcatgctgaggtttcattttgtgtgcattttgtgactatataaaaaaaaattaatgtaacaagaaatatattaaggccaaaatggagttttagaattagagaaagaaagcatggttaccaagaaaaaatatattaaaaatggataaattcacccataccatgtctaagttgaatatttaatggggaaaacaaatctaccaggaagttggaattcaaatggaatttaaactttctgaatttgaaaatcaaaaaggaatgggaaaaaaataaaagaataaaacaaacccaactaaatgggcctcgca

SEQ ID NO: 50359 - DNA, 527 bp, Zea Mays
tttgcattacttgaattaagtggtctttctctttaatcattagcaaaaggtatgggtttacttcttcttcatgggtttgcatttttctctggtagtttacctcatcatgagcttagcaaatttttggttgtctattatcacattaaaaggggttgttcatgatttatttggaaaatgccttattatcaccttgtatttattttctttacttaaaaagttgggctgaggtgctctgtatttttgtagtggggctctggtggttataagtccactagatttttattaatcattttggttatagttttgtaactctaataattgattttcagtctatatgaggctaaacaaatcatcttaatttaaaactggtccaaattaatggtctctgtatttttcctaggttctctgttgcataagtaaactaggaaaatattattaatcactgttcattaatttctaaggcctttctgagtttctctaagttttggacaaattagctttaaatgaaaaactacatcataatttcc

SEQ ID NO: 50360 - DNA, 544 bp, Zea Mays
gcgaggtgggacgacaaattaggttcccaccgagcaagtccacgagatagggcgactgaccaggtcccttccgagcaagtctgcgaggcggggcaaccgaccaggtccttgtcgagcaagtccgcgaggtggggcgaccgatctggtccctaccgagcaagtccacgaggcaggacgaccgactaggtacctaccaagcaagtctgcgaggtggaaacctaagtccagcatcgcgagtctgcgtcaactatgataagatgcgtcaacctaggccgcagccaggcatgtgaacggtaggtcgagggcacaccgaggggtcactatcgacatgactgcaccttctcaagtacgacccgtggtgcaccccactgccctgaggggtcagtcgaccctgttcattgagacctcagcaccagagcttctacagtgactcaaatacccaatagtgcgcagccgatactccataccgggtgtatgcctatgcatgatggtgagtgacataatgagtcccggtggttcaccattcagagtgagtccatgctag

SEQ ID NO: 50361 - DNA, 544 bp, Zea Mays
cgtggctctgcctttccaccgcgtcgccgtgactctctatggccgtctaatcgtcgccggtgaggtcaccacgacggtagacacgagttcatgcgtgccagtaactccctgcccctccaaccgccgcgcgtcgccgttaaaattcccggccgccgctcttgcttcctataaattgagccctccaccagccccgcaaggtcatcagccacccagccaccgagaatcgctagcaatcgtgcatcagtgagcttgaatttcggttttcccccaattcgggtttccgccaccgtgaaaccaacctcaccgcgaccagccccgttccggtccgttcatcctcccctctccctcgtttgagctttctcataactctatgatgctcgccgacccacgcaattgagctagaaaccctctggtcgccgggaacacgggtgtctcgccgcaacactctcggtcaccgtggccagagccaaccaggcacccaattgcgaaattaggttaggggaattgatcggggaaggtccaatttggcgttagttgctcgggg

SEQ ID NO: 50362 - DNA, 293 bp, Zea Mays
gaagaacacacagagacaaaggcacagaggactatgaaggtcaaagccaaggagcacaccgccacgacgcccaaagtttagctaggaagaaagcaccagattcgtagccctcagtcctcaccatgcataagagacttgagagtctcctccctctctcgaccgtttgtaacccctgctacgagcattgagcatcatggtgtcggtagcacaagccaccgaagactggatgcagggatgttctgtctgagccagtataaatcttgcgcccaccgagcacaccatccggacccaga

SEQ ID NO: 50363 - DNA, 518 bp, Zea Mays
gttttcatttgaattaggcatagggaatatgatgagaacatactcctttcctaggttatataatttatgcattcactatcaagcacccaacttaatccaccgaaggagtacacctacaaaacaaatcaagtttctagtttaggtccccaagtaggattggggccttgcatgttagtcacaagtatattaggaacccaaattgttttcttcatacatatgttagtctaattcccaacatacttggcaacaactttaccaaggctgttgcgcctaaaaacaacaattttccaaactatctagagatgcatgtgcctttggttgatatgcatatttgtttttgttgacctaaatgatcaatttggtttttttgggaaacattcttttgtctaggcacctttcttgtatgggctttagcccgatcaggggatatattggtgaccttcccttttgtggggcacaacactgcttgagagtgcgacactatcgtgtgttgtgcaggttgagctgtactaatctac

SEQ ID NO: 50364 - DNA, 334 bp, Zea Mays
gtctttaatgaagtgtccagacttcccacaattgaagcagccagtagatgaactcgggagggcagggaaatgagtaccaggggcactcggctgatttgttgaggtgggggcagtggcagggtggataaagataggttgtttaaaggggtaggagggtggacatggtgaagaacggttttgattaaaaggtcggatcatcaacctttgtcgcttctcaggcccctagttggacctgtcacctccatagccctttgacttgcctaggcctgcatacatggcttcaactgccagcgccgtgctgacagccctgctgtagaagaggtcaaggcaggtg

SEQ ID NO: 50365 - DNA, 579 bp, Zea Mays
agttcaattaactccctctacatgatgtcaggtgaaaggcgaagcaaggggagggagtagtaccggcaggcacgacgcgaagttccctggccgcggcagagggtgttctacgacggaggaggagattccgatgagcgattaatggcaccggaggcagcgatttccccgcaaacgcctcggacggcctcgaactagctcggtgtagacccccgacccctccaacagcttcaagcggcggtgaatggacgggagggcacggcggcgccgctcgtcccttctctcggtgatatggtggcactggaaatcaaggcggttgcgaacctagggaagctatggaacgggggaaggcaagggcggctggtgctttatctcctggcacggtcaatcggttcgtgcgcgctaaactagcgccagcatcgcgtccgccattcacgcgcggtcaaatcggcttcggttgaagcgagcacggcggcgagaagatctacagggcgcgctcctgacgtgctgggcccgcaagccagtgagaaaggaaacgagcccgccgcagggagtggctgacacaccgggcccgcaagtcag

SEQ ID NO: 50366 - DNA, 664 bp, Zea Mays
tacaacgaccagagatcgtcaaagaataaatgccgcacaggatctatattatctttgctccaaaatgcatcttctggcacaacaaatgtgaagtcctcgagtttgtatttgttgctagccaccatgtaccactcatgcattctaatctctggagtcaacaacttagaaaggtgcactgtcgtcaagaacggcctcccattcacaaatttaggaggaacagcctccttcttgtatatcgggatattgattttaagacgtaatgattctcaagtatgaataattccatcttcttcccatacttcgaaattgtctatttgggaccgtgtgcgtactccacgagatgctgattccgcttttgattgatctgtcataactctctgcaatttttgcaggtagcgtgtcactgattctgatggtttcttgacattgtcagtggcgattcgctgatgaattgtctttgaagtagttggcccttcaacattggtgtcaacctttgcttcctttttgatgtttgcatcaacattctgaggaacaattttgtctacgtccccctcgtcgagttccttcacaagaggtgatatgattgtttcaacgatttttgtggaggtcgatgctatattttcctgcaccatggggtatggaatgatcgaactatctttctgtt

SEQ ID NO: 50367 - DNA, 843 bp, Zea Mays
aaaattattaaaatgcatgtgaaggttatatagtgtatactcaaatcgctctaaatatttgtgttgcgttgagcttttgggctcacgtcgagcgattaaatgatatagtgggtattcagacacgtcgatcagactacatttttaattggctgagctatggcattggctaagccctggcaacacgacgcattatttgtgttgtaagaacttggctgcgtcatgtgattgctatgttgtactctcgcttaatcggaccactcctgttgagttggaccgacatcaccgaatcacgtatttttcgcatgccctgtaggcactgtccgtctgtcgttatcaccgagccacaattgcgtctgttgctcacgttgtgttgacttgtcgtgtaccccaattaccgagccacaaatgcgcctgttgcgcttgttatggaggcttgttgcgttgtcgtagcctagatggccacacacgcgttgacgtcagatacgatagagcttgtactcgcgtggattgtggtgggtcgttcaagccctaaagtcacattatgtgcaaccttcgtaaacaattttgtttagccctatattttatttgcttgtgttgtttggcatcatatatttatttatattgccaagtggccataacaactatatcaagcactatagtgcttgaataatcttggaaattaaattgaaatacaacagaacatggataagttaattctctgctctctcctcatgcataaagttttacccgaagtaacccgaagatatataatataatgcatgaaagcctttttggcatagaaaatatcacaaattgggattatattagtaagcaaaatgacct

SEQ ID NO: 50368 - DNA, 459 bp, Zea Mays
aattttttgtgtgtaaatatatatactctaaattttgtccagcacaattaatcaaaggtttaatatagtggttagtaatatatgattcataactctgttgtagtatgccaaccaaagtctaaaaagacaaggaatataagataaaatattcgttaaatgataaatcgatgcataaagcgtcaaacctaattcgcttcagacgctaatatctaaatctcacacctttatgattcattctatcgtctggctaggcagctacaattgccgctgaccacttgacttgcctctaccatatcctcacaaccaaagtccaaagaaggtgatcacgcgaagcagcagaatgagcgccgtcaacttatatacatattacattagatctcgtggataataaaatctacaaatttcaactaaagttgttatcttctaattggtgtgtacacgacaaatttgacgtgtacc

SEQ ID NO: 50369 - DNA, 539 bp, Zea Mays
tctaggtcaccggcaatttgtcgtcggcgttgctcaccgtcgcgaagccgcctcgcgtcatgggctggtacttctccgctacacgtgccggtaagaaccctattgtgatcttagttgttgtctacgcttcgcttggatcgatcggatttggagctttggggcagtagagcggggaccatacatcaccggcgatggtgccgccgtggtacctctgcatagtcgcccttgagtcgttaggtaggcagggccccgtggccgtagatctgaacacgagcagctgtgattggggcctggtggccagttcaggcgggtgaatgtggttcgcccgatctgcatcgatggtgtggggttgattggctggttgctctgatctcggccgttgatcaccaatccacttgcccgcgtcccataccgcttcagtgaaacctagatctcatcctgaccgcaaaatcataatcgtgtggtgcagattctaagttaccccttcggcctcgtccgttttgcaaatgagaccctgtagttttattgaatgaacccac

SEQ ID NO: 50370 - DNA, 457 bp, Zea Mays
cagagtaccgattacgatggcttatatgtggagcttggtggggaatagtaaacaaggaatgcaatctgaatcctagttgttgtaatgttaaataaccatccaactagaagttcacggcctagtgctgaccacaagatacgagtgatgtaagtagatcaaacacacgcgcaaagaattttcagatttgatgcaaatcaaggagtatggttggaatgcaagtgttgcgatcagacccaacaaaaattttgcaccaaatgacaatagcaaactggttgaacaacttgatgaactttcagcactcataaacaaattgatcgttctacatttctttcacaatcttgttcaacacttttttgggtacttttctttcttctctttttttgatactctttttttatagaactaaacacagagatctgatatgatattgcacactttataatacttaacaaagaac

SEQ ID NO: 50371 - DNA, 1143 bp, Zea Mays
aatccattgatattcaggtggtgcattcacttgatatggaggatctgagcaagaagtccatgaccaatctcaaatggttttctcagtttcttctcccataaataaaagggatagaagatggtgacgttaaaatcagctttccacttcaggattttccaagctgacaagcttcatggccagcgtgatgctatccagggcgtcatataccttctcagatcttggatgcgatttatcttcaaccaggaacttgtgcatcctaccatctaactcaataaagctgtacccagcagatttcttgtgatctttttcctttagcagcttccacacccgggcaacaccgtcccatttgccacatgacgcgtatatattcgaaagaatcactaggttagctgtattgtgtggctccaggtgcattagtttttccactgctatttccgctagttcaaagttgccatggaagctgcaggctccaagcagggctccccaaattacggcgtcaggctccattggcatgctcgcgatcagactgtcagcttcttttaacaggccagcacgccccagcaggtcaaccatgcaaccatagtgctcgattcttggcttaagaccgaactcccctctcatcgagttgaagagcagcttgccttcatccaccaagcctccatgagtacaggccaaaatgactccaacaaatgtaatgccatctggttttgcccctgtcatctaaacagagtaaaatcagctccagccctaccaactacggtgcataatctggatttaaggttactggtcactagtttggtgcttcgaagcatatttggtcaaccaagctggatgcaaagcgaatgaagcagggataagaagagaagtgcaagcaagacatcctcaccctcagtttatgaaacaaggccagcgcctccgtccagaggccatgcacggcaaacgccatgatcatggagttccaagaacaaagatccctccgcgtccccatgccccgaaacaccttccaagcccggcggatgctgccgcacttggcgtacatctcgaccaaggcgttggcgacatagacgttcctgagcatccctctccccctggcgtagcgctccaccttcctccccagcgcgagggccccgagcgcagcgcacg

SEQ ID NO: 50372 - DNA, 854 bp, Zea Mays
attttgcctcctctttgtagccagaaactatcccccaatttctcgagatttttttcagcgcatttctggaccttttggttgaatccactatatcgctctcgtcctttgcctccaccatgttgccaaatcggtgatttagggacatccaactttttgatcggagatctgcaacgttggtatgttctgaaatgaattccccgttgaatcttaaaaatctggtgcaaatgtgaaacctaaatgtcacatttacagtttctaaaaaatgttacatttatggagttattttataggaaacatcgagttatgtgatcaattggagacctatttgtttgaccctagcacgcaattctgagaaacatggtaacgacatcttcttctgcattgctaaagtttgcgaggacaattgtggcctctcgttgcattggtgaagtttgcatgtcgaagttttcgtgttttgaaatctcatattggcatgggttatcaagattgtaacacttcttgttcttcatcaacaatgtggtatgactatactatcttagcgcctcactaatgggaacttcataggaaaaataagattttgtagcgacctacatgtgaattggggtgtgttcagcttcccatggctgtgcaagcccattcaaggccacagaatgtttcgcggcaattatggcccgtgcttcaccatgccgtcagcgagtgctgcttgatcataatgctcgttacgactgctgtgttgtcatacatggccacaaggttcgcacgcatgtgcagcctccggtcaccatgtatgttatgttcgaggttggatcaatttctacatggcaaggcatggttctctgaagaactagtttgtg

SEQ ID NO: 50373 - DNA, 309 bp, Zea Mays
ctagaaaataattatcctcgtcactatcattagcttgaagaataagttgatcatgtgacagaactagcataacgggttaaacattaaccactagcatcagagcagcaggctatgaccaagttgaccaaccatttgttgcccctaattgttgcatgtgcaacttctagattctaattgactaaatcttctagattttcaccctcatcttgcaaattctcatcatcatctagaagtggatgtggattgccgttggggggagctcatcttccgaaaactcaagcatgcccaaggccattacccattggacaa

SEQ ID NO: 50374 - DNA, 471 bp, Zea Mays
gtcaatggggtcattaggatttgagctagggatcaaggtgaacacgcttggtctttggctcaagctccgaaattcagaattctgaatttcagaattccctattgagtccccacttgagaagcttgcttggggttttatttaaattattttggccaagcttccttaatctttattgttgcttattaaatatacttcaatgtttatatttggcctaagccatgattctatatttttcatactcttttacctcttttcttcaattttatttatagagctcaattagggttgttattagggtttcaacattttgctttttagaaaaactcatttgttttgatcgtgatgattttaagtataaacttagtggatcctttattcttaagtcaatttgatgcttcatgcttaatttggctcacaagaaatgatggctcttgggttagcacttgagagaaaccctgggtgacactgggg

SEQ ID NO: 50375 - DNA, 395 bp, Zea Mays
caattatctaaacaaagctgttgagaaatcgttcttgtaattcatatataggaacttaatataacggatatacagatataagaacggacacttctggtgattataggtacaagaaggtactagagtatgatctagctcttatttagggagtgtttggttcgagagccagttgggatggagcagctccgtccgaaagatttaggggagccagatgattcaacatctaagcaaaatattaccttttgagagtcactccatcctatatggaactaatccaaacaataataaattaggagcaaaacgcctccgcctcaccataatctggaactaaacactaccttatagaaccaacgacacaccgacgagcaggcaccactacccattgcatacccccg

SEQ ID NO: 50376 - DNA, 357 bp, Zea Mays
acaaaacttgaaatatctgatattgaacgatcaagggtacagaaaaatgtcgaagagcttcgtcaagccaaagagaagtgttacaatgttgctacggaatgagctaagaacttaaagaatagcttctctaaagtcagcgcattttccatagagcaaaagtttatccacggtgatcctgacggggtaatccgctagatcaacgacaaagttgaagcttttgaagagattcttagcgacagaggagatttttgtgccttcgtcggtgcttgtgggaccgtatcggtccttgaaagggtcggctgcgagcatgccaaggctgtggtgcagctaggattctcactttcagccgacgacatt

SEQ ID NO: 50377 - DNA, 720 bp, Zea Mays
gccatctgccagggggagagagtcactattatgcacatgccttttttccaaccaagttattttattcaatacaccaataaattacaagcatacaactactacaagtcgtactacacatgagcgttttctgaggtactaccgaactctttttctaacgtgtccccaaattccttgagaaggtcatcaaggctagctagggacatatcctcgatgtcggacaaattctctatcctggcgggagtttgtgctggaggggccttcttcctccgctcagcttggcctccttggttcttggtcttcttttggattttctttgtgggggcgagcttccttagcttcttgtcataatccatcttcagggtttggtaggcttcacgggtgttggcctcctcgccttctactatatcgagacactcttggagggatgccttctccttcttaagttccttgacctgctactctaagctttccacccgggagtttaggtgggtgcaatgggagaaaaggtcatcgtagtggttatcgagagtgtggaggtatccgaccatgtagacgatggtggggtcatcctcggtagggtctctccctgacagggcctgaagtcttttcctccaggtgggggtatttttgttgctaggtgggaagtaacgaaggggggtttcaaagatctctctgctgtagttttggcatagctgtttaagggcttttcgggcaacactt

SEQ ID NO: 50378 - DNA, 441 bp, Zea Mays
tcgtccccttagttggtccaaggtcatgaggacgaaactgattgttgttgccttttttggcgacttgatgtaagttgttgctgttgtcgtgagatcaccaaaactaggcgccaatattggatacttgatttcaatccccttaaggtatcaaagacaaagcaacacaagttaagtatatgatccttcgtcctttaacacttctttgaagtgttggcacgaaggacgaaggtctttaagaggagatgtaaatgaaacaatgtagaattgaacgacaatgtaaaacataatatgaaactcatcacacgtgcctttagcgttttaattccatcttcctttatgtcaagttaatttacaagtgtaccttcggctccttaacacaaggtggcacgaaggttgagcaacacgaagctgcggcccacaaaaatgtactttatacatggc

SEQ ID NO: 50379 - DNA, 768 bp, Zea Mays
aaaagaaccactgttctagaaatgctactaccaccgaagggaaatcctactaactactcgaccttgtggcgcttcgggggaggagacgcatcagctttgggatcatcgccattgccactggtgtcatcgctctccttttcgttgacgtcgccgatgctggagctgctggcgccgctggacccgtggtcgacattgtcgtcgtcgccatcgccattgtcgtcgtcagagaagcagacatagaggggtggttctggctcctcctcctcagaagacatggcatcctcctcactattcgacgactcgttggctccatcccaggggaaaaggtcatcctcgctgtcctcctagtcctcgccgaggaggagctcgaggtcctcgccatcgatgagggagagggcatcctcggactccaccgcgaagtcccactcctccgcatcccgatgcagaggagcctccttctcataatcagcgatagggtcccacaccggtgttagctcctgatcgatgtcatcctcgaagtaaggaaaggaggaggaagaggaagaggtgggtgccattgcaggcggaagtagcacaatgtgctacaaagcaaggattagggaggaagaaagaacggaggacccgagtcattggaacaaggctaaggggctgattccattgcaatcggctactaagagcataggccactgcacatgggtcagggcacctaccaggcctacatgacagtccccgagaccgaaatagggagaattttaccccaaaggaaag

SEQ ID NO: 50380 - DNA, 434 bp, Zea Mays
cggtatatggtttccttgaaccatgtgtgggaattcgaggggttaggttattttggagcggggatcgggcgtgtgtctggtactgagaagactctgaacccacgaggggaaattgtagtgttcgaggcgttttagatgctagtcttcgatttccataccacccatttgtggtcgaagtgttgaacgtttcagcgttcaactgcatcaaataacgccaaatgctattgtggcaatgtataaatatgtgtgggcgatgactacatatggtagagagccttcaattgaaacctttgtgaagcattactacctccattggcagaagaagactgtgggtggtagggtgatgcagttcgggagctagactttcacaccgaagactgacaagacgggtggcgaagtgtatgaacttgtaccgtgtgcaaagaacaaatgag

SEQ ID NO: 50381 - DNA, 495 bp, Zea Mays
ctaggtttgaatttaggcgaagaaatagggtttggggcactcggctcggaaacgatcgcgcaaaacgggaattttggtgaaatttaagcctgggatctcggattggcgtgaaatttggcaagtaggttactggaagtgttgtgaaggtgcctgaaaaatttgggtttaatttgagcatttttggctggtttgggcatttcaccgagcatgtggcgtgcggggagctagggctttaggaatatggccatttgaggtgagaatgccctcccgaaggagctaaaagtttgcagggatacacaatggaggtacatgaactcattccatcaattggattcacaggaaatcacagatttggaagaggtgtgagaaggagtggagaaggggcaaacttaacacagggaactgagagggagaagaacaggagatggggggaagacctgctcaccgagggagggaaggagagagacgaggtcgccggagaaggtggccggagat

SEQ ID NO: 50382 - DNA, 636 bp, Zea Mays
ggagaatggcctttaatgggaatgaggacaccaccacaactctgtgtgcctgaaaatagtggcgcaacttcctgaacgcgataagtatagcatatataagcttgtgcgtctcaagatacctgacctttgcctcatggaggaccccgctgacatagtagaccgacttctggatggttcagacccccgcagtcggtcccgagtcctcaaactcttggccttccgtcaacatcgtggtggtcggaccaccaccttctcctaggggaactttctgacttccctggggatgttgtgtcgtcctttcggtgaccagcaccatgctcaccgcctctgaagccgctgcaatgtataagtacaacgactcccctggctctggagctaccaatatcggcaaggacacaaggtgctgcttcaactcttgaaaggctcattcagcctcttcggtccaagagaatggccggacttccgcaacaggctaaagaagggtagcgccctctcagccagtcttgagatgaagcggctaagggcggccagtgaccccgtaagcttctggacgtccttgatgcgggtcagaggcctcattgcctcaattgccttgatcttctctgggtttgcttcaatgccctagtgcgaaaccaa

SEQ ID NO: 50383 - DNA, 985 bp, Zea Mays
ggcaagttcactttgagatgcctatgagtccaggtgatgcagagataagtgttatgctggacatgttagctggggattcttctgactcggtccctgctgaaacaatggctgttgcaactatcccagagcttgagaaaaccgtggacactcgaaagcctgagggtactcgcccgaaacgtctctgccaggtcagtcatccaactgcacctgtcgaggggaagaaaaagaaaaagagacggcttcggcgagtgtcgtgtttggaccaggatgctggcccttctgctcctgctgctgaagaagtaccggtggaactctttactggagctgatcccagtgggtgtgaccctaccagagctgaacccaatgggtgtgaccctgctgacgctaatcccaatgggtgtgaccctgtaagaactgatcccaatgggtgtgaccctgccagagctaatcccaatgggtgtgatcctgtgtcgtttattgtccgtattgtttataaggacggagaagaagaagaggaagtcccattgattcggaagaacagtcggcgttacagagtcagtggggggaatagcgatattccttctccagctttgtctgcccttgttagcctgcaagaattatccatagcaaattttgatcaggctctcgaggatgttgttcctgaagatatgctgtcagagccaactgatggtgatatgatggacgtctgctctgacactccagatgtgggattagaggtatcccgggcagcatcttgtgcatcatcgaccttggaaggcggtcttcggagccaagaggttggtcaaggtcgctcaattcccacggaggtgactgagaatccttcagccttaaaggtggttgttgcagagaacccagtcctcaagggtggtgttggcggttgcccagcccccgaggatgttgctggtaatgatccggctcgggtgggtagcgcaagctgcaacccagcccccgagggtgttgccgg

SEQ ID NO: 50384 - DNA, 456 bp, Zea Mays
aaagaattgataagagcttcaggggaaaggatggagttactaaatcatacagacagaaaatgttgctaacgaaaacaatgaaagttgttcgccagacgtgtatgtcaaaagcagggtacgacaaggcaatggatgtgttggatgagctcgatggcgttctataccgattagagccagacattggatgtaatgagtcatgtgatgttagtgatgatgaggaaaaccaggtaataagattcaatttttttaaatgttatactatttggaacatatgagtatgtatggtcacctattatttgtaccagaaaggagaaataaataataataatgctggcgatggaatggaagatgacaattcaattacatgccataaaatagtatgtaaaggataaatatataatcttgcattaagtatttgtcggcgtttcgagaccggggggtccctgggctgacgag

SEQ ID NO: 50385 - DNA, 728 bp, Zea Mays
gtggaatcctagctaagtcttggctcaatggggctctaatcttttggtcctcgacgacgctcctcctcctcttgttcgtccttatgggttcgtgtccgtctcaatgcgtctggttgccccaagatctctctccccttttccactttgccttgaggctatcctctctcttttatagctgggagaggggtcggccagcggtggtttccctaggaaggagccgttaggcaatggtaaaaccagcgttttaccccaggtgcagccacgagtactcgtggggcctggggctacctagttgtctcgtatttactatggcagatgacgtggggtggcaatggtcccagacgtcatcattttggctatgttgatccctggcctccgtagagtggggctcagcacaacccgtcgtgtagtgccccgctggagatctgtgcactcaggcctagtccgataggccatatgtgtgtcgtagatcgaggggtgcgtcgggttcaaccaggggcgggtcctttcagggttgacgtatctacctctcccaacttactcatgggccccaacgattaggggctccttaccttagtgtattctctgataggctggtcccaaggaccgggggtcatttccttgagtgtatccctcgagcccctgaggggagctcatctcccttcgaggggctgatgacgggttagacggtgtcgtgtctttttgtttcccatgaaatcgtgacgtcc

SEQ ID NO: 50386 - DNA, 1089 bp, Zea Mays
aaagtcgaaagggagcagtaccaagatattgattttgttagcggcgagtaccaagaatgtgaattgtatattgatgactctaattgacgctagccaattaatttgaatttattcgagctcgtggagaggatgcacttgaagtctaagaaacgaccgagctcgatctgctttcattcattcacccacttgaccacttgagtactcaacaaagccacctctacgtgcctacaaatacagcaataggtggttcacaatgcctcgaggctaatatctcgtttaggccgggctgcctgaccatagtagtagtaatataatgttcatatcaaagttctctgttcacttgtgacaaggagacaccaggaaactgataagcacccacatccaccatatgtctcggtctgaggttgtacgacgattcgattgaatgccgaaggataacagctatggtgctcttcaatgactaaagaacattaagacgacgggagcaatgtgactatttatcgcagttgttcctcatatcgtgcatacaagaataagtctatgtacgagttatatataggcgtcatcaagatcccacacagaggcaaaaaccaggcggtcgtgatagagagaaaaaaaatccatgaatctctacaataatttataagagatttactagcccaaatggttaggatagattggtttccgtcggacatagttgaattagtgtatttctttctcacctattactatctgcggtcacgccttatgacatattttccatccacctagtcatctctgagtcgtaacagccacatcattgtgcaacaaccctttggtaactaagatttagttatgttgtagtagttttattgtaatgttatatcaatatcttcttattgttgcaagcatgaatgccgcatatatattgtggtagaatcaaaagagagtactaagtcggtcaaccatggtgctggtatcctacaggcaggtggccagtaccttgcagtgggcaacctagccgattagctcatgtcacttgtcagtcgttgatgcaccatggaggagatggagggcagccaccagacagacatcgatgagacatgatga

SEQ ID NO: 50387 - DNA, 293 bp, Zea Mays
ctcttcattctggtccaccaatataaagatctgagatcctggtacatcttgttgctaccagggtgcatggagaatttggaaaggtgagcttcatccagtatcttctttctgagctcagggtccttgggaacaactagtcgatctccaaaccatagaattcccttgctgtcctgacggaagcacttgtatttttctgccttttgcttgatcattttcttgatcatctaaacacccttatcttcaatctgtgccctgactatttgctcttgcaatgtgggctctaccgagatata

SEQ ID NO: 50388 - DNA, 550 bp, Zea Mays
tggtgactccaatttcgtcagtacctcgccggtcgccgtgcatccactcaatgcaaggagcgacgacagatgccctgtgctccacatttacactccctcgctagtcctcgtttcccgaaagattagaacattttgaacctgcttttattgtggtgcttctaatctaaacaaacatatccggtcaataaattgattaaaaaacattgaaaatatcctagttttgtagtatgaggtagccaagaacccttttcgcgaaacgagagcaaggacaaaaccgagcacgagaatggccgccaccgtcacatcacatatgcggttgagcgttgaggtttctgttcattgtagaaattgaccgcccacccgccgggacaaggtgccgtacagataatccggtggaacgcgatgttaattccggcgtctatcttggctgcctcttcctcctcccgattcagcgtgaggggccagggccagatgcggggcctcccttcccttcccttccgtccggtccccatgggccatggcgtcgcccgctatgatttcttggcaaacc

SEQ ID NO: 50389 - DNA, 651 bp, Zea Mays
atgacaaataatttgcagtcttcaacatcggaaaatccgggtcaaaaggcatgggttgtacacacatttattaaagtcacctagaaacttaccacgacatgcactaattacatgctccagtagtttggcatcattttaggtaaatgtgccacaaacaaagactccggcttgtgtttcgaaatacataagcaatagtttctgccatggccatgtctcgttctatgatattgtgtgtggatgcttgcttgatcgcctttaaaaggttttgaatagtcaaacaaatgatccaatagtttcattgaataaaagtgagtctccaaaaaatagtctgcttgtgactagttccaaagatgggagcaaaaggcaagtttgaaaagttgtacaaaaggacacaatgtcaccaatcccattattgattgatcatccgcccaaaagaaatttgcaatccgaccatatttcttgtcagtctgattacttctttttcaagtactctatgtttgtgtgtcattgtattctaagtacttcatgctctcacgaccaatctcattattgcaatccatcttagagaattgcactttatttactgttccattaactccttcgtggacccatacacctaggttgggtttatctttggttcccatatctggc

SEQ ID NO: 50390 - DNA, 354 bp, Zea Mays
atttagtcagccttcccagagccccagctttctctcgagcagaacaagtactcctttgcaatcacacccacgctcgttggacagtcacatcggtcaccgtttgccgcctgcagtgcttgtaagaaccttgtaagagcggagtaagacgcttcataatttatattccaccacctccaccaccaccctgagagatagttgtagggttcatattgtttgttgcctttttgtctctgttttgtgctaacaatgataggaccaaagaatcaaatggacaaggacaaggagcttaagcttaatgacgatgagtgtgtctctcagctggaattgaaggagatgatgcacgcgatgactgaa

SEQ ID NO: 50391 - DNA, 395 bp, Zea Mays
agtttctgcaagataaccgagacgtattcgcatgacaacctgcggatatgccgggagtcccgagagaactggccgagcacaaactgaaggtctatccccaggcgaggccgatccggcaaaaactacgtcgcttcacgcccgacaagagagaggccattcgcgctgagctggctcgcttggtcgcggctgggtttattagagaggtgttacatcccgagtggttagccaaccctgttcttgtactcaaaaagataaaagtggattggcgcatgtgtgtcgactatatggatctcaacaaacactctccaaaggatcccttcgagctccctatgatagatcaggtggtagattccaccgctggatgttcagtgctgtctttcctggattgctactcc

SEQ ID NO: 50392 - DNA, 508 bp, Zea Mays
cgagatttaggaaggacttgggaaaagatggggaaaatctatgtgaagctattcttctctctcccaggtagcttcatcttctccatgatggctccattgtactttgcacattttaatcactttactcctcgtgacacgagtcagtgtatcaagaatcttgataggatattctgcataagtcagatcatcttgaacactaaggtcctccattggtagctgctcttcaggtaccctgagacacttcttcaactgtgatacatggaagacatcatgtacatccgcaagatgatctggtagctccagttgatatgcaacctctcccactcgctttaggattaagaagagtccaatgaagcgaggggacaactttcctttgactttaaatcttcgcataccccgaagtggtgacaccttcaaatagacatgatcaccctccttaaactctagcagtcttctcctggtatcagcatagcttttctaccttgactgtgcagttctcaaattctcc

SEQ ID NO: 50393 - DNA, 871 bp, Zea Mays
tgacggcgaacgacgatgaaccgagctccggcgaacctataccggccaagataagcaatggccggtgccctaacttggctgtcacctaattccacacctaataatcgtttcccttcgctcaattgcacaatccgagccctaaatcgccctgtccatggagatagtgcgaactacggatgaatagaagtgttcctcgcgatctagcgtggtccagcttaattgaatgggtcgaggagcatcagtggcatgtaagagtgctgaaacaagagagcagagggcaagatcggacctgaagtgcactaaccacggtgagagcttgttcacggtggcggaaaactgatttgggggaactcccaaattggggctctctagtgagcaattggaggcacgagagggtggattggacgcttgaatacctaatggagctgagggtgtgctcaatttataggacccttgagcggtggccagtgaatttgagtttgcgaggtggcggtcggagagaagggatgcactggcgcaagcgaatagtggctttcaccgtggagagctcaccggcgatcaccggatgggctaagatgagtcattacggtgtggttaaagcatcgaggcacgtggcgcaaggttgtggggtggctaactccggcgaggatggttacgaagcggccatgagctaagcggacacggcggccggagtgaaaagtggtttaagttcatctacgaggtgatatttcttacccccctctgtgttatccaactgcgccaagcacgaatcactgcgacgggcgcgaatccgggcgcacggtcgccgacggtgagttctctgagctagcgttctgattaggacactgtaccatcgcgcagctcattcagt

SEQ ID NO: 50394 - DNA, 718 bp, Zea Mays
gaagaacgagagataagagagacctgagctggacgaccgacgcagggcagggcagggcagggcctgccgccctggtttaattctagtagtagtagtggtggtgctttgtttagcagttagcacagagagcccactcaaaccaatccccacgtcacgcgcacgaactgccgaggaagtttctggaacgcttgattggcgttcagccgatttggccgggaacgggggagtcggcaatcgcgtgacgttttcacgcggtgccgaaatccagtgtgcgatgtagtacgtagcccccaaccaaactcaaaacgaccggcaaataaatatcctgggcaaggtggtcggtgagttagggttagggaattggattgaattaaagcccagagaatggtgatcattgtgtctagtactactccaccagacccagagggcgcggattaagcggcggggcaatcagcaaaagctgctgccgccacaccgaggggcggtccggtcggagtgagctttgcttcggtccgaatcatctgataaaaaggtaattcgtcgtacgtgtcgcagctaaacttaaacctgtgatgaaccaggcaaagcgtgcgcatcatattcatacctgcaggtttgtttgatcttctctttactcgatcggcaggaacaccgatgaccaggcaacgcttccctttttctttctttctttagggcgggcccagggtctgacagtccg

SEQ ID NO: 50395 - DNA, 742 bp, Zea Mays
attctttctgatctctggactgggcgccaataacagagaaacacagggactatatcgcaaaagatcatcagactcaggattcctccacactggacgacgggttaattcatcgaaactcgagggactctttaagaaagtgaccgcggtgaaggggtatgcacaatttctagccctccgattaactacacacggtgccgattagaaccgacacagctaactcccacacgctctatccttggacgcccgattagaaaccgacggatgtgatttgatacgaccaagggccatttaggttccgatctggaccatccatcacatatccgacggccagcccaacttcttccccaacgcgatttcccccccggccgatgttgcacttggttcgcggcagcgcagccccatcgtgatcccgtccggtgatccgacgacctaatcctcgagccaaatagtgctaacctatgcccgagtcatggcggataagacaagggtgacattaccgatggtgaggacggagaaaagcaggtccacggcgtacggtggattcatggagtcgctgcgcgatgacaagaaattcgccgccatcccatcgatcacagttcctagcatcgcaacgaaaacgtcccagggcacctggagaagcactcaaatttgtctctgcgccctaaacggcagtgtgtgctaggaatcaatggcagcaacagtggtccaccgcgccgctgcgtgaggccttggcaagcttgga

SEQ ID NO: 50396 - DNA, 682 bp, Zea Mays
atttatttccatcactctggaccgggcgccaattaccagagaaggcagggtctactgcacaaatgtttccaagactcagcttcctacgctctggacggcgggttaatttgtaaacatcatggggtctctttagcaaataggccacggcgaaggggtatcgatcactttcagccgccagattagaatcatgcggctacgataggtcatatcgatgccatcgacccgcgtgagccatggccatccgattgaggatcaatgtctttgagtttaagacgctgcaagccaacctggtacgctcgatcctgatccaagggtgaagatcaattcgttgaaccggtatctgctatctaatcctagacgttcgcgaacagatcgacggtggcagctccttcttctctcccttaaccaacccgacgacggcggagtagccgccccggcggcgcgccccctggcaacatgaccgaccggtccccgatcccgaatccgacgaccgcggcatgaaaacgaaagcggaagcgagcagattagggaaggatttacctagcaggggtggaagcgaagccgaccgacgatgcggtacagcaaggttccacaatggcggcgcccgcacgcgatggtgccgagtcagtgatccacccacgcgctccgacatcgacccgcccatgcggtccgctggttcccc

SEQ ID NO: 50397 - DNA, 443 bp, Zea Mays
gccagatagaactataaattatttttaattggaaagtcgttctttaatcactatcgaatgaacaaataattaattactgaagacatgtgacataccaaaataacgttactaatataaaattgataatgttacgaagttaatcccactagaccgagtcgtgacgggtttaggacacaaattatattgaataaatagcgatgcgtggaataaatacgacgtggcacgatatgattggctagagctaagccacacggatggccacacgatcgcagccacatgagctcctgcattgtggccaaacaccaaacggcaacctgggccacaaaggggaagacacgtaaccaactcgtggggagtgggggtgttttctctccattcttttctgcaattgaacaacaattttcttcatccacagacataacagagaatggagggagaggaag

SEQ ID NO: 50398 - DNA, 477 bp, Zea Mays
cttggtggagctggtggttaggaaagcatgggtgtatatatgtatgtgcacttgattatgtaggatataagagatggataggttagggcaaaaatagccaggggtaagaaggtttatggtgaggaagaatttcgtgttgggtggtaatgcatatgaagattgagtttgacttctctccttccttgatgaggttgatcttgtccttttcgggtcttagtctcattgattcaaggttgagttggcctaatgcactaatttagggtaaagtgcatgaggggagaaaggttcataggagtaggatccagtttatttcactagtgttaacttgttaatgactgtccttaggttagctcaacttaaggttagacttcgttaggttagattaacctattaggttggatcagatctaggttagattgttatgactagatagactagacaagttctcattaattagatcgtggttgttactttagg

SEQ ID NO: 50399 - DNA, 489 bp, Zea Mays
aggaggtaaagaaactggattaggttcaggagtataactagtagatgcctcgctacgtgctgcaactctatccttcatagggaatatatctttgaaaaaggaggcatcacgagatttagtcacggtgttaacatgcacatctagaaaatcagatttaatcaccagaaatctataggttgcactattatgcgcatatcctagaaagacaatcaacggtttttggtcccagtttacgtttcttcgcacgcatgcacattaactttggctaaacaacccatgcacgcagaaatccaagagtaggctttctacctttccatccttcatagggtgttttatcacccttagcagatggaactcggtttagaacaaagcatgtggccaaaatagcttcgccccaccatgacttagataaaccagaactatccaacatggcattaaccaagtctctcaaagtttggtttttccgttgagccaccccctttgattgag

SEQ ID NO: 50400 - DNA, 731 bp, Zea Mays
taggcaaggctatctgcgagctggtccttcgtcattgcagacaaacctaactcaagctccggatatcctatattatctgccatctcccgacaaacatcaatttctttattgtcaggaagacaataaaggaagtcatcctcatcatccccaccatacaccaatgaccctcgagggtactgcagatccctggagtaatgttgccttcgtcgatttgttctttcgataatttcttccctgaagcatgacgcactataaattctaattcctcagtagatgctccaggggtagcgagctcagattccttggtagcaccctcttttcttaacaataatggtccatcagcagcctccaaaagccttgcttcagcaccctcctcagtggcccccgaaagtcttgcttcggcgggggttgagggcctagcctcaatcgcagtctgcgctgtgccagcatcggcagatccctttacaatcttctcctctgcagtaggcactgaggcaggagttagcaccttcattaattctataacagtgtccaatacactagccatcctccttctctttggagttactaaagcaatcttttgtaccttcggcagttctgtttcttgcaatgaactcaaggctttcgattgttcccctaataccttcacttttggctcttcggccgattccaccctggcttcagcagtagcagggtgacttgactcaacagtagaggacccttcagcagac

SEQ ID NO: 50401 - DNA, 766 bp, Zea Mays
ttccagacggagtcgcggcggttcgaggcggagactcgcgaggaagtgcagaggctgagggatttggtatctcgagtatggtccccatactttacatccataaactattatctattgagctcatcacagattcacagttcagcctggttgcaactagttgcttggcatctgggtgaaactggtaaatcgttactaattctgttcgcttgggcttgctcagatcaaccggcaataatagggtatagggcagatgtgtttaatatgctttggtctgatctatacactagcccgtcttctcgtctaaaaactagccagtagcctgtagtttgttgattgatctttgttggcctgcccgatggaagggaccacatgggaagctggaagctagctcttgccatctagtcaaattgttgccttgccatttagtcaaattgttgccttgccatttcattgcatttcagatggaccggatcaatgcgggtgataaattcttgggccatggttgttgcctcctgagaaggatttgaattattgtcaagcctgtgttggtccgaacaaacattgtggcttcactatgcaaacagagcgaaaaagagcatggttatgagttatgacttatgtgatgatcagtaaaggctaacatgtattttatttggtctatcccttactaaattatatgaacattaacaggtatgtcttatgaacttatggtgtcaaatgatcttctgatagattctaatgtatctcttatatgtgtgatgttatc

SEQ ID NO: 50402 - DNA, 462 bp, Zea Mays
gaaagaaccagatgacaaaaatgcagccgagcgcatcgttagacagtcagctcactacacactcattggggagacactatacagaagaggcgcatcgggtgtcctcatgaaatgcattctctcatctacagggaagcacttctagatgaggtccatgctgggcaatgtggagtacacgcagcatccaagacactagtcgggaaggtcttcaggttgggattctattggccgacggcgaaaagtgatgcagccgagttagttcagaggtgcgaagcttgccagtacttgtcaaagcaacaacatctaccagcacagcaactgcagaccatactagtaacttggtcgttcgcatgctggggactggatatgattgggcctttcaagaaagctcaaggaggatacactcatgtactggtagcaatcgacaaattcactaaatggatagaattcaaacccattgct

SEQ ID NO: 50403 - DNA, 759 bp, Zea Mays
aaagaattgcacccatggcggcaccctgcttctccagatgaaacaaaacaactccatccacggccgtccccccaccgcgcagcacttgatagaacatgcttgactgaagtttgttgtctctagctgcagcgaaacatccccggacgatctagttattgtcccactgcatattattctcgattggatgatcttgtgtcgtaggccatttaatcaagtttgcaggagcaacattctcttcagctggtagaaagtttatatcaaaaaaaattgaaaggtaactcgtggtcctcatcggtagaaagcgcaacaagcaagttttgaagaaggaactcaaagcaggctcacatgtgctgatgtttgtgaagctattagaggtgaggaaggaccaaatcatctttaattagataattttaactttttatcaagttttgtcatattttaaggtgctgaattgagataaatattactttagtctatgtttgttgtacgcacgatatcttaaagagctttttaaaaatggctccgagtactaattttatagagctccgccactgattggacggataaactaacgacgacgaacgaagctggagcggcccataggtacggacggacaggcaacgcagcggtaggtggtcaccatccatgcacggtgcacccccaccagtcgtccaaatcccttccctcccgctataaataaattctaatcagacgaggcaggcagcggcggattcatcagctacctaagctcgctagcag

SEQ ID NO: 50404 - DNA, 348 bp, Zea Mays
cacaagataatgatgagcacaaaagcatgagaaaaaggtggttctatcaaaaaaatgaaataagctaaatgatgcaccacctatatggctcctaattatgtgccaactatatgatttatgctatgaaattatagtaactggttttagtttagtaatcattcagtagtctattcgttagctattcgttaattgtagcttgttggaaatataaaaaatgaatcgtagtcttaaagaaaacaaattagcgtagactgctaatacgacgcgacaacacgctaagtgtgttcgttagatgcctgtagccagtgtattgtgtaccaatcattgtattgtatagatgtgtatttt

SEQ ID NO: 50405 - DNA, 703 bp, Zea Mays
cgcattctagagacttgaattattctaacactttaccatttgttagagttaacataaccaagggagaactaacaagtagacttactaatttttatacaagttaattcacgcgcgagaactaacatacacatttaattaacgcattcaccacacgaacattgtttcacgccgcacactagtttctaacatgcttttcacataactcgtaattcaactattcactaacaataaatcacgcacgacaactaccacagcaaccaatttatttatttggaacaccgcctgcctagcgtaccactagttcccacattttgattcaagctcaataatatagcctttattcgattatacaacagcgacctaagcgtcgcgttacccaaggcatacatccttcctcgtcgcgagtataaccatatcacggcatatacccgcacatacgtgccccaggttacgcacaaggcatcaacagcatagtgactctaaccggattaatcatactcctcatttgcattgactatcacaatcatcgatcacatgcataaaacaatacacttttcacatagacacctatcgatgcattccccaacacataatccgcatttttaaaaatttattctcacagcaaaccacacatcaaacacattattaccgaaacttaaaaacatccaagttcttgttctacttcattttctttcgccacaaa

SEQ ID NO: 50406 - DNA, 715 bp, Zea Mays
gatgacactgaggagggagagaactctaatcaaggatccattagattagcaaatacacaagaccgtaagaagtagcagagaactaagtaaaaggatagttctcgaaagattgggacattcattgaacacttggtgggtgaggagtattgacctaggagaggcaacactatagtgaagagagcagtaggggctactaatctatcaaaaagggaataattattggtgtgcagggatgtgtgtgctcgtcgatgagcagattgatgctggtgagcacatggggcaactcgtagggtggagtagtggatgttggtgcatgtggaacggtgtgagcataaagagcaatggagctgacatagcatggcgtggtagagggcacgagtgtagggcgtggatgcacgcagtgctatagccgtgggggctgatggagttacaacgacatccaagggtatcacagatgcgagagaagagtaggtgacgaatagagtgaacatggcaccactacacaaattagatggggaagagtgtatctaagccctaatctggatgttgggtcgtcaaacgcagcactgtcgggccaacgagtatggtccgacacatgtgcaaaaagtgctagagagcttctataggccatcggtctgatgagtatcgttggatggtacgatggaactatgtagttggcatggtgcattgtacatcaccgtaagactagttcgat

SEQ ID NO: 50407 - DNA, 354 bp, Zea Mays
aatgggtgtgatcctgttgaagctgagcccaatgggtgtgatcctgttgaagttgaccccaatgggtgtgatcctgttgaagctgaacccaatgggtgtgatcctgcaccatcttttgtccgcatttttgatgaggacgaagaagaggaagaagaaattccactaattcgcaagaatagccggcgttacagaggtaatagaggtgatagtgatattccttctccagctctgtctgctcttgttagccttcaggatttatctataacagattttgatcagacccttgaggatgttattcctgaagatatgctgttggaaccgactgttgatgatatgatgaatgtttgctctgac

SEQ ID NO: 50408 - DNA, 539 bp, Zea Mays
catcatcggcgacgcacgaaaggcctatgaaaataataaaaaattcttgcaggaaagaggtgacagaaaggactcctgatggaggggagactttgaaagttaccatcactacctccaacactggggggtaggcgtaagcaagaaacctggcgcgagcacttgttctgtgtatcgcggacggtctgggacaccgtcggacagcccggctcattccagcggacggtccggcaacgcttaggaggcatgacaaccccgtaccttttaaaccatgatgaccagaaataggtacgtggaaaactaatacgtccaaggtagctggtcggctggttaaatccgacccgacctttgatcaattattgtctaagtatgtgaaaaagaaggccggcccaagtgactggccgccaaagcgacctcgctcacccacccaggagcgacaacaggtaaggccgattggaccatctcactaatcggaaaggacaaaagagcataacgtccaatcaagacctaacgtacctgcgtggacacctccacctccatac

SEQ ID NO: 50409 - DNA, 295 bp, Zea Mays
cttgctgaggttgaattattgaaagagaagggtctgactgcagaggctgtcattgccgattttgttttcaagaatatttagccactaaaagacagagcatacccagcttatctgtatcgaggcctcgctgattcaacccgggttaccaatagaaggattcctgctgtggatttggtgagccggctcgagatgatactcagaggcaaggtgtcgaatatcggtgctcctgttgcatactcagcctggaatctgcctccttccaaggcctttatcagttttgggtcaaatcctcctg

SEQ ID NO: 50410 - DNA, 1049 bp, Zea Mays
ctacttaatgaaacacaagtctgaatctttagaaaagctcaaagagtttcagaatgaagtggaaaatcagcccggcaagaaaattaaagcactacgatctgatcgtggaggtgaatatttgagccatgagtttagcaatcatctaaagaattgtggaattgttccgcatcttacgccacctagaacacctcagaggaatggcgtgtctgagtgacgtaatcggactttattggatatggttcgatcaatgatgagccagccgaacctacctttgtcgttttggggttacgctctagaaacaacatctttcacactaaatagggtaccgtctaagtccatagttaagacaccatatgagatgtggactgggaagactcccagtttgtcttttctgaagatttggggttgtgaggtttacgtcaagcgacttcagtcggataaactcaatccaaaatcggacaagtgcatgttcgtgggatatccaaaggaaactttgggatattacttttagcaccggtcagagtgcaaatgtttgttgcccggaatggtgtgttcttagagaatgagttactcaaaagagagaaaagtaaacaaaaggtgtatcttgaagaagttcaggatgagccagtgtcacatgatccaacaagtgatgctaatatagcagaacaagttgagacgtctgtggcaagagaaacaccaccacaaccacaaaggtcagcaaggcttcacgaagcagtagagaagtgctattgttgggcaatggggaagtgttgttgttagacaacgacgaacctgcaacatatgcagaagcgatgatggacctagattccgagaaatggcaagtcgccatgagatccgagatagattccatgggagaaaatcaagtttggaacttggtggacccgcttgatggtgttagacccatagagtgcaaatgaatctataagtagaagaaaggcatggatggaaatgttaacatctataaggctcgacttgttgcaaagggttttcgacaagttcaaggagttgactatgacgagacattctcg

SEQ ID NO: 50411 - DNA, 567 bp, Zea Mays
atttattgagcagtattagcacttatctgcgtactatttgtccctgttgtgtgtggcgttgtcgactcctccctggtacctggcctccctgggatgtaggctcgacatgtcgaggctggataccagcatacctaaaagagttggcaacggcccccaagaggcagctgtgacaccccagtgtcacctagggtttctctcaaatgccaaacctagaaccattattttatgtgaaccaaagtaagcatgagcatcaaaataacttaagtaataaagaagtcaccaagtatatacttaaaagtgtcatgatcaaaacaattgagtctttgaaaaggtaagaatgtgcaaccctaattaaaaaccctaagtgagccccatgagcaaaattcaagaaaataagagaaagggaatgaaaagtttaaaattttgacttgagccaattatataagttaaagtatatttattgagcaacaagaaaggttgagaaagcttagccaaaataactcaaataaatccccaaatcagcccttgatctatgaacccttagagaaattcagatttctgaatttc

SEQ ID NO: 50412 - DNA, 292 bp, Zea Mays
ctcgcaggaatcccatcgcgacgacgcgcaggaccaccccgcccaatcgttcttcccatgcaccgcggatgccccgcccatatcccccacgccccaaacacaatccatgcctcgccgccatggaaggaatcaacccaattccctcgtcgccatccagcgcacagaaccaccatcggcccacatcccatcgcgagtgcatgacccccgccatctcattcttcccattctacgtgtcagccccacccatatcttgcgatgctcgagtacttcccattctacgcgccagacccgc

SEQ ID NO: 50413 - DNA, 635 bp, Zea Mays
ctttatcaagaagcgtctgcacctggcgctggatctccttcgtctcatctggatttgtatggtacagggcacggttaggaagagaagagccggggatgagatcaatctgatgctcgatgccacggagcggtggaagacccgatggtaagtccgtgggaaagacatcagcatactcctgcaaaaggttaaccacatcagggggtatatccaaagacggtgcatcatcaagcggaacaagcatacacgagcatacaagtgcataacagggcatatgagcctcatgtaaatcatcaaaatcagcatgtgtagcaagtaaaacatgagcattcaactttatttcagatgtaacaggtgcggctgatggagatttgacttgttgtgcaattttagcagcccttctaagatcaacttacaaaattaggtcaggggtcattggatgtataactattttctgtcctttaaacataaaagaataatgattcaaatgaccatgatgtaaactatcagtatcataatgccaaggtcaacccaataaaaaatgcatgcttccatagggataacatcacaatcaacataataagaataagaccccagcgaaaaggggatacgtaccgagtgtgttacctttattttac

SEQ ID NO: 50414 - DNA, 924 bp, Zea Mays
gtgccataggattttagttgggcagatacggaaccacgaacatcctgtgattatgaaaaaataagcaagaaagctagtctgccagcgtgaacgataaaaagcaaaatttgattcacctgaagattggagaggaacaaaggaagacccaaagcaggaagaattggtacattgcttgatgaggggatgtcaataggaatgatatcaaaggcacgacttggaggaacctcagcctcgtcagcaggcggcagactcctggcgtctgggtcactggcctctaaagtgaccacaccagcgagagcagtagataagtgtgtcaccgcggcctcctcagattggaccagcggcgatccaacgtggatgtccatggaagcagcagaaagggagccagaggaactcctgacatctaggtcactggcctctagggttcagaactcaagaagacacgtcgacataaatataagatttgctccataagtcgggcgcaaagagtgccagatcataactcggaaaagcaagaattgcaatcatcactcttgcattacctctaaaattcggcaagccttcaagcacgcgaacaaaaagcatgcaacagtggttaagtgaaataactgtgttcttcattcataaaggggaattcatcacaaacttgaagccgtatcattatgagtcggcctatttcaccactggtcactacattacattacactactctactacttacactacaatatactaatactactctaatccactactacttactactacttattgctactactactgctatctattctaatatttaaaccagcggcataatgccactggccttgtcgccgccgccgtcacccttgccgccgtcgccgttgcccttgttgccgtcgccctcgccatcaccgtcacccttgccgtcgtcgtcgtcgc

SEQ ID NO: 50415 - DNA, 300 bp, Zea Mays
cgcacagtgaatgggtgccatcaaaagtcatgcacaaactgaaattggaacctctctaaaaacattttgtgtttgtaggtcacggtgttggaacctgtcgtgcgcgcgtgtcgcagatgtgcattgcagatgttcgttcaccagcgaacctgcagctgtcgaatctgcagagaccagaggtgagcaacgacgtagggaaatagggctggcgggggcacgtgggtaacttggtcctggagcattggagaaggagcataccacaaggaaaccaacacggtcagtcaaaaccaaatctagata

SEQ ID NO: 50416 - DNA, 869 bp, Zea Mays
gaaatggattaaaccccatttccctttcaaaaatgatttattcatactttaagaatcatctataacccacaatcacaacagtttcccatctcatcattcatattgttctaaacaacacaaggaaacacaaagagccattataagcaacacaatagcatttgtgatgtcacataggcgacacatagcatccaattgtgccgccaccacaacactgaaatacaatcacatcttagcgaccattccttgctcgtagctgacgtggtctgtgcagtgcaccgattgatgcgactcacatgccctctgctgcaaggcgcgacctagtaaggttgtggctaacagatcgtgcatatggtcgtgcaaaacactattttacgttattttacactgtttacatagtggaagtttgaaatcagggatgagatgagtaagactgctacaggtagcctaagtcaatggcggcgtaaccatatgcccacgcattcgccgggatttgttccacgacccatgcgttggggttgaaaaccataatagggtgatggagaatcgtcaggactcctcacgagtatgccaggggagattccacaagtggactaaactacactagtttcatgttgaatctgtattgaacccaccctgagattattcttgtgaatcgagccacgatagggaatggcctaactaaacatgccctataacggcaacaaagcatcccttagaccccttccaatggttcacggaatcgcttccctcaaccccacggtagtgtacactagctcccccttgtcgttcaacggtttcaccttaggggcactctacatggggagaggggctatagtctccccctttcacatgcgaggagctataatctc

SEQ ID NO: 50417 - DNA, 450 bp, Zea Mays
cgctgacaagctcaagaccgagagcaggagcaagtcgagcaaggtgcaaggctgcaccaagagaaccctctctttgctcagaacctataacccgacttggcttgtgcaatgaacacgccgagtgaagtcggaggggtgctggcccagaaacaaaatacatcggacgtctaatgcaaaagttatcgcgtacttaataaactgtggaatttaactgacataattctacaggttggaacacgaacacacaaagggccatacgttcatgggcacagaatatctgaccggataatggcattgaaaaaaagaaaaagaaacactttgtgcaggggcagtttccatttttttgctacaagacgatcggacgtggtggtattgccatgcatgcatggggcccacaagacattttctaaccatacggaacacacgatctctggatggtttctttctcct

SEQ ID NO: 50418 - DNA, 458 bp, Zea Mays
tctttgacattttcttcaagggatttagtgcatgccatggttgatcccgtctcaagcttcttcaccatgtgatcacggttatcttgagaaggttgagcagtgcacttcccttttagttgtgtcaagctcatctttagcctctcattttcttctttgagctcttgacatgtatcatcttttgttcctggaaattttagctcaaaggaggatttgcttgtcgaggaacaacaagcattagcacatggtaatatagtttcaatttgaatacatgtgcatgagtgaggttgttgggattttaagttttctatcacaacctcatgagcaatgtttaacatgatatgatcatccataagattttcatgagaacatagaagcatatcatatttttcttgaaaagctagattttcaacttttagcttttctacttggtccttaagcaaggcattcctatttactaa

SEQ ID NO: 50419 - DNA, 431 bp, Zea Mays
cagacccaaggcagggggagctatgtcatggcttgacgggggaagatcagcaggaacaatttgaagggcattgtaaggggtgatctcagccccgccagcagataacagacttctcacatctagctcaccgacctctaaggcgacttgtttgttcaaagctgtggaagcatgcatcgccgtcgccccatcggaccgaggtggagacgacccaacatggacgtccatggaggtgtgggaaggagagcccacctgaacaccctcgggggctgggttgcagcttgcgctacccaccagagctggatcactaccggcaacaccctcgggggctgggtaactgccagcaccaccctcgggggctgggtcttttgtagtagccacctctaaggctgagggctcctccatcacctccatgggagtcgagcgactcggac

SEQ ID NO: 50420 - DNA, 783 bp, Zea Mays
gtaaaagttatgggttaaacaagttttaggttatttttaatatttattttgcacttaaataagactccaggggtattattgcaattcccagggacctatctgtaacttgtttcaaactgtgcggggatggcgggtttattttaagggaaggcggggtctcttttgcaaagtggcggccgaggggtacagccaagccccaaccgcccgatcaagtttcaagggtcgagattagaagccgaaggggtacacgatttccgctgatgggttcgtgaccaatggctcggattcaatttacacgagatcaaaccctaggcgttggatactcgatcaacggtccacggtgattgcttccccagatctaatcccatccactcaatctaaatcggacgatgatcgcatcatcttctctctcacgcgctccagccattcttccctctctcatctcacgcggtgcctgctccagcggagcccatccacccgacgacgcaggcgggccatcgcccagctttgttgttctcctctgctaccgccgacgtgagcaaaaactgcgcttagcaaagcgaactacaagaacttggtcttaccggtgattgagacataggccggccgagcgacggtgcaccttcatcaccgccggcgaggttctgcttcttcgtctccatgatgtcgcagacgattccccccatggtggtcgcgatggaagccatggcttgcggtggatagacagaagggcctgcatagcaagattcttataaccagcggcggagtccgatcgggtgaagc

SEQ ID NO: 50421 - DNA, 488 bp, Zea Mays
tcaaagagggggtgtatgtggagcaatccccttcttcgtacctaccttagcataggaccattctcgagcttagtcgcttggccacttggtttggtaggctaacataggaaacttcaaatccttgcaataagcaaagttttaacatctgatattgtcgtgtggcttgttggaaggtctggtcttcatctgatagtgcaattcatgcactctgcagaagcatctagcatcagcccatgcaccttggtttcgtacaacccatatgaaaaccccatgtcttactattgcattcgatgtcaatagatgcatggaaatttcatacttcttcaatacttcggtgaccatcttatgcatcagcaaccaaagacttgcttataaaaagctcttaaacagaacaatctcatcatcctttggcttggggattgtttcttgtctaggaaagtgaatcaagactttgtcatcaatgtacccaagcctcttcaaaaccttca

SEQ ID NO: 50422 - DNA, 369 bp, Zea Mays
cggcgtggtaaggcggaggcgcaggattgggggatggagatcgtggtgctgcgctgggggacggactgttgtcttttgccagtaaactagtgaagaaacgggaaagaacagcggcggctttccgtcacggtttgttcggcgatgccatggacgggatgatgagacatgagaggaacgtgtcctgcgtctgcctcgcgctctgcactgcacactgcagtggcaccgaagagacttcagatagacttcctgaggatatggatcgggatttctgggtttagcatgaccacgattcgaaattagtagctcaaagtacagtctagcaggaagatatttgagcctggttagcacggcctaaaaagaggaccggat

SEQ ID NO: 50423 - DNA, 320 bp, Zea Mays
gccaggccttgccctaatccctacatatcgacattagttataattcgttgcaattagagaacaatgtttccctttttatcaaaattccaattgatgtaataactcaagtacttttaatctgtggtgtcgtgctttattgtcattctctgtgtctcaccttcgtgtgagagaatggtactcgatccttgtcaagtggttaatcggacttgatccgacggactgatagtctattctgatttaactgtatagttgccttctgggcaatgcttgagcacttaagttggaataatctaggaggttccgccacaatatacctccca

SEQ ID NO: 50424 - DNA, 956 bp, Zea Mays
aggggaactcagttcacctccaaattctggacgagccttcagaaggctatgggcaccaagctagatttcagcaccacttaattatcaccctcagacagatgggcagacagaaagagttaacaaagtcctcgaagatttattaagagcatgtgtgctagcattcgatagaagttgggaatccagtctaccctacgcagagttctcatacaacaacagctattaggccagcatcaagatgtcaccattcgaagcactgtatggacgaaagtgccagacccctctcatgtggtccaacgtaggggaaaaagcactggaaggacctgcctttgtcaaagaggcagaagagaaagttgccctgatccgcaggagtttacttgaagctcagagtcggcaaaagagttatgcggacaacaggcggagggaactcagatttgaggaaggagacttcgtctacctcaaggtctctccgatgcgtggtgtcaggaggttccaaacaaaaggaaagctagcaccatgatttgtcggccccctatcccatcattggcagagtaggacccgcagcataccgtcttaaattaccagagtccatgtctgacatccacaatgtgtttcacttatcccagctccgcaaatgcctgcaagcaccagaaagtcacatcgatgaagaagcagtgcagattcagaaagatcttcagtaccgtgagaagccagtgaagattcttgattcagcagtcagaaagacctgcacctcagaggtgaaactctgtaaagttcagtggagcagagaaggagaagaggaagctacctgggagagtgaggactccttgaggagggaatacccttaccttttctcgaatccaatctgaatctcaagggcgagattcctttaagtggggtaggtttgtaacatcccaaaaatcccaaccaaggtttgaaaccctaacctcctaaacccc

SEQ ID NO: 50425 - DNA, 471 bp, Zea Mays
tcacatagagagtctactaattaactcgtaacccacttaaagcactagcgatacatatatacgataattacgtaatgcaaataaccctttccgattcacacaagttagctaatcccaacacgaaagtagtaaaccatacacgagcgccacattttcttagctagaacatgacaccctagagttctatgagaccgcaactttaaacacccaacattagcactcatacgcatcttccatcatgagttccttagaccccacgggaacaagtagagaataatatttctcaacgacttttaactaagttaatagacaggtgacacaatgactactgcggtatgtcattacttcatcagacaagcaaaaatctattctaacaattttggccgaaccgtcgactaactgtttataaaactagcctatccttcgtactatcactttcgccacatcatgcatacggaaagccaatttaag

SEQ ID NO: 50426 - DNA, 610 bp, Zea Mays
ccaactatgcccagcaggactacttcatggggtttggtcctatcaccgaacattacacatcaatgttcgagatggggcacttccccaacctgctgcaagaagtgctgcacgcgctaggaacctacgtccgccccctgtatgaaacaaggcgagtgagcgagcctccccgggctttctactacatcactcgcatccacgtcagggtgatggatgcaggggataggggattcaggactctatctgctcacgagtccctgacaccactatccacctacgctgcctcggtcagcgatgctgccagacggactttggggtctctcagccacacataccggcagcagctgcaggacacgaggttcaggcatcttcctctgcgtctgagtggaggaagccagaccagcatcgttccaggtggagctggtgaggagcgcctcaacaccctagctggtgtggtggccggcctcaacaccgacctagacagtgccaccctggatctctctagggtgcacttggagctggaggatgcccatgccaggattgtcctggaagcccagcttcaaggacgggatctgcctgaagcccaggtccccgccatggtgttgtctcctcc

SEQ ID NO: 50427 - DNA, 939 bp, Zea Mays
gccttgtcgtaccctgcttttgacatacacgcctggtgaacaactttcattgttttcgttagcaacattttctgtctgtatgatttagtaactccatcctttcccctgaagctcttatcaattctttcaaacggtacatcttttcttgatgagacagtgtacctttgcaatatatactttgaaggtatcttttcaacttgtagatgcatgaaggctcttaaaagatgaacacacaatagacctgaaatcatgaagaccaaccattatttttttaatgataaacattaatttgtactacaatcaacaaattatttagtatgcaattttattcttttaatcaacacaatatgtacaaacctgtatgttcccactgtttgcactcgcatgtatactccccagcttctatgtccgctattatcttgaattgatgttgtccccatacaattttattagatctttttttatgttgtacgatccaatctttatcacaaccgtctatgtccttcaatattctgtatgcagtggcgtatttcattgattcctcaaaactattcataacaactctggtgtatgccctagagactctcacttcgaacctatacaatgtatctgttatccttggtccctataagacgttaatatcataattaaacaacgtatttacataaacatgtatgccatacattattgataacaaacacgacataccttgctcatcaatgcctcctttgattctttcattttccttctatgcaacattttcatcatttgtttagcgaactcatgcagaggggtgttcgcatctacatgtgattgcttcactaatctgttcatgctctcacttcgttgtgtagacaccattaccccacagaagtcatttttaaaaaatgctggtatccattctttccttatttcatataatttgcgtagagccatatc

SEQ ID NO: 50428 - DNA, 1164 bp, Zea Mays
ggcggacttgattgctgatcggaggaagcagccctggtgaatagttgaacccgctgggcctcccccaacggacctgcgcggggcaagagcgcctggaagcgatcctggtattcttctaccgtgcccgtgctccgacatttggctagctcgaacaacggtgccgatcgcagcggcggcccatagcggaggttgaggagatccttgaagcgtcgccacgtcggaatgccttcgtcctgctggacctgcatgtaccagagttgggccttgtcctccaaattatagggggccatccacaccttttcttcctccacgatcctctgttgatggaagtacgactcgcagcgattgatgaagacgagcgggtcggacttgccgtcgaagcgagggaagtccatcttctagaaacgaggtggccgatcggtgtggtgttgcccgtcgagaccgccgcccggcacctgggcgcccgaggacgacgtcttgtccttcttcatcgtgtcgatgtcggtttgatgggtattgatcttgccggtgagacccttgatcaatttggtgaggtcggcgatcgtgggttcggccatggcgctggggtggtgtgcgacagaggtgggaggtgacggtgggttggcggtgttgatggctgctgggtggttggttgcggcggaagtagcggatgaactggaagagtcggatcgacatgaccgtgaatccgtgataccaggttgtcaagggccttagacccttagtgtctagggaagggggccctcggctacgtagatcgtaccctcggtccgtcttctccggtgaggttttacccctcttccgaaggcttgagagtggtagggatgagggaggagataactgtgttattgcttatcctctcacagatgccggctacaaggctttatagcctgagttgcaacaggaagggaaactaatctcctatagtttaggatctccactaaagggaagctaatctctataatttaggatttctactaatctcttccctcttctagccggccttccttctccagaggtggcggctgcatgctctgtggattccttccttcttctagccactaattttctggctttccttttctagcgccggcgtggccctggctgctgctcgctctgcagcgcgcctcacgtccctcgcgcgcc

SEQ ID NO: 50429 - DNA, 353 bp, Zea Mays
aggggcgatcaagtgaccaccgatttcgatatggacgcgcgagatctgaacgcgtagtagtgaacacagaccgttggatccaaatcgtgcgcacacgagtagattggagcatttaaaaattgtgaccgcggatcttgcatccgacggctgagagtgaataccggttcaaagtgatagaagtctaatctgggctgtcggtttagatctgacggctgatatcacgcgataccccttcgtgggtccattttacttaagagtccctccgaaatcctgaaaataaacccgccgtccagttttactatgcactgagtctaagatatcttgcgtagagccccctgcacgtttcagaaaat

SEQ ID NO: 50430 - DNA, 552 bp, Zea Mays
gtggaggtctagttgatagaagtgaaacaccaatcaagctgaacaagaaaaggattcgactatatattgctccaagtgtagcttctacccttcaaagggatttcaatgattccaatgctgctgataattgagttgaagagattcatgtctgacacattcccacctaccttatttccatcctccaccgagcggcagaagttgaaatcaccaattagcatccaattatccaccgagaaatgtaaaagttgctaaaccagctgatgaaggccatccaattagcatccaattatccaccgagaaatgtaaaagttgctaacacaagtacaagggagatcccttgagggagaagcccaacaaagagcctatgaaaaaagaacaaaaaaggtgcaagcatcctcaagacccagccagcgggccatgcccaaaaagcgaacaaatgatccccagaatcatagtaaacaacatcgtcaaccaagcaatccaagccaaataagggctgaataaagtgttgtttaataggaccatgttccagacacaaaagaaggaagtcat

SEQ ID NO: 50431 - DNA, 367 bp, Zea Mays
agatcaagcatattgttgagccaaagagaaaaagactagctaatccctagtgatttaggctacagttatgagcaagtattaaggccataaatgcaacacccaaaatcctaatcttggagattcataaaagtttgcccaaaatagtggagttaaaaaatggaactagagacttagaagaaacaataaaatgatggtatgatgggagtgtttctttcatgaactataaaattgggaacacctttcaaagtattcaagtaactcttaatatagtatataaatgtctttccctcaaaataagtaagatgcaaatattcactcttgaactaactcttaaacgggcacacatttaaaaaaatgaaatcctcca

SEQ ID NO: 50432 - DNA, 281 bp, Zea Mays
atctatgctaacctattgataaacaagattttgtcctacccatatatcctagctatcttaactatagctccctagctcggatggagacaccaagatcgaaagaaaggaggagatcaacctcgacaaggaaggatataacagtcaaagtgaatctcgagatgaatcaagacataaacattttggataaagtcttttccttgcgataatctttcttacctcaacctgttcagtttatatcccacataaatagtagctggatacctatgctctcccaatcttcc

SEQ ID NO: 50433 - DNA, 516 bp, Zea Mays
agcccaccccaaatgctcaagatcatggaccccaagacccccatacatcaaaggcctttgcacctttgcccaattgactaagtagtttcctccatgagcttgctcctgtcctttccaaagaaaattcctcctgattttatcaatcaatttgagcatcaattttggcagctctagggccatcataaggtggatgtgggttgtcatcaacactgctttgaccagcacctcgattcaggagtggagccttctagccacgaaggttatctgccactttatccactaagggtaatcgaacatcttaagtaggtttcttaatggtgagagggaacctagatatgtgcaagaaaaactactaacaacgtaggctagttctcccgaaacaagggctatgccctaagatgaacactaaatgggtgctgctgagcttttggacaggttgcatgttagactagagacatacccaaaacaatccaaaattacttaaccaaagcatagatcaccgctggccggcctcac

SEQ ID NO: 50434 - DNA, 295 bp, Zea Mays
ataattttgttgaaacatagaaggattaacaaatgcttaattagctatctgacgaggtggtgctgcttttgagaagatcaagttgggagacaggttaacagattacaggattctaggttggaaatgcagagcaagaaactttcaccaactggagtgtatagtactccttgccaaacttgacatagaagcatgtctgcatagtataccacaacagaacatctcgtgatctcaacagtggatatcaaataacttctccttactggagcttgcaatgaatcttactcatgatgcattt

SEQ ID NO: 50435 - DNA, 684 bp, Zea Mays
attagttgtttttcatagagtatattatttatataaaattttcatatatgtttagtgcatatatttatgtatttcagatgattatagctaatacattattggttacagcaaggtctgtttttattgaaacatattcagattttccttatgtttgaacatgtcagtatatgtatgcaaatgtaaatagagtatagtatattcagatgtttattgagacattattattgccatgcaaaatttatacagtgtgcttttatgcttggtatttaaaacaactaggttcattgattcaatcatatcacacaataaatacatatgcatatccaacagattaatttttacaatattgtgtactatgtatgcagcttttaattttaaaaaatgaagcacgtggaccgtcctacgaataaccccaaacgtataacaattcagtcaagcgaggagtgttttagtgttgacattccgtgcgcagaacagtctaatccatgtccagaagttggaaatcctccaaatgttgacagtcaaactttgatcaatgaaacagtacaacttgattctgatgaagatgacttcatgccagctctgaagaagcgtaatgtttctgaaagccatacaagagttttaagaaaagttgtgacaaagaggattaaacatgaggatctaccccgacaggttagtgttatg

SEQ ID NO: 50436 - DNA, 821 bp, Zea Mays
cttgatgtttgttccgtgcacagggcggcaaccacatacaagtatttacagtttctatcatacaagaatttaatcttctttcagaattttttcaggggcttcatataatagtctgtcaacaacttcgtcgacgactttgttagcaatctttatcatgtccaaagcttctttcatgaccgggttagcctcgggattgtgtggctccggtggtggagaaaggccggctgtaataaagtgtatgatggtaaattttgaagctagaaacgaacaatgaagcaaaaggttctaaataaaaatacctataatcatggcgtgtttagcagcttcttcagctcgcttagcctcctcctgggcatcgtgagattctttctcattctttttaatggcatcatcagccatctcacgaccacccttcatccacacatcagagtagaatttatcgcccaatgtagaggcctcagccgaagggtctctagtgtcgtcaactaagagaatagattctgcctgggctacggccttaacatgttcacacccgactttttctaaaattgtcatggcccctcgagcaccgacaaaagcacaaaaatctccacgaacgctaagtatctcatcaaaagctttggcctcttcgcctatccactggataaccccttcgggatcaccacgaataaatttctgctctgaagaataagatcccacctttccaaagctatcttttagtttctttacgcattccatggatacttcgtagcattttaccttggaatcccaaagttcttcaatattcttctgcaccccgactctttccatttcacttattt

SEQ ID NO: 50437 - DNA, 284 bp, Zea Mays
ctccggcgagccgccggagttgcctcctggccgacgagtctcacttgaccagcgtcctgctcccttcccaaccatgcgtatgcagtgcgccatcgtgtggagaaccgcccgtgcggttgttgccgaggaagacgcaagcagtcactccgtccgtgatacttgcgtgcgttgaaaaagaacgaagcaatctcacgtacgtgagtggagaggactgcttcttacacaccagatcccactttgcaggaccttctgtggctacaaacttagtggcttttcgtgtgtta

SEQ ID NO: 50438 - DNA, 360 bp, Zea Mays
gggggagagaggtcggctgtaagaaatatttgatggtgaattttgaaggtaaaaacgagcaacaaggcagaaagtttcaaataaaagtacctataatcatggcgcattcggcagcttcctcagcttgattagcttcctcacgggcgtcgtgagattctttctcatgctttttagtggcttcgtcagccatctcatgaccacccttcatccacacatctgagtagaatttgccgcccagtgtagaagcctcaactgaagactccttagtattgtcaactgagagaataaattctagctgagccacgaccttgacatgttcacacccagccttttctagaattgccgcaaccccttgggcat

SEQ ID NO: 50439 - DNA, 425 bp, Zea Mays
acaagccaaatgatgactggctgaaatgcattgaagctactagcgacgagctacttggggtatactccaaggccgaggacaatgccttgtccgcagctttcgggggtcggaataagaaaagattgaacagggtatttgatgctattggcttcgtataccttgactattgctacccactgcgagggcaagggataaagagaaagattgctgcttcggccaccacagctgagccgaagggcaagaagatgaaggttctgactcaccggccgtgttatattgaaccagccatgatacctgaatttggcgaaggtacttcttcagctgccaaagcaaaagaaactgttccaattatgcaaagcactgtagagccgagtgtagtaccaaagataactacagttgagccagccaaggctgaagataataag

SEQ ID NO: 50440 - DNA, 1204 bp, Zea Mays
ggcatccaatgcggctacgctggaggcacatggggctatgggggtattgggactggaagcagtggacccaagcactcggggacaatgtgataggtggcaagtgggtagcacgacaaaacggatggctgggagcacaaatgtcttgtaagcgtgtcccatcctgctataggacaagagtatttatagggtaacagaggaactgaggcctaaaataccgtagtgcactcgattacctactacatgtcccgaatatactgtccaacagggtaattgtggatcaccttggcactattctttgttacaccatttattacacccacctcgaggactaacaggtgggccatatgggtccacacccacaaacgtgtatccacttggtggagtccaacactcttcgtcttgtggcctttgagtgggcttcctgagaagggttgccttgcgaagacttgttaagggagggaggagacctctcgcgcttggtaatgactggtggcgcctcgtccttcgtttgatgctcctaggccctcgatgcgtcctaccccccttgccttcatcgatcgtgtggtccctcgtcgatgtgttgctccgatccctatgcaatcaaatagcctttgcagtttttaggagggatcgaggtcaagatcattctctgtcccaatagtagcccccaaggtagtggttcaacttggtgagctggtcccaaagtccttttgaaatgatgatcgaacgctgccctcgatcacaagttgagatgatccccaagaggtttgaaaaatgattgttgtgttgcgattgatgtgaccggtgtcgtggtttgttgtgcgatgttttcaaatttcgaagcttcgggtggctataaatcatcgtccacgtgtggctagggttacttttctgctcaccaccttttgactccacacgtgggcattgcttttgcacctgctctcgatcgtcgatagtcgctcacgccgtcgctagtgctggctcgtatgaagcagttcgcccttgttgccgctggtagatgatgacgtcctcttctttggtatcgtctagcgtggctgcgttgacaggctcaccatcgacgaaggatacgttagcgagttgtcgctcgccacccttgtttcataagctaaaacggtagaaattgggtggtcgtatatttcctcgaggcgtgtgcaggagctatagcagttggggtataggacgt

SEQ ID NO: 50441 - DNA, 444 bp, Zea Mays
gaaacctggtttgtctcactgccgcacataggggggagatctctggtttgacgtgtctaaggcacgtgtcccgatgccatcttctggcacaagacagagaggttagttatgcacgtttttgtcaatggggccattaggatttgagttagggattaaggtgaacacgcttgatctttggctcaaggtttgaaattcagaattcagaattttagaattccctaatgaaatcccacttgagaagcttgtttagagttttatttaaattgttttggccaagcttccataatctttgttgttgcttattatactttaatgtttataattggcccaagccatgattctatatttttcatacccttttcccctttctcttgaattttgtttatagggctcaattagggtttttattggggttgcaacattttgcccttttgaaaacccatt

SEQ ID NO: 50442 - DNA, 403 bp, Zea Mays
atgtttccaagaaagaaatcattgtgctcaagctggactttgagaaggcctttgacacggttgagcacgatctgatccttcaggtgctgtccttcagaggatttgggcccaaatggctgggctggattagggatatcctccattctgacacgtcctcgattctccttaatggtgtgtcgggcaaatcttttcattgcaagtgtggggtaagacaaggagaccccctttcgcctcttttattcgttctagcggcagatttgcttcaaagtataatcaataaggcgagacagcagggtcttctccagctgccactcactgagagctgtggtcaagatttcccgattgttcaatatgctgacgacactctcttgatcttggaagcttgccccagacaattattttt

SEQ ID NO: 50443 - DNA, 662 bp, Zea Mays
tgattccacacaactttgatgagttcatctgcccatttgccctttggcaattcatctagcgactttgtgattcctagcaagattatgccatatgctttgcttcgagatcggcaggctacccaaagcgcctctagacggcgtagagtcgaagagaggtgaagattaagattgagatactacaactagagctacgctatgtctactcctaataaatgataatatagatagattggttcgattggattgcatgttctcaatcggttgtaccctttcatatatatagaggtctggacccgttccaagccaatacccaacagtttctcatgaatttgttaggataatcacgaatgaaataaggactagccgaagttaaagaccgtcttgatcattcgtgtggaccgttcggatcaaaaggccaggccgtcagactgtccatgtacctaatttggtcctcaacaagtgactaatcatgtgtttagtttagttgagattacatgggatatgaaggtcgtataccagtttttgagatggaacgatctgtgtttttttttggtagaacagagaaggcatgaggtgatcctagctattttcgtagaaggggcgatgaattaattggacgtctttttactaatctatttgccaccgtcagatgtgggggtggg

SEQ ID NO: 50444 - DNA, 388 bp, Zea Mays
ccagcccttcaaacttgtcttctaattttcggacggtcgtacagtacttgcccatagaatcactcaagcaatcccgatctttatttatctgacttatgaccaccagtgattctccgtataccatcaacctcttaatgcccagtgatatggcaatgttcaatccatggatcagagcctcatattctgctgcattatttgatgctgggaatgataactgaagagcatatttgagttgttcacctccaggggcaatgaagaggattcctgcgcctgctccctgtagtttcagcgagccatcgaaatacatttgccatacttctgtagcctccgggttgtcaggtacttgttgctcatccactctgatacgaagtcaaccagtgcttgagtc

SEQ ID NO: 50445 - DNA, 520 bp, Zea Mays
caaagacaagggccacacaacaaggacgttgcaggttacaatccaaaagcaaaaggaaattgctgaagccgaggcgcggtagagttagccgaagcaagtcctccatactgcttcgtgctattctccatgcatcctagagtatgtaggtaaccaatagcctacgacttctgtagcttcatcaagtcactcctaagcatcttgggcccaattaccaccacccccaccaatggcgcctgccccaaaccatgatcagcagtcagaatggcaccttaggcctcaacaacaacgtgatcttcgggagcagtctgaggctcgcacagttaatagcactatgcccgaatataggcacatctactgaagacgacacaacgttttggccaaaagaaagccctaatgtggtctattttttgtttttatatttttctgttgcaaaagacaacacaggaaggtttaaccttcaacttgatgtaataaacatgtggttacactatcgagtgtgataaaaccaagtttcgaagcc

SEQ ID NO: 50446 - DNA, 310 bp, Zea Mays
aaagtcagtggtaattaaagttccacttatttaattattggattcttggcttgaggaatgtctcatcttgttaaaggatgcatacatgacatgtgcctgctattgacactttggcttccgagctaaaggtggcaatgactaacaattggcttcacatggcatagttgtagggattagagatggaacccaaggaatggctaaatcatagtatgaaaatttgttatatcatggtgggtcactcctcccttacctgatgaaagggaaatggccttaaaccatttcctataattgattttggtacttgattacc

SEQ ID NO: 50447 - DNA, 353 bp, Zea Mays
gacccgttagaggattggcttctgatggacgaggtggtgctttcctggatccatggcaccctcacggtcgaacttcaggacattgtccgcgtgccggacaatactgctcaccagatctggggtgcccttgaggctcagttcctcggtcaccgtcagactcggatcctgtacctcgagaccgccttccgtcagcttgctcagggcgatctctctgtggacgagtactgccgtcagatgaagacgatggcggacactctccgcaccctcggggcccccatcaccgacgagtgcctcgtgctcaacctcctccgcggtttgagccctcgcttcgatcgtgtgacgcccattcttac

SEQ ID NO: 50448 - DNA, 1441 bp, Zea Mays
tcgctggtgtggacggaggagtcttcggatgaggatttggattatttcgtggcattggatgtggctgcggcggagacttctccgcgtgtgatggatgttgttcccggtccgagtgctgggcgtctgtggcgaagggcgatggtgaagcgtagggtgagtgaggttgagggtggtcgtcttcgtgtggacagggctggcaaatgagaattgttggcctcgccggctggggtaagcgtaggtgagggggagttgcgaaatttgtttgagggtgaagagctgaggataatgttgtttaactatagggagatgggtatcatcccgaatgttgaaccaatgtaatgtgtggtgccctcgctgcacgtatgtaactgtaatttgtatgatgagtctgtgtgccttcgctgatccagacgtgcccgtgggggacttgtgcatttgatctagcgcgtttattatgccggtccggctgcgcctgtattcggtctttgcgcgaatagtttttcgacgaagattttcgcacggatgtgcctgcgattttgtgcgcttgttgtgctagtccggctgcacccttgggcgacttttgcacggatagtcttttgaggaagacttcgattttaagcacttgtcgtgctagtccggctgcacccttaggcgacttttgcacggatagtcttttgaggaagacttcgattttgcgcacttgttggtgctagtccggctgcacccttaggcgacttttgcgcggagtgtcgcacatgagggtagccggcgctgcccctcgcggtgactttgtattggtcgaatgccgaagatcgtcgatgcggtcttttttcgacgtagatttttgtggggtatttttcgcgtgtatattacatggctctgcctcgttaaaaacctcaccccccgggaggaaaagagtgcggtccggaataaaattgttttgcgagttacaagggcgagctggccctggggagtcaaacaataaatttgcggagattgtcaatgttccaagaatgctctaagtcttcgtcggatggcgttgtgagcctgtacgcgctgggggacgccttcgtcttgatgatgaaagggccctcccacttgggctctagcttgccccgggactctgtccgtgctgtccagacgagtacgagatctccttcgctgaattccctcgggatgactgtgtggtcgcgccatgcttttgtttgagcttggtatttgtttagagcatgtagggcgaagacgcggtctccgtcgatgaggtccttcgaagtaggctcgtccacatcggggacggctgacggaactatccgtggtgacccatgttttatttcttgcggggtcatggcctccgatccatatagaaggcggaaaggagtgaacccggtcgccctgcactcggttgtgtttagtgcccagaccgcttcaggtaacaggtcgg

SEQ ID NO: 50449 - DNA, 525 bp, Zea Mays
aggacggcgcattgattctacaaaagacgaggggcttctttgtaacactgttcggctgaaggggtatgagggctttctagccgttcgatctaacactggcggaccagattagaactccaatattatcaatcggtacacgcttactaccgtcggattcaacatctacggctgatcatctaccacggtgcgatctgatctactccctccgatctggttacaacggcccagatcaaaaggtatcatggctgattcttaacggtccgatctagatcgagggtccggattcaatctcgaaagggtatgcctaggatccgatctcagccgtacactctacatcctacggctcgcactgattcacccccaacccactctttttcctcggcatgcatagcggcgacaccgtccagcatggcggcgccatggctaggactaccccacccatcaacccggtgaccaagcttcaatctatatggttcaataggccgtggagcatcgcatggggccatacctgcacttgaagtagag

SEQ ID NO: 50450 - DNA, 681 bp, Zea Mays
caccactgcaggctgaaacttggctgacagtgaattctgttgaactttggagtccatctaagcttgatcgagtgagcaaatgaccaaggttcctatggttgaattggagctggtatataggtgaataactttgttgtaatccggtcggtagcttatcacatagaaatcgaagaaaaacacccctaaagatgctttgtcagacagactgaagaagatcctgatggtacagtgaacgaaaagatctacagatgcactgaacgtgccaccggtgaaatccgcgccacgaccctcgccgacgtcgcgattcgtgtgcccaggtgttcggataacagcgggcagtgaaagatctcatcgtagggaagagttggagccttatcaccggactgttcaccgcgccacttgccgcgcggtcggtcgaagtgtcctcgtcggagttcgccgccctttgtagccatgccacgtgcttacgcttgttatcgtgtcgcaagacatcgcagtggacaacccgtttaccgcctgggtctttacctcgttgagcgccacggtaggtgcgctccggtgactcacctttgctctgaccgcaagttcatcccatctcaaattcgcgaaacctttgagtggtctctataaattgagtgttcagtgtgctccgctagtttgttacgaaccccgagcaccaac

SEQ ID NO: 50451 - DNA, 922 bp, Zea Mays
cctgtttttgacacacatcttagtgcacaaatcaacataacaaacgctaataaacaacgccgcacctacgcacaattccaacccgtcgtgagcgacaactctccccatcaccaccaaactgcagcggcgctgcttgataatttcataactttaaaattataacagcagtgatatcaatcaaaaactctgtaagcatttacatagaattccccacaagttttatattcaaatgataattaaattccaaaccctaattagcccaaaacagtccacaagataaaccctgcaatctgtttttggacaacagcatacccggattcaaacagcgatatctcctaaaatttaactccgaatcaagctcataagtactcgttggaaaggtatgacaaaactctacattattatcatactgattatcactaattacccacgaaaaatcccagaaactgctaatactactgttattcgcccacccgcaaatctgtttttttggacaacaacatacccggattcaaacagcgatatctcctaaaatataactccgaatcgagcgcataagtactcattggaaaggtatgacaaagctatacatgattctcccactgattcccactaattacccacgaaaaattcccagaaactgctagaactactgctgttcgctcacccacaaaatttctggacaacacctctaccaattcgcatacgtaaacatctaatcgattgaattgcagcacaaataaacaagagttaatcacaaaatcaccttgacttctcctcctttcctccctccttccttccaccaaattccaattggagatttgcacccacgcgacgtagatcaagagggagggctgcacctaggagaggagaagatggggggggctatggtttgtgggatggtggctgcaagagtttgagg

SEQ ID NO: 50452 - DNA, 1334 bp, Zea Mays
ccctacgtgaacatccatggaagtgtgagagggagaaccaactcggacaccctcgggggctgcgtcatagctcgcgctacccatccgagccggattatccccggcgacaccctcgggggctgggtaagcgctagcgccatccttgagggccgagctctctgtaacagccacctctaaggctgaaggaccttcacccacttccatgggagcagaacaatccagaccagcctcctgacccttaagaccgtgctccaaggtcgatgaggcacgagatgccgctcgggataactccagcccggcatcgggcacatcagcacaaatatccatcatcccaccatctgtcagctccgacaacagatcctctgggaccatatcttcgagagtctgatcaaaatttgccagagacaattcttgtagaccaacgagagcagacaaagctggagaagaaacaccactactttccccgctggctatgtagcgccggttgttcttccgaattagagggacttcattctcctcttcctcatcttcatcaataatgcggacggtacacccattgggatcagctgtggtcagattacacccactgggttcagcatcatcaaggtcacacccattgggatcagcatcagtcgggtcacacccattgggattagcttcagcaaaaactggcactggcacttcctcagcagcaggagcagaaggaccggcatcctgatccaagcatgacactcggcgaagacgtctctttttctttttcttccccccagcaggagaagttggttgattggctcggcgaggacgcttcgggcgaacactatcagacctctgaatatccaaagctttgccggcctctgggatgggtgctacagccagtgtttcagcaggggctgcatcagaggaatcttcagccaacatatccagcatggcacttatctctgcatcacttggattcaaaggtacctcgaaatgaacctgcctctcgttgttagggatttcaccaagtgaggcaaccaaagcactaacctcttcgggagagggtcgcactctaaggcccaaaccgctatcaccagaacgaggatttgacacaaaactggtaaaggccttggaaggaggcagattccaggccgagtatgcaacaagagtgccgatgttcgacaccttgcctctgagtatcatctcgagccggctcaccaaatccacagcaggaatccttctgttggtaacccgggttgaatcagcgaggccttgatacagataagctgggtatcctttgtcttttagtggctgaatgttcttgaaaatgaaatcggtgaccacagcttctgcagtga

SEQ ID NO: 50453 - DNA, 448 bp, Zea Mays
gtcggtgtttggaccacgggtccttaaccaaccagtaatgtgccgcatggctggctctagatggtgtgcgagatgacacaagcgattaccctggtttgggcttctcgaggccctacttccagcagaggggatgaggcttatattactcgcaccgtggtgcctatagtaggggtttacaagcacaatgggagaggggaagtctccaagtccctagagatgattgacacaagtgccaatatctaagacaaagtgagagagcaagaactcgtctacgtgtgtcccccttcgccaatggagtggccactgccctatttatacacccaggggaccgtccgtgacgaaactgagtcttgtatttgaaggagagatgccatggcatctgacctgacggcgaaccgtgcagtagattcacgcgtgttgactctccgtagagagccgaggggtcgtc

SEQ ID NO: 50454 - DNA, 572 bp, Zea Mays
cgcactggccaaggcggctgccagaggcgagtctctgccctccgacgtgttctaccatgtcatcggcacgccagccgtccggagccccgaagggctccaaataacccaatgacagcgagggccaccgcatagtcaaccttattatgaccgaagattggcgggcaccaataaccctgttcctacaagggtactaccacccaactgacatcaacgaggccaagcgcctcaaacatcgaagccgggacttcgcgctgattgagggccaactctacaagaaaggggtcagtcagccaatgcttaaatgtgtcaccgagaccgaaggcgtccaaatcatgcgcgaggtccacagtggtacttgcggctctcacgcagggccaagggccctagccgcaaaagtgatccgccaaggcttctattggcccgcaatgatctgcactgcaaatcgggttgcaaggtcctgcgaagcctgccagaaattttctcctcgatcaggcagcccctcgcaattcacaaaactgatcgcccacacatggcctctccagcgctggggcctggacatcgtcgggcccttg

SEQ ID NO: 50455 - DNA, 1102 bp, Zea Mays
ttaacagaatcctaagaaattaccttaaaatatgggtaccatcttggactgtttctgattttaagtggggtttcaccagtgggtgccttaatcatgtcatcccttaattcaccaatggcatacaaaacttctttaaaatacctgctaactgtctccgcagacctcctccaactttggtgtatgaccctaaaacgctggttgtggccaactacatgaaggaacatggctacttgttcctccacattgttgtggatactatctctaagcaggttcctactcttaagcaactcatagagctagaaaaagggggttcttctcatgtgcaacatgttaacacactccacatcattgaagttgtaaattctattcaagtttctgtgcctctcttcacccattgcactcattagggcataagtgatcctaggtcgtgcacttgacactggacaagtctagaaacaaaatatgcatacacagcagcaacaagtccagctgccttcactattaacatgcgcctctcatcatcatcatccatctctagacgcaaaggaacagagccaagtatcacataaaagctcaccagcagtaacatgatgcagtactagatcataggcatggcaacaaaataagctcagatctagggaccaaatcataggcatggcaacaataagctcagactaaatgctataaaatcacaggcatggcaacttaagctcagatcattcaagaaatgaagggggaaaggggaggggaaggaatggcgtctgttataccgaacaacaacaggaagaaggacgaagcgccgagaggaagcagctacaaggcgtgaggaagcagcaatccggatgccctgtcaagaaattaaaaggggattagaaaccctaggtcgcgaaatagaacaaaaaacgaagctccaaacctacaaagcacgaatccaccacagatctgaaaagagaagaagaaatagggggaggatgggaggaactcggcaccagtcaccggcggcgacagtagagcagggcgcgcagaggaaggggaaggaggtggcggtatataacagcggtcacggtgggaaggagggaggtaaccacatcgttcgcgccat

SEQ ID NO: 50456 - DNA, 662 bp, Zea Mays
gccggataggcacaataagtgcgtcaatcgacactccgcgcaaaagtcgcccaagggtgcagccggattagcacaagtgcgcgaaaacgaccaacatgccatattacaacataagttgcagttacatacacttagcgagggcacctcatactacatcggctcaaccttcgggatgatgcccgcttccctataattgaacaacattattttcaattcctcaccctcaaaaagattccacagatccacctcaccaatgctcgtcccaatcgacaaagacaatagctctcgtttaccaaaccggtctactcgaagactgtcccgctccatccccatccgacggcgcctaccactccgtgaaacctcgcccacactatgcttcgacaccaccctttgtcgtcggcacttggtcctcgcactaggaagaccagccacctcgccaacctccacctgtggcgaggattccgccgtgtccacatctaacgcagcaaaataatccaagtcttcatccgaagactcttcggtccaggaaaacgtactcccagactcagcatcatacaagaaacacccagatctagaaccagataaattgtcattggcaggcactacggttgcggccgccacaaaattagtatcgtcagcagcggttgcttgcgcaggcccat

SEQ ID NO: 50457 - DNA, 480 bp, Zea Mays
caagggtgtcgctctctattggttcacgcaaggacaaagtgttgtctacaagctagcgactagttgttcatcgctctgacatagtgaactgttcacgatcgtatataagtcccgagcctggtcacccataaactctctagataattatcgtactctcgatcatcattgaactatttatgtgatgtcgatcaccaatagtaataagtacacactctcacttaactctatcaaactcaacaagatcaataggtgcatgcaaattactctcttacacactaatgagactatcaaccaagtgaatttcaaatctcaagcccctcggtaggcaatgactctttcacacactcaacataggtcgtttcaactattaaattggacaagagtattagtatgagctaattggtgggatatttatagcccccaaccccaactagtcattacagtaatcgcaaaacctatgatcgttggatcatctgacac

SEQ ID NO: 50458 - DNA, 675 bp, Zea Mays
tttggaaggagatgaatgggtacgagttatggagcaaaaattcggcctgatccgatgtactgaaacacagaagcccctattcgccacctaatagttgagaggtcctgccagcacttggtgggcaaattttttagccattcagcctgcaagacatctggtcacgtgggcagaattcaaacaggcattcagggaacattatgttccggaaggggttctatagatgaagttggaggagttcatacatctgaagcaagggggagttccgtaatgcagtatctcagcaagtttaatcacctctcccaatatgccatcgatcaagtggacactgatttaaaaaagaaaaattgcttcatgagagggttgaatgaccgactccaacgcaaaatggctacgtgcctggatctcacctatagtagggctataagcacaacactgtcagttgaagccaagaattcgggccaaggaaaaatcaagggatatgagggtgaaggatcatctcaggggtctgaaaagcggaaaaggttggtaattcatcccttcaacccaaatcattcttctcctcatccaccctcagatccctttaggcaactcgtgttcatccgtcccactcctgcccccgccctgaacaatcagtctagtgcccctggtgctcgtttccccgccctacctagttcc

SEQ ID NO: 50459 - DNA, 653 bp, Zea Mays
actgccacctggtacgtgccgtgccctgacaattagaacctagctactagctgttctttttattggtatatgttcgtcagttcaatacttactgctctatatcactaattgcagcggtgggaggcgtggatggttgaattggtgagcgtggcgtgcctgtccatcgcctgcaagctggatgaggtcaacatcccatcactccaccatctccagatggaagaggtgatgagccactcgttcctgccggcgacggtccgagacatggagctgacgctgctcaaggcgctccaatggcgcctcgcctgcgtcacgccctactctttcctccttccccttcttaatactcctcctcacacagcagcttggactagccgctgcactcgtctcctcatccgctccctcgcaggtatgtaaagtaatctgcagcttcagctagcattaattaattaattccatctaattgcaattaaattagtgcgtgcagagcccttgttcatccagtttgatgcctccgttatagcctcctctgctcttcggtgtgtggcgctgcaggatcatcgacaccatcatcacaacactactactactgattatggtagctgcatcatcagccgccttgttcgtcctgcaactgataccttcaacgccttgtg

SEQ ID NO: 50460 - DNA, 897 bp, Zea Mays
acggtccctacggaccctgcgcttggatcctatggaaggaactagggcctcactcggattactcggttgaagctcaccgagccccattgctagcccatcaaggaaagtgtggtacagctcacatccccccatttcctccaaggggatgcgtggggtagagtaaactaaaaagataggataggcctcctagacggacccctgcatcaagtaggggcttgggggctcgcctcacacaagtatgccagacagaagaaagttgcacgaaaagcaccccagacccaaaaagggcttgagacaaagcaaggccagggggtcctaaaacccatacgcgtcatcagagcagctaagtcgcacatggagccacgaaagattaccaatcgttaaactatggacgatggcgtactattcccttcacaacaccaccctaagcacgacgttcgcagcagcattgaaatcacctaacaacatgtctagatctaccgctgacgaaccctcaagcggatcgatggcattgtggaaattaccaccaaagtgtagcagcacattggaaagggccactgtcgcgccccggtgaagtcccaagctctatggtctcgcacgcacgggtggggacatcaaggagatgcaagtcacaatcccgaccatgaacacgaatgacccttgtggcctgattcatgcactggtaaagacacgaaagctcaggtcccagcaagcataatgaacattatgtcttacaagaacaaaaagcggtggatcaactttttcattattccgggaagtcgcgttggagcacattacaacgtggggtcagcgagcgctacgaacaatgtcgtctatagacaacctacgtacgacgtgacttactgcctcatcataatactccaacatctcccccag

SEQ ID NO: 50461 - DNA, 487 bp, Zea Mays
atcgttttctcggttccagtcgattgtcaacaagatgcgtgccaacaaggcacatcttccctatgatgatcacgagagagcgctgaagttgctacatgctctagatcgaagggtttgggaggtgaaggtctcggcgaccatcgagtcgcccaactacaagactctcactttggatgagcttttcaacaagctcaagtccatagagattgaccactggacccggaccaagatttagaaccccagtgcacccaccatggacttggtatctagaggtggttcctcctctaacccctcactttctatgtttgctctatcttctttgctatctatcacagaggagcaggtggagagcctcagggatgacgagctagcacttgtggctagtcggttcacgcggttccacaacaaccgccaaaaccggcggcgtggccggttaaaggatagatgcttcaaccgcaacaacccgaccacttcatcgccagtttcc

SEQ ID NO: 50462 - DNA, 535 bp, Zea Mays
gtttcgtagccgcattttgtgaggtcatgtctcccgctcgatctccatctccatcacctcctaggttttgtgttttctcgctgtatagtatagcatgcatgccacgttgaggctgaatgagaagcttggagtttagccgtgatcctcccaacattagtactactcaacacttgacacacaaaaggcgaatgtatgcccgtctctgcgaccgaatgtggttgtcagccagagaaagagagtggtatggtactgtagcgtatcgccggccggagtagcgtaccggacttccgcgtgcctgtgaataatggcatggcactggcacggaccatgtgtactactggggtggtctggtgagtgccttttcgtcagtgggtcgtacttcgtgcactgtgccatgcccgtgtactgtagctgtgcgcagcagagtcgcattgggcgcagccactgcacgcctacagccgtaggagaaggcgtttgctggcagcatctactagctagctagctagagctggacgattgcagatcgacggaatgg

SEQ ID NO: 50463 - DNA, 407 bp, Zea Mays
ctggacgcgtcgcgtccatataggagccacgacccccccgggttcgcctcgccatcctcttttcccttgccctcacaaccaccgccgcaacagtgaaagaaagtcgacgttcgcgtaaagcagtggctgtcgcgcttgataacccacctggccgctagtcggaactcgacgtagggttgcggagactcgccgtgaggttggcatcgtgtgcgctcggttcatcggtcacgtgtgcaacgggattccgaggaattcctcgtcggagcatcaagcaccaccgtggagctcgcctctccgccgtcagtcctctgcgccgcgccattgacggtaaggaccctccccatctttccgcattcgctatggttgcgttgatccgatcgattaggtagattcgtgctctggtggcg

SEQ ID NO: 50464 - DNA, 333 bp, Zea Mays
gacagcaaacaaattgcaggtatcacactcaactgtactgtgtatagtctgttcccagtgcgaggtgcactgaccaacaggttatagtctagatcaaatactttcaatctaccagcaaataatctgatgtcatagcctgcttcctctagttgtccaagactaattatgttgcttttcaattgtggaatgtagtacacactagtgagtaccttgtggtcaccttgtctggttttcatcaccactgaacctagtccacagattttgacagtagacccatcaccaaacttcactgacccactgacagtgtcgtcaagttgagaaagggtagacttg

SEQ ID NO: 50465 - DNA, 664 bp, Zea Mays
tcaacgtcctatatgatcacgcttcggcatcagaagatcttcagccgcactgaggaatgacgtgcaagtgtgctagacaactttcaatactatatgcacctatatcgacacgagggatttgatccaggagcatattgcttacagagtatggccccttgcaagtggatgggaaatgccgaaggaggctgccgctagctccagccaaagtggcctgatttaactgaaatacacatttcggtttagagatcggtttgacgagccgaatgatgattggttgcgctctatagaggcaacaactgatgagctgcttggagcgtacttgagggttgaaaacgaagctatgacagtcgccttcagcgctcgagggaaaaagcgactgaatagggttttcgatgttatcgggtttatctaccctgattactgttgtcctattcggaaacaaaaggggaaaggaaaactactgcttcggcgtcttctagtgcgccgaaggcaaagaaagtgaaggtcttgacacgtagaccacgacgcattgagacgacagatgtgccatagcttattgaacatgcaggggttgctcctgtcatagaaccaagtcatgctgtgccagtcgaggctagcacaaatctggccaaagagccaaaattagagaagacaacagatcagt

SEQ ID NO: 50466 - DNA, 290 bp, Zea Mays
ctcggggcaacatttagagcatgctctattatgcttctgtccactccacataagtcatttgctgaccagacaaagacatccttaatgtgaaacaaaaacctcttgacatcggattcatgctccgaagttaattagttgctgaagaaaaccctttggcctacaacatcttcacaaaggagaactggcttcatctgatctatcgaagatgctttctcttttacttgttgtttagatttctgagtttgtgcttcatcttcatctatattatagacaattttaggctcttgtag

SEQ ID NO: 50467 - DNA, 378 bp, Zea Mays
gtcccaatcagatgaaagaaggtgcagttatgtacgtaacaaaactaaatgcagaggggtttcctgaagaaccacttgacgtggttacaaagtttcaaaattcttgcgggtctactgttagagatatagtgccaatcacacttcagaaatggaaggatttagatgaagacacccacaataagctatgggctaagttgtctgagtcattcaaggtcccaaaaggcatagaggatgcagtaaggaagtcgatgctctctgctatggccaagatgtttcgtgggtggaaggccgagatgaatagagattttgttaagaagaataaggttcctccgcccaagaaaatggggaaaatcactcaagctcaatgggagaaatttg

SEQ ID NO: 50468 - DNA, 273 bp, Zea Mays
ctgaaagttggatttattttgcttcgggtatgggcagtccttgatgaaatgttcggacttcccacatttgaagcaaccactggaggaactgggaagggcagagaaacgagtaccaagggcactcggctgattgttaggagcgggggcagtagtgggacgaataaagatgggctgcttgaatggatatgaaggtgggcgaggtgaagaacgattttgattaaaaggtcagatcaccaacctggttctctttttaggcccttgatttgacctttc

SEQ ID NO: 50469 - DNA, 498 bp, Zea Mays
ctttggctctggaactacttctccagcaaagcaaatcagtccatcttcattttctctaaagtaacctagcttcttcatcacaaccaagtcctctgctcttactgtggattttccaaattcaatatcaataggtttggctgggcacagaatgctatcgtcctcttcacttttgttgtcactcccgatttctgccactgcttgtttagcttcggcattggaggtaccttcggcagtagctgtctcttacacaaccagacctgatcacctcatcacttctaatatgggcgctgtctcaattacttcagtctcatctccctcacgggacaccctggcagtggaccttactctggacatttcagtgttcagtttctttcagacgaagctgatcttaagtgacgaagcgcttgtttgaaaccacgatgccgagagcttcgactttagttaaaattttcaacagcacaatagtgcaatggcaatgaatgttgtgataacttgtca

SEQ ID NO: 50470 - DNA, 321 bp, Zea Mays
cctagatttaccccagtttcacttgctctatagatttatagttctataatatgtgcttccttgtcaatctttgttactcaattttgctagataatcacttgtcattaatctaaataacagtgttgtcatcatagatgaagctcacaacttagttgattccttgaataagatattcaagtcaaagatcacatcttctcaggttactctcacctttcattaacctttccatcacaatctggcaaatagtattttgccttgtgccataggtcattatatttagttgcaactgtattgctttgtgtttcattcaatgaacataaa

SEQ ID NO: 50471 - DNA, 627 bp, Zea Mays
ggcagagtagataatgaagtacatctataattttttgcgattttttgtcacttttgttacttggtttgcacagaaacttagtttgcatgttgccttaacaattgtcttagcatgatatgacaacgagcattcttaatgatatgcaacttgtgtaagcatggtatctcgattcactaacttttgtcacagatttcacattttcacttatcccatgacctcaccacgtagatgcatcacaaataatgaggaaatagtaggtaaaggtatatcccatccaaacaaagtaactttattcccaaactatcctaacaatcaagttgcggatcaaacaaatcaaacatgagttcaccataatagaacaaacgagcaccaccttaacgaactaaggactaacgactaggaactaaggatgcataacaaaagtggttgattacatcgaggactcaactaaactagatacctaagctggtcctataggtaggggatccatatggaagttgttgttgtggttgtgacctgtagtggtggtgcacctcaagacgggtgggaaggcctctctgtactcaacaagctcagctcccatcttctagagtcgctcactggtctggcacaactcatccaaagcat

SEQ ID NO: 50472 - DNA, 764 bp, Zea Mays
gtccttcaggcgaagaaaattttgaccttcggcacctgggcagtcaggagcttttcgaagaagtaaagttggagctaaaagaatatgccatgttgtgtggataccaaccgggagctttggtcttcggcggggttgatgaggaggtcttgggatgtatccatgatcgcgccagagcgaagatagttgacactttatcaaagagtgtcggctttctgaagctagagactgatataccgacgacaacatattgtcgatagcttattctactccaacttcaaggtgagacttttgactaagttactattattatcctcgtgatgaattgaatgttctgactataacttgttgttgcagagcatgctgctaagcaaagcgctgaaaatgcagcaggataacaaagataggaaaaacgagattataattgaaggcttggaaaataagataaaatatcttgaagcttctctagagaagaaagatttcctgctgcaagcagtcgaaggctccctcgcggaagcacaatctcagaacactaaattaagcgaggaacttgacagtgttcaaacaattttgaagaaaaaatccaagcgatttgaccatgaaacaaaagaatttcgagcaaaggctgaagctgaggccgagaagaatacgaagctgcatgagtctttgaaagaccaccggaacaagtgcgcggattttgccacccggtgcgtaaaccgactgaagggaattttcaactcagttggagctgctgccgaagagattac

SEQ ID NO: 50473 - DNA, 285 bp, Zea Mays
agaaataaccggccacgttaaggcgatctacggcggcgctcacggacgacaagatggtgttcccatcaacacaccgtggtagagttcaatcgacaaggttcataagcaaacagagatcatagggatactaaaacacgagacagggagggtcaagctcacatgaggagctttggccacggtggagcacctcacggcggcaacggtgaccgattctagggaaatccgatgacttcgagctatggtggacgagaagggatggctgaggatggactgggcgcgtatcag

SEQ ID NO: 50474 - DNA, 348 bp, Zea Mays
cgctttttagttgctctttgaacacaagggtgtatcctttacagctgtttgggtcattttcatgactcacttcttagcttaacctccatatgcaaagctgaaaagaaagcaagtttggactgctctggtgtagacttaaaattccagggcatatgaggtaagaaacaagtgttgtgccattgtttcttgagctacattttttgttgaaaggaatatgcaggaacataccttgttgtgcagttgaaaggaacacgcagtaacatacctagtattccaacaaaacataccttcttcaaaggaacaagctggaacatactttaatctatgtttctagttttacaatataat

SEQ ID NO: 50475 - DNA, 1063 bp, Zea Mays
ttccttttgttatttccgagctaaatgattctgctacaaatgggtaatatcagatttgtgcttatttatattcttcgtagttctattgtgtcatgtgaataactaattaaactctccaacagtaaaatccctctctttcttgaatcttattctctgacctgtaaatagtgttctgcttcctatcactcaatgcagcaaatgaaactctcttgttttttgaataatggtattacgtccaggctaaaggaaatgtagatagttcctgccatttgtctttatattctgtgtatgcagtcaagttctattgactcccaacaagaaatggagttaatataaggagtgctttgcttacaaatatcctgtaaatagtgttctgcttcctattgttcaaccatgatgtgtgcattttcatttaaactttctttaattggtaaaggtacatcaccgctgtcggcttctcctgctcactgctcctcttgtgcacgtctctcatctccgacaaggtattgcttttaatttgtagcgcaacctcctatacaacttctgtttctgctaactcggtgcaaggtacgatgccgccatcccaatccctacccctagatcgagttaatacccatacatacagccatttcttttaatcgatgaaaggtatgatgcaaattgttaattagaatgtgccaattcacaagcaaactttgttgattactttccttttgttatttccgagctaaatgattctgctacaaatgggtaatatcagatttgtgcttatttatattcttcgtagtcctattgtgtcatgtgaataactaactaaactctccaacagtaaaatccctctctttcttgaatcttattctctgacctgtaaatagtgttctgcttcctatcactcaatgcagcagatgaaactctcttgttttttgaataatggtattacgtccaggctaaaggaaatatagagagtaccagtcgtttctcattatattctgtgtatgcagtcaagttctattgactcccaacaagaaatggagttaatataaggagtgctctgcttacaaat

SEQ ID NO: 50476 - DNA, 562 bp, Zea Mays
ggaaagctggacgacttctgacgttctccgcaccataaaacgagacccgtgatgctctgttgctgttttaaatgcagtactccgctctgtttcagaaaatgttcatattacaaataaataagtactattttatgctgttacaaataaattgtattccttagttttaccgttctatctatattgtgcatggaacgtgttcatttccaacgaaggtttaactcacgtaaattcaacacatgtttctaatgaaggtttaactcatgtttggaacagtatatccatgcgctgctgccattgcagttgttaagtgtaccttaaatcctcatgttcagatgttaataatacgataatttagacatttaagcatatagactccagacactgatatttaataatctgattagtcccgtaaagcactagttggttgtctgtatttatctgttttcttttttcaatcagaatctacaatctcataatctgcgtatccaaacacccagattctacccaccagcttctctccacagcagccgaaccaaacacccagattctaaccatcagcttc

SEQ ID NO: 50477 - DNA, 452 bp, Zea Mays
ctttgttccgttgcgctcgtgagcattcaactgtcacgggcgagggattcaggctggtggcctgcgttgctcttgctagtccacgatgaaagcgactcacagagaggcttaccagttaccagccacagtttttggggcccccctttggtgatcttggatcctagcttccttgtctgtatgggccacgcactaggaagtgaagcggacctagcttgctgctactttagagtacctcagtagagctagagactggggacaaaaatatatacacacccctgtcttctacagtagtacaggaattgcatgattagtgtgttatccgtgatctcgatgaataataagaagcgtcgaagctgagccaccactggtgatgaaaagattattcgctcaaactgtcttggtctgcgagattgagagcacactttcgcctcgaaatcccatgcaaaaaaagt

SEQ ID NO: 50478 - DNA, 532 bp, Zea Mays
ggacgaggtaatggaagccctgggcttccattagtaccaggaagccccagccaggtatagccacgtcccgaaccagcgtgcgtcccatcgagcacgggttcttactcggacatattttagcgtaaaacatgaacaaaaataacgtaaatgattacgaattttagcgtaaatcgtagatctattttgaaacggtgaatgcgtaccgaaaattacggcgtaaaaatctcgcgcgtcccatcgtgatcgggttctgactcggatagattttagcgtaaaacatgaaccaaaacagcgtaaatgagtacgaaatttagcataaatcgtatatctgtttcgtaaccgcaaatgggtcccaaaattatgtcgtaataatcgtgtgcgtctgatcgtgcgcgggatttggctcgaatagattttagcgtaatacatgagctaaaacaacgtaaatgagtacacaatttagcgtaaatcgtatatctgtttcgtaacagaaaatgaggcccgaattacgtcgtgaaaatcgtgtgcggcc

SEQ ID NO: 50479 - DNA, 529 bp, Zea Mays
gcaaccctcacagagcacatttcctccacctgctccgagaggaagatgaggccgaagctttggtggcagattccgtgcacctccaaggaaaccattttgcttgtttttttggtgaggataagggccacactacaagaacatgtcaccataccatcaacaagcataaagagtttgcttcgttagctacgctaccttcacaatcaaaagaggtcttcagtacatgttcatactgttcaccctacatcccacgacatgtcaaacttagtcgcaagagccaaggacaagtctgccttcaacctcaaatgcctcaagtaacccagcaatgagtgtatggtcatgagttgcctccttcatcccaggaccacctccttatgatcatatcgctgctaatcaacccaagttcccaaggcaagaactacaacaaagggatagaagggagtgatctgcaactcgtattatcaacagtatggtcccagagacgaagcacatatattgaggaccctaaggggctgggtaagtgagcccgaag

SEQ ID NO: 50480 - DNA, 492 bp, Zea Mays
gtgttccaaaccgtgtgttagtcgtttgtgcttggagtcatactagctgggcataccttgtatttataggcgatctctcagcacaccatatgcggagggagcatcaaggtcaaggtcagccagcaggtttgcaaatgtgtctctgctcagtccgtccgtacgtcgtcgtcattgtccctgcatgctggcggcggcacccaacgaaacgcatgcaggtttccaaccgtatgggaagtatggaacgtaccctcctggacatttgaggtcgtcctcgtcccgtcctattgctagctggctacttccatacttccaatctagggcttcgccgtcgtacgtcggctcacagaaagcagaaggcggaaagataccacgatgacaagcgtgcgcacattattcaactcatgcatgcagatgccagctgcctgccaacctatatggcttgtgcttgtcccacgatatacattagggcatatgtacaaccattaagcaatt

SEQ ID NO: 50481 - DNA, 276 bp, Zea Mays
agggtgtgcacgaggaagaaaggagacactaacatgtgggtcatatgcgccgtgaggaagcagaaccatgcactgcaccatggtctacattagattattacagagtagtagagatttggacagcagccccaagtcttcaacacaacggcatcaccggaccgcgatcaacggccaccgcccagctctctccaaagcttaccttacgcgccagtgccccgctctagcgacgcgatcaggaagtaaattggcagagccccgctcgagcgattatcgacg

SEQ ID NO: 50482 - DNA, 299 bp, Zea Mays
ccagattcttcccctctgtccactgctccacaacagtacgaatttggatatttcccgtggggagagcagccactagcacctaggctaagcacttcccccttatcttcatttattaaaactacaagtgaaatcacagggagacgagattcttctttagttttccccaattcagactctggttcactgaaacagcactcatttctccattgcaccctccctgttcaggccctctgatctaccaattcttcgcagcaacagaccactctcccttaaccaaaattattctctacttgtagctc

SEQ ID NO: 50483 - DNA, 593 bp, Zea Mays
tgtagggactgaaaacagatcctgcaagaccatcaatgaagaaagtggaagtcataaaaagcagaagatcctgaagtcattgtaacaaactgcctaattacttttgctactgtccaatgctggagcgacttgggttcccaaggaagtggggtgaagagcctcctagggacccctgaagggatcctgcttggcaatgaatatgacaatgatgtccaaagtatcaccatcagtggaacaccgtagtccgcaattaagctcctttgccatgctgcaggtattatctggagcattagtaattattgtgttgaattaaccataatggaaacggaagtacgtatgtgccatatgacaaaccagtgccatatagcgatgaccttacgctcctgctagctaatgcagtatatagtacacccattgaaaagataaatccaagcaaaccattaatatatagccactggaactggaatgttgattgactttgattactaccgtcaggggcactgaattcaccaaccatcccctatatatggcatattatgcgatcagcagctaaaactaaatcattcagatttaacagatgtaaattgcatacc

SEQ ID NO: 50484 - DNA, 593 bp, Zea Mays
ggcaagcgctactccaccggcgagcctcacagcggcaatcggcacgagctctctctcacgggtaacagcgcgtttcactctccctccctgatttctctctgcaggcgacgcggtgcatcccgactcgtgggcaactgcggcagcgatgtcatgcgcatggcgatccggggtcttatcccacgacgcggcggactcggtcagtcgttcctcaaatcatgcgtggcggcggagatttcggtcatggctgttgcggaggtgcgggatgacacgcgggtcccagccgcagcggcgtgcgtgagatgaatgcgacagacagacgaggtcccatattccagtgaaacggatttgcccaacgcgtggatggccactgacaggcatggcccgcctgtcggcgcacgtcagtggctgggttgtacagggcaactggttatctgggccgagaccaagagtttgagcccacgcgccattttctttttttcttttctttattctttttctatctttccaaattcaatttgcattcaatttaaattcaaacctcgcgccaattttatcctcaatttatattgtggccttaaaagtactaatttttg

SEQ ID NO: 50485 - DNA, 343 bp, Zea Mays
tagtgctacgccaagttcatggccatacccaactatacatacctaaagctgaagatgctaggcccacgtggagtcatcatggccaccgctccattcaaggcagcatacgcctgcgaatgtgctagctccgagttgatcccggcgcttgctaaatcttagggaggcgacagtctaggcaccgccgatgtgactatggtcggccctgattccgccagacccaaggagcaaggaggaggccccaagacaatcatgagcatcaccgacgtcccaaaagtgtgtgtaggtcagcgaatagagaggcacgtgtgcaggcacaaaacgcaagggtttcccagtgatggag

SEQ ID NO: 50486 - DNA, 337 bp, Zea Mays
tgctcccgttggcaacgtcattgatgtacttggcgtccttaatcatcatttgatggctatcaaatttgccaggtacctccttgggcaccatctttgtatacctgagattctcacgaattaaggagacaagtgtaggatctaaaacagtaaatggccttagcattaggcacacgactttgtgatccatccatcttgtgctcctatagttccacacttggttcacaagggactttagcctgttgtacatcttttgtggcccttctcccctcttcatggcaaacctcccaagctcaccttcgatgagctccatcttggtgattttgaccatggtgttgcc

SEQ ID NO: 50487 - DNA, 1069 bp, Zea Mays
ggattggaggatagccccgagcgtagcctcaatcaaaggtcacgggaagcgtggatacatgcacatttaatgtgacgattcgaatacctaccccacatgacgtcgtagtcaaacagggagcgatgggaccacggtcccatccactttcaccaactacgatgatgcacgcccagaaataacggccactattcccacatgccgactactttgctcaaacaaacttcggatgggacgtgcgcacttctaagcatggtctcacccttgggagggaactccgccttgctcaaagtcagcctcagcctcgggagaaagttctgtctcgcccgagcttggctttggccaactgccccggcaacaactcctcacgattcgtaggaggctactccgacgactgaactaacccctccttgtacgactacatgccctgaggcaggctcgacctaggccttgggaggaacctccatctcgctcgagcctagcctcggcgtagataacatcgaccaaaggacgccaccaactcctccatgaaggctgctgacaacgggatggctacatgaccgacgtcaagtttgctttacgccatacggggacaattgccatgcgctttttaccatacttatcactgtttcaacaactacgactcggacaacacctccattagatatgctcaggtacgcatccgagccctagatcctagacacacaccactaattcactcgttggtaagacccttgggtcaaacaccgacacaacctctccctctcttgtaccagtaatttttccagtcatccgttgaccaaggttcaataaatgcactcaaataaaaggaatgtgatcccccacttgcagattggatcctaaaggctatactactatataaaatgtagaacatgtgtgcatcagtcagtgccaaaactacaaactcatcaagagtgggacgaaaatagtttgatcctagtcaagtaattggtgtttgcaacaattggattcacaaaccttttcaaggggcataatcacattgatatatgatcagaagtatgtgccctattgcccaagcagatgaaaaaag

SEQ ID NO: 50488 - DNA, 2543 bp, Zea Mays
gatcaggagagctctcatgtggatgatggagcgtaccaatagcaggtgcagagggctgaatacatgattccgtaggctggttggccattgtagaggttgatacggtggggcttgctgcatccaaaaaattaggagaaacaggtgcacacatatggccttgcatcaatatagtactgctgctatccaaatgcaaattacgcgatgtggagttaggatgaacagactgagcagcctgagagcaattcgaagaaagacgtttaaaaggaaaaatagtctcatcaaagacaacatctcgagaaatataaacacggccagaatcaacatcgagacatttatatcctttatgtaagttgctatagccaagaaaaacacactcttttgagcggaaagaaagtttagttttattgtagggtctaagatgtggccaacatgcgcagccaaagatttttaagagagagtaattgggaggactatgaagcaggcgttcaaggggacaagtattatcaatgacacgggttgggagacggttgatgaggtatgtagctgtaagaaaagcctcgtcccaaaatttaatgggcatgtcagcatgagcaagaagagctaagccagtttccacaatgtgacgatgctttcgttcggccgagccattttgttggtgtgtatgtggacatgaaacacgatgagtaatgccaagtgagcgaaaaaatgtgttatgaattttctcatactctccaccccaatcagactgaacacatttaattttagcattcaaaagacgctcaacatgagtttgaaattgtgagaatatgcgatgggcatccgtgcgatcatgcatcaaatatatccaagagaatttgctatagtcatcaataaaactaatgtaatatttaaacccagaaacagatttaggggcaggaccccacacatcagaaaaaattaattctaatggtgaagtggattgatgaagagagacagtatacggtagctgatgacttttagctaattggcaagcatcacaaacggacgcagagggttcactagtacatcgaatattattaagacgtaaaatggactgaactacttgtgaagagggatggccgagacgggcatgccactgggtcttgcttgcagacctgctgagaagagcatgtttgagtgtagtagctgcagacgatcggatggggtagagaccggactcacatcgaccggtcagcaggctgcgtcccgattgccggtcctttatacagaaatgccatggatgatattcaaagaaaacatcattatctttagaaaatttatgaactggaaggagatttttagaaatttcaggaacatgtaaaatatggcgcaaagcaagaggacgaacagcagtagtaattgaagaatgaccggtatgtaagatgtgcaaacctgtgccattacccactcggacttggtcgttgccgtgataacgttcccgaacagcaaggcgatctagatcgctggtgatatgatcagcagcacccgtgtcagtgtaccaatcgggatcgacgttgtaggaggatgaagcagctaatgcagccaacggcggtacttcatcgtaggaatcatcatgacgataccagcagtgaactgcagtgtgaccctctttgccacaaatctgacaagttggtcaagtagctgatccttgattatcccctgaataatgaggagaagtatcaacacgaggaggcgggaaccgaccacggccacagccacggccacggccacggccacgaccatgattcattggtgttccgctacgtccggcatagttggcagatgaaccagtatgaagttgtagctcgacctgatgctgaagttggcgggcctcaaacgccatgaggtgggcaaatacatcatccaaagtaatggtttcagatctggtggtcatcgatgtgacaaaagaatcatagtctgagccaaggccggccagaagatatgctattatctcatcatcacgtaaagcagcacctgcagcagcaagttcattggccagccccttgattcggcgaaaaaaatcagccgcagatagatctcttttcttggatgtagccagttcaactcgaatttgcaccatgcgagcacgagtagcagagaagaacattctctgcaagatatcccaggcctccttttgatgtggaggctgagatcacatcccgcagaacctcttcagacatggatgacagcatgccgctaagaacctgctgatcctggtcgaaccagcgatcataatctggattggagaccatggtgatgccattgtcagatgtagatgcaatctgctgagctggaggggaaagagaaccatcgagatagcccaacaatttggcgctgcggagaaagggcagtaattgagctcgccagaggaggaagttagacttcgtgagtcgtattgtaacagcatgatgaatatgaattggcacaaaggaagacgccatggaaggaagcatggtagtagtggtggaaggagaggaggaggaggtagaggatgaagttagattttgccggaaaatttatggctc

SEQ ID NO: 50489 - DNA, 653 bp, Zea Mays
gccgaagaggaaaaaggtgaaggttcttactcaccgaccgcgctatattgaaccggccacagtgcccgaatttggcgatgatacctcttcggctactgaagcgaaagaacctgctccccccacgcaaaagattgaagagccggctggagtgccgaaggcaccctcagccaaatcagctgagccgatggtggttaatattgaagaaacaagagtcgaagggacaaaaatattagaagtcctaagcccttcggcaaaagtgacagtgccgaaggcacaaaaaggtcttacaacgacccccaaaaggaaaaggatggccagtgtactggatgtgctggagatgataaaaacttcaagttctactccagggaaaacagccgaggcttcacaagcgcagactgagacaaagctgaccgaagttgaagttacaaaaagccaggccgagaccgaagctgggccttcagagcccgccaaggagaaatccttggaaaccggagaaaaggcaacagaaaaagaagttgtagaacaaattctgcctgaagaagctgccactcctactcccgaagcaccttccgaagttcttgattatattatacgacatgcttcgggaaaaagattgtctgaagaagagatttttgaagctaaacactatgccc

SEQ ID NO: 50490 - DNA, 793 bp, Zea Mays
gttcaattggcagggtcggggagtatcaggagaacccaaggatattgaaacaagacagtagggagtatgaacagacctgggattcgctgaccacagtgagggctttttcacggtggcggaaacacagtttgggggaaatgggcaatttgtggtctctggtgaacgattggaggcaattgttggtgctttggatgcgtaattatcctacgaagctcacggtgtgctcaatttataggacttgggggcgatggctcgtgaatttgagttggcgcggtggcggtcggagagtgaagagagtactatcgcgagagctcggtggcatctaccgtggcggcctcaccggtgatgaaccagtagcagagagtggcttacggtgactcactgtgacgtggtaattgccgaggcatgtggcgttcgatcggcgggcggccaacaatggtgaattatctgaaccggccacaaagcagagggggtgcggtggccagccggaacagtgcccatactcaacagcggtgaagatctttctaccctggggtgttatccgggcctaagcgagcacgaatcacctcgccggcgtgaatccacgtgcgggggtcgccggtggccaggggatctgaatctgctgatatttttgttaatgtaccattgcaaactccttcagtcagtctgatagagcgaatgacagagaggtttgctccaaattttatgtaatgactgaatcaactctctgtatcaaagttatagcctaataaagcagctacaactttgctacattgtgcacccacaaaaagtc

SEQ ID NO: 50491 - DNA, 593 bp, Zea Mays
aagatattagactttaatctttgcatacaaaaatacataagggctaatttggtggcaagggataaaatagatcgcggtaagcacaggtatattcctcatcgattgtttgccgcagaaaggaaatgaaagtagcaagaatactcgtttcctagccctagttttttaagcatcttgtcatacactaggatgatattgctttaagaaatgaccattcagtgctttgggtaggtccccaccttataaaattagcttccaagagtcagtgaattttgtccttaatcttgggaagtaaatccggacgaaacgaccttggtctttgcttaaagggcatgaaatcaggcttaattggtaaccgatgctccactatctctcgacttagtcctgacatttcagtatagctccacgcaaagcaatcaaagtattctcttaataaaccgatcatcttactcctaagtttggctttcaaggtcttgtttataagagtcggtcttggagttctaccatctcctatgccaacttcctccaaaggatcggtcgattttaaacccttgtcctaacttgtcaaagtctctaaactcttctattgtgtttat

SEQ ID NO: 50492 - DNA, 726 bp, Zea Mays
aataatgtggcaaactcagcttcatattctgaattgaatgtaggcgaggctgctgtttggcactctcgactttgtcatattagttttgatcgcattatccaattgtccaggcttaatttgattccaaaaattcatgttgttaggagatctaagtgtcatgcttatgtgcaagctaagcaaccacgtaaaccttttaagagcgtggaagataaaaatctggcacctttagatctcattcactcagatctgtgtgaaataaatggaattttgacgagagcagctaagaaatattttatcacatttattgatgatgctactagatattgccaactctattttgttaagatgaaagatgaggcacttaattgttttaagatctatacggcagaggtagaaaaccaactagaaaagaaaattaagcgggttaggtctgatagaggaggggagtatttttctaatgaattcgatgaatactgtgtggaacatggaatcatccatgagacaacaactccctacttgcctcaatcaaatggggtggctgaacggaaaaatcgaactttgacagacttggttaataccatgttagatagttctgatttacctaagtcatggtggggcgaagctattttggcctcatgctttgttctaaaccgagttccatcagctaagggtgataaaacaccctatgaaggatggaaaggtagaaagcctactcttggatttctg

SEQ ID NO: 50493 - DNA, 418 bp, Zea Mays
ggggatagaaggatgcggggaggaagaagacagtcggtggtccgttgagtggtagctggacggtggagattatatggtgcctgggtcgttggattcacatggagtggcgatgatttggttggtgcgtaccacttccgtgcgcccatccgagccgttgattgagtgacgggtggtagagattagatcccgggggcgacaacaccacatccgtagatctaggatcggcctgtccgtaatgcataccggttcacagttgatgccgatctaatcaggaatgctcatccacgatccatcgaccgaaactaaaccataccgtttcgacccccccgctttgcagaaagacccccgaagaaatcactaaacaacccgcggtcctgggcaagcacgttcggagtctgctaaagttttatagttttac

SEQ ID NO: 50494 - DNA, 630 bp, Zea Mays
ttggattcaaaggtacttcgaaatgaacctgcctctcgtcgtcagggatttcgccaagtgaggcaaccaaagcactaacctcttcgggagagggtcgcactctaaggcccaaaccactaccactagcaggaggatttgacacaaaactagtaaaggccttggaaggaggcagattccaggctgagtatgcaacaggagcgccgatgttcgacacctttcctctgagtatcatctcgagccggctcaccaaatccacagcaggaatccttctgtttgtaacccgggttgaatcagcgaggcctcaatacaaataagccgggtatgctctatcctttagtggctgaatgttcttgaaaatgaaatcggagaccacagcttctgcagtcagacccctctctttcaataatccaacctcagcaagtagagccccagcctcagccacctccaggtctgtgggggattcggtccaactcggagtacgaacatctggctgtctccctgaccgtgggggggagggaattcccatgattctccacgataaaccattccaggcgccatcctttgatgttgtccttgagtgggatgtcgaggtagtcgatcttcctcccacgacgcatctccaaactcgcg

SEQ ID NO: 50495 - DNA, 703 bp, Zea Mays
atgcggggtgaaaaatcttgcgcaagagatgaagtcggggcactatgactgccaagtcgtcgtacccacttgcgtcgcaatgtggtcggacggtcatcactgtggaaatagtcgttcaccgcgattgcgccacgccatagtcgatccaccacgttgttgcaagccgcaaggactcagcggtaaccgtcgtagttcgttaaccagtgaccgccacggtagctcgcgcctgtgactcacctcctctctccgaccgccagcgtttcccttccaaattcagagccgccgctcaaagcttctataaattgatgccccagttttcttcgctcagttgttacaaacctagagcactagccctcgcctcggctcatccatcatagcgccccaattttgtatttcccccaaatcgatttttcatgccgccgttagcatctcgccgtggccagccgcccacaggttgattaatgctactttgtttggtgttctagcatcccttaagtctctagttgcccaaagacccgattgattgaactagaccacgctgaattaccaagaacacctcagtttccctcgggttttgccgtcgtcgtgggcagaagaactctaggctggattcgtgcaattgagggtcagattaggatcgctaggggtgggattaggtgttaaccaagttagggtattggtcgttgcgcatcccggctggtac

SEQ ID NO: 50496 - DNA, 575 bp, Zea Mays
tatggatcgtatagcactcctccatatggtgcttatcttctatttcattctcttgtaggtacaataatgccctaatcattgacagcaatgccgctttgactaagttcgcttactctggtgctccttaattctaatggcaaagggactaatgaatatggaggatgacaggatggtaagtacatatatatttttatgaactccatacatttttaggtcaatgatagttttttagctcataattttataggtttgtgtgtggctagtgcactttgtggaccctatcgatgataatggtaagaagggattgaccttctagggccaaatagtctgcacctacatctccaccacataatccccctcgctacaatacctccaagcagctaaaagatcagtggtcgacaagcaatcagaagatcaccctctttaatgccatataggaccgcttgtacacaacccgatcgagtggaacatatagtgatgtgttgtttgaagcagccaagaacttccacaataagctcaacaaaaccaacctcaagctagagcacatgtggcatgcttttcgctatcagcaatgt

SEQ ID NO: 50497 - DNA, 495 bp, Zea Mays
aaagcctaaagacttaagactaggagtacatgcaattgttccttgaaaaacataacatttataatggtcataagaagtaacattttacttgacacaaaaaacatactgtccacttggtttcttgaatctatcttatacaatttgtactttttgacagagatgtgtctttcaacaaattgacaggggatcttcccaattctattggttctttatcaaatctttcaagtctgtaagtattaaccaatctcttcaaagaaagcttctactttgcattagcttttcaataatgatggattcatgtttactcgcttttgcagttatatgcagaacaatcagttaacaggttctgtcaatgttctccgtgggctaagccttactacattgtaagtgaattgtcagacaatagtttgacttatattcatgcttgcttgataactaataactgttttaaacagaaacatagcaaacaacaatttcagtggttggataccaaaa

SEQ ID NO: 50498 - DNA, 415 bp, Zea Mays
tcttgtgacatttacactgatcataaaaatctcaagtacattttcactcaggagctgaatttgaggtagcgtcgatggctcgaattgattaaagattatgatttgtccattcattatgaccctgggaaggcaaatgtggtggctgatgcccttagcaggtccggggttccaaaagtgaccttgcctttgatcgctgatctagaccgtttggggatcgctttgtgctatgtcggcaccgctagtgaggagactcggatgcttattcaatcctccctcatggagagagtgcgtgcgctcagcagcaggatcatctattgcaggaagctcaaaagagggttggtgatggtaaaccccgggagttcaccattgatgagaatgatttggttcgtttcaggggccgtctttgtgtgcctca

SEQ ID NO: 50499 - DNA, 546 bp, Zea Mays
gagctcccaacctcactgctcacggtgaccgcacgatcaacggataacacaaagtgttcccgacgattcaatgggttctagcttaatcggtcgggtcgagaagcatcaagggcacataaggatactgaaacaagagagcagaggacatgaatggacctgaagcgcactggccacggtgagagccttttcgcggcggcggaaaaccaatttgggggaagtgagcaattcggaggctctggtgaacaactgggggcaagtgctggtgctttggatgggtaattaccctatggagctcatggtgtgctcaatttatagagtcagtgagcggtagtgtccaattcgaaaggattgcgctggcggccgggaagaagagatgagtcaccggtacggtttatcgtggcactcactggctgaggggctacgtcggtcattggcgagttgttggggctagtagcgacgtgggtaaaaggtcatggtcgtggcacgatcacagcgacggtgtttgtgacaccctagtgtcacctagggtttcttcctcaagctaac

SEQ ID NO: 50500 - DNA, 479 bp, Zea Mays
atgccaaatagaggaactattgttctagctatgccaaacagaggatccaatctttttgtaggggtccctaacccgccttatctatccgacaaggttatggttacatggcgtcaaatagattactatcgctacactatatgtgtgtggaaccgactccgaataacatgcaaacatgtggttctgttgacttatcatctctatctacatgagaatcagttacgaaaaagccatgcctgcgtcttctatctccacatcgttatactcctgttggtcacttgcttttgatagctatatggtatcaaaaacaaggcaacacaagttagaggattgaaagccttctccctctagttatctcttcttcgaagggtaacacaagggagaaggtgtaaaatagaaatgttgtacaagtaaaaataaaactcaacctactaaaagcaaaggcttaacccaagtccactataaaatcaacctacttaaca

SEQ ID NO: 50501 - DNA, 691 bp, Zea Mays
ttaaccgtagccaaagctttctgcactgcgctttcaagcgaacacttcaccatttaaggttaacttcgtcgaacgggttagcttcgtcaaacagtaaaaatccatccaaatggccagagtgcgatcaacgacaagggtgtctcgtgagggggacgaaaccgaagccactaaaccggcactaatttcagaagtgatgaaacgatcagctctggttgtggctgacgaaggtacttctaatgtcgaagctgagcagactgtgattgagggtgaagatgttgagagtgaagaagactacaacattttgattccaacgaagcctagtcatctagattttgaaaaatctactgtgtctgaagatgacatgcctatgatgatgaaactgggctatttttgaaaagctgaaagcaaacttattcgatttgctggagaagagactaccccaaagccgaagaaggatgaagttgtggttttcaagagcttcttcagagcggggctgcgatttcccctgaataagatgataggggaagtcctaaagaacttcgaaatatatcttcatcagctgactcctaacgctattgttaggctcagcgtctttatctgggcccttcgaagccaagggatgagcccagatgccgaagctttctgtcacgtgcatgagttgcactatcagatgaaggccaaggcagatggt

SEQ ID NO: 50502 - DNA, 710 bp, Zea Mays
ctgagacataaacttgtcctcctcctcttgtgcatgtaatcctgtcttagctagtgcgatgagctcagtcaaccttgatgtgtcgtcctcctcttccccatgtaatcctgcctcagcgagcgcgataagctcactcaaccttgatgtgtcctcctcctccatcagctccaccatagccattttttcctgaacgtatcttgcacgagcctcatctgcgagatagttcatggcacatgcaatctctgcaaatataatgggacaaataagtttgcaaagacaacatgccctttttctcactcacttcgactcacacgaccagcaagattccctaacatctgtttctcagctctagccgcctcccattctcttgcatcatgtgctctcttctcatttgccaccttcaatctcctccgctcagcacacatcgggttgtcaaaccacattgatttcgcgaacctacgcatctgctgtctgcgatctttaatgtatgaattgatgagctgagatccacaacgcatcttctgtcccattagtttcttggactttattgtatgcaccacctcttctttcttgtcgtatctctcccaaactgtattttctcgtctcctacacaaaagacggtaagtacaggtgcaacattacagctgatgtaatcaaaaagaaataccaacctcattgtaatctaccatatgtccacaaaaatagccaac

SEQ ID NO: 50503 - DNA, 1740 bp, Zea Mays
gtccattcgctagcatggacaatgagtctttggaggacgtcttagattattttgtggcgttagacttgtgtgcggcagagtcttcgtctagggttgccctgactgcggcgaggggcaagccgaacggagtgttggaaccttgggcgagacttcgcaaggcataagaggccccaaaggtgtcaccttatgggaatggaaaggcctcgaccatgggagagaatgcggtcggaggaagggacttgccggatcatccttgtgccgacaactgacggtgtttcgaagagggagatctgagggctctatttgacggcaaggagattagacttatgttgtttaatttccggggggctggcctaatcccaaaggcggagcctatgtaaaatgtaggcattgacatggtcgttctttggtgaaatcaagtggcaacgctgccctcaccccccttcaccaaaggacggctatgtgaacttgcttatggaacagaatgcattgtatatgaatggtagcttctcgctcattatttcccgtacttgaattaagttgcgcccttcgttgtctaaatgtggaagacttcgcactcttggatttttagggatgtgttgtattttctgatccgactgcacccgtaggtgacttcttgtttagatagagataggtgtctctcggacgacctcacacccttaggtggtttgttgcacttgttgtgctggtccagttgcacccttgggcgacttttgcttggatagagtgggcatctcccgaatgacatcacacccataggtgttaaagtacacttgttgtgctgatccagctgcacccttaggtagaatgggcatctcttagacatcttcgcacccttaggtgttgaaatgcacttgttgcgctgatccagttgcacccttaaacgactttttcttggatagaatgggcgtctctcggatgacttcgcacccttaggtgttgaaatgcacttgttgtgctaatccagttgtatccttaggcgacttttgcttggatagaatgtatttgtctcgcacgacagttggttagacttgccgttgtggtgactgtcttggtgtcaaatgccaaaggccgaccccgcggtcttttttgacattttgtaatcgtactttttgggggggattttcctggcgctttattacgtggcaccacctcattaaaaacctcacccccttcgaggaaaagagtgcaggcccaaccaaagtgatgcgtctataggtgttacaagggcgtgaaggccctagcaatagctagcttacaaataaaatttcctcagattgtgtacgttccacgagtgttcgaggtcttcgcctacttgtgttgcgagtctgtaggcgtttggtgatattttgtttttgatgatgaaaggcccttcccatttaggttcgagttttcctcgggattctattctactagttctgatgaggacgaggtccccctcctcgaactctttgggagtaatagcgttgtcttgccagaccttcgtttgtgcttgatatttgttcaatgcttcaagggcgtcgacacgatccccattgaggagatattttgttgttggctcgtcaatatctggtatggtcgtgttgtttgttcggggtgatccctgcttgagttcttgcggagtcatggcctctaatccatacattagtctgaagggagtgaatccagtggcacatgatttggttgtgttaagtgcccaaatgacttcgggtagttgct

SEQ ID NO: 50504 - DNA, 871 bp, Zea Mays
tggtatagtattccttatccttcattagttcatttggttgctggtggtggtatggacagtggactgagtggagaactggacatgtgatcgtgtgttgctgggtgctgccttgttgtgtggccgtgtgtggtgtgctgctaccttgctgttcacctgacgtgccaccttgttgggttgcctcactggctggcgcctgtggagttgtggactgtggaggacaggattacaggacgcgtgtgactttgtgtggattgtggacgcgtgcttgctgcttggctagttgtcgattctggtttgtgcctttgtgctttacggtaaactgataatgagtatgattgtaatttgtacgactgtatgagagtctgagactgtgatgtttggtctttctcggaaatacagaaactgatgtgctacacttttggtcttttgctatgtgaaaagttttgaacccctaaatgtttattgtacagttgtgatgcatgtttttgttgtatatttaattatttatattaaatattgcattgtttgctaatggaatggactacagtgaacctgagtcagtggtctaaaactgggtagaacgggctacccaaacccgaacccgaaaaattcgggtacccgaattatcgggcctacagtacattgagactgttttcgggtattgtttctagatacccaaaatttcaaaagcccaaaaaacccgacccgaattttcgggctaacctgaatgcccagtcctagtaagagtggcaaccaagaaaatgttggtggtggccacaaatcaagtgctcaacatgagaagagaaagaaaaatagaatcaaagggcttaaggcgaaggtataggtagaatattttattttgttggcaaag

SEQ ID NO: 50505 - DNA, 369 bp, Zea Mays
tatttgtcctttagaatggatcgacccttctcaatatagctcggcttcgttggttgatcttcgttttcttcctccgtagcattcgagctactcttggacttcattgtcacgaaagccttcatgacttcagaaatcaatgtggtgtccaaagtgttttcctctctctgatgggcctctaacgaggtggaagtggctaatctagcagttgtgcgaattctagccatttcaacatgaaattctaccgaagctcgctctaaacgcgatattcagcggaaagctttggagcgagagaaaaaaccagcagcaggtaggtgggagcaataaatgtagttctgcttcaccacactcttttgcttttatacaaagaac

SEQ ID NO: 50506 - DNA, 388 bp, Zea Mays
atttggcttaattaacacaacgaatcttaccatttgctacttgttacaagtatagctgaacaacattacatacaatatgaattacttttcataggtagagaagtaaggaaatggcttgtggcaagagcctgaaccgtggccctgccaggataactaaaaatgtctagctggtagtttgaccctgccccaataaactgctactcttaaattccatccttgagggtttgctataactatctgtatctactggactactactatttcaaccatataggttccacgcaggttaagctcaattaaagtactatagtgttggtttaccttttgcctatatttgttctatcttctagtggagaaagcctaccaacacttcatgtggatgaacttg

SEQ ID NO: 50507 - DNA, 488 bp, Zea Mays
ggttcgacaatcaagaatacaatatacaaccatacaatacagcattacaccaccaatatgtaatttggtccattacatcacacaacaagcaatgaactattaaagcataagcataagcatacaatcagccatagtgccatacaagtatacaaccatcaggcatcagccatacatacatgagacatcaaaaaatagatcaccatgctttataaagagctatttagattggttgcctcattaaaaacctttaggtaaaaccccatttcaactacatggggacaaaaccataaaggaaaaaagagtacaacctagctcttttagtgatcatgtccatctccaccaccaacacaagtcgatccttcttcttgtgcatcaagatacatgtttgccatttagctctttcagatcctttgttctcaacgcagtgttgctgccgaacagctgcttgctcccaatccttggccagggacagcatctccacatgttct

SEQ ID NO: 50508 - DNA, 1143 bp, Zea Mays
atgaaatccaaaatagatgtgggtaatatttgacatctgattaaagaagttgcatgatatttgttaatcaagatctctattcctattaattaggaagtatataaataggctcttatgctctaaggacatataatgtataaggtagaatcaccctaaaggcatgcaaagtgtataacatagaatcatactttaaggtacaatgatgtggctaaggccaaagtgttgtgcataagtgtcatggttttgacccgacgttagtgaatttgtaggttaggatggggttagcgtgcttttgtcctaatggctttgcacttggtgattctaaggaagaaagtttagatgggttcggagagagccctacatttagtatggagctaaagtttttgttgcttggttttgtgtgttacaaggcgaagcgcttggctttcgtgctcgtgtgaggaatgttaccaacttagtttgcctgcctccacaacgaggcacccaatccattatatagcggagggagcgagtaatcattgttatatgatgtttttgatggggtacgtcatctctacctttagtcgtgtagttgctctagtgtgtctgctttgtcatccttgagatgacttggctataggggtggttgagtcctaaacgtgttcgaagccatgttgctaggtatgcttttctgagaggcatgtggtgattttcctcatatttctcttgctttcctcacatctggctttattgacttctatacccttggagcgtgactgaccatgacctgtgaggccctattcgtacctttgatggtgaaatagttggttggaggagtcattagtctcatgtatcgtacatgtttctgccctttgcacgcctcagttaggagtccgcgccgagtgatcaaaatatcataaatgcacttccccctagccatgttgtgtggcttctaggtcatggggtctatcggtaccctaaatataaggtacccactcctgttgggtcaaggcgagacccatgtggttgcccataaccacaggattaccgggtggctagctcgactcagagcttaggccccaccatatgaagctgcgggctagcgtggctcatttcctaagctggaccgccaacaccacgcgtcccataaagggagtaaccatc

SEQ ID NO: 50509 - DNA, 455 bp, Zea Mays
ttgatcgtgaataatgataaatgtcaaaccttcctggtagccttcaacactgtgtgcagctacattggcaccaaagacttggtcccagaacatatagctttcaaagtgtcgccccttgttaacgaatgggaaatgccaaaggagactattgatagctcaagcgaaggtggcctggtttatttgaattatacatactggtacaaaagtcaatttggggagccagatgacaaatggctcgaggctattgaggcaaatattgatgatttgttgggggcatatacgaaggctgaggacaaagccatgaatactgccttcggtgaccgtggaaagaaaaagctgaatagagtttttgacgtttttggctttgtgtaccccgattattgctttccggctcagaagcaagaggcgaagagaaggattgcatcaactgccccttctactgcgtcgaaatccaa

SEQ ID NO: 50510 - DNA, 786 bp, Zea Mays
ccatgctcctttagggaagtttgcaattgaaatagcatgggaatggcagtgtcacaagcgatcgagagcttgcgcgcttcgtcctccgccaccttcttcacctccttggccacttccatagcatcctgggcctcagagaacttctagaggtctgcaaaggagagatcatggagcaaccatgagcaccaagggccaacaaaagctcgaccaaaagcccactcctgccgaaggtccaaatttgccttctgcagacgagcgttcacagcccatagggtcgactcggcttcctcggcccacgagtacgcttcgtgcaggtcttgctggagttgggtcctctccccgttgaggcgtttagaatcaccgcgtgccttattgtgccccgagtggtggcgtgttacctcactctcgagatgctcgaccttggcctagagggtggagagctcgtgatctatctccctcgagcgggccacttctgcctgcagcctcaccacctcccgctgcatggcctacagtgcctccctctagggcgacaatcaagagtagtgatgctgcatagaacggtccgccagtaaaacctaaccacaacaagaaaaacccaaacaacggggagaacagaaaggatggtgcatttacctggtcatgagggatgatgtccaacgtcatcgacgaataggcgatcaaaaccgcctctctaaagttgcagaggaaacattgcactgcctccaggctcttattggccaagtcggaagccgcctcaatcaagtgccactcctccgcttccatttc

SEQ ID NO: 50511 - DNA, 398 bp, Zea Mays
tctaggaagtgccacgcccaagtattccctaagatcatgcggaagagtgcaacaccctgagccaacaagaatcggaccctaatgactgaagagagcctatcatcaggtacataaggaatgaagaagaaccagatgataaggctacagcagaacgcatcgcgagacagtcggcccactacaccctcatagggggcgcactgtatagaaggggtgcgacaggagtcctcatgaagtgcatttcctcggttactaggaaacagcaattagatgagatccacatcggacagtgtggaatacacatagcatccagaactctggttgggaaagttttcaggtctggtttctattagccaacagcaaagagtgatgtagccgagttagtccagagatgtgaagct

SEQ ID NO: 50512 - DNA, 533 bp, Zea Mays
tgctactaacgctccctagccgaagctgtgtccaggtccaggtcccagtcgaggctaccttttggggggcgctgccaacttttttaggtatgctggtatccaacctcgacatatcgagcccacatcctagggggccaggtaccagggaggagtcggtagcgccacacacaacaggggcaaatactatgtagataagtgctaatactgctcgataagtagtactcaaaagtaccttacaaaagcaaagttattacatccgccttcaagcggggccctagccttatgtctacaggtatgacctactcgacatcagtagggtcacgctggaagcgcgcggccgccatctccacgacatcttgtacgacctcccgggcagcgtcttcagcagccaagccaacggtcaccattggaggcggcaccaaagccatcaaatccaaagagatggaggcgcgaaagatggagctgtagctcagctcgcttcccgccttcatagggctggtgaacatcctttcctccgaatgctggaggaagaa

SEQ ID NO: 50513 - DNA, 844 bp, Zea Mays
agccaggtaccagcaaactctgaggcgctatcatgataaggccatacgacatcgatccttcgtagtgggagatctggtcctctgccgaattctaacgggggaaggacggcacaaattgtcgccactatgggaagggccattcatggtagcagaagtcactcggccaggatcatatcgacttactcaaatggatggcacggaaatagggaattcatggaatatagagcatctcaggaagttttacccctagctagatttcaaaaagctattggggcagcattgtattctgtaattggaaaagtacgtcatcaataaaaagacttcattctcaaaagctcttgaactatttattatcgatttgcatgcttacttaacttaggtgaccactataccctactaacggagcaattggcttaagtcggcagtgacttaagacggtgcgacatgctcacgcttacttaacttagggtgaccactataccctactaacggagcaatcggcttaagtcggcagtgactcaagacggtgcgacatgctcacgcttacttaacttagggtgaccactataccctactaacggagcaatcggcttaagtcggcagtaacttaagatggtgcgacatgctcacgcttccttaacttagggtgaccactataccctactaacggagcaatcggcttaagtcggcagtgacttaagacggtgcgacatgctcacgcttacttaacttagggtgtccactattccctactaatggagcgatcggcttaagtcggcagtgacttaaggcgatgcaacattctcacgtctactcgacctagtataaacatgcctacgatcac

SEQ ID NO: 50514 - DNA, 995 bp, Zea Mays
gcaagcatgtcatgtctatacgccgttgtattaccaataccgttgacattggacacgtctgcctatcgttaggaacttcgaatcccatgggctgacaactgcgcgttgactggaatcttggatgcgtggtccgtatggataaaacacaacactgcatttccttttaatatagccggtgatgatctagcttatatgatactaagaaatcacaaggtttggatttagggccagaagccgagagctccacatctttcactctctgactctgtctctcagtcattattggtgttggtggtacttcggttctgatttctaaacacaggtagacggtagatagccagcggcagacttattatccattcgagcattcagactgaagaaatagggcgccttaaaacaatcacagatgcagccgattaagccttttttttatcaagaagagattagtgcctccctgatgacgaatcccattatacctgctccgcgggactagtactgcaaagcattcatctgctcgattttgcactctgcatggccggtcggtttcttcttctgattggtactgaattattgtgaggcagttggcacatgcttgtctggaacattcaccagtattcacccgtttgcgtcatataaatcttattattatgttatttatgatacccaaaaaaaaaagatactttttatttggtgactgaatggtctgctctgcaacttggaggctcgacatcgccaagctgttttcttaattattatagcctggtgctgatctgatgctgtggctgggaaaggtgctagctagtatgataaacagatgcggctgcaaagtccaccctgccttcctgcgtatagtatatattaaccacttggcactgaaacaataatgataaattgagattcctgggcaaatagatttctgtacctacgaaaacacatacattttaatgtgctcaactggaatcttccctgttgtcgatcgctggcgtcaaatttga

SEQ ID NO: 50515 - DNA, 410 bp, Zea Mays
taaatggcagcacatgacgtatggaaatcaggcacacagactctaacgtgggagacaggttgattgaccattcacggaagacacacctactgagtacaggccggccacgccacgaccaccccacagctcaaaggatggatcacatgataagacatgacaatcccgcatgtgcaagcacaacgacatgacgggagaagggcagcgtcagcagagactctttccgtcaaaggcaagaatcatcgacgaaaaacaagacgacaagacaaagctttgctccatctggtccaaccgaggaaccatataacagggtttccctcctcgagctataaaaggagacggggagttctcaaatagagaagagaaaaataagccatcacatatagtacttgtaatttcatggagcacttcac

SEQ ID NO: 50516 - DNA, 653 bp, Zea Mays
gtccttctcggccgcgatcttgaaacagaaccacgcgacgctcgggtcaccggatccccctctcctaggactcccgctctgggtataaatctatggccacgacctcctctttcccctcctccagtctgcgcgcacctctcggagtagaaagccgggttcgcgcccccctttatccatcaagcgccgccatcaggaaaacaccatgaacttgagaagagggcaccgccatgggcgaatctagcgtgtagcatcgtagtgtcctcggtgggcggtcttggggaaccacaagtgataccctcgtgttgtagaggtggttctcggtgagatgtttccccggtggcttgtcaattgctcaccggagatgggcgtgtgggcagattcgcaccacgtcgtggccagacatcgtcgcaccaacatcgcggtggactatcagcttccctcgacgttggtcagggaggctcgttggggttacctgcgtgtggcccaagtcgttccgggcataatgggtcaccgtgagcacgccaatttctcactggagttcgggggccttggccaatctgcgctttgccgttggtagggctttctgtcataagattcacggtgagattgcttctcctagaattatatttctcatgtacttcgtttagcatcgt

SEQ ID NO: 50517 - DNA, 385 bp, Zea Mays
gtagctggctaatgcttagtgcaaatggggcaagttccatgggttagatttctctcattttcatgtttcaactgtgtgccttgatttgcttagatttacttttccaaattaaacaataaaaaaatcatgtggatggactttaaagaagtataatagatctaaatatgtgatagtataacagatatgattagcaattgttgaggttctcacgagggagttcaacagcggggaacattgtcttttatttgttggggctgcagttgtcgatgccacgatcacactattgagctctagcctgttgttgatgatgattgttcgttgtttgaaattcgtctattgacctctatatatgcctgaatttcctagacaacattatgtctatgtt

SEQ ID NO: 50518 - DNA, 812 bp, Zea Mays
cctaggataccaaaaaccctaattggaaccctggaaaaccctaaatccaaaccctaggggcctatgtgcaaaaattgtgcacatttggactaaagtgtaaaaactacaatgtcaagacatataaagtcacatggttcacatttaggatgatttacaagccaaaccctgagttttggacttacttgcaaaagagccacatttgaactcttttgacgaagtctgaatttcagtgtactgtgctcatctttgtgaccttgtaacttctaaacaaaagagattttgccctaggtcaccacatcaaagttgtagagcaatcattggagaacaaatttgcttaagggtgtgagcatagttgttaagtaaagttgggagataattaagtccaaagttggactgtcaagtcactgggtctgaatttttagacaaacagtgcaaccactgagactttgagcatggattcaactatgatctagtatgaatctgcccatggcatctatgacaaacttgtagctggttagtagctctataactttgctgcagagcttggcatgagtggtcatcggaaatcgagagaaaacttggctccaagtttgtctgtcagactgactgaactccaatcgccatggtacagtaccgggatcggatcagaacgccagcgtcagaaagatctcgccgccgacgactccccgccgtgattcgtgctgtcgctgccagaactcccgctcgtggtggatggataacctctcgggtaaaagaatctctgccgccggtgagctggaggtcactccggtgactcaccgtggcctcccttt

SEQ ID NO: 50519 - DNA, 483 bp, Zea Mays
ttcttaattcacaaaactgcttgttcttcacaaaaacttcttgttcttacatcacagaaacaacaacatggttgttatgtacatcacatagatagataataagctaactcacacatacagagaaacaacaacttcttgttctttaccttattcagttgggcatttatgttgttacatgttaatatatttatttggcttcaaaacgttctgcaaggagcccacaatctttttaaatcacatgtttactttgccctttaccttatttagttggtcatttatactgtggtttttgcagcgtttggtttctacggtttctacagtgatcttcttctggttggtcttctcgaagagcaaaggagctaaggtgcgaacctaagagccatttagctagttggagtaccaaaaggatgccacatctccatttccaatagtaaccttggtcaacatgtgaaatagggctctatcaacctttgaacacgggat

SEQ ID NO: 50520 - DNA, 479 bp, Zea Mays
agcttgttcttttgtactgcactgatgcagggtggccagaactcacaagctaataacacctgctgctgctggtgtttgtttactactaaattcacatgccctcccctgtgctctgggtgtttaccttctaaaggtttctgatggtctgtccatctgcagtgattcagagctgcttctgtgaaaaaaaagaatataaatttgttgtactgtgggagcagtagaaatgatatcatcatccctcgagctttatccagtctacacctcaatacagtattacttttttctgaccatggaaaatgaagagacagaagtgccaactccaatgagaaaagatcatgtagtagagtactcagtactgttgcatgtgaacatgctctctgtgatcttggtaatgcaatgcaacctctctgactgacacagatgatctggctaacatttcctgtataaaatcaacccatcttagatctaaccagcgttca

SEQ ID NO: 50521 - DNA, 358 bp, Zea Mays
tgcatcatgttagtgtttaattggttgttgacttaatgagaaactagttgtgtgcctgtgtgttgcgacgacatacaaattattcgataaatattagtgtacaacgatttaatattgttgctcacagttgctaggacacatgcttgaatgcctgattgactgctgggcaggacacttctttggttcttatcttagtcctcccctaccaccactggcagcagcatacaatgatgccatgtggtgtgtttcgatggtgtatgatcagtgatccagttattggtaggcgcagattgtcatagtttagagaaaactgtagttactattgagaggagcagacaacacaacacctagattcttg

SEQ ID NO: 50522 - DNA, 271 bp, Zea Mays
taaactattagtatcatattgccaaggtcgacccaataacaaagagcatgcttccataggaataacatcacaatcagcataatcagaataagaacccagcgaaaaggggacacgtaccgaacgtgttacctttattttaccaccatcattaagccattgaatgtgatatggatgtgggtgtgcgtgagtgggcaaggataatttctctaccaaagttgtacttgccaaattgttgcagctgccactatcgatgatgatgcgaatcgaccgt

SEQ ID NO: 50523 - DNA, 482 bp, Zea Mays
cgcagccccgacattaaaagtttgccttaaaaagaaaaagacctcttaccctctaagaagaatcttctctcctttccccgatattaacaaacccttcttttcttctaccagatggaaggctcctttgtcattagaacgtcctactgctcagaggtggaaggattccctcatcttttacggagttgcgtgcttcgtacggggatctgcaagaagctggagtacgtctggaaagaataccgcgaaaatggaactgagaaatgctctatggcagtctacctgggagaaagccaaaattacccaaatcaccctcccttccaagtcaccttcactggacaccgcttcccagacacttgccaaaatgttgctcaaaaagccctctgccagctatgccaaaactacagcagggaagtctttgagacaccccttcgttattttccacccagcaacaaaaatacccctacctggaggaaaagacttcaggc

SEQ ID NO: 50524 - DNA, 944 bp, Zea Mays
acccaatgagccttgtagagattaatggatccatctaacttctatttgattttgaatatccacttggagtcaacaatatctaggctagcacgaggagggagaagatgccaagtcttatttttatgagggcataaaattcttctttcattgcataatgccataaaggatgctttatagaggtgacatgtgatgatggctcttcaacagaagttcgagtaatagaatatgtcatcataccatcactatgttgttttggccgtcgtagaatacttttcaaatgtgacgtcatcagtaggggcaatgattggattagttagcccatcgatatcaaggagtaccgccagattaagggttgctgctacatacgaccttatggggtgggcatgttgttcactgatggagaactcgcgggagacgaggcggatggagacggcaatgtgagtgacatgcctagaagatcatagttgatggatagagctcacaaggaaacacatgcaggaagatgttccaaggccaaggaatatggtaagagagacaaagaaaaaattataatttcccataacacatccttcttcctcttcctcctcccatgtcaaatgccactactaccacattggcactgatccccatacaccaagtcatcatgattcaactgactaaatccatttttctctaatggcatgctcgactctttttgtatctatgaagctagaagcttctcggataccttgatagatccaatgccacccatgagaagaagatcattgcattgacagtcatgggagatgttgaaatccctaatccgatgtatgctagatggtatgatcaagatcaacaactactgagtggttttctattgtcgatggtcgaggaagtcctttaagatgtcaacagtgccatgtctccacaggaggtctaggactctctccagaagaagaattttg

SEQ ID NO: 50525 - DNA, 630 bp, Zea Mays
tggttgcacggagagaaggttggcgcgggtttcaaatgcaagtagaaacaaagagcgaagggtgtggtacccgattgaaggagtatctcgtgcatagagggaagaatgtcaagaaatgtccctctgttccaccagacataaagacatacttctaacttgatatagatgagacaaaggaaaagaagagttctaggttcaggaagcagctgagggcagatgaggcaacacaaacccattttggggatgttgcgtatcaggatgaacttcaagtggctctgcatcagtcacgtgtggagcacgaatttagtcagagggctggtgcaatgtatgacatgagtggtggatcctccagccaaagggtatctcgagggccacttgataggatgatggtgaaaggatcacgatgcccaagagggggggtgaattgggcttttctaaaaaatcaacactaattaaaacctaagcaagagctaagcaagagcccaacttcaccccaacaactagcactaagataataatactagaaatacaacaatgcttcaaatacatgctaaacaaatacacaatgtaaaatgatttaaattaagtgcggaatgtaaagcaaggtttagaagactcctccaatttttc

SEQ ID NO: 50526 - DNA, 358 bp, Zea Mays
ggttctaaccacctagaaccggtccctttgactattttgaggccatttgatgaagtgccagtggagggaggagtcgtatatcaatcatggcctgaaccggaggagggagcacagacgccaaaatcagcatatgtctctagcagtccagctatgtgcataagaagcaagaccaattacacctctagtccttccatgggaactgggagcaaaaggaagttcaatgtctgatgtgctacagattgaagctctagaaactggagatgtgctagctcttttgtttaaaactgtgatgtgctagctcttttgtaaggcccttttgtaatagccaaactggtgtgacctagatagcttaaaactg

SEQ ID NO: 50527 - DNA, 661 bp, Zea Mays
caacacgtagaaatcgtagacggagagaagaagcagccgtgcccggccgtctactgccggtcagcgaactccgcgtggatttgtcacccatccatccggccgtcagcttttacctttattttagttttcgcctccaaacgcatcatcaggcattgcagcgaatggaaaagaggcgctgctggacctcacctctctttggtttttgccgccccagctacggcatccacagacagtgatcgtgtcgccattgccatatcctattcttacctgctcccgccgtaaaagattacagcattgatcaagaaaaattctatgtgggattaaaagcaagcagtacgccatcgtgctttgccgggccacatgtctttttttgaacgagatttcctcagctttaagaaagctaagtcacaatgtttaacagccatgacccaaacgcgggataccagtttacaagaaagaaatcaaaaaaaaaaaaaacgaccaaacctgacaagtgacaacagccacattggctcgctcggctagcataacaaccatactacacacaaagtttttccagatgaccccaacatgtgccattgcctgaaatcctgccgccactcgaccaacagaacaacacagacacacagcggcatttcagtttcgtttccgaataaggaag

SEQ ID NO: 50528 - DNA, 623 bp, Zea Mays
acgtactggaggatggaattgtccagctcaagaagaaaagaaagcgactgtgggaggagagggagaggtgagaaaagaatggtagcataggctagcatagcagagtgggtgtgggaggagggagagggaaaaaggagaccttgtagctactgtctgaccctagcatttgcgtgtggtgtgtggagaactgaagatgagatgacctgagatgaaaacaacccgatggcaggcctgagcatgcatgggctatgcatgctagtgcatgagcatgagagaatccaatcatcatcgtcatctgtcggtcggtcagtcagtcagtcactggccgtatgcatgcagctagccgctgttttgctgtcactcagctatctccacatcgatggggacgccatggatctgatgctacgacatacagtgctctctcttttctctctctctccctctctttaatttctttagcgggatggtcagtcatggaaaggaaaaggaggaggaagaggagtcagccgaaacgacgtcttcggtccatgcttaaatcgctgcctgcactgtcatctatcagactatctatcattcattcgctcgttcatgcatgaataatccgtcgtcgtcgcctctgatct

SEQ ID NO: 50529 - DNA, 567 bp, Zea Mays
ctttgcttcatggaggacctcactgacgtagtagaccggcttctagatagtccgggtctctgtagctggtcctaagtttccaggtgattgtccttcttgtgccgccctttcggcgactaacaccatgcttattgcttctgcagctgtcgtaatgtacaagtactgcggttcccctggctccagagcaaccaggatcggcagggaagctaggtgctgcttcatttcttggaaggcttgttccgcctcttcggtccagacaaatgggcctgatttccgtaggagcttgaagaagggtagcgccctctcagccaacctcgaaatgaagcggctaagggctgccagtgaccccgtaagcttctggatgtccttaatacgggcgggaggcctcatcacctcaatagccttgattttctccgggttagcttcaatgccccggtacgaaaccaggaaccccagcaacttccctacggagacatcgaagatgcatttctccgggtttagcttggtgcgggttgcccgcagcttgccgaaaaccagggtctggtcttccactatagccaacccctc

SEQ ID NO: 50530 - DNA, 1006 bp, Zea Mays
tccatgagttccccacttccgtgtcatccatttgagtaagccggaatgatcctggccgagtgacttctgatacaatgaatggcccttcccatagtggtggcaacttgtgccatccttcccccgttagaattcggcgaagcaccaagtctcccactgcaaaggaccggtttcgcacgactttatcatgatagcgcctcaaggtctgctggtacctatccgactgaattactgtgttcaatcgttcttcctctagcacatcaatatcttctagcctggtagcttcagcttcagctatgttttcgaaaaccaacctcggcgccctgaatattaggtcagcgggcagcactgcctctgacccataaaccatgaagaacatggtatttccattcagagctcgactaggttgagttctcaagctccaaaccacgtatggcagctctttgatccactttcctgcaagcttttcactcttgtcaaacactttcttcatgagtgcttccagtatcattccgttggctctttctacttggccattagctcttggatgtgctactgatgcatacttaatctggatgatccgttgctcgcagaagtcgaagaattcagagctggtgaagttggatcccaggtcagttatgatgctatttggtatcccaaacctgaatattatgtcttgtatgaattccactgccttggctgaggttaaagaggcaataggcttatattctatccattttgtgaatttgtcaatagcaaacaacacgtgagtataacctccctgagctttcttgaagggtccgatcatgtccagcccccagtatgcaaatgccatgttatagggatggtctgtagctgctgtgcgggtaaatgatgttgctttgataagaattggcaagcttcacatctctggactaactcggcggcatcgctcttcgctgttggccaatagaaaccagatctgagaaccttcccaaccagagttctggatgcagcatgtactccacac

SEQ ID NO: 50531 - DNA, 834 bp, Zea Mays
tgtagccatgaggtatgtggaggagatggtgttctgacaactgtgatgcgcggaccgatgaatacaataggatctggtgagatggatacaccaaatatattacaatcgcacgtaagttcagtgcttttacctatgtttatgatttgagttctctagcgatgctgttatgttctggagaaatgaaaagttgatgttgatataatgattttatatgttctgcacagccagattcgattgatcctattttaattcctaggattggtatggtattccgagatgttgatgatgcgtataatttctataaatgatatgcatatgaggttggatttcctttgaaaaggtatagggaaaagacaaactgtaaatggttaaattgctctagagaggggagatgtgcagaaagaaaagatggtaaccctagagtccggaacaaatacacaggtcaaacacaatgcaaatcagggataaaggcttagaaaaatttatgatggtgcaaaaaaagtgtcatatctgtcatgattaaactagttaaccttgagcataatcatgattttgtaacccaagaaactgagaaacaacacctccgctgtaacaagacacgtgacccggaatttatggactttgttggagcaatgcatgacaatagggtaccacaacactgtattgtggatatgatttcagacatgcatgatggcccagaaaatgttcctattaggacacaagatttgaaaaacatgtaagagctgttactcaaatctgagtttaattttcatttacgaatgacatcgtcattttgataatagattgtgatgcaattgagtaatttgttttgta

SEQ ID NO: 50532 - DNA, 582 bp, Zea Mays
ggaaaatctatgcgaagctcttcttctctctcccaagttgcttcatcttctccatggtgactccattgcactttacacatctttatcatcttatttcttgtaactcaagttaaagtgtcaagaatcttgatgggatagtccatgtaagtcacatcaccctgaacattgagctcttccattggtaactattcctcagggacactgagacacttttttttaagttgagacacatggaatacattatgcacataagatagattatcaggtagctcgagttgataggccatctctccaacttgcctaaaaactctaaatgatccaataaagcgaggggacaatttgcccattactttaaatttcctcattccacgaagtggtgacaccttgaggtacacataatctctttcctcaaattccagtggtcttcttctattatcagcatagctcttttgcctggtttgagctaccctcaaattctctcgaattatacgaacttgttcttctgcctcttgaatcagttcaggcccaaagaactgtctttctccagtatgatcccaatatagaggagtcctgcacttcctg

SEQ ID NO: 50533 - DNA, 449 bp, Zea Mays
cgaagaggttcatcacccaatgtggctggccaacccaatcgtcgtccccaaggcaaatgggaagcttcggatgtgcatcgactacactagccttaataaggcttgtcccaaggacccgtatccacttccacgtatagatcaaatcatggactctacctccgggtgcgacctcttgtccttcttagatgcttactctggtttccatcaaatccagatgtctagggaagataggaagcataccgcttttgtaatagtggatgggctttactgttatgtcgtaatgccttacggtctgaaaaacgccttgccaacatttgtgcaggcaatgagtaagactttcggggacctgattagggacaaggtggaagtatacgttgatgacatcgtggtcaagactaagagagggtcgaccctagtggaagacttaaccctggtcttcgacaagctgc

SEQ ID NO: 50534 - DNA, 299 bp, Zea Mays
ttcaattcctagatagtatgatagagcccccaaatcagtcatcttgaacaccttcttcatttcagccttgaaagcactaagctcacttctggactcccccgcgataataaggtcatccacatacactcctaccaccaatctgtaggaatttctgacccttgtgtactaaccatgttcaaccttgcacttgataaaacctagatcattcaacacagtgtccaatttcgagttccatgctctaggagcctgcttcaaaccatacaaagccttgtgcagtctcaacaccttctgctcctcac

SEQ ID NO: 50535 - DNA, 381 bp, Zea Mays
tgatcacagttatggtcttgcctctgaattggtagtatcttggcttaggcgctccttactttaaaatgttgtttcttctggtgtacctaaagaacctttttaattatgatgtgcttagacattgcgctttatatgcatgatcgtgttgtttttcaattagtatatgtggtgcaatgattgtcaagtatgaagcatgtctaggttgcttgtaaaatgttatacttcttgaggcatgcattgttgtattaagtcaacctttcatttgatattcaaatcggtatccctttgtgttgaaattgttagagtataccttggccaagatatgttgtgatcccctctagttctgagaaagctagaatgtgtaaagtgcaaagttattca

SEQ ID NO: 50536 - DNA, 658 bp, Zea Mays
ataaatatagaagacaaacagaggaaggaagcaaattttcctcctccccattgagatcctcttcctctgattattcctgcgattgcccacgtggtctagttgatgccaccgatggcggtggccatgggtgtggcagcaacttcacagaaaagtatatcgcagaatgcaggcaaatgatcaatgatgcaaatatgttctatgcacacatgtatgagaaaagtcacacatcgccaattcatgtcaaagggtaccctagtagactgatgagaacacaagcacatgcacagagatgtgtgtacacatgtagaaccattcatcgcctaaaccttaaaaccttgaaatttcatacctgtgagagacgacatggtgctgtcgccagcgctggagaacttgagggggagctcatcgccaggcagattaaaacatagccagtccaacgccgattcaaacgtcgccgaatcctaccacagaaaaaacaagacacacgaatggaaaatgatcagctcacagccaatacgaacatacggtcacatcatcgccgtgaggttctaagaacgctagtggatgcgcacgggtatcgcggagagcgcctgctcgatttgcgcggaagagaagccctcgagagcgagcttgtcgtacacgccacgcagccgccgcg

SEQ ID NO: 50537 - DNA, 287 bp, Zea Mays
gtcacactatctctcaggcaggtatagctgttgatcctgataaggtgcaagaggtgatgaactggaagccaccaacgactgtccgtcagattcgaagttttctgagattagctggttattaccgaagattcattctggatttctctcgaattgcgaagcccataactgagctgttgaagaaagaagccaagtttgtttggggttagaagtgcgaagatgcctttcatgcattaaggcaacatctgaccacaacaccggtgttagcgcaacccgacagcaacaagcca

SEQ ID NO: 50538 - DNA, 433 bp, Zea Mays
gttattgcagtgggctgacaatgttactcttttctcttgagatgggctaatcctttttagtagagcatgagatgagatgagctgagcttgcccgactcctgtgtgtcgccacctcacctcacctggctcctcctgtgcttctcatcccttgtctcgcttttgtgttccaatcccagccaacaacgttggctagagtgtctgtctacgctctctacgacagctcaatgcagaactcgcttcattgcaagtaggtgagccattaattatctgttactgtttccatcagttgaaaattggagcgatagaagaatggacataccttgtacactactccgtactcacccctgccaagttcacgttcagttgaaaaattgcatcagataaatttaagtatgaatcctgaacatgaacaaagcaaaatgttattcaggtt

SEQ ID NO: 50539 - DNA, 852 bp, Zea Mays
ctttgcttaagtgattaagcattgttgtcatacaaaaagtggagataattagccctaaagtctggctgtcagaccactcttagactgaatactgactaccagtgagttctgaggaactttgggctcgattcatgctgaaaggaataagtaaacgggcaagatccctatagcagaattgtagctggtatatagggctacaagtttgttacaaatggattggcaagttcttgcacaaaaatccaagatctaggcattgcaattctatctgtgaggcactctgaatcaggatttcgatggtacagtgttcagatcagatcgccaggttcagttcatctcgccgccggtgatcccacgccgtgatcctcgtcgccgttgcgattcgtgctctgtgggggtgcagataactcttaagggcaagaaatatcgcatcgtggatgaactcaggccactgttccgctccggccgtcgtgcccgcctgagttacggccgattcggatgaactcaccggagatagccatctatcgaccatgcgccacgtgccttggtgtcttaccacgtcacaatagctcatattacacacgttcggtgatcgccggtgagcccgccacgatgaaagccaccaatccgtacaggttcgccggagctcggcctggcgccgttcgccgtcgaggaccgcaggttgtgaaggattagaaagtggagggcctcggtgtaaatgtcagtgacccattgaaatagtgtgcgggactattagccagtttttcaaacgaccgaggacccttgcgcaaagttggcaccgcgggcgcgtgcggacgcgcgttttctctgttctcgggccgacttggatcagat

SEQ ID NO: 50540 - DNA, 1320 bp, Zea Mays
gtctagagcttgagaaaagaagttgcgttcgaaaaagaaaatcaggtgacagagttcattattagagtctcaagccaattgccctcaaaaattgacttgagcctcaggggcatgtgcgagacagatatcccatgggtcactaaagcgcagatgcactccatgggccgctagagaggtccccaataagtcatgcaatagggcgcataatgggcctcgaaggcgtgaagcaggagccgactaatgtgacgacatgctagatactgcacaggcgtactggtcgcataaatttcgcgcgaaggaattgcctcaaacctgaagatgtgtcttgtgcacggtaaaacatcagattactcagaggataactcagaaaagacaaccaagcaccgaaggaatagggacgctggtaacagaagagaatagacttagatagattcaatgacctgtacatggatatctctccagtcggctatataagcctacaaaggtacccctacaaaaactctctcgctcaccattagattgataggtaacttcattttccacctcttgcaaaccacctataacctgcgaacttagagaaatccaatacttagcaccacactggacgtagggtattacacattcacgtggcccaaacctgtataaacttcccgtgttccgacatgcccccactcataccatcacgcagcgatcaacattatcgtcctcccaaaagtactttgggggctaccccatagtgagtagtcgggacaaaacaccgacaacgagcacagaaaggggttgaccacgacactaggtgggtccgcggtggagctatgtcttcgacaagaaatccacatccacccgatgatcaatccacaatgacgcctaatgctatacgaagcgaagaatagtggcaactcggtgcacgactcagagcagattaatggcttcgtgaagctctagtgaagaattgcacaccccctagttggtcttgcgcttggaaagccacacccacacattccttacccttggctgcccttctcgtccacatgcctatggcgaggggtgcgatgtagacatggttcaccggcgatggctcccttaatcctcatcgtggcgctcctatctttcctccctatctctttcttggcaatgtttcctatgtgtgcacgaagatataattcccaaggtgcggatgtggttgtatcatttttaggcatggggtcagtgaaattataatggaatcccagattttgcggcgaggtggttatgtcggtgcaaatcggctgttcgtggttgatatggcgaggaagcaacgagatgacatgcgggtcccac

SEQ ID NO: 50541 - DNA, 339 bp, Zea Mays
ggctatttataggcacggcggtccggctagcggtccgcggccacggattgcattgtccgtgcatggttaccacgtaaggaagagacacagtgagggaggagggaggcacgagtgacacggcggcggaatgaccgagccacgatgaccgccggtgaaatatctccgacccggctctggctaggttcgcggaatcgtgacacgcccgaagtaatctccccgcggtcgatcccttccccaaatcactcgaacacatccaattctacagtgccctggatctttgtcatcgttcttcagatattttcagtgctctgatcttcagtgttttactgaaccgacctc

SEQ ID NO: 50542 - DNA, 320 bp, Zea Mays
cttgagagagtcaatacaatttttattaactcaagctatcaatctttaatgatctatatccaagattgacccaaggttattttgaattgttatctcttaaattcatatcatctcggggaaagatattgatgttgtaggaaataaagaatcatcttatgccgaaaagtcaaggcctacaacatggaggaaagccaaaggatggtaacaattacgctttcaagtatcataagttatcatttcttatgtgtcttgtgtagtcacatagaaaaagaaagcacttcaaatgtttttaaattatgtcaccattctttgaagaaatt

SEQ ID NO: 50543 - DNA, 1189 bp, Zea Mays
gcagggttaatgtgtccaatccctccactttgtagtcctagcttcttagccctgatattcctcttcacctcattggcatattttctgaaatcaattgcttcatcatcttcccctgaactgtcatcttcaatgggttggaagtagtctttatctaatgattcagtttcagtgtcttcctctttatcttctactggaaattcagcaaacctattatcttcaatttgcttgctgctgccaccatcttcatcttctacaatttgcttacccctgccacaatctgctgcatctcctagactgactccttgtgattctttggaaggttgctcaaccatttgaagacagacaacaacttcctcaacataaatttctgcaacaccagcatcagttatgtgactaaccattgttaggcaagatgcatcatcgactagcagtacaagaccattgctcaattctgcccctggcttcaaccaatgtaaacgcataaagttcttactgacaacatgatctgctaggtggccctgtatctctggaagagaaaccttgtccaactccacatatgacaaatcacatttgcctcctacatactcaagcttcccttgatttatcacaaatcccccactatgatggaacctaattgacaaatgatccaacctacatttcataaggaaatgttaatacacttcctaaatcatgcagaccttggactacagctacgtcgtcatccatccacccacaagatatggaccttcccccaaaaacaatctgccaactccaaaactaccagcgacatggacaagtgggtactcacctctcgctcatgatgcaaagtgatcagacgagcagcgtccgatcatgtactcatcgatcgcctcatcggagatggtgaaggcggaagtgcggaggctccgagggcgctaggcagtcgaacaacagaaggatggacgggctctccagcttccaacccaaacccacctgtaggtacttgacatggggccgatgaggactgacaagcgggccatagggccaggctggacgagcgcgccacctaggagccacgttgggtgcccagtaagcaaaacagcctcctaataccgccttgaggggtaatatgtaccgacatacaaagtttaatgtgtggaatacctggttttccaggtcggggggttaagtatcccacccttcaaacgcc

SEQ ID NO: 50544 - DNA, 1076 bp, Zea Mays
gtggacttggatgcccattgtgtgattccaatcgcgttgacctgtccgtgtgggatgtttattccgatgcgcctctttgtttgccctggcggtgtggccgcttttggttgatggaggccacagtatgttgattttgtctggtgtacagatttaccagagggtttaagtttgttagtggagtgtacttcttaccttccattgtcgcagaggctctgcaagtagaaggttcctaacaccagctaataataatatatgctgggggctactgtagcagttcgtgaaatttggatgtccattgggtgattcacaccgcattgacctggctgtgtgggttttattcgcacgcactgctttgttaccttggtagtgtgtttgctttaggttgggcgcaacattgcgttgatttcatttgttatacatatttacagacggtttgagtttcttaggagagtgtatttcttgccttccattcttgttgtctataagtagaggctgcgcaagtagaatgtacccaatcttgctaataattttgtgtggaacacatttatagctccataaaacatgcctcatatgtggtgccagaatctgaattatgtagaagtgccatgcaggtctattagaaatggtcagctacaaaaggcctatatatactgggaaattataagtagagttgttatattttgtaccgagtgcttaattcgttttctgtttatggaatatatttgcgcgctttccttttttatgcccctatgttacttttttcttctgtgaaacataatatgttagctaagttgttagtcacggtgtcacccctagactactctcatgcttaactgagccttaataaaaattgtttttgctaagatatttgttatcatgtaaaaaccattgtggcatgtaaccggcatacttaagcatggtatacatattacatatataacacctgtaaatgtgcattggcaaacaaaagaagcttgattacacatggttctgttccaacacttttttgtttgtttatcagtttcaaggattatgttggaatgactaccatatagtctttgcatccagtatatctt

SEQ ID NO: 50545 - DNA, 454 bp, Zea Mays
cccaaggcgaggtacttggtctgatgtagcctttctctaacaactcatcaatctgcttcctgagttccaccaattctggtccggacactcgataggctctcttggaaataggggcagtgcctggtataagctctatatcaaattcaactttcctttcaggtggcatgcctggtaactcctcgggaaacacatataggaattctgatactacgttgatagcttctgatggttcaatctcctcaatacaggtggtgacttggtgacagcttcctttccttggtccagacaagaccaactccactaacacttcctctcctgataaggacactaacttcaccgtcctcttgtcacaactaagactagcttgatatttggttagccaattcattcctaggatgacatctatagtcgcatcctggttactcataactattagatcagcggggaactctat

SEQ ID NO: 50546 - DNA, 1020 bp, Zea Mays
agtatttgatttaaaacagagctaatacggcattgaagggagtatatttagcaacgtgttagggagtgtatttctcttgcctctgcaatacagcgctagcaaaagtcatagggctggccatgaagcaacacgcaataagatttgaagcaacacctaagaaatttttaattagcccaattcaccccctcttattcatcttgatcctttcatagctccgatggaagttgacatttttcagtaatggacattaagttgaaggcaatggtttttcataagcaagcatcataattttaaagtgcatagttgtatcgatcattttgaacctttgattgttggatcaatcttatgaacccaaacaattcttgggtagattgaccgaggtaagtctagtgataagtggtgatgcacacttgtgaaatatatattactaaatagctctaaggtagctcaagataagtttgagaacaaacacaactcaaagagtgtgtgaaataaatgagttggcggtggtacagttacaccgacatgcctagtgcactaggacatgggacaccagatagtagaattccttattacgaaaaggactagcaccaacatgtctaatgtgcactagagagagttgtaaaatagaatgagatatggcacccgatatggcactcgatatggcagccaaagagggtcgtagacttgtgcaagagacagtgtactcactagacatatatggtgaggcactcagatatacctataattgtgcacctcgaagcgttatactcaccaaacttgttgagtgagcatcagttaggagcatcatataacggtggctaatttatgaactagccattgaaacatgtagaggacattatgcaggagattagtgtgcaccatacatcttcgatgcccccatgaaagctgagtggaggggcaactactagtttcttgtcttggggcaacatatacccctctatctcatccttttgaagtctcctaccgatttgttcggctaaaaaacatatattaaac

SEQ ID NO: 50547 - DNA, 443 bp, Zea Mays
atgaaattagcttcgagcagtctgtggacctcggcttttgttgctttggtttttttgtctgacattttgaggagtttctgcttttttggatggattgaagggtctatgcttaaatcgtgctcgatgactgagtgactgacacctacgaggtctaaagctgactaagcgaagacgtccttattgcggtttaagcaggacaacatcttggactcttcctctatggtgaggtcttcgttgatcaaaaatgtttgattcaatatcgaagtgtccaaggggactttttggcctcttcgctgctttgaatttgagctttgattgttgttgttttttgtggcgctgaatggcaaggccttcgtcttcagagataaggcaatggacattgcgctgccctaggaccaagtctctctcaatgttgtgagcggtttgttggtccccatagattg

SEQ ID NO: 50548 - DNA, 1380 bp, Zea Mays
acgaaaccaactgggcctgaattccaagctcccagcctagtactgcactcgcgctcggcccaggggaaaccgcacctggcggcacatctctacttgattccatccattggctgtgacaatgacatgtgggcccggcttccctgggtcatcctctacctcgcgctggagtccaaaccgaactaggaaatcgcgcagggttgttgcgccgccttagagccccttcccaaacgctgcgacctcgggcctgatggaagcttcttccccgttttcccgcaacaagagctgggagtccacatcggcatccactcgcgccgttgttccactgcccgtgggccccgtctgaatgggtcgtcttccccaaccgaataagcctagctcggacttctaacgctgacctaccgtccgcaaatcctagctcggctctttcttctcaggtcgtaacaaacgcgtgacaaagccagagaccgaatcctcgtaatccccgctaggattagcactggtcggactcaggccttgggtataaaatccagtcgaagccgagaccgcctcctcctccatctcttgcgccctaaaccaaagaactttcgcggtgcgcagagaacaatggaggattgtgggttgccgtattgtgcggagtcgtccgtcaccgctgtgggccggaatttctcaccggtgcaaatcctcaccctcaaatccgccgtacgccgtggccaattcagggaggtacagcagtcgtggtgaccccaattgctcgccggagctcggcggatgtctctggatcgcaccgtgtcgtggatggggtctccgcgctgttcaaaccatcggtaagattgtccctgtcacgctcatcatgaccccctgctacaattgtactcgtcggatcagggtttggggcactaacgcagctgattggtcgggccacccattgccgccaccatggttgggggcgcctcgtcgcttggtggtcgtcgttagtgtgggtgatgtgcggcgaatcgtgcgccgtccgatccactttggatgggcgagattagatgtagggatcgtttttggcgagtaagttagaaccgttgagatcttgtatcgggcggatgtggttagtttgagtcttataaaatccagaccatgggatcttgatctcgcggctgatggcgcgtaccggttcagagtggtgctcgatttaatctgggcgtccatctctgatcgaacagtagatattcatccataccccttcgccatgtcggtttcaataaagagcccctgcactcttgttaaaataacccgcagtcctctctaggtgttcactgagtctaggaaaacttgcgagatagcccctgcactttccagaaattggcgcgcagtccagagagtagtaaaatt

SEQ ID NO: 50549 - DNA, 464 bp, Zea Mays
gtcggtggtcaccgcgagcgaaccttgtctcagtcgccaatccagcctgggaaacctacccaggaggaggggttggggtggtagaaggtgtgcgggagcgcgtgtgggcgcctgcgcgactgggccttgaggaatttctcaccgacgtgtgtccactccgccgagccatgaacctgcgtggacgtcaagcagccaaaggtaagaaggcacccctagaaccaacctcggtatttcatatgtgtagtgtcgtcgaatcaagtcggctagttttcaggcgggtgtggggcgaatgggtggtcggccatggtgctgccatggggccacagggcgtcgaaattgggaacattggggtgctcgcgagtggcgttggcatagataatgtgttcgggaaggatcagacttcgtattgaactaattaaatcagagtttggggaccgtgggcgctatatcgaagttctccggcg

SEQ ID NO: 50550 - DNA, 341 bp, Zea Mays
gctgcatggaattcatcgctggagttgtgggggctatgctgggccgctaactaccatggacggagctcctgtgcgcgccagtcgaggtgagaacccccctttgagtcttagccttcatctgtaatttgtgtagtaccgagagccatggagaatatctcacctggggttgggtaatcggtcaacaaagtcttggtccctgccacgggttggcgagcgtcgtcgcctaggcaacggccaggccatcgtgggaggttgggatgtggtgctggccgttgattcgaagaatagcggccgccattagatcaaatctataccggttcgtcgatgtgtatgtaccgtcc

SEQ ID NO: 50551 - DNA, 320 bp, Zea Mays
tgcgggggagacttctccgcgtgtggtgggtgctgaggatcttacgggtgcgaggactgggtgtaggcggcgaagggcggtggcgaaacggagagtgagtaaattgtcgcgaagtgataggcatcatcgtggtgagatggagggtggttgtcttcgtgtggatgggactggcaaacgcgaattgaggataatgctgttcaactacagggagatgtgtatcatcccgaaggttgagccaatgtaatgtgtgatgccctcgctgtatgtatgtaaccataatttgtatgatgaggctacgttccttcgttgatccagccgcg

SEQ ID NO: 50552 - DNA, 356 bp, Zea Mays
acattattacataaagttgagtaatagaaaaggaagaaagtttgcatgtaaacataaatagacaagggcatgtgaaactatttcttggtagctttggatctacttacccggcctattggggtcttagtatatatgctttgtctctgggaccatactgttgatggtgcaagcttcggagccctcccttccatcccattgctgcatgtcttgcattgggaacttgggatgataagcagggacctgattgtaaggaggcgactctggaatgaaggaggtgttgggcgaccatgcgctcatcacatggttgcttgaggcatttgaagtcgaaggctaatgcagcctaggctcctgggttg

SEQ ID NO: 50553 - DNA, 378 bp, Zea Mays
ccttatcaaattgtttttaaggcaagagagtaagcaaaagaaacgaaaattacaataaatgtgtattaagttcttgatctatcccctctgttgcttcagtaaatatgcctggattctggaacagtgttgttaattgttcgagcttcggactcttctcttacatgacattgctgctgaacatgacatttcccctgaggctgctgattatgagatgaagttggtactgatgcaggtggctggggtagaacccacctagctggagagtgacttgccgaagcaactgaagttataggttgtgaaaatggttgttggttacacacatacaccaggatgtatgtagagtagcatgaagcagtgtgaagaactttcttcggctgg

SEQ ID NO: 50554 - DNA, 569 bp, Zea Mays
gtcgaaccaatatgcttgaggccaaaggcgtatccacaccaatggtatctgccgaaaagcttgtgaagacagggggtatattgctctcgtctgaggatgctaccagatacagaagtgttgtaggtgctctccagtacctatccttgacccggccagatatctccttctgtgttaatcgggtttgtcagtttatggcttctcccacagtagatcattggacagcagtaaaaaggatcttacggtatcttcgggcgaccatggacatgggtctttggttcaccagatcatcatctttcctcttaagcgcatttagtgatgctgattgggccggcaatcttgatgatcgacgtagtactggcgggtatatcatttttcttggtggcaatccggtctcatggagttccagaaaacaatcaactgtctctcgttcaagcaccgaagctgagtataaagcggtcgccgacgccactgcagaacttatttggattcaagtgttgatgcgagaacttggcattactctcagccgtgcacctagtctctggtgtgataatattggtgcaacatacttg

SEQ ID NO: 50555 - DNA, 349 bp, Zea Mays
cccgacggcgtccaggcggtggagcgattctagccacggaggagacatcgccggagttcgtcatcatcgtgcacaaacgtccagaccttgattccctagcgctacacatggcagagacaaaagcaaactcaatggaggtcttcttaccgtgcatggcagcgagcggagccctaccaacagcacgacgcggcggacatgttggtcacggcggtgacccattctctctcttggctagaatggcgctcaagggaagggcgtctgggcactttgagtcggcagggtattgcgagggagagtcgcgccacggtgtgggagtccacgggcggcatggatttcggccatggcgacg

SEQ ID NO: 50556 - DNA, 530 bp, Zea Mays
aatctatttttccaattcaattactcaatttaatacagctctggactgggcctcgaatactgaaaactgtaggggcttcctggtaagtagctcgagactcagacaatggtgatactggacggcgggttgattcttaagttttctagggtctcttctgcgaactggcaaagtgaaggggtatcggccatgatgggccatcggatcagacccgaacggcctagattaggtacgtgcacttaagtgatcggtctacaacgcgagcccttggatcgggatcctacggcccatagccaatccgtgggttggaacgcagagccaaatctacccgtctgttcccaaaccaacggttccgatttaaagaaattcatcaccgcgccagcactaatcccaagcgcccaaccaggatccaacggcccaggttacaactaagccaaaagcgcgcacatccgatcttggccgctggcttctaatcgtatggctaggaacccttcttcaacctcaagtctcccaggctgtgcacctcccgcagc

SEQ ID NO: 50557 - DNA, 329 bp, Zea Mays
atatctagagttatccttaatatattttgcaagtctttgacagatatgtctatcttaaaagggttgaaacttcgcacccatgtcatcctgtgatgtagcatgacgaaagtctatatcaagactatacgtagttggtatacataaaatagataaaacaatgagcacttactgtaatgtcatatcgtcttggattgccatgatgtaatcgcatagaacatctattaaattggctttggtcatgagcatatcctttgtggaaagaccactcattaaaaagtcgttggtgcactcatctgtcgatacctttataggagttcctttatcccaat

SEQ ID NO: 50558 - DNA, 1139 bp, Zea Mays
ctggctccctcgccaagcaagttcgattcagaatccctgccacatccctcagccactcacgcagcaccgtcgtgcgtccctggagatcgtctgtcactgcaaatcagcattcaagtctcctgtacgaggcgccgctggatgccagcctaggtaaacctactgaagacgaggtcgatggatggacaacggtccgttacaggcgtcaccggagggtcaacacacctgcgcattcaagcctcccaacaacccggcacactgcgctgcgctccccggccagggaggaattgatggcaagcttgagaggtaaatgcatgcgctgcttgtccagaggccactttgctgcagattgcagggatccactgaaatgcctcaagtgtcgaggttcaggtcatatggctcggcagtgccctcagagaagtagtagcagcagcacaccaaccactccacccccacatctcgacggcccctgcttcccacctcttgtccagaccgtcatggtgaggcccggcgacccggacgcccgtccgaaggagacgttcactgtggcggcctcctcccaggagatggaccgggagcttgacagtctgagcacccatgccgtggtggcctggctcggaggagttcggccggacacaagccttcgcacggtgacgagggcgttctgttcccagttcggcgtgcgtgcaaacgacatcaaggtggcagagcattacccagaggacttcttcatcaccttcacgcaccgtcaccacagggatgcggcggtggcgcaaagagacttcaaatacggcagcatcgacttccgcgtccgacagtggcagcttccaacacatggtgatcacgacgactttcagtaccacgttcgcctatgtctagagggtattcctctccacgcctggaatgagagcatcgccaagagagcagtgacaagaagctgtaccctggactatgttgaagagcagtccctgaggaaggaggacgcgcgaacgctcaatctctgggcctggacagtggatccgtccaacatcccaaaggtaacttggttgaccattgttgggaggacagcactggtccacgaaggagatgcaccaccagcggcccgcagcggcttgactttccgcgtcatcgtgcacctggac

SEQ ID NO: 50559 - DNA, 555 bp, Zea Mays
ttgggacacacgtcgatcttctcatatgtcatcccaagactagccaacatcttctttgcgaagtacatattctttggcaacttttgattctccgggagaacctcgcccatcagttggacgatgtcgttgtaagcactgtttgaaatgttgtgcttcgactttatcgccattagtcttgtgagagtcccaagaactaacatctgagtgtgctcgtgcagtctctcttctcccgcggcgagtagccagaagaattcctgagcatcgcatggaagctgccccggctcctcagcgttcatttcaacctccctaccaagatcatgcaacatgtcgtccatcctatcatgatcatcatcaagttccacctccgcatcaacgtgtctaatagactctccatgccagtaccatacaaggtagttcgacataaacccacttttgcaaaggtgtttctccatttcttccttcttttgaggccacttgttctcgcagcgattgcaaggacacttcactagacgaccagttgcatctttgaaagcatgctcaagaaaagcctttgtt

SEQ ID NO: 50560 - DNA, 424 bp, Zea Mays
caagattgattacacaagcttccgaagtgccgaaggtatgaagaagctttttaatctatcattggctaaaatgtgctttgacggggcttttgtttaataatttatttgcatcttcgtaggtaaatcttgaaggtgaggaaattgttgtattgcctataattagtcaaacccctctggctaaaatggaggctgagccaaagaaggttttgactccaatgccttcgtcagagacctcaaagaaggacgagcgaataactccggtaataagtgccttcttttttgaggatgttaaagaggagggtgacaaagctgagaccgttgtagaggctctggagaaggttaccgcaacaatgaaggtaacagaaaaaggtgatgtgtgcatggcaattacaacaatagcaatagctaaagagtttcctgcaac

SEQ ID NO: 50561 - DNA, 361 bp, Zea Mays
atttacttcaggagaaggagcaggagcagagctgtctcctccaaccctcacaatagtcatgtcacggaagtatcttcctctcatagcatcaacgtgactttgtttgatagttgattttccgaagatggtatggcttggtcgccagggtcgatcttcagaatcttcgtctccactttctatatcatactcatcactgtcgtcggaatcttcagacagatccgccagtatttctcttgtaattttttctatgtttgtctttgccatggattcgtaaaacccagaaataaaaggatctacaactttcttctcttcataaagcttctcttcctcaatcatcttcctttcctcagtcatcttcttc

SEQ ID NO: 50562 - DNA, 287 bp, Zea Mays
gtaaagtaaacataagagaaagttcaacgaataattcataatttgaaagaagctcaagctcgtcagaagagttatgtagataagcgacgaaaacccttgtactttttagttggggattatgtctacctcaaagtctcaccaatgaagggtatatcacgttttggggttaaagggaagcttgcaccctagtacattggtcctttccctgttcttgaacaatgtggaccagtggcataccgactccagttacccaaaacattgtctgctgtacataatgtgttccacgt

SEQ ID NO: 50563 - DNA, 315 bp, Zea Mays
caacaagcagaaggaacttgcttcgtcagccactaaaccctcccagtcaaaagatgtgttcagtacatcatcatactgttcaccttacatcccacagtatgtctagcctcagttacaggagctaaggctaagtttaccttcggcctcaaacgcctcaagcaatccagtaatgagtgtatggtcaccatctgcttcctttgtcctaggaccacctccctatgatcaagtgtctgctggtcaccccaagttcctcatgcaagaattgcagtaaaggggcagaagggagggatctgaaactcgtactgtcaacagtat

SEQ ID NO: 50564 - DNA, 1435 bp, Zea Mays
ccatcctcaacttcgccttctacaagccgaccgacgaactcaagttatgtgcctttcctcaccggtccatgtgcccagtgctcctgtagaagatcggtaggtgccatgctagaaaagcctctacacacccaaaaacccgccatcagtgctgagccgccgacgggagtccatccctcttcctcccctgaaacgtcgtcgcccgccacccttctcccccagtagtgtcgcgatgctggctcaagacaccgcctttcctttcttgaacgaagtcaagatgctgcatgtgttgaggatatactccatatgattatccgtgtcctttcacagaactcgcttgtaccatctttcttggagtaggtaaattcacttgattgttgttatattttcatcaatcttcttaagaggtgatttgctttgatttacttacagatattagatagaagcaagcaaatatttcaattacatcaattctcacgttaataaggaactttgctattgtcattactcaatgggccgggtttatcaaattgcagctattatggacttcttcttttttcttaaaaaattaactttgtctccgattggtgaacactatttttcctttacttcgtgtcatcctttttgtgatacaattcaaggcaagatgcaaatgtggtttctatatctgttttctctctgtatcgtgctttttagtttatatatgaagatgtgatatttgcattaattgtttgcgaggaaatttgagccaatctgtctattagtcctttagcttcttggaaagcttttagagcagataatcaccaagtttcatactaagtttaataccatgatatttatcatcttatctttagcttccaatgttaactaatgccctcaacaaagtaactaatgcttatactttgtttctaggttttacagaaacgttcccgatctgatgctttaaaagatgggcgcaaaggctcctttcccgatctgatgcttcttttcttttcccctttttattttatccttcttcttttatagttcccttagatcaggttccacataaaaaaataccagaaaagaaatatgcaaacaactcattagcaaacaaaggtgagatttcaagaatcaaattgtacactttctcaaggcttcagctccaatatgtcttgtaaattcagtgtattaacgatacataaaggattggattttgtgttttgaatccttcgtggcagctttgtttttggaacaacgctgggcagtacctctactccttaaggactacaccaacgaggtaattattgctattagtcgtctgcacatcatgtcttgcttattttttttatttttttacagctttctttttcccctggttttgttttattacatgtgctttatgatccgtatttatacctatgtacatagacaaataggccattttatagccaatcta

SEQ ID NO: 50565 - DNA, 576 bp, Zea Mays
tttttttcttcaatgcacttatagtcctatgttgtcttgtagctagagggccaaaacatcgcgatcgccccataactccacaacctaaccgttaattattatctcataccagcatgccttcctagggtgcaccttcttatagcgtctttggcacactagacgttctatgcatagagggagtccgccaagtggttgtggagtcatgcacaacgcagacacatgaatatccttgttgtgtcatctcacatcctaggtgtgaccctattcaggatgtggtcaacaatgccttggagtggtggagagcaagcgagcacctaacatgacctagcacacatctgttgggctctagcacctcactaattttgtggcatgtttacaacagatggccatttcctgccttgagcctatgttggggaagctacaatggttcttgctcgacaattacatcctaagttgggaatctctttggccaagccaagcccctagacaaacaaggcctagatggttctctaggcttccttagctcattctcttggtgttggggtatttggctagggtgatttaggaaagtttatg

SEQ ID NO: 50566 - DNA, 545 bp, Zea Mays
gacagtcctcggtcaaaatgatgagtaccaggtctgagccacattcctgactgccatgacgaaggattttttctatgaatgttgagttaccaccatatgaagatatggtagctttgtaacccatgaggaattgttttggatcagttaggatatcatacattgggagtgtggggggtctgtacaatggtggccaaagcatcgtttgctactctagtgtcagtggagaagcttcgtcatagaggaaaacttggaagttgaatggttcctaacaaaggttgtcatgattaaggccctcatagttctgatccttgtagttgtactaatcttgcgcctcaatgttgcgcatctctttagttgctttatcaatccttttctgaagctcaaaaatacaaagcaccttctccctgcacttctccaactactggtggattgcttcgaggttattgatatgtcgatcaagctcctcgtcttgtggttcccggctgatagccttcctatttccattccttgcttcctagaggagagcttcgtccccttggttagtg

SEQ ID NO: 50567 - DNA, 933 bp, Zea Mays
gtggatacagatgagaagcgccaagagtgtttcctagaaggattgattggacctctaaattatcaacttcagagtcatactttccccaatttccagacactgctgaacaaggcaattggccttgacagcaaaagaaaggaattatctgaccataaaagaaagtttcaaggtcagtccagcaggaacacccgcccgaacaacgctcaaggttcacagttccgctctgaaaatccaggcgaaaacaattatcaagtgcaacgctctggacagcaaagccagagaaataatcagagtcagaaccaacaaaggagcaactcccagaccaaccagaggtctggtgggagttcatagaaccgtcaaggtggcgccagtaacacgcaggccagaagcaacaacgcaccagtccaacccaatggctgtttcaagtgcggtgagctaggccactatgctaacaactgccccaaggcgcaactagtagacaccccagaaaagcaatactcagaggaatgaccagaacacccccgctcgtggatctgctcagaacaagactccacagaaccagagtagaggaagggtcaatcacgtcactgcagaatcagtgcctgaggatgccgacatagtgtatggtatgtttcttgttaactccatacatgcatcagttttatttgactctggagcatcgcattcctttataactgagtcatttgtggaaaaacataacatacaaagtaccctcttaagaagatgttacatattagttcaccgggaggtgacatgaaaggccacacactcatgcccccatgttaacctcaagattcaaggaatagatttttcagtcaacccagtggtcctaggatcgaacggtattgatgtgattcttggatgcaactggttgaaaagttgtgatggagtaatacagtgtgccaacggaac

SEQ ID NO: 50568 - DNA, 656 bp, Zea Mays
gttatattgagacttggttaataaacatacatttgttgttggagtggagtcaaaaaagtggaacactcatattaacatcatcagcatccgaatatatgccaatttgctacttgtaataaaaaaatatgattgttatatgtgtcataagggttggtttaagtgagtggtagtagaaagtggaaatggaatgccaacataatggacgtgaaacatgtgccggatcagtgtcatatatatcttgcgtttgtgtctgggtggtgtcctcgtccatatgaaaccgtgaggtgcatagttggtttgagatgatgttgttgggcggtcaacgagaggtgtaccttgttttgtagtaccataatcaaagatgtatgaaacatttgtcataagtgaactaaggtagacagtagtactcctgcttagtggtgttttgtaggatagagcataaatagtggaacaaattatgtgtgactgtgagataattgttggattgaagtggagtgagtactttggagggggagtagctgaaccataagtattgttactgaatgacataaatatcctgtgttggtcataaaaatttgtgtaaagcttaagtgtgtggattcagaaatggtatgtaattgtgtaaattaatgttgtgtaacactagcaataaaaat

SEQ ID NO: 50569 - DNA, 376 bp, Zea Mays
ccgccgccgtgaaagcatcctcaccatggccagcttgctccaggttagttcaagctctctggtcgtttgttcttgcgtccttaagtcttcctcaagctcctcgacccctctgattgaactagaccgccatggatcaccgggaacacgttgttcctttgattatccgcactgtcaccatggccagagcaaattaggtagccgttcgtgaaattgagtgaggggaaaaggtccttaggtcttgaatttggtctctgccaacgtagaacgccagtcattgagagaatcggccagtacactagctcgtcggagctctgggcggcgccgctcgccgtctgggacgtcagtctgtaaagaaatagaactcaggggggctttc

SEQ ID NO: 50570 - DNA, 390 bp, Zea Mays
cccgcccattaaagtagcctcaaccgaaggatccttcgtgttttctatagagaagatgacctccgtctaggttgcagctttaacatgttcacaaccagatttttctaaaatcgctgcaacccctttagcaccggcgaaggcgcaaaaatcgccacgatcgctaagtatctcatcaaaggcttcagcttcttcatcgatccattcgataattccttcgggtcgcctctgataaatttctgctcagatgcgggcacccaccattgcaaaactatctttcagctttttagcacaatccaaggatttttcgtagtacctttccttcgattcccgaagctcatctacattcttttgtagccttgcgctagtccattcacttatttcttgttttgc

SEQ ID NO: 50571 - DNA, 497 bp, Zea Mays
caaaactcatagtgtatattgcaaataagttaggtctggttccaggttaacttctaatacatccatggtttggtcgggcactcacaggcacttctttagctgtgatacgtggaacacattgtgtatcgtagacaaggattcaggcaattgcagtctgtaagcaacatgtccatatcgttcaagaataggaaatggaccaatataccagggtgataactttcctttgactccaaaatggttaactcccttcattggtgacaccttcaagtatacacggtctccaacttggaaggttaatggttagcgcgtttatcagcataattcttcggtcgtgactaagtttcttttaaattatgtcgaatacgttgaactttttcttctgtttcctttaccaaatcaggtctgaagaaccatcactctcccgaatctaacaagttcaaaggtgttctacatcttcgaccatatagagcttcgaatggcaccattttgatgctctc

SEQ ID NO: 50572 - DNA, 518 bp, Zea Mays
ggagaggccatgtgtgggcatttagttttgtgaattttgaagggctgcctgatcgaggagaaaacttatggcaggcttcgcaggaccttgtgacccgatttgcggcgcagatcattgcggaccaatagaaaccttgatggatcacctttgcggctagggcccttggccctgcgtgtgagccgcaagtaccgctatggacttcgcgcaggatttgggcgccttcggtctcggtgacacatttaagcattggttgactgacccccttcttgtaaagctggccttcaatcagcgcgaagtcccggcttcgatgtttgaggcgcttggcctcgttgatgtcggttggatggtagtatccctgtagaaacagggttattggtgcccgccagtattcggtcataataaggttgactatgcggtggccctcactgtcattggttatttggagcccttcagggctgcggacggctggcgtgtcaatgacatggtagaacacgtcggagggcagggactcacctcta

SEQ ID NO: 50573 - DNA, 850 bp, Zea Mays
gggggcatatgttgagcaccatatgtgccacctggagaggctagacgggtcggctctatagcgggatagtctgagccacgaacgatcatgccgctttttccatgtgtgtttatccatctaattctgtggattctgttggagaacgcctaggaaaggtctagacatccccctatatatatgaaggggtacgaccgattgctggcaacaacaaccaaacaaatcaatctgtatttcattactttactttcctgccctagaagtagtagtaacgtagccttctccattcccatcttcacctctctttgactctacatctttgtaggcatcttgggtgattttcttatctcaagacaaattttaggatctctcctccgtgacggtgtccctcccagggggtcagatctaggagctgttggcgaacgttgtcgccagtgcacacttgaggaccgttcgaccaccaggcgcggaccatctgacccgacgcaaggaagatccgctcctaccgcagggtcgtagaccgttcggccctagaccgtagattgtccgtgccgctgtagagatcaccgccaccagtaaatcttgtagtgattgacgctcagatcggcgcaaacatgaatcttttgtgctctcccaaaagatagagtatcagtagagttgtcgatcgctacgtgtagttgatcttcatctatcccccacttctgagatcgctaggtgtagttgatcttcatctttcccccacttgtgaaatagagtcatcttaaatttaccgaatttatatacaagagcaataatatttagaatatgaaatgagcttcatctgataccccataaaactattttactaaaatac

SEQ ID NO: 50574 - DNA, 1120 bp, Zea Mays
cttatttatagtaccagttttgaacagcatatcgagcatgtgcagttggtcttggaactgttgcgaaaggatcattggcagatcaaactttctaagtgtaaatttgcacagcagcagttagcttacttggggcatataatctctgctgccggtgtatcaatagatccagaaaaaattaaggcagtggctaagtggactagtccaaccaatgtgaaagaattaagaagttttttgggattggcaggatattaccgacggttcgtgagaaactttggagtgattgcaaaaccgataacgtcacttttaaagaaaggagtcttgtttgtttggacatcttctcatgaatattcgtttacagctctgaaagaggcattagtgtcggcccctgtattatcattaccaaatttcaatctaccgtttatcttggaaacagatgccagcaacattggagtaggtgctgtcctcatgcaagccggccatcccatagcttatttgagtaaggcattgtgtcctcgcaatcaaggcttgtccacatgtgagaaagaatttttggccatcatccttgcagttgaccattggaggcattatcttcaactcaaggaattcattattcatacaaaccatcgaagtttggcacagttggatgagcaaaggttgcacactccatggcaaaagaagatgtttacacggttgttgggattacaatatcgcattgtgtataaaaaaggaatagataatggtgctgctgatgcgttgtctcgcaatccacagatgtcaagtgactatttggccatttcttcgtgtactcctcaatgggtttcagaaattatagattcatatacacatgacccatttgccaaagatctccttgtcaaactagtagttgatgcatcggctgtgcctcattattccttacgagatggtcttcttcgttataaaagaagaatatgggtgggacagtcagctcctcttcaggatcacctaattgcagcattgcatgcgtcagcagttggtggtcattccgggtttcccgtcacatatgctcgcttgaagcaactgtttgcatggaaaggtatgaaaaaagcagtagagcagttcgtttcgcattgcctcatctgtc

SEQ ID NO: 50575 - DNA, 525 bp, Zea Mays
atttgatgcattggtgcgatttgaatattccaagcatatcctttgttgtcgacaggcagaggaacctgcgccttagatatgtgtgtgcgtggaaatcaacagctgatagacgagaaagagtagcatcaaccgtgatggatgaaacacgcggcttatagttacatcgctcacatcagcatgttttcggactggaaacttgtgcgtagttcctactgagaattccagacgaattcgggtcaccgcacctctgcgtgccctcgagcgtgacacgaattgtcaattcaaatcaagacaccgtttccccttatatgtcttccatagaccagacgcagaaatgtcgagcgccaaatctgcagatcgaaaacaatccttggaaaaaagaaaacaggtcgtcgcatggccttcgtgaacgcctgccctgaacctgaaccacggagctttcaatcttcacgtcgaccggggcgtcccattcgttgagatcgctcggatttttgtatatatatttttccgggtcgaaactggcgg

SEQ ID NO: 50576 - DNA, 879 bp, Zea Mays
cgcagagagaggtcatgttcaagtgcggattggctccaaatctttgagattatggccatgatcccgttgagagatctcttcccctgacattcctttgtcgtttgtgtgtggaggcttgcaggttccgctaactggatcaagagatatggaggggtgaagttgggcttgtctcactaccgaacatagagagaagatctcgggtttgacgtgtccagagcacgtgtcccgatgccatcttctggtatgaggtagaggggttggttcggcacatttttgtcaatgggagcattaggatttgagctaaggatcaaggtgaacatgctcggttttgattcaaaggctgaaaattcagaaatctgaatttcagatttccccattgaacctccacttgaatggcttgcttggagcttttaacaactatttttggccaacctttcataatctttattgtagcttagttagtgtatttcaatttttataattggtctaagtcataatttcaagtttttcatggtctttcatcccttttcttcttgtctacttaaatagcttaattagggttggaattagggtttcaacattttcccctttttgaaaatcttaatttctttagacatgattctttcagactcactttagtggatcttttatttttaagttgatttgatgcttcttgctcaatttttcttacatgaaatgatggttcttgagttagcacttagaagaaccctaagtgacactggggtgtcacagggaggaaggaacgtgctggtcgtccgtcccgttattaatggatgggattgatcggatgggtgagcgtttcggaaggagggtgatctgaccacagacgatccggattagaacatgaatacctctttg

SEQ ID NO: 50577 - DNA, 1280 bp, Zea Mays
ttattgttcacataataaggttgtagctactcaaagaattcttcgttattcaagtggctgcaataacttatccaagggggtgtgatctgtatgtctgatgagggctattaaaccatccaaagttttatatacctccatcacctgacctactgaatgcataatccaagaacttggcgactccatctaaataaagatttttttgaagtcaggccatccaaacattcagtactaagacgctcatcaactagattcatccatgccttactcggtgccataaatatggtaaatattaattataaaacttgtggcaatatatttgttgtcaaaacagattcatatatcattcactcttaaatgtttactctaatttacatctactaaaccatctgaagatttatgatgaataccatcgtttaaatctgctatatgatcgtatactagaacctgaaacttgtgaaatacagtttaaatctgctagatgatcgtttaaatgcagagcaatgatatgttagttccaacaattcaagagtgtagctagtttctaaagcaaaataaaaggcacaaactgatgggacataagaaaattgacagtttctaaagcaaataattatcggctgctatcattttgcattgaaaaatggcttaaacattttgcttgtgatacgaacagcctttgtccatgcatgctgggaaaaacattgaaatgcctaacaattcttttttctttgaccgagtaaatgcctaacaacaattgactgaacataacagatgagatatctttaacagcaatatctcacacaccacacaggccacaggcatgcagtggcctaattcaatagagttggctgagagcaaattaaatgaaagggacaagaaaacgatgtttttttagatggccagacacagcacatacatgaacttcgaaatgaactaatctattgcacgcataatgtagcagtagcaccaaactaattaagaagtaggaggttgttctctaactactgcacgcatggaaattgcagaggatagctactgctacacgcgcacgatcttgaatttgctctctaactgcatacgcacgaacagagcataactgcaagcgcagacatcaaaatttctctctcacgcgcacgagatcggacccgccagggattaaatcagacccgccagggacgagatcaggcacgcgcacgagatcgtttcggccgggcgcgcgggatgtcgtgccctagttctctgcaatttcacatgccagccagcgccgacggggatggggtaaa

SEQ ID NO: 50578 - DNA, 451 bp, Zea Mays
tcggggtgggctgggggtgagtgagggaggctgaacggctagcgtaccagccagccagaatggacacatgtagcatcccatcctgctgctgttagactgtactcctaggctcgtatcgtacgctcgttgctcggtgtagtttacctatcgtggcgaccaagtgccacgtcactgtccggcacttatctgacagtttggctggtgcaccagctagctaccgaggccctgagctgagctgagccagagcgccgttaaactagcgtgtactagcaaggcgcacgtgaagcgagctagctagtacgtagaagataagacattgtgaaggcagcagtcgctcgcccccaccacgccgacaaattgaaggagaaagaaaggtggttcgttcctaggtatgcatatgcatatgcatgccctggatctccgatctaaggaccagcgtcacagttcgtcg

SEQ ID NO: 50579 - DNA, 471 bp, Zea Mays
agacttgggggcctggtggcttaggagaaggacttcagtcctcctagctatcgtagcgtctgcctcgctaaggctggtagccaaatgtttcacgctgccaggtgtgtccaccaagacggtcatggaccgcatgtggttggcgattgtctcggagacagtcatgcatcgtgggtgccctctgcatggtatgcgcagaatgcaccgaggcttccttctcgaagcgagagggccctggctggaggctcgaagcgggtccctagagccaagaggccaaactctcggcctactggaccgtagcgcattctagaagccccagaagttcgtcgtggatgaagtgtccctcggtggtggagggctccaacatggtgcagagtaggagcgcagccgctgctaggatttggctcactcggttgagggcgggggctcggtagagtcgacgtcttcctccaaagccttcgcccatgcacctct

SEQ ID NO: 50580 - DNA, 469 bp, Zea Mays
gttgggatacatccttaaagatctcggatctctccatactgtaaatatccagggtttggactgttgtgggggctgtgagcagtagagtccttatctattttgttcactgtctctagtatgggacacggggatatttgtgtgttgggcttgtgtgtgtgacctgctatttgtgttgggcatccacgtgtattagctatgcagtgctggcaccttgagagttatctccaccatgtgctgaacaaattcagtgaaccactgccctgtcttcttgtctattttttagggcacaatccagtgaggggatctctgctctcaagcttttgctggtcccttggtacctctgcagtttctgttgcggtttgagttcctctctcaatccccaggtcgatttgcccttgttcttcacagccaacgcccaacctggtgatcatacccaccgaaaccaacaccctgctgtggccaaagcgtt

SEQ ID NO: 50581 - DNA, 463 bp, Zea Mays
gtcggatgtttgttattttactgtagtgaagtgagcctaggctgaggcggtcaatcattcatcagctccttcaacatccagctctgtggatcgtgaatgacattgtacctatctattcccctccattcctcagtgcgcgggtacgagggtgagtggttctacgttcggaacctagaggggagtgcgcccttgttcaccagctgcatcccgatggcccatccacgcaggacttacggtgcatagaagaggtttaggccgaagattgactacatgttggccgccattgccaagcagcgtgggtggggcctcaccgatgagaggttagttcagaccttcatgttgtgttgtcttcagcctccggtggccggccagaggacgaagtggcagttcaccggcacgggcgactccgatcgccactccgccacaatcttgacgaaggaggaggtgccggccactgtgtcct

SEQ ID NO: 50582 - DNA, 393 bp, Zea Mays
tgcgtagtcacagacggtccgaatacctatcgtggatggtctgcgttcccgcagagaggaacccaaggtcctacatgccgcgtacacgtgccatagggtttgtttgatgtttggtccaaaatggcgtcgacacactttttgtgactccgctaggatgagtgtgttttagataaattagatcagccatgatgtcatattcgaaagatcgcactaatgtcttcccaaacaatatccttaggccgactatggaaagtttgtcggccgacgagcggtaggaatctgaagaccacatgaaccgagctcatgaagtggcgaaggaaaggtttctatcacacttcatagtagatcggcactagaagatcaccaagcaaggagagatcaaccttgagtccc

SEQ ID NO: 50583 - DNA, 673 bp, Zea Mays
gacgtcttgcggcatgacggtgatttcccagccctggcgagcaatcccgcatgcaccaatctcacgtagccaccaggcctttccccgcaatgtccgtcgtgtcacctcggtcacctagggtactccacaaacggatataggaaggagacgttgatttctagtggtgggttgacttctggatcgcctcgcaaccgaggggtccgactacggagggagcgggagatgggatgatcaagggggatgcacgagtcaggcccaagtgtctcggcttttaaccccgagcgtggaagaggtcgacccgattccccaggcagcatagcgcgaggtggttggaaccgctcgtccgcaagatgaggacgatcctgacaagaaggttccacttgtaagcgaccagcactacttccaccggacgactcacgtggaatcggtagctgacgagtgggtcccactctgcagtggcacagggtgcgtgctcacaccatcagccccggccctgggtccacctatcggcacgggagtgtgcaacatcaggctgggtcgactagcttgaaatgggccgaggtaggctccatccctttcctttttttcttttttttctttttattttcctttccaaattcaagtagtgaaactaagtttaaattcctatttgaatttcagatttccaagtatc

SEQ ID NO: 50584 - DNA, 434 bp, Zea Mays
atgttatattatagtggttttctaatccctaatattgctatataacccttgatttcttctactcttgttttcttgccattgtattgtcatccttggacaatatctaccttgatatattaaacttttgcctctctacttttctccttgataatgctttctccctattgaattcttatacttttgctttcatgtcattgtattgccacccttgcgcaatatctaccttgatatattaaacctttgcctctctacttttctccttgataatgctttctccctaactcactttatatcaatggttgtatcatttatcctcactttgatagttcatggttatcttatttcacccttggccaccaacaaatatgtcttgtctaactccttgatatttctaatatgattccttgactttataatatctttcttattccaaa

SEQ ID NO: 50585 - DNA, 837 bp, Zea Mays
ttcctgctgaaaacattccaatccttgctctcatcagtcaatagtgtccgacacatagaccagaaacgaaaagtttctctattcacataacttcgtgactagggtgctactcctccactcttctatgtacctgtttgtttcggggttttttctggtgtgcttttctaaaaatctacatacggagagaatctgagtattacgtggattacgagtggaggaatgtgaagtggtctataggctttaggatctagaaagtgacggattactcctttcacaacaactcgaatgactgtgtattcacattgtttttttgaacggttttcaccaaagcggttatcatagaaacaggctgaaaagtaaaaaaatgtttggcagtccgcaagagcttccggcgaccataatcagcaaaaaaaaaagagctaaaacaaacatgcccttgtaaagtagtccagtgtttggcaacgttggctctcttgatccattccagtccagtccagcgtggtaccttggagtgaaagagtggttttgtggcagaagaaggcccatgcacggattgcagttattaattagtttctgccgtcatttatatgggccctcacccccaaagtgcgtactcgtataacgtaacggcctaacgggccccgtcacacaatttgcggcctgtcggcatcaaatgtatatgttgggccttgagtactcagtcatcgagcccttctccatttgtcaaatggaagaaagtggtcaccgagctgcagaaagaaagaaagctgacgaaaatgcgtgcagactttcgataatgctgcagatgaacaccctgaccccagtagctccaaatcc

SEQ ID NO: 50586 - DNA, 311 bp, Zea Mays
gatttatacaccacttcagccactctagccacaataggaaatagaccaaaatacttgaaggccaatttatggttagctcgttttgccaaggaggactgaatgtagggttgtagtttgagataaaccagatctccaggttgaaagaccctgtccgaacgtttcttatctgtttgatatttctgtatctgttgtgctcgcacaagttgttgttggaccaattgtaccatcaattcattcaaccattcatctagagagggaatatcacaagagtccttaagatgtagacccaactgattaggaggttacccata

SEQ ID NO: 50587 - DNA, 344 bp, Zea Mays
taaaatgcggaacataatcatgtttcatcagtttaataatacaaaaataagacacaatggtgattccttatttcagaccattaactgcactttacttgtatgaagtcaagtgtaaaaccacgagatcattctagtggagttgcacagtgtaaggaatgactctcttatctatgtccaatgttctatactgtaatagagtacaatacagtgaaaccctagctacaggggtacaagtatatatagaacccttgtgggccagacccatatacacaaatactctaacaccccccgcagtcgaaactctagccactgcagatgttgagactggatcgaaactccgtgat

SEQ ID NO: 50588 - DNA, 425 bp, Zea Mays
gcactatctgctagcactataatgaactgcttgcacacttgctggatgtttcaatggactgcttgcacacgatttgaactggtcacaaaaacagagtctgcaatgcgtctcggctgaaacgttgagggagacgcgctggcttctggctgcgacgtcgagggaggtgcgctggcctgggtgtggcggcgagacaaggaacctgaccaggactccaggagagaggagctgggaagaacacagtggagaggatgagcttgtgtggctgtgtggataaggtgagagtaattttggaactctagagctgctaaactggttagaactatttttgtttttgtaagtggaagaaagggcaatttaacaaggaagcacgctttgagaagggcatagaagcgaagcctattagaacgagggcattctggcgaaac

SEQ ID NO: 50589 - DNA, 689 bp, Zea Mays
gcgcttcgcatgggaatccgcaagaagccggaatacgtctggaaggagtatcttgaaggcggaatggagaaatgctctatggcagtctacctgggagaaagtcgaaactatccaaaccacccttccttccaagtcacttttaccagataccgctttccagatacttgccagaatgttgcccgaacagccctccgacaactatgccagaactacaacaaggtgatctttgaaacccccctttgctactttccacccaacaacaagaatacccccacctggaggaaaagacttcaggccctagcaggaggagatcctattgaggatgatcccaccatcgtctacatggctggataccttcacacccttgataaccaatatgatgacctcaccctccactgcacctacctaacttcccgggtggagagcctggagcaaaaagtcagggaactttcaggggaaaaggcgtcccttcaagagagccttgcaatagctgaaggcgaggaaaccaatacccgtgaggcttaccgcaccctgaagatggactatgacaagaaactgaagaagctcgcccccgcaagaagaatacgcaagaagaccaaaaaccaaggatgtcagactgagcagaaggaagaaacccctccaaccctaccccctgtcgggttaaggaactcgtccgacaccgaggagat

SEQ ID NO: 50590 - DNA, 537 bp, Zea Mays
ttaatatgtccttggcccttggagccagaagagacatatgtcttgaccactagactactagtgatgataatttgtgatagaaatatgaagatcttgtagagacctgttgtatcctctctactcctgatgatttcttcgtatgagagcagtaatactgttgttgaagatggatcctggcggacaccagtcctattttcattcttgccaagcagttatcatcatttgcttcatcaaaagctagttatatggtgattttcccagataaaatgaattattggccttgtctgttctattccaaagcttctctttttgccgaacaataaagagatcgaaataatgctttatagaacaagttggtatataatgtgaggagaaatatttgccctgctggcaacaccataaataattgactattgttataagttctctctcaaaattattatacctaaaaatgttgcattaatcgatacccaatttcagagtggtatgagtaattggataaaccatgggcagtgataaaaacgagctggactatac

SEQ ID NO: 50591 - DNA, 466 bp, Zea Mays
aaaaaattgcgagtgaagagagtgactctgagtctgattctgaatctgatgaagagtacaatgaagaagatgtgtaagttgggaaagatcatgtaccccctatgcctattgtttgttatgacagaaatgaccctccaatgagtgtaggcaacatatatcccaacatgcgagaatttaagttggcattaaatcaacatgatatcaaatctgaatttgagtataatattgaaaagagtgacccagggagagtgagggcatattgttcaaggaagaaggaagaagggtgtagatggaggttgcatgcttctataatgagggacaatacaacattaaaggtaatatatgtcttgtttttgtcatttattttagagatctcttttattttagtgttgtaatgcaacatttgatctttggaccacttgtatttttgtacgtaggtaaggaagaatccacatcaacatacgtg

SEQ ID NO: 50592 - DNA, 492 bp, Zea Mays
gtcgaagcgaatctgcgccctacttgtaaaaccctcgaacagttatgaataaagcacgtttttggaactgctcttgatgccaaacacggtaaacagggggtgaaccttggttaaagccttggtcctttctctccctttttccccttctttctctttccctttggccactttcaggataggaagcataccaggagtcgaacgagataggacgaacaacgacgaactcgacagagtaacgagcgggaacccccatcgcaaaacctgctatgttactttttctcttctgaaatcaagtgcttcaagtttttcttgcctattgtcggatgggtctttggcaaaactcaacaccacaccactctttctttcctggggcaccctcgacgggaagggggtcttaggacaatgtaaccagagaccccagtgatcgaacctcaggaaagacattgagcatggcagccttaccacagtattatctagaaacggacctatggg

SEQ ID NO: 50593 - DNA, 631 bp, Zea Mays
gtgggtggtgtgcactggcaagaaatgagcggtcttggtcaacctgtccacgataacccaaatagaatcatggtgcctggaggtattgggtaatcccactatgaagtccatgcaaatgtcctcccatttccaagatggtatgggaaggggttgcaaagggcctgctgccttcaagtgactagccttgattctctggcaggtgtcacattcggatatgtatttggcaatttccctcttcattctggtccaccaatataaagatctgagatcatggtacatcttgttgctaccagggtgcatggagaatttggaaaggtgagcttcatccagtatcttctttctgagctcagggtccttgggaacaaccaatcggtctccgaaccatagaactcccttgctgtcctgtcggaaacacttgtatttctctgccttttgcttgatcatatctttgataacctgaacacccttatcctcaacctgtgccctgactatctgttcttgcaatgtgggctccaccgagatatagcttaggtcacccgaagaaacaacttccaggttcaatctgcacaattcatcacacagggtggtgactcttgcatccatgcccatacaattgcactgggtctttctg

SEQ ID NO: 50594 - DNA, 655 bp, Zea Mays
tcaattttcctatttaattttatgattaccacagcccaaggactgcagacaccaatatccaagaacttaggggcctaaccacaagaaaaaggaccaatccgcaatattaaccgaattagggtggatgacgggtttattttggtagtacccaggggctcttatgcataaaggctcggcgaaggggtacgccaggatccgagccgtccaatcaaacgctaacgaatcagattagaatcccaacaccacaagtctgtacgcgcctgctgctaatggatcacgatcccacagtccctgatccatcccgaggcgggacgccaggccctgatctcagtcgtagcttcacagatccacactccggaactcatcaccgaagtggaacgctcctatctaatcctatgcgtccaccgcggatccaatgacctgccagtgccacccccaatcctcacccgcagcatgaccctgcccggtgacgcaaggacatcatgacggcaccatggccgaaaaaccctcctagaggtttggctacaccatccccatccaatcggtgctagtagaaattcaaagcttgactaaccagctgaacaagccctcaccggcagatgtacaacaaaattccctatccacggcccagcgaggcgcaacggcgtcgatgaag

SEQ ID NO: 50595 - DNA, 1035 bp, Zea Mays
gtcgatatagccccttgtactttactagatttcatggtacaccatgtgtgtgcacgcgtggttatagggccagtacacgcagtgcatagcggtctcaagtgccatgcaacctaggctgtgtgccaatatgctaagtcagacttgtaatatcactcatcacacatttaatatattatacaaagacattcattaagcatcactaaggaatagactctagggccttagatgtagggaccacgtactagggtcgtaccgcccctgatgggcctaccacatctttctaccttgagataggttcagacttagccatcctgagtccttgactccttcatgggacccccgagcctcaaagggcatgaatctcagctgtcaaagtgtagcatgtgtttgggggtcagtcagcatcaaggtcccaccatcctactgccctatgatacgagggaccccagggacctatatcattaggtgacccatggtgtgaggggccctaggggcatatatcttcatgtgtcctgaggcacgaggggggtcgagggcatatatgaccatgtgccctagggcatgagggcccttgagggcctattaccgatagatgcacgtatgtgtgaggggcccataggctcatattgttagttatcctagggcgcaatgggccttagggcttatattattatgtgtcccaggcgtgagggacaaggatgtgcaaacatgggggagagaacatccatggggtcaaaactttaccagttggtccctgaatcacctcttcatgccaacgagatcctttcccacgaagaggcatcaccactccatgagacccaaggtggcaccgtgtccatgacccctggtggacccttagggtctatccctaaatgaagcactggaccaagctcatttagcagccgaggaattttgagcataaacaacaataaaatgatggaggaacaaggaggaacaagaccttgcctaggcatgggtatggttagaagaggataccaaggaggatcggaagatggttgtagttgataccctccg

SEQ ID NO: 50596 - DNA, 401 bp, Zea Mays
tagccactccgtttccgagggtaacgcggatcctggagacccggtgaagtagttcgcgcccgcacggaagatccattgagttagctccagttgagaaggggaagaggaatagtgcggcgcgggtcacgttgcgagcccgacgggaacgttgaccacgcgaggaaaacgggagagctggcgagatccgaactcttcggaggatcccgacgacacggaccgcagaggaatccgctgcgtctgatgctgtggagaagaatatcctgacgaaaggggcccaccagtcagcgactcaatgcattttccagccagagagtgtgcggatgggggtgttgggccgtgcggcaatgggccagcgcaggggagattcggcccagacgacgatttttcattttctctttttt

SEQ ID NO: 50597 - DNA, 436 bp, Zea Mays
gccgaaggtagcagtcattaactgatcttctttcttcgtataatttccaagaatttcattgcataggatttctattaattctaaccattcattgcatggttctttaaaccttttctaaaacttgaaatggtagggcagacgcacaagctcatacttctttccctcatccttcttcttcggaattccccaaccgccagaagtctggattgtccgatttgccagatattcttgtactaaatctctggtgctgatatgcttagccacaaccctgaactccacctcagctagctggcagggagaccccaactgcatattgcacaggggccgagtcatgccgaagttcaatctcaatggactcatcaccatgctcataagcttttcccttttcttctcgtccgccttagcgtaaaaccattcactcgtccaaccagtcggc

SEQ ID NO: 50598 - DNA, 487 bp, Zea Mays
cacgtatgcgggttactgtagagaccccagtgttgaggtccctgcgacaggggttgactggcccttcaagtcagcgagggcatacctgaggatgtgtgcggggggcgtatcgtcacatacgacagggttctttcggctctgtacgcatggtccaggcatggttcggtgttgatgagtcttgtcgtgccagatgtggtccagtggttctagccctcccctcttgcgggcttactcgacagagagtcattcgtctgctctgcctcacgagtttgctcagcagagagttggtcgttcgctccaccttgtgggtttgatcggtagagagttggtcgtccactttgcctcacgggtttgctagacaatgagttggtcgtccgctctgcctcgcgggtttgcttggcagagagttggtcttccgctccgtcttgtgggtttgcacggtagagagttggtcgtctgttctgcctcgcgggtttgctcggcagag

SEQ ID NO: 50599 - DNA, 444 bp, Zea Mays
gaacattgcacaacaaaatgttaggtagggaactgtagcgtctcatcatactagtctcatccatctacatgatgtgggtatttatagggaaacctagggtaggtatcccaaagtacatttgtacccctgactatgaaccaaattcctagaatattccatgtaatggggtatttacaacactgcaacgccctgtggacacgtgcactcgcaattttaccctctggttacagatgggccctcctagagcccccatagtgggccggtgacctggatgagtcttcttccctagagccttcatcgcctcacagccttcgtggcttgggacccctcgctccttgcggggggtgtagcctgtgtcgagggcccatcggagagttgcagtggacgaatttatcaacctcaatgtttgtcttgtgcctaggctctctcctaggcaccagtatt

SEQ ID NO: 50600 - DNA, 990 bp, Zea Mays
ctcagatggttgtcatggtcatcaagcatcaaaactgtaaacggaaggttgacttttcccttgttgtccaggttgatgatgagtgattgtcaacatgggtagtgctttggtgtgactcttggacttaccagagtgtgagtttgtgtatgtgcaaccatgtctctcgacttgtggtgtgcaatacagggacgatagtcaacggtgaaggtgaagatcacgcgggtcatgccgaggggctgagagcggcaaaagacgagtgttggaccttgatcgagggactagagaagttggggtgactagccatgatggctgacagttgggacacacactagagcgaggacatgtcacaacggatcatgtcaccaacacggtcaaggactgatgggacacgtgtctaggacgtgggggacgcgtatggagtatgctactcatagaggtttcggtggtgagcctcaaaaccacccatcaccccggatcgatgattttgtcgagtttgggcctccaaactcaacagtgtggttctggtgagaatcggaggtgacacgtggcgtcatcgtgaagagtgtgtcaaggcgaagcaactttgtgaagaaagcatgtgaccgttagatgaaaactcaagagttggtccattttgcccccagctaagtggataagctctatgtatctaggggtagtttagactagtgaaataaccccccttataaataggtaggagggttatttctacaaccatctctttgggctttagttgtttagggtttcacattctagtactctctagttttattctctagtttgcaatagttctagccctgagatccacaattgttttgtaatcctgcatatgtgtacttgagattatgaggaactgtggccatacccacatgtggtgtagggtgtttttgaattcaattcgaaactgatttgagttcgtacttgtttgagttcttcctctcttctcctcccttctctctttggattttgatg

SEQ ID NO: 50601 - DNA, 348 bp, Zea Mays
cacctctaggctgctttcaatgatgttgggggcgacaaggacattggttaagcgaaaaggatcgggaaggactgcggcacctactgaggtgacgggtagggcagatccgtttccaacaacgatggaagaaggaagggaggggtgggaggaggtggaagacaagatacctacgtccggggtggtgtggtaggaggcaccggagtcagccacccagtcagaccgaggtgggtggggtcagcgtcatcgtggaaaaggagctggcgaaagactgcgtgtcccacccattggtccaggtcccccacacgggctgagccggaggccccaggagagggaggagcccctgctgag

SEQ ID NO: 50602 - DNA, 370 bp, Zea Mays
acactttagtccaaatgtgcactgttttgcacataggcccctagggtttggatttagggttttctagggtttcaattagggtttctggtatctcatgggtataaatgtaattcaagttcattcttaggaacattttatgattgttttacttaaaccttagggttttctcaatttgggtcatgttttacccctttaaatcctatttagggttaagtcccctattccagggttttatttgcaaaacactagaacaatacaacttgtttgaaatttttacctagtgaatgcactctaggtgtgtcaaacatatgcaatgccaatgtttatgatgtcatgctcaagttttagtagcagtaacaccaggggtgtt

SEQ ID NO: 50603 - DNA, 641 bp, Zea Mays
ttggattcgcgaagctcctcaatatttttctctagcctagcttgtgtccattcactgatttctttgctagcttttgcaactgcatagttttcattagcttcagcgagctttttccgaagttcttcgatctcggctttttgggcatcggcctgagcattgtatttagcttcgtcttctttcattttactcaccaacgaaatcaaaattttgtctttctctagaccttcgtttctcagctcaattacctctgagcgaaggttgttgagagctattgtacagctttcgtcttcgacgctcttttgtgcccttaaggcattgctaagaatcaagccctgcaaagaaaaagaaagaattaagcatgacactgaaatacttcatttccagctttaaagttaatttatatacctttatactgttgtacgcaaggctatcagcaagatcatccttcgacatagccgaaaggccttcctcaagcttcggaaatcccatacttttagctatctcccggcaaactgatatttctttgttgtccgggagacaatataggaaatcatcttcgttagtgccattgaacactaaggcccccttcggatattttagtctttgggcgtagagtctggcttctaggatttcttcctcgg

SEQ ID NO: 50604 - DNA, 571 bp, Zea Mays
tggggatggaaatagacacggagactggtgaacacgcgtgtatatagcaaacggggaggcaaaggccaacaaggccaacggccaaggcccaagggaggggggcgtgattatgctgggagggtgcttagcaaaatagcgagagacgagacggcgacctataattggtgagattagcctaatccctcctgccaagacgcaccctaattaagcaacagcgcgacaagcgcgtgccgttaacccaactgagggctcttgctaattcctctcgcagatattataataacctcagcacggatggaattttgaattcaatttctatcccgttggaccgtccacacggctatggcccctcctagaatcaattgttagggatatggccatggttcgtaagtaaaaccgtggctgcgccgtgtcccacgcatttagagggccgggatcgtactggagattcgtcggcacaatcagagccgccgaatcctaaaacggtccaggattttttttgagtcggaaactgtgggaaatgcgggatatgatggtgagcagatatttgcaaatgtatccttggaaagat

SEQ ID NO: 50605 - DNA, 765 bp, Zea Mays
attctttcaaagttgggaatactctaaaagctaagaattcttgcaccagatccctagtaccaatgtgctccgcaataactcaaaattcgcccagtgcaacttggcatggactcctcggtttcatgtcgcaccggggcctagtctcttcgaaaattaattctaatgggctttgaaccagcttctcctttttctcatcaactttgacataaaaccattcagtcttccagccagctggccatttggtatgatagctgaatactggagacttcgcatctttgcgataagcaaaattgtagcagtcgaagttctcgtgtagcccatcttctctagcttttgtctgataatgaagctcatgtgcccggcagaagccttcggcaagcggttttgcccctggcttcggagagcctagatgtagacgctaagcctaacgatggcgttaggagttagctgatgaagataaatcccaaacttctccaaaacatctgcaatcaactcattcaaaggaaatcttaatcctgctttaaagaagcttttaaagactaccacctcatccttttctggcgtcggagtaatttcctctccgccaaagcgaatcagcttctttttggcttcactgaaatagcctaacttcatcaacttagccatatcatcttcggtaacagtggacctcccaaactccaggtggctaggtttagatggcagggcactgtaatcatcttcagattcaccttcctcagcaccaacctgctcagcttcagtggcagg

SEQ ID NO: 50606 - DNA, 357 bp, Zea Mays
aaatcggcaaccacagcttctgcagtcagacccctctctttcaacagtccaacctcagcaagcagagcccctgcctcagccacttccagatctgtgggggactcggtccagctcggagtacgaacatctggctgtctacctgaccgtgggggagggaattcccgtggttctccacgataaaccactccaggcgccatcctttgatgctgtccttgagtgggatgtcgaggtagtcggcctttctcccacgacgcatctccaaactcgcgcccccacaagctggtgctgccctccagccatcctaggccgacagtggtacaagtacttccataggccgaagtgtggcagaataccaag

SEQ ID NO: 50607 - DNA, 985 bp, Zea Mays
gcaaagaaatgtcatattgaatatttattttctttttttactgtcaaccgggggagagaattccacatgaatttcattgtttcaatgacctcatttttaagggaaacgaggtaaacctttacataactttgtggcataccgcagattacagctgcaagcacaacgcagcaagtacttcgccaacaaggaggaaaagaaagcaaaaacaacacgaacgtacttgacacaagcggaataataactaaccgagttcctgaggacctgatcatcaaacagcatactcgtcggctagccgaaaccaatgtaaaccacaccacccgccgtagcaacgccgcacaattgtctccctccattgcgcacaacaaggccacccgccgtagcaacgccgcacaattgtctccctccattgcgcacaacaaggggaggaatgcttgaagggatgaaggaccgcccaactgagaggcgactagtgagggaggacgcccattgaagcttgccgaagaacaaccatctcccttaaggttatagcaccccatagacagcacatccacgcaccataaactaccatccaacgcccttaaaggggaggaagcctctacggagggagagtgagatcatgggtccacctggcataagattgatgtcaccaccaacaggagacgaatgatgaagcagaggtgtcaatggtcatgcaaccaagagccacgaccattaccatcttcaagaccaaagccaacaaagaagaacacacgaaagcaaccattaaacgagcagagacaatagtgcgaaggtaggacacctcccctcgcactgggcgtggcactttcgctgcgaaaatatcacctttgaattgatttcagatgacctcgagaaccgccattaagagcagccacagatgaaaaacataggcattctggcttcgcctccaacaaggtgaatgacacaaaagcaccatcaagctagggttggcagaaagccaagcaag

SEQ ID NO: 50608 - DNA, 349 bp, Zea Mays
aaagaatttgcgtaggttatccacattccacaagtgctctaagtcttcgccggatggtgaggtgagcctgtaggcattcggggatgttttggtcttgacgatgtagggcccctcccacttgggttcaagcttgccccgagactctcttgtgatggttctggcgagtactaagtctccttcattgaactctcttgggatgacagtgttgtcgcgccatgccttattttgcgcttggtatttgcttagtgcctctaaggcaaggacacggtctccgttgatgaggtctttagaggttgattcgtcgacgtcaggggtggttgtggggcttgctcgtggggatccatgcttt

SEQ ID NO: 50609 - DNA, 649 bp, Zea Mays
tttggtggcaactgctgcaaaggtgcctcatcctgaggtgcctactgcacttgctgggcacgccttccacctcggcgcatgttgtcagacatctatagaaagcatacacacatcagatctggcactgcagactttcaacgtaagcaaagatatatagacgtcttcataacactgaacaaatgagcatcttcactgaccctccacacagccaaacacagcttctcacataaagaggaaagtggaaataaaaggttgcccaactaaatgactaactttattaataactacaccaagttgtaggggatgctcacaccttagtgacaataattacaaagttccaaattcatcataagttcatcacgacaaacatagaaacacatgataagcaaactaaaacttactaagactgattaagagtaagacactgatttcaacattattacatactccgactctttcgatctagggctccaagtctatcttggtcctacagtctagggtgccataagcatgatgaccacggggcggtgagcggtaagggtgctgagtcccgacaggggcaggagaaccatcctcctaatggcggcgctccgcacgctcaacacatagttcctcaatatccgcccgagccttgcctaattcatcaagg

SEQ ID NO: 50610 - DNA, 644 bp, Zea Mays
ctgacctaaatccttcaatccgcccttctcttgccttttttatcgccactttcttcaccttctctttctccttgtctgccgccatgtccttctcttcattgaggggagtgccttggttgagctctgcccttccttagattacgagagaggaaccctcgtgctgcagctagctaccttcactggtatttccaaactcaacatatgactttgttttaataaaaaacacaaaattatttcagacttgccatgaccaaaatgattgtagacttctatcatctggggttatcattgcagacttatatcattttctacacatgacgtaccatgaccaaaatgattcaatgaaagcagacaagatggatacattgattaaaccaaactactcaactggacaagatatggtaaacaagctagcaaataatgtaactgctaatgggtagcaaatggcaatagaaaagaagtacctgtcttgcaactgatcgagcaatattttctgaccctgtcaagtgtacaaggtttaacctcccatacttcatgagttcatcattttctattgttgtctctttgacttggatgtttatagaaacaacagcatgtgatcggctgcatgaacataatgaagagtgcttagcccccgataggtg

SEQ ID NO: 50611 - DNA, 723 bp, Zea Mays
tgagtttcgtgctttcggcctagtcataaaacggaatcgtaaaagaacaggagacatccttataggatagggtgtccaagccacagcaacacctacgcctccaggatgcagtgtccccactcaccgtccttctcttaagaaggtaactcacattccgacaggaactccgcaaaaagacaagacaatgaacacaaaacacgagaaaaaaatgcacagcagaacacagaacaaaacaaaaagtcttggggcaatatacacagaacgaacttaaaagtttgttacaaccccatagggcaaatgcctcaggtgtcagaagggggcgaggaagtaccctcggcgtcatctgggggtgtcgcagctgagtaggacccaacactgagaggagagattggcgaaaccacatcttcttcgaagtggcgagccaacgccgcacccggcctttcgacgacgttggcgagcccacggacctccgtgtcgacaagatcatcctcatcgggtaggatatatccctctctcactcgctagaggtctacctcgtagtgggatgcaacgacgaccaatgcccgcttcactctggtgtgaatggcctcgcagagttcgctccacatatggccactcagggccagcatgcggctccacgtagacccacccgaggggatgtcttcagcgtcgaaggttcgaccaaagtcccccaccgcctcagacaaagcattgagcttggcg

SEQ ID NO: 50612 - DNA, 484 bp, Zea Mays
catagtagtcactggttttccgataggggatatccttcacaacaaggaagccaaatagccaagtgggcctgtgaactgggatctcatgacatcgaatttcgacctcgcactgccatcaaaacccaagcattggttggcttcgtatcagaatggactgaacaacaagtaccagagaacccagaaactgcagaagtatggcggatgtattttgatgggtcactgaagctgcagggagcaggcgtaggaattctcttcatcgcacctggaggcgagcacctcaaatatgccctccagttgctatttccagcctctaacaatgcagccgagtatgaagctctgatccacggactaaatatcgccatatcattaggcatcaagagactaatggtatacggagattctttggtagtcataagccagataaacaaagaatgggactgttcgaatgattcaatgggaaaatattgcactgccgtacggaaac

SEQ ID NO: 50613 - DNA, 524 bp, Zea Mays
caggggggctcttttataaaaacccacagcgaaggggtatcgcgggatcttggccttcggaatagatctggacggctctggtttactatttttgatgcgcgactcacagcagctggatcgtggatcaatggcgccgattttatgactgaagggttacaccccaacctaatctgagctctcgatcttaaaatctatggtccaaacgagatccgatcgaatcagtggctaagctctaatctgggccggcgaatactgaatcaacggtgcccaggcgtcttctacctcgcgactagccccgtagcggtgccgtgctccccacggcggacgcccccggcgagtcactgaccaccgattcacaggcccgcaagccttcctaagaccaccaatccaaccctaacgacatagcgaacactagggtagagttcataccgtgattcacgacatggaagaccctggccccggcagcgcccgagcacagcggctttatcaacactagcgaggaatttccccattacgaccggctc

SEQ ID NO: 50614 - DNA, 644 bp, Zea Mays
ggactggtgccttcgtatccttgtgatacgcaaaattataacatccaaaattttcgtgaaggccatctgccctagccttcgtctgatagtgcagctcgtgcacgcggcagaaggcttcaacatctaggttcatcccttggcttcggagggcccagatgaagacgatgagcctaaagatagcgttaggagttagctgatgaagatatatttcaaagttctttagcacctcccctatcatctcgttcagagtaaatcgtagtcctgctctgaagaagctcttaaaaaccactacttcatcattcttcagtgcaggggtagtctcttctctggcaaatcggacaagttttctttcagtttccccaaagtagccaagtttcatcatcatgggcatgtcgtcttcggacaaagtagatttctcaaaatctagatggctgggttttgtggggatcaaaatattgtaatcttcctcaacttcatcaacattttctccttcaacaacagcctgttcagctttggcatcaggagtaccttcgtcaatagctccctctgtcacaactagtcctgattgttccatgacttctgaaattggtcctgtctcagcgacctcggtctcttctccctcacgagacaccctcatagttgat

SEQ ID NO: 50615 - DNA, 1105 bp, Zea Mays
cgaacccgcgctcgtaaaaggacgcgagcacgaccacctcgtcgtccccaggatggggcactttccccttgctctccagtctctacgttaaaacatccttcgggggaatgaaccctttcttctctaggccacggaggcgactctctcggatcgagctgtctaggaatgacgccataggcgcagagggcaagtcggaatggcacaaagaggaagaacaacaagggaggtttcgagaggcagaacgcaagggtatggtaagcaaaaactaaccctgagcgcactcctcctttatttatgcgaatgggcaaggggcagccacaaacaaattgtgaaggaactgccccttcaaccaagggacgccttgggtatcgagcaaagagaccatgtgttttgcaggacctcgctgcctagggcagagcaccaggacaatgcgccgcgagaagtacaacggtaacgggcggggaggttgactagaccaccaagcaacccaaccatgacatagcagacgaaccatttcgcgtcccatcagacctcccatgccaaacaacatcatcatggccacccattattaccacaccacagcagtacccctgcctcggaccagctaggttaaaaactagaatgcgttcaaaaaatccccaagcagagcgaggggtggaccgagcaagctcccagcgagccgcatgctaggtgaccgacctattcgtcatttgctcgaatccacgtctatggtcatacctcacattctcccgcaaaaacacggtcgatggggtggccacagagcccccctttggtcggcaagacagaccaaagggccgatacgagatcgaataaggaaggacataatgagatgcccctagcgggtcgagccctcagtgggttcactcgccgagactaaacccaaccaaagggtgttcagatatcacttggataactcattcacagctcgacgaccccgctccacgcgccatctaggtcgaaggagggggccctcccctcacaaggatcccgaaggaaccttcttgaagggagatgtgtgcacaaaaagaatcaaaccgccaatcgaagaaataagtgccagaagccacacccggcttcggcaaca

SEQ ID NO: 50616 - DNA, 722 bp, Zea Mays
gaagggagtgtttccatgtaaagctcggctaggttgagttcttaggctccagaccacatacggcaactctctgatccactttcttgtaaacttttcattcttgtcgaagactttctttctgagtgctttcaatatcattctgttggctctttctacctgcccgttggctcttggatgtgccactgatgcatatttgatctggatgcttttttgtttgtagaaatcaaagaactctgaactagtgaaattggatcccaggtcagttatgatgctatttggtattccgaacctgaatattatgtcttgtatgaattccacttccttagctgaagttagagaagcaatgggcttgcactctatccacttagtgaatttgtcaatagcaaccagtacatgagtgtatcctccttgagctttcttgaagggtccaatcatgtctagtccccagcacgcgaatggccatgttacgggtatggtttgcacttgctgtgctggtaaaatgttgttgttttgataagtattgacaagcttcacatctctggaccaactcggctgtgtcactttttgtcgttggacagtagaaaccagacctgaagaccttcctaaccagagtcctggatgctgcgtgtatcccgcattgcccagcgtggatctcatctagcagttgcttcctagtagccgaaagaatgcacttcatgaggactcctgtcgcaccccttctg

SEQ ID NO: 50617 - DNA, 327 bp, Zea Mays
cttgtatccttcgtacaaaacccctgttgttgtcatcgaatggttcgtccaattttattttagaactctcattccctcaattgaacaatttgttgaagtactccttccatatgttcttgatctattcattcttcactaatagttggtttgcttcatccttgatgcatttgacttggttgacatcccttgtcttcctttcacgaatcttggccatcctatagatatccttttctccctgctttgtgtccaaccgttgataaaggtcgtcataggcttgaccccgggctctactaaccgctcgctttgcagacttcttcgctatcctgt

SEQ ID NO: 50618 - DNA, 805 bp, Zea Mays
tttgccatgaaccatatgtgatgagagcattcctaaacctggcaagtcacttgtcgtcattaaaacagcccctcgcaaattaaataattcatctctcgatgcgtcgtatgtggacatgccattctgaaatatatgtttcaggtcctccaatagtggttccaagaacacatgaattttgtctccaggacttttaggaccaggaatcattaaggacaacataagattatgatctttcatgcataaccacggaggtaggttatatactattaaaacttctggccaacaactatgagtacttctcaacatcccaaatggattaaacccatatgtagccaacccaaaacggatattatgagagtctgatgcaaaaattgggaacttttcatgatcttggtcaatacgggtgcatctgctggatgacgtaatgcaccatcctttatgcgctcttcatcatgccaccttatgaaaggtgttatatccttgcacataaacaatctttttagcctatctttaataggaaagtatcgcaaaacttcgcaaggactagctttccttctttgtttctttattaaaaccgagttaggttgcatacccttccaccatgaggccttacaggtagagcagaaatcatcatcttttttcccttctaatatagttggcaattatttggacaagcatgaatatcctcataccctaatccaaattttgaaataatttttttggcttcataaaattcttggggagttgctgttcatttggaatagccatacgaaaaatgtcaagaagatcaccaaaagatttatcc

SEQ ID NO: 50619 - DNA, 923 bp, Zea Mays
caggacttttgggtcaaattggagtaggatttagtgcttgattgaggatagttactatagtcgatttgtagctggttggttgagctacaactttgttaaagacggattagtaagtattcacatgaaaatttgagatctaggctctgcaaagtggtatatcaggatgactgaatgaggaactgatggtacagtatcgaaatatctcaggttcaattcatctcgccgccggtgaccacgtgcctagattcacgccaaacgctacgattcgtgctcaaggaagtaccgattgttgctcggggtagtaaatatccctgtgtggatgaacttgagccgctgttcactccaaccgccgtgtccgcctggttcacgaccgattcggatgaactcaccggagttagccacctattgaccatgcaccacgtgccttggtgtcttaccacgtcgcagtagctcgtattacacatgtccggtgatcgccgtgagctcggcacggtgaaagccaccaatctattgcgacagtgctctcctctctctctgaccgccaccacgccatctcaaattcacgggccactgctcggggatcctataaattgagcatgccatcggttccgcaaggtagtcaagcaaccaatacatcaactcgtgcctcaaatcatccaccagagctcgccaatttgaaatttcccccaaatcggtccagagcaccgcgcggagtgacctcgctgtggccaacgcgttgtaggtccgttcatgtcctctggttcctcgttttagtatccttaggtgatcttgatacaccctgacccatccaattaagctaggacccataagatcgccgggaacacttcttgttatccgttgatcgcgctgtcaccgtgggcagggagaatgaggccttgaatcttgaaattagttgaaaggaa

SEQ ID NO: 50620 - DNA, 420 bp, Zea Mays
gttcaatgggcctgggtgtcgtgtggcacagttttctggcttcgctgacgagtgggccgcgtcggtcaggccgccgtcttcaacaaccaagaccaggctcagcgatatcgccaaggaaagcgaacaagtggttgcgaaccaactcggtgcgcagggaggcagggtccacgagtataagtatcgttgcctcatgacccatggggttattggagcgaaataaaagggaggtctagacgccggtttgagagagactcctcgatgggcggaagaaggtgcgcctccgcaacaccattgcacctcttgacgctgctcaacccccgatattgggtctaggagtgctgtgaggacccagtgtgcgtgtgcgtcgagaatcaggtcggttgggcactctgggacacgaggattgcttgtcggagttcg

SEQ ID NO: 50621 - DNA, 1032 bp, Zea Mays
atcttaagtctgaaattccagtaacagtgaaattagacagactttgaacctgcttttgagttggattcggtaactattttatggtaagctccatggcaaagttgaagattaactataggtctataattttggtacaatgagctagtcgggtcaccacacaaaatcaggagtaaatcgagctccaagatgctctgtcaggtcgactgactgaagaaacaccatggtacagtgctcggatatggataagactgccagcaccagatgttcaccgccggtgacctccttgccgggatttgtgccgcggccgtgtggattttgctcaccctgaaaagatctcaccgtggataaatttggagcacagtggccactcggtcgctcctccacttaccagcgacgtggccgcacggccatcaccggcgtgccgccgttctttgcagttatgccacgccatcagccatcttaccacgtcgcagttgattaccacacaccgtccttctattacctaaggccttgccacgatgttcaccacttatcgcacacaccagtgaactttctcccctccgaccgccagcacaacctgctcgaattgaccgtcgccgctgtcgctccctataaattgagccccccaccagttccgcaaagtcatcagctagccatcccctgctaattgttagcaatcatccaccagtgagctcgaattcgagttttcccccaaatcagtttaccgccgccgtaaaagcaccctcgccgtggccagccacttccaggtctgatcatgctctctgtggttctgtttcagtacctgtgtgcattcgttatgctcatcaacccaccagatcgaactagaccatcctcaatccgcgggaacgtgtgctcccatgatcggtgtccgctatgatcgtggacaagcgactcccagtagagttcatgttagtttaatagttgttcctaggtcgccttagatcaatgaagcctctccgttagttattccgagcagtcatcgccggccatggccggtacggaccacgtccg

SEQ ID NO: 50622 - DNA, 550 bp, Zea Mays
gaatcaaataaaactgatgtaggtatggagttaataagaaacataccatacaccacgtcggcatcctcaggaactgattccgctgtcacatgattgactcttcctctactctggttctacagagtcgtattctgtgcagatccacgagcaggtgtgttctggtcagtcctctggttgctgttcttctggggtgtctgttgattacgctttgggcagttgttagcatagtggccaagttcgccacacttgaaataaccattgggttgaactagggtagttgtgttgttgttcttggccagagtgttcacggcacttccttgacgattttgttgttggacactagacctttgaccggtctgagtgttacttctctgctggttctggtattggttgttccgctgaccttgttctccagagtgttgtgcttgatagttgctgttcccactctgattttcagagcggaactgagaaccttgggagttgttttgatgggtattcctgctggtctgcccttggtacttcctcttgtgatccgacaactcattccttt

SEQ ID NO: 50623 - DNA, 434 bp, Zea Mays
cttcatctgtgccattaaacactaaggccccttttgggtacttcagttctcgggcatagtgtttagcttcaaaaatttcttcttcagataatctttttcccgaagcgtgtcgaataatataatcaaggacttcgaaagacgcttcgggagtaggtgtgacagctttttcaagcaaaatctgttttatagcttcttctcccgctgccttttctccagtttctgaggatttctccttgacgggctctgaaggcccagcttcggcatcggcctggctcattgtagcttcggcttcggttacctttgtcttggtttcaatctgcgccttcgaagccttggcaattttccctggagtagagcttgaagcttttattgtctccagcacatctagtacactagccatcctttttctcttaggggtcgctgctagacctttt

SEQ ID NO: 50624 - DNA, 800 bp, Zea Mays
atgactgaggaagctttcaagacatcattattgccatatctttcaagaaggcctaggacacgccctagaacaaattcacctcatccatgaaaacgtgcacgatacaaatccgtgtggagcttgctgcatcaaagaaacttgatttgtctgccatgaacttcttctgctggatcatggggctcgccagtcgccaccaagctcaatgctactaatgcacctctacatgatgaggaagtcctcacttatctgctggccggctcccaacggactatgacccattcatcacctccatgatgactaaggatgagcccctctccatcgataacatgttcgtccacttggttgcgtttaaggctcgctaactccaacatatggccgaaatgcacatgcaacacagtgcctctgccaactacgtggatcgtggtagcccctctcgtggtagtggccatggtggtcatggtcgcgacagcggcggtgctccctcccatggcgatcgtcgtggcaacgaccctcgtcctcgatggttgattcgcggcaaactcggccacaccgccattagcccatcaagcacgggtacaagatgggtgattcatacctgaatgaaccttctgtggccttgacatctatgcactccaacaaagtcgaccccaactggtacaacgatatcggtgtcacggatcacatcacgagcgaccttgattgcctagctgtgtgggatcattatcatggcggtgatatggtgcacgtggaaaacagggtaggtttgcaaactaaacacattgattcctgttcaaatcaat

SEQ ID NO: 50625 - DNA, 598 bp, Zea Mays
aaggaatatgatacaactaagggaaaataagtaaccttcaacttttaaaattgagacaaaagagagaagattttagagcacaggtataacataggcatcaaggtaagatatagaggtgtcaaaggcgaaggtgataataacgaaaggcataacaatggatagagttaaggcaagactcgcgaaatggcgaagtggagaaaacaatcaaggatcagataagtgaggtttggatagaagagttgaaataaagaaaattcattaccgaaggaagttacaaggaattaacgagatcaccaaggatgtgcaaaatcaaatgaccgttcatggatcatttagaaacaagggtggtcaaggacttgtaagctgaaatgtcttaaacaaaaactagggtataaaggtaagcatttatatagaaagtaagagtacgcaagatttcgaaggtgtgagatcaccaagggagtatgaattaccgaacgatagcgacttaacaacagaataagaaagggtcttcaaaagacagggtgatcatggacatataaactagagtgtttaagtaggcaggagaaatttagatgtaagtatttgaaacaagtgtatt

SEQ ID NO: 50626 - DNA, 710 bp, Zea Mays
ttaatttctctagtttatactattctggactgagcgtcaaaatcataaaagaccaggggttcatctacaattctccccaagacacaaacatcctctctactggacggcgggttcattcctaataaactcagggttacttatgcaaaactcgagcccgaaggggtatcggccaaggtgggccgtctgattagagatcgagcgccaggatcaaaccgtatttaaaacaaaactgtatgcgtctacagccgatggatctgagattgatgcccaagatctaaccacgcgcgcaccaaactcccagccctccgatcaccactaaccggtcacgattggttttcttccacgcgctcatccgtgaacggatcttggctacccgtttccgatccaacgcaagggaagtcgtccccaacctcgggatagaacctacccagccccttccgttcacccgacgacacacccgccggcggcaagccatctcgcttcctagactaacattgctccgcccgagatatgctaatcgaccggtattgtgcgacgaactgaatggcagaattattacctttgacggcgtgatcaatcgcccacaccacgaagaggtccgcttcaacggtggatgcgcagcaccgacgaaattcctccgccgcgaaggccaccagagttcccctggagcaccagcgcaacaccgcgaagccacccgaccgactgatcac

SEQ ID NO: 50627 - DNA, 462 bp, Zea Mays
cttttggcctcttctaaagcatcatgagattctttctcattccttttaatagcttcatcagcaatttctcgtccaccctttagccataattcggaataaaatttcccacctaaggtagtagcttcggctgaagggtttctaacaccatcagctgagaaggcaaagtttggctgagctacagccttgacatgatcacagccaaccttctgcaaaatggacgtagtcccacgggcgccggcaaaggcacaaaagtcccctctatcgctaagaatttcctcgaaagcttcgacctcaccgtttatccattgaataacttcatcaggatttccacgaatgaatttttgctcggaagaaaatgctccaactttagaaaaggtgttctttagatttttagcacattccatagctatttcatagcatttttccttagaaacacgaagctcatcaacatttttctacggc

SEQ ID NO: 50628 - DNA, 824 bp, Zea Mays
ggaagagtcaaaagaaaaagggttgtcagtattctgagtacgcaacctatccggtctgtcaaggaagaccaagagagtttgaagaagataaaaacagtgccagagccaaaggtgtcggctcctaaaaaatggaagcttgccgaaaaatcctctcagaagacgaagatgcaagatgtgccgaaacaaactacaagcccttcgtcttctgctgtggaggtctcggaaatattgaaggtaataaccgggtctttcccattcacacctctaagtcctctggcattggaactgacgagcctcttatagaaaaaggaaatctcttcgggtgctgatgggagagacgggggccagaagaaacgacgcatgatgaatatactagaagccattgagcaaaccccgaccccagcctcgacagataaagctactaaaccgactaatgccgaagctaccgttgcagccgaagacgaaaatctcacaaccactctatccaaaattgacagactcatatcagacgtggttgcggagaaggaggtagccgcagtagtttcagacaaggggaagaaaattgaagaagcctcttcgaaaggagtgaattttgacctgtggcacttgggcgaccaacaactctccgaagaggacatgtcagagctaaaagaatttgcaatctccggtggctaccagccggggtcaatgctctttggcgggttcgatgaagaagttgtgggatgcatccgcgaccgtgccggtgataaaattataagcaccctgtctaagagcttggattcccgaagctcgaaaaggacatcagatgctatagacgtcagcac

SEQ ID NO: 50629 - DNA, 648 bp, Zea Mays
aattttagcaccggtgcggtcgcggatacatcccacaacttcttcatcgaccccgtcaaagagcattgagcctggctggtaaccacaggatattggaaattcttttagctctgacatgtcctcttcggagagctgttagccgcccatgtgccgtagattgaaattcactccttctgaacaggtttcttcaatcttcttccccttgtcagaagctactatggctacctccttctccgcaaccacatcggatatgagtctgtcaatttcggacaaagtggttgtatgattttcgtctttggttgcagcagtagctttggcatcagtcgatttagcatctttatctgttgaggctgagggcggggtctgttcaatggcttctagtatattcatcatgcgatgtttcttctggacccgtctctcccatcagtagccgaagagatttcctttttctgtaagaggctagtcagttccaaccccagaggacttagcggtgcgaacgggaaagactcagtcattaccttcaatatttccgagacctccgcagcagaagacgaagggcttgcaatttgctttggcatatcttgtgtcttcgtcttatcaaaggatttctcagcaagcttccgttttttgggagcagatacttttggc

SEQ ID NO: 50630 - DNA, 782 bp, Zea Mays
ggcagatgccttgagcagaaagacccagtgtgatgagatggtatgagcatggatgcaagagttaccaccctgtgtgatgagttgtgcaagctgaacctggaatttgtttcttcaggtgccttaagttatatctcggtggagcccacattacaagagcaaatagtgagggcacaaattgaagacaagggtgttcaagttatcaaggaaatgatctagcaaaaggtggacaaatacaaatgcttccgtcaggacagcaaaggaatcctatggtttggagaccgattggttgttcccaagaaccctgagctcagaaaaaagatattggatgaagctcacctttcaaaattctctatgcactccggcagtaataagatgtatcttgacctcagacccttatactggtggaccagaatgaagagggaaattgctaagtacatatccgaatgtgacacctgccagagtcaaggccagtcatttgaaggtagcaggccctttgcaaccccttcccataccatcttggaaatgggaggacatttgtatggattttatcgtgggattgcccaatacctcccggcaccatgattccatttgggtcattgtggacagattgaccaagacagctcacttcttgccggtacacaccacccacaggacagagaagaatgcagaaatctacattgactaaatagttcttttgcatggaatactaaggactatagtatcagacagaggagcaccattcgtggcacgattttgggagcaattacaggaatcacttggga

SEQ ID NO: 50631 - DNA, 892 bp, Zea Mays
tttcaggaatggctttagcatggtgggacaccttcagtgaggccgtaagagatgctacctgggcagaattcgaaacagccttccgtgagcaccatgtaccccaggggatagttcaactcaaggaggatgaattccaggagctaactcagggcgagagaacagtcagtgagtatgtgcacaagttcacagagttggcccgttacgcgcctgacgacgtcagcaccgagtccaagaagatggcccgttttctgaaaggactaagactcgagcttaagaccatcctcgccagccaagacttcctcaacttttctcacctctccaacaaagctatccaagtggaaagggcaaaagaggaagaaaaagggcacctcaagaggaaattccaagttctccgagctcaacagcaagaacgtcaccagagggctcgaccatttgggcttccacccaggggaccaagcttcaataaaccatccggacccactccatcgcgctacagtcagcagagtcagagctcccttcaggcaccctccgttgcaagcaaccaaccgccagcaaatgcctgttggcactgcagagaccccagtcacttcaagaataactgccctcagttgaaggcacccggaccgacctactccaactcggtgaatggccccaagattccctcggcacctacctccaaggcacctccttccatcagccagcagagcaggactcagtaccagggcagagccagagtcaaccacgtcaacgctcaagaagcccaacaagccccgggagtagtgctcggtgagttccttgttgaatttactcccgctactgtgctttttgattcgggagcatcccattcatttatagccactaagtttgtggaaaagcatggcatcccctctgc

SEQ ID NO: 50632 - DNA, 568 bp, Zea Mays
cacatatttgagagaaagtgtgggaactcttctatatcttagcatccatggggtgcaaggtgtcaacatgataaacatgcttatgacaatttatgcactcaacatcatatactagcataatagatcattattgagagcataaatttaaactatccttgcacacaccacacgatgaatatgaaaaatcttgtatgactttcttttacccattaagatctacatatcaatctctcctcccttacacttgattccaatatttatccccctttggcactcctccctcacacttgcttccaatatttctccccctttggcattaatctccaaaaaggatttctccaccgaaaggaagaaataagaatagacaagtgagggcaagaggtagataaaaagatttgcatataggattcccctttaaagttttctactatatacacatgcacacagtagcatgtaatgccctagatgctcaaaggtaataatagagttaatggagcgatgtacctttgttctaggcctcataatctccatcatgatcatgaactttgaatttagtgctttgatgggc

SEQ ID NO: 50633 - DNA, 2109 bp, Zea Mays
tcggagccagaggactcctacgtccactcattatgccaaccaaaatgggttccgagtgcgccatgtgacccaggatccccagcaccccttaagggctccgagcacaccatgcgtctagacgcccatgcagtggttggtcaagtatttggtgagttaaggagttgttgtgtatgtatgacaggataggtatgaccgcccacagccttagtcacactggttgtcaagcccaaacatcctgggtgtggtaccagtgcgcattatgggcgaaagcatggatgacgtttgccacgtccagtgactacatccgatcatgacacatagatgattgtgaccatccatgacgtgtaggtgatgatgccataagaataaagatgcacgtttacaccttctagagtgtagtaggaagggtcaggctatcaagctgaccccacataacctataaccccatcgcacttggactataaaagggagagagggtctccttcacaaggtgaggccacggactcaacacccacggacacacacacacacacacacttagtcattttccgagcaatacaatcaagtaactaagaggacgtagggtattatgctctagtggcccaaacctctctaaattaggtgtctcttgtgcataatacacagccccaagttgtgccctgtctcgtgaacctagagttctttgagtcttgatagaggtcctgatatcgtggtgatcgcctaagcccttgcgaacctaaaaggtggtgctttcgatacctcgaacagaccacctgccattagttggtgtgccacatagattgctatgcatgtcgttgtagcaccaacatggcaacttgtgagcccactacggagggagaggaccatggtgccctctcagacaccgactctcactcccctaagcagcatccttgtcgtgcctgttgtcacacatccgtggccatcatccatggtggcacaattggcctaaaacctaaaaggagcgaatgctagatctaggtctggtagggcctcctatgtcttagaaaaagaggcaggtagatcaaaggtcagggcaatgtggtcctacttgtttgactgtaggtagaaccacgacatcttccacaagtcctagcaactcactaggttcaaggtaatgtatgtatgaggccactagtacgcccctagaagtagcatttgtcatagattgtcccttgcatggtccatcgtaggatgaagaactagcaaaatagtgtatggcttgcacacaccccacgaacatctcatagagatcgacgaaagttgccatgatgaggatggagttggggagagatgcgagatctagatccaatagaactcaagtgccatcaccaagaagggtgaggctagaaaccatagccttgctaggaggtgagcgttgaagacgacatgtcctgggcacaatgtgctacattggctaggaggttaggaccaccttgtcgctcatcactgggtccatccaccccaacaacatgttgtacaccgcaagcaccctctcgttgctcaatctcgacttgggaagtgtggtcttattcaatggggtccattaccaccatgggagaacacgataagagaaggggagtagagccctcgagggaacgtgaagcgggcttcgaaaggcaaaggggtgcttttggcaggaggaaagttgagtgctcatgtgcttgattactccttcatggacgctccaatgcctacatttatgatccacctgaatggataagactcaaagacggtgcacgaggcccgagaaattgggagacggtgtcagtttagcttctgatgcatcgctgctcatgcagcccgtgttttataattctatcctcactcatagactctagagcctatagtgggtctggtgccattatcaccacccctaggtacggataccccatgtgctatagcataagtatgttgaagcccccaccttcatgatgaggcatatcaagaagacagttacgagggaaagaatgtgtggttgggatcctgccacatgggaggccacctaccacgcatgttttaaccaagctcccatcctacggacgccctcgccaatccattgacatgttataacccaactctcatcctgcg

SEQ ID NO: 50634 - DNA, 875 bp, Zea Mays
gttgtctgtggtgcaccacaagctcgggatgtcggtggtcccgcggtgtgtacttcatctctgggccacttgtctcagtgcttgtccggttggtggttcccttccttcttaggtgctcggggcacgagcttcggctaaccgatgaggtcccaagtccgttcatcggcggtgatgtagatgtccgctttgcagaaaagctgttccaaggtggtcgatgccttttggaagatggcccaaatgaaggccgagtcattagatccacggtagaagtcctcgatcacgactgcctcagccacatcggggatgcagttgctcatggtctggaagcgcttctagaatgagcagaggcactcgtcactctagcctttgatggatttgaggtcccagggttgcaccagtttgtcggagagcgattggaagtttgtgagaaaccggtcacagaagtcgtccccattgtcgatgcaatggcgaggaagatgtatgagccattgaagcgcgtcctacccatgcacgatatgcaggtcctctgttgccccaatagcctaggctgtcatggattagatgactagccagccgcccgagtcttgcttgggtttgtacttgtcgacattcaaaaccttgaagttatgtggccactagatcattcggagccgggaggaaagggttgagactctgcatgtccctcgagcctcgtgtcggtcctctcgagcatgatcattatggtggtccctcggtaatgattgatgccgtgggtctagcagcctatctcgagctgaccggactagcgtggggctgttcatcgaggccgctgctgattctattctcgcgatgtgtctcggcgctgacaagccatggttccgatcatactcctcctg

SEQ ID NO: 50635 - DNA, 277 bp, Zea Mays
gcaaccttaggttgagtgtcaacgggcatgatgcaaggcttgtagtcggacatgccgacctgagcaagaacatctaccatgtattgtcactaagataggaacagactacgccatgacgttgaacatgcatctcgagaaagtgatgaagagggcctagatccttcatataaaactcgagttgggaggagtagatgtagaggagcaagcacattgtatcagttccattgcggtaggcaaacaaggaggcattagacttggcctcaatgaaccccagagt

SEQ ID NO: 50636 - DNA, 724 bp, Zea Mays
ggaggacgtgcatctactgtcctggaggtgttcttgtggtgtttctgctgctagtgcaaaccaacagcctagtgaccaaatgtgtgtgcatatgtggtactacacagggattctggttgctatcgatcgtggcctagttctttggctgccattgatgttactagatcaagcggcgccccttcgggcgccctatccggcactgggaaatatgaatacataattatacacgctataatcaaactaaaaggaggatgtactaaatctcaaaccaaaattgtttagttcagtgagaaagaaaacagatactcaacagaacatataacatagatagctcgaaaataattcacattaaagttgtagcaccgcacttaaacgtgcaccataacatgacgttgaggcttgtttcagctggaaactggtccaaaataagattacatgttccaagtttacgtctagtcgatatagtgagggagaggcacccatacctgaggtatttacaaggtacctagagccaactcttggccggtacaatccagacagctaggcacaaacattacgcaactacaagtgcagagccatttcatctactaaaggcagctgaacaatccatccacaaaagatccacaaaaggcaagacatcatatgtgacgtgttcagactgcagatttgtcaaggctgccaacaaatataagaatgtgagtataaagttccataaatataacat

SEQ ID NO: 50637 - DNA, 704 bp, Zea Mays
atcttaatacattcattgcatatactgtatggatgtgactgcttaggaaaatctattgaaaattcctggacgtccccccccaatgggtgtgatcctgcaccatcttttgtccgcatttttgatgaggacgaagaagaggaagaagaaattccgctaattcacaagaatagtcggtgttacagaggtaatagaggggatagtgatattccttctccagctctgtctactcttgttagccttcaggatttatctataacagattttgatcagacccttgaggatgttattcctgaagatatgttgttggaaacaattgttgatgatatgatgaatgtttgctctaatgttccagacgtgggattagaggtatcctgggtggtatctcgtgcatcgttgactttggaaggcagtctttggtgtcaagaggttggtcaggattgctcgactcctatggaggtgactgaggatccttcagcctcagaggtggccattgcagaaaacccagcccccgagggtgatgttggcgattacccagccctcaagggtgtcgtcggttatgacccggctctggtgggtagcgcaagctgcaacccagccctcgagggtgttgccgatagtgatctggctccaatgggtagcgcgagctgtaacccagccctcgagggtgtccgagcgagctctccttctcacacctccatggacgt

SEQ ID NO: 50638 - DNA, 576 bp, Zea Mays
tgaatttactgattttgctttaatttggtggcgtgagtataaaatgaaacatcccactgccattccaaccacttgggatcagttgaaagctgcgatgcgacattgatttgtgccttcgtattatgctcgtgatttgcttaataaatgcagcgttttcagcaaggttctcaatctgttgaggactatttccaggagttacaaaaaggtatgattcgttgtgggatattggaggacaacgacgctgctatggcacgttttcgtggtggtttaaaccgcgaaatccaggttatacttgattataaggaatattatgatatgactactttatttgaatatgcttgcaaagctgaacgtgaagtgtagggacgccgctcgaagacatattctaacccttttgcaggacgaagctcgacatccacctcagcaccagttccccctgcgccatccaagtccaccactactccacgcgagaggacgaccaaaccagccagcactgccccgcccacaggtcgtacacgggatattcagtgtcatcgctgtagaggatttggccatgtgatttgagactgcccaaac

SEQ ID NO: 50639 - DNA, 670 bp, Zea Mays
aaataactcagttatgttgattggacgtgatgtgtaaatttaaaaattgtaggtttgtgtgtagggtgtactattgaacatgtatgtcgatgtattataatagtgattgcgttagggtcatttgaagtattttgaatacatgccgaatatggttacattcgaaatagggaaagagtcatgttgtgcgatgaaaaggctagattgattttataggtcgtacgaaaatcgttctattaagtgtatacgtcgagtgtgttaaaaatatcctatgtaggcagagtgtagtgtattggttaggcgaagagttttagaataaacgagtatgaggcgtgcaattaagtcgagattgaagtgcaaatcctacgcaatgtgatgggattcgtgattatatatgagttatatttgttgatgtgacgagtagtttagaaaatgctcgtttgcatggaggatgtatcattaagacatgagtgtcagagttctttaatattagtggtcgcgccacattgcttgaagtgtctcgagtgcacgccatgatatggttgtatgcgagacagggttatgcacatgatgagtctagtaaaaatccatcggtgtcggcatgatttctgttgtatggcggatcgatgccttgccttgtcaatcattacattccatgccccatgggataaat

SEQ ID NO: 50640 - DNA, 559 bp, Zea Mays
agctttccgtgctcatcatgttcctgatggggttttgcaaatgaagcttgaggagtttttgagacttaggcaaggggcagataatgtgatgcagtatattgggaaatttaaccacctttctcagtatgccatagagcatgtgaacacggatatcaagaaaagatattgctttatgaggggcctcaactcaaaattacagaagaagatggccacttgctatgatcttactttcaatcgggcaataggtgtggctatagttgtggaagaaaaggcacgagtatatcaaaatatgaagcaggcatggaaaggttctaggtcagggttttctcagtcgtcggcgaaacgccaaaaggtggtaatcaggactgctggttctacaaatgttccttaccgttcaactacttatcctttcaaaaatcccacttatattcgtcccaccaactggccgaaccaacttccacctgcaaatacccaagttccccgcttgcctgctcccaaaggcactaaatatccctgctacaactgtgggaaggcgggacatttcattaaagattgtccc

SEQ ID NO: 50641 - DNA, 524 bp, Zea Mays
gtttgctgatattttcacagttcctactcaattgccacctgctagacagtttgatcatcacattccactggttccaggagcggtgcgccggtgccagttaattctaaaccctatagatactcaccttttcacaaggatgaaatagagcgtcaggtctgcattattgcaagctggattgatcattcctagttctagtccctttgcctctccagttcttttagtgaaaaagaaggatgggacatggcggttttgtgttgattacagacgactgaatgatctcactattaagaacatgtttcctatgccattggtggaagagattttggaggagttggtgggtacaatttttcacaagcttggacttgacaactggataccaccaaatcaggatggcagagtctgagcctctgaggaatataaaactgcttttaaaactcatcaagggcattatcaattccgtgttatgccttttggacttacaaatgccccggctacattccaatgtgcaatgaactcgattttgg

SEQ ID NO: 50642 - DNA, 281 bp, Zea Mays
aaaaggtgctgggagatcgtccaagttattccctcgggaacctctaacccacacttggactcggaaaataaggaaggacttaggacaaccctggtcaatagattgttataatcatgacgtggtgcatctgaaaatgaagaaataagcgagtctttttacaagtccctcccacaacttagatttgcaaatgaatgttcatagaggatatgacccttaactcatacataatgaaaccgcgaccgccgatatccaactacgtcaaatcttggatccaatcgttg

SEQ ID NO: 50643 - DNA, 285 bp, Zea Mays
ctagattagattgctcttataaacgactgtatgcgtttggatccgttggatccatgttctgtggcacggattaaaacagacgaagagctttatttgatataatccacgcctatcgattgggatctgacgaccgggattttaaaatcgccataccaaatcccaaccacccatttcgatcatgacagtctggttctaatggcgaagtggtatgaattctaagccacaagatcaccagtctatggttcggattgaatcaagcgaaggatataagggatctaatctcgc

SEQ ID NO: 50644 - DNA, 1245 bp, Zea Mays
gggcgaagccttgccctccgacgtgttctaccacgtcatcggcacgccagctgtctgcaaccccgaaggcctacaaataactcaggacacagaaggccaccgcatcgtcaacctcatcatggccgaagactagcgagccccaataactctgtacctgcagggccactaccatccaagcgatcgcaatgtggccaaacgactaaagcatagaagcagagacttctcattagtcgagggtcagctgtacaaaaaggggatcagccagccaatgctgaagtgcataactgaaaccgaaggcatacaaatcctccgcgaagtccacagtggaacttgcggctcccactcaggacccagggccctcgctgccaaggtgatttgccagggattttactggcccataataatttgcactaccaattgagtcacaaggtcatgcaaagcatgccaaaagttctcccctcactcaggcagcccctcgcaattcaccaagctcatcgctcatacatggccacttcaacgctgggggctagacatcgttggaccactgcctacagctcaagggaacctcaagttcaccttactcgccatcgaataattcacaaagtggattgaggccagggcagtatccataataacatcgaagactgctcaaaaattcttctaacaaaacattgtctgccgcttcggagtcccgtccgaactcatagtcgacaacgacaaacagttcgatagccaggacttcagggatttctacttttccatcggcaccaagcctgtcttcgcctcggtgtaccacccacagtccaacggtgttgttgagcgcgccaacggcaaaattttcacggccatcaagaaaaggattcttgacgacaaaagggcaaatgggccgaccaattacctgaagtggtatgggccctaaacacgacagagtgccgggcaaccggattcacacctttccgcctcttgtatggatctgaggccatgacaccgcaagaattaaaacacgggtcccctcaaaaaaacaaatcagtcgtccccgatgtcgacgaaccaacttccaaagacctcatcgatggagaccgcgtctttgccatgcacaaaccctcgacaaatatcaggttcaaaccaaggcctggcacgacaaagcagtcatcccaagggaattcaacgaaggggaccttgtactcacaagaaccacccggacagattcacggggcaagctacagccgaagtgggacggtccat

SEQ ID NO: 50645 - DNA, 884 bp, Zea Mays
gaatgtttaaatatgcaagtattgattttaagtgtttacatttctgtcggagggcaaatcctctggccgggtggtggattgcacctggcctggtccttacatgaggagaaattataggtttttgtcaggtctttcagatggacacgagaacacaaggatttagagtggttcaggccgctggagcgtaatagccaacatccactgagagttgtatttcttgagaacttgggagtcgtcggccggaatgtggacctaggagagtttaggccctaacaggtggacctaggagagtttacaatatggaacggggaaacaccagatagagctgacaatgctagatcttcttcattttgtatcccttctttgtcgtcgtgcaggctcttgacatcctatcctcctgttttgtctaatcggagtatgcatgcagcctttgcggtaggttgtggcatagcctgatacgttgtcatgcataggtgtgggcggtgtcatctcgtctcctccgcatgtctcttcatgcctcggtaatgcacgaagaacagtgaagtcataatgaagggcatccaaaacggtgcaccgggtcaatgcccttacctcggtaacgtgcgggtaacattaaaatctgcacatcacaggcctagcgtgtcgtgtgcatttaatgctagggatacgctacccaccaacagcacgagcaattatgcatcccatctgcactcaatgctgatgggccctatgttagcgacttttgtcaggcatcgtcccttacgctaggtgcatctggccacgtgttggcaccgaaccccaccctggacagggatcatgcccaagaataagtgattgcacgacattctcaggccttccctgattgtgggctcagaccagattcg

SEQ ID NO: 50646 - DNA, 486 bp, Zea Mays
ctttcatcctccatcttagtccattcccaccgtcgttagaactgtggtgcactagagtacatacgctggttggaggtcgcattgttgtggctacttgatggcactatcgtgcttgagggagaatgagcaccatatgtgggagtagcaccataggtgggaggggatgcaggaccataaggagaagcatatggaggaagagcactatacgagccatacggatgaagatcgtatggatactcgtatgcgtatggaagaggatatggataagtgaaaggttgtggaggacgagcattgctggaaggggcttcattagttctaggaggagaaacaatgattgttggaggctcagtagtaggagtgcatcaacactcgatcaatatggatacacacgggtaaggaaagagagattgtgaattagtgcaacaattttcactaatttatggcctctatttccccttaaacaaaacctatgcgaataaccaagcg

SEQ ID NO: 50647 - DNA, 360 bp, Zea Mays
aacagtactgggcagcatctggcccagacggcccagtaacatagggaaaacacgcgcgtgcgcccgcgccctggcggctttacaggaaaggcctcggggttttcactatctgcgaacgggttctctcactgttttgatgtgtcactgacaaatcacagaaaggctctcccccttctatttcttccccgcgaatgcccctgaccacggcgcgcacgcagatcgtctccgacatggttcgtaccggccatggctggcgacggcggctacggccaactaccggggaggcattactgacctacgacagcctcggaacatacatcaattggacctgaacaccccgagaacgaccagtccacgagc

SEQ ID NO: 50648 - DNA, 698 bp, Zea Mays
gggtcccaagacagaaaggctccacggtagcaaaggcccagaagaaaagcttgtgatatggtgttggtccattgtgggccacaccagaggtcccaccagtcagtgttgtcagtaggtagatatttgggtgcacctgccaaccgggtgtcaccatgctataattaccccgtggcacagaatattcctagaatgtagcagataattggggtacaagtatatttaggcttatgtgtcaccggatgagacacacataacaagacactacggttccctacctaatatttatttcatgcatcgtgcctctcacctatcaccaaatgtttaggtccacttgtcaggatccaacatttggcgcccatcatttgtgccatgaagaccaatctcacgatgcctcctaagaagaacacctaggccaactcctcacccaaggacaaggcagcaaaggtgatcctcgtcgctaacgcaaaaaaggcaaggccatcttcatcgacgagatcccataaccatccaccaacaatcccaaaaccaccactaaccagagcgcgaagaccgccaccctacaaaacaaaaaatggtttccataccctaagtcgaatgttcatacctctagctctgacaccccaaatgacccaccacgtaacccacgcaaccatccctaccaggccaaaatatggctagatctgactaggaacatgtcg

SEQ ID NO: 50649 - DNA, 1217 bp, Zea Mays
ctatgacctcgatgcgttgtagggaggggaagtgctgttgtggcaggcgaagagattgtgggtaataattcgcatcttgttctacatggtgtaaaatgcgaatgatccgacgggatactcatacggtccacgtgtgtagccggatggtccgagcatttcaattaaatttcgtgaagagtacgacgaccctggtgttgctctaggtggtccgtcgtaaaggacgggaccatctacagggtgccggacattctgagatcaagctcggatagcctgtctgtgtgtaggaccacatgtttgtcccaaaatggaggaggttgtggttgcccagtgtacgagttcattggcatgctataatatggctaggtttgtgactgcccatttgtagccgatgagttctttgtgctagcttagcattattctcatatgatggaaaattagcaacgatagattttcatatgcacatgtcagtttttaaaggattcttccatacccgccatatatgttttgtaattgatctcgctgctcatctacataatacctaagagattggattttgttggttttacatacattggggtgtgtgtagcctgtacaagagatgccatctcaaactccccttaccggacgatcttcttatggcgatcaaccttggaatgcactagatatttttttctttgcctcttcgcgctcttggtcttgcctccgcatcgtctctcttcttgttgtcttatctaatctttgaatcgttgttgatctttgacaggctctcaagagtcggcttcatgatgttgctcggggaaacttcgatgacatatttggaatcggccatttgtggttgattttggtagatctagaacacactttttcccagcggagtcgataaaaagtgtgttggctttgatttggggccaaacactagtatgaaccgcaaggcagtgctctctgtgggagcacagacggtccgtgatcttgtaccggacggtctgtgacctcactacaggagatgctcctctctgtgtactccgtgtaggtccagatagtccgcgatggcgcagaatcatcttctccatagaaaccataaaactcgcctcctggtaggtaccccgtcgaggaggacagttcttgggcgtgctttggggttagtaggccagcgtctctagacgtagagtcgaatagagatgaaaaatggggtttgagaaaggctaaactaaggatag

SEQ ID NO: 50650 - DNA, 701 bp, Zea Mays
gtggatctgttcctcagtagcaacagcactgggttatttctataatgacgctgatccgacagctggaatcccaatcatatgagtcttagcttaaaccctaagcatgcgttcttgctgtaacttgccggccatcccggctctctctctctatctctacccctaattccctattccagcactgcttacccagaagaagaccccaagcaagcagccaagcacccgcagaagtagaccaattatcaacgggcctccagctcagccaaatctggatgcttacaatcgacgtgagcccgtggtagcagtaaaagcagtctgaatcaattaatctctctgcagttcaatccagctacgctatgcatggtacgaatggtctggttacaggggaccttttctggtataattaaagggttcagctgaaatttaccatgcattactagcaatgttttaaatgtccggctaaggctctcttagcggcgagtaagtttttagatcacctatatatgaagtctatatagccggctatatatagctgcgagctaaaccagcatttagcagttttagagagaaaaaaatgcatgacatatcttcatagatagagcataaactatagctcaaatgttcaatatctgaatttgatagttcaaacactagttcaaatgtctaataacaaatcaacgtgcatgcaaattcaacaacacgtg

SEQ ID NO: 50651 - DNA, 1089 bp, Zea Mays
cagtcttgagacttatatatgctcgcttgagttggcgtgggtcagtgtggctgtgtgagcgagtggcagcaatagtttaacctgaccggcggacctgtggtcactttcttggcctgtcctgggatccgtgcgcgcgttctgaactactaatccaatcgaatcgaatcgcacctcgcgtggtcccgttttgcacgaattttggtcggtactgacggttctttttctagacaagttaggcgccaattttggatggatgctgttgccaaagacccaaagtgcgtggagtggagtggagtggagtgcctatccgcgaccacatctacaacgacaccaacatcatcaactcgacacaaaaatcaggcacctaagataaatggactccatcagtacgcccgctcgtttgcgagctctacccaattgggctcagcctgtacacgcagtgggccggcatggcataaggcccagcacggtctctcctactaaaaccctctgcttcctgcaaaagcaaggcatgcttttgcagttttgccaaagatccaaaaccctttttttctcaatctgcaaatattgtacacaaatgaacatgatttcatatgcgcttgcttccaactgagcaggaaattcattcaacttcgattcatgtaagaaaaagtgggagcgaagtgggggaacaaatatagatccaaaaccccttttctcggtctgcaagtattgtacacaaatgaacatgatttcatatgcgcttgcttcgaaatgagcaggaaattcattcaaaatttcataggctggtgtgagctgccgagcatcctctgtgctatatgtttccttcagcaatggtttactgcaaccactgtggatgatagctgcccctccataaaggacccagacaaaggatacatgcgagacctccctgttctcaatacaaaaccagtcagtgttaccattgttatggacatgggcttgcattgcataccactctgttaatgcatgcatgtccatcaagcaattttggctagtgtccttgtttgttggtacatcaactaacatgtttagcaatcagaagctgtggttcatgcgggaaggttcctg

SEQ ID NO: 50652 - DNA, 404 bp, Zea Mays
cggagggtttccccgggctcctgcctcactgcatggaggtgggcctccacaccgtgctgctggtaagcactagcgaagtttgccacgaatcgcgcatagagttcttcccaggagtagactgatcccagggtgaggttcatgagccaggtccgggcaggtccagacaaggccacatgaaagtatgttgccatcacagtggtgtttccacctgctgtcgtgatggcggtaacgtacacctgcaggaactctgacgggtttgatgttccgtcgtatttttccagcaggtgcggccggaacttgggtggccaggacgccgcacggagatgatccgctagtgcggcgcagcctacgccggccaaggggacacccgttggggaccgggtgcccattggtgtctgtggtgc

SEQ ID NO: 50653 - DNA, 440 bp, Zea Mays
catacgtgcagtagttgccactgagagctgaaggggacgaacgcgatcgctacgatacggagttaaaattgaataaatgcgcagttagtacgaatgcaagatgtctgtgggaagttaattctcctactcggctttttcatcacagcaagagctggaccacattgcattgccttttcatcaacagttaaacaaaacggaaactcgatcagctgtccaatgagcggatcatgcgctcagagaaaataacctttcggcggcaagcttaaattaaacgaaatcaaactaaaatatagaaggtacatgatgaagatgcaagcaatatagctgaatgcgttcatcctcctcccttatcacccggccctgccaaacgtctcgtcgtctcatcacgcggtcatcttctcagcgaaccggaggactatgcaggacatggcgcatgtatg

SEQ ID NO: 50654 - DNA, 780 bp, Zea Mays
tgcaaggccatcaacaagatcatccttcgacatggccgaaaggccttcttcaagcttcgaaaatcccacacttttagctatctcccggcaaacggatatttctttgttgtctgggagatagtacagaaaatcatcttcgttagtgccgttaaacactaaggctcccttcggatattttaatttttgggcatagtgtctggcttccagaatttcttcttcggataatttttccccgaagcatgtcgataaatgtaatcaacatcttcgactggagcttcaggggcaggagattttgctttttctgccataccttgccctgttatcatgccggtatctgaagtttgctgatcagccttgtcctcaggcgcgacagccttcgtctcaatgggcactgtaggctcagcttcggcttcggcctagcctttggcaacttcggcaactttcttaataggaacaggggtcaaggcctttgcagtctccataacagcgtctagcacgctggccatcctcctcctcttgggagttgtggcatgggctttttgcatcttcggcaaatttgcctctgccggtgggctcatgatttctggcatttttactatttcttccacctttggctcttcgatcgtatcatccttagcttcagctggcccaactgtaggcaccttcggcattacaatatactcttcagcgctctacacgatggaagtagcttgttttgcttcggcagttgaagaggtcccttcgccaaattcaggcactatggccggttcaatatatcgc

SEQ ID NO: 50655 - DNA, 562 bp, Zea Mays
aaaaatttgatgcatttacccttaatggttcaaagaagcttaaggaacctccaccttggaacaaaggtagcttatcctcgttacaaggttaagctttaagctttttgacaagaatatcacttcacccagttttaacaaaaatgcatcaaagcaggaatgaaatttagataggttaaactaagtatgaagctaggttatgcactttagaactgtgttatgcaatgctactttaataatgaaggttgcaatccttgataaaagtgatacttctttaccaaattggattgagttgtagtagcatacttcatgagaaacttattcttatacttgagactacataagattacttaagagaaagtgttagtctcaacataatcaagatatagaaatgggctcccccctaaagatgtgcatcaagtatttgaatgacttggttagatgcattctcttttaaagacaaataggggaattcattgaacatcttgatcaaggcatataaaatttgcaataatcagcttatgcctggtattctcaaaatgaaaaggtttagaatacttacaac

SEQ ID NO: 50656 - DNA, 333 bp, Zea Mays
gtcgaaggatcacccgccgctggtgcatgccgtcgccattgggtaatatcgaaggggaggaagaaggtccttcagccgtccgatctggagtgtgtggattagattagatcgggtatagcctcttcatccaactaaatctacatcgtccggttctgtctgaacaggggagattcgatctccatatacctgttcaaccattgtatcagggccatcggattcaatacaatagtcccgattcactgataccctttcgacgggacggttttctaaaagagcccctagacttttgctgaacttacccgtagttcagaacgttgataagatcattgcaca

SEQ ID NO: 50657 - DNA, 458 bp, Zea Mays
aaaaatagtaaccacccgataatatcacagtaagtgggttaaacaaataaaactaggattttgccaatacttcaaaaaaataaaaagagagaccaaaagtggaaaacagtaagtaaccctatttttccctaagtacttgtgatatgtactataagggaaaaatataaaactaaggtagatatacaagggaatacaccccaccctctgccccatgagaaagatcatatattctaagaaatcatacaacccatcccctataagtaaaaacagccaactttatgaatgattgctcttgcgcaaagaaaaaactagaaaaattaggaaatctgttgtttgacattttttcaaatagagtggtagtagaaagcacccactaagcccccaaacattagaagatcaccattaattaaccattaggtatccttggctgaaatttggcataggagcataatatcacc

SEQ ID NO: 50658 - DNA, 448 bp, Zea Mays
actgctaaaaacttaacattagaaggaaaaatagaaatattgttagaccagggttaagaaaaatagtggagacactaacttagtagtaacactgtttaaaattagtaaacactccaatgtacaaggttaaggagggtttgttcactaaagcttgtttatgctcaaacttaggaaaatttagaaaagggattaaaaatggaaaccagagggcaaccatatttttcctagcatgcctaagtcatgtagttcacaagaaaaatctattaacccatagtccagtggaaagaaattacactctcaattattcatgaaaaatagagaaaactttaaaaagtcctaagaaaataatcctaaggagaaaacacccctaccttaggaatgactattcttttgttgagaagaacataggaaaaatgaaagttctgttgtttgacatttttcaattagt

SEQ ID NO: 50659 - DNA, 1024 bp, Zea Mays
acacttaaaaacatttactaaatgtttttatgtatttcctggatttattttattttttaatcagtaaaaaggacggtgttcactatttctaagagttcgggccctgtaaaagttatgggcctaaattaaatttctttagctaagttaggactgcgggttgatatatgactctgctctattcggctgttataactctgctctatccctggtcattggatccaaaggcaacgacacagactagtctcccatttctacgaaccggtacactctctgatctctccgattccacatctacgacgtacgatcgtccacgtcttggcttaacatctactcgcccgatcaaactctgatggttcagatggattcaagccgaatgggtaaattagatttaatccagtccatccatccatccatccacatccaacgtccacgctctcatccctctcctctggtggtcgaacacggaggcgcgcacgatcaccacggaggcggcaattctggcaaccggtgaaacaacgctctggcgagcaacacccttcaacaaacagggctacactatgtggaggtcgcgatgaacgattggaaatagatctcaccgaatatgatggcgaagaggccctgggtccacggcgtggtgaagctccgcgacggcgcttgacctccgacgagcacgctcctgctatagggtgtcattgctcagatgcagacggtgctactcgttaaggggacagtggagagcacgatgaggggattcctacccaaagaggtgccggtggtgacatggtccgtgtcgaactgcggctccacaacgtccgacttgctccagtgagaaattcggccggcccttatggctcacacttcacaccagtgtcttgaccaacctccttgcctcccaatcgaattccatagccaccaaccgaggccggagggacggcgtggtcaagatccggagcgcgacgtctctctccttgctctctgctctcttcgctacgtgatttctcaatgctcggctattgacgttggc

SEQ ID NO: 50660 - DNA, 484 bp, Zea Mays
gtgctgttgactgtgcgagcttcagactcttcatgtgtatcatgttgttgttgcgcttgacggtgcccttttagctattgattgtgaggcaaggttggatccatgggtggtggtggtggtagcggggcccatgcagcttgtgagtggcttgccgaagcaactgatgttgtggactgctgattacccacatgccacatattcggaaatctatggagaataacacgtagcagtatgcaggacctacttcagctgattctgtcgtgctttagcttcaactatttatttttgcttttggatcgtgacttggcacatccttgttgtgtgtctcttatcttctccgcagaataagcaaaacaaccttctcagttgagagctgaaccttccaccaaagcttcttcctcctctgcctcttagaggtggtggcctgaaagaggtttgttgtgtccccgatgactgagagctatgctgatgcccttgagtatga

SEQ ID NO: 50661 - DNA, 599 bp, Zea Mays
tggtcgatgccctcagcaggaagcctttcgggataaaagcaataggttttcttgaagactggaagcaagaatccgctcagcttaatgcatgcttaggagaaagtagcagtttggaagtccaacccttgctagaagactgcatctgcaaagctcagctactagatgcagaagtgataaagcttgtagaaagagccagcaaggagcagccctcaggcttcaaaacagatgaaaaagtagctctggttcaaaaatcacttgtgcataccaaagggggaaacccaaaaaactctgctgaatgaagcccacagttcggcttactccattcatccaggaactaccaagatgtacctagacctcaaaaccaggtactggtagaaagggatgaaaaaggacatagctcagcatgtagcccaatgtgacacctaccagcgaaccaaggcagaacatcagaaacctgtaggacttttgcaacctctcccaatacctgaatggaagtgggaagagataggcatggacttcgtggtcggactaccctgatccccaaaagggaatgactccatctgggtcataattgaccgattctccaaggtggctcactt

SEQ ID NO: 50662 - DNA, 570 bp, Zea Mays
tattctctgaaaattatagcaggaacaccctttttcttggacgaactatcttgtgtggttccaaaatataaattaggggcacatgggatgaggttctagcagcatcgctaattaaactaaattttgtagtatattttgatctcaaccacaaccacaatggtctgaattcccatttgatacaagtaacttttgtatacacttctcacatatcagccactatgcctcacaattaacatataaacttgtggaatctaactaattaacatatattctctgaagattatagcaggaacacccttttgcttggatgaactgccttgtggttccaaaatataaattaggggcacatgggatgaggttctagcagcatcactaattaaactaaatattgtagtatattttgatctcaaccacaactacaatggtcgtaattcccatttgatacaagtaatttttgtatacacttctcatagatcagccactatgcctcacaattaacatataaacttgtggaatctaactaattaacatatattctctgaagattacagcaggaacacccttttgctt

SEQ ID NO: 50663 - DNA, 557 bp, Zea Mays
ttcttgattctaaataattttgaggattatatgtggacatatgaaaggggcctcatccgaatcggtaagcagcaagcatcataggatcaaagatcggtggcctcgattttaaaataccccgatctaatcttggtcatacatccacaattgatcgaccctgaccaaatcagcgaagggggtactacaggatctaatcctagccatcaccgcggagatcgacggttcacacataccctccttcaccccctctctccttccccggtcatccgagtggtggcgcgctactctaaacggctgaaggctcgccggcgtcctcccgcttgatgccttgatgctctccttctaaaaccagatggtgctaagccacacaaaggaaacagtgaagtgagttggaaggtcattaccataggtcgtgtagtcctatgcctggtccacgatagagggcgattccatggcggtctacaagctccgacgagcaattgagagtgtcccgatggtcgatcccccctgccacgcccacgaacgtctcctccacgcaccgcaacactctccatcca

SEQ ID NO: 50664 - DNA, 566 bp, Zea Mays
agtgaaggtcgatcttcacatgcttcgtatgctaatataatgctacatgggattgatggagatcgaggtagactccgttgacgttgtcgcagcaggcaagagtggagcgctctaggggctgtggagctcctggagaagctggcggagcaggaggtcttgatcacgctattgattacaacgcggtacttgacctcagcgcactggagcataagacgacaggtcgtcgcttcatggcccaagagacgagattcacgtccaggaacacggtgtaaccggaggtggaccagtgcgtgttaggacagttagtccagtcagcgtcgagcatcgatgtcggtaaaggtcgaagaagaagacctagtcgatggagccgtggaggtaaagattcaataaaacgagcaggtcagccgcggattattttgtgcaagcaaggactccaacctataatacggggggttttttttgaatctttttcttaaataaaagcgcagtagagagtttcagtggacgcacagctgacctgctcgccgctggcaaacctgctgccaggctttcggcgccccatatgg

SEQ ID NO: 50665 - DNA, 348 bp, Zea Mays
ttagatataaaacaaattaagtgcttaattttaaccatatgtttaatactaagataaggttactagatgatgaacaatattaatatgagtttaatgcaactagaatggtttaaaaaggagttaaattcataaagtcatgaatttcctaagattgggacattatttttgcactaaaaatgatttatgtatttattttaattgatttctcgactatctggactgtgaccataaatacaggagaacccagggtctaaactataaattccagggacctcggtgtaagtctgatccaatgctaatggacgacgggttgataagtaaaaagggtaggggcactcttgcaaaaag

SEQ ID NO: 50666 - DNA, 397 bp, Zea Mays
gtttcttgtattgaacctaaccgtgtagatgaagctctacttgatgttgattgggtgaatgcaatgcatgaggaattaaacaattttacccgtaatgaagtttgggagcttgttgaaagaccaaaggatcacaatgttattggaaccaaatggatatttcgaaacaagcataatgaagatggtttggtgataagaaacaaagaaagactagtggcacaaggttatacacaagtagaaggattggattttggtgaaacattcgcacccgtggcaagattggaagccattcgaattcttctcgcatatgcctttgctcataatataaagctctaccaaatggatgttaagagcgccttcttgaatggtaagattagtgaattggtatatgtggaacaac

SEQ ID NO: 50667 - DNA, 702 bp, Zea Mays
ggctgatattgactggtgtcaactagtttatactgatttgtgtgatgctgccagtcgttggcacaaaaggaacaaaaacaaacattacacaacaatatatggatgttcactcattattctagtaagtaattctttgtttaccaagcatatatatgatatgcaaatatttgttttgtactaattaaatattttttgcattcttttttgttcagatttactatcttgatcacttacatcaccctgcatgacctgataacaaatatggtactcctcgcattaagtttttttgataatgagaccataagagatttggctaggggtgacagacgtcccctccgtaaaactggtgaaccattcggtcatgcagaggttagacataaacattttttgtcctgttatgcagatgttacaattccaataactgctaacagttgtaacttggctttatacagtttcgtagccgttcagaaacatgttatgtcattgcaccagaacggcctgtttctgacgttttcaacatatatgtgccacgtatcaagcatttgattggcaacaagctgaaatgtttgccctcccagcatcgaccaatgtttgaatcaatgtttgatgctcatgacaaggaggtggataagtactgtgattctcttaagctgagccatcagatgattatttctaaacagattgaactatctgagacctttg

SEQ ID NO: 50668 - DNA, 438 bp, Zea Mays
ccaagccaattgcccaatgtttctgccatttcaatgaggagaagcgcaaggccataggcgaggaagtcatgaaactcttagcggcaggatttgtaagagagatacaccacctagtgtcgatcgttaatcatgtacttgttaagaataaaaatggaaaatagaggatgtgtgtcgactatacgtgccttaacaaggcatgtctaaaagaccccttctctctccctcacatcgaccaggttgttgactccactacaggatgtgaactcctttcctttctagatgcgtactcgggctaccaccagatcaccatgaaggagagcgaccagcacacaacctccttcatcaccccattcggttctttctgctacgtctccatgccttttggtttgaaaaattccatagcaaaatactagcgatgtatgctctagtgcttcactg

SEQ ID NO: 50669 - DNA, 984 bp, Zea Mays
catgcaacaccctttagcatcttctactcatctatcgtgcatgatctttacagcgctgttatgatctctaattcaaaatttgcccatatggtctatactgtagctgctaaattagttgaaattgttagataaatagtgttacaggaaggtcagacatttccagtgtgctacagttcatcagagataacatagattaatatgtgatgtaaatagccttttccacaatgtgctaggcattttatacagatccaattgatgaaatcactcacacaatagatagaaaggaaacattttaatttacattgtggcctcgaacaagctgctggcatgattccacccctcaatgtgtccacaccatccataattctgtcggtccaaacttttgcttggtatacgctcggtgggtggtgcatgcatctcccaccaagccattccttgtgcaccgtggacagccacttcggtactgaaataaaaaacatggactatagataccgagctgaggtaggtatgtgtgatcgattgagaaaaaaagatccaaacatgtgcctattggtagctagttgtggggttgggatgaccactgctaaaggctaaagctttctcccacatttagaatctgatcccagaccaacagcacttgactcacccccattaattccactggtcattattcagcagagcaacaactaatgtaacccacaagcatccagagaggagatcaggatggcatcagtctgccagcactaaaccaataaaccatgaagtttctttatttcataactgctgggcgcatcaatcacaaagcctcgccagaaaagaaacaatagcacagggtgcctgccatggaatagcctgacagttggtagaatcaacatattgtaaccaaaatcttgattattgggtcgctaggttccatggacaaccatgtggtgataaagttcacttttcaagaatgaccgctatggtacaagttctagaaaaaat

SEQ ID NO: 50670 - DNA, 1156 bp, Zea Mays
agtcgaattgtagctggtatgtagcactacaatattgctgcagagagttggacttgttgccacatgaaattgagagaaataggcgctccaaagtgctctatcaggtgttctgatggggtctcgccatggtacagtagactggaatggatcaggacgccagtgcgactgctcttaccgccggcgaccgatttccgccgcgattcgtgccgccgccggtccaacttgagcttggggtaagtggataacacctggtgcacgttgccgtggataagtccggccggaaaagtaaacccgaccaccgtacagagttgccgcggtggaaacccgataggctcgccgtcgaccgccgcttcccgaccgtgcgccgcgtggcctagccgttttacagcgtcgccatgactccctctacccgtcccatcgtcgccggggagtttgccacgccattagccacgatttcaccgcgacgtcttcttccttatctccggccacctccgctagccgcttaaattaaagcaccaccgcctcggggctctataaattgaccccgccgtgagcttcaccacatcctcacgcattcagccaccgtgaatcgctagcaatcgtgcaccagtgcgcttgaatttcggttttcccccaaatcaagtttccgccacccgaaatcaccctcaccgtcgccagcccaattccggtcagctcccgttccctgcttcctcgtttaagctttctcacatgccttggatgcttgccaagccattgaattgaactacgggctctctggtcatcgggaacacgaccatatagccgctatgcttacggtcaccgtggccggagctccgtagttgatcattcgtgcaattaaattgggggaaacactcttcaggtagtgaatttggtttacgccatagctaggcgccggtcattgccctaatcggccggcgtagatgctcgctggagctcctccgtgcgtgaacgacgtcgagggcgcgtcgggtaaaggaatagataattggaggacttttctgcatttggtcagtgacacaaaagaacagtgagcaaacctgttttgatttagttaatagatcggggtcttctgtgcaaaactcccgcgggcgcgcacgcgtgggcgtatttctgctggttactgggccgcctgggc

SEQ ID NO: 50671 - DNA, 697 bp, Zea Mays
tttgagagttgtccacgacaacatgtggcacaaaattgaactgcaagcacaattaagaacaaaaatgcatgtcagatacatgcatgacacacaattaagctagctattagttgtattgtattcaaaaaaggtcttaccctcctcatcccgtaataagtgtgtctttttagaatttaaaattttgtcccaaaataaatatacctttagctacaaaattaaataactctagttgtctctttctattttcgttattcttcaagtgcgatgtacattttcaagcaactttttatgtaggtttatatgtattttttaattaatattgatcttttgacaaaaactctaaatatagtatttattttggaagcgaaagagtagtaaagtaaccgtagaaaccgtgcagccatgcggatttttttttctccgcgtacaaaaaaaacattccttttttcatggatgtgaccaagtgaagtttcgtcggcgcaggcaactcaaacgtgtgcctttctgaacctatcacttgtacgaagaggcgagtggttacttgatcgacgtcgtctgttcacgacctgtggagtcgcttacaagttcgctccaacgcatgttcgctatcatctggcccattgacacgactgcctataacttacagactctttgatatcgaacgtcgaagattttaaaaatcctctgctaaatacta

SEQ ID NO: 50672 - DNA, 381 bp, Zea Mays
cttgatcccaaactcaaaaccctatggcccaattgacaaaatgacgcccaaagatctctagcacaccctggaaaagtttgaacccaaccctaagccatttgacaggacttggcatggcttttgtctcggtgtggataactctgacagagccgacttctcacccctatatctctctacaccggccgtatctttgcttggaactcacatcaaaaaggtaggatttggtgcagggaagagaccgtacacggggggttttgccaagatctgcacgctaaagcgctcaaatcggtcgttgaaccctggcagaggtaaacccccacgtgttcgacgtgggctgacactcgggggcacgctcagagcacgcccgcacgcgaacccccg

SEQ ID NO: 50673 - DNA, 789 bp, Zea Mays
caagaagagattgaacagggtttttgatgtaattggcttcgtgtacccagactattgttatccctcatgaaagcaaggaaagaaaagaaaggttgctgcttcagcaatctctgctatgccgaaagggaaaaaggtcaaggttctgacacaccgacccaggcactctgagacggccgaagtgccaaagcttgctaaagggtcttctgccgctaagccaagtcatcccgctactgccgaagccacaacaggatcagccgaagagccaaatccaaagacaacagtggaggagccaaaagccgaaaccgccgatgtgccgaagtgtcctgccgaagctagggcaaaaacggtcgagccagaattgaggaaatcgggagaggtataaaaaattcctgcagtaactccaaagaggaggagaatggccagcatactagacgctgtcatggggtcgacaaaggtaccaactcctgcctctatagaagtgcccagcatgagtgagaaaaatataaaggagagtgtcgaagctgttgtaactcgggttgaggctgaagctgggccctcagtttccgcaaaaacagggcctgcggaactttttgaaaaggatgctgaacaagggccctcggatgctgcaaaagctctgttatgttaccgttagaagaagggagaaccaacaaagaatctaaactctctgccgccgaagcttctacagagggattgtaatttatagtgcgccacgcggcaggggaaaagctatcagaggaacagattgccgaagctgtgcaatatgctaaa

SEQ ID NO: 50674 - DNA, 392 bp, Zea Mays
gtgacactgccgcaccatctgtcttgagtttttaactttgatcttctgcaaccaactaggttgtttatctcttagtgtttttgtgtgatcaaacgacagtggtttgatcaacatagtgatttggtgctttgtgagcccctagaggcttcgggtagagatcgttatcaaagtcacaatgttgttctcgcaagtcaagaatttttagtggctcccatttacccccctctagtcgcctcaccggtccttcaattcatatcaaagccagttaaggatttccttagcttaatcggtctaaaatcgacaaaggcaacatggaacgaggcgttgacaaaccttcgttctttgatgacaaactatcgataatggaagatccacatatcgacatatcttca

SEQ ID NO: 50675 - DNA, 333 bp, Zea Mays
cgagcgtgctctgctacgacgtgaaaacgactagtcctgtagaaagctgcaccgcaccgtcgtcgtcgctcgcccctcgcgatttgatagtctagattctacgcgccctacattacgtgctggaacataaaaagaagacacggcgaggctgataaatactcccacaccacctgcattgcccagtcccgtcgcggcgttcgtgtcgtggatgtgtcccgttgcacgtctcggtggctaggctttctttttcttccagctccgtctgaaatctatggggagtactgtacgtgaggcgacgtggatttcagagctcaccgtggataaggatactta

SEQ ID NO: 50676 - DNA, 445 bp, Zea Mays
cggcgtaggaaaagaagtggacaagatcagcaatgacgacgacaatgcccagactttcctcgccggcacaaatcaaatccactcccgacaatctcagagatacgacagaagacccacgcaggcaagggaatcgacacgcggtcagttttcaccaatagggcaacatagaagctcctttgagaagtatgacaccacatacagagacttgggatctctccctctcccgcctgcttgtaacccctactacgagcaatcagatgtcgatagcgcgagaaactaaagattggagtagggacattccgcgtgaaccagtataattcttgcgccgactgagcacaccatgcaggcctaagacgcacatacacaaatttactcgttggtgctagtttgaaacgctaacagttagcgcgccatgtaggtgctttgcacatttttgccatcttct

SEQ ID NO: 50677 - DNA, 597 bp, Zea Mays
ccaaatttcagaagttaattgatggcagattacttgttacagactttgtgttgttactgtattgttcccctgattatcagtgcttagattaattatttgtctgaacaacatccctagtttggtcactatgactcgtggataaaatggctatccagaaaagaaatggttaatcaaatgcttatcagaactgttggtcattatgcttatattgttggtgttttcacttacatattttgttaaggtcaccatttttgctttagtagcttgttgccggtcagttataagatacttgctagctgtgtatgcttattgcttggttgtcaattacttctcatgtatcagtttttttatttcttttatcccttctgattaaatgtttgtataccattaaggtgttagtatccttcgaatgaagaattttgtgtccctctatccatgtcagttgtttgatcttgtcatggatagttgatgcgagagagccggccggtacgctttcatgactccaacccggccagctttcgcgtaatcgctcgcggtaactagtcctgacatgcatgctaataatagtcaccgccgacagcgtcgcgtgttttctgg

SEQ ID NO: 50678 - DNA, 701 bp, Zea Mays
gggcccgcactgtcatcccttcatctgcgtgcccccaacagaacggccgctcttgcggcaagcgatgcaacaacccacccgaatcctagggggaatccattcaaccacctcgagccgacttgttggggagctacaaaaccatatgccgggggcctcgcccccctttccaccgtcgtgaacaaccaccatccacgagtgaggaagccgacaccagggagtgaaggagagcaacaccgccacactcggagctcgcatccgccaccatactgcacccagggcatggttgcggaggttcgcctgcgtgcgagggttgcgtaggagcatccccttggacacataagtcacctgagtaccgagaatcgttcactggagcattggagtccaccgcggaccgtgattctctatggtcagagcacttcatggcccgatcgtcggtgaggatcccttccctgtttttgccatgttcttctctaagcgttgcacgccctggattagagtttgagacacaacactgtagcaaggccaccttccggcgaggcctccatcgcagtcgcgggcggtgccaccgtgcttggcagccgggagctgagagatggcctggttgccatcgatctcagatggacggatgggattacacatgtgtaacaattcgacccatttaaactagagccattgattagttattcgaggggtaacataag

SEQ ID NO: 50679 - DNA, 547 bp, Zea Mays
gaagagagaccagatggggcactggacaatttccttgatgtcttctcttttaattaaatcatttttaacgtaaaaccactcctccatccaggccctgggccatctttttcggaatgttggcaccgggtggcttgcattagaaagggcaatgaacccgtaacaaccaaagttgttgtggtattgttctttgccgatagccttcgtctcatataaaagctcatgcatgttgcagaagcacttcgcgctcggctccagcccctagctacttacagcccagacaaatatccccattctgattatagctttgggggtaatctgatggagaaagatttggaatatctttaatacctcgaccacaaatttactaagcgggaaccgaaggcctgccttcaagaagctttggtatataagaacttcgttttcctctggagcaggggcagtaccgtctcctccaattctgacaatagacatgtcacaaaaatatctccccctcatggcgtcaatatgactttgcttgatagtcgattttctgaagatagtatggctt

SEQ ID NO: 50680 - DNA, 276 bp, Zea Mays
gtctgactccccatagtgggcgcgagtgaaagtccattaccacctccgctcaatgagaaagaagaccagactcaccataaacaaggggaaagaagatggtgccaccaatatggcggagaaacaaaaggtgttcaagggggcctaagccttggcagaatgtgccactaagcccatttgtgacatagaaaagaccaaacatcgtataggctgatctcataaagataaagagcgagtacatgcctacaaataagatcatcggcaaatggaggcaccgag

SEQ ID NO: 50681 - DNA, 567 bp, Zea Mays
attgcctatttgtattttgtaataaaaaatcctagcggggtttcaagagctcatacatatgtttaggattccggtatagctggtggtaaaggaccaatatctcataagattttagatatgacgactctaaactggacatactgatctctaacttttcttagaataattcgtctattttttcctaaatgttattcatggtagttggtcataaaggacctaatcctgagacgtgaggcttaggtggctgggcattgttatgccagttatctgtatgataataacttgcatatggtggtgtgaatccctccaactccctttgtgtcagaagatattcggttctaagtatgggctcgcttcggctttggtgcatcgaaggtggagggtagttttgttgtgatgtaagacatgtctgcacgctacgtgtaccataccaatctgagtatggtacgttgtacggtacgtggtaggtcatcagacagtcctacaggagttcgaacagtccgcgagggtacgtcgaatggcccgtttgatgccggatgattcgagattgagcttagatggtccgac

SEQ ID NO: 50682 - DNA, 842 bp, Zea Mays
gtgaacactatagcaaagttagagagggattatagggcaacaatttctctacaggacgaagatcatgttgtaacacaaaaattaaagaaaaccgcctctgaagatgctctgtcagaacaattgaagaagaccctaatggtacagtaacaaaaagatcttctgattcagtgtatctcgccgctagtgaccttccgccgcgattgacgtcggtcatcgcgatttgtgtgccctagcttgcggataacgactggcagtgaaagatctccacgcagggaaggattggagccttatcaccggactattccctgagccacttactgcgtgattgactgaggtgtcctcgctggagttcgcggtcttttcatagccgtgccacgtacttagaagagttaccacgtcgtagtagacaaccgtaagtagtcagtccatcgcctaagacgttgccccgatgaacgccacggtagctcgcgccggtgactcacccctgtcttcgaccaacgatcttcccctttcaaaattcggagccaccgcctccagacactaaaaattgatggtgttgctagctccgcaaggttgtcacgaagccaggacatccacccctgccctcgattagccaccatagtcggggaattttgttcttcccccaaatcagtcgaaatcccgctgtgaaggtctctcaccgtggtcagcctgcctcaggttgattcatacccctctgttgaatgtttttagcatctctaggatctcctgttgcttgtaggctcgattaattgaactagacgtactgaattgcccggaacaccgtagcttcttctcgatttccgctgttgtcatgagcaggc

SEQ ID NO: 50683 - DNA, 546 bp, Zea Mays
accttgtaacagatggcccaccgcaggctcatcgcccgtaagtctacgggaggatgtgttccttgtcactagcatgttgtgcgtgtttcttgccgctgcagctcttctctttcggagtacggtgtgcccaccctgctgtggtgcattcttttctatttgggtttcccagagggagaggaactgcgttacttctgggaagggaggccatgctctggaggaggaggtatctgggtgatagttgtggtcaagcctcgggcagataatccactgatgggtggatggcactttggatcgttagaccgtatacccagagaagggtcaggcagagccgcttataagatacttcaagatttgctggaccattttcctggggagattgctaccgccatgcctggagtctttcctaggggtgatattttcaaccctaagtgggactagccagaaggtagagctctaacaagaggtgatagtgagcaacagcacagcgacaccgcaccgtctagtgctatgtttgcagtgatgcaactgtataacaacacataagta

SEQ ID NO: 50684 - DNA, 704 bp, Zea Mays
ccgggacagtccccacacgacttactctcgaggagtgataatcgagagacagtagaattaaatgttgtctgacccatcgaatagcccccaaggagaaacacactcccctcaggggcatgcgactactatcggggatctcagatctccggaaccctgggggccacgagtaagaggggacggatagagcccctcctcgataaatccacccctagatgactcacacgcgtcgagctagggggtccggtgaggcggaactaggtcgaggagtcagacagatcgtcgagggggtcgctcgagtaggtcccatgcaaccgttggactgctacccgccattaatgctacacatgccacatcaactgcgcctgacgccaagttagagcacaacatgtcaccaatctccctccaaattatagcttataagccctagacctgagtccactcatgacctacgaatttaggcctgagtcccctcaacgccctacaagggtcacaaagcgacggaggaaggccaagggttaggccgcggagatcgagggtcgacgtggaagacgtagccagagaacacaatgatgacacttagactcccttcgtcgacacgcttccccaacgaaattgaaagtagatggccggaaggctgtccaagaacagataaggacacacaataatgattttatcaggagagaattactctgtattacaacggt

SEQ ID NO: 50685 - DNA, 459 bp, Zea Mays
cggatcagaaatgaatgccccggattagaatagctttaactcgaatcggtatgcagccatggtcattggatcccgggtggatggctcggattcaaaatcgccctgagtgagtcgcggccgccagatccggatcggacgacccgaaatcgccgtccgcaaattactacggcctaacccatctctaccacacagattacatccaacggctgtggcgttttcccccaattcccatcggtctacggtggcgccgccagaggatcacggcggaccaccgccggagacgaccggtctcccgctacaaggcccggtacctcgcctaccattgtgcagaacgtcacccggatcaaggcgagcatcgtgaaggtcaactcaccagtcgagagggcaccgacgaggccggtcgacagtgcagcgccgcccgccgccttcggcgagggattcggagtcgcgtctacggtt

SEQ ID NO: 50686 - DNA, 768 bp, Zea Mays
agaaaccctagctttttacagttgctcacctgccctccttgttcgttctgcgccagaaatctgacctgtatcaagcagaccgcgcgccgccaccgacggtacgttgcaatgtcttcttcctcgtctgctgcgagcacatcgccggccatgccatcgtccgaggagaccctgaggcctgagtgacttgggggtggttgagttgcagcccagccacattgtggagtttgggacctcaaggattttctcgggccgtgtgctggagatgcagtggcttggttactttggtaacggtgttgggcgggccccaggtgcagaagagatccccgagcctaagggtgagttgatagttttttaggcttttttcgctgccggtcttcgcctcccgacgcatcgagtcatggcggaggtgttgcgaaggtttgaggtgcaagtccaccagttgacgccgaacacagtggtggcgcttgcgaagtacgtctgggcagtttcttcctacggtgggcagccgtctgtggaggtcttcgccaaaaattattgtctgcattggtagaagaggaagataggggataagatggcccaatttggatcttgcacctttacgccgaggactgggaagacttcggctgaggttgtggacatagtcccctgcgctaggaacaagtggggtaactgctggtatttttggttctatgtggctcccgatgatgtcgaaggcttgccaagtctgcctccgaccatcctgtgctcacattgttatgtggcgtttcc

SEQ ID NO: 50687 - DNA, 654 bp, Zea Mays
aaagactctccgtgcaaaagtcgcctaagggtgcagccggattagcacaacaagtgcgaaaaaaatcaaagtctttctccaaaagactctccgcacaaaagtcgcctacgggtgcaaccagaatactagtacgcaaaaaacgaagcctacgggagcggcccgatcaacgaaagcgcgtagcttcatcacacaagagtatggttacatacatacagcaagggcatcgcacattacattggctcaaccttcgggatgatacccatctccctatagttgaacaacattatcctcaattcctcacccgcaaacaggcttcgcagctctccctcacccacactcgccccagccggcgatgacaacaatttccgcttgccagtcccgtccacacgaaggcgaccaccttccacctcaccacgatgacgcctatcacttcacgacaactcactcaccctccgcttcgccaccgcccttcgccgcctatgcccaacactcgcacccggaggatcgtcatcacccattacgcgcggtgaggcctccatcgtagccacgtccaatgccgcaaaataatccaaatcctcatccgaagactcctctgtccacacaatcgaactcccagaatcatcagactcaaaacacttagacacagaatcatca

SEQ ID NO: 50688 - DNA, 498 bp, Zea Mays
ggaaagtgtagcccagccttaaaaaagctttggtaaacaactacttcgtctttttcgggaagaggaacaatgctctcctcaccgggcctcactatggaaacatcgtgaagatatttacctttcatagcttcaatatgacctctcttaacagttgatttcccaaagttgacatggcttggtctccaaggtcgttctttggcgtcatcagcatcacaatcaaaatcaaattcctcgttatcctcagagtcatccgacagtccagccaatatctcgtcagtgatcttcgcagtgttgcttaactccatggcctcgtaaaatctagcaagcgcaagctattcactcttgctaccctcggccatcttaactcaaactaaaaacaaccaaagctacaacaagtgtaactctcaatggctcaaagcaacaaaacaactgaatgacacgataaatattttacgatgttcattctatttatatgcaaactaccactgcagagtggcc

SEQ ID NO: 50689 - DNA, 546 bp, Zea Mays
tgggcgcctctgtcgtaggttgggtgcgctaccgtcacttgtgggtgcaggattgaagataactcgtcggtcgttaatctggcgatggatggctaagattgagacgagggacccacaccctcgttccattttgctatgtaagccgggggcggtcggatggggatcaaatgatccatgattggtgctgacttgcgggccttggatccgcgatccgatggccgatgttagttaagggttaagatgtgatctggtgcatcagctagtgatcggacggtcgtagttgcgagataacccttcgctgtcgcagatttgtaaaagagccctcggggttcggggaaatcaacccgcagtatagaccagcgtgaaaaccattacgcagaggccctaaaatttataattcgaaccccgcacttccttgtaatatggtgcgcagttcagaactaagagaaaataatgaaataaatttagaaattggatttctaaggtaaatagaattctagaacttgtttaattaatagaaaattcatttttgctcctttttaatct

SEQ ID NO: 50690 - DNA, 710 bp, Zea Mays
gaaatatgctcacctctatgattatctttagggcatatttctaacaaaaaaatttgctgaatcatgcaggcagacttgtgctcgtgtcttctgttctgtcctcctcgcccatatatcacttgtcgatcttttccctcgcgacctggacctgtaaacgcattgacaagatccgccgctcctttctctagaaaggtaaggccgaatctaatggggtcactgtcttgtggcatggccgctagtcagcaagctcaaagccctaggcggtctgggcgttctcaacctcgacaagcttgggtgtgccctctagcttcgttggctttggaaggactggatgagtgaggatcatccttggaaagggctcgacgtgccttgtaacaccgtggacagacttctttttagcgtctcaaccattgtcacagtaggagatgacttctttttagcgtctcaaccattgtcacagtaggagatggtaagacaactaagttctggcatggcagttagcttgatggcatgacaccaaggaacctagcaccaaatctcttcgagctagtctcaaaaaagaataagtcggttgcctgtgagttcattggcgagaattggatcaggtctttgagaaacaagatcacatcctcagttgagatcgaagatttcgtctccctttcgatcagactccatgagttccatcttcagccacaggtttcgaactccat

SEQ ID NO: 50691 - DNA, 398 bp, Zea Mays
atggcagtttggaaaaagcaatatcataacaacttcaaatgttatagcttcatgtaccggtctgatgtgatttgtcctttgccaacgctttggaaaaaatggtcgggctcatagatgaaatagtggttttatattaaaaatgatctaaatgaaagggatgatgtgaagagcataattcagcgccccatacgatcacgcttcggcatcaggagaccttcgatcgtaggtggaaatgaagcacaagcatgtttgatggccttcaacatagtgtgcacctatattggcatcagagatttggttcaggagcacattgcttttaaggtatggcctcttgttaatgattgggagatgccgaaggagaccgctactggctccagtgaaggtggcctagtttacct

SEQ ID NO: 50692 - DNA, 286 bp, Zea Mays
atagtatggatgatcgtgtaccaggactgccacttctccagacctccatggcatatgacataggggtgtgcaaccttagatatctagggcgtgccatagtattcaaggacacttgtagtagtatggaaggtgtactcctttgattgtcacttctttagacctccctgtacatactgcatgggctagatcattctctgaggaccagaaggtgcgactataagactttggatgacatcagcaaacagtaaagtaggggtagttatggcttgactcacacctaactatt

SEQ ID NO: 50693 - DNA, 412 bp, Zea Mays
tagaaatgcaaaatgcattgtcgtataaattgtgggtttgaatatatgtaaatgcaacggttttattggttgttgtatggttcagttgcaatgatttttttgttgcaataagatgtaattaccatggatctatttcgttgggacttcagtagtcgcaacattttcttcttgttgcaacatcattagttacgatattttttgttgttgttataacggttcttaccacaaatattttttatagcaaaaaggtcatgtagccacaagacacattatgttgcaaaatgatcaaatgcaacgaaattatttgcatggcaatacatcttgttgccacgagtcacttgtgtggcactagtgttttgttgccacgaagcatcttgtggtaacaaagccatttgcaacagatttaaacgtg

SEQ ID NO: 50694 - DNA, 675 bp, Zea Mays
tactagccaaattcaagagaaatagactatatatatagtcgtgtactagccatatggtgttttaggtaggtttattccctttagagtcgcttttggcgcataattatttacttattatttcacatgacttagaaaagagaataatcggtctaaggaagtcgatcgatgtgattagcacagatcgatccacaccatcagcatgcatgctagaatttgacgttgaattttatgttgtgcacatatagagtggtttactggtcactgcacaaaccctccttgggttgacaggtcaagccaagtggcacacctataacattgaccgcctccagcactcaaaggtggccgaagccacaatcaacagagacaaatcataggagcagctagcgtatctcccggcaccagatgtgctggccgcctagacgaccgtccactagtttcctacaacgagaggtggcaaccaggcgggaaaatgatgcgcaaaattaaaggaagaggacgaactaggctaggaaatgtgaccccatcatatcatttagctatttctaggggttccgtctctaggccttgtcaccgcgcttgcgtataggactagttgtcagttgtcacggaaacaccgccttttgttgagaagtcgaagcagtagtgtcggtagcagacacatcaattgtgtctgct

SEQ ID NO: 50695 - DNA, 1170 bp, Zea Mays
tttgaaccctgtggattatctagaacatctcatttccaaagttaactaggtgaattttgagatcaattcagttttatatgtcattctttagttgagctcgttcaaaccggttgaaccagttttggcaccggctgaaccggttttacctagtttgtttctagtttttattgaaaaatatttctgtttgcctatccacccgcccccctctaggcaactttcaaaagcaaagaactaaaacctcacctttaggctattatagtctaggccatctgcaagctggcccttcggcattgcggaaagtccacactcgatcttcagctaacctatgttattcatcatcacgcggcacacatcaatctctctactgtctggaagatagtagaggcattcatcttcatcatttccgtcgtaaatgagcgtgtctgtccgatattgtaaatcttcagcataatcttgtactttgacgatctgctcagcagtcaactcccctccagaggcgtgtcggatggtgtattcaggctgcacagttgattcctcttcagctatcgtagttgcctcctcttccaaatcttcaacttgttcttcttatttatccttggatttatcaggaatggtgtaaaccttcgaagctacaatcttatctgaagcagggtcaccttttagagcgtcatctagtttttgcgcaagttcaatttcgacgttctcaacaccaagtgcgctatctctctttggagagggtggagcaaccttcgtctagaaagattcctcagtctttgtgaacttgaggattgctctcaaaatattatccatcctcttacctttccgaggtgtcccctcataagtcggcttcgactctggtcttggccttggtgcaagctgcaagctagccaaaggaatttcatcatggatgggtagctcaactacctcctccttaaccttattctccttctcctgcaatgaaggtaaaactattataaaacacttcaaggtaaactcacatgtctcagagaagattagaggaaaatcattaccttcggtagctcagaagaatcaaccttcgattcgatagccggtgcgggctcggcagcgatctcctcaataagaataattgtcataggcaatcttggctcaataatagccaccctatcttcataataaaccttcgactgc

SEQ ID NO: 50696 - DNA, 411 bp, Zea Mays
ccatcacctggtcattcaccgtctggggacacgatctggtcgaacctcttagaaaggcatccgggggctacacgcatgtcctagtcatgattgataagttcactaagtggatcaaggcatggcctatcatgaggatcacctctgagcaagccataaagttcatcaccaagactatccactgcttcggggtaccaacctcgatcaaaatggacaatggtacacagttcaccaggaacaagttcctagagttctgcgatgaacaataccacatccacatagattgggccattgtggcccaccttcatgcaaatagagaggtcaagcgagctaacgagatgatcatgcatggcctcaagtctcgaattttcaaccatctcaagaaacatggccagcggtggctacatgtgctaa

SEQ ID NO: 50697 - DNA, 385 bp, Zea Mays
gcaagcgcgcagcacgcaaggcttctatgcttggcgtccgctcaaggcttctactgcatggccgcgggcacttggacgtcacaccagtggccatggatggaacacattactcagaaggtgactcggtttcctaattaaaagtgttatttgtgtctttgataggaaaatatattctcagaaaaatgagaagtgtaacccaaaaagacttcatctaaagtttttggtccaagtttgttttttaattaatggtatgatgacgtttgccaaataaccacatgtacgcaaatatgaaatagattggtgtatcccttctaaccttcatatagagttatctcattgttctttgtgggaattatttcattgttggagtgacatcccccaccat

SEQ ID NO: 50698 - DNA, 927 bp, Zea Mays
cgttgtataaaaattggagaacaaagccctctaacatgctttgtcagacgcactgatgggtgttcgtgatggtacagtagctgaacaagatcagattcaatgaacttcgcagccggcaatctccgcgctgcgatccatgctgtccgccacgattcgtgctcagctcgggcaggatattaccgcgaacgtgaaaagattggagggggaatggattgagtcggcttcactatacccacttgcatcagcgacgtggccgcgcgacagacgtcgtcgtgccgccgtttacctcggtcacgacatgtcttaggctattctaccacgtcgtcgcgggttgtggaggataaacatgtgacggccgtaaccttttgccccgtgaacgccacagtggttcgcgccggtgactcaccccctctcttcgaccgccaacttccctcttccaaattcggagccatcactcatggatactataaattgagtggatagctagctccgctagattgttacgaagctagagcaccaatcctagcccccgattacccaccgtagcgcctgaattcggtattcaccccaaatcggttgatgtcgccacagtgagacactccattgtggttagccatccttaggtccgctcctccccttctatgccatgtttaagtatccttgactgttagtgttgctcatcgaccaaactgcttgaacgctaccacattagattgctgggaacacctcgacctgccctgtatgttcgtcgtcgtcgtgggcagaggggattctgggtcagactgactcaattagggcatggactaagttcgcatgggatcggggatgctagcccaacgctaggtttagacagtcgacgccgttcatggcaagtcccagcgaggggatggccggcgggccagcgcgccgccaggggcttgtccggtg

SEQ ID NO: 50699 - DNA, 598 bp, Zea Mays
tgaatagagttttgattgtacagtaactgaagaagatcgtgggtgcagtgcaccttgccgccggcgacccccgcgcttggattcgcgtcggagatgcgattcgtgcccgttggtgcccggataacgcctcggggtgaaaagatcttcaccgtggatgataccaggtgctggccgctgtacccacttgcctcacgaccggtccagatagcctcgccgaagttggccgcctgccacgtgatggccacgtgccttgaagctttaccatgtcgcagtaagccgctttaggtagctggttcgtcgccggtaatcttgccacggtgaaagccacgcatctcttgcgctagtgacctcccctctctccggccgccagtgcgccatctcaaaattagccaacaccaccgatgaaacctataaattgccgccccagtgaactccgctaggtaattgcgcatccaacgcaccagcccttgcctcggattatccaccagagcctcccaatttctcgcttcctccaaatcaatcagatcaccgccgcgtgacatctcgtcgtggccagacgtctacacgttagctcatgctcttctgtgtgatgttctag

SEQ ID NO: 50700 - DNA, 337 bp, Zea Mays
gaaaggatcactcgatgacaacgaaagtagaatatgacaacgaaagtagaatatgaaagtatttgtggaacactcgatctcacctcttacttacccaagctctttctagatctctaggaccatgatggtgtcggtgtgacagcttcgacagaggtggtagagcggtcgaaaggatcacaagtcaaacgtcccggttcaggtttttagtggagctataggaggctgatcaaggtgggctatggtactatcaaccaagtgtgttgacgtgctaaaaagatatgaaattgttgctggaaagattctcaccaaatcaatgtaaactaaaattttcagcaac

SEQ ID NO: 50701 - DNA, 651 bp, Zea Mays
aatgatacttgacatagttgacaatgttggtgagcccagacgtgaaggccacactcttcctctatgtagtagcttcacacaacaccattagcgcgaccatcattcaagaaaaggaagttgacattgaagcacaacaattccctgtccaattcatctctaaagtcctcatcgaatcaaagttcaacatgttggagatggaaaaatagcacaagcaatcgtaatggactctcgcaagcttcatcactactttgaggcaaacaaaataatggtcctcatgggccaaagtctgaatgacatattaaacaatcctgaggcctccacaagaatcaacaaatgggccatggaattgttagagtacatcataaacttcaaaccagaattgcaataaagtctcaactcctcgttaacttcattgtaaactagataggaccaaaaagcctccacatccagcacccaaaacaatatggacagtccactacgacgatgcatagggatactttggagcagacaccaccgaagtcctcaccttgcctttaggggcaaaatacaaatacacaacacatctaagttttaccccaaactccaaaaggtgcaccaataatattgtagagtacaaggccatcatactcgacctttaaaaacttagagccc

SEQ ID NO: 50702 - DNA, 371 bp, Zea Mays
gaattaattgcattcatgtggccaataagccaacaactgtattccaattgcaagctattcagaatttgctaggttatagtttctgctgacttggcggtgtctgcattgaccttttaattttagctatgcaaattgatttctagactatatttctgaagtatgtggattaaattatgatcatactcccccctgaggatttgaaaccataacaatatcacccaatcacatcccatgtattttcctgcaaacactgctagtagtttctatttatttacaggggtgaaagagagagtatgcagttaataagggtaaactatgctgatacctaagatatcactttacttttccgttatgtgtatatggagcgaaaa

SEQ ID NO: 50703 - DNA, 464 bp, Zea Mays
gtggttatgggatagatgtcaaagttattagatatgggtgtgggttggatgtaggttggggttttttgcaattagcgggcttaacttggctatccaaaatattagccaccccctcgataaccaaagatggacaacgctagtcaaggatagataacgtcataacgagattgactcttagagtgtgcacaagatacagaaacattataataaagtgggaatatatagagatcatttttttatttaaataagtctcaaaatggtggtttaaagaatgagttttaaaatgatcctaggagatgctcaatatatggtttatttctagactccgatcctgttgagaaagaaaaaagcagccgagactcgacagctctatagaggagggagacaagtaaatgctatcgcatccaatcgaggaacatcacagccttgaccgacggctccagatgtcccctcccaccacaaga

SEQ ID NO: 50704 - DNA, 437 bp, Zea Mays
tgctaagttcagcaagtgtaagttttggttagatcaagttatatttcttggtcatattttatcagttgaaggagtagccgtggatcctggtaaagtgaaggatattctagaatggaagctgcctacgacggttcatcttgttcgaagttttttgggcatggcatgatattatcatcggttcattcccgatttttcaaaaatctccaatcctattactgagttattaaagaacaatgtgaagtttaattggaccccagaatgtaatgaagcttttgaaaagttaaagaagttgctaaccacggcacccgtgttggcccaacctgacatcgagaagtcctttgatgtctattgtgatgcttcaggtacgggcatcagatgtgtattaatgcaagaaggccgtgtaacagcatatacttcacggtagttgaagagacatg

SEQ ID NO: 50705 - DNA, 463 bp, Zea Mays
cgcatgacaaacatcgcaacaaagggtttagggtctcctttgctcgagggctcggatgctacatctaacagatgcgctcgcgcccccttacttcggtcgtaaacaggcgaccaagtccctgtcgagcagcctcctgaggcggaatagatgaccaaatccttgcctagcaacattacgaggcagagcgggcgaccaagtctatgtcgagcagcctcgcgaggcagaacggacgaccaaacccctgccgagcaaccttgcaaggctgggcgaccaagtccctgccgagcaacctcaccagagggggcgagcaaccaagtcccgcgctagtatgactagcgtaagtgaagaccgacccaatgatgcgagtccagatcagcaagacaagatgggtcatcaccaaactacgactgggccttgggtatagcgtcgaaaggtcctcaacggacgtcagacgacaccttgc

SEQ ID NO: 50706 - DNA, 561 bp, Zea Mays
gacccgacagatggtctccggccacggatagcatcacaagcacatgcataccatgtcggtaggaggcacagtgaggcagatcgcggcatgagcggcaccacggcaaaagttaccaagccacggtggccgccggtgaagttccccgctaggcttgggagatggcgccacgtgcaggttattccttcccagcgttatccacaccataccgcgcgcgaatcagaaaggcgacgacacaaatctacgggcagaaaggtcgtcgacggtgaggttgtcgtgctggcagtctgatctggttcaggcactgtaccatgggagaactcatttagtgcacctgacagccaagttctagggcagtttttctcgaaaattttcatggcaacctacccaaacctctacagcaaagttgtagagctgcaaaccagctacaattttttcatagcaaccttggtcaaattcctaataaatcaagcttgaattcttgcccaaagtctctatagttacactgtcagtctgaaattcagattttcccagcctgacagtctgactttgagtgtgtttttc

SEQ ID NO: 50707 - DNA, 388 bp, Zea Mays
atagtcataccaactttccgtagaagcaggacatgaagcttccataagcttcatgtttcaagatggtaaaaccgatacaaaaagttggaaatagtgatacctcaaagttggctcaaactaattactaatcctaaatatgaaaaatcaagacaaccaaatatgaaagaactaatcactactagaggaggtggtgagcaactgagcacacactatgataaaagttcttttcacaatcaagacaaccaaatgtgtattagaggtggtggtgaacacatactatgataaaagttcttttcactttcaagtcctgttctatatgctaacctctgaaagttggtctattgactgaactttttttggtcccttagttccatctcaactgtggttg

SEQ ID NO: 50708 - DNA, 469 bp, Zea Mays
ggtgacccgacgagtgccaaccttgaggatgatattgagagctgtggtggcactagagtcggtggacgtgtgtctgacatggatgaagaggatgaagaggaaagttcaccctttggttcgcaagaatcgtcgtagcaaaaacagcaacgatgtctcaattcaggctctgtcaaggctggttaatctttagaggttgacgatgtctgccattgatcatgcactggaggagattatcctagaagatcttttattggaacttcctcaaactgggactgctggcatccgtgcagaagtcctagatgacattccctcagctagtaatctagttgggcaagaaataacccggacagtttcccatgcttcttcgacctttgagggcggcctaatccataaggacaccttggttcctgatgttacatgcaaaggttacctggctcctgtgggtaagattgaggatactttagccccc

SEQ ID NO: 50709 - DNA, 847 bp, Zea Mays
caaggcatgtactgtgcgcccccgcgtacagagtcaggcgcgccaccactgcgtttgggggccagtcaagcctggtcgtcggatgacctcaataccggactcccagcagtgacctgaatacccagaaggactggacagtacgccataccgggtgtatctctacaacatgctgaaggatcaaggatgacgtagtgctcatgatgacggggaggagtcgcgttttgtacgaccgtgccgtgagactgatccgtgggaccccacacgcactatcatgaagacatcagcaacagactcgctacagggacccgtgtggcggatgaacaggacggagcgtcttaccagaggtacggcaacgcacgaccctacggacgacgtcgggaggtccacgccacccaaaggcagcaagccaaggtccctcccagtagaatatgagatcctactgtaaagttctcccttgaattataaaagggcagggcaaccttccttctacacacaatcacacaagttgtaacatgacatactgcaattccatgatcaacactacactggactagggccccgacctgaaccagtataaccccgtgtcccaagttcatcgttcgagtccgagcgactcaccattcgaagcgagtctgcgctagcacttgccgaacaaaaatctcattgtccttcggtttttgaaaccatgacaagtcccatacctcccctgctgttatagtctgccctctgctgttaccattgatcgccggcccccagccggtgactgtcccttcctacgcagccaagggtcggcgcccaagactctcgttacgtccccatcgcaggggttgtaacagttgtactagta

SEQ ID NO: 50710 - DNA, 358 bp, Zea Mays
ctaaaatccttattggtacctcttgatatctgagatcgtcctgtagatcaattgtttctggagtcacttgttcttctggtatccttaggcatttcttaagctgggacacatgaaacacatcatgcacatctgacatttcttgaggtaactgtagcttgtaggccactgctcctactttcttgatgatcagaaaagggccaatgtaacatggggctaacttcccacgcacttggaatctgcgtgtgccacagattggagaaaccttgagatatacatgatccccaacactaaagcttagggaacgccttcttttatcagcatagcttttctggagggactgggctgctcttagattctc

SEQ ID NO: 50711 - DNA, 390 bp, Zea Mays
tctcgggccacgtgctggagatgcagcggcttggttactttggtaacggtgtcgagcaggccccgggtacagaggaagtcctcgagcctgaaggcgagttggtagtttttgaggccttttttgctgccgatcttcgcctcccgacacatcggttcgtggtggaggtgttgcgaaggtttgaggtgcaagtccaccagttgacgccgaacgcagtggtggcgcttgcgaagtatgtctgggcagttgcttcctatggcagacagccgtctgtggaggtcttcaccaagaattattgcctgcattggcagaaggcgaagatagggaataagatagcccaatttggatcgtgcaccttcacgccgaggactgggaagacttcggctgaggttg

SEQ ID NO: 50712 - DNA, 690 bp, Zea Mays
cctaaaggttggcatcaggcgagtcatcattccgtatcccgcctgaggttggcctcgtgcgaggcgtgagttcgtctctcgcccgaggttggacttgagcaaatcgtgactacgtctcccgcccgaggttggtcttggttgagtcgtgactacatctcccacccggtgaaggccttgggcgagtcgtgaccatcctattcgatgttggtcggcggagttggttgtcagagagttggtcagcagatccaccttgtagagtttgtaggcggagttcggcaccttctggagcatcacccgaaatgccctcggccgagtcagaaatgtgctacttgtccggggttggccttgggcgatttgtgactatttctcccactcgagattagcctttaggtgagtcgtgactgcatctcccgcccatggttggcctcaagcgagacatgactgtgtctcccactcggggatggcctcgggcgagtcggaaatgcgctgcttgttcagggttggccttgggcgagtcgtgactatatctcccgctcgaggttggcctcgggcgagtcatgactgcgtctcctgcccgaggatggcctcggacgagttggaaatgcgctgcttgtccggggttggcatctcctgacgttcttgtcgcatttgcgcttgcatttccatcatggtgtttgccaattgctgcag

SEQ ID NO: 50713 - DNA, 435 bp, Zea Mays
caaagaacagaaagtcttggagacttataagcattggttgtggtttaggtgaaggcaaaggcataacatatgttttgttttatgccggtcaccaggtgtttagataaaaaattgttcgggttaataggctaaatagtcatactataaaggaggggtttatggctttggtatgtataaaacttagtgcctcataaagcatatagtagttgtgtttgcatgaggattaacaacgtttccggtttcgagagttaaaatcctttcaaaaacgtgtttgaaaaatgactaagtattgaggacggtggaccgtctggatcaggaggccggaacgtttgcgatccagccagaggggtctgaagtgtgttcacttcagactggtccagtatgtttgtattgcagaccgttcaggccttgggttcgaaccgtccgcagtcctga

SEQ ID NO: 50714 - DNA, 479 bp, Zea Mays
gtgagttatagaacgactaatgcctgtagtgagttatagaaagactgtgcaactagagaatgggcaacacattccctcaataaggaagaatttaattagtggttgtcggaggcgtatttcccccagccgggtggtggaatgcacccgcccttgatcctctgataaggagggggcttagaggtttgcctcaccaagtagattaactaaagaacacaagggtttagagtggttcgggccgccagagcgtaataccctacatcaactgtgagttgtattgcttgagagcttgagtgtcgcgggtctggatgtgagtcgaccgcccctctgcatcgctagtgccctctgaaaggatcacgatgcccaagagggggggggggggtgaattgggcttttctaaaaatcaacactaattaaaagctaagcaagagctaagcaagagcccaacttcaccccaacaactagcactaagataataatac

SEQ ID NO: 50715 - DNA, 1334 bp, Zea Mays
gttggttgcagacgcagttcgcgggtggcgccagcttggagccgcgctgcttgcgttgcgcctcagccggtcaaggcgtacgtttctacagcgctttctctactcattcaatgtgcccggatgtcagttgcactgctttttagcagcgctaaacttttgaattcagagcgtggtttcgtcgaagcacaggtgatgagagaaagggggaccggtggggaaaataataaaaaaacttgtgttaaatatagaatggtatgtacgttaaagatagaaagttagatataaagttgtatacgttaaaaatagaaagttacatatatttatataatagaaaagagttatgctcttaccactatataatccatcagtttaaactttgcaaaaatcacacaaccaaatcaccccatactcattatccccactaaattcacctaacatattgtactcaaacttaacacactatcaaaatcaacggtccagatagttgaataactcatctcccttccccatgaactactttatatgaatcatccctcatcccttcccttcccttcccttcccttccccctctcctcacttgctccaccgccatcatcgatcatctcctcgggatcgtgtgtaacacatgctatatagtagtcatatgaaagtttagggttctgtcacttaatttaggcactgttgaattcagagcgttgtttcgtggaagcagaggtgatgaggggatgggggaccggccgggaaaataataataataataaaacttgcgttaaatatagaatggtatgtacgtgaaagatagaaagttagatataaagttgtatacgttaaagatagaaagttacacatatttatataatagaaaagagttatgctcttaccactatataatccatcagtttaaactttgcaaaaatcacacaaccaaatcaccccatactcattatccccactaaattcacctaacatattgtactcaaacttaacacactatcaaaatcaacggtccagatagttgaataactcatctcccttccccatgaactactttatatgaatcatccctcatcccttcccttcccttcccttcccttccccctctcctcacttgctccaccgccatcatcgatcatctcctcgggatcgtgtgtaacacatgctatatagtagtcatatgaaagtttagggttctgtcacttaatttaggcactgttgaattcggagcgttgtttcgcggaagcagaggtgatgaggggatgggggatcggccgggaaaataataataataataaaacttgcgttaaatatagaatggtatgtacgtgaaagataga

SEQ ID NO: 50716 - DNA, 610 bp, Zea Mays
ggaaatttcttcggctattgatggaagagacgggggacagaaaaagcgacgtatgatgaacatactccatgcaattgagcaaaacccacctctagcttcggcagacaagactatcaaatctactgatgctgaagtgccattgcaactaaaggcgaagatctcacaaccaccatgtccgaaattgacaagattatatcagacttggctgtggaaaaggaggtggccatagaagtgtcagacaaagggaagaaggctaaggaaatctcttcggaagaagcaaactttgacctacgacacctgggtggccaacagctttccgaagaagatatggcagagttgaaggattttgctatcaactgcggctactagccaaggtccatgctctttggtggggtggatgaagaagttataggatgcatccgtgatggtgccggtgcaaaaattataggcactctgtcaaagagcatcagattcccaaagcttgaaagggatatcagctgttacaggcgccagcatatcatagggagcctgttttattccaactttaaagtaagtactctcttttaagttactcctgatgtgtctgcattagcttaaatattctaagttt

SEQ ID NO: 50717 - DNA, 596 bp, Zea Mays
agccaatctagaccgttggcacatggatcaaccgtcaaggttttacgcgaccattatctaatcccatacacccgatctggaatcaacggctacggttgcatcatcctaaaccagcatacagatgagatctcgaccgtctatcccaggatggacggtgcagagggcttcatcatccaccatgagacaacgactgagcacggcgtggcacaagctcgtgacggcggcgttcatgccggcgagttccaaatcgaagtcccctagcgctatttttatgcggtttagggcaccgcgaggagcagagggaggcaaagctaggggtgggattataccggagtagtaggccgcgaaggcacccgcccacggcaggatgcggcctagagctatccgccgagctccggtgagcaattgctccaatcccgttgacccagtgcgcgattacccacaggagcacgtttcccccaggtgttgcgcacagctctgaaccgatcccagtcataggtcgacaccgacgatgaagacgcacggcggcggcaccaacttctttgtttgcgtccgcggtggagtttgtgtgcgggcgctggttcaacaggggcgag

SEQ ID NO: 50718 - DNA, 320 bp, Zea Mays
cgaaattcggagcggacgcgtagatctcgcaacctccatgcgagggcaacggacttggttgcgcgaagctgggggaaagagctggcaaacgggccccacaatccagtgagtcacgcgcgcggtcgtgggatgcggagtagcggttcggccaacgcggcagagggagcggctgacggggcgggcccgccggtcagtgcatagagagggaccaagcgtggtcgatgcgggattgagggaaggggtcgcgcagtggaaacctgtccagtggggaccaccaggcagccgcagagagggaaagaagcgcgggagctatgtgggcc

SEQ ID NO: 50719 - DNA, 523 bp, Zea Mays
gacggcggagggcgccttgggggcggatgccgaggtattcttggggccattcaccgagttggagtaggcgggtcctggtggcttcagctgtggacagttgttcttgaagtgacttggatcaccgcagtgccaacatgcatttgccggaggttggttgcttgccactgagggggaatggaaagagctctgactctgctggctgaatcgtgacggagtgggtccagctggtctactgaagttgggccccttgggtggaaacccaaatgatcgagtcttctggtgccggtcctgctgctgtgcccggagaacctggaactttcttttgagatgtcctttttcttcctccttagccctttcaacttgcatggccttgttggaaaggtgagagaaattgaggaagtcttggctagccagaattgtcttgagttctggcctgagtcccttcaggaaacgggccatcttcttgctctcggtgctgacatcatctggcgcgtagcgggctaactcagtgaacttgtgcaca

SEQ ID NO: 50720 - DNA, 1071 bp, Zea Mays
agtttctacaaagtatacgactcctacatttccactcctatgaacatcagaatgtaatttgaatgcgtcgcaagctctgctccgaatcaccggcttgctagtcttacatgtgcatgaaggactcttgacggtgggtagaagatagtctcataattgatgatgtgtcacaagtttaaagtattggggagtaaattattagcgaactgctgtgcgaagataagattttggggaaaaagttttttagcggaacccctaataaatagtttttgggaacaattgtctaggggactcttggagttgctctaatacctacctctccccgcgcgtaaacagaaaaataattgacacgatctacaacaaccccgcctgaatcgatctccttcatgattttctctcgttccttgtcaatagatcaatctgcgcagccggggtagctacaacgtcttcctcctccctctgtaattcctagccagccaccacgtcttcctcctcccctctataatacctaggtcaaagggagaaggggtggccatcccccatcccttcccttccaggtcgcgaccatcttctcaccttgggaaccacattcacctcctcccctttgtaattcttaggtcaaacagagcaagggtggccatcccccatcacgtcccttccaggtgaactcgttttcctgccccttcttgattcttttgttcagatatctccgatggtctttcctatgcatccataatcatgtagtaaatcatgtagtagggcgttggttgaactgctcctcctaccaatgataacaatcccagaggcaccgactagatgcattcgtgccaattcatccaggtcgagtcccagctttatcatcgattcgcgctggccacaggctagcaaaatcgtacgacgtgctcatctcgcagccaccagctccacactttcccccgtatctggtggtacgaatgttcaagcaaaacaaaaatgctatgaattggcccagaattgttagaagtggtagctgcaatgatcttccctccctagaacaacaccccctcatccgatgtgcccctaatttatattcta

SEQ ID NO: 50721 - DNA, 1157 bp, Zea Mays
cgaggcgtcagtcggtcgcgctccagcagtcctaagaacaacgagcacttgggccctttcttcttgcaactaatccaggtccaaccccgggttggtgaggtggacaatggatcctactgcattggaactgctatgacggtcggccgaggcggaggcattggtgcaaccacacgtctaggtggtgcagcagcagccggacatgacacacggatgagtcgggcccctaagtgcaggtgtgggccgcacaaggctcaattcgtgactgaatgaggtttagccatgaccgtctccagggccgccctggatctcaacaagggcttcttctctgtcggggcgatggtgtgggacaacggggcctccttccccacactcgctacgtggtgcagggcacccctttggtccatgatgcgtgagaggcatccaaagtggaaaacatctccgatgatgaagctgaagacggtgttgaaaacaatggccctgtagctatcgtatatgaatgttgcgctctctgcctagcgcgccagcaatcggagtttggtaccaacgtcacactacggggtataccacatagtgcttttgggaggatgatgaggtcgatcgcaactcgatgggtcgtgtgaggcacgatggaacacaataaactatacaggttcggaccgctcaagcgcataataccctacgtcctataagtttgtggatgtgtattgctcggtgattagaggttacaaagggttcatgttgtagaagatgactatgcttctgaggtctctctcattttcgtaggggctcctcctctaccttattcccgaccgagaaagagttacaacgcatggcccgatacatgatcttcgtccacccgcctctgctagagtcgtaccgagtttttcggtggtcagcgagtcctcaagagatttctacgttctctgcatgtgtcgaacacagtctaggtttcttcctcacccgcttccgattttgcccgactaaagtccccaaggggaccatgtacctaacccactaggtgcctttcaggcggcgtagagagcataaccaatccgtggtgattcgggggatatctaccccccacactcttaacacatgggtagaatctaaacccgtcttgtcccaaaggatgggattatgttaatctctttggtaaa

SEQ ID NO: 50722 - DNA, 651 bp, Zea Mays
tccatataggtcgcattcctttgctgattctggggaatacgaacctcagcctgattattctgatgatgggcgagttcccgtagaacccttgcattgtccacagtggcatttaccagcgcaacaatggcgtctaccagggtaggtggaattggcggtggtggaggattgaaattagcttctgcatcaccacacgatgttccatccccttccaaatcttaagtacgcataagcatctgaagtaaaacaaaattcatgaacatacattcataaccacgaaatatattatagagaattagtacatggagcattatttattacaataccaaaattggcatagtttacaaccctatgcctacaacagagatcgcgtcatcaatacacctgtcacactaaccctccgtatcagtagctacctccgaaacatcactaccacgtggggtctcaccactcagtacaagcataggagctgcttctatgtctaagtcggcgtcgggctcacccccatctgctaacaccacaccaccttctgcctccgcagctccaggcacatcattggggtgcagctagtagtagagctgatggacttcctcatgtagctcatgggaatagtcctctagatcattgtaggctaacaccaaatcctggaaacgg

SEQ ID NO: 50723 - DNA, 328 bp, Zea Mays
cgccatcccttgatgctgtccttgaggggatatcaaggtattccactttcctcccatggcgaagctccaaactggcaccaccgacaagctgatgctgtcctccagccataccgggccgacagtggtaaaggtacctctagagtccaaagtgggggagaatgccaagaaaggcctcgcacagatgtacaaaaatgtcaacttgaagaatggatttgggatttaaatgtgtaagatttaaatcgtagaaatcaaggagaccgtggaagaatggagaaacatgaagagcaagccctcggatgaggaacgacacaaaaacgacggcctcgtg

SEQ ID NO: 50724 - DNA, 662 bp, Zea Mays
atttcactcgacatgcaagcataagtccgcatagaatttcttttttaacccttttctcatttctttattctttatgccggctgcttcatcacgacatgtatagtttgttacgagcgaatcaaatttgttaaccctccgtgcggtttcaacggggctcattgcgattaggagcaggttgttgagagctagcgctggagtataaataataacctgctctctcatttcatcaagcaacggagtcaccatctggccgagcgtgccccagaatcgacgacgtcggtgcccaagccctccaagtaccggggccatgaccagcttgaactggtccatggtgacctctgcggcccgatctcgccaccaacatcggccgggaatgcctacttcctgttactcgtggatgatatgagtcgctatatgtggctcacccttctgcgttccaaggcggatgcaccggcagcgatcatgtcgtttcaagcccgagttgagcgtgagactgggaagaaactgaaggtgctccacactggcaatggtggtgaattcacctctgtccaatttggtgaatattgtgcagacgaaggcattcaacggcactactcagcatcgtacacgccacaacaaaatggcattgtagagcgccggaaccagatggtcgtgaacatggc

SEQ ID NO: 50725 - DNA, 772 bp, Zea Mays
atcgagtaccgcttgtttggccaactacaatattagctatttcgtgacttttccacatgtatataacgcgtgcgatagcctctcccgaaacggatcctctactgtcactgcagagaccttataacggcaagtgggctttggtacccaccagccccacctgacatccccaatttgccaccccaaatggccgagggtttttgttttgtcacttggcaatgagctaaatttcaataacgatggtatcatttcgtagcgtcgtcagatgtggttagcatataggtgtcgggccggtgtaccatgtcatccatatggcttgtcggacgagaaaactttgatgatgagcctgtactattcctagcttcggcaacatgcgcggtcttctaaaactttttcctcttttatagactacaacaaggacgctgttttgcgtaaattgaatttttcgcccaaacgaccaacaattttttttatgtgtgtgtgggtgtgggaaggggggttacagagacgttagctgcgctcacgcactaatatccttttgttttatctccccgatatgatccatctaatcttttgcgtgtctctgtttatcaaacatcttcacctagacttcaggtgtcactttcgaactatgtttctccaatttgatatgtgagcacggatctatagctgttaaaatatataaaggctcgtgacagtcacagaactatagtatacctctgcacgatacatgttgatttcttttgataggaactacgactcaaaaaagatcaag

SEQ ID NO: 50726 - DNA, 406 bp, Zea Mays
gctctagattcaagtccatgaccattgaccctaagggacattgccactaatgttgctgatagatgacacatgagctcttgttgatacatttgagaagccccatttatcttggttgtttggtcatctcagcgtcctgctacagttcatcggctagaagctagtgattatgtttactcgtgtatctctgttgattcttttggacccgcgcctccttccacgtctttgatcatgtccaatttgacctcggctatttcggtgacaaaaagggcaagtttgaccatttgcttgctctcattatgactgtctggtgatgttagagtatatttggcccgttaggattgtaaattcaatgtcgccatatgtatcccaggagatgttttgcccccctaagtttctatactctatg

SEQ ID NO: 50727 - DNA, 553 bp, Zea Mays
tgttcatattccgtggttgttacatacaaaagcctcgttttgacaaggccaattggaatgaagagaacacacaaatattatgtgatttatgtgttgaccaaattagagctgggaactgtctaaatggtacaatgacaaccagaggatacaacctgataaaggaggaattcttttctaagacatgacttagacatgacaccaaacaatttaagaatatatggactcagtgcaaggccttgtactctttttggttgtttcttaacaatcaaagtgggttaggaagaatggctgatggtgtagttatagcttcagattcattctggaagactcacacggaggttagtgcacttgtgtcatatatctctgtacatgaagcccttagaactgatagctaaaatgtgtgttaccttttattgcagaaaagaaaagagtgcaggaagtttcaacatgtgattcctacgtacatggaacaattagcagaaatgttccatggaattgttgttgatgggtctagttcttgtatccctggtgatgtacacagaccatcacaaga

SEQ ID NO: 50728 - DNA, 667 bp, Zea Mays
tatatagtcagccttcccaaagctccaccatttctctcgagcagaacaggccctcctttgcaatcacacccacgctctttggatagtcacaccaggcatcgtttgccacgtgcagtgttggtaagaaccttgtaagagcggggtaagacgctttcataacttcttttccaccaccacaccctccctgagagatagttgtagggtaacactatttatttgtttgttgccttttgcctctgttttatgctaacaatgacaggaccaaagaaccaaacatacaaggagaagggtcctaagcttaacgacgatggttgtgtctctcagatggaattgaaggagatgatgcacgcgatgactgaagctttcaaaaaataccaggactctacggcgaaatcctataagcatcttgatagatgagttgctgaacttgttacacacatggacatgctggagattcgtcccccacaacaagatccagccccagttgctagtgcagtagtgttctctcctgcggaggacgatgacgacgatgacagagatgttgatgcatcgctgcgacgatgccttgcacataatcgacaaggtatgggaggtaatggtagacgtcgttattataatcatgaaatagacaatgatccatatgctaagattaagttatctatttcac

SEQ ID NO: 50729 - DNA, 339 bp, Zea Mays
gccggtaggtccttggcctagccgaactgtcctacgcgacatgcttcaattctcctctacgtaattaagcggtatgcatcacgttgaggatggaatcttatattgctattcagatagaaaaataaatagcgccggggccatgctgcgcgctagcacccacgccgagggcccgcttgtcactgctggcgtatatcttgcctgcgtgcacaatacaggagcttaaagttgaataccccgagagggcgatgattgggttcaccatttgccgcactgcatgcagtcttggctctgagctgtgcgacgccataggttagatcaccagtgcagccaccatatgag

SEQ ID NO: 50730 - DNA, 452 bp, Zea Mays
cgtggacatggctatggcgagtccaccgtcgagcgcgccatcgactgtacctggatgtctcgccgaggaagacgattgatcgaccgttgatccagtgatcgatggctgtgaccaggcgtacacatcgtatggatgagagtgaatctgtgcctttcgtgcataatcggacgacattagttaggtccgaagtcataaaatatgggtcgctggattgatcacgactggtgtagatgcggtcataggtgttttaaatcgtggccattgggtttagatccgatggctatcagtgcgtaccggttcgagggaacctaaatctgatcaccgccatcggttgttgatggggcggaccagaactcaccataccccttcgccgtgtcgtttttgcataagaggccttctgaaattagaaaataaacccgcagtccacatagcagtgatctaagtctagggat

SEQ ID NO: 50731 - DNA, 604 bp, Zea Mays
atgagaatattgaaagttttctacttcgagcatagcaatcttgtcatttttggatttggcatcttttagtttcttgtctttctcctcagtgacattgtgaagcctgaattgactttcaattaggtcactggctagagtgtctaacatatcttccttttattcattcttatgttgaagctcaatgattttgaaacagagattgtttattgctatgtgggcactgcttgcttcgatatccttctatgacttcaacgccatacttaatatgagcccctacccattacgaaaatagttaagcacattaccccaatcgaggtatccttgtctatgagctgaaataaaaaataaaatatttacctttaagcttgtataagccaggcagtctgtgaggtctcatcagggcatcatagataagccatcctcaagctttgggtacccaatgttgtccatcatatattagcacacacaccaatctccctactgttcggacaatagtataggaaatcgtcgttgccgccataaaaaagttgctcgtgttgggtaccctagaccttcggaataggattgaacttcaacaatctgctcttgagttagctccttaccg

SEQ ID NO: 50732 - DNA, 595 bp, Zea Mays
cgggagtcctgggaggtcttcgacttcgcctcccgccacataaaaccaataatcataccagttgccccacttgttgcgggcacagggaactagctccacaacttccgccgaagtcttcccagtcctcggcgtaaaggtgcatgatccaaactgtgcaatcttgcttctaatttttctcttctgccagtgcagacaataattcttggcgaagacctctacggagggctgaccgccatacgaagtcaccgcccagacatacttcgcaagagccaccacgacattatgagtcaattggttgatctgcacgtcatacctctgcaagacctccgccacaaaatgatgtgcaggtaggcgaaggccggtggtaaagaatgcctcgaacacaactatctccccctctggctcaggaatctcttctgctcctggaactcgtccaactccattcccaaaataccccaaccgctgcatgtcttgcacgcgaaccgaggagatcctcaaaacgctgaactccaccgtgtggcctgggtgcagctccaccaccgccaaatcgctcatggtatcctcggacgatgattcgcccaacggcgtattcgca

SEQ ID NO: 50733 - DNA, 585 bp, Zea Mays
catagtaaaccattgcactttgatgttgaggattattcttggtggaatcacaaaatgaaaggccatctatactcactccacccaagtatttggtaagttgttgaatcaggaatgaagatctctgatagcgatgatgaggagtacaacccggtagaagcggagcaaatcatccaccgcaacacccaatccaccacagtattacttgtttccttgtgtagggaagaatatagaaaggtgaacagtttggagagagacaaggacatatgggatacgctcaaagcagtgcacgaaggtgacaagacacaaagatagagctcctagaaggggatcttgaaagatttcacatgctcaagagagaaggaacacaagatatgtataactaactcaaagcaatggtgaatcaaatccgcaacctcaggagaagaagtcgatagaccatgaagttgtcaatctcatgaggtcctttacttctgtaatgctacagttgtatctttcatttgtgagaatcctaagtataaaaagatgttgcccaaggaggttcttgggaagttcctaaaccacaatatgatgataaggcactccaag

SEQ ID NO: 50734 - DNA, 411 bp, Zea Mays
cttttttgagaaccgcaaggttccagtcttttgacttatcataaggacagttgtatttcccccaatctatactaggagtgagtgatatatcatatatgcatagctgtacatttttttgtatgttcaaacttcaaagtatatgcccacagcccaagctatgtaatgctagacctacagatttggttagaggtgtgctaggaggcagctgcttggtctcgtgcatgggtgtgaaactgtgaatgtcatgagtatgctgtggatcagtaaactgtgtaaatatggtttgtgcccaacgatattttgtctaaaatagttatcttgttaacttttctctttagatatggctgcaactgtgtaaatggtttgtgcccaacgatattttgtctaaaatagttatcttgttaacttttc

SEQ ID NO: 50735 - DNA, 374 bp, Zea Mays
gttggactgtcagactgcctgaggtctgaagttcagactgacagtgttttgagatgaactttgagctcgattttgaaggggatccagtgactttttgtgagtacacattatagcaaagatatagatggatgatagcactacaactttgctgcagatcattgggtatgttgccatgaaaatttgtgagcaaatcgagcctaaactatggctgtcaggttgactaaatactgcagcccatggtacagtgaccgttgaggatcagatcgccagccccagaaaagatctcaccggcagtggctttccgccgtgattcacgtcgccggcgtcatgattcgcgccctgggtaagtggataacgtcgtaaggttaaaagat

SEQ ID NO: 50736 - DNA, 1000 bp, Zea Mays
gtatatatcatgttgctgctggatcattcaagtttcagtctgatgatattagatctattattattatatagcattatgtatgaaaaaaaaaactcccgcgcatgcacaatttagcagttcatccacacatagggcaaaaaagtaagcgtctgaataacctgtatggttgtatgttgtacgatgtacagccttcctccatctgctactatacaatcacgtgctctccacaatgtattacaatctcaattgccgttacttggttggccggctccagatcaaaatattcaacaaaacctacattatctttttgcgtgctgcgtggaaactgaatggcacatgcatgacggcatgatgccccaacatacgtacatccaacattattagttgcattgcattgcctttcagctgaatttgttatccgcatgtggcgtacactagtctctccccccacccacacacacacacacacacagaatttcagtgaagcagcattgtatagtctctgactgtatacgatggttagattaacctgcaggctgcagtggttggaggcatggatgaaacggaatagtttgcgagactgttttctggtgtatgattgcttggtgtacagtgaatgattcgtaataagaggagaggaaaaaaaacacctggaatcaatggactgttttttacaacgatggcacacctaatgaccctaccaaaggatgtgcacttcctgtatataataactagaactctagaaggatacatgcatgtgcattgcatgcatagttggacctacatgttatatataggttagggtcaaaactaggcaacctaatggtatgatcagatagaaaattataactaatggagtaccggacagtgttataagacgatgggatggccaaacaaaagcataattagtcatgtagacttcttgtattttgatagacttaaaatagtaattacatctagcaattggtgagggatgaagtggattttttttttgcatgag

SEQ ID NO: 50737 - DNA, 510 bp, Zea Mays
cggaaattggtggagatgaagagacggatggagggcacgatgggcttgaggtgctgagcctcgggtgacgagagaagatggacacgaggagacggttgggagcctgaagatgcagacaatgagttgcatgggaattgagaaagttatggcagcggaagatggacacgaggagtcggttgggagcctggagatgcagtcaacgagttgcatgggaattgagaaatttacggcggaggacgaggggacgttgcttatccctgaaactgtcggccagaaggggacgttgccaattttgggcgccttaatacaacctatatcacattgatccccaaaaaagacggagctgataatattaaagatttcaggcctataagtttggtgcacagttttgccaagctggtcaccaaaatccttgctaatagattggccagcaagctcaatgtgatggtgtcaccgaatcagagcacatttataaaagggagattcattcaagacaatttcatgctggtt

SEQ ID NO: 50738 - DNA, 530 bp, Zea Mays
tctgaatggcgttctaatggtacagtagactgacaaagatcctaggtacgctgcacctcgccgccggtgaccctcgcgccgtgatctgcaccgtcgccatgatttgtgctctctagcgaggagataatcatggcagagtaaagatcttggcaccggataggctcggacccggtcgactgtgagctcaccgaacccacttggactgcggctggccgggatgatcctcaccggcgttagccgcttaacgatcgtgcgccacgcgtcttggaagcttagcacgtcacagtgaacctgtgtagcaagcccgtccatcgccagaggacttgccactgtgaaagccatgaatcccttgtgccagtaaccttccttttctctagctgccagcacgccattccaaaattaggagtcaccgcccttggactctataaattgagcataccactagctcggttaggtaatcacgaagccaaagcacccgctcctgccatcgattagccaccatagctctctaattcctcttttcccccaaa

SEQ ID NO: 50739 - DNA, 367 bp, Zea Mays
tgaaccaaaactgagcatgttcaccttgatctctatctcaaaactctaagctcccgttgaccaaaatgtgtctaactaacccctccacctcataccagaagatggcattgggacgcgtgatctggacatgtcaaacccaggatcttctctctatgctcggcagtgagacaaacccaacttcacccctccatatttcttgatccagtcagcgaaacctgcaagcctccacacacaaacgacaaaggaatttcaggggaagagatctctcaatgggatcatggccataatctcaaagatttggagccaatccgcgcttgaacacgacctctctctgcgctgcctcgtgctcgacgttgtgccaaacgcc

SEQ ID NO: 50740 - DNA, 953 bp, Zea Mays
aaacttccaatcgacgtagtcggatgcggtccaggctccttaaggtggcgatcgcctctcatcggtctatgcttattgtaaagctgaaggcttatgctataagtgtgggttgccatttcataaaggtcaagaatgcccaaattcagttcagttacatcttgtggaagacctatggaatcactttcagtttcctgttgatgacactacgccgctacctgcacaatcagaggaactccattgtctgcactggttttctttagaattggttggcattcctgtctttaagtccatgagatttgtgggggacgttagtggtctatccatccttattttgcttgattttggcagttctgcatcctttgtcagttcagtcatggctgattaattgccctttgtttcaactccttgctccccaattgtggttcaagtggccaacggtgacaacatgccatgtgctcgtgaactggtgaatgtggtttggcccattcaaggacgccagtttgtttctactataaggttttggctctatagcactatgacataatcattgcgatggattggctctcgtctaataatcctatgattgtgcattaggctgataagtggttgacactttccaaggacgaagtctttgtcaagttgtatggtgtcaagacttctaatcgtggggcttttgttcaactttgcaacattgttgacttaactgatgaagataggttggttgccaggatcttcccctggagttgagcatctcattgacaagtattctatggtgtttgcacttcctcatgggctgccacctacacgagattgtgaccatcaaatttcactaattttgggggctcgaccggtgcaaatgtgaccatatcgatacactcttgtcccccaaaatgaaatagaatctcaagtgtctgacatgttagcttctggactcattcaacacagcacaagcc

SEQ ID NO: 50741 - DNA, 357 bp, Zea Mays
gtcaaattggaataggatctagtgctcgattgaggatagttactatagtcgatttgtagctggttggttgagctacaactttgttaaagacggattagtaagtattcacatgaaaatttgagatctaggctctacaaagtggtctgtcaagatgactaaatgagaaactgatggtacagtatcgaaaatatcccaggttcagatcatctcaccgccggagaccacgtgcaaggattcgcgcctgacgctacgattagtgctcaacggagtacagatagttgctcgggtagtaaatatcgccttgtggatgaacttgagccacttttcactccggccgccgtgtccgcctgactcacg

SEQ ID NO: 50742 - DNA, 1149 bp, Zea Mays
ccgcgcaagaacgagagatcttccactatctcaatgtgattgcgcaatgtgtagacatggccctttttcagatctgatagaacatcataattaacaccaacaagcggtaaaggggtggaaaccggagggggttccctgtcaggttaagtgactgtaagccaaacttccttagggatttcacaaggatcagagcaccaggcccagaggtcaaaggatctcgtgcgctctctgcgcctagcacgctcttgaacatagtggatggcacagctcttccctagtacccttgcaaccacatcctccccccagcagtgaacaggaacaccttcaactcgaaccttaactctaaactcgaagaaagtctttctagcataactatcttcggaccaatccccaaaatgaaagacccgaccacgatacgagaccgtattacggtcaagagcccactgctttgatctcgaatcagagaaaatgatgaagaattgttcagggaaatgcttgacaatttggtactgaccatgctgtagattgaacttttccctgagcatgtcacctgcctgaaggctgtccacttcatggttgttgctgtcgaaggagcaaaccactgccttgttgatcatctcatccctacgacgcctgattgagccggttgctgcaacaacgcagtgagcatgagcaggcctccccctcgggtctcctgggtagcgagcttccatgttctggccttgttgtacaacttgcctgaaggttttcttgagtgtgagaggtgagaagccaggcgcagttcctagttgcatcccttgccccttatgaagtggaatggaaccaggagcgggctgctggtaggtagaactgtaaatgcctgcgctctgcgatgaatgctttacagatatgccgcagctacgagaggcactggatttactcgtgtagccattcctagggcacagtctcgccctatgcccggtatgcaaacagagtcagcaacgcgtagcagccgagcagcgaaaagcgaagtggtttggtgaaaggcagttgaagcatttaccctgaagcttcgatttgaacagtctggctcccattgcatcgatctgctgcagagatttctcgagatttccttggattttacgccaccagtactttggcttgacttca

SEQ ID NO: 50743 - DNA, 443 bp, Zea Mays
gaggtggattcatcgtttggtctccaacgttcattttcttcttccttcaaagggttagtttcacaagaactaaaggaagtagaagcataaaatgaactatcatgtttggactcatcaaatttatttttaattctagtccaaatattatgtgcatcaggaatatgttcattataatttattatgaaggcatgataatcttctttgctaagagaattacctaagatgtcaaaagcaagataatttaagcgtatacatctttgatcttcctcggaaatatttttcttatcgtaattagagggtatagtactcttatctagaatttgttctaatcgtgggtctatggtcctaaaagcatttatcacactagtagaccatgaagtataattagaacaatcattaagtaaaatatcaagagttacctccttgattttcttcagaggtgt

SEQ ID NO: 50744 - DNA, 452 bp, Zea Mays
tggttatgccttttggcttgactaatgctcccagcacttttatgcgtttaatgaacgaagttctatggcccttcataggtttgttttttgttgtctattttgatgatatccttatttacagcaagtctaggaaatagcatttagaacatttgcgtgctattttttatgctttgtgtgctactcgcttgtttgtaacatggacaaatgcaccttttgcacgcaacctatctcgtttcttggttatgtggttactccgtagggcattgaggtggatagcagcaaggttgaagccattctgggctggcatacaccaacgacgatcacgcagattcgaagttttcttggacttgcaggattttaccgccggttcgtgcgtgattttagctccattgttgcccctttgcatgaactcataaagaaaggtgtgttttgtgcttggggccccacacaag

SEQ ID NO: 50745 - DNA, 501 bp, Zea Mays
tgagattacacatttctaatgatgtgtacgcaaactccagcggccactcagtgctgctccttgacgcgtatagagtttgcatgccaaacaagagaaaaaaagaaaaatcatgtatcccaccatataagcttactaagtttgcgtacatagttttcaatgttttagctgctgctattttttgttgtgctatcttgaaaatgccaatgagtgtgtttatttaacaagtctaaaatatgaactgacatatgcatgtgagcatgtctgatttgctttagaaagagaattagctaaacatgcttttgcctttttatcaatattgttgctaccgagacataccaaaatcatattcatggacatggagtaccattttcctttcccctaaaatagttcaacatgtgtcttagatgtgacccccatattttttgtattctgaaaatctattcatgaagtcttctattaagttttctgtagtgttatgttagcattcgatagtaatttctg

SEQ ID NO: 50746 - DNA, 450 bp, Zea Mays
gaggcgcttgctgaagtatccgttgccgaagctccgaagcaacagaccggagttgaaaccgagccttcagaaccaaccaaagtaacacttttggaagcagaagaaacaaaaattgcaaaggcaaccgaaggaataaaaatgtcaaagcctactttggttgaagaaattgataccgctgcccccgaagcatcttccaaaatacaagattacattgtgcgtcatgcttcggggaaaaaactatctgaagaagagatttatgaagctagtcactatgccagagaattgaaatacccgaagggggcactagtgtttaatgggacagacgaggatgacttcctatactgccttcctgacaacaaagaattatccgtctgccgggagatggctaggagtatggggtttccgaagcttgaagctggattatgcgctatgacaaaggaggatcttgcg

SEQ ID NO: 50747 - DNA, 769 bp, Zea Mays
atcgccatcgctcggccttacgccacatatccgagcacctctgtcgcgtcaccgtgactctttacagccgttaaatcatcgccggtgagctcgccacgactgaggacacgaacccacggcgccagggtcctttcttatctccgaccgcccgcgttgttcgatcaaattgagcgccaccatcgaagcctcctataaattgagcccccggttagctacgctacctcatcgcaaaaccagagcccccaatcccaccctcaatcgttcgctagagctcgtgaatttcgaattccccctaattcggtttccgccaccgcaaagaatacctcaccgtggccagctcgattcaggtgagctcaagtccctctgctgcttgttctagcatccctaggtcctccttaagctcttcgaccccttcaattgaactagaccatcacctatcgccgggaacacattcctttgtccgcaatgttcacggtcgccgtggccagggcaaattaggttaccattcttcgaattaagttaggggaaatactcggggagggtttaattcggtgtatgccgctcgggagcaccggccgttgcataaatccgccggcacaacctcaccggagttcatcctccgcgctgccatcgtcgtggacttcgtgcggtaaagaaatagaaatccagggaccatactgcaaactgtcagcgactgtgttaaacagtaaatgaacctacttcagtttagccggtaagccgagggtccttctgcaagattgccagcgcg

SEQ ID NO: 50748 - DNA, 766 bp, Zea Mays
aaaccaactgccaactctggtctcgatcgtagagatgaggcgagagtacggtccaacgggtgacaacaagtcaagtatgagcgctcccttggtacaacgttttcaaacttaatttggcacgagtgcatatgtgactaaggaggtcctcgacagccgagcggcatttttctttcgattgttattcttgcatgattgtttgaaacgaaccattaaaggatgaaatttaggagctatgggcgaaaattcatcaccgtcggagagggcgtgcagggtgttcgctcgatcaggggccccaaatctcttgatccccaaacaaacatgtaagtctgtagtatatttatataacagaaagcctacattaatctttaattctttattgatccattagcatgcatgcttctattttatgaccgtgaattatgagtttagcctcgaatttttgccctggtgcagtgggacccagaccttgtgcggtgatcacatgaaacttcaaactacgagcctatcagtatcatgcacttatatataacactaaaagcgggtcgtgataagtgattatcctcgccggccgggtccgcgatgggcagttgtcgatacgagatctggttttttctccgtgtttggaagctagcaggtcatcagcggggcggtgagggtatcattagctatatatatataagccgttgaaataaaacaacaagaatatgctgaacaggaaggttgtggcatacagatgataataataactgcgtatcgttagtggctg

SEQ ID NO: 50749 - DNA, 613 bp, Zea Mays
atggtcgggtaggtatatgattagccttctggggctgcgctgtgtctgtgtgtatcgattactctttggaaccacttctctctctctatagttgtactgggcgcgagctgggaaagccctctcgctgacatgaacatcccaaagggcaaatgttgcaacgtgcaacaaaatgttcgtgatggacgagcggcgcctctggaagctctgcatgcccagcgacggctgcgccagcagagctctcaaaactgcgtaatctctgctcgaacagaggttaaatcccgaagaatttcgttcgtgtgggctggccgctggctgtgttggacacatgaaaccggggttctaagttcagcatgtgcatcgggagcatcacgccgtttcctttggcacgccactccctaactggtactagcactgcgtgtacgtgtttggcgacaccccggtggcgtttgtttaatcatcgagcactccaaactgtcctaggtgtgtcgtaaagaaacggcgagttttcccctttgctggcgacgatgatccgtcgcgtggtcccaggtggatcgcaggtcctggcggaatcgtcctagttggacgcgcgcatctctctcccagtccctccccc

SEQ ID NO: 50750 - DNA, 391 bp, Zea Mays
aagatgtttttcgaaaaggcaggccatagggaataaccgttgctggaaccttgctcagcagacacaagtgtacgacgcatcttctttatgcgatgttgtctgttagcggtggcaagcgttgcaggaaagtcgagtaaagacttgttgcctgcaacctacatgcacacacgtcttagtatgtgcatagagatgtagcagataaatgcagcagcaaaagcccgagagccactaacctggccgcttccgccgtacccgttgagagtggaatggaatcacataacgcgacacatgtgccggcgccgaagcggatggctgatcaagtgggttcatgtgttcgatagtagctgttcaaagacataacgaatgtttggttggctacgcgaaagggaaa

SEQ ID NO: 50751 - DNA, 774 bp, Zea Mays
agacaactgaggcataattaccatagaaggaagctgattgttgtgattgattgggggaatgatgggtgcagcgctcccctacttcttcttcctgggcaccatgggacttcactaaggcacgaaatcaagcacggacccgtagaggaacgagaatttcaaagggagatttgtggcagaaaaaatagagttgtgtatattcgcacactgtggacctattaagtcaggcactttaagtcggatgatataagttggacatgttcccagccgggcagactaagtcaggtagtcgactattgtgcacaatcaatcagaatatatcagtcagaatataagtcggaaggaacgagtgactcaacaccagtaagcaagatctcaaacacagtatacatatcaaaagaaactcagcattaaggagtatatgcagcaaccagatttcattcatgtgggaaaggggtcattacagaagagaaagggtcgactcattatgaaccgaccctaacaaaatacaacctccacttccgcttcttctactactttactacttctactactacaactacctaccactacatcatactacactatactaatacttatgccggtggcgccttgccaccggcattgccgccactattgtcgctctcgtcgccaccgtcgtagctgctactgccactgttcctgctccgttcgccgccactattgtcgccctcatcgccactgtcatagccgctcctgtcctcgccaccgctatcttcctcctcctcgaagtcctcc

SEQ ID NO: 50752 - DNA, 465 bp, Zea Mays
aaattgtggaaattgtaactgtacgggcacaagtgtaagtggatgagtagattgtacaattcaatttgttggagccgatctgggcgtcaatcactaggggtatacagtgagatggcaatttaatccgtggatttagatatcggttggatatccgacccgacggatcaggatatagatatgttttttgacccgcgggttagaccccgtatccgatccgaggtaaagtgggcatgaatttggatattaaacctcacccgcgggttatccgttggatatccgaaattaaccattactgacgacccacacatggacaccaatgaacaaaccgccaacccaccaatgagcccagccgccagcccaccaaggcaccaatcacccaaacgccaaaactgtaatcccctgccgtctttcactcttggtcaaccccaggccaacccgcaggacgcatcccacccgccaacccgc

SEQ ID NO: 50753 - DNA, 420 bp, Zea Mays
gatctaaagaagaaacagcgagagagcgagaaccacttgagagtgatccacaaaaatagtaaggaagagtttccaaagccaaataaaactccacagcctctaataactaagacaccgggaaaagaaggattagtcatgatgactaggaagggggatctaaaagaattgagtgaacctaatgccatgttctttgtgctcctgtacaaggacacccttcattctactaacaacttccctctactttgctactttgccaagtattgtctttgatgcattacaggaatatgaggatgtgtttcctgatgaagtgccaccagggctaccccctaagagagggattgaacatcaaatagaccttatgtctgacgcttccctcccaaatcgtgctgcctatcgcaccaacccagaagaaacaaagga

SEQ ID NO: 50754 - DNA, 657 bp, Zea Mays
agattttccaccttcgtcagaatcctttgaagttggcataaaccgagtcaatgttggtcccaagggacttaaagaggaaaatggtagcgatcgagtcattacctcgagaatttgggtacagtcatgtgacgatgtagtagtggtgctacccttcttcttctcttggccaactacggtctttattggagctaaggtcttcacaactgtatctttctgggaaggcattttatccttcttcttcactagacccgaagatggctctttggtctcactctttgcagctcacttcctattctctcaagctccgacattggccgaaggatcttaataatttgggtattcaaaccctagagcatccataaccctgttaagatgaagtttccctcggctcccgaggatagattgtatatctttgtgctctctagtaacattatttccacacatttcattacacttctcttcaataaacttcagccacccagcctaaggagccttatatgaagactgttctttgaagtcaaaaacaaatgtaacaagttcttcatctttcaatttcacttccttcgatagtctccttccagtccgagtcagatatatattgtaagcaagcacctcttgaactagatcccgagttccaatctttctaatgactgtatt

SEQ ID NO: 50755 - DNA, 338 bp, Zea Mays
taaagctacacactatggttgatgaccgaggcaaggatctctggtttgctcctgctttcctttcccttccccggctggtctttatatagccagtgaaaatatcaagggggttggattcttgaacttgcagcatggataactgtgagcatgagattttagtcgtggcttactcaagaagatccatgcagattcatagagcacagtcatgcagggtgaagattatccacggcgagggggggtaaggataggagagcactgtagtggatatttctaccagtgatatttctgctgatggcctgattttgaatatctctgtcctcccttatctctaccatcac

SEQ ID NO: 50756 - DNA, 542 bp, Zea Mays
cccagagcacccactcccacccccgattagccatcgtagcgccctaatttagttcttcccccaaatcggtcattcgcaccaccgtgtgacgccgcgtcgtgcatctccaggtccgctctcgccctccttatccgtgtttcagcactctcgcatgcttgtgatacttgtcggctcaaccaattgagctagaccgcgcttaatcgtcgggaacctcggtgttcgccatcgtcgtgggtaggagaatctagggccagattagttcaattaggcatggactagactcgcctgggctcggggatggtgatccgatgcttagttccggcggtcgtcgtcgtttaggacagatttcggtcaagagatagccagcgggtgaacgtgtcgtcgccagtgacttatccagtgaaaaaatagaagtctaggggtcttagtgcaaacgtcagtgagacaaaggaatagtgccagggattcttttctggttatccaaatcaccgagggtctctgcaagtttgccaatgcgggcgcatgtgggtgcgggttttccc

SEQ ID NO: 50757 - DNA, 1563 bp, Zea Mays
cttcgaggttcgcttggaatattctcaaggtcagctggggagatagtgaaggtgggcttgttaacatctctcaaatgcttacacccagcttttgcaaatatattagttgttcctcgagcggccactagggcacaaaaatctccgtgcccctccatcactttgtcaaactcattgatttcttttttccacaaactcaagcgccttcaaaatatcatcggcagaatatttctcttctcctcacattgccccgattgaactaaaaatctcgcgcgggcgaagggagcatcgagttgtgaagctagagtaggtgccccgatgcattttgagggcttcaaataatttagaatgtttctctgcttcggctttgactttatcctttaaacctttaacctcatgctcataacggatttcagcttcctttaaatttgaatgtgcttcttcaagctatttgttttgatcagaaattcgagtagcatgctccttaatccgaaggtgagctttagtcaggtttgcttcggcagtcttaatctttgaatctttttcttccagaagattttcaagttctttcactctttcttccaagttattgataacaagctcattttcctgtctttgttttcttgttgcaactttaaagcttttctcaatagtaggctctgttaaaaagatgaagtcacgttagcccgaaactctcgaaatttaaaaattaataagttaaagaggtaaacattaaagttataccttaaaatttgaatagaacaagctcccagtaacatggtgtctcctataattgttgagatctcgttcgagctttgggaattcgatgctccttgataaagtattaacaatttttgctccggcacggtcagtgatgcaccctagaatctcctcgtcgaaaccaccaaggagcacggatccaggcttgtagccgccagcaatagcgaattttttttaactcagagatatcttctttggagagttcctggcccccaagtgtcgtaggttcaactctctatcctccaaagaaactccttccaattctttcatttttaagggctagggcgaagccctattagtggtcacttcagccatttctctttcgggaaccacatcagctataatcctgtcaatctctgacattgtggttccaagagggcctcctctattttcagcttcaggggccgcttcatcagcttcgacatcagcattagcttcggcattagcaggggcaacacttttttctgccgagactgggggcggggtcttatggatagctttcatcacatccatcatgcatcatttcttctgacccactcatttcccccagttgccgaagcaatcttctcccattccgcgcctttttcaaccccttctcctttgactgcaataagctagtcagatccgaccctaggggacttagcatagcaaacgggaagggttcagtcattaccttcaatatttctgtaacgtcggtagaggaggatgaagaggtgccagtagtcttctctggtacatcttgtaccttcgcctcggtaggggccaagattgaggagtttcgttttt

SEQ ID NO: 50758 - DNA, 319 bp, Zea Mays
atcattacaaagatccaacttcagtacatgtccatcataacaagcatccaacataagataagcaaactaactctaactaagacttactagagtaagacactgaactaagcattattacagactccgactctgtcgatctagggatccaaatctatccgggtcctgtagtctggggtaccatagtcgaagcgaccacggggcggtgaacggtaagggtgctgaatcctgacaggggtgggagaaccaccatccagatagtggtgtgctgcgcactcagcacgcaattccgcaacctccgcccaaaccttgcccaactcgt

SEQ ID NO: 50759 - DNA, 587 bp, Zea Mays
ttcgccttcatgaccgttggtcacggcgaagatgaaggggcgcactatgcggggcggtgatatgctccttgtgcagcggttcaccttcttcgcactcgaagaccaacgcgccagctgcatgacttgtgggaccaggcccccgtgtcataagatggataccccggtgtgcatgggggagacttctcacgacgtttcaggcgggagcgagggagtctgcctttaaaggggggttcatccctcgagtagcagccatgccttgcttctctcccactcgcggcgtcctctcgcctccgagctctctgtgcccctttgccttcgaggtctctgctttgcgttgccgtagtttgccatggcccttgtaagttcatcccgagcgtgcccagactgagtgagtgttcgacatggtataccgcctgcttggatgggatgcgctggcgttcggcggaaggatttgtgtcggcgccctccaccctggtgaacttgccgctggagagtttgtgccttttgtcctccccagcgggttggtgctgccagtcatgcctttcctctgctggaggtgcacggccccgtgggggcggcgctcttcc

SEQ ID NO: 50760 - DNA, 1274 bp, Zea Mays
gattgtttcactaacatgatcacttaagtccttcttcttattcagaatttctcatccacgactccgactctggcggtcccaggtcgaactcctagtatcaaccgcatggactcaccgccggtgatcttctccggtgatgtataggtctctcgcaccaaccccgaagtgaaccggtcaaatctaccctataactcgaattgctaccgccccaaatctacccgacccacggccgcggcggaaacccgacctccagtgaggtagaccggtatccctggcaaggtagtattcaatccctggctatgaaaagctttagtgacctgtcaagcatatgatgctcaccgtggttgggtcagggaggaccaagttcagtcggtcaaaatggaaggcattcttggtggcgttcaccagatggcttgatggtgttctggtgaaaacacaatggtagagttcaaaaggaagactccatgatcatcactatgacccctgggtcctgaaaggtgagtaaatcgaacatgttaccttccagggaggactgaccacagggtggtgggtgatttagtggttgtggtcatcacaactagagttttcttcgagttcaagctttcacagtgaaccaaggagtggggaaaggtagaggaggtagtctagacatagggaagcaaaaaggacatgttgaaactgctatggaatcaccaggacttgttgagattcagttctttggtttttggatgattttgagcagtcaccacaaacaggagtttctaggctttttagctcgaacttagcaagggctaactacactaatagatcccccaatacctcttcatggtaaccacgcaagcccgcacatagtaaaaaactttacacctccccctttgttgcatgtttaacaacaaggcaaacagtgaagcaactgagtcattttagtcaaagttttcacctccatgccctaatccataacatggtagagcagtaacaagctaccccctagtctactagttctcttaattggcacccaccagaaacacctagaatggatagtggatggagatatttctttcagatatttttcttccttgatcttcctcagcttgcgcacagtgccatcttcacttccctttttctctcatttccatacaagaacagactaactgtaggtctacaagtttactatagtcttccaggtccaaagacataaggatcacaagttaagatgccccaaagtcgaccacaattcaaggagactaatttcagtcaactgaaactgaatcttg

SEQ ID NO: 50761 - DNA, 497 bp, Zea Mays
cttgtctatagtttcacacatcacgtttggctcaaacttaatttcctgcatatgtaccaatggaacaatttaagcacagtatccatcataaggccatcacagacagaattaatgcatctgtataacaatgcactagtggacaaatcatcgggacaataaatttatcaaaaaaatcaatattgcctcaaaaagctcaatttcttgatcagggggaaatccagccatttcgtttagttttgccaggatttctgaaggttttcccaaggccttcacaaagagcctccccatgaaactacatgcatgaaacagctccatgagtcacatgataatatcattattttaatgaagaataaagaagcagtacttaggacaagatgtcaatgttatcacttaaaacagaagatgtaccagagttcttccttttctgggttgtagaatttgaagaaaagaagaatatcttccttgcccttctcaggaggagggagaggccgcaaatc

SEQ ID NO: 50762 - DNA, 272 bp, Zea Mays
ggacaacaccgagcctaccaaggcaaaggggaaccatgtcgtgttagtcgagtcctaggcttgcgccatggggcttgccatgcatcaccacaaggacgtcagccacgaacccaccgcaaggatagaaacaatgggcggcaccatgtccagaagtgctacttcgagcaaccaggagaagggggcctgagcaatggatgaaagacttctctctctacctctctccctaaagagagaacaatgtaagctttgacccttgggatataaaagggaag

SEQ ID NO: 50763 - DNA, 586 bp, Zea Mays
ggagcgaacccgccttcgggtagatcggggtggccaacgagatttgttgtcctcgtcgtttgggacgagtattggtgagggggatctacggaatctttttgagggtgaggagttgaaaatgatgttgtttaattattgggaggcgggtctcatcccaaaggctgagccgatgtagtgtgtttggtgccctcgctcttgtcttgcggtagtgagtgaaaacgctgccctcccccggctcgcaataaagagggaggggagagtgtgattgtgtttatttgtgcggtggggttggtgacccctctctatgtgtatgtaatctgtgaatattgtttattgtttgtgtaatgtggttggttacccttcgcttgccagtgcgatgttgttgaatgatgtggggaatttgtgtgttgtgactgtccggctgcacccttaggcgacttttgcacggatttgtcttttggtaaagacttcgtatcgtgcacttgttgtgcttgtccgactacacccttaggcgtcttttgcgtggagttgtcttttggtaaagacttcatatcgtgcacttgttgtgcttgtccggctacaccct

SEQ ID NO: 50764 - DNA, 345 bp, Zea Mays
gacaagagttgtgttatgagtacgaccacacacaggaaaaggggccaattcgatggcccaggcggatgagggatccccctctctctattgtctcgtctctttttctttagcaagggtggggccccattgtaagccttctctcttaagatacaaaagggagaagttcacccttcaggtggcacacaagcacaccggttgtaacatgctccagagcaatactataatcagcacttcactgaactagggcacaagcctgaactagtataattcaccacctcaaatccatcactcgagtcccagcgactaaccattcggagtgagtccgcacaagcatccccgccgaac

SEQ ID NO: 50765 - DNA, 335 bp, Zea Mays
ccacaatgtcgtgtagcacgagcgacatgattctgcgagcgaaggaagaggcgccgacggcgttagtgaccgcggaaggtgctacatcagcaaaggaagtggccacgacagccaggggagggtcgtccgaggcggctgttggcacttgctctcctgtgcaagtagatccaacgggaaagtggaaagagtattggcaaagtttgtcatggtatggaaatagctttgttaatctacccctatgagggcactgtacgggggtatttataggcactcgagcgaccacccgtcccttgtcaaagacgtttgtgctctcgagtacctagtttatccccaga

SEQ ID NO: 50766 - DNA, 555 bp, Zea Mays
cgccgagcgcagccgcgtgacacacagccctcatcggcggtggtattccggcccaacggtggcggctacaggtctcacctggttcgcgatgagggatgagaggagggatgtggcatggagtgcgcaaagcccaggatttatatcctacagagagggtggagtccgcacggaaggagagagcggtcgatccaatcctggcggcgaactcttaggaagacgctagtggagtttgttgagatcccatgtctgcgtttgcgaaccagcggagaagacggagcacaaccaatgaggcccacacgtcatggaccgaacagacccgtgtgctgatgagaggagaccgacgttgcgaccccacgcgtcattgacatcacgcaggggtgagagcacacagagactgccatccatggcccacaggtcggcgccgtttcccctagatggccagcgcggtgacgaggctaatggcccgagtgggggagaatttggcccaagaagcggttttctgttttcttctttttttgttttgaatttctttctcaatttcaaatttcaaaattt

SEQ ID NO: 50767 - DNA, 856 bp, Zea Mays
ctcgtgacacgctacactgatcctatcgatgtctacgagtggcatttgcggatcgactccttggtcccctccactatgtcagcccgtgcctcggctccctcttgtgtggagccactgatgtaccatccggttgctctccaacatgactccaggcacgtccacatgatggttacccagcgagccactggtgttcttcggcctgtcgagcgcctggtcctctcagcgtcatcttcggtgctatcccctgagccatcctttgttcgtagtgcgctcatcaaccccaataggcggcgtgcaatggaaaaggagtacgagaccttataggcgaaccacacctaggacctagtgccatgcccctttagcgccaatgtggtcatcgggaaattgatcttcaggtacaagctgaaggcagatggctccatggatcgttacaaggctcgctaggtcttgcggggcttcacccagtgtcccggggttgactatgacgagaccttcagcctcatggtcaagcctggtaccatccggactgttctaactgtggctctctcataggcctggccagtgcatcaactcgacgttaagaatgccttcctccatggtactctgatagggacggtgtattacactcagcggtcggctttgtgcaccccacgcaccccgacatggtctgcaagctcaactggtccctctacggcctccactaggcgcctagatcttggtatagttgctatgccacattcttgatttcacaaggcttcatcgaggccaaggcagacacctccttgttcatcttttgccatggcttggatactgcatacctcctcctctacatcgacgacatcgtcctcacagcctc

SEQ ID NO: 50768 - DNA, 521 bp, Zea Mays
ggcagcatcaccacataggactcacctctgaagcctgggaattcctcaccggagacgaggaaccacgtcgcaccgtggtccgcggcagtcgccatcacgctcatcggtaaagacctcggaaccaagttcgtactaacctctgcaatgtatttcgtgggctatcgatggagattgggtgctgaggcatcggcggactgtgcgcgataatggcgccgccgtgggtgaagggttcatcaccgtctctggtgccgacttgggtagggcttcggtaaatctttgatcttcgatgcaagggctaggattagatctggcaagtgttggccctcgaccgtagatcatgtggggaatggcccagatcaaatcttggcgtatcacttcaaatcattaaattagatccatcgatctcgaatctgacgagcagtgtggtatgacagctcgtgagattaggagatcaaacctggtctgtggattcgtaatcgcatggtctagagcaaaggataccccttcgaccgaggaaattt

SEQ ID NO: 50769 - DNA, 619 bp, Zea Mays
acctcaaagaagattgggctagagtcttatttcccgtcaacttgatctttttaagtgtgcatgacttcaaattgtcatgaaggtgtttagttccattcttagtttcaccagaaagtttcttgaagcaataattacattttgccttggttgtgcccatgtatttcactctcgtgaaatctttccacactaatgaagtaagcttcctctttgattttgtacctaattcctcttctatttcattatcctcatcatcgtcatctagttcaattggttctgagtcattggctgattcgtgttctgattcttgttggcgttggctactcaaattcaagctagtactaccagttgcacttgttatatccatttttcttaatctgtattaaaatggtacttagacagttacactgctacaagtagttttcaaaatattatactgctactagaagagcttacgctacttttgcaggttcaggttggagacaattcttgcttgtggtagacttggggatgtgtcgctttgcaccagcagcaacagctatcgtggtacctttgttgcgagacgttggtactggaagagctggagaagcattggtgtcgaggttcttgtctgtcagatccg

SEQ ID NO: 50770 - DNA, 583 bp, Zea Mays
atggtgtgtcggttgtgataatgcaaggagataagattattctagttcagcttgtcatgggtgatttggtcttgaacgtaattagtgtatatgcccccccaagtagttcacgacgagaatgctgagagacttattctagaaagacttagatggcatgattagagatgcacctattagtgagaagttttcataatagaagaactggacctgcggggggtggtaagacagtctccaagtgttacattaagaatatcttctcatgcaggtcgagataacccctaaactcttgccctacctgtcggtgttaagtaccagcaacacactacggaggtgggcgcatagtgcttttctaaggtaggtgacgaggatcacaactcgatggcacgtgtagaacacgtcggagacacaagaaattgctcggacgctcgatggtacgtcctgtggtttccgtctgtgtgcggttgacttctctctggagtacaggggatgtctagtggaagaagatgagttctatgagtgtccatctcatttttgtagggtcccttcagcataattgccgactgaattggggttacagagaaac

SEQ ID NO: 50771 - DNA, 560 bp, Zea Mays
tgatgaatggagaagtaatggatgtgatcacgttcatgatgagatagttgaatgacctcaagatggtcaggaatcaaaacatggcatatgatccttacattatggttcttatcaatgccaagaccaagtttgagggcaggattgaggtggttcacaccattttcagttcgttcaagaatgacattgcatttctccatagagtcccgactccatttctagattaggaaaaggcagagtgtgatgaggaggagtaagacgctccacaggagcagtaggtcagcagatgctacaaagaatgcttcggggctgggcatctagtgctagtggggagtataaaactaaaaaaggtcaactccaaacaatcattactgacttggacacttcagccgaggatagaattttgactgaggctgaacgaaatcaactggaacaagccagatgtcagctatcctccctcctcagagacgaagaaataagattctatcagagagccaaagtaaaaatgtattactgggagacaataatacctgatatttccatatggtggcaaacgacaaata

SEQ ID NO: 50772 - DNA, 558 bp, Zea Mays
ggcttttctcggtactgtagatccctctgaatctgaattgtctcttcttcgatgtgactttctagcactttcaggcatttgcggagctgggatacatgaaacacattgtggatatctgacatggattctggcaatttgaggcggtaggctgcgggccctattctgccaatgataagatagggaccgatgaatcgtggagctagcttcccttttacttgaaatcttttgaccccgcgcattggggagaccttgaggtagacgaagtctccttcttcgaaattgagttctctccttcggttgtctgcgtaactcttctgccgactctgagctttgagtagtcttttttggatcagggcaactttttcttctacctccttaatgaaatcaggcccttccagtgtcttttcccctactttggaccacatcagaggggtctggcactttcgtccatacaaggcttcaaacagtgacatcttgatactggcccggtagctgttgctataagaaaactctacatacggcaaactagactcccaactcttgtcaaaggtcaacaca

SEQ ID NO: 50773 - DNA, 811 bp, Zea Mays
ctcttaaccgaatgggccgaaccatcatggcctagctccctccgctcatcccgtgtgcaatgtggcttgctgacttgcgggccccaaccatcagttgcgtctgcctcacttgtgtctttgtcgtgtgatcgtttcgtcgggtatctcctcgagataggaatccactgtaacaacctcgagcgtgcacgccgaagatcctcctgtgtgcctcggccgcatgttgcctctcccgctcgaaccctacccctcgtgggctatataatccgaggctgcacgctattgccctcaaactgtagttgccggataaaacacgagctgctaagagccaccatcgccatgagagcagagagaagtcggagtgtgtgtgtgcgcgctgccactgttgattcaagcccacaccattgaccatctctcggagaggggttctggaggtcagctagagcttggagaactatggtgttggtagtttggcatgttagaatgatcggagggagaggaagtcgtcgccagatgccatcccgcgccgtagagccgcgatcttcgtggtccccgcaccccggtgctacaatatgaggtaaagagcgtctagatcaaattgtagcattcctctattcatgtaggtcgtttcttagcggggtcagatcacgagaatgttgggggtggaagttcgacagtgagcttgtcaccgtccgagccattgatcgattgggtgcgactcagattggggtggggcatatcgtttcgtcggaatagatcagagtcgctaattgaaaatccaaggtgtggacgattcttggtccgttgatccgag

SEQ ID NO: 50774 - DNA, 570 bp, Zea Mays
ggaggaatccttaagtgatgatgatcttgatgctaacattgccttgatggtgaggaagaccaccaagatgttaaagaagctcaatagagaaggcatcaagtttgactcaagaaagaagaaattctttccagtaaaagaaagcccatttctgaaatggattgctataactgttgagagcttggtcatcttgctcatcaatgcaacaagcccaagaagaacaagttcaggggcaagaaagaagatgacagtgatgacgagaaaaaggaaaagagattcttcaagaggaaggatgggaagcacatgaggttccacaaaaagaaaaatggaaaggcatacattgttggtgactgactcactgacattgagtcatcaagtgggtcttcttcaagtgaagaagaaaatgagaaaaagttgtcgccatcgctggggacttctcttcaccaccaccaccaccatcatctacttctcacctatgcctcatggctagaggtgaacggaaggtacaaatgataatgatattattgatgatagtgatagtgatgatgaatttgcttcaccttcctatgatga

SEQ ID NO: 50775 - DNA, 865 bp, Zea Mays
ggttgatcagtcaccagtgatctctcaaggctatctaggctatcagtcgagctctttagaaggactcctcagtccgagtgctgaagagaggactggctgctggatcacactgagttgaaagccaagtgtccactgacatgtgtctaaagcgacgaaccttggcaacagtggccctgtgaaggtcgaacagtctcggatccatagcaagcgatcaaacctcattctcgtcacgttctcataatcgggcgggaggtactggtggagtggcagaggtagagggagcggtggaagcaggtgtggtggaggcagtaggcgtagcttgggtggtggtaggcacttgagtggcggaagttggcgtggtagtgaaaggtggagtggtactggtggctggagcagaggggttgaacctagctagagtggagcatgcccaagacgagaggcacgaacacggaaggctatttgatatgatccaatcctcacctgctctcccttctctcctatctcagccgccgccgctgctgctaccactgcccgtgctgctctagtagctctgtccaacttccttttctttttgccttcgtactgctcaagatagacctccttgcccttgtatagtctgaatgggcgagggggatcatgatcatcgccccctcctgctagggtcacattcttggtctcaccatcctgactgctcactgatcattgacacaccgcacgagaatgagagtagataaatcagcatagcaaagcaagggataagaatggaaaatcgaagatctagctacctggggcacgtctttcgagaaaaaaccaaccagaggaagtcacataagcaggcacgccgacacactgaaatgacaaaata

SEQ ID NO: 50776 - DNA, 796 bp, Zea Mays
caatgaagcattgtttctcgaagggcggatgtggtatgttggtcgacctctggatcctagcaccatgacgtggatctcggcctactgttgcgtagcaaggtcgaggaggcctcagatctcatgttgggtcctccgtttgcttagagtctcagcttcaaggagcctatcaaggagcgatgtgacaaccacgacgttctagcttgcccgggggaattatggtggcccgctttcgtcgtggattatgcggtgacagatgttcatcgttgtatcacatgctcgtccaccatctcgttgtggataggtcgattgctgtcatggtgtccctttcttgccggtcgggaggcactgacagctctagtaaggacttggtcctaacgatagcctttggcatggtagttcgaaccaaggtggggcagacactgccacacgtatcatgacactagcagaggttctctcgggacttctcgtgagtggggaacggtcttccgaagtgctagctatgaagcactcctgggttgggtctagacttgttccgttggatgagaagctatgtccatactccatccctgaaagaaggaggtcatggaatgaatctctcatggggtcggtcattcccatgaactcgacataggcgggtcctgccgtgcaccaccgtctatcgttgtcctaagggggggcaagctagaggcctctgaggcctctagcaatgtcgaccaaaccatttgtcatgggagtttgagcttccggggccctaactattgttcccacgttgttgatgacaaagttgagacttcca

SEQ ID NO: 50777 - DNA, 471 bp, Zea Mays
gtaccatatcctcttcatacgacgagtctcgaggagggtcgttagaaggaggataagaagaagaagagggacccgaataaggtggcagaggaggaggatgagcagaaccagatggtctgggatcacttggaatgggtcctaaagcggtagcaggagtagactggaagtaaggtgaatcatcatagtcctcttcctcatctttctgagtaataaacgacacaccatattcctgctggtgccattcattgagatattctagataggcaggaattggaacaagaggaggtcgctatggcatgggatgtcccatggaggctgcaaagcttcgcatgtcatcatgaagttcttgggtctcacgctgttgcatagcctcatcaacagcatgacttctgcacatggaaaaaacctccaccattcccttagccagacacacaaacaaacctcgtcctcgatccctgccctggcctcttc

SEQ ID NO: 50778 - DNA, 472 bp, Zea Mays
gagaaggttcctggatgtagttgcattgagctaaacggtgttgttcatgaatttatcgtgaaagataagtctcatttggacactaatgcaatttatgactgcttacatgagatcacattacaaatgaggcatattgcaaacctgattgacatttccgaaagtggctcacatatttagttcagaaactatatctaattatataaaatggtatgttcagttgtatcacataattaaattgtgatgtgtgtcagctgccaggcaataagcctctcactgtcatcaatcatgttatgaaattctgtcctatcagtgactctgaagggaataccagaaatcagaaggtaatatttaatttttttaacttacaaaaaatcttttcagttgtaaaatccttgagctggtactcatgtatctcaatctcattcattgtcatctttgcataaagtgatagaagcattgttttcagatcgtc

SEQ ID NO: 50779 - DNA, 508 bp, Zea Mays
ctttcccctcaatcaattttgctagagatggtctatcatgttctggccacggtgtcagtgcgggtgttcaagtggattatcgtgttccggatcaccgaaggctgggctggctaaattgaagctagggaaaggttcctgggttcaccagagatgacgcacacgctaagctttgggctaggcccgagcagaaaggtggggcgacggagagggtgtcatggcggtttttgacagcgcacggatgcgttccggtgatgggcttcgaccaaactccaaattgccgcatccaggagcaataagggatcaaagactaaataaaacagagagtaatttggtaattactgaccagaggagcgctgggcccggatgtttcttctcggcggagctaagaacagaagagggagggaattggggctacgtgggttttccggtgagctcgagtcaagtgcttagtcacagaggcgcgtgatgtggagaagaagccaagcccgagcgcaatttataggccaac

SEQ ID NO: 50780 - DNA, 376 bp, Zea Mays
cgcccggtcaaccctagcacgggtggaagattctgtcctctcgcggtggccacgcatattcttcagctccagctccaagtcagcaacacgcttgcgggcagcctaagcctccgtgcgggtgttctccgcatcctctttttcatcattaagtcggcggccgaggtcctccttttcctcctcctgcgctgtcactttctcgagaaggttctggctcttatttttggccgccgacttatccctaatcgccttagtgtgctgcgttcgaaggcgctcaatcctaccctcgagttgtttcctcttgaaaacaaactgtgaggtcagcgcccccaaagcagcctgctcggcgaaggccgtcacttgacatcaaatatccaaa

SEQ ID NO: 50781 - DNA, 913 bp, Zea Mays
gtaagcgcgagcatgttgcatcgtcttaagtcgttgccgacttaagccgattgctccgttagcagggcatagtggtcaccccgagttaagtaagaatgcaggtcgaccatgaacaatatgggtattcttgaggtctctttattgatgatatatttctagtttacagagtacattgtcgtcccgatagcttttgaaatacagctaggggtaaaacttcctaaggtgttctatgttccatgagttcccaatttccgtgtcgtccatttgagtgagacgatatgatcccggccgagtgacctctgctactaagaatggtccttcccatagaggtgacaacttgtgctgtccctcccccgttagaattcggcggaggacgaggtctcccactgcgaaggatcgacatcgcatggtcttatcgtgataacacctcaaggtttgctggtaccgtgctgattgaactaccgtgttcagccattcttcttcgagtacatcaacatcctccagcctagtagcctcggcttctgctatgttttcaaagaccaaccttgacgccccaaacttgaggtcagcaggtagtactgcctctgacccgtagaccatgaagaaaggagtatttccatgcagagctcgactaggttgagttcttaggctccaaacgacgtagggcaactcccttatccactttcctgcgaacttctcatttttatcgaagaccttttttctgagtgcctccaatatcatcccattagctctttcaacctgcccgttggctcttgggtgtgccactgaagcatatttgatctgaatgctcttttgctcgcataaatcgaagaactctgaacttgtgaagttggatcctaggtcagttatgatactattcggtactccgaatctgaatattatgtcttgtatg

SEQ ID NO: 50782 - DNA, 749 bp, Zea Mays
gtcaaaggtgaaggtgataataatgaaaggcataactaatgattgagttaaggcaagactcgcgaaatgacgaaatggagaaaacaatcacgggtaaggtaggtaaggttccaacataatggttgaagtaaaagaaattattaccgaggaaagttatggaaacgatgagaacgataagggtgtgaggaatagaacgatcgctcatggatcatgaggaaacaaaggtggtcaagagcatgtagaatataaaggtaagcataaaaaagatgagagtatgaaagatttcaaggagatgagcataccaataccaagaaacaagaaattgccgaaagatagcgacttaaataacagaagaggaaagggtctcaaaagacaggaatgtcatggacatataaactgaaatgtctaagtaggcagtagaaatttagatgcaagtatttgaaacaagagtattaaagggatacaagcatgtcaataccaaaggactagagtttgccagatggtagcaatttaatgacgaaagaggagagaaccccaaaaagacaagacggttatggtcagggggcatctacaaagatgtcgcaagcacaagagtaagatcagatcgagtagattgagaaaggttagaccataatagaataaaatacttttggcaagggggcatatagaagcacaacatagaattagtcgaggtgactaatattttgaaacagcatcaaggatgaggtgaagtaataatcgataagtcc

SEQ ID NO: 50783 - DNA, 385 bp, Zea Mays
ctggattgcttcggcctccaagtggttcacctttccacggttgtacgcttggccacgattgcctgctgccggctgcagtacaccttgccttgttggagcattggggttggtctgctggtgcgccatcttcttcgggcactgcatcgcccagtggccttgttctccacagtggaaacatcctctgcctccaccttgtgctggggctgcttggttgctctgatttactgctggggcaggaaggcgaggtgtctggttgttctgcttctgatactgattacctccctgctggctgttctgacgatactgctgttgttgtgggtactgcctctgaaactgctgctgatgcggacgctgattctgattctgatatccctgcgggtgacca

SEQ ID NO: 50784 - DNA, 461 bp, Zea Mays
ttgatgaaggtatgagatgcacccgaatcaaacagagtcaatgcaggatggttggcgacataaaacatactcatcataacaggggcaccttcagagattccatgagtatgagtaagattgacctgccccatcctaggaacagtcctgcttttctttctagtattctgtcagctactctgagatggagtcattagtgattttcgctcaaccagtggtctagaaagacgacaatccagggtagtgggtcctgacttcccatagtgatcacatgggttcatattgatcagattgtttttggaatgaacgcctggggcatccgactgatgtgggacaaaaggaataatagcctgtcggacacactactgttgtgaactaggtaactgggatggaggatcaagagaacagatgataggttgataaacaatcctctgacatcaactactgcaactagaggattcttc

SEQ ID NO: 50785 - DNA, 568 bp, Zea Mays
gacaatttgctccatccttgcaccgatcgatcccaatcaaggtaacgaagatctcatcagagaagcaaggaaccaaaataaaaaggccatcagttcgacccccgtaaataagagcttgatgaggaaatcagcaaccttgaactcatccactagcaagttgaaaagcgcaaggaaaaatgcttcgtctttcagagctccaaaggaagattaatgaagcaactgaagatatgcgcaaaattgaagcacacaaaaatctgaacaactttagggatcaagattacaatggacgtgatcatgacaatcttcgtcatgaagtatacaatgcccaagatttcctctatgatgaagcttccccactgacaccagaactacaagtcacaccatggcgaccactgtataagcctcctacactacctatctacaatggcctgacaaacccaaagtagttcctcatgagctacaaagctaccatatcatcttatggtggtaactcagaagtcatggcaaagtccttggtcatggcggtccaaagtgtgtcctaaacttggtacttgtcacttcaccaagg

SEQ ID NO: 50786 - DNA, 965 bp, Zea Mays
gaacttgaggataccttatctttgagggcccaaggacttcgctgatgaagtagactggatgttgcaccgggtgcgcatgtccttcctccacccgctcgactactaacgcagtgcttaccgcgtgattcgtgcaggagatatatagcagcagatcttccgctggctgatttggtgcagctcggcgtggtggcttgagtattagtggtgtagtcaggaactttttcagtgcctctaaagcttcctgtgcctctgtggtccactgaaacttgtccacctttttgagcaacttgtagaatggcatgcctttctcgcctagccttgatatgaatctgcttagggctgccatgcatctagtaagcctctgtacctttttctgtgatcgtggcgcttccattctcatgatggcctcgattttttctgggttagcttcaattcctcggtggctgacaatgaatccaagtaacttccctgccggtactccgaaaacacacttttctgggttgagtttccaccggtaacgactcaggctattaaagaccatctgcaaatcttcgatgaagttttttgagttttctgttttgatcactacatcatcgacgtaggcttccacccgcttgccccagtgatcggctaagcatgtttgaatggctctctagtaagttgctcctgcgttcttaaggccgaacggcatggaggtgtagcagaaagctccaaatggggtgatgaaagcagtcttctcctcatcttcctttgccaagttgatcttatggtacccagaataacaatctaggaaggacagtgtagaacagccaatgatcgaatcaaccacctgatgtattctagggagcccgaagggatccttcaaacaatgcttgttgagattagtatagtcgacgcacatgcgccaatccactttattcttttttagtacaagaacaggatttgctagccactcggggtgcagt

SEQ ID NO: 50787 - DNA, 471 bp, Zea Mays
ccactatccaacacccaacttgacccatggaaggagtattcctacaaaacaatcatttttttgttttaggcatccaaataggattatgggccttaagggttagtcacataagccttgtgcacccaagcactaggtgatattttcttcttgtaggtgccaacatacttcaccacaattttccatccttgtttcaacaacacatgtaacaatgacatgctgtttaggagtgtcaacttgacttgacttcattggtcgatccctagcaatagagatattgtcttgtgagtggcgcgagtcttgttgaggagcacattaagggacactcctttgtttaaccttacacatgacactccattcaccatgcctcttacattttacttgccaccatacttgtgcactttttctccccttggtacatgcacccacttttgacaagcatcttcaacatacgaatctccatttttggcatgc

SEQ ID NO: 50788 - DNA, 624 bp, Zea Mays
gtttggagtacgcgctcctttcaaaatgtttggtgaattgcatgatgcctatgctaccagctaggagggagtatcaggctagtgccggtttcgtacgtcatctcctgttttgttttccaaagcatgcaccgacgggtactgtgtacattgcactaaaccaagatttcaccttgagctgctccatccttcgtttttggcaccttttatagcccctgccccttcttttctctaccgagagaccaaagagtcaaatgcgaggtgcgcgcccgtgtcaccgtggccggtacattttccgtggaagcttgctggttggaaccaactgtctggcggcctagctagtgcagctttcggtgcctattcggactacagctaccacagacctccggcgggcatgtgcaatccaatacaagcaaagcaaagcactcctcctcgaatgcatggtctcggtgcaggttcagagctcactgcgtcttctctgaaacttagaccatatatctgaatggactagtgaccattccaaccaagaataatattgctccctcgttcttatcccatgccccggccagtgattggcagttcggtacacagcccacacgcacacacgtgctcgcacgcatcttttcg

SEQ ID NO: 50789 - DNA, 417 bp, Zea Mays
caggtgcacaggggcagtagcggtggcacacgactacgttattcatagctcaacagttgttagcgtcggcaccagtgctgatggggaggcgtcgctggcatacaggtcctaaaaggggaacaatgtgagtgcaatgcccctcttctccctctacccctctgcgcttttcttcctcctcaatttccttggttgacagtgtggcatggatttgtgcctcattgatgtcgcaactcaaactaaactagcactaggtcggctcatgtcgtagctagatgttgggattgccttgttgagcttctcaattttgtttggtcattgttgtctccaaaaaatagttgatgatttggttttctcccatttgttatatgattttttactgagattctgggaatgtatgctctagaacggctggtcagg

SEQ ID NO: 50790 - DNA, 965 bp, Zea Mays
caaaagatagacgcacgagtgaagtagtttggcaccaaccagccatgggtggcttcacgatctcggtcgatgtagctttgatgctatgtccttcgtctccttctcgttgaagaccagaaacacgtttcaacaccgcatatatcatagtttgatgcggcatatcgagcacctcgtattcggtcgtcatctcaacaacgtccgacctcaagaaagtcatcctgacaacggtttagtggagtgaaaggagagtgagatgagtgaattatgagatgtggtaagagcaatttgaagagtggaagatgttaatgaactttttaaaagacaaaattttaaaatttacaatagtgcgaaccaatcaaaaactgtcacatgacaaacggaggtcggtagcgaccgtgccgcttggttgacagcccaacccactgcccggctctggttttgaagctgatatgacggaatccaccacccgatggaaccaccagggcatggatgagtgtcgactctagttttggatccaacattagcgtcccatatcgtcctcgtcgacgcagaacagatatgatagaatttgtggtgttggtttcgtgtgtaccagaatatgtcttaagtagtggagaataaaaagagaaacaacgtacaaaaactactcaacaacacgcttccgctaggatggaaagaaacataaaaaatccacaaactacagccaactaaaaataaaccgattgaaatgcacaccagtgtgactctcaaaacaaacaacgggtccatagtaggcaaaagcaactaagaaccaaatcgactaaggccctgtttagaagcaatccagattttaaaaatcagttcctatttcgtttctagaaactgttttatgaagaaaaaaatctgcttgatgatgtttggaacccggttttaaaaaccagtttctagtttttttgtgtcacacctggatttaagggtaaacccgg

SEQ ID NO: 50791 - DNA, 412 bp, Zea Mays
caagaaaaaggattatagatgtcaaaaccagaatgtgaccaatgctgtgattcaaattttcaccatcagtctgcataggagcagattcattgtcgccctgcatggacttggagattgaggcatcttcggtgttcttagcgtttttagcagtctgcactctctccttatcctttgcagcgtcctcatttccttcactatcatcatccttttctctgggtacaagagagtttggtggaggtattgccggctcaaaatattgatcctccatggagaatgtaatctcataccccaccttatcagaaaccacatctgttgtgagcggaacaagttctttatctagtgtcccaaccaagattcgaatcacacctttcttcctatatgtatacatatcaacatcaatggtggtgccaat

SEQ ID NO: 50792 - DNA, 600 bp, Zea Mays
agcacccgaagttgttggaaggtcttcagttgccttcgtctgataatgcaactcatgaatttggcaaaatgcctccgcattgggttcaacaccttagcttcgtacaacccaaaaaaatccctaacctcactaatggcatttggggtaagctcatgaaagtatattttaaatctttcagaacatccactatcatcttgtgcaaaggaaatgtaagtcaagctctttgggtttagggtttagggttcaacacctttgtcttgcttaggcttcggcaccaaatcttcccccttccaatcagacccagttaacaccatcaatataatgaaacttagtaagtacctcaatatgtccgtcttgattgtggattttccgaggtccacgtgacttggcttcgtaggacgaatgatggtgttgtcttcttcaatattaatgtcctcattgtcatcatctgactcttcaactggaccacaatagcatcttcagcttgcggtgtagtagcttcgttagctaccacaattgagctctctcccctcgtttcagggttctccaaagcaagcactaaagctagcttaggaactgattggtctcctgccatatctg

SEQ ID NO: 50793 - DNA, 1194 bp, Zea Mays
cgggcccgtaaacaccatccaggtcggcgcagactcatcccggaccacccgcatcgtgggaaatctgggagagaaataggaactcgcgctcatcaccttcctccgggcaaatgccgacgtgttcgcttgggagccgtcgcagatgcctgggatccccagggaggtgattgagcaccatatgaagatctatccggatgccaagctggtaagccagaagcctcagaggcagtccgtggagcggcaggacttcatccgtgaggaggttcggaagttgttgcacgccggcttcatcgaagaggtccatcaccccgtgtggctggccaacccggtcatcgtgccaaaagcgaacgggaaactccggatgtgcatcgactacaccagcctgaataaggcatgccccaaggacccatatccacttccacgtataaatcagatcgtggactctaccccggggtgcgactttttgtctttcctcaatgcctactccggttttcatcaaatccggatgtctagggaggataggaagcacaccgcttttgtaatggtagatgggctgtactgttatgttgtgatgccttatggtctgaaaaacgccctgctaacatttgttcgggcgatgagtaagaccttcggggatctgatccgggacaaggtggaggtttacgtcgatgacatcgtggtcaagactagaagggggtcgaccgtagtggaggatctaaccctggttttcgacaagctgcgggcaacccgcaccaaactgaacccggagaaatgcatcttcggcgtctccgcaggaaagctgctgtgtttcctggtttcataccggggcattgaagctaacccagaaaagatcaaggctatcgagataatgaggcttcccgcccgtgtcaaggacatccagaagcttgcgggatctctggctgcccttagccgcttcatttcaaggttggctgagagggcgctgcctttcttcacgcttctacggaaatctggcccttttgcctggaccaaagaggcagagcaagccttccaagaattaaagcaacacctaacttccctgctgatcttggtagctccagagccaggggaaccgctatacctgtacattgcggcggctgcggaagcagtgagcatggtgttagtcgccgaaagggcgacaccagaagggcagggatctgagaacttggaaccagc

SEQ ID NO: 50794 - DNA, 802 bp, Zea Mays
aacaattgggatattctctttcatttggtgcaaaacatctaatttaagggtcctagcgcatagctgctaaaagaagttacctagttctacaattgctacatatatttcatcgtgcattattcctcaaagagcagctggtaaaatcctttgaagtatgatatggcaatcatgtgttttcaagccttggaggttgcatccatcagcagtgatgcatgatgctaggttagaagcatacccatttggaaatttcacacttctcaaaaaatcataaaatgctaccttttgatttttatccattatatagggggcatgaggaaccacataggtacctccatcacacttcaagtgtaaatcttttcttatgcccatgtcctcaaaatcaagccttgcattaatactgtcctttgactttcctggaagagcaagaaatgtacctagcaagtactcacatatatttttttcaatgtgcattacatcaagattatgacgcaacttcaaacctgtccaatatggcaaatcccacaggcacgaccttctcttccaacattgaccaccatttgcatctcgcttcctcttattgctatttggatgcttccctggtttaacttccttcactctttccaattgttgcatcaactcagtggtactaaattgttgtggtttgtcacggttctcaatttggccatcataatccttctttttcctccatggatggtcatgtggtagccaacgtcgatgaccaatatagcatattttattccttattcttctggagcaatgatctttgtcacaatggacacaa

SEQ ID NO: 50795 - DNA, 342 bp, Zea Mays
cagctcctgcttatatgaaaaccctgctgaccgcttgtcttggcacttgttgttgctcaactgggcctctggccacgcctccatcttatttccagatctctatctctcttgctcgattgctccgcttgttgcttctttcttttttctctttcacgatttcatgcccctttgctcggcaatacgaatttagatttttcattacgttttctctccatacaagatcgatttagatctgcttgagattttcaggagggcctcagcacattttaagtggaaagctcaaagcatgatgaaaatctttctgtttcacgcacccgtactatttctgctttggtatttttg

SEQ ID NO: 50796 - DNA, 1391 bp, Zea Mays
tgctttggctaagcggcctgcacgatcggtgtcacctgtagtgggtgataaaccttgtatcatgcgatggactcagcagatgaccagagcagaggatgatctttagaaggcagtggtgattactgttatcagcgatcatgagaaggtcccggttgaagagattgctgagttgattgctcctaggctagagttggaagatagctccttgataattcgacagtcttcagagtcaagctacatcatgtttctacccaactgtggcatggtggatttgtgggtgggcagttgggccttttctcagggcagccactttcactatcacctgtaagaaaaggtctcgttttttgaattccaaaggtgttgtgttacctaccttattggacgtagagcttcagggaatccccatccttgcttgggaagccaagaccgtggaacaattgcttagtccttttgctagtgttcatcatgttcatccagacaccttggagctaaaggatgtggttgtttatcattgttcttcttggtgtttgaacgtgtcactggtaccagattcgagagagctttggattgttgagcctccctttgccgttgatggtgaatcctatgacaggagaatgtttatgtatccaatctgcataacattgtcgtctgcccctcggtaggatggatctgatcctaaccctcaggttattgaagtggacggtgatgatatagggcgtgtgcagcagtgatatccacgttcaagacctccccagtcacgtcgcgacagtgaggaagatggttagtcgggacgtcattcatttcatgattgtttgggtccaagagatgatgacatgaagcatcgaaacctgatttatgagaaggcagaggcagatttaatgtggacagtggaatccggtggggggatcctgtctcctgggctgaaagagatggctgaagataggcaagacaaccctgatgtccttaatcctgcacttgagaaggtgaagaagctgaaggtttactctcgtcaaaggctcaagaacatcctgacactagagggggctggagctcccactcctgccactgcgcttcctccctccccctcaggtgtggcagctgccgacacaattccgtctgaggctcctgtcttagatgttgacgttgtgctggcaactccatctgaagatggcctcccattgtcactttctctacttgagcctggaacgctacctccctccctgtcagatgtggcagcagccttagatgttgatgctgagttggctgctccatctgaggagggcctcccagcgacacaagcttctttggagattagtgcacgagaacaattcatcaacagattgtcacacaagatcacaagcgtcctaccagtcccaaaatctgtcagacac

SEQ ID NO: 50797 - DNA, 480 bp, Zea Mays
gttacctataagagtttcccttgttatcaataatggttatggaagaataaacctttgttttggtgtattttggtgtgtcattacgagtggttatagattattccactctttttagtagaggcattgtttcttctcaatctaggaaaggccaaagttatcattatagttttggttgtttttttactggcaagtgtatagcatacacatgaaaattaaatgttggtagaaagatatttgagcaataacgtattaggtggaaatgtgttgttggtagctaaaattgctcgggcgaaggatgcatcgataagaacctatagaatagattatgttggcatagttatgccacgatataccaatataatttagacaccacccaccatggaaggttttttttgttcaggcgtattttattctattgtcactttttctcttcccctttttgcatgaggattggcatgtttgaatacagagctaataata

SEQ ID NO: 50798 - DNA, 851 bp, Zea Mays
aaaagatactaataataacttgacaacatttatagctacatagtgtgtcaaattgttgcaaaatgaaataaacttaggctcttaggatgcctaaatataccagaatacataaacataaaatgcactattggagcttctttctaataaaaatcgggctacctttcttgtgaataataatgaaattgttctgtccacgcattgctaacaagtctattgccgacatggtgaaattctaaatcaccatgcccctgggaaaaccaatacagcggcatttgcagctaaattcaagacagactagggaattatagatacagatcatgagtaccacacaagggagataaatacaggctgctattctatcagttccaataacaatatcaagaaaaatcatggtatactccaaataaaaacatatacagtgttctatcaggcaattagcctcaactggaaaaacaatagtgttagcctgtaacttagaccaaacagcctgcattggccctcaatcataaattacaccttctccgtaaaaaaagatgcaaacagagacaagaaaaaaagaaagagaagaggatacttttaccatcttggatgagggaagaaaaggaccttttttttcccaacataagtacaaatcaagccaatgaacacagatccaaaacatcgtaccacaaaacacagcatcacgtaagagccattacatacagcgcaccaactccccgcccagatccggcttcaggtgcacagatccagggccaaatcccgccaagcaagcaaaacagagagaagcgaggaagcctccgcagagacaggacgcaagaaaaaagcgcgaggcgcgtggaggcgacacagga

SEQ ID NO: 50799 - DNA, 880 bp, Zea Mays
cgggggagtgttagcatgatgtaattaggccttgatttgtggatgtaattgcgctatctacggttgccttgcatgctacttgtgcgctgtatatatgtactcctattcccagtattggaatacaatcaatcattcacatacttacattaggcatcacaactttttcgatggttgatatggaatttagatatttttcagtggcatgtagggaattgactcaaaaagtaaggagtgagaatataatggactagctcatttctcaaaccaaatagcatatgcatataagtggagcattcgagtctttcaacaaggcatgagaaataatggcagttccacgcaatatcattggtaccttgagatttgagagtcgtttagtgaacaggcatataagtggagcattcgagtctttcaacaaggcatgagaaataatggcagttccacgcaatatcattggtaccttgagatttgagagtcgtttagtgaacaggcatggtacgcgagcaattatttttatttgattatttcgtctggtactgggatggcaaggatcggatctgatgctgtgcgctaattagtacgcccactggcaaaaagaaaggcaagtgcattgtcttgatgtgacttttttctacgaggtctaagattgggaaatcggatgacagttccaacaggataatctcatgtttcttcttggtaaacagtgtccactttgttccacagcaccccaacgagcttcaggatatgcaaagtcacccaaattccacatacaccgtagtaggtgaaattgtgcaattaatgtaggtaggagtctcttcagtgggatagaaagagaagaaagcaatggtaaacagtgaagtttaggcacttaagccctgctgcc

SEQ ID NO: 50800 - DNA, 525 bp, Zea Mays
tcgccacggtagatgccactgagctctcgcgatagtactcttttcactctctggccgccaccgtgctaactcaaattcacgcaccaccgctgatggagtctataaattgctgcccccgcctgctacgctatgtaattgtgtaactagtaaagcaactcgtgcctcgaatcatcccctagaactcttcaatttcccactctccccaatttggttcccgccgccgtgaaagcatcctcgccctggccagcttgtttcaggttggttcaagctctctggtcgtttgttctagtctccttaagacctcctaatgctatttgacccctctgattaaactagaccgccctggatcaccgagaacgcccatgttcatccattgtccgcgctgtctctgtggacagggtgatctagagtctcattagtgaaattgagtgaggggaaatggttaggaggaatccaatttggtgtctgcagcacgggagcaccggtctttgcatgattcggccagtatagactcaccggtgctcg

SEQ ID NO: 50801 - DNA, 617 bp, Zea Mays
atagcatgacgttgaggcttgtttcagctggaaactgggctagaataagattacatggtccaagtttacagctagtcgatacagtgggggacaggcaaccaaacaagagctatttacaaggtacctagagccaactcttgaccggcacaatccagacagctaggcacaaacattacgcaactacaagtgcagagccattccatctactaaagccagctgaacaatccatccacaaaagcgataaacagaggtgaccaaggtgtacatccacaaaaggcaagacatcatctttgacgtgttcagactacaggtttgtcaaggctgcaaacaaatataagaatgtgagtataaagttccataaatattatgcgctgggtctttgaagttaatgttataccaaagaaagatactaagcacatgtatacaacctcgaggctacacaaacacggtcttgatcgcaaaccaatagccttaggcagtttacttaggcaagatagatatgattatgcaactgcctataaaggaagctgttcactggctaagtacttttggctctgcccagacactggcatttaatacatattttatatactacacaaataactttataatattct

SEQ ID NO: 50802 - DNA, 1058 bp, Zea Mays
gaaagcttctaaagatgttggcatctgtcagtgtttggtattggtaacagactacggggtgtatcacgtagtgcctttgtggttggcgagatcgattgttgctcgatggtttgtgcttaacactacgtgtcggggacatatccccaaacccttggggcccacgagtcagcaagaggacgagggaagattccgcctcggaaggacctgcccccggatagttccgaggcactaagcctgggatcgagcgaggaggagccaaaaggggggtcaagcgaaccgagaggaagccactcgcgtggattccacacccggcttaggactgacatgtcataaatgactggtctcattaactacgcatggccccgagccacagcagggaagtcaatcctccttctaatcaagacctatgggcccctagtccggcgacccacatatgacctatcgactctatgcctgagtgcacacgcaatctacagggcatgcaacacgacgagtcacgccgaggcccaatctacgaaagctaggggttggcgtggcaaagagagtgaaagggaaatgtgccctcgtgccatttttatattgttttggtgattagatgctcaacacatagagttatgactgtattattgagctaaaagttaaagagatgcaaatggaaaagcaaggtatgattctagccttagtaaattatttttgctaccaacattatcctactaagtgctaggaaccttctcaaagtgagagaaatctaattggagaagtctggttaaggcgagccagacttgcgctagcctacggtgcaccggactgtccggtgtgcaccgaaaagtgttcggtgcccaggcttgcaccctggtgaactggccgctctcgggaaaagctgagggcgtcgcgactaaaattcatcgaaccgtctggtgtgcaccggactgtccggtgtgctagccacgcccacgccaacggtcgaccacgcgatcagagggtgacacgtggttcaaccaacgattagaaggtagcaccagactgtccggtatgccatgagaccagtggctggcaac

SEQ ID NO: 50803 - DNA, 645 bp, Zea Mays
ctggtgtattccagatcgaagacgacgtgctaaaatgctctactagggcgctttactataggatgtggggtcctcatggtcgcggtgttgttcgagagagggccaactgagcacttgcacatgtatgtttgtctttaacaagggtggtctgtgtgtgtgttcgttgtttgaaacgttgttgtgctgtcttcgcaggagatgagggatgaagaggtggaggaccttgccggacttgagaccttggtggcccgaaatgacgccaaggtggagacgggagtggaagagcaatcctcgctctaggaaggtggcgatgagggccctgcggcgatggggacttttgcgcaggtttaaagattatagtaggagtggtttgacgattttcactttgtatgatacttaagatcgcctgccacgcaggttccggcttctgggcctgcgcaagcaaactttgatgatagcgagaatgatgaatcattaatgtgtcgaaagtttgatagtagcgacacatctgatgagtctgatgttgagttgtggtcttcggagggtgaggggatggtgagcacgttagctgggatggatgatgagtcttcagaagatgatctagattattttgtggcgctagatttgtctgtcgcagagtctccg

SEQ ID NO: 50804 - DNA, 675 bp, Zea Mays
gcgcgatgggagttctcatgaagtgcattctttcagctactgggaagcaactattagatgaaatccatgccgggcagtgcgggatacatgcagcgtccagaacactagttgggaaggtcttcatgtccggtttctactggccaactgcgaagagtgatgcagccgagttagtccagaggtgcgaagcttgtcaatacctatcaaagcagcaacatttaccagcacagcaactgcagaccatacccgtaacatggccatttgcgtgctggggactagacatgattggacccttcaagaaagcttagggaggatacactcacgtgctggttgccatcgacaaattcactaaatggatagagtacaaacctattgcttctctgacttcagccaaggcagtagaattcatacaagatataatattcagatttggaataccaaatagcatcataactgatctaggatccaatttcactagctctaaattctttgatttctgcgaacaacggtgcattcagatcaagtacgcgtcagtagcacatccaagagctaacagacaggtagaaagggctaatggaatgatattggaagcactcaaaaagaaagtcctcgacaagaatgaaaagttcgtaggaaagtggatcagagagttgccatatgtgatttggagcctaagca

SEQ ID NO: 50805 - DNA, 385 bp, Zea Mays
cgagatgtagggttaggcttttggcctctttttcgttgctatcttataagtgggtacaagtttctttatatagagacatgagacacctaaaaaaggagcgccctggggtgccaaagtttcatcgagggttgaattgtccttgtcgtatgatgtcctaggtgttgtctcgtgtccttccttttttcggccgtccaacttagtgcctcgcggtcgggggtgcgttgtcgtgccgattgttatgtggaaggggaaaatggggtcccttctccttggcgcttcgttcttctggggttcgggccctttcccgggcggtgactccttgcttagaaacttactaagcaacacacaatccttgtaggcgtgacgacctaggtgctaatggttc

SEQ ID NO: 50806 - DNA, 620 bp, Zea Mays
aacagagcaatctagatcagccgcttggctcttaaaaccgcgctccaaggtcgatgaggcacgagatgctgcttgggataactctaacatgacagcaggcacatcagcacaaacttccatcgttccatcatctgccggctctgacaacagatctttagggaccatatcttcgagattctgatcaaaatttgccagatacaattcttgtagaccaacgagagcagacaaagctggagaaggaataccactactctccccactggctatatagcaccgactgttctttcgaattaaggggatttcttcctcctcctcatcttcatcaatattatagacagtacacccattggggtcagcatcatcaaggttacacccattggggtcagcatcatcaaggttacacccattggggtcagcatcatcaaggttacacccattggggtcagcatcgtcaaggtcacacccattgggttcagcattagtcgggtcacacccattgggttcagctttagtaaaagtcggtactggcacttccccggcagcaggagcagaagggccagcaccctgattcaagcatgacactcgccgaagccgtctctttttcttttccttccccttag

SEQ ID NO: 50807 - DNA, 553 bp, Zea Mays
cagaagaccatcatctcggacctctgaacagagagtgggattgtcacattcaggaggctctgatagaaggtcctcagggatgatctcttgcagcgcttggtcataatcagatattgacaacccctggaggctgacaagagctaacaaggcttgtatgggaatgtcgctgaccctgtggtgacgactattcttatggatcagcggaatttcttcttcttcctcctcctcttcctcatcaggcgcaccgctagtaacctcaacatcatcacaacctctgacattgtcctcgaggatggtgctcgccggaccatcaccgagggatagtgtggagaggccagcatcctgctccaagcatgacaaccgccagagtcgccttttctttttcttctcctcggtaggtgcagctagatggttcactcggcgtgaacgcttgcggtgagcaccttctggtctggatttcctcgtcttcaccaaagtcttgctcaatcacaaatgctgttggctcagagcgggcagagtcagatgattctccggccagcaggctaagaacaac

SEQ ID NO: 50808 - DNA, 615 bp, Zea Mays
cttaccacatacggtggtgcagaaactctcaaccacggcagatggcggcctacgatggaggttgtccttcggtgagaaatagttgtcgtccagattgagctagcacccgcacttcccctgtacaccatcctcatgctcttctcttcctcttaaacctgtcatcgaggacggaccgttgacctaggtgaggatcgaatgcggtggctccctcggcgtgaactcgtttggcaattatggtggctcggggtcgatggacaaggtaggcaaaagtggcccgggtacttatacccggagaaggggctggataatgatggctgtcaatgagatcaacgaaggaggccgttatgctagcgtgtgagccagataggaaggaagaatatgtgtgtgacatgtgggccacatatatctgcgactatgagcgaggagggaagcggctgacatgtgggctccatcagttggtggtgacgcgcggagggtcgaacatgggttggacagttagttgggccgagacgaagtctgttggcccaagtgaaggtaagcttctcccattttctcttttttgtttctattccttttcctaaatttagtcttaatttctaattcaaatttaatctg

SEQ ID NO: 50809 - DNA, 524 bp, Zea Mays
aaaacttataataagtgggtcataaattaataatgaagagctaataactattacacaagtggactaagagattggctgtaaagatctttatagcccgtaattagctatattattagcctttctcttatgtgtatggttgacatggtaacggtgcaggcccagcgagggcacgtgcaggcggtgcacaagaacagcccctcccctctccctagggcctctaaaatgctagttagcaatagtttaggctgcgcgcaatacaataataaatagaaagtctagctaagttagctcggtaataaaaaaacataactatgcaatttgttttggctagcagagtgcaaccagcgcgtgcatcatccgttgccgttagtaaaccacttcccacatacgacaaaaatgtttaaagtattgacacacagaagaacctacatcctttcacatgttaaagacacaatcacaattaataagcgagattaacctatattgtcgaactttagaaaaaaaaaattggtcacacgatgaag

SEQ ID NO: 50810 - DNA, 621 bp, Zea Mays
gtggcgagttgtaggtgttgactattcgaatccaaaagattgattccttcttgtcattgctataaatggggtccataaagtgcagcagccacatgtgaacctaaaaattgatgaagtcaaaaaactattgtcgacaaaaatgtgtggacttcaaaaaacatgtgtacttagcagtcttttgtcctccatctttgtctagtcccttcgccgttgaaattgagtatcaccagagtaagtggattggcccgaatcggcatcacggtcgatgcttggaggcactatcatgcatgtaggaggacataatggagaagaatcaccatatgaaggaggagcgccatatgagagaggacctccaaacgggggagggaatggaggaccaccatatggaggaatagcatcataggatccatatgaaggaccatagtatggatatccctacagatatggaggtaaatggtggaggagcgtccgacgtaggagcttcaatgatatataagcttcagtggtaggaggagcgacaatggtaatatttttgttgagaggatcatccatggaagatcatggggatacgaagaatgaagatatgagtatagaaacatagtttgtggaattagggaatga

SEQ ID NO: 50811 - DNA, 960 bp, Zea Mays
tgaaggttgacctgagtcagagggaggatataaatggattatttagcgccctatatggtctctcttcggcattaggaggccgcccactgcacatggaaatgatgtgcaaacatgccagtgggctttcaatacggtgtgcacttatattggcataatagacttggtctaggagcatattgcttagagagtgtggccacttgtaagcgaatgggaaatgccgaaggaggctgccgctggctcgagccaaaatggtttggtgtatctgaagtatacatttcgatacaggagtcagtttgatgaaccgaatgatgactggctagatgccgtagaggcgaatagtgatgagctacttggagcatattcaaaggccgaagatgaagccatcacaactgccttcggagctcggggcaaaaagagattgaatagggtgtttgatgttatcaggtttgtgtaccctgattattgctatccctcgtgaaagcaagggaagaagaggaaagttactacctcgtcaacttctagtgtgtcgaggtcaaaaaaggttaaagttttgacacaccgacccaggtgtattgagacgaccgacgttccgaaactaagtgaaagggttgctttggtcacagaacgaggtcgctctatgccagtcgaagctaagacaaattcgactgaagagccgaaactagagaagacgacagaaccgttacagacactgagtccaccatgcgcaacggaactgacaaagccatcaaacatccccgtagcaactccaaggaaaaggagaatggctagtgtgcttgatgctgttatggagtctgtgaaaacatcaactcctgcttctgccgaagcacttagaacggaggctaaagttccggggggggaaatgacgccgccaacatggcttagactactactaaaactagacctgcagaagttcctgccgaagctggaccttcggaaact

SEQ ID NO: 50812 - DNA, 428 bp, Zea Mays
aattttctgcccatcaaggttgcttcagctgaaggatccttcatgtcatctatggagaaggcagcttcggtctgggccatggttttaatatggtcacatcccgccttctccaagatggttgaaattcctcgcgcaccggaaaacgcgcaaacatctccgcaatcacttaaaatttcttcgaaggtctcggcttctccacttatccattcaataacgccttcgggtcacctcgtatgaagttttcttcggcagaatagacacccactttggggaaactatcttttattttcttcacacaatccaaggatttttcaaagcatctttccttagatgtgcgaagttcttcaacatttttctctaaatgatttttccaatattcgctgatttctcggttagcttctgtgagtgcgcatttttccttagcttcg

SEQ ID NO: 50813 - DNA, 344 bp, Zea Mays
ggcgcacatggtcgttccgtcacgatcctggtctctgtaccacgtcaggggatcattagtaaagtgattatgggctaagtggccgaggtgagaggggttagatgtaaaagaggcactgaacattggattagagatgaaagcttcacaattaaagtgctcacgtgcgcacgtaaggcctgtgctcacaggatacgttcccaatattatatgagtgacggtcaacccacctcacttcctggtgaaagtagaagtatgtgagagacatctttgattgaagatctctcgtgtcatcggcgaacttgtgcaacatgaactcgagtgatcgagatctaggcatcgttgag

SEQ ID NO: 50814 - DNA, 481 bp, Zea Mays
cgggggcatggtgtagcagtgtgtacgcccacaccgtaggcttatagagttgtgtgtgtgtatatatatatactagttagttgcccgtgcgttgtgacggtacacgaatactgctgataagagcattaatagtaatcaattttggatctttcgtgagatgtgctctcccgacaggaggaaaaggaggaaagacccattcattttttattcatcaattagaacaaagtagaagaagcaactaaacaccatacatattcatatatcaaacccatatattgtctaatagctacacctgtggtcaacaagatgcattcgtcaccgtcgccgctagcttaattccctgtgggtgaggacaaggtggcattgagagatcattttagttctctgctcattatttttccaccccttctgctcaacacccccctcagacgtcgaatgtcgcgattcaccgatgagcaggccaaatccgagactcgcagag

SEQ ID NO: 50815 - DNA, 969 bp, Zea Mays
attttgagttcgtgaacggatgagaaatggaaggagcaataccgaagcgcgtcatgtatagctcagtcaagtgagccatgctgacaaacaaaacgaaagtttagtgcgaccattttgagttcgtgaacggatgaaaaagggaaggagcaataccgaagcgcgtcatgtatagctcagtcaagtgagccatgctgacaaagaaaacgaaagtttagtgcgaccattttgagttcgtgaacggatgaaaaagggaaggagcaataccgaagcacgtcatgtatagctcagtcaagtgagccatgctgacaaagaaaacgaaagtttagtgcgaccattttgagttcgtgaacggatgaaaaagggaaggagcaataccgaagcgcgttatgtataactcagtaaagtgagccatgctgacaaagaaaacgaaagtttagtgtgaccattttgagttcgtgaacggatgaaaaagggaaggagcaataccgaagcgcgtcatgtatagctcagtcaagtgagccatgctgacaaagaaaacgaaagttcagtgcgaccattttgagttcgtgaacggatgaaaaagggaaggagcaataccgaagggcgtcatgtatagctcagtaaagtgagccatgctgacaaagaaaacgaaattttagtgtgaccattttgagttcgtgaacgaatgaaaaagggaaggagcaataccgaagcgcgtcatgtatagctcagtcaagtgagccatgctgacaaagaaaacgaaagtttagtgcgaccattttgagttcgtgaacggatgaaaaagggacggagcaataccgaagcacatcatgtatagctcagtcaagtgagccatgctgacaaacaaaacgaaagtttagtgcgaccattttgagttcgtgaacagatgaaaaagagaaggagcaataccgaagcgcgtcatgtatagctcagtcaagtgagccatgc

SEQ ID NO: 50816 - DNA, 579 bp, Zea Mays
tcatctgtggtaaagatgaacatgcacgaaactaattggtatgtatacaaatagtttctaataatttataaaacatcggacatgttgtacaagtaagaaggtagctaagtaaagcatataagaacttgccatggcagttgtcttggcacgcttgtggcgtaggttgtactgtgtaggtttatccggagagcaagaatcagtggatgaagctgccaggttgggcaaccttatacaacaactgctgaaaaatggagtgcatgacacataaatgttatcgaataagtatatattggttggaatatgcataaagtaaattgtgtacagagaaacataaacacgtttcctgaaatcgtgtacagataagcataaactcatctctagcatggtacaaatttgaaatctggtaataacctagtagtgaaaagctgaaaatatattattttttacctaccggtagttgtgtatagataaacatacaccgtttatgagtaattttacaaatggtgtaagaaagtaacaataggggccggttctgaaatcatgcaaccgatccgggaatcggaatccggctaggtaaag

SEQ ID NO: 50817 - DNA, 899 bp, Zea Mays
ctttccgatacctccgccctcaaaggaggacagtaagaagaacaccgtcgcgccagctcttttctaccccgacatcctctttatcgaggggagattggagttagtgcccatctctgacgatgagcctaccatgcaggggaggaacctccccagcatgatgcctggtgatggagaaaaagacaccagaatgggcggcgacatcatgaagccgaggaatgggatccgacgcagcccgtgcctcgagacgaagcctcggaagtgggagaaactcccgacaaaccagtgcatcgagaaatgcgtaactcccaccaccacgatcaccgacaggctcaagatcgggagcgagggctagccaaacaagacgctaggcttcggtgagagaaccctctcctcgctcgaaacttgtaccccgatttcgctcaagcactaaacacgccgagtgaagttggaggagtactggcaccgatagccgacgacctcccgcgaaccccagacgtggaaggttactagtgactacttactcaggcaactaatcatcttctacccattgctcatctagtgaacaacctgtgtcacaccatcaacagccgacgagatgcgcggagtacaatcagcgctttgcgagaccgacgacatgaaaaggagataaggcgtcgggaggagtacgaccgggatcacgacgtaccagcacgaagtcacgccacccgagttgagtcggcgacagcctcatccagtggcccgttcagggggacgatcgagacgacctactaccgactcccctccccgggactgacgacatgaacatcggcaagaggacacatgcagagtttccacgctcaatccacatctccgggacatccaatggcctcccaacttcaaggtttgcaatgttgacaagt

SEQ ID NO: 50818 - DNA, 442 bp, Zea Mays
tttacgaaaaacgccataacttgactctgaacttcgatttcagtgatcttggacttttcggaaagtttgtttcgagggctatccaacctagcaaagaacaagcccaaagatcaggaagttaaacttttgtacattgtatttctctcatgctagcacttggggcttggttagattgagcacttgagacttgtctatgattcgtattgcatcctgtttgatagtatgacatacctataatcaagataaagagaatataactatttgaccacttgagtcttcaatgtcttcatatgccatttcctctcaatatcacttcatatgggattgcaatcatctttgtctcatttcttcaaacaaacacaccttgagcatgtgacttgaaccacttcaccacatatcagttcacttcattagcttcaagtcacttccactaatgatctga

SEQ ID NO: 50819 - DNA, 843 bp, Zea Mays
agtaagcgtgagcatgtcgcactgccttaagtcattgccgacttaagccgattgctccgttagtagggcatagtggtcaccccgagttgagtaagtatgccaattgacagcgatcaatttgagtgcctttgaagccttttattgatgatatatttctcaatttacagaatgcatcatcatcccaataacttctgggatgcaactaggggtaaaacttcctgaggtgttctatgttccatgagttcccaatttccgtgtcatccatctgagtgagacgatatgatcccggccgagtgacttctgctactatgaatggtccttcccatagaggtgacaatttatgtcgtccctccccgttagaattcggtggaggacgagatctcccactgcgaaggatcgacgccgtatggccttatcatgatagcgcctcagagtttgctgataccgtgctgattgaatcaccgtattcagtcgctcttcttcgagtacatcaacatcctccagcctagtagcttcagcttctgctatgttttcaaagattaacctcggtgccccgaacttgaggtcagcaggtagcactgcctccgaaccgtagaccataaagaagggagtatttccatgcagagcttggctaggttgagttctaaggctccaaaccacatacggcagctctctgatccactttcttgcgaacttttcattcttgtcgaaaactttctttctgagcgcctccaatatcatcccgttagctctttcgacttgcccgttggctcttgggtgcgccaccgaggcatatttgatctgaatgctcttttgctcgcagaaatcgaagaactctgagct

SEQ ID NO: 50820 - DNA, 1257 bp, Zea Mays
agttccaaaaatacaaggaatttgcctagggtaaacacatcaaggttgtagaactataataggagaacaactttgctcatgtagctaagctttgatcacatacaaagtttggagaaaaataagctcaacgctgtcctatcagtcactctgatgactgattttaggtcaccagtgacattggccaaacttttgggtcaaattagagtaggatctattactcaattgaggatagttgctatagtcgatttgtagctggatcatagggctacaagtttgctacagatgaattagcaagctcttatacgaaattccaagatctgggcactacaaatctgtctgtcaggcgctctgaatcaggttttcaatggtacaatgtccggatcagaacgccaggttcagatgcctcaccgtcggcgactgtgtgcccggattcgcgcccgccgcggtgattcgtgcccagcgcagatggataacggtgaagggtaaaaatcttggcgctcggattagctcggactcactcacctttgcggccgccgtacccacttgaaccatagctggttgggatcatcctcgccggcgttagccactcaacgatcgtgcgccacatgccttggtgtcttaccacgtcgcaatagctcgggttacacatatccggtgatcgctgttgagctcgccacggtaaaagccaccaattgcttgcgccagtgccccccccttctctccgaccgccactgcgacatctcaaattcatgggccactgctcggggatcctttaaattgagcgtacccttagctccgcaaggtattcaagcactcagcgcacccactcgtgtcccaaatcgttcaccagagagccccaatttaggatttcccccaaatcggtccaaaacaccgcgcgaagtgagctcgtcgtggccagcgtgctttaggtctgttcatgctctctgctctcccgtttcagtgcccttgtgttctcctgatgctcctcgacctgttcaattaagctagactgcgctagatcatcgggaacatctctgttcatccgtagttcgcgctgtcaccgtggacagtgtgattaatagctcatattgtgcaattgagcgaggggaaacgattattaggtgttgaattaggtgtaagccaagttagagcaccggccattgcgtgtcttggccggtacaggttcgccggagctcggttcatcgccgttcgccgtcgagaaccacgggttgtgaagaattagaacgtggagggctt

SEQ ID NO: 50821 - DNA, 364 bp, Zea Mays
cattatttgatgctagaaacaacagctggagtgcgtacttaagttgttcacctctgggagcaataaagagaatccctacactcgctccttgcagcttcagcgagccattaaagtacattctccacacttcagcaacttctgggctatctgggacctggtgctcagtccattctgatatgaagtcaaccaatgcctgagtttttatcgccgtgcggggccagaactctatgtcgtgagcctcaagctcgcatgcccacttggctatccttccaatagcttttttgttgtggagaatatcacctatcggaaatcctgtgactactatgactttatggccatcaaagtattgttggagcttgtgagc

SEQ ID NO: 50822 - DNA, 328 bp, Zea Mays
ttcagtttttggttcttcggctttatctctatcagcctttggttcagttttctcggctgagggcgccttcggtatggtagccggtttttcagccttctgtgtaggaggagtgggctcctttggagcagcagctgaagaagtttccccgccaaaatcaggcaccacggccggctcaatgtagcgtggccgatgggtaagaaccttcaactccttgctcttcggtgcaggctcatccaaagtagccgaagcagcagccttggctgaagtagcagccttggtagaagcagcagtcttcctcttctttctttgtccccgcagtggatagcag

SEQ ID NO: 50823 - DNA, 462 bp, Zea Mays
cgaccatctccacacattctaaatgttttttttcacttcattcggtggtagagagacgatagactcaattataaatgttatgtccattgctgagtcatatcaaatcaaagcttatctcgccaatggtaattaagctacgtttcagggacaattattgggacgaccattcaatgggaagattattaagtagcatgcgtcgcatatcatatccctgatggtctattagagatctgaaagatcgaaccaggagtactttgtaaatcaaagggagaaagaccaaactccgcgttagttttaacaataagtagtctctgttctgttggcctgctgcagttttgcgtgtgggtgaattgaagttctttctgtgagcgtcaggcagactttcattagcaagacttgagacgtcttccgtcattttttaacttgtgtcagagaatggacacggggaccattcaatctttc

SEQ ID NO: 50824 - DNA, 673 bp, Zea Mays
gtttttggaggcacgactagaaagcggcggttagggcaaaacttccctatctgcaatcaaagtcgaacacagatctttcgtggaacaaaataggttgtgctagatgaataaggaagggctgccgtgcaggcaaaagactcaaggcggctcgcaacctatctagggctggcgcggcgataagtaacacaaggcggctagcgagggcaagtcgattaatggggtggatcgacttgtgatctgggtaatggtgggtgggatagcagcgaaggtgcagttgaactacgacgaagatacaacctaaaccagcaacatgactcgaccatggacacaaattgaacaaagccaaactgaaaacgaaattgcaaaggctaaacaagggttctagaacagcggaatttttttgtattgcaattttctggagttataggaagaaaacataaactaaactagggtaatcctgacggtaatacctgagacgttgaataccacttgataggaacgagggtgcctgatcttccatcaggtgaaggtaactattgatttggtggagatgtcacacagacgatccggcttccaatcaacacgactagaaccccgcaatcgcagcaccacttctcctctggttatcaaccgtgcactgcgcgattgacctcgccatgagggctaattcctg

SEQ ID NO: 50825 - DNA, 465 bp, Zea Mays
taatatttaataattttatccagaaagaactacttgttaaactcaaaattttgagacagagaattatacaccagtaagaagccactgtaatgtttgcagaatttttggaaatttattaatataacttgtagttcaaacccaccttaaaagcataaaggaaataagaagaagaaaggaaaataataaacctcgctccaataagtttaactagaaatcttattaaattctcactaagacattaaaaggaaattagtggaacaccaaaatagacttaccacttagtttaactaggcttgaccctaatttgctaagtataccacaagaatcttttgtagcaagattaaactctaccagatttaagaagatttgtcaccatcaaagttcaattgctaaactacatatcatgtcatgcatatatcttactcagtgcattcattagactgcaatgtcgctgacggagagtac

SEQ ID NO: 50826 - DNA, 581 bp, Zea Mays
aactatcgcttcttgttatgcgtgtctcatcttgctacaggacgagagtatttataggcccgcccggggtaggtggtccaaaatacagccctacccccggctaccaactatatccagagaatatcccctgctacgggggtaattacaacattgttcgtacagtaattcgcgtacacctaactacacatccacacgctacatggacaagtgggcccttttgatgtcttttggtgcaccggggtgtgccgggtcgacttgtggccttcgttccgagggcctccgtgtcattgctcccctgggtcatgaatggcttgggctcatccattagtcgacgaggaaacgaaggcatcgactatcgacggtttgttgctacccgccggatcgaagaccccttcgcttgtgatcttgcgtatggttaatacaagaaaagaagtatggtcttcactatgtggtcaaaaatgtgtgtggccttcggctgcccggccatccaaggccttcgtatgacgtagtctctcctcggcgttctgtcgggttgaaggatgccttcgttgttgggcccttcgctcgcggatctgtgaagg

SEQ ID NO: 50827 - DNA, 750 bp, Zea Mays
ctcgatttcaagcttcacctagagagattcacttgaaggccgcaaaaagaattctaagatatttgaagtatactcccaatattgttctatggtatcccaaaggtgctcaatttgaattaattggatattcgaattcggattacgcgggttgcaaagttgataggaagagcacctccggttgttgccaatttcttggaagatctcttgtttcatggtcttctaaaaagcaaaattccgttgctctctctaccgccgaggcggaatatatatcggccggtaattgttgtgctcaattattatggatgaaacaaactctattggattatgggatcatttttaagaatgtacctctcatgtgtgataatgagagtgcggtaaaattggctacaaatccggtccaacactcaagaactaagcatattgatataaggcatcacttcttgagggatcatgttggaaagggagacatcactatatattcaattggcacggatgatcaattggccggtatatttacaaagccattggatgatacgagattttgcacattaagaagtgaaatgaatgtgatagatctctcaaatgtggcttgaggttgaacacacatgtgtagtattgcatttcgcttctaaatatgctctataggctatttattgggtatttttgatgattttttccattcttgtttgatctaagtagttttatatgaaaatgtgtattcctcaaatacataatgtgtatatgcatgca

SEQ ID NO: 50828 - DNA, 550 bp, Zea Mays
tgcaagatgttgcccgtcgtgcgctttcgcagtattgctcgttgttcaacgaggtagctgacggcctcgacctgaagtactaccctcaccgttcgaatgacattgctagaggtgtgattgtcttgcccattggtgagggcaatcccaggctgaacatcatggtcaacctggtcgccgtgctcaacatcgagctggaccacgcccttggcgagatgggcaagggttgggcgaaagttgcagaactgcgtgttgaacgagcaacgcgccactatcaagatggtggttccctcgatcctatcgggattcaagacccttaccgctcgctgccccgtggtcgctttgattacggcacccctgactgcaggacccagatagatttggagccatagattgacagagtcagagtcggtaataatgcttaattcaatgtcttagtcatagtcaatcttagttatagttactttgcttatcagatgttttgatgcttatcgtgatgaactcgtaatgaagttggatctttgtaatgatcgtcaccaaggtgtgggcatcc

SEQ ID NO: 50829 - DNA, 316 bp, Zea Mays
cttgaggttcccttgggccgtgggtagtggcccgacaatgtccaggccccagcgctgaaggggccacgtgtgggcgatcagctttgtgaattgcgaagggttgcccaaacgaggggaaaacttctggcaggcttcgcacgacctcgtgactcgattcgcggcgcagatcatagcgggccagtagaagccttgacggatcaccttagcagtgagggctctaggccccgcgtgagagccgcaagttccgctgtggacttcgcgcaggatttggacgccttcggtctcggtgacgcatttaagcatgggttggttgacc

SEQ ID NO: 50830 - DNA, 376 bp, Zea Mays
ttatttaaaagatagaattttttaactggatgtatgcgaggtgggacccaagataatgacatgtgagagatttttgcatgcagcttggggcggatgatggaccaactggtgtatcaccctaggtgatgtatagcatatatacacacactctatttgtcacctaaggtgatggactgtcccctgcgtcctgcccggcttatccccccacacggctccatgggccgcgcggctccctcgtacatcatgtcagatcctccgcgtgcggctcccttcgaacgtacacgttggctccatggtctgcatgtttgttaagtcattttctattctgattcagacattctagcatctatgcaacattaagtcattcttcattttt

SEQ ID NO: 50831 - DNA, 337 bp, Zea Mays
aagaatcttgataggatactccgtgtaagtcaaatcaccctgaacactaagctcttccattggtaactgttcctcagggacacggagacacttcttaagttgagacacatggaatacattgtgcacatcagatagattatcaggtaactcgagttggtaagccatctccccgactcgcctaaaaattctgaatggtccaataaagcgaggggacaattttcccttaactttaaatctcctcattccacgaagtggtgataccttgagatacacatgatcaccttcctcaaactccagtggtcttcttctattatcaacgtagctcttttgcctggtc

SEQ ID NO: 50832 - DNA, 542 bp, Zea Mays
ttcgcgctagctgggtttcgtaacccttctctaccctgcgcctataatacccgagcagtcgttccccttctcctctctgttcgtcccatcaattacgccgccgctagtgtgcatcgattgggagaacgtcgggaggaagcgccatcgctgtagatcccactcgctgcgaattcttcgtcctagaagcgtacctgggtaaccgcggaagcctcgtggaagtactccggcactcgactgcgtgaaaactcctgtggacacctcggaatttcctcgccgaactcggttgtcgtcgccatcgtcgcttggcgccatggaccgacttcaactcacgaccagaggcggtaaagaccctcccctgttgttcatattggcatgcgcttcgtgtagcatgttttggtttgggtcggggggcgccggaatggcttgtgggtgctactccggcgatgcgccgccgtgtccgcgtttgcgccaccgcgcgcggtcgtgtggctgtgggattggggagtcgccctgtgaacgacatatccgggccgtccggttgt

SEQ ID NO: 50833 - DNA, 823 bp, Zea Mays
tacaacctactcgagtcggccatggctttgtcgatgagcgagtgtgggggtcgtggggtgtccgcatgctcctccgtgtagagcatatgtcgtccttcctcgagcgttatgcactttgcttgatactcgaggcacttttcttatagagcgttccatcaatgatcacgatggactttgctttacgagataaatgcctagtagcgctccgtaagtcaatcggttgattagggttggcgccaatcttgcttttcggtcgttgcgaccaacttgccatcgcgagctagcgaggtgacctggccgtttgtcccctcaataattcccccttctgtctgtttgatttttaataagggtttgtagaggttgaatgcgaagactccacctgggacgggttttcgccctgatctatggttgagagatcatcgacttcgatgttgaaatgtctataactatgttgtagcttaaagcccctgaacttttctttgagcttacgtacctcatcgtagtacccgcacatttttggatcacatggcttgatttccttcatgacctgattgacaaccaatttggagtcgcccctaaccaggagttgtcatgctcccacttcgcccacgatctggagcctgttgatgaaggcttcgtattcaatgacgttgttggtagcgtcaaagtggaggcgatgtgaggacgatacccgcgttgcttccgatcttgaggtaggagccatcaaaatactttctccagtactccgggtcttccactggtggtggttcctgcgcttccgtccattccatgacaaaatcggcgagggcctatgacttgatcg

SEQ ID NO: 50834 - DNA, 1004 bp, Zea Mays
ctacgacgaatatgttgaaagttccaatagaccaacgcacagcactcggaggctccctcttcaccttggccacgacccgacatcaaaatgggtccatcacactagcgatggtaaaaagtaaagcccccgaaggagtcaaccactccttcggggcctcgggggctacacccgatgggcgcactcgcacgcacccatcggagaccgaatcttccacacctcaagaaaaaataacgaaagcataggagcctccaagcaagtgtcaacacacttcctcggaaggctcgcgagctactgtcacagacaataattattgacacccagattacgtccttaaaatgcgcttaagaactctacccaggtacataccccaagaacaaagaaccagggcttcgccttgctcgaggtccacgtcaagggccttccccaaaactccgcccaaaccgagccccccacgagggtcttacaaaatcttcggcttacctgagattgatctcgagtaggccacatgctcgggcatatctccacctcgcccaagcctcccgcgccctagggccccatctccgcctcgcccgaggctacctagccctaggactgccatgtttgcctcgcctgaacctgtctcaggcgatgaggacagagctacccgagggccaatgggggacaactacctttaatgcgcatacctaccctgcccagcactacaggtgcacagtggcaataagactgcggtcttttcaaatattaacatcatgactacgcatgcaccactgtgcatgcacgccgcctgccagcccctgaagggacatgtaatacgacaggagggcatatcggccctcgggcgcagattctgcctcacccggtgccaagcttaccctcggatccaaagcccccctcgcccgagctcgggtacctgctccaccacgaatcccgcaggaggccactccgtcgactgtggcacacgtcagaaagggttcgtctatcacctagggaagacttccacctcg

SEQ ID NO: 50835 - DNA, 478 bp, Zea Mays
gataagctctatgaaaaattcaactttcctttcaggtggcatacctagtaactcttcagggaacacgttggggaattccgacacaattctaattgtctcaatcgtattgaactccttgtcatctagtaataaatggttacaggctccttcttcttgttcaagtaagtacagcttggttactacttcctttccggatggggacaccaacttaactgttctcttgtcacaactgacagtggcttgatttctgtgtagccaattcatccttaggatgacatctaacccttgagttcccattactactaggctagcggggaagtctatcccccttatttcaatccttagattcggacaaatcctatcagactaaacttttcccccaactgaattaactcttaaaggtgggatcattggttctatggggatgttatgtgcttctacccaagatgtagaaacaaaagaatgcatggcaccagta

SEQ ID NO: 50836 - DNA, 535 bp, Zea Mays
catcctggaggacagctcggaggaacagctgccgacgcccaccccgttggcaaagtcaccggccttcgcagctaagtcatcgacatcggccccgcctgcaccagccgtccaagcacctgcacctggaggtgacgaccccgacgactctggggacgacgatgacgaggatgacaacgacgacgaaggaggagacaaacatgtcaatgaggaagccgactacgcccagcaagactacttcatggggtttggtcctgttgtcgaacattacacatcaatgttcgagacggggcacttccccaacctgctgcaagacgtgctgcacacgctaggcacctacgtccgccccttatacgaaacaaggcaagtgagcgagcctccccgggctttctactacatcactcgcatccacgtcagggtgatggatgcaggggataggggattcaggactatgtctgctcacgagtccttgacaccactatccacctacgctgccttggtcagcgatgctgccagacggaccctatggtcgcccagc

SEQ ID NO: 50837 - DNA, 721 bp, Zea Mays
ctgggcggcgccgccacgcgtggctgctggggagggttgtcgcttggggatggaccggtggccgtcagatggccatcgtacagctgtgattaggtcttggatacccctttgcgcggttatataggagtcgtggatcttagaatgtgcagatgcgattagatggcgcgcaatgcttcagccgggattcacatgggtcgtgggatcatgttcgaatgggtgaaaacagttttgatcccatataatctggaccgtcagatatcgatccggtggccatcatcacgtaccggttcacttgagtcgcgatttaatccggggcgtgcgtgctagatccagcggctcacatgtcatggtaccccttcagcctggcaaaatcactaaagagaccctagacttccttaatataaacccgccgtcctatctaggttaaaaatccttactgctgggtcctttgtcttgctgttaggcccctcaattcttagaaaattgtgaccccagtccagaattagtaggaatattcataatttaatcacaaaatgattttctttgcaaaaaaattattccatagacttgattaatccatatctaatctattttaattcctttttgatccaattcagttgcaataaattcatgataatattgtttattatctggtatccttattttagtatgaaacatatggttaaatttatgcgcgtgatttgttttgtatataccactt

SEQ ID NO: 50838 - DNA, 836 bp, Zea Mays
atttgttcctctgataaatcatatatttctggattttcgattgaggattttttatagactagaactatacttcttaagtttttgtgtgtgtatatttaaaagcatatgcgtaaataaaagagagggaaaattctataacatatagagaaaataaataaataaataaaatattttagaccagtgtttaagtttgtatatttagactaaaggtgaaactcacaacaaattctggaatttaaactatgaaagcaagtgaaaaagaaaaagaaaggaaaacaaaaagaaaagagaaaccagctcctacctaggccgatttcaaccgtttgcagcccaactaacctaaaccctatacccatcagcgctgtcggctccgctgcagccgctagaccttttgcaccgacgcgcgggccccaaccgtcatccggacttcgcacgtgccaaatccacccgctggcgctggtttgtggggcccatccgctagatccctcttcaagctcgtgcgaatcggtccgggttgaccgccgaaatcttcgccgcctgaccaggacatgctcgacttaggctcttggggtcagattccttccacgcggatatcgtggggccccctcgaccgaacgccatcacggactttgtgcccgctgctataaaactgagaactacctactcccggaccgtgcggctgcgatggttggggaatcagttgaatcccgcgacatccactcgacgccagctgggtgtgtcgtcatctcgccgtgctacttttccatggcgcctaggtccgacaaccctgctgctccatccagccatctcctccctcacggctccctgcaggccac

SEQ ID NO: 50839 - DNA, 415 bp, Zea Mays
gtgattaggagagcataggtatccagctacttattatgtaggacataggctgaataggttgaggtaagaaagattatgaccaggaaaagacttcatccaaaatgtttatgtcttgattcatctcgagattcgctttgactgttgtatccttccttgtcgaggttgatctcctcctttctttcggtcttggtgtctccatccgagctagggagatatagttaagatagctggggtatatgggtaggacaaaatcttatttatcaataggtttggatagatggattatgtaacctattgggagtgtatggctgagttgatctaaggcactaacttaggcccaaaacatgtttatagggtctaatctatttcaccagtattaactaacctatttatgtaactcactttagattagatc

SEQ ID NO: 50840 - DNA, 512 bp, Zea Mays
gtgcaacatcagtcatgacttgggtgtaatcttgctcagtggcaacacttgaagtaaactgtgttggagcagtcaagttttggagggattcttggtttgtggtggctcttgaaccggtatgtgtagtagtagttaggcttagagaagattgttggtttatggcagcactcctttgcctagtgaatctaatttgttgcccatgaacatcaggggccacaacccttttagatcctcgtgttccttgtgtaggtttgtcagcaacatcagtggagttatggctacatacaccttttgcaacatgggaatcctgtaggaataacacaataatcatgtgcatatcaatttgttggcaaatgcaagtgtaatgatatatttatatataacataagaaaacaaatagatgaattacaaacttgcttacctcctctttctcggagtcgttgctctcctcgccgtcaaacaaagacccagattcctctggaccatcatttttgctccttactcttgtacca

SEQ ID NO: 50841 - DNA, 579 bp, Zea Mays
gacgagtcggacacggcccgccgtgatggccatggtggaaaaaatgagtacaagacatagagaagatggcgacgatcatggtgatgagttgagccgatcgcgagcgagaacatggcaatgggcaagagaagatggccgcagggagaggcaaggatggccataacgagggtagagctggtcgtgtgaagttggacttggacggggatgaggcgcacctccatggtcagagtttgggccgtttggctgtgctttatggccagatctctccggttggagatgggtttcgtgctcgtttgttactataagggtagatgcatctcatcaactacataatacacgaggataaattagtaaacgaagaatttttggaaaatgccaggctaatcaatcagtagatgtttatagtcccgttttaacacaataaatgattcaaatgacattattacgaaacgctatgtttcaaaattgcaattgtctctgtttggacgggcgtcgagcgtgacaaaatacaaactcaaaattcaaaacaaaaacacactactgtcatatataacattaggctctcttcaatagagcatg

SEQ ID NO: 50842 - DNA, 693 bp, Zea Mays
gctggaatgttgggttaaaaagctcgccctatattcttaggaatatcatagctagtgatgtattccgtcctttttagagaccatatagtgataatataaaactgcatgccgccaccacctgaccaatctgttgctccgcgtgagaccggaactcaaaaaacgaccgccatgctcatgcccatgcgtctaccgagtatataccggaactcaaagaacgacgccataactagggcagaaaagctggtgcgtgcatgcgtgcatgccactggatcgatgggagcaggttcttctggttgttgaatgaggtggtccgatcccatctcctggattcgcatcaatcgcgtacatatcacacagcgacggacgatctacacaggccttgcttttgccattccattcggtctcgtcctgttctccgccgtcaataaaagcggaggagaagacgatggacagcaggacatgggcctggacgaacgtacacaggatctacctctgcttgcacgggcacgacgacccggtccgatcctttgcgttgcgatcgcgcggctgtagaatttaaggtaaggccgcaccgcacgtaagctttgttttagcccgcggacaagcacgatcaggtgacgttattatcgttaaataacgcatcaccaggaaccctaccggctagctaattccctcggccggtctgagttttca

SEQ ID NO: 50843 - DNA, 623 bp, Zea Mays
cgcagactcactctgaatggtgaatcactaggactcaacaatggatctaagactctagggttatactggttcgggtttgcaccctactccagtgtagtgctgattattgtattgctttgagcgtgttaaaacaattgtgcttttgtgggaagaaagaggccccctacccttttatatctcaagggtagaaccttacaattggacttgtattgtactggagagagaaagagagagggagggagggacaaagatatgcttcccgagttagcgtggtgggtccttcgtagggtcgtgcgtagccatactcccagcatggtgtcgtgctttcccgctgctctggctcttgtagcgagtccatcgctgatgtcttcgtaatgggttccacgaatcagtatcaaagtgcagtcatacggggtgtggcttctcctattgtcatgggccccttatcacctgctagcatgcataggagcacactcggtatggcgcattgtcccgtccttccgatgtacgggtcactgtagagaccatggtgcccattcggtgtgttgtgcaatacagatgtgacttgatggtgatgtgtcccatcatagcttacgtggatcagtagcgctggacttagatct

SEQ ID NO: 50844 - DNA, 675 bp, Zea Mays
cacatggaattcataatacactgtttcgctaagaagtactaactcaataaagagatgttttcgattcaaacaaatcactgcgcaggagaatttttgcaggaagcctcggttgcaggaatagcagaagaagatggtcgactcacgatagcaggtgcggcaagaacatctgcaacaatatcttcatgcaccacaacaccaggcctcctcatcaggatccgcctggcgcgaacgaccttgtccatggctttgtcgtacatcgccttcataacaacacgatcatcctctaaggcttgatgctgagacgggtggcctctagctcttatgtgacaagcctcttcgaaacacacagctccttgatgacagaatctttggaagacagcagcttactaagtcgggacacttcagactggcatgcccttagttcatcctgatgatggtccaggtccgacatggtgaagcggtgactcgtctccagaatagtcaagaaattgctagcatcacgatatagtctatccaggttgtcgcgagaagcaatgagcatttacctctcctcctacaagcaagaacaacactaagcaccaaagcaaagaaagcaaaacagaagcagccaagaaagttgacctcataagccattttctcggagtcaagttgagcattcagagaagaatttaaggc

SEQ ID NO: 50845 - DNA, 306 bp, Zea Mays
ggtgagattatcctttggcctcgaagggatgtcgaattggttgatccaccacgacagtcgtcgtcgcaggcccaaccgtctccgtcttctcaaattgttattcctattgtacatccatcatcacctcctcaaacttcacatgctgctcctcatcctctttctgaccctccttctcctcatcctcatggtggcccaccgtctccgccacatacatcgcccttcagggatccaccttctccacagccatcaagggatccatgaccatcaaagaaatctaaagtttctataccaaaattagtgtccccg

SEQ ID NO: 50846 - DNA, 344 bp, Zea Mays
tatttaaaacgagcgcaaaatgccggacgtgtgaaaagaaataaaattaatacaaaatgaagttggttatgttagttatatggaaatgtatatttaatgagtagagggatatataggggaaaatttaggggggacggttgcgggacgagtgaatatagggaagggaatcttgctgacgtggctgcatagtaacatttaggggggaaaatttaggggaacggttgcggatagcttgagcgacggcgacgcgggccaagcgagagaagggaggagaccctaacatgtaaccccacctgtcagcagtagaagcgtacgcgccacgtggctaggttggcgggctgaaa

SEQ ID NO: 50847 - DNA, 415 bp, Zea Mays
cccagacgtacttcgcaagcgccaccactgcgttcggtgtcagctggtggacttgcacctcaaaccttcgcaacacctccaccacgaatcgatgcgtcgggaggcgaagaccgacaatgaaaaaggcctcaaaaactataaacttgccctcaggctcgaggacctcctctgcgcccagggcccgcccgacactgttaccaaagtaaccaagccgctgcatctccagcacgtggcccgagaaaatccttgaggtcccaaactccacgatgtggccgggctgcaactcaaccaccgccatatcactcagggtctcctcggacgacggcgcggccggcgacgcgctcgtagcagacgaggaagaagacattgcaacgtaccgtcggcggcggcgcgcggtctgcttgatacgagccag

SEQ ID NO: 50848 - DNA, 388 bp, Zea Mays
gaactatcgacgaagtccaggcagcttcaactcagaaagtgttgtgcctatgattaccaagccccaaccaagtgagttatgctttctacaattcacttcaggttccactggtgatgccaagggtgtgatgataacacatggtggactaatccacaatgtgaagatgatgaagaagcgatatagaagtacttcaaaaactgtccttatcagttggcttccacaataccatgacatgggtctaatagggggtcttttcactactcttgtaagtggaggaacttccattctattttcaccaatgacatttatcagaaacccccttatatggctcaaaacaataagtgactaccatggaacacacagtgcagggccaaactttgcatttgaa

SEQ ID NO: 50849 - DNA, 532 bp, Zea Mays
cgaagcttcctagcttcgctttcacaagtccaccgctcacacgaaggcttcaaatgaaggttagctgtattattgcttcggaagacctgaaatagacttgtagatcgttaaagtcctaattttttgaggagcttccgtagaagaagggccccgacatactcataaataaatagctaccacaacagaaaataaggtgggttagagaggagtggatggataactagagactacgtcagctccgatttgattgaagcttgtttcacgtcacaaagaatcaattggccaaatgaccacctaatctacaaatttcaacattgacctgtctcggtacgtagctgtagaagtcagacgatgagcatattgtgtattgacatcttccttgtataagtagtctttgtattatatccagtcctaaactttcgtttggccaggcacgcatcaaggctgcgaaacgtgttaattaatcttttttataattgaaaacgacccatcagcatgactaagttcaaggggacaataaggaattaaggag

SEQ ID NO: 50850 - DNA, 711 bp, Zea Mays
agtacaccctgggccttataaataattaagcggaagctcccctccggcctccggtctgagctctgttgcactcttcacctttatgcacgactccgccgccatctacgttgctgatcgtcgatccctcgatcggcagcaagctacatctcgacgacatgaaccgggtccgtgttcaccgcactgcctatacgtctcaacggcaaggtctctagaattatttttgtaactcacctgaccagaacagtggtggttttgtggcacaccgaatcgtccaccaacggctacttcaacggacactggcgctggcatcggttagttgacgtggcactcggtccgatggtgcatcggacaggtccgatgcccataagtagatggaaagtatcaatcaaatcccaggttgggggctaagggactaggttcggtggtgcaccattccggtttggtggcgcaccggtttgatccggtgcccccgagaaagtgcatatttccagcagctttgagaaggaaagtgcaatggctatggggcctattggggctataaaaggacccctaggcgtcctccttcagtacacctttgaagcaaacaagtgtagtcattgcaaaccatatctatctccctctcttgtgtatttctctctagacttatgcactttgatatgagtactctattaattctattaaaccttgaccaagatatcaccattcacgggg

SEQ ID NO: 50851 - DNA, 868 bp, Zea Mays
aaaaaacggaggtgtgactggccacatgggggaggcagatagctaccatcggaccgcgctagcttgatgcatatgctgaggcggggagtcatcgactggctccatgaggatggcgacgaggatacaggcgatgcttcctctagaaccctaggcccgtggggatgcatgcgatgatgacctctagaaaacgaaggtgtggctggtgttggcaggagggggagggagcagacgtaagtcatttcgagtagatgaatggcagttatgggtaattttagcccaagtttgatggaaaatatatatttggtttgttgatgacctgttttgaggttgggggagcttttgatctcgcctttcttcaaaaaacaacttccgatcttactgctccacatgaagatcatttctaaaaaatacccgtttggcacaactccttccctaaaatcaagagctagagatgtgccaaacgggtcttaagatgtcgaagatagccttattaagttggaggagtactgaacgaaataaacatcatatgaaggggggaatatcgttcattcaacttttagggttcagttgtgagcatattcatcattttcaatcctcttacttccaaacatatccttattgaagggttattcctatctatttcattcacgttctatggcaaaccaagcagtcaagtaccacctttaagctttgttcggttgtatatggatccgaggggactgaaagagactaatcactttatatttagggagtgtttgattctctaactaaagtttagttttgtcatatcaaatgtttgaatatcaattgtgcctattaaatataggcttaagtaagtctaataaattcatcttgtcttttagttttt

SEQ ID NO: 50852 - DNA, 646 bp, Zea Mays
tgagtgggaggtggattggtgccttcgctgtggctcggcgtcagacgtagttaatgcgaccggtcatttatgacgggttggtcttgggctaggagcaagattcactcaagtggttttccttcggcatgtctggcccccctgtcaggttcccccacgcccgaccccgggctcggtgccgcaaggctcactcgaggacagattattttaggtagacgttacctaactccttcgactgactgttgggccctaaattcctgggccctttccccagtgtgctcgctgactgatgggccctagggaccgaggatcgtatccccgacaagggtgtctatttctataaattatatgtcgtagatcttgttattctccatcgtcagatgtttgttgcagttcttctctaggattgatgatgtgaacaataccgtgaatgatatcacattttcctttgtttctccatgctcccccttcatcgaatccatcttttgagatcatcattgaaagtattttatttggtatccatactatgtcttatatcgtcttataaaaattcactggaaacaactaagaacgatacgacataaactttgtattcatattgcctaattaaaaactgtatatgacaaaactctcagtgaaagaaaatcat

SEQ ID NO: 50853 - DNA, 321 bp, Zea Mays
gctggtggataatttctacagaagcctattgggaacaagactggatagaactgtcactattaatcttaactacctggggctgccctctcataatttggaggatctggacttaccaattacagaaaaagaagcctttgaagccattaaagagctaccgtccgacaaagcccctggacctgatgggttcacaggaagattttacaaagcctgttggcctatcattaaggaaaatgtgatgcaagtattggcagctatttgggataggaaatttggtcactttcacaaactaaattcagctcttatcacccttattccaaaaaa

SEQ ID NO: 50854 - DNA, 678 bp, Zea Mays
aatttctgtgccatccatctgagtgagacgatatgatcccggccgagtgacttctgctactatgaatggtccttcccatacaggtgacaacttgtgccgcccttcccccgtcagaattcggcggatgacgagatctcccactgcgaaggatcgatgcctcatggtcttatcgtgatagcgcctcagggtttgctggtaccgtgctgattgaatcaccgtgttcagtcgttcttcttcgagtacatcaacatcctccagcctagtagcctcggcttctgctatattttcgaagatcagccttggcgccccaaacttgagatcagcaggtagcacagcctctgaaccatagaccatgaagaaaggggtatttccatgcagagctcgactgggttgggttcttaagctccaaacgatgtagggcaactcccttatccatttccctacaaatttttcctgagggcctccaatatcatcccgttagctctttcaacctgcccgttggctcttgggtgtgccaccgaagcgtatttgatctgaatgcttttttgctcacagaagtcaaagaactctgaacttgtgaagttggaccccaggtcagttatgatactatttggtattccaaatctgaatattatgtcttgtatgaactccattgccttggctgaagttaaggaagca

SEQ ID NO: 50855 - DNA, 355 bp, Zea Mays
gcgcaagggatgcaaaactgtgcgccaagtaaatggacaaatggtccatgtgttgatgtgaaagtgggaagcaacaagaggtagctaacatgcatgcccatcagcagacagagtggaactgttactgtactgctgtagtggaaaatccatatcaactgaaaagggcatccgtggacttcataattgcccacaagagaagagcatctatcgttgaggtgattcattctagaagtttgcatgtatagacgcagaaagtcacaagcaaaagggtacatataatgactgatggaaaactgaacatgctgtcgttttacacatggttgggtttatgcgtaataggaacgaccgatagaga

SEQ ID NO: 50856 - DNA, 497 bp, Zea Mays
cttgcgagctctacggcgatgcacaagagtgacatgagtcacatgaccacctcatcttccactgtaccgtcgcccgctccttctgggaacacatcggctgggcggctggcaacttgaccacttgccacccgtcaccccggctgtggcctgtgggagatgcctagtcctgcacacgccccttcagaaattttctcaaccttgttgctgctatgctgttggtggcgtatataaaaccaccggaatgacgtggtcttttgtcactagcaaccttgcctgcggagactcttagtggcctgcagagatgattgtcgtctctggcgttatcggctgcgtttacatgatagctggatcgtcgacgattggtgtcaattgtttgtcatggcctacaggcctagtcctcccctcacctctgcattgtattcccatggatcccaacccaaaacaactgcaggtgcctatgaaccctccatccctaacataccagcatcaatagaaag

SEQ ID NO: 50857 - DNA, 750 bp, Zea Mays
tgctggcctagaaaatgtaatagaacagttggaccaaggcacaagaaaggaggtacaagtatctaggtgcagcaagaaaataggcttggggcaaaataaacacagaggtgcatagaacaatggcgtttctgtttatgtgctactcttttcttttttttctctctatttttttgcgatttttttcaaatattttttttagatttttttcttttgcagcagcacataagaagaaaacacaccaagtttcagatttttttgtgcaatgatgcgtcctctagaatttctacaagtttgccctaaaattagaataaatgtttggaaaatgagaagtcctatttcaaagccgaatttgggaattttaaaaccagcgaatccggcaaagccggaaagaattggatgcgaaatttaattctgtgcgatttgaaaaaaatgggcccgattcgagttctgaggcgaaagttacgactgttttaagtttggactccaaatcagggtttctggcgagatgttggaagggtgggagttcggttttgtggatagggtcggttttagagatagaattttttttgtggataaggtcggttgtagatataggatagattttgtggatagggtcggttttagagataggatttgttttgtggatatggtcagttttagagataggatctgttttgtggatatggtcggttttagagatagtatctgttttgtggatagggtgggtttttgagataggatctgttttgt

SEQ ID NO: 50858 - DNA, 377 bp, Zea Mays
caataatttacatattcaattcaacattacacactccaaatattacatagttttgttacagtagaaacctaatcttccttcatttgttatatacatcaaggttttgaaaatgtttattacaataaaatatattcctctttaaggactttctctgcaacttcgttcagcaatttgttgacgacttcgtcgacaatggattcagccatgtttatgatgtccagcgcttccttcatttctggatcaactagggaatcgtacggttccggcggcggaggtagttcagctgaaataggaaaaattgattaatttgaagccacaaagcaagtaccgaagctaaaaggccaaaaaataatacatatacgcttttcgcgctctgc

SEQ ID NO: 50859 - DNA, 1047 bp, Zea Mays
gctgtggtcgctgattttgttttcaagaacattcaaccgctgaaagacagagcatatccagcctatctgtatcgaggctttgctgattcaactcgggtaaccaacagaagaattcctgccgtggacttggtgggccggctcgagatgatactcagaggcaaggtgtcaaacgtcggcgctcctgttgcatattcggcttggaatctacctccttccaaggcctttaccagttttgtgtcaaatcctcctgctggtgatagcagtttgggccttagagtgtgaccctctcccaaagaggttagtgctttggttgcctcacttggagaaattcctgacgacgagaggcaggttcattttgagctgcctttaaatccaagtgatgcagagataagtgtcatgctggatatgttggctgaagattattctgatgcagtccctgcagaaacactggcggtagcgcccatcccagaggctagcgaagctttagatattcagaagtctgacaatgttcatctgaagcattctcaccgagcccatcagcctgcttctcctgctgacgggaagaaacaaaagaagagatgtcttcgtcgagtgtctagtttggatcaggatgctagtccttctgttcctgctgctgaggaagtgccagtgcctgcatttgctgaaactaatcccattgagtgtagcctacctgctattaaccccaatgggtgtgacctagatgatgctgaccccaatgggtgtgacctggatgacgctgaccccaatgggtgtactatccatgttgttgatgagggtaaggaggaggaggatgaaatccctctaactcggaagaacagtcgacgctatattgccagtggcgaaagcagtggtgttccttctccagccttgtctgctcttgttggtctacaagaattgtctctggccaactttgatcagactcttgaggatatggtcccagaagacctgttgtccgagccagcagatggtggcatgatggacgtttgcgctgacgtgcctgatgctgggctggagttgtcccgagcg

SEQ ID NO: 50860 - DNA, 678 bp, Zea Mays
caactggagcacaaacacaccatgcaatggtaatcaatgagtaaaaacagagactcaagtttgcaattagaggatacacctagttgcaatcaacaagcaacaaacgttgcaactagagcacaaacacaccatgcaatggtaatcaatgagtaaaaacagagactcaagtttgcaattagaggatacacctagttgcaatcaacaagcaacaaatgttgcaacagaaaatcaacaaaccacgcagttgcaatcattagttgcaaccaatattgaacaaacgacggtggagcaacaatttttgcttgtttttttcttaccggatggaacagctgggctgcatcaggagtgaccagcaatccaggtggaattgaaggcggtggcgtcagcaacgtcttgtgatgcaagggatcacctgatccgccgcgtacacccgctcccgctgtcgcaatcggatacggcaatatcggatcagccccttcagccacaacaatctccaaggatttaggggaggagcatcaaggcgattcaaggcgcggcagcaacggtggggccatggatctagggttagaggatcggaggaagaagaaggagacggcggtggcgcggggacagggatgcgcgcggcggctgcggggggcagggaggcgcgcgaataggacatgctgaggcgtgctcggg

SEQ ID NO: 50861 - DNA, 669 bp, Zea Mays
gcaataatttaggtgtttctctaaacatggcttgtggtgttagattaatatattcattggatatggtgtgaatttctaaggattaccagatgatgtgtacatctgttatttcctcttgtaggatcaagcaacctgcaaaatggccaaaaaaagtaacatggcacgagtgaagagctttgatagatattactttgcttcatttctgtatgtactctaacagcataggctttcatcttacaactttgatttgtttggagacatttttaatgacattcaattaacgcatttgtgtattgtatgttctgctaagatttgtttgggctagccattttgtagcatgagtgaagatgcatatttttatagcttatggatgctgtgaactgcagctagctgtccatccatagcatgtgaaagaacagaggtgagcaacgacgtagggagttacattttttatttaatccctggtttatgctttttgggtgcagaatgatatggaagttcctcaccagtatgtttctagggggatgcataccaaaagtagcagcagcaatagcctgcagagttcattccataagccatctaaagcaaatcaagctttgaagaggtctacaagtcaaaaggatttctttcattctagagacagcagctccgtgagtacctttgtcttca

SEQ ID NO: 50862 - DNA, 5980 bp, Zea Mays
gacggcaaggatcaggaggctaggggagaggagaggtagccgacggctggctagggaggagggagggagagagatggcttgataccatgttagattggaaaccctaaccctaaatgggtaggtgatatattaatatatatatccaagtacataggccaaggcgcattatggtgacacaaacacaaaatactaacaatccatagaataaaacatatcattagggcaacacaatgataaaagtgataaaagctctgtcctagaaaccttgttgatgccctaaaggagaagtaaataagactggagggactagttcacggaagagtttgaagcagagggggtagtgctctaccatagctgcaatccgacgataacaccaatgaccatgcacaagaagtaatcgctctaaaaaacgaaactgtgctattgcaaagtcactcgccataacagcctgcaatacaaagcagcatagttgactaattattagataaaacaaagcaaatacaaaaaaatagaaaaaaaggcatgatgtttctgttccaaaacgtagtactaggcggagcagcaccaccttggctagcacttaggtgctttttcaccaggagtggcttagaacttgatctatgtattaaagtgagacattagagagaggaagacaaattatgatcataaaactcatggatgccatatttctttattcatgggtcactcctccagctaagcgaaaaaagtaaaattgcccaggaacaccaaggtgctaggagagcctaaccacctgcctagcacactgtgccttttgaaacattgatgaagctagcttgggtaaagctcttttcatgaggtcaattggtcatcaagatatttaaccaactgatcatcgattgcaatgttctatcacatgatcagtcattctgtcctaaaacacagtacggaacaaacttcatgaggaagctaaaccttccatccaacttgtctttcaagcgagtaatttggctaaatattgcaaataaaacttgataaattataattgtagttctgtttagtccatttcaagaatcaaagcataggccggattcatcataatagcttaagtgacagatccaaaaatgaaagcagtgcacaaaactacagacctgcattccttcagcaccacttattccaaccccaatgtcagcctcttgtagcataccaacatcatttgctccatcaccaatagctaaagtagttttacttgtcctaattttaaccaatctggtgacctgcaacagtatccagtgctatagaagctgcaaactagtattcactattatggataaattaaatgccagcataaacttattaaggaatagtcaaacagatgcattatcttgttactcaccagtgccttttgttttggtgaaacccgacaacataaaacagatgcacagttgactgctagatccagaaatgagttcttaaggctgcccgtgagagcatgtgtcagagcattgccgtcaatgataagagcaaatgaagttgaagttcctttttgggaaatctttcctctagcatcttttaattttctatcaatttcctcaaatgtggcctgtatggtaagatacaaaggttacaaacgttattgtatacagctatacatagcatcaaccgatcttatacagcccacccgtttgccctaaacactactcagatgatctaatagtactgatacttattgacatttatgtgcatttcatgacaaaagaacatataggacttcactagcatttcaaaaattgtgtaaattctgcaattatttatacatacatgcaagtaagaaaatgtgtcgtcgtttctagattacatacaattttgtttccttctccactggacccctctgaagcacttgtacttgagttctccagtgtgataaaaatttcctccatctctttcctcagtaggttacaagcgtaactaaataccaatcatcaacatacattaaacattaaggtattgtaatctcagttttcagatatgtatcagcatatggaatggaactaaccctatgtttacagctgtctccaacttgtctccagttaaaatccagatcttaattccagcttgtgcaagtttataaatacactcagggacctgcaaggatagagttgatacaagcaatgatttgaccatgagttaaacaattgtttacattttgacacataaaaactgctaatttttcctcaaatatcaaaacaaggttacaaatgaaattatgtgacaaactacctaaaaataaagcatactatgtgacactatctaaaaatcatagaaattaagtgacagtcacccaataaatatattgtgcacaggaaaagagtaaatcagaaatagaaagaagtttgtctattcagaatttcagataaatataagactctttagaaaataagaaacgccaagtagatgtcaacgcaccccattttgcaatctatcctctacagcagtagcacccaaaagaaccaaatccttctcaatgtcttctgacaccttctcaacagctgcaacatgatcagtatgtacagaattcttggcagacgagtaatcctgattccatacaacatattgttcttcagtaagttcacaatatgcaagtgccagggtccggagacctgcctcagaatactcatcaatgtgacactttgttttggtcagatgagctgttccattatccttggagagcctttcgaatattacactggagcacagagatgaaaagataatgatacttatttgaacaggacttgaaggttgaaaattttagcatgtgatgtttacaactctgaagaaaggtacacttcagaatagctggaatagtttaaatatgttgcacaactttaaggctaacactatcatgatatagataattagatatgtacttataaacgggaaatgcagtgtcaaacatagaagattttcatcacatgtaaaaacaattattgaacctgtcagctcctttgcagaacagaaatagccgaccctcttctgtcctcacaataacagacatacgcttacgagcactgctgaattctaagatgttgagtagtttatatgttctgaaacaaaaatagcatcatgacgttggcaacgttgacacttttaaagaataatcactaagaacagtggaaatgataagcacctatcaacctttccaccaacgacaggatcgtactcatgcactgatatagttgtttgtgtcctatgataaaattcaaagccaaactctcttgcagctgtaacaagagctgcttcatcaggagactcagcttcataaggcataccagcagaatttccatctgccacaggaatcgcagtatggcaaacagctaagactcggaaaaacatttctatagcatccctagaacattctttggcccatcttccattcatcaaatgactatcagtgaaattaaatcccttgactgatctcttgaattcagtagtgtccttgcgcccaaaactgccattagtttcaactatttctccataacacgtttcaacttctgtaggcctacttccataagcaacaccagcaatggaacatttcaagaactccattgaattgcatgttaatgtccctgttttgtcagacagtatagtatggacttgaccaagttcttcattcaaatttgaagtgcgagctcttgcaggtttatcagactcggcgcaatacatattctggtcttgatttataaatgtgctctgtaaaaccttgacaatttctatcgatatatacaatgaaataggcaccaagcacacatacagcatcaggcttgtaagaaaatggcagaatgctgcaaacgatgcattgtttggatcaaagaatatatttgcttgatccggcctgaggtaccatgcatagcttcctggacttatctcatgctttgttctcattccaaacacaattgacccaaacgttgcaataacaaagagaatcacaaaaaggagatatattattttatccattcttcgttcaactgaactcctctttgatggtggctccattgcattttgcatcacctttgtatcatgtcccgtaaatattatggtgccatatatatacattgtattacgaagttttgaatcccttagcaggacctgttccggagacagagaatattgttgcccattgtagtatagtgttcctaagaaagaatacaatttctcattcggatcctcacaccgaatgaaagccttgaaactatggaaatggtcatcattcaagcccatagtcacctctaatgcctgtttccgcttcaagtttgtctcaccatcaagattcatcgtctccacatagcataatccatcacaagagctagacgaaaggaaaataagatcagcagggaagaactcatcctttttaactttaattatatcgccaactcgaagcttcttccattctgtctcatgaaatgattggatcccatcatacacctcaaccttcctattgttcacttctatgtcctatgtaaaagaagggcaaacaaattcagttcagtaaatattaaacaaaataatgtgtatatattgctgggaaattacttcaacacaatatgttttggttcaaatttcattaccacagcagaaatagcttaaatagatttatgttaattaaagaaaattttgtgtgggtatccaagagaaaaaggaaacacatttgctgaggccttatcaacacagcttgataagagataggattaccctaggtatttaaacgactatgttatggcgcaaatgttttaagacagtaagcgagtagtaagcacaactaaacgtacagttatctttctctcccctacattgtaaccacaagacaagcattctcattgcgctagagcagaaattaagtaattagcacaagcccttcgatcacaaacacagacaaagtacggccatccacaatcccaggcagctaaacatgccataatgacactatacagccaaatgataatacatttgcatgactgaaaaaaggcattaaattctctaactacccactagggatctggacactgcacgtttgagaatctcgtaaaataaaatgtcgcagagatgcactgcagctaataaactgccttgcaggtgcataaaattgttgtattgaggtgacaatcgtgccacatttcatatcaaaaccacccggtatctccgggcattagagcatgtacaatacaattaaatgaggtgtctcttaagaggtctctggtgggctaagctgtctctacacgactctatatatattgtgtcttttataatttaggaggataggattgtatcatgctcatgctgtctcttttccttggaaaaaccgaggagtttctggttgcacgtgcccttacgcaacaaatccaatgggccccatttgcctacccaataccgtcaagccaaccaatcggcctacggacgaggcatcagcatctgccagtcccaatgccttgctcgactcgaggaggtacagcatagcagagactgaagagcagtgcgctcacctgctgcttccggcgccagtcctcgacggcctccttggccatggcggcgctgacgacgacgacgagcgggagcaggacggagacggcgcggtagggcgcaagagggctgaaggagacgcaggcgacgacgaggaagaaacagttcgcggcgcggcggaactgctcgaagagcgacttgggcacgaagctcgcgggcgtgtacttggttgtcgagatcgcgttctccgggtaggccggctgcgcgccggccccgccatcggccgggagcgaggaagcgggggcgttgcagcggaccgcgcgggagaacccaggcgtggcaggggcggggaagggggcggaggaggtggaggaggcggcgagagtagtggcggccgcagcggaggcgagctcgacgagggggcgctcgtcggtgtccatgggcatggtggtggattggcggtggcggtggcggtggcgaggcgggg

SEQ ID NO: 50863 - DNA, 449 bp, Zea Mays
aaaagatccctcgaaaaccctaaactagaaccctagggggttaagtgtaaattttgtgcacttttggatccaagtgcaaaaaccaaagtattagagcaccataaatcatatgtttcacacatttgaagatttgcaagtgaatagtggagtttggacccatttgcaaaaagcaccctataaacaatatgtagctgaaatcttactgactgtggtttagggtgaacttggagagctcttttgaagataatccagtgatgtttgagcatggttactatagcaagattgtagctggattgtagggctacaactttgatacagagaggtggtcaagtcaatacatgaaatttgaagcaaattgcgctgcaaaacgctctgtcagaccgactcaatagaattgcgatggtacaatacactgattaagatcacaggtgcagtgcacctcgccaccg

SEQ ID NO: 50864 - DNA, 621 bp, Zea Mays
cttgtaattcccctgaacctactgaactatagatcggatctgtctaggcatattattgctcatatcttgcttaaactcggatctaaatgtgttaaaagaattacacactccctcataaatcatacgtgctattttcgtgacattagacccatatttgctagccacgacagtatcaatcatgtgagtcagttcttcgcatgtgacagatgaagttaccttctcgctggatgtgcctgccccaccggtttgtttgattgcaccattctttgtcttccagaaataagccaatttctcgttccgcttctcctccatctcccgcgcaatttcctcttcaagttccttcctgtccgcctccataaggtcctccatcgtgaccttgatcacgttcagaggatggacatcggatttgtccggcgctgtcttctttgcagtctgttctttcatgaccccattcatgattggcgataagatctccaaccgccaacaatttgtagttgtaaaacgattgaaaaattgttccccaccggagtcgccatatctgttgctatgaatcgatctttcaagcaaacaacaaagataattgaattagatggatctcactttcacggagatgattcagat

SEQ ID NO: 50865 - DNA, 416 bp, Zea Mays
ttgttgctgactttgtcttcaagaacatccagcctctgaaagatagagtgtacccagcttatttgtacactagggtcaacgaccctacccgaattaccaatagacggattcctgatgaggacctgctgagccggattgacttgatgttaaggggcaaggtttcgaatgctggtgctccctatcttattctgtctggaatctacctccactgagtgccttttctgaattcatttccaatcctcctaatcaagatggcagtccgggtcatagagtgtgaccctcactggatgacatcgatgctttcatcgctccattccggaatcttcctgaagcagagaggcagactcatttccagatgtcgaccagtgctgatgaggctgaggtaaatgctgttctcaacatgctagctagagaat

SEQ ID NO: 50866 - DNA, 376 bp, Zea Mays
gaagattcctacccaccacgcaccacgggtgaagaccttggtccactagctccattcgatgctctgcacttcatattttagtattcctgggcctacctgtcggggcccaactctcttgtatgtgatcctcttagtctataaaagagtgggcacttgcgtagcagggggaggacacacaggaccgaactcaagcccatcttgggactcaagaacggggcattcacacttgaatccctacggaggcaactccaaccaattctagactttcttaactctcaacaatactactcacaaagtaggggcggacccacaagggttctaggtgggtcatggcacaacataaggcaaccagacatcccactaccccccatttcag

SEQ ID NO: 50867 - DNA, 550 bp, Zea Mays
gccggagtgattagtggccgcatggcggtcggaatcatcacgctccatcgcggcgatcttacccggatcaaaaagatctttgcgaggagatgcacgccgcacgcccatctcgaccctggcgcaaatcacggtgcggattggtcatcggcggcgagggtctaaagcttatcctcccgggcactgtaccatggcaatgttcttcagtgctcctgatagccaaagtttagggtggattttctctaaagttttcatggcaactcacccaaatttctgcagcaaagttgtagagttacaaaccagctacatttcgactataggaactgaactcagttgagcactagatcatacataatttcaattccaaagctcgaccaataacactggtggtcatttttcagtcagtaacccgactgacagcccaactttgggtttaattatctcccaattcttcataacaacaatgcttaaccccttaaacaaagttgttcacctttaatagctctacaatattgatgtggtgacctagggcaaaaaccttataatttgaaaa

SEQ ID NO: 50868 - DNA, 606 bp, Zea Mays
ctaccacatagcaactgatgatgagtgtgtccgcatggagcgcgatgcgaaagtcgatgtctcttgcttcgaagattagtggtacatgagaccactttgtctgaacaataggtcctgtgatagcaacatggttaacacttcagtactgattccttttctgtcgtttgttctcaaattccaagctggaccctccgaagattatatgatcactcccctgaagggtggatcggcgaagtcctcctactttggtagtggggggagtggtaagtgttggtttggatgctgtggtggtggtggtagggctaacctttctcagtgttgaaggcgttgttgctatgggaagatattggggttttgctgctaggggtaatatgggtgctcattttagtattgatgctggtggtattgttgcagctgatagctatgagcgatgactctttggttgtctgccggggcggccatagccatttggtcctttatcgccttggtcttcaggcaatccctggttgggtgcgctgagtcttcgccatggaagacatagtagaatcttcttggctgctgagtgcctcgggcctctgcctctgtccctagtcgcatcgccaccgc

SEQ ID NO: 50869 - DNA, 526 bp, Zea Mays
cagagaagatggctagagctgatcaaggactatgacctggaggtacattatcacccaagaaaagccaatgtggtagcaaatgccttgagtcggaagttgcaatgcaactgtgttatgatggattctcgcattgacaccttgtgtgatgagttgagcaagatgaagattgaagtgattccatctggtgctttgtctcacatttctgttgagccagctttgcaagaccagatcatcatgacccagttcagtgacaagggagtgcaaattattaaggagaacctccatcagaagaccgagaagtataaatgtttccgccaagatggaaagggtatattgtggtttgaaagcagattggtggttcctaaaaacaaggatctcaagaagaaaatcttggacgaggcccatctctccaaattctctatgcatccagggagcaccaaaatgtaccatgatctgaagcccttgtattggtgtaccagaatgaagagggagatagcccaatatgtattggaatgtgacacctgtc

SEQ ID NO: 50870 - DNA, 1110 bp, Zea Mays
ggcctacaacgtggccagtacatctgtgggaccttgtgccatgccctcttgtcataagcacgatagaagcatgcatgtactagcctgacgtagaggcaaggcaagcatggttaccccatgccagccagggtaaggcaggtcaccaccacacaccgtctcggatgatgccatgacgtgccagaggggtgacagggtgtctctggcaatgggacgagatgtcgccacgtacgacctcaatatcctttgactttgtatagtggctcccactaggcgcaactatggaggacctcaacatcggagtctctacagtaaaccatataccatatagatggagcgatccgccattccaggggtatgactacgtgcgaaccagaatacaacgtcaggtgaaccacgtcagcaagactaccatagacaacaaattgtgccatacttcggacaaagttcccttgtaagagcctccccttgaactataaaagggggagcattcgacttcaagggaggactctactcacattctcacacttgcaccctttgtaacacgatcattagagcaatactacaatcaacactacactagacttgggtgcaagcctaaactagtataaactccctgttcgaattcttcgattcaccattcggagtgagtccatgctagcctcccccaccgaacacaatttctactgtgtccctggtacccgaaaccgcgatagtcattctaggcaaccttaagtcattcaagcgtttagataacattaagtcattccaacgtacaggaaacactaagtcattccaggacattaagttatttgagcgcgttaagtcattcgttaaatcatttgaccccacaactgcccactttaagttattcgtgtccattaaggcattcgagtgcgttaagtcattcatggtcgtcaagtcattcatttagtcattcaagctcattaagtgattctatcctggctccgctcgacttttggtttggctcgtgagtgtgtgtgtggggggggtgcgggcaatgcagacatgtgtcggtgatgtggctcaactcatggggatggtggctcgacttgcgggaagcatgcgctcaagacggaggcatgagaggat

SEQ ID NO: 50871 - DNA, 1249 bp, Zea Mays
ggaagaacaggaggaataggattccaaaattattatgaaggaagaaatcgaactggaacatcatcccaaagagcacagtaaaaagtgctgaaagtgttgtaagaaaggcctcccaggtaaaccacgataaccagtaagccgattcatagagccccatggtagacatagcctgcaaatatatcaaaattcgggctcactttgagcataaagatatgcaggcagactgtggtgagtgaagtctgaacctgacgaagctttagttctttctctgccaccaatgcactgatttggaaaacaaatccgaacatagcaatggcaagaaaaaaagttggccctgcttgagcaatggtagagaaggtctccgtggctgggtgagcaaattctttaaatccaacagtccagctaaaatttgggtctgttacattaatgaaaaacacttattcccaatgaacaattaactaacagaaccaaacacaaaactaacagttaattatgcattacacactaaagaaacatttgcggaatccaccatcagtaagcggggttgtaaaatttttaagcttttttctgttcctcttaatgaaaaatgtgcttgtgcttacattaaatagtctgaaaaaatgtttggacaagaaaatagtgtttaaaaagtacaaactagcaggaattattgtcaccgtggatgagaatacatataaacaacatttttcttaaataagcatggaaaattaatacctccaatcagaagccttgccatttccctctcagctgcaacttggagtggtatctggaacttgaaggtagggtcttcatatgttcctctccgtgctaccggagtagagtttgtctgaataccatactttatctgagtggcatttatatcttgaaaatgtaaagccccagggcaacgcattgggttttgaaacaaccaagcatcaacatcatctggagtcctaaaacctaaaacctgaaagaatcactgataaccaattagatgacgtgttgagtgattgtcaattctgggttgcagtcacagaacttgattaagttttggctagtgcacatactccctcaagtcataaatataagctgttagtattaacaaagtgactcaaagactttgttgcccttcatttatacactgagaaagatggagcgcttatttagaaatggaactaaagcaaaaatagggataaaagtgcttagaaattactgattggctgagctttacagcagctgctgttgtggc

SEQ ID NO: 50872 - DNA, 1941 bp, Zea Mays
tgggggtagtcgactggttcgataaacttagcttcgagcagtctgtggacttcggccttttctgcttcggtcttcttgtttgacattttacgaagtttctgctttttgggccggaccgaagggtctatgcttagaccatgctcgatgactgagcagctaacgccgacgaggtctatggctgaccgagcgaagacgtccttgttgcaacttaggcatgataacagcttggcttctctatcttgggtgaggtcttcgctgattaacactgtccgatttggtattgaggcatccagagtgactttttggcctggtcggtgctttgaatctgggctttggttggtggtgctttctaggggcgcgagacaacgtggccttcgaacttagagataagacagtgggcgttgtgctatcctaggatgaagtctctttcgatgttacgagcagtctgttggtccccgtaaattgttattgcgtcgagaggtccttggattttcatgcacatgtaaaggcagtgaattgctgcttcaagtttgttgatggaccttctccccattatggtgttgtatggatagaccatgtcgactatgtcgaaggtcacatgctctaatcttacattgggttttgtgccgatggagagggggagctctatcttgctaagtggaaatgtaccctttcctccgaaaccatagagtgggttgtcggcatgctggagtaggttgtagttgatgcccatttggtcgaaggcatgcaggaagatgatgtcagcttggctcctgttgtcaacgaggactttgtgcagctcctagccagccacattgcaacagatgacgagtgcgtccatgtggggcgcgctatgaaggtcgacatctcttgcgttgaaggttaatggtacatgagaccactttgtctaaatgacggatctagtgactgtgacatgattgaccctttgatagtgatccccttttgccatttgttcttgaagtcagagctggaccctccgatgatcatgtgaatactcccctgaagggtgggtccgcgaagtcttctttctttggtggtggtgggtggtaggtgttgatttggatgctgtggcggtggaggtggaagagctaacctttcttggtgttgaaggcgttgttgctatggaaagaaattggggttttgttgctgggggtagtatgggtgttcgttttgatattgatgttggttgtactgttggggttgatatgtatgagcgatgactctttggttgtctgtcgaggcggccctagccaattggtcttttgttgctttggtctcgaggcgatctctggttgggtgtgctgaatcttcgccatggaaaagacaatagaatcttctcggttgctgagggcctctgcctctgcctctgcccatggtcgcgttgccatcgtggccttgttgcaggggatagtcttgacgacgaggggattctctcctggttgctgctggtttgtgatgttgtgcaactagagctgggcacgctcttgtcggttgggtcctgatgtggaggcctgatccatgtcctgctggattgtagagtctccttagtctttcgttgagacttgactttcctttggtggagctcttctcatcgggcatacttttcaaaaagttgatacaactcctgcaggttagttggtggatcccttatgcagtggttgtatacgacacctgctcgaaggccgctgattgcatagttgctggctatatgctcatcaaccgagggcaacattgatttcaacagggggaaactttttgtaatatcacgaagactttccttctcttgctgcctacaaagcgagagatctgctagggcatctgtttcaggtctataaccttgaaagttcaacaagaatttgtcacggagtgacttccatgaatcaattgataatggcagcaaccttgaataccatgtgagag

SEQ ID NO: 50873 - DNA, 559 bp, Zea Mays
tcagctgattttactacaatatcatcaatgtggacttccagagtgtttcccaacagttcgtgaaagatcaaattcatagccctctaataagtagcaccgccattttttagaccaaatgtcatgacaacccactcaaataaaccaatgaagcctggacataaggctattttagacgcatcctcttcggccatgaaaatctgattatatccggcattaccatcaagaaagctaataattctatttcctgatgcattattgattaatgtgtcggctatgggcatgggatactcatctttaggagttgctctatttaaattgcgaaaatcaatgcatactctaagcttacctgactccttctccaccgacacaatattggagacccactctgcgtatctgcaaggtctaataaaattagcttctagcagccggtggatttcgtccttgattcatgggagaagaccgggatgaaatgttctagctctctgcttgaaaggtctgaaaccggacttaatgggcagccgatgctctacgatctctcggcttaatctcggcatctcag

SEQ ID NO: 50874 - DNA, 307 bp, Zea Mays
tgcaatctaatgaatgcaatgggtaagatacatttatgccatgatatgcaatttagaaatgataatgtatggaaatgattaagtcaataaggtaaagcttgaatcttactattggaagttctagtggtacacttagccaattaaagtcaagtatgatcaagtattaatggttagattattttggtgtcccactgatttttattttagtgtcttagtgaaaaagtttatcaagattcttgctgaatcattatgggtgaggcctattacttttgctaattctctctttttcctttttctatatatgctt

SEQ ID NO: 50875 - DNA, 507 bp, Zea Mays
agggcactgtagaatcggatgtgtccgagtgatttggggtaaggatcgactgcagggaggtagcttcggacgtgtcgcgattccgcggacctagctagagcctagccggagataattcaccggcggtcaccgtgactcggtcatttcgaccgtcgtgtcacccattcctcgctcctccctcattgtgtctcttcacgtggtaaccatgcacgaacgatgtaatccacgaccgtggatcgctagccggaccaccgcgcctataaatagccccgccacccacggcgaggtattcacctcttcaccagtgagctcggttgaagcacaaattcacagcatcctctccagctctcccaaaattggtggtgcacggtgaatccgtagttcttcgcgaccgtgtagccccaacctcacctcctaattccaccagaacccgtcgcggcaccgttttcccccttctcagtcaccggcgagtgaaaatcctccgcgctccgtggctagccactccca

SEQ ID NO: 50876 - DNA, 613 bp, Zea Mays
ttagtgacattggattcatgttacaaatgggtgacaccctggaatcagtacgagcaaccttgttatacttttttggtttttgtgtggtgtagtactaaactcttaggttctgagttgaattcctagtgtaaacaaattttcagacctcagttaaaaaatctcctcgttgtgcttcatccactctcgtgttatggaaactatgtgggccacctttcgtcctgggggatgttgcatagtgggcagagctgaccctttattagttaatgccattagggatagcttaacccctccagtcagagttatttttctaatagtactatgtgttatcactaaaccggcagacatggatgcttcaatgctacaattctagaggcaagataataccgatgatgtagacacataattttattatatattgggttatatccacgaataatagcaataaactcaaccatctatagtcttgataccttatgtggaccactgacattcacgacgacataggcattttgctatctacaacatgcactaagatgtcaatcaccatggtacaatggaaagcaattgctaagaggaaaaacactagcatctaagcattatatatgatctggaa

SEQ ID NO: 50877 - DNA, 661 bp, Zea Mays
ctctgccacgcgtcgaggccaggcgttacccacaaaatcctcggtatgtttccccccattgtgttcgccttcgttagcacatcgcagagcaccggggagcactagggttagtgaatcaggtccctggtcgcgctgctcaccggagtgcaccaccgtgagggagcagacgtcgccgctcggtgaccgccaggaaggaggatgggtgtgtgaccgtacatcggctgctcgaaggctcagattagattctggtagcgtttcaggatcgattgtattgggatgtttgatctgatcggagggttaggattgaagcgcgccttcattatatcatggtcgtaactctcggagtgaacgacatcatccacataccgattcatcgtctgcaataatcttatctggaccgcttgattgaaacgggtggttcagatctaagaataccctttcgcctacacatcaggttccttaaaacctgacccggtttgaagcgctgtccgcgtttcatgggatgttcgcccatcgggtgccgacacgtggacactgctctagagtcgcggacgcgaaacttccatccaatgacgttgagtgctgagcagttccgtctccctcctgaccttccctccctccacaccctccctctcccgtcacgcccctgcctcctcccccg

SEQ ID NO: 50878 - DNA, 355 bp, Zea Mays
gaagaacagccaaaaccactgggccctctgataatggcagagttgtcgaagccatcaactacggcgacaacaatcccgaggaaaaggaggatggctattgttttagatgttgttatggagtccctgaaaacggcgactcctgcctccaccgaggcctctaacgagaagattaaagattcaagagaagtagttactgcaagcactgcttatattcacgctgaagcaggatcttcaagggctaggccagcgaagttaatagaagaaactcttccagagaagcccacgtcacctgctcctgaagcaccttcgcatagtgatctaaaatatattgttcaacacgcttcgggaaagcagc

SEQ ID NO: 50879 - DNA, 599 bp, Zea Mays
atggattttctattttggcagatcaatagctcaaggaatactaaagtgcacgacatctttaaaatgttatgtactactgaatgtcacttgagtcaagcacatgatattgaaggtattcccattctttcagaatctatttcagtccaaatgaattggatttccaaattaaaagctatgtatccttgttcgtagacaacaaatgaaggaaaattctacaacacatgacacattcctgccatcaatgaaagattgggcacatgcacacaacaaatctaactattacattagatgccaaagctgaggtttaaaaaatacatattttcagtacctaatgtcctgcaagaaccagccaaccgctacagcctgtccctcattctcctttggtttcaacaccaacagaaaatattcattatttctctgctactatctaactttggacacgaccagagaagttcaatcattcgaacctactattgaacttagaaaagcatcacaaaggcagatttaactgaaagggaaaaagaaagaaaggaacattaagccatgggaaattgtactggactcatgccattcactacttaaaatataatagcactaag

SEQ ID NO: 50880 - DNA, 395 bp, Zea Mays
ttttgtttcttattgcctttacccttctcatctcttaatcttaccttagcgattacgctatgttcgttatctaaaacctccaatctcccaccttagttcaagcgtggtctcttacttatctcacccgtggttatatcctatactttacctcttgcaagacttatcttatctctattcttgattgtacctagattcctgtttttttatgcacatttacctcttcctttatatccttgcctattatcacctttgacccttgacctctctccatgtttaccatgatgtttacctatttcttagcctcacttattctatttcaatccgagagtgttattttccctatcctgctcttgttcgtttcctttccctttgtcgctttgcaagtcttgtcttac

SEQ ID NO: 50881 - DNA, 353 bp, Zea Mays
ggcggcgcagtcgaccgaattgggggaaaacggcgttgcggcggctctgggtgaaattgggggtggggattgaggctacacggccataagaaactatagcttcaccgtgcagactcaatttgggagaagggggcagagacagcgcgaattttggattgcgatcagctcactggtgaagaggtaaacacctcgttgtggctccctgctctatatataggcacggcggtccggcgatcatttcacgaccacagacatcatcgcgagtgcatgccgaccacgtcggtaggaggcacagtgagggagatcatggcctgagtgacagcacggcgagagttaactgagtcacggtggcc

SEQ ID NO: 50882 - DNA, 680 bp, Zea Mays
agttaagaacaaatgccgcctgaaatatttgagggggaaggatgccctctttgttggcagcctcaatagaatgttgtctaggttgatactgttgcactgaattgggaatactatcttttgtcaaaatttgttgccaggcccgtgactctatcgaaaaggtccagggtccttgcaagcatagatattctgctttggtgagtgtgacaaatatggttccgtcgtccacaaacatagatatgtgcaggccaagtgtttgacaacaaagcttggcgagcatattgagtccagtagctgtttagagcagtctttgcaatgtgtctattgcaatgacaaagagtagaggcgaaaggggatcaccttgtctgaggcctcatccatgtcgaagaggataattacgtacgttgttgagaagcacccttgaggttgatgaagagagaattgctacagtccatccctgccatctcataggaaagcctaggtgtttgaaaagagtaaggaggtactcccatcttatggaatcaaaggcttgagacatgtgcaatttcattagaagtgtcggggtattggttctgcgaaggtggtgggttgcattgcgcactgccatgaaactatcatgaatgctcctatgtttggttaagacactttgacaagtgaagacaatcacactcatatgaggttgt

SEQ ID NO: 50883 - DNA, 414 bp, Zea Mays
gagatggatacaccaaatatattacaatcgcacgtaagttcagtgcttttacgtatgtttatgatttgaattctctaatgatgatattatgttcgggagaaatgaaaatttgatgttgatataatgattttatatgttctgcacagccagattcgattgatcctagtttaattcctaggattggtatggtattctaagatgttgatgatgcgcataatttttataaacgatatgcatatgaggtcggatttcctttgaaaaggtatagggaaaagacaaattgtaaatggttaaattgctccagagaggggagatgtgcagaaagaaaagatggtaaccctacagtccagaacaaatacacaggtcgaacacagtgcaaagcagggataaagcttagaaaaatttatgatgatg

SEQ ID NO: 50884 - DNA, 350 bp, Zea Mays
caaaatcatatcgatttctagtgttgtttttcatgagcttgaaattcagctttcgagtgcgaactgatccaaatggactccgattgagctaaaatttaacacaaaccttgaaaatgactttccaatgtcttcacaaattttgagctcaatcggatttgtaaatcaatcgcagatcagaaaacaccgacagacttcgggttttgcctttttgatcaaaacgagttcagatcaatccacaaccaaaaattgtacaaaccagaggttcttaatggtataggaacttaatcaaacccagagagaaaccccaaaacaatccctaacccaagaaatcaatgattctcaaaaaaatc

SEQ ID NO: 50885 - DNA, 311 bp, Zea Mays
gtggcaccgaacgtctaatatgttgaactactagttttggggccatttgaaactagtcgttagggcatatggtgtggagtatgctatgtcatcgtacatgtctaatgcccctacaatagatgtgtaaaaaggttaatagttgaatggtggagtggggttataaatataccttatggttggccttagccacgctcttggcacactatacatttatgcatatcccttgagagttgagaaacacactatattcatgaaagtcgcctagagggggtgagtaggtgaaaccaaaaaattataaactttgaacacaa

SEQ ID NO: 50886 - DNA, 486 bp, Zea Mays
ctttgctagccttctctgcaagcctcattgtgcatctaagagttgagctttgcgaatgtgaacttctagcagtggttgaacttttatactgcctctctcccccaatcaagtagttagctgagcagactcctgtttccagtcttccagaaaatttgatgccttcttcccgaaaggcttccggctgagggcatcggccactacgtttgcttttcctgggtggtagtgcactacaatttcatagtctttgatcagctccagccatattctctgatggaggttgaggtctggcagagtgaagatgtatttcagacttttatggtctctgaacacattgcacttgtttccgatcaaataatgtatccatatcttgagagcatgcactatggcttctaactccaaatcatgagttgcgtaattctgctcatgtggcttgagtagtcaagaagcatacgcaatgaatttctcattttgcataagtacacaccc

SEQ ID NO: 50887 - DNA, 407 bp, Zea Mays
ccttaagcttgatatggttaaggtatgatctcttagggtgatgaaacttggttagggcttggctcctcaattttggtgcctttttctcagtccaaatcacatgtgataataggtcacagatgggggcactaagggaaacccctaagtaacacctggggtgttacaaaatcgtaagacaccgtaaataaccataagctagcattagctatctacacgtcatcgagcgcacaacatcaacaccactggaaggacgacgattactacctataattaaccaacgcaaacacgacatcacacgtacaagcatttaccacattcactttaatcatttattagttactctattatttaaactacttaggcacacgtacattcactgtgacttctaaacgtcatacaaacaaact

SEQ ID NO: 50888 - DNA, 463 bp, Zea Mays
cgcatccgctagcggtaagagcctacgagactgctccttgttcttcaccggggaagaataggtcactagacagagagaaggatcggctaagctctcagaggagacatagttcacaagagcaagaacacagagagggagatcaggagtgtgttttctagagtggggaaagggtgctggcagcctaaaacctaagaatgatgggggaggtatcttactgacctagggttacaactgccctccgattttcatggtaaaaataggccgctacagtggcccgaggccaccagggccgtccgatcgaattgaacggctcattgagggccgggagtggggcaagcacccgcgcgtgggctgaatgtacggcctaggcccaggttgcggtcttccgtaggctgtgttgggtcgaaagcccataaaggttgggagtgagttgtgcctcgtatgcaggccatagtgggctgca

SEQ ID NO: 50889 - DNA, 412 bp, Zea Mays
ggggcaccatgaagggagtggggtcgggcggcatcattcgtcgggagtgagatcgggcttgcaaggcgagccggcatcatggcaacaacaaggaggacgggggcaccaggaagggagtggggttgggcagcatcatccatcggcagtgagatcgggcttgcaaggcgagccggcatcacgacgacgacaaggaagatagggcaccaggaagggagtggggtcgggcaacatcatccattgggaaggcgacaactgtggacggtgtcgggaatagggcatctgtgtggaccagcttcggctgcgttagaaagaatgaggcctaatagattggtgcaaagactggactaaggaggagggcaagagtctagatgactgagcctatccgacgtggaggttcataacatgacttttt

SEQ ID NO: 50890 - DNA, 1115 bp, Zea Mays
ataaacagtgtaggctacaatgtaaaactgtattttacacggtcatatacacgctttgcggagcacaagattcaaacatggtcgacccactccgaggtagggaaatgagatgatgttactgtcgggtacataagaacgaggtacccaaagtaaaggcccataacctctctccgacctatttgccgagtaagtctacgaggtgcggcaaacgagcaagttcccgccgagcaagtctacaaggcggagcgaacgaccaagtctccaccgaacaagtccacgaagagggacgaccaagtccccgccaaacaaatctacgaagcgggacgagcaagtctttgccgagcaaatctgcgagcggggagaacgaccaaagatccgacaagcagacctgcaaggaaggaacataggccgacgccgctgggccacgtcggtcgtaacaagacgcgtcatcaccaaaccacatccagaccgtacgtacaacaccaaaaggaccctgataaacacgatgatacaccctcgcatgcgcctcggatatgccctcactaactcgtggggccggtcaacttcggtcgcgggaacctcagcgccgaagtctacaatgacttgtacaccggaaaggccaggataacaccccataccgggtgtatgcctacacgtgctggaaggtaacacaaggggtatgacgcaagatgaagttgtagtgaacacgaccctggacctcaccataagtccactttgcggaacccgccaggtaccgcaacgttgacatcgagcaagctacatgatccgtatggagagcagaaaggatagaacacagtatcgtgagtgcgtcagcgcacgcccccacatacaacaccaggagggctagagcaacctaggggcaacaagccaaggaccccgagtaaaatacaagtcccgactgtaaaggcagccctcgagcgataaaagggctagacaacctcctttctcaacacaagcacactagttgtaacacgctccaagtaatattacgatcagcactacactggattagggctcccgcctgaacaagtctaacccctgtgtcacagctcctagctcagatcctcatgattcaccattcagagttagcccgc

SEQ ID NO: 50891 - DNA, 1086 bp, Zea Mays
aaactaacgaagccaaacttagtgcacaagccgaagctcacaaagtcgaagttgaagatttaaagaaaaagcttgcagaaacgagtgaaaagtttgatgttgcaatggtgaagcactagataagcgaaattgaaaaatcaagggtacaaaagaatgtcgaagagctccacgactccaaagagagatgctatgaaatatccttggaatgcaccaagaatctaaagaacagttttgcaaaggtgggagcatactcttccgagcataggttcatctgtggtgaccccgatggggttatccagtggatcagcgaggaggtcgaagcttttgatgagatacttagcggtcgaggggatttctgtgcttttgctggtgcccgcgaggatgtatcaattttggaaaaggtcagatgtgaccatgcgaaggctgttgtttagctagaatttgttatctcagccgacgacattaagaatccttcagccgaagcgtcttcgttaagcggtaaattttactccaaagtatggataaagggcggtcatgagatagctaacgaagctattagaaaaaatgaaaaagaatctcacgacgctcaagaagaagccaagcgagctgaagaagttgccgagcgcggaaagccttataggtacctttactgagatttagcttcggagtccattttcagctttggaattaacaaacatttttttaatgtagctgaactttcacctccaccggagccatataaccctgaagctgacccagccatgaagaaagcgttagatatgataagaatcactaatgaagctgttgacgaagccatcgacagactgctaaatgaaaccgctgaaaaagtgctgaaggaagactaaatctttgtatacttgagagtgtaatgcttgtatataactttcgtcttttgtaagaatcaaacatcaagtttttgtatgtatattaatgtaatatatttctttgtgatgcatgaaaccttcgtacgtcccgtttttgagctgttggcaaaaaacaccttccctcctttttcatgcttcacgaagaaaaagattctgcttatgtcactgttgacaaagatta

SEQ ID NO: 50892 - DNA, 497 bp, Zea Mays
aaaagtcacacaatacaccaacaatcatttcaaagaagcaaatcaaaatgaacacaaaggacaatgaactcaagcatactggcacaacacaatccaattctactcattcaacctaaacaaaaggtgagacaaggtttggaataagaaagatattataaagtcaaggagtcaggtaagaaatagcgaggagttagacaagacatatttgttggtggccaagagtaaaataagataaccatgaactattaaagtgaggataaatgatacaaccaaggatatgaagtgagttagggagaatgcattatcaaggagtaagtagagaggcaaagatttaatatattaagatagatattgcgcaagggtggcaatgcaatggcaagaaaacaaaagtataagaagtcaaggattatatagcaatattagggattagaaaaccactataatataatgtcacccttaccgatctagtcgaaaatcttaatactaaagaacaatcc

SEQ ID NO: 50893 - DNA, 331 bp, Zea Mays
tgaactatgatcattttggcaattagtttttttacttgctcgtgattataatctttaggtgatgagatagtagggagaccagatccagattcacctgtcgttgaaggagcaaagttcaatagagactgatcaagcttctgttcgatatgcttttgatacttgtcacagttcatatgcctcgacaatgtcattgttgttgacccttgtgcataactctaaagctttttacaatattttcactttgcctttagtaatggattctccttatcggtcgggtttggcacattcaccttatcaaaaacctcccaaaccttgggtttgcctttgcttc

SEQ ID NO: 50894 - DNA, 386 bp, Zea Mays
cgaaaacgctgctggccgattctaccgatagatcctgcgccggccttcgcaggtaagagacaacgccggccttcacaaccaccacgagcgcagcatcggaagcttacccccactacttgtcacctttcaaaccgtccaaattgcgctggtggttaccgggaattgccatgccccgaccccatgtttattcaggccttacaatgaccagacgatgtttcctctctgtgtctgggcgactggcctaatgcgagtttcgatcatgtaacataaaggttaaagcaagaaaaagctaactactgtattatgcagtgcacttttagatctatgactaatctatactactcctattaagactacaacgaaggcgtccacaccttccatgcccc

SEQ ID NO: 50895 - DNA, 559 bp, Zea Mays
gagtcaaagggacctcatcttcttcctccccgtcgttttcatcagcaacacagacaacacccccattgggatcaacagcagatggagcacacccattggggtcagcgtcagtaaattcaggcacaggtacttcctcagcagcaggaaccgaaggaccaacgtcccgatccaaactagatactcgccgaagacgtctctttttctttttctgctcatcagcaagagaatcaagttgattggctcggcaagggcgttttgggcgaacactgacaggtctctgaatatccaaggttgtaccagctttcgagagaggcgccaccaccaatgtcccagcaggagcagcatcagaagagtcctcggccagcatatcaagcatagcacttatctctgcatcactaggatccaaaggcacctcaaagtggacctgccgttcatcatcaggaatttctccgagcgaggtaaccaaagcgctaacttcttcggcagagggtcgcactctaaggcccaaaccgccatcagcgacaggtggattcgacacaaaatgagtaaaggccttgga

SEQ ID NO: 50896 - DNA, 434 bp, Zea Mays
agccgattcagataagctcgccggagttggccgcctatcgaccgtgcgccacgtgcctaggtgctctaccacgtcacagtaactcatcataagcatgttcgttggtcgccggtgacctcgccacggtgaaagccaccaatcctttgcgccactgctctcccctctctctggccgccagcgcgccattccaaattcatgagcccaccgccctcgggtcatataaattgagtgtgccatcagctccgctaggtagtcaagcatccaacgcacccactcgtgtctcggattgtccaccagagagctctaatttgagatttcccccaaatcggtcaagaacaccgcgtgtgtgagcttgccgcggtcagcccttcacaggtccgatcacaccctcctagctcttgttttagcactcttgtatgcccttgatacttctt

SEQ ID NO: 50897 - DNA, 531 bp, Zea Mays
gttgaaggacagaggcctgatcgtcgaggcagttgtgatttattttgtatttaacaatatctagcctctaaaagatagagtgcatcctgcatatctatatatcggggttagagatcctgcccgagtaactgacagacgtatcttggaggaagatatattgggccgagttgagatgatgctaagaggtgttattgttaaccatagtgcccctcagtcttactctgtgtggaatctggttcctgctatgagttctgaccgctttgcccttctattgttattcgccgagttattctatgggtttttgtgttagcattagcgttttctcgttacgaagttctttctctgagtttgtgtccaaccctcctatcactgatgattacggtggctctgtttataaggcacggccgtctgctgctgaaattgaggccatagttgctgctcactagggtctgcctgaggaagactaacagacccacattttcatacaatgcccggatgatgattatgaaattgaagatgtctttggcatgc

SEQ ID NO: 50898 - DNA, 488 bp, Zea Mays
aaaaaagggaactctttttatcgtttcacaagacaagagatgcagctttaactatcatccatcgtccgtcgctttgtgcaatactcggtggtagctcattgcctcattcccagcttgtgcctgcctgagccggtgcggatgctgaggaggccctttccgagtctgggttgggactgcgacgtctacgcgggaacctaattgatcctttgctccatttcccaaccatggctttgaggtcatccagttcgtcattgagatagtatacctcgaagatctcgtgcgtccatccgtggttcagtccagctgatttcaagacatgcacattgagtattacttaatcaatatccatccttcacttaggttgtgatgttcattatctatagtcaatctcagcatttggaccatcccacttggtctcatgtattgaactatattatttggtaagtataatttaagtatcgtgtaaattatattaatcggcacaaaat

SEQ ID NO: 50899 - DNA, 551 bp, Zea Mays
gtgagttccttcgtgatattatcatgaaagagaaagttaacttcattggccttcaagaaaccaataagaaagactttgaagaatcttggctgaattttattagtggtaatagaaattttgtttgggtttggtctcctcctaatggtaggtcaggtggtttgttggttggttttgatgcggaaatgtttgatgttagagaaaaagagttgggggaatttatgattaggttgttggtgattcgtaaagtttcaggttttatttggaattttattaatgtgtatggtgctgctcaaaatgatcaaaaacagaaattcttgagtgagttatctgctttttgttctaattgttctcaccctttgttgattggcggtgactttaatattttcagaaaggaatcagataagaacaaacctgggggtactaacaagtggagctctctttttaattctattattgaggttcatgatttgattgagttggatcttagtggtcgtcattttacctggtcgaataatcgtaatcctcctacttttgagaagttagacaggttc

SEQ ID NO: 50900 - DNA, 1131 bp, Zea Mays
cgcgggagggttcgcgagcgccgtggagaagcgctcgataccggggatagttgaggaggaagggtatggagcgaggggagaggagttggaaggggacgtggccggggctttggagcagaggtggcctccgtgggatgggttggccgagcggtacaagctcatcggcgccacctccctcgccttcgtcatctgcaacatggacaaggtgacccatcctgtttgtctctatcacgtggacggttccgtcctgggcacttggcacgggatgacaggctggcaggcggctaattgcactgttacgattttgctctacggtattttgagctgctagaattaaaatgactatgaattcgagttgttgacctgctatagttttgctcatggaaaactaggtagtcaatgacatttaccggatattcagtgggaatttgggtggcaactggcaaaacgattgcactgtttttttcctctgggtttcctttagagaactttagctgaagtccactgatgcaatagtctttgtgcttgctctaaggaaacgtgccatatctaactgtcacattttttagggcttattttggaactcatttgcatcactagtacaaacatgtaaccttcactatgtaccaacagggcttttaggcatttccttacgagcatgaaattgtttgaagtaatgaagttgctatttacagtttaatgcactcttcttcatgtgacatatttatttaattctatgaaagcttttatggatgatcggtccatcatcctttcctgagaggaacaactgttcattgcaatattctaattttgcaggttaacttgagtgtcgcaattattccaatgtcacatcaatatggttggaactcatcaactgctggcttagttcagtcctcattcttttggggttatgcattgagtcaactaccaggaggatggctggcaaaattgtttggcggaaggtttgtttatgactttagggtaacaaaatcatcttgaatatgtacgaatacagtgtctatgcttatgaaaatactgatctaatatggcatctgcttgtgaagtaggaattgccaactgctatcctatggttcataagctgaacatatccttatttgtgttacccctttc

SEQ ID NO: 50901 - DNA, 584 bp, Zea Mays
gttttgcaaaatcccaattaagccacacaagtgcgagaagtaaataaaaatcagagttttctgtttgctgaaaatcatcccctctaactaatctccaatgttcattagcttaaaagcctcaaagctgtggactccaattgacaaagttgtgttaaaatatcccacttataacatgtcggaagatggctttgggaccaagcattttgacaagccaaaacgccagttttctctcgatttggcccctttagatagatcaacctttgggacaagacaactcctaacctaggccaagaaacactttggtctccacacgaaacagatagagggaagtcagggaaagagatcttacagattgatctttcccaaattcactaagatttggagccaataggtgtttgaacatgactacactaacaatctccatgtgctcgattagggactacacgccagcacacatccaaccgacgcccacacgcgcccccatgcccacgatcggccaccgtatgttttcaccctcgcccatgcctataaagaccacccctaccctcggctgttcttcccgcaagccccaaacctgttggcaa

SEQ ID NO: 50902 - DNA, 438 bp, Zea Mays
ttgtctcttagtggaaaataagaaggcacaagtcaacaacacaatacaagaccatgccgtctacaggaaatgaaagacaccctctcacagtatgcagccgactcccgtcctccaggaagcaccccatgagcgtataaataggacagtctacgacctcttaagggtaggcaaacacttcacaagtcttctcctccattcggtattgccacttgcctcaatcatcacctgggacatgggattcttccctctctcgttgtgcttgtaaactcctactgggagcacttaggtgcgagtaatataagtctcatcctccctctgttggaagtagggcctttctagcccgaaccaggataaacgacttgtgtcaactcgcatcaccatctgggtttggggcacgtgatggtatttcactagttggttaggtccacggatccaaac

SEQ ID NO: 50903 - DNA, 1034 bp, Zea Mays
atatgagtcccactccttgctgacatgagcttcgcctcccttcttttagaagaatttcttcttcccaaccttctttccttgtcttcttccatatatcatcactagcataaggacattatgacatataatgaccggtcttaccacatttgtagcacatcctctttccttgaggcttataatccttcttcttccgagtcttgaggatttgccaaaaacttttgctaatgagggccatctcctcagcttaagctcttggacggatcaattggaagttccttgcttggggctccatcctccttctcaattgttgccttgaaggcaacaactttgtggctcaatgttgggagtgtttccttgagctaagtcctcaatgtgcttggtgtacttaaccatcttctcatggctaagaacttgccaagaacctcctctggagtcatcacctcgtacctaggattttcatgaagcaaggtaacgagagtagcattacgagagacaagggaccttagcatgagtttgacgactttgtgcttcgtccacttggtgctcccgtagttctggatttgcttcaccaacatcttgagctgattgtacatctcttgcggcccttccccttgttgatggcgaaccttccgatctctcctttgatgagctccatctttgtgatcttggtgatcttgttgccttcgtgtgccatcttgagcatgtcccaaatatccttggtgcgttgcaatccattcgctttgttgtattcttccctaaataaagaggcaagcaatattgttgtggtttgtgagttgcagtggatgatttgggtcaccttgtctgagtcgtagtcctcatcatcactttgtgatatatgcattcctaattcaacaatatcctaaatacttgggtggagtgagtataaatgactcttcattttaaaccccaacacgaataatcttcaccatcaaagtggtggtttttcttatggaaccaaaagtaagggtgtgtgtttaggaatatgagaataatgaaaagcagctaggttataa

SEQ ID NO: 50904 - DNA, 544 bp, Zea Mays
catcaatttggatttgcgctgatcaggaaaacgctccttgcgcaagtgaatccaaaccaagtcccccgattcaaataacactttcttcctatgtgtgttcatgcttgcagccttgcgcactgctttgagcttaattgcttccttggtcttatcatgtatcttttttaaatatgcagcacgcttggaagcttccatattggttcttttctgcaatggaaggggcaacaaatctaccggagcaataggtttgaacccatatacaattttgaaggggcaaaaaatagttgtagaatgtactgctctgctataagcaaactccacgtgtggcaaatattcctcccaatcctttaagttcttctttaccattgttcgcagtagcattgacaatgtacgattcaccacttcagtttgtccatcagtttgagggtggcatgtggtggagaacaaaagtttagtcctaagctttgcccacaatgttttccaaaaatagctcacaaacttgacgtcatggttagatacgatggtctagggcatcccatgtagc

SEQ ID NO: 50905 - DNA, 653 bp, Zea Mays
cgaagaagcgtgagaaactgtctgggttatttcttgcccgacaggattaccagccaaagggacgtcatccgggacctctatacggacgacagaactttcagtctcaggaggctccaataaaaggtcttcaggaataatttcctctaatgcatggtcaatggcagacattatcaacccctgaacactaactaaaacccgacaaagcctgcatgggaatgtcactgctgctatagctgcggctgttcttgcgaatcaaagggacatcttcctcttcatccttatcaagcacacgaccaccaactctgacaccaccacaaccttcaatgtcatcctcgaggttggcgctcaccgggccaccgccgaggactgaggtagcaagatcagcatccaactccaagcctgatgatcgtcaaagtcttttatttcttctcttcccctcagcaggcgcggctggatggctcgtccgacgcaaacatttgcggcaaacactcccagggctctgaactccctcatcctctccaaggccatgtcaagttgcaatagtcaccgactcagtacgggcagagtcagacgattcaccccttagcatactgagaacaacgttcacctcaacctcatcagcggttgtcggcatctggaagtgaatatgtctc

SEQ ID NO: 50906 - DNA, 382 bp, Zea Mays
gagtatggaccctggctggtaaacacagttgatagcaaaacccttcaactctgccatatcttcttcagaaagctgctggccacctaggtgtcataggtcaaagtctgcttctttcgaatagatttccttagccttcttccctttgtctgacacttctgtggccacctccttttccatagccacgtctggtataatcttgtcaatttcgaacatggtggctgtgagatcttcgccttcagttgcaatggcagcttcatcatcaatagatttgacagtcttgtctgctaaagttggaggcggggtttgctcaattgcatggagtatgttcatcatacgtcgctttttctgtcccccgtctcttccgtcggtggccgaaggaatt

SEQ ID NO: 50907 - DNA, 528 bp, Zea Mays
tatacctctactctgtccctaatcaggtccctgaaagtcttactcatcgctcgcacaaatgtcggcaaggcgtttttcagaccgtaaggcattacgacatagcagtaaagcccatccactgttacaaaagcggtatgcttcctatcttccctagacatctatatttgatggaaaccagagtaagcatctaagaaggacaagaggtcgcacccggaggtagaatccacgatttgatctatacgtggaagtggatacgggtccttgggacaagccttattaaggctggtgtagtggatgcacatctgaagcttcccattcgccttggggacgatgactgggttggccagccacaccgggtgatgaacctcttcgatgaagtcggcgtctagcagcttccggacctcctttcggatgaagtcctgccgctcaacgaactgtctccgaggcttctgacccaccgatttggcgtcagggttgatcttcagatggtgctcgatcacctccctggggatcctaggcatctgcgat

SEQ ID NO: 50908 - DNA, 604 bp, Zea Mays
agctctcgtcctttgcatttttttgagccttcagagccttgctgaggattagaccctgccaagcagaactacgaacaaacaataatagtaagaattcccataaattataatgaaaagtaccgagtatgaagccaaaatgtgcaaacctttaggctattgtaagcaaggctatccgcaagttgatccttcgtcataacggacaaaccaagctctagcttcgaaaaccccatgttgttcatcatctcgcgacaaacattaacctccatgatatcgggcagatagtaaaggaagtcatcttcgtcattccctccgtataccaaggaccctcacgggtatttcaagttattggcatagtgttgcacttcggcaatttgttctaatgataactgctttcccgaagcgtgtcgaacaattatttcaagtcaccatggggaggtgcttcgggagcaagagatgtagatttttcagaaacactctcttccatgagccctattggcgcagctttcgaaggtccagcttcggcgagaacattagttgtgcttgcagtaatcacttctcttgcatcttctgatttttcaccagatgcttcagcggaagcagggac

SEQ ID NO: 50909 - DNA, 362 bp, Zea Mays
gcgaggcaggctgttgcgtggcccacacaccctgccagtggatgcgccggccctggcgctggaacgacagggtcagtgctcagaagttccactggatggtgcccagcgtctccaggaagtccacgccgaggatgaagtcgaagtagcccaggcgcatcccaacgcacgtgatggagaaggactcgtcgttgatgatgacggggacgtcgcgagcgataccggcgcagggtaggcggtcaccgttggccaccgtgacccgaaggtgttcgccacccgccatagctagcccaaggtggctcatcgtgtcaccgttgaggaagttgtgggttgaccctgtgtccatgagcgcgagtagtcgctcg

SEQ ID NO: 50910 - DNA, 347 bp, Zea Mays
ggtagatgttggatttgtggtaattcacattcaaccctgttgaatctgcaaaagagttgagcatagctttgagaaaaaatagttgtctagggcatgcttccatgatcaatatcgtatcatcgacatattgaatgattgagaagtcttggccacatcggtggtgtagtggaagtttgagaaggtcgatatcttttgccctgttaactatggattggagaagatcacctacaaagataaataggagtggtgagagatggtctccttgtccgacctgtctccgacaatggaatgttttgcctggcaccccattcaacaatattgcagaagttcgagagttcataatcttc

SEQ ID NO: 50911 - DNA, 1047 bp, Zea Mays
tgccgctagagccgccatggcgtggcaacctttccctctcttaaagcatggaaagttccgcgtaggacaagaaggcccacagaccatcatatgaggggttggccccatatggattgtattttggtgccttatcttgttagccttggagggtaaatacgaaccttactgaccatttcctttttgccatcgaggacgaagtcgaggttctcgaaacgaatcgtcgtttcgggggtccgatcggtgtcgcggcgagaacgtgcaaggcccctacctgacgcgccaactgtcggtgtttggaacctagctctgacaagtaaatttctttgtgtgagttttggtttcaggatggtgtgctcaatcggcgtgaggtttatactggttcagacaaaatgtccttgtatctagtcttcggtggctcgctctatcggcgtcgttgatgctcaatgctcatagtaggggttacaagcgggcgagagagggaagaagagctcctaggtctcttatgtgtggctataccttaggactgcgggactagagttctctgctaatccttggacatcatggtggttcgctcctttactccggcctttgtgatcctccaggtcttctggactgtctgtctcactcgtgtcctcctttgtgtccatctacgaccctccccttttatagtctccttctcttagaatgggctattgagccacggtaaaatgagacgttctaccctggtaaattgtgcttgtcaccttgcaccctggttgtctgggctttcatggatgtgtcctttatggcaggcagtatggacggcgtggagcaccacaccttcattactacctctgtagcctaggtctcgatgtgtctcgtcgtattgcgggtcatgcagatggtcggtatattcaggcctaggctcaataggttatgagtgcgctgcagaccaatggactcacaggtcatgagtgggaggtggaccgactcacctaatgtggctcggtgccaagcgtaattaatgtggttggtaaattatggtgggtcagtcttgggccagacgag

SEQ ID NO: 50912 - DNA, 1302 bp, Zea Mays
tttggcaccttgattcaggaacgtttcgccaagaatcaacaccagtttcttttgaggcaactatttcatatcagacagttgtcctcggtttcagcttatgttgaagaattttcacaactggtcgaccaattgactgcctatcagaatcaatcagacccattgtactatacattgaagtttattgatggtcttaaggacgacatcaaggcagtggtgatgttacaaagacctcaggattttgattctgctgcagtgttggcacagttacaggaggaggctgcggatttattaagaaagagggactcacggcgtgcatactctggagtttcgtctgctgctagagactctaaaccacccttgaacagcaagcaggaggatcagaaacctggtaacaccagcactgaggccaaattggcttcgctatatgcatatcgcaaggcacagggtctttgttacaagtgtgggctgcagtattcaagaggacataaatgtgctgacacagtacaactgcatctagtggaagaattgtggaacatggtgcctgtagccgaaccagaattgattacctcagatgatgaacaagaggctaagttgtgcatgctgaccctgtctcaaacagcagtcgagaatggcaactctcctcgcaccatgcgattcatgggtcatatagcaggaatggagattttagccttgttggactcagggagttctcattctttcctcagtgaagcagtggcagcacagttggctggcgttacactgatggacaaacctgtcaacgtacaggtagccaatggctcaaagttatcttgtgcttatgaattggtgaatgccaaatggtcaatcagtggagtatcattttcttcgacattgaaggtgttgccattacctacttatgatctcattataggcatggattggttagaggctcatagccctatggtagtgcattggtcacagaagtggcttcgcatatccttgccaacatctatggtaacactgagtggtttggcttcatcagtgctccacagctcagttattcaggtctgcagtttgttggagttaccagacaaagaacaattgattcttcagggccttcctgcagatattcaggaccttattcagcactatgcgccagtctttgaattacccactggcatgcctcctgccagagattgtgaccaccagattgagttgttaccaggcgctagtccggtccagatgcgaccttatcgatatgccccagccttgaaggatgaaatagaaaaacagatttcagagatgttacaatctggtattgtg

SEQ ID NO: 50913 - DNA, 336 bp, Zea Mays
tcaaatggctggctagggtggtatttatagagcccccatccaaaagtagtcgttagaggaaggatgttgttctacacctcaacggaccggtctggtgactccatgtcagctagccattggcttgtgacagattgtctattgcactatagtaggtccggtatgccacccgcaaggtctggtgctgccatgtcagatagccatcgacaactagccattaaacctcggtccgatgcaccaccggaccgatccaatgaaccagctgacagccaagactttgattcttctagcttctgttcttgggctcttttggtctcgtgtcttggacttgtgctaagt

SEQ ID NO: 50914 - DNA, 654 bp, Zea Mays
attacacccctaatgcacacgacattgccccacgtcatcgacggttgtaaacgagcacatatatcgcttgggcgggacggcgacggtagatgcatcggcggcaatggcgactggtggatttcaagggcatgtagaaaacccacctacaggtactcatgttgtgatggatacaccaccggtgttgttgtgagggcccggttgcgtcaagttcaaggaaggtggggcagatcaatctgtgattatgcgaccacctatggcgactattaattgacgggatatggatacactgcaagtgctacaatcacaggtaagtttgacaacattccatgttctttacatgaacctatttcgacccgcatccggccccctcatatgatagaacagttcatctcctgtatgaataacttaatatttttggatgcgatggtaggtgtacataattttgatatgatgttttgacattacagccaacaaccatagatccatcaatagttcctacgatagggatgacgttgaaggatgttgatgatgcttatgatttttataagagatatgcatttgaagttgggtttccgttgaagaaatattgagagaaaacctactctaagtggttgaattgttcgcacgaaggaaaatgtacatctagaacaaatg

SEQ ID NO: 50915 - DNA, 560 bp, Zea Mays
cgcaagttttcgtagacacagaacctatctatgtggaccgcgagttatttcttttattttccagggggtctttaggaaatgttctcgggcgaaggggtatggacagatctgcgccgcagaataagaagtgaacggtccagattaaattatgcaatcctatgattcggtacgcactactgaccgccagatccagatctgagggtcggtaggatgtccacgtatacatttgatcccagacgcacgccaccgatccaagggctcggattttatttggcgcacagggatacaccaattcaatctgaaccacccactggcgatcggacggccaggaggcccttcttccccatcaccccgctaagacatgaggcagcgccgcaacagtcctacggcggagcgtcaccggcgcatatccaatccagcaccccgaagctctcccccagccgacgactatcgaagaggcacgcgtgagaagctaggaactgtgcagggcacccataccggtgattggtgtgccgagtaatcccgcccacggggtctgcggatccgtgacgccaccatag

SEQ ID NO: 50916 - DNA, 537 bp, Zea Mays
ttgaggtagctcagtttgattgtggatacaaaaccatcattgggagactgggacatgaaaaattcatggccatcccgcactactcgtacatgatcctaaagatgccaggtccctagggcatcatcaccgtccatgccgacttctaaggagctgtggagtgcttttgaggggccatccaaacggctctcaaggctggaccctcagtggtactccctgcatagagcgacgacacgccagcagaggatagcctcagaattccctcgaacgaagcatccactgctacctctatgtggctaactgaagaaacaaagagggtcaaccttgggttctccgacgagcgcaagaccacggtcatcaactctagccttaccgacaaataggaaagcgagctcatctagtttttgcaagacaaccgagacgtgttcacatggcaacctttggacatgtcgggagtcctgagagagctggtcgagcatcaactcaaggtgtatcctcaatcaaggccgatccgatagaaactatgtcgtttcacacccg

SEQ ID NO: 50917 - DNA, 415 bp, Zea Mays
ccgcaaccgtttccggctataccgctccgctccagttttcggtaaaaaaatggtaacggaaatgggagaggatatttttagccgttttctgttcgttttcatccctaggtacacgtgtaggggagggcaaaagatggataaaaactatttttagtaccttttagtaactagagaactaaagtttagtcaccctctgtgggggacaaatatccccgaatccactagaaggcgaaaagacccttgcatgggccacagacccgtcgcctcacaaggtcgcttcgtcgtgggccgggaaaagactgcaaatgagatgggctgacccaggagggcaatgggatcatgcccggatcatccgtcagatcgcgcacaatttcaaggaaccgtccgttctctcccacgtccggcgtccttgaat

SEQ ID NO: 50918 - DNA, 893 bp, Zea Mays
aatagagtatctcgatatccccctcaaggacaacattaagggatggtgtcttgagtggttcatcgtggaaaatcatggcaaatatctccccctcggtcagggaggcaaccagatgttcgtacccccagctgggtagagtctcccaccttttcagagataactgaggccaaagtgctacttgctgaagtctgctcattgaaggactggggtctgactgctgaggccgtggtcgccgactttgtcttcaagaacattcaacccttgaaggacagagtctaccccgcttatttgtataccggcatcaatgattccacccgagtcatagacatatagattcccaatgaggatttgttgagccgactggatatgattctaaggggtagggtctcgaatgctggtgctcatgtagcttactctacgtggaacctaccgccaaataggccattctctgaatttgtctccaaccctcctgctcgtgatggtagcccgggtcatagaatgcgaccctctcccgaggacattgaggccttgattgctccactttggagtcttcccgaggctgagaggcaaactcactttgacatgccagctagcaccgatgatgctgagatggacgctgtgcttagcctgctggccggggaatcattcgactctacccgtaccgagtcgatagccatcacgactggacaagagtttgtcgaaaatgtggagattcgaaaacccgaaggtgcctacccaaagcgttcacgccgagtgaaccgcccgactgcacctgtcgaggagaagaagaaaaagaggcgactgtcgtgcttgcatcaggatgctggtccttctgtgccgatccctgatgatgtcctagtggacgccattcccaaggttaacgtcgaaggttg

SEQ ID NO: 50919 - DNA, 333 bp, Zea Mays
ctggatctgggcggggtcgtggtttggatcagggagtggccggctcggcggtggcatgggtggaggcaaagcctgatgaggcggtcagtgccaaggtcgcccacatcagcatccttgctcatgtctcgtgcaaccgccgccgctgaaaccctagttatctcgcacacagcagccgtcggggaaggttcgatagagtagaaggttttatacgatgatgttaggacaaaataagcataaacttatgtacaacaaagcgtaaaaggtttactgacaatattgggtgacgagtgagcggtcagggctttctccaactaaagagagcccatggctcct

SEQ ID NO: 50920 - DNA, 356 bp, Zea Mays
gttcctcaaccctagcggacgtcgtcttgtttggggttagcaaggttttccaaacgaacccaattttcttccactaacaggcaagttctgctattatgaccatctggaattcaacactttatgcaccttcagttcatctttttatcttcttttgcacctaactttacagtccttacctcatcactttttatcattcttccttttggctttgcccagttaggtttatccaaatttattccaccaatgtcaaattttagcttctacataatcaaatgatatgcacattattacaaaataccaattcatatgtgaactatctgaaatagctattttatttatgtaacattgtattcatg

SEQ ID NO: 50921 - DNA, 885 bp, Zea Mays
caagtttgagctattttgtaatttgacaggtgagctgttgactgtggtttgtgaagctgcagtgtaagttcacatcttaagtaggagttcttaatattagatcctggtttagttatgccaatgacaggctgatcaccgaccaaacacatgtttaccgagtacaactgtgcagctcaggtccttaggtgtcatgtgtactcaaagaaattactaatggtctttgtaaacaggaaatgacttctgtgctatcatcagctccacagtacaaccattgactctgtccacacgcttgcattgtacctaaatatttatgaaatccagtcttggaggttggaaggcggtccatggatggtttttttttttgaaagcaacgtggatgaaatttcttagttgggatttatggcatccactgattagtctccgtgaaggctggatccaaaccctactcatttgtcatcatttgctcttgctttgctccttccaggatagttcagtccagctctgcagtgtgacctcagcctctttgtctaatcactgctttaagttccatgatagagttagtttaatcactgctttaagttcgatgataaaggaacacatgaataattaggcgaaaaggtatcctttggactgtacttttttctataagtgaaatttatttcatcagaaatgaaacatagttccggtctctacaaagtttatatttggcctgctcaaataacccacaaaagttcaacaatagaaaaacagcaaatgactaaacttctaatctattgctaaaccaccatccattccaagcgaagatgtccatcgtaattatctctagctgcagtgaagcaacatttagcagcaattactccttctgcagtaggctccaaaaccgaa

SEQ ID NO: 50922 - DNA, 809 bp, Zea Mays
gatccccaaacggtccagatcagcgatcaacggcaaggccacctttggaaccccggacctgctaagggcatcagccaccacattagccttccccgggtgataatgaatggacaaatcataatctttaatcaattccagccgccgatgttgcctcaaattcagctccttctgagtaaaaatatacctgagacttttatgatcgctgtaaatgtcacaagcctcgccataaaggtaatgcctccacgactttagagcaaaaaccaccgcggccaattcaagatcatgagttggataattcccctcatgcttcctcaactgccttgagccataagcaatcactctgccttcctgcatcaacacacagccaagaccaatacacgaagcatccgtataaactgtgaaacgcttaccgctctcaggcaaagctaggataggggcgtccaccaacttgctcttcaatgtctgataactgacctcacaatcgccggaccagacaaagggaacacccttctccaagagcctagtcaaaggcttagcaatgctggaaaaatttggtacgaagcgccgataatacccagcgagccccaagaaacttcggatttcaaagacactagagggtctcttccactccaccatagccgcaacattcttgggatcaaccgcaataccctgctgattaatcacgtgccccaggaaagccacttcggatagccaaaaggcacacttcttcaacttgccatagaattgattcttccttagggcacctagaacgagacggagatgctgctcatgctcggcctcggtctttg

SEQ ID NO: 50923 - DNA, 721 bp, Zea Mays
aatttttcttgtaggagcaggactcaaggttcttgttgtttctagcacaacatctagcacattcgccatccttctcctcttaggagttgcggcggagcttttttgcatcttcggcattgttgcctctgttgaagggcttaaaacctctggcatttttggtatttcttcaaattttggccctttaattttatctttgtcagccttcgtttcaactagctcaaccgaaggtagcctcggcattacagccggcttttcagtcctctgcgcagacgaaggagcggtctcttttgttttggcagctgaagagggcccttcgttaaattcaggtatcgcggccggttcaatgtaacgcggccggtgagtcagaaccttcagcttttttcccttcggcacaggctcatttggggtggccgaagtagcaactttcctcttttttccctgtccgcgcagcaggtagcggtagtcggggtaaacaaagccaatggcgtcaaaaactctgttcagtctcttctttccccggcctccaaaggctgaagacagggcattatcttctgccttggaatatgctccaagcagttcatcacttgtagcttcgatacacttcagccaatcatcatttggttcatcaaacttatccccaaacctgaatgtatacttcagccggaccaaatcaccttcgctagagttagcgatagtctccttcggcatctcccagttttcc

SEQ ID NO: 50924 - DNA, 438 bp, Zea Mays
gttgaaccttcttttgtgatcgaggtgcttccatctttatgatagcttcaatcttatccggattagcctcaattcttcggtggctgacgataaacccgagcaactttcctgctggtaccccgaaaacacatttttcgggattaagcttccatctatatcgtctcaggctgttgaaaaccagctgcaagtcttcgatgaagttttccgaattctctgttttgattaccacatcatctacgtaagcctccacacgcttgccccagtgatcggctaagcatgtttgaatggctctctgataagtcgctccagcgtttttgaggccgaacggcatggaggtataatagaaggcaccaaacgaagtgatgaacgccgttttttcctcgtcttccttcgccaaactaatctgatgatatccggaatagcaatccaagaaagaca

SEQ ID NO: 50925 - DNA, 521 bp, Zea Mays
ggaaaactcgataactaaaatataaaaaacagaacatatcgacaattaattttaacttaggcaggactacggattgaatatattaaaagacatgggctatttgttaaaaagacactgccgaaagggtacgggtgcacgtgagccgatcgatcaacgatcgagggcccaaattagatatgaataggtattgcacttcgatcgtaggattcgagaacaacagtctagattgttattacggctagattccatctcacgtgtgcacccacgatccaacgaccatggtctaaataccagaagaggtatcacccttttctaatctccaccgtttgtcgctggatcgatggtaacacgctcttcccttccctctccgttcatcctccgcggcaaacaggactcccacggcagcgccctagccggccaacgtgatatcacaccacgatgaaccaaacctgaccgaaactatgcttcgtggagcgaagaacaatgcgaaactataggagggagtctcacctccctaccgg

SEQ ID NO: 50926 - DNA, 702 bp, Zea Mays
aaaagttttatgaaggctggactttgttttcccttgcacaagatgctagttgaagtgctaaagacatttgagatataccttcatcagcttactcccgaagccttaattaaaattggagtttttatttgggctctgagaagccaagggctagagccagatgccaagtgcttctgcaacattcatggattatcctaccagacgaaggcaattgggaaggagcagtatcataacaacttcggatgttatagctttgtacatcgttctgatgtgaggtatcatgtgccaacattctgaaagaaatggtccggctcttggatgaagcaatggttttatgtcaagaatgatctgagtgagagggaagatgtgaggggtataatccagcgccctatacgatcacgcttcggcattagaaggccatctatcgtgagtgggaatgaagtgcaggcatgcttgatggccttcaacacggtgtatacttacattgacaccagggatttagttcaagagcatattgcccataaggtgtggccgcttattaatgactgggagatgccgaaggagactgctgctggctccagcgaaggtggtctggtttatttaagatacacctatcgctatagaaggcaatttgatgagccgaatgatgactggcttgaggctattgaggctaccagcggcgagcttttgggagcttatacgaag

SEQ ID NO: 50927 - DNA, 434 bp, Zea Mays
cattgttcgacacgcttcgggaaagcagttatcattggaacaaattgtcgaagtagaacactatgccaaggacttgaaatacccccgagggtccttagtgtatggaggggatgatgaagacgactacctatactgtcttcctgacagtaaggaggttaatgtttgccgcgagatgatgagcaacatgggatttccgaagctcgaacttggtttgtccgccatgttaaaggaccagcttgcggacagcctcgcgtacaatagtttaaaggtttgcacattttagcttcgtgtttagtacttttcgagctatttttcggtaattcttacttttattgtttgttctctcttttgtttgacatggtgtaatcctcagtaaagctctgaaggctcaaaaggatgcagaagacgagagatgtcagatagcacttggaaac

SEQ ID NO: 50928 - DNA, 353 bp, Zea Mays
ttcgcaatgaagaagatgatgaacgacaaggcgctcgtgcggcacctcgcggcctgcgagaccatgggctccgccaccaccatctgcagcgacaagaccggcacgctgaccaccaaccacatgaccgtcgtgaaggcctgcatctgcggcaaggtgaaggacgtgaacagctccgcggagaccaagacgctgccctccgacctgccggcgtccgtcgtggcgatgctcctgcagtccatcttcaacaacaccggcggcgacgtcgtgctgaaccaggacagcaggcgcgagatcctgggcacgccgaccgaggccgccatcctggagttcgggctcgcccttggcggcgactt

SEQ ID NO: 50929 - DNA, 329 bp, Zea Mays
atcctcgccgccggtgagctggactccactccgaggactcccgtcgtactttcccccttgcccggcagccgaagcggattaactcgccggagactgccgcttcccggctgtgcgccgcgtgtccaagcttttccaccgcaccgccgcgacttaccctcgctctccgtggctcgccggagtaattgccacgactgtggacacgaatccaccgcgcccgtggtcttctccacctccggccgccgcgcgtcctctccaaattcactggccaccgcctcccctcgctataaattgagtgtccccgccactccgtaggatagttacgcatcagt

SEQ ID NO: 50930 - DNA, 318 bp, Zea Mays
ctaaaaacatgctctttgagttcactattcggtgcgatgtcggtgccagatcagacacgtccagtgctccttagtgctgatatgttgatttacatgctttccgattcccttgtttgatcaaatctgtttgaaaggtaagaaggatgagcttgcaaagaggcgacaacagctaactacgcgtgaagcaaacatcaagcgtcaccaggaagagctccaagcttgtgagacgaacatcaagaacaagagtgaaatgtataaggatgcaacctattcatcttttgggtgcgagagaaaaaacacccacactatacaccaagt

SEQ ID NO: 50931 - DNA, 275 bp, Zea Mays
tccgcgcagaagtcgcctaagggtgcagccggactaagcacaacaagtgcgaaaaaatccgatgtctatcgcgaagactatctgcgcagaagtcgcctaagggtgcagccggactaagcacaacaagtgcgaaaaaatctgatgtctatcgcgaagactatccgcgcagaagtcgcccaagggtgcagtcggactagcacaacaagtgcgaaaaaacccgaagtctatcgtaaagactccgcgcataagccgcctaagggcgcattcgaactagt

SEQ ID NO: 50932 - DNA, 483 bp, Zea Mays
ataggagtcatggtgcttaattgatatctgaatttgtaatactcttcacctttgtgttcaccaaaccactcatagaaaagaggatatagtgtattacatgttttatggcccaaatatctataaaatgcccatatgctggtaaccaggttgcgcctaggactagcgtgcatcatatctaacctatgctcctcgctctatccataaactttctcttcctcttttgggtacttattatgataccctggggtcatatcatcatgacaattggtgcaccaggttggagtaggactattgtttcttgaatttggtgcacttgttatgctatgtgctggggatatgatccccggtccctagggctcgtcggttagcgagcacactgaggaaaaagtctctagcaactaggccccgctggccagttggaggaaataggtaacgcctaccctaaaagaactcgcctcagacgaaccccttggcaccgagccc

SEQ ID NO: 50933 - DNA, 769 bp, Zea Mays
ctaacagtgacagaacttatatgtatgctatttgtctttgctatgtgcgtcgttaccaacttctccctggtacttggcccccctgggatgtaggctcgacgtgtcgaggctggatgccagtatacttaagagagaattggtgacctgccccccaggaggtagtatcgactgggacccggacatgcacacagccttggctaggaagcttttagtagtgcacccataggacccactaactggtatcttttatcctttgattcatgcaacaggacctacaagacttagaccgggaagccaatccgtgtgtccggaccccctggatcacaactccaaatactagggcacacgtcgcagagtggtggagcatgtaggcttagggtacgggaccaggctaagcggctacacagctccggaccaccccaggggacgtgtgtccgttctctagaaccgaaccctaggttgctggacccataggactatagttccaaatactagggtaccgtcacagagtggtggagcatgcaggcttagggtacggaaccaagctaaacggctacacagctccagaccaccctaggagacaagtacccgttctctagaactggcccccaggccgccggacccccctaccgaggaatcccaaacttcaagcctggctattcaattcggatgtcattatactggcaagggtgggaactgtatgggtgggttagataaaaaatgatgctcgtaaattgaaaaaataagagcatcacaaaaacaaatctgg

SEQ ID NO: 50934 - DNA, 492 bp, Zea Mays
atggtatttagtgaccatcaacaataactaaacaattcaatgagtggtaatgactcacttgcatgagaaacaccctctttgtaaagacactccaatgcccctatttgaaatctctcatgtgtccaaactcactatgaccaaacttcaatgctaacatgtttggttctactagaaggtaaggacatttttgttgtttctactattggttatgtcacttctaaaagctctaatggaagtaaaaataatccactgagctccttttctcaaacattttcaaattactaactccaacatgtctcccatagaatgaccattacctttagcatcgaattaggatttcacaaacatcttaagttttctacttgataatgcatcacctttcaatcttaatgaatatgcaaagttagaacacttaattgacactagataaatgcatttacgtatttaatttgtccctatttatattgtgattatctaccctataaatccagc

SEQ ID NO: 50935 - DNA, 638 bp, Zea Mays
tgtgtctaagtgttttgagtctgatgattctgggagttcgattgtgtggacagaggagtctttggatgaggatttggattactttgcggcattggatgtggctgtggcggaggtttcaccgcatgtaatgggtgatgaggatcttccgggtgcgagtgttgggcataggcggcgaagggtggtggcgaaatggagggtgagtgagttgtcgcgaagtgataggcgtcatcgtggtgaggtggaaggtggtcgccttcgtgtggacgggactggcaagcgggaattgttgtcctcgtcggttggggcgagtgtgggtgagggggagctgcgaagtctgtttgcgggtgaggaattaaggataatgttgttcaactataggaagatgggtatcatcccgaaggttgagccaatgtaatgtgtgatgccctcgctgtatgtatgtaaccatactcttgtgtgatgaagctgcacgctttcgttgatcaggccgctcccttaggcttctgtacggagttctttagaaaagacttcgattttttcgtactagtattccggctgcacccgtaggcgacttttgcgcggagggtcttttggaaaagacttcgatttttcgcacttattgtgctagtccggctgca

SEQ ID NO: 50936 - DNA, 375 bp, Zea Mays
tggcggacctcatcattcttgggcacaactatgcggttgttaaaccatacaataccttgatcatcttttctgaaacagtttgccttaccggcctctattttctcatgaatgtgtttcataccctcatcgcttctttgtgcatcaattattctttgcagaagaaccgactcaagcttcaagtgatttaaggttccatgttgaatcattctcaggtttaacttctccatttcttggcataatgtagtgttagaagtcttcatcgtaagacattgataggaagccttgcgacttagcacatccgccactacattggccttgcctgggtgatagtgagtttacaattcatagtccttaatcaactcaagccatctcctc

SEQ ID NO: 50937 - DNA, 816 bp, Zea Mays
ggctaattcaccatgctattccctaaggcacacattgatgagaaggagagcgcaaccaccagcattgtccattcccaagctttttggcctggagcagagaaacataagagaaattagcctatagctctcatgtgcatgtagacactcatgtagctgtgaattaatcttacagtgcttttagactccacatagatagcaccaaaaactatattccaacaatttaaacatttcgtgtgcagagaaaatgacaactcaagctttgtccaatgctcttgaatgattctgcgctttatgtggaaaatgaaagaagctgtttaaaagagcaaccactgtaatttaaggggcatataagaccaggaaggttacacagaagcacaagcaggactgcataaggacagggtaggaggcagaaagacaaaggttaccaaaccagaagggccagcaggaaacaggaaccagacaccttggcctgggaggccaccaaacctgttctgttgccaaacaatagaaatcagacaatcgtcatgagctcaaagggcagacaccaggccgagccatgcccacacaagcatgaggcaggtcagcaggtctagctcaaagcttcgactatgccatcaacaaatgcagcagtgcagcacatgaattcctaagccatcatatgatcttgcaagctaaatgcctgcctgttttaccggtcacagctgtattatctcgacctacaaatattctatagtggcatttgataatcgtgcaagccaaatgtctgttcttccaatcacaccggtgctatttccatcaagaatattctacactcac

SEQ ID NO: 50938 - DNA, 449 bp, Zea Mays
ctctaaaggaggtggtgtacattacaaagcgcgttttggtcgccggagggagaacgtacgtagttcacctactccgaactgcaatctgagggaggatcatccgtcctgctccatcttggcttgagcctttttttttctttttgtcgaggagagtccaccaacgtccatgtccatccattggccgttgcgttccgtgttaggtgatgcctttgcctcctacagtgtgccgttccaaaggcgtccatgggagatgggatcgtcatcgtccaccgacgaaggctgatgaaagaagccgtgcctgtctgactgtctgtctgtagaacagaagcgggggggcagttgaactagtcaccgttggagaggacacgccggcgccggggacgcccgggagtgctggacagacaggcaggcagttagctgtcactcgctcatcctccactccggcggcc

SEQ ID NO: 50939 - DNA, 277 bp, Zea Mays
cacaagttgtcaccactatgggaagggccattcattgtgtcggaggtcactcggccaggatcatatcggcttactcaaatggatggtacggaagtggggaactcatggaacatagagcatcttagaaagttttacccttagcaagacctcaaaagctatcggatcaacgttgtactctgtaattggaaaatacgccatcaataaaaaatttcattctcaaaggcattcaaactgtcagttatcaattgacttcgattcaatcagacttggaatcaac

SEQ ID NO: 50940 - DNA, 359 bp, Zea Mays
gcgggatccgttggccttcacgtggcactaggcgcatagcagaaggcgtgcccaggcggctgagtgacctgggagggcgagatttctcgccggggttagaattccgccgtgcggtcgctgcgcggcatgggcagctccaccaacgcatcgaccttgggtaagtgctcctccagctgactccctttaccccctggaacctgtaggaccttgcggtagtgtgtgagcgtcgtgtgtctgccggccattgctcaccggagatcctttatccgtagaccgccgtaactcgagtattgccttgttctcctcaccgttgcgagcaatatgcacgtactgggtttcgcatgatccctcccatcgat

SEQ ID NO: 50941 - DNA, 1460 bp, Zea Mays
ctttgatcaagtcaaatcaccacatcacatgtttgttttgaaattttagcctagtggatgcactctaggtgtaacatacataatgaaatgctgatgcgtatgatgccatgccaaagttttagttttcgtaaaaccaggggtgttacaagagtggtagcttctctgtatcgtatcctcggtagcagtgtgtgtcatcaactcataaaggaactttgttgttgggtgaagtctgcaggggagtgccaagaaccttctgagaaaggaggtctgaagagggcggcaacgttagctgtactaggagcaactcctccgtgaggacaacgaggaggatctgaagtaccatagcacagactaaagcctcattgtcgactcagggaatccaaaatgctcctggatctgagcagtgtgtagagtgacatcctctcgctcgaaccggaacctcatccactaatggtcagggtcaatcgaaattgtagcatagaacactctaacccactcctcaacgtaccagccaccaaaagtcaacaaggactatagacctagtagataagtgatgtggccctcagacactgaatcggctgctaagcggaaggctgataggtcaaaacgccggtgagctctcaaagaattctgctctgatagctaagctcagtaaaaggactcgtgggtccgggtgctgaagagaggagctgttgctggatctcgctgagctggtaataacaactccactggcacgtgacggaaacgtcaaactctggcagcagtggttcgctgaaaatcaaacagccaagggtccgcagcaagaggtagcacctcaatcttgtcacactcttggaaccgaggtggaggaactggtggagtggaagagggagcagtagcagtggaagcaggtgtggtggaggctataataggtgtggtggtaggctcaagagaggcggaagctggcatagtggaggaaggatgagtggtagtagtgactggggctaaggggccgaagcgagcaggagtggagtgagtccgagacaagaggcgacatacccgaaaagcaatctgatcagaggctatcctcagctaaccttcgtgctctacccgatctgctactgctgctgctgctcgagtagctctgtccaacttcctcttctttttgcctccctgctgctcaaggtacaaatccttgcccttgtcctgtctgaaaggacgaggaggttcctggtcatctcctcccccttacggtgtgacattcttcgtactcaccatcctgcactgactactgacacactgcatgagaaatagagaagataagcaagagcagcaaagcagtagataagtatataaataggaaagatttgctacccgggcacatctctcgagagaaaagctaggtaggaggggagtcgcaagcgggcacgcaggcacactgaaatgacagaagaggtgagcatgtattagtcacatagtca

SEQ ID NO: 50942 - DNA, 943 bp, Zea Mays
ctcctcacgacgtgcaccgcacacactttgtggaactatatccttaggccagcgacttggtagaacaaatcaaatggttagatatttagatctacaacaccatagaattagagagggaaagggagggaccaggggaggatgcaaggaggagaaaatgacattggcacctacacatccggagcatgttaacgaggggacaacggagcggtgatcttgaccagatccaggattagggttaggggacaaagaagctggaaggggatagagaagttagaaggggacaatgaggggaagatggaaggggataatggagaagatggcactggcacgctggcacctatgcaaccggagcaccggattcgctgacaaggtgacaacattgcagggctagaggggatagagaaggtgagcacaagagtcgagttgctgcagcggtgatggtggctcaccgtcgcccccacatctgcagctacatgtggggaaaatggagacaacgaggacgagtggttgcgcgtgagtggggaggggaaatgcttaaggtttctaagtaggccacgagctatggtggcggatgggaccactcatatgtactcccgatgacggtccctagccagaccagtcgttgtagatgggctgggccgtgcttgcaccatgggctgcttttaatggctcgagcatggctgttgtcacgcaaggccatgctgggctccaggcagacaagacgggattatggacatgtatacctgggatgtgaagcgcttcaagcatggacatgtacaggagccgtgcctttggttagagccggcgatgtgtggactgttgccttggtagccagtggtagagtgtgcagtgctaccgttgtagctgcctggtccgccttgctaggagggacccgtgggggcacaagtgtagtgctcaggtcattatcgtcatcattcatctc

SEQ ID NO: 50943 - DNA, 536 bp, Zea Mays
gactttcatcagttttgtgtcaaatcctcctactggtgacagtggtttgggccttagagtgcgaccctctcccgaagaggttgaagctttgattgtttcgcttggtgaaatccccaatgacgagtggcaggttcattttgagatgcctataaaactgagtgacgcagaaataagtgctatgctagacatgttggctgaggattcctctgattcggtccctgctgaaacactagctgtagcacctatcccagagcctggaaagaccttggacattcaaagatctgatagcactcgtccgaagcgtcttcgcccggccagtcatccagcttctcctgctgaggggaagaaaaagaaaaagagacggcgtcggcgagtgtcatgcttgaatcaggatgccagccttctgctcctgctgccgaggaagtgccggtagagatttttactgttgatgatcccaatgggtgtgacccggctgttgctgaccccaatgggtgtaaccttgatgacactgaacctaatgggtgcaatccggccag

SEQ ID NO: 50944 - DNA, 293 bp, Zea Mays
cacgattatttggacactccttaatgacatgaccacgacctccacatttgaagcactgaataccactactcttggctgtagagcccactgatgtagaagtggatgctgctaatttagaacccatgattggagcagcagcgttctttccactataattgctttgaatgtgggatcgcaagactccagttgaaccttttgacgctaagggtgcaacagtaaaccttgagcttcctccagtcatggttcgtgcaccatatgacaaaggtttgttgttcttagcatcttgctgcagc

SEQ ID NO: 50945 - DNA, 964 bp, Zea Mays
aagtgaggagaacagtcgggcatgaagaaagaataaaaataattggttaaattgtgtgtatttgtacatgaacaagaagggtttgtattgacaaaataagaagtaaattacgaggttctacaaatttgtttcgacaaacggactaccgtagctggtaataccatgcataggtcgtttgtgtgaaattttttgtgcacaaaaactaaaaaaggctaaatgaagtctggttgagcccatgcatagattcgactgctgagattgttggtgcagactgagggttctgataaaacatgtccccttgagggttgatctgaggactgtgggtttgatctgatgaatctatgcataacaagctgtggagtcgtgtatatcgtgcaatttacacggatctaaacacaaggaaatgttgtagataggaagacaaaccttcgatggaaggaacgagaaatatatatatgaaacattggtgtacaaactagatctagggcggaggcagatgtaatcaccttgcacgggacctcgtcatcggcatgtgcttcacatccttcatgttggtgctttgaccgctgttgcgtgtggcgttggttcttctcggatctgggttgtctttgcctcctttcgtattcgaggttgaagtccaacggcgacaatgcttgttgccttgtaccttcgtcctagttgttggacgaagggggaggcgtccatgttctccatctcgaacgccaccaccggaactagggttttagcgaggggagggaagaaggggatgtgaacgaggggacctacaattgacacagtgcattcaggacacacggtacatatgggcgacaccatgcattttgcgtaaactatgggtaagttattgaaggtctaagaagccattcacaaaggcatgaaactgatgctagaagctagggatgtggtcgtggaggtatttggagacacgtggtgatcaactagatca

SEQ ID NO: 50946 - DNA, 674 bp, Zea Mays
ccccctctaggctactttcaatcatcccccacgtagaaagacaaccaaacatccccgagtcccacgctggttttacacatgccttgcggctcattctcatggaagtcaccgttggtcgacccttctcctagcctataaagggggaggctggcctcatggcaagggaagaatcagagagggtcgagaggagagagctcttaggcaactggacaccattagacgaacacgaatccacaaggacgaataggaggaagaggatcaccaacgaggacatggaggccggagccccgttaaagccaagacctagttaggactccacccagcagcttctaagctccacttccaccccgataaaagacttgggagcctctcatccatctctcaaccgcttgtaactcctactatgagtttgatcatcaatggtgtcggtagcgtaagccaccgatgactgaaagtaggggacgttctgcatgaacgagtataaaccttacgccctctgcaaacctccggagccccaaacacgtatactaaatttacttgtcagagcgatgtatgaaacaccaacaataagaataaaaaatttactatccccgtctcaatttataatgtgcttgatttttttactaaatttgattggttcgtcttaataaagaagtctataaaaaataaaaaat

SEQ ID NO: 50947 - DNA, 628 bp, Zea Mays
tgctctattcaaattgcaaaaatcaatgcatactctgagcttacctgattctttcttctccaccggcacaatattggagacccactctgcgtatctgcaaggtctaataaaattagcttctagcagccggtgaatttcatcctttattcatgggagaagatacggacgaaatgttctagctttctgcttgaaaggtctaaaaccatacttcataggcagccgatgctctactatttcttggcttaatcccggcatctcagtgtaattccaagcaaagcaatcagaatattctttcaatagaccgatcatttcatctctaggatcgatctccagggtcttattcacaaaagtcggccttggagttttaccatctcctatatcaatctcctccaaaggacccaccgatgtaaacccctatcctaatttgtcgagatctctgaattcctctattatgtctcccatagaggaattagatgatctttgtgcgacggtggaccgtctggtctcgagagttggattgtctgcaacatggttttatgttgtagtgactgctcggccttaaaagctaaaccgttttgtgacagaccggaccgtcagaagccagatcgtccacgaccagggactcatt

SEQ ID NO: 50948 - DNA, 695 bp, Zea Mays
ctctaatggtgcaaatgcgcccgaaaaatgcaaatcctacatatttagttaaaatttcaccatgtgtgcattcctagaaaaaatcttatgcacccacaaggccaattgcacctcctcaattttgttatagcttcgtcatttactagcaccgacgtgtcgtgcccgttgacaaaagaaatagtggaagaagaccaggagcacgcttgcggtggtggccaggtgcaacaactacttttgcggcaccacatttgtgacgatctgcaccgcacatgagcatgtcttgttgtaatagttgggcaccaccttcctgcggttagcgccgcaaccacgacgggaggaagggctacaactagggatgtaaacggatgaaattggccgggataaatcctttcttgttttcactttgacattttaattcaagaatggattctggatcggaattgtcaaaatgggatcgaacacgggatatgcaagataatggaaacgaactaatccggacgaaaatgcatcgataatagtaaaaaatcggaaagataaaatgaaaacattgtccatatcatacataagggtgtttggttcgcacctcctaaactttagttggtgtccctaaattgccaaacaatatgactaaaggaggccttccaaacaacatttttagggactaatgtttagttcctaaagtttatgagggtgac

SEQ ID NO: 50949 - DNA, 373 bp, Zea Mays
acagagcaacaatcattcacatcacttgcccacgttgcatcaaaataagcataaaactgaagcggactgttttgagcataaaaaagacacctagtggatgttccttgtaagtagcgtaggccccgaagcaaatgtccataatgcaccgaagttggagcactcgcaaactgactcaagatatgtactacatgagctatgtagggtctcgtcacagtaagatagactagacttcccacaatatggtggtaccgagaaggatccgcaagaggtgtgccatcagatggacagagttgtaagtgaagatccataggggtggtagctgtccatgtatcagtaataccagaccgtgcaagaagatcttgattatatttgg

SEQ ID NO: 50950 - DNA, 735 bp, Zea Mays
ggttgttgcttcgataggaattagcatgcttcacacttctagaccaggtctgttgcatccttctttgctattggccaataaaaaccatacttgaaggcttttcctaccaatgtttttgatgctgcatgtattccgcattgccatgcgtggatttcatccagcagctgccttcctgtagttgagtgaatacatttcatgaggatccctaccacacctcttctgtatagcagaccccctatgatggtatagtgacccgactgcctttaaatgcgctccgcggtggccttgttgtccggttcttcctcgtttttatgtacctgataattggctctctctagtcgtttggatctgtttctgcctggtctaccatgttgcattgttcagcctgccctgcggtgatgcttggttgctgcacctcctggacaaaaacttcgagcggaacctgggcctgactggaccctagttttgatagtgcgtttgctgttgcattgcgatccctttccacgtgatggaattccaagccctcaaatttatcctccagcttccgcaccgcggcgtattagttgttcattgagtcggttgagcagtcccaatccttgtttacctggctaatgaccactagcgagtcgccatataccattagccatttgatgcccagcgaaacaatgatgctcaacccatgaattaaggcttcatactctgcaacattgttggaggctgggaacaggagctaga

SEQ ID NO: 50951 - DNA, 522 bp, Zea Mays
ctggaatggattaattaggagctagaatgagttaaatatgaattttacaagttcttagatttattttcatatacattaatctattttcggatttaattcatagttatatcagattgttggactgcggccactaatactaggaaggtgggggtcctttttgtgaaaatatgggcctaggtacaggtactctgatctttgaacaaccatggatggcgggttaattaaatgaaacccgagggtctcataagcaaaatcacatggtcgccgggttacgggtcgctctgattcgtttgatcgcaaacgaacgatccatattaaatctatcctactacgaaacggtatgcaacagggcccctaggattagagatccacggtccagatttaacatatctatatactcgattcctgctcgcccgatcacagatctatagcctagaatcgatcgcgcgaaggggtatgaaatgacctgatcccaaacacaccttactagatctacggtcagggtgttttcccccttcccca

SEQ ID NO: 50952 - DNA, 500 bp, Zea Mays
gttcggtttgctgaggaagaggtgattccagagccgaaagatgacaaagttgtagtctttagaagcttcttcagggaaggacttcggttccccctatacgaaatgattggtgaggttctgaagaagttcgagatttaccttcatcaactcacccccaatgccattgttagactcagtgtgtacatatgggctctccgaagccaaggaaaagtgcaaatgctgaagggttttgccgggtgcacgaactccactatcagacgaaggctagagctgatggtctgcacaagaacttcggatgctacaactttgcatactgaacggatactaaagctcatgtgattggttatcgcacaaaatggcctactggttggaccaatgaatggttttacatgaaagcttacgagaagaaaagggagaagcttatgagtttggtgatgatccccttaaaactaagcttcggcatgacgcggtccttgtgtaacatgtagcttgggtccccc

SEQ ID NO: 50953 - DNA, 646 bp, Zea Mays
agtacgtctttggccggtgggtcagaattttggctctcttttgctttgacgtggaggaggtctttggtgcactctttcgtttcaccacctttttcatgcaggaaagcggcagtcacgataaataaatccgatgacatcaaacactctatttaatttcctttttcctcgaccaccaaaagcaatatttaaggcttcgtcttcagccttcgtaaaagcacctaacatttcgtcacaagttgattcaatagcttcaagccactcgtcatctggttcgccaaactgatttatgtaatgatatgtatatttcagatgcactaatccaccctttccagcactttggcttgagctagcgtcaacatccttctacatctcccatttgttgacgaggggccgtactttaaaagttatgtgctcttgaaccaaatccctggtgcaaatgtagctgcacacaacgttaaacgcaaccaggcaagtttgtgacttctctgtattcacaataactggtcttttttcgaagcgggacaggataggccacttgattacatctctaatatcacctctcttgtccaagtcattttcatataaaacaactgcttcatccatgaacccggtcgtttttgccgaaatgttggtacagggtgcctgg

SEQ ID NO: 50954 - DNA, 1012 bp, Zea Mays
aagtcggggggcagactgaaggagttctaggcgaaagcaagggaatgatcaagctgatcaagagtatatggattctagtgatgtggatgactcctttaatgttcaggacataattccatcacacaaaactgcttgaggaaacaaaatcgatagaaataataataataaaggctcttctaaggttaggtacatacctaataagaggagagttcctttagatcacctttcccctcatagatagttcatcctgaaaggcatcagttggaactgttaggggttgaggaaacctaggaaatttgagttcttaaaatatttaaagagaggaacttattgatttcattggtttgcaagaaaccaattaaaaataagtttgatcaaacttggatagatgccctaggaggaaataaaaactttgtttgggtgagctttgtccctaatggtagatttggggggtttgttagtgggcttaaatgctgacatgttttatgttagagaataagaagctacaaaatttgtgttaaggttcttagtatatcacaagcataaaaacataaaatggaatttcataaacgtttatgaggttgctcaagatgataaaaaagataagtttctttgtgaattgtcctcctgtcacaagagcaaattccttttattaattgctagagattttaacattttaagaacggaaaggtaagagaacaagtctgatggtattaccagatggagatccctttgcaatgctatttgcgaacacaaggttgacttgtcacttgtgattcgagttgagtcatggagtaacctgcatatgaacgagagcttattggccttgtggggatggccattcacagtaaggactggtcactatagtctcaagtttcttcttgatcggcgcttgtccaccatccctcaacatacatgggttagtaagttgtttggctatgatatctctgtcaagtacagacttggcaaattgaatggtgcagcagatgcattatctcggcgtgatgaggag

SEQ ID NO: 50955 - DNA, 510 bp, Zea Mays
gctgattctgcaatttctgcaaacagtgatggaaatttctaggagagatcggcagatcgctaagtgtgtggtaggctacgcacgtcagtctctcggttagagaaagttctaaccaactctagctgatggtggtacctaccgctcatgagcataacttgctccaaaggataagtatttcctatttactgttaagagttgaaatattcaatgatggagaacaataaatatagaaagtgaaactaacatctttctccatcccaccagcacaccatggcttcttcccacatggttaactcatggatgtagtgcatgacaagtaatttctaattatcatacatactactgcaggaactgctgtgggacccataaccaggaattgtcaatcctaaatccagtttaacaatattctctttgcatgcaaactatatttactgctatgtgtcaccattacaataaataaatattacacaacagattgttgtacaccacagaaaccaccattgcgtaaag

SEQ ID NO: 50956 - DNA, 456 bp, Zea Mays
tgccgacagtctaagagaggaaatgttgttaccaatcttcatagcgggcatggcgccagcaatgagtaagagtcttggtcactcgcgtaaccttgatttctattccttgaccacttgttatatggcaatgacatcgtcgcttttcccttgcatggttagagatatgatgaccgtctgcgctagctctacatcaaggccctgaccatccttggcaactttgccgtcgttgagctatagtcttagcattcttccatttttcatgtgcgtggagctagttttcttagttccgcccgcgaacaagataacatattaacatgtgtgttattcttggatttgaaactagaaaccaatctgacttgagtaaaacctttgattttggttccatctcggatgttgtgccagttggtttctcgtttcactgaacccataaacagataggactctctttcttaccac

SEQ ID NO: 50957 - DNA, 390 bp, Zea Mays
ctcaacagcagaggacccttcagcaggcatcgactcttctattgtttcagtgcgcttaggacgatgcgtcaaaactttaaccttttttggcttcagcgtagtagaaatcatcgaagcaacagctcttcttttctttccctgctttcgcgaaggatagcagtaatctgggtatacgaaaccaataacatcaaaaaccctattcaaccttttcttgcctcgacctccgaagaccgctgtcatggcatcatctttggcccttgagtaggcgccaagcaactcatcgctggttgcgtcaatggcatctagccagtcgtcgtttggctcatcaaattggctcctgtatttgaatgtgtatttcaagtaaaccaagccaccttggctagacccagc

SEQ ID NO: 50958 - DNA, 479 bp, Zea Mays
aacgtagcaataaaattctttctcttacggtgcttgacatgcaagtggaaaaattttgtgttggcatcaccatcctcaagccataaaatccttgatctcatcctagccatagtacgcttcaggtaggataaaagtaaagaatgtttcttaagcttgcttttcagccaaaattcatcaggagtcaacaccctttcatcttgtgcaatttctagcttatgtgatatttcctttgccaatgtcagttgagatctaatgtgaccaacttgcctatcactccaagcttgcaacctcctggttgccttcttaagtttatggtgaagagtaagaatagggcagttcgcggttccaacagattcccaagcatcgtgcacagtatcatgaaatccctccaatttaggccaaaaagcctcaaaatgaaaatgtcgactccctgatttattatctcgaagacccagaattaaggggcggtgatcagagac

SEQ ID NO: 50959 - DNA, 307 bp, Zea Mays
tgcagtttgtcactcaaccttgagtaccaagctctaggggcctgtttcagaccatatattgttttatccaacttgcatacatgatgtgggaatttactatcttcataacctggtggttgtcacatgtagacatcctcctcaagaacaccatgaagaaacacgttctttacatctagctgcctaagacaccagcctctagacactgctatagaaagcaccactctgatagtagcagctttgacaacggggctaaaagtatcctcataatctatcccataactctatttaaatccctttgctaccaatc

SEQ ID NO: 50960 - DNA, 615 bp, Zea Mays
gagaggagaaacctaggcgggttcctggtgcaccatgctcgggtggagcttaccgtatcaaaagcaacagcatggatgcaatgatcgtggcggtagcactactgtcatgcggagtaggagaaataggcaggagagtgctgcgaatggggagtggggttgtgagcggagtccgatgtatttgatttgaaattcggatgacgcgtggagagtgtgaattgttggggcatgaacgatggttgctagcgtagagcgcgtggcacgcgtagagcaaggcaggtggttggagaagaagtggctgaccagtggggtcgaggggtcaacgagtggaaacagcacaggcacgcgagcattggcgttgacaggtggggtgcaactgtcagtgggtgagggtgagtgaaacgcaggcgacagcggcgacaagcaaggcataagtgttagtgactcgatgcggtgtggggggaggtgggccgagcagaggagtggaccgaaaggccggatgaggtaaaaaagaaagggtttcccttttctttttctatttgaatttagttttcctcttttaattcaaattcatatatgtctcacaatttaaataggcacacaacaatacaatttaat

SEQ ID NO: 50961 - DNA, 1157 bp, Zea Mays
cgacgctgagagcattgggatttgggagttcgagagaaatgaagacacgcttggagcatgaggggcacatgggctgcccagtgggctgggcaagaccacttcttactcctttctttcgttcttcttttttcaccatctactgttctgagctgttgttttaaatttccattaagttgttaaggtgttgactatgtcttgcacttaatcgtaatcgtaaggtggtagtaaattgccatgactcgccgctttgataaacatgattttttgagtttatagaacagatacagtgattaacgaattgactattcgtgtaataaaatctgactaagcttaaggtattattaaaatcaatagagtgcagtttgcaaaacattcaatgacaaaaatagtaagtttagtacgaaccgagccatccttggatccagaggccaggcgggtgctcatccattgagatatggacaaatcagtcacatcaccatcgtgcttaccaactaagcgaacaccatcaacaagcttttcaagatgacatttaacagggtcttcaacagtgaagtcttttcctctacccactttagttgtatctattcttaagacacagttcccaattccaacaaatagaatctcctgcaaatacaggtttaagtcactttgtaggttgatgcgcaaaaacaatagaggggtgtgatgtaaggctttacttgcttatgcgagtgccaacatatccttggatggtaagcttcagcctcgcctacaatctggatggcgatttcaatcttcccagtaatttgtggtttattttcctcatcaggtccttcatcgattctccacacatatatccgtccatctatgctcgcactgcagaagatcgaagcaaattagaacttggagactcgaacctaccaaaactaagtaactaacgtgtataaactagaagcaacaagataaattctaaaatgcaatgctagataaccagataatagccagcaaacagatcactgattagtgtggtggtaactgaacatcctatcattttgtattagtaccttgccaaacgatggacatcctcagcaaagaaagccatgtctgtcaccctctgcggcaaaaacagaatgacaacaggatagatcaaacaaatgcagtcatgtgctcagtaaaat

SEQ ID NO: 50962 - DNA, 418 bp, Zea Mays
tcgtcagtaaatgacctaaaaaactaaataaaataataataataaaatttgttaccttaaaattagcatagagcaggcttccggcgatatggtgtcgttgatatctgtagaggtcagcttctagtttcggtaggccaacgcttttggagagggttctaacaactttggcctcggtgcggttccgaaggcatcttagctttccttcgttgaccccaccaaatagcgtagcccctggcttatacccgcaagatatggcatattttttcaactcttccttttcggcaactgttagctcttgtccaagcaaatcttgaaagttgaaattttcttcttctaaaatgtcatcgatctgctcttttcccttttcagttgacgtgtttaccgcagccacagcagcttcttcttcagccattttcag

SEQ ID NO: 50963 - DNA, 274 bp, Zea Mays
cttttcctcatttggcattctagaatgcaaggaacatcatgtggctgctattatacaacctgtatgcatagtatcttttatttgcatatttatagaggcgttctcacacctgtctggaaaatagagaacaggttatgctagtagttcaaatattcaatagtatcattttaataggaccatcaatccatcatctctttattttgccaatatgtagttcaagtgttcaactatcatgtaacaccaatgactgtaaacccatactgatactgctagg

SEQ ID NO: 50964 - DNA, 1132 bp, Zea Mays
ggttattacaccttgcaacctaactttagtccccttatgctagaactccaaagccttttgtttccaatgataaagcataggatcatagttctgcaaccaatcaaatcctaagataacatcatatgaacccaactctagaattctcatgtcagtgctaaaagaatggccattacaccaccattctactgcaggtaccatagaatcactcaccgactccttaccattagccacctttaccttgacagcaggacaactgatagatggtaaccccacttgctgcacaaaagcagaattaatgaaagtagtagaactgcatgtgtccaccaataacaaaaatgcttgatccttcaccaatgcttgcaaacgaatattctgcatacttttagtaccagaaatagctagcatcgacggtttacaagactcatcccctagttgatcttcctgatccaactgctgtaaaacttcctcactgagctccaaggacaaatcctcaacagaaagtgtattcaactgcataggaccttttattttacacttagcagcatgacctgcatcatacttctccccacaaacaaaacatagaccatgaatccttctataatccttgagtttcctttttttggagagatcaacacccccatttatctgcttatggtcaggtctatactgcccaccttgtctgatgacagcccccctcgtagaagtcgacctctacctttctccaaaacttcagagtgcaactttgccaatagcacaacacgattcaccgtagttggtacttgacacaacactgagccccgaatatcaggtttgaggcccttcacaaattgttgcccaaagaaaatttcatccaacgtaggattgtgcatagcagtggaataacgtaacccaacaaactcctctacatactcatccactgaacccgactactgcagatgaagcaggtcatgcatagcttgggggtactcataagaaccaaaagtactcaccactacagcagtaaactgattccaatttcaaagaggttgattcaacttgtaaacctgcagctatttcgctgccttgccttccatatgcatagaggctgccatcacccacaacgatgcctgagcatgatagagagtaaagtaat

SEQ ID NO: 50965 - DNA, 456 bp, Zea Mays
cacaactgcacttatagaaaaagaaaacatacacacaattcttcaacggtgaaatctttaataaaagagatattatggcttgtagttagtgggggatcaaaaatggaccaaaggaggggctactaagttgatcaatcgtggcgctggtggtttggcgacagacgactgctaccttgtagtaggcatcctagtcgattaggcactgtcgcctaccgacctagagcctaggcacgagtgactatctaaatcaccggtcactaaaagctgagttattaacatggcattttatgtggcattcatcccataaagatgacaaaatataagattgttttatcgattacgaacgtggatgatgcatgatggattatggagtgaaacatttagattggtctaaagacctgctcctactacttctaacatgtggtcgggcggggctccaaccccagcaaccttccc

SEQ ID NO: 50966 - DNA, 1127 bp, Zea Mays
cgatgacgatactgaggccttacatctatctcacaaagcaaagtcctttgtgattattgacgaaatgttgtataagaaaagcgccttgggcatcaatcataagtgcatcacattcgaggaaggatgactgttactcgctgaagtgcacggaggaacatgcgggcaccaccgcggcaaggcgttcaggcaaggattctattggccaaccgttatgctaacgccgagcaggttgtttgtacctatgagggccttcaataatatgcacgacaaacacatatgcctgctcaagccgtccagatcattcccatcacttggtcatttgtggtttgggtgttgtacttcgttggacccttgaagaaagcgcttggtagataagttcactaaatggatcgacgccaaaccaatttctatgcttaaatcatcagaggtcgacgcattattccgctatatcatctaccgtttcagggtgcccaactccatcatcaccgacaacagacccaatttatgggagaaccattcctacaattttatgatgacttcaacatctgtgtcgactatgaggttcccaagtctaatgggcaggttgagcacgtgaatgtcataatcctacaaggccttaaactgcgaatttttgacaagctgaaaaagttcgtcggatgatgggtggtcgagctacccgcagtattctggagcctactatccacactatccagggtgacaggctgcacatctttattcctggcatttggtgtggaagccgtgttgccctaggaactagaatatggctccccgaggactaaggcttacgatgatgtatgagcaactacagacgcacaactcatcatcgacctgctcgacgaagaatgcgacacggtcgtgattcgctccaccaagtatcaacaagaattgttacgctaccataaccgacaggtgcgtggcagatcatttaacgtcaaagacctgatgttgcaaagggtaatgaccaccaagcacaaacataagctctcatcgcggtgggagggaccttacatcatcgcccagatcatgcgcccgagagcctactgtctcaaggacaacgacagaaacctaatgactaacgcgtggaacatcgagaacctaagaagatt

SEQ ID NO: 50967 - DNA, 349 bp, Zea Mays
cagcaggttagtcagtttactggtttttacgtgactgcacatagttatacaaacctttcaatatggttatgatgtcattattaaataatttgtttctgttgctttaatgttacataaagaaggatgtaggagtccggccacccaaactgtactggagatgtctactccagcatcgcagcctgagacgcagttgacagacacacaggtacatgaattattgttaaggcaacaacatatttgtgtactattacaaagttgccctgatgaagttgacattgatccattggtgcaggcaaatataacgaaacagcccaaaacacctacaatcccagtggtaatggtatttttt

SEQ ID NO: 50968 - DNA, 553 bp, Zea Mays
ttgctattcaattttgaatatcaagaagatccctctcggtagataccccatggatcttaatcaccaaaactagccttaaacgtttcggaaacggggcggaaaatataaaacagggatcagggcgggaaagtagtagcatgtttggttagtggaataaccttgttcagaaccaagtgatccagcatggactcactccttgcaggttcggataggaggaatgagttggttcgcctattttgcgagaaattggtagcttctagattttagttttagatcgaagagtggatgacagatgagatgaatccataacggtaaccaaacgctgggttcggatgactccggaccattggatgcctctaaccaaatacatggtagatgcctcccccggccccaccccattgccatccttattcacaaatcagaccatcttgctcttcatccaaacattctgtaatagtaacagttaaattggtgttagaactcttccggacggcagtacacaaattttcacatcctttgtttcattttcctatctcgctcttgtaacagtaac

SEQ ID NO: 50969 - DNA, 430 bp, Zea Mays
ttcttgcaagagcatattaggttaaatatctaagtagtgttgtcttgtttctcttttcgtctgatctgaaatttgtgctgcataccttagtgtttgttcttccgcggttccacgtaaacaccatacactgtccttgagttgtatttcccgttgttgagaacccacatgttgtacagaagatctatctatgggacttgtactatttaaacctagggatcgcagataaattacagtaggaataacaaaacacgtcccctttgcaaagcttcgactgtgatattgggtgcattaacaccatgtatgactggaagttcttcaactgatgctgacgaggtagttctcgtcatggaagggacatgactcttctgttaacaccaaatgaattgctgaagcctttgcttttgttgtgtgcaacttctgcagatctgag

SEQ ID NO: 50970 - DNA, 635 bp, Zea Mays
ttttattccagtaatggacggcagcttcaattctttaagactgcaaggtgtttcataaaaactttaggacctatttgatatagtatctattcatcagtggacggcgggttaatttcatcgatttccggtgactcttttgtacaaatgctcgactgagagggtgtcgctcacacagagccgtttgatctaaaaccgacgggctagatcggacaggtgaaacggtacgcctggatttaatccctacctttcgacctgatatcaacggcttggatttgaattacccggcccgtgatcgcgcatccctcccaaacagtatttcactgcgcagatctcggccacctgcaagtagatcgacggccacaaccctccttccccaacccacgacggcggtcggcagcggtcaggccctccacacggcggcacatcactagagtgccacaaattagcaccacacgcgccccaaacgtgaatccagacagagctacacacagcgggtgatgcgacagtcaagatgaacgactacttatcacggtcaaggtgacaggaggcttggtccacgacgatagacgggtccatagtgaagcgcaacgtcggtgagcaattgctcggccccggcttggttccccgacttcttt

SEQ ID NO: 50971 - DNA, 822 bp, Zea Mays
ggctggtcggcgggccaaagctagctaggatgttggtcctactcgggccggttttttggatgttgtcttcaagccttcactctcgtgtggtcttcactcggtaggggggagcacccttgtagccgtcgcctttattggctacgacgagttggcccctcaatagtcgagggccccatcatcgttgttgtcgaggggagaggccttcgtttgtcgtggtcgttgcaaatacaccatctccaacgcttgcctttgccttttcatcggtccgcccctctgcgtcgagcactttatgcaattgattagcgaatgatcaaagggtaggcctctcctcgctcaaacattacttaaactcatagtgtgcataattcttctatatcttgtcctccttgctaacatttttcttcaaacggttgcatgttgccatggtctatgtatttttctgtcttcctactatatgtcttatcttagattgagtaaccataattcaagtccgagccatacatcaaatcctctagctagtaggagatactccagataagaggggtagattacttcaatagtgcaccatcataatgttgatggtgtctatacttgagtatacacagaatacaagtttaggtcaaaatagagaaacacaactaaaattacagtataggtttagtatttcgatactcatattcgatcaatagtagttttataataaagatatttaaaaaacggagacaattttattgtctcccccaatttccgcattgtatctgtacaaaccgaaagtacgaaaccaacacattttttgcgcccaggtaaaccatccacatcaac

SEQ ID NO: 50972 - DNA, 477 bp, Zea Mays
aaatcctattgagccaaatgatcggggtccattttccatataatatagtcacaacacatcatacgatgctgctacacggtttgccacgcacgcatggcgcgtgctatacactagtctctactatctattaagtaagcaatagtagtctgccgttctgccgttctgccctccttcgtttcacgcgcagaaaaaaattaaaccatggctactcaggaatcgaaccttagatctattgagcagaatacctagccttccaccctctagccaacatgactcatgttgaattgtgtacaacttcaactaagacgtctttttgtgtttaacccgccgtccactctgtatgctcactgagtctagaaaaacatttatagcttagcccctgatctttctggaatttgggacgcagtccaggaaataaagaaaatagggaaaaggaatttagaaattgatttttagtttaaaaataattgcagattg

SEQ ID NO: 50973 - DNA, 473 bp, Zea Mays
atttcacgctgcacaaaaaatatagtatatgatgtaattacacacgacatacaatttgtttttacataaaagcaacacacagacattacaatgtttttacacatcttacacgcacaatttaatcatcctccttcaaaactttatccgcaactttgtttagtagtttgtcaatagcttcgtctattgctgcgtttacttccttgaattcgtcaagtattccccttagagatggatcagcttcaggatcatacggttttggggcagagaaagttccgctacataaaaatgtagtttgttaaatatgaatctagaacatttacgaagctagagcgcaacacaaacatacctatacgcctttctcgctctgcagcttcttcagctctccttgcttcctctgaagctcgatggttctcttcttcattttgtctgatagcttcgtctacaatctcccttccaccatttatccagacttc

SEQ ID NO: 50974 - DNA, 635 bp, Zea Mays
ctcttgtagatggttcgcactcttcaaactacccgcatcaacaccaactatgccccttagccccggcagatcccggtctatccagtggtagtcgaggaagttccggcggatctccctcccatctgagtggagaatgtaatcaacctggaggacagctcggaggagcagctgccgacccccactccattggccgaatccctggctttcgcagctaggtcatcgacgtcagcattgtctgcaccaaccttccaagcacctgcacctggaggcgacgaccccgacgactccagagacggtgatgacgaggatgacgacgacgaagacgatggagaagacggacacgtcaacgaggaagctgactacacccagcagaacaacttcatggggattggtcctgttgtcgaacattacacatcaatgttcgagacagggcacttccccaacctgctgcaagaagtgctgcacgctctaggcacctacgtccgccccctgtacgagacgaggcgagtgagcgagcctcctcgggcttgctactacatcactcgcatccacgtcagggtgatggatgcaggtgacaggggattcaggactctgcctgctcacgagtctctgacaccactgtccacctatgctgc

SEQ ID NO: 50975 - DNA, 553 bp, Zea Mays
cacattagatactatccctcgagggacaaaacgcaccattcgatcaggtccacccgtgctctctgttgcatttctttttttttctcaggggagattctcttgtcaagggggagtttttccttctacccttgtctatgcttgatgagtttacttgtctacaaggggaagagattttgagatttctcgtttcctctatctagggggagaattttttctttcgggcttcctctcattcaagatggcgcgatatgttatttggagctattgctagttgtgttgagccgtttgcctccttctggaggaactagctttgattttagctttgtgctgatcttatgctctgaattggttttttatgctctgataaagccttttgtgctccgatgagattttggcttctggctagtggtattgaaccctgcttttgcctcttattgagggctagccttttcttgcttggtcatgttgagtcgctgcccatttctttggggaccaagttttgcttactctaaatgacttgtctggcttttatctggcttatggtcatttgagt

SEQ ID NO: 50976 - DNA, 521 bp, Zea Mays
tgttgaagcccacttcatactctgtgatagacttcttctcttgcttgaaagactgcaaatcaatcttcattttctcccggaaggtgaccgggtagaacctcctttcaaactgcctgatgaagacatcccaagtcaggactcttggtgaggaggagtgcgctgtctgcatgcctctccaccaaatttgagcctctcccttcagcagctgtgtgccaaagcaaacaagatccccatacacaatctcaaagacattcatcttatcctccacgtaagttagccaatctgctgcctcgaccggagtaccactgccatcaaaaggatccagcttcatgcccatccactgcatcagagaaagaccactaactggaagaggcacctcagcctcgccacctagagcagcacccgcagggacaacgcccccgggcactcctcctccaccagcaccctgagcagcacccgcaggggcaacaggaatagcttgcctcagaatggccaactcctgctgcatggcctgcatcgcg

SEQ ID NO: 50977 - DNA, 596 bp, Zea Mays
ataaattagaccctacacctataaacatgttttaacctatattggtgccttaaaacaactcggccatacacaacgacctaacccaaacaacagattcatgatgggttgcatcatccatccatcccaacctaacatcaaaccagatcttgacctatctaatgtagtctatcctactcatagctatattagccataggtccctaactcggacactgacatcaagacccaagaagagaagatcagcctcgtcaatgaaggataagagtcagaccagatcgtcagacaagttaggatcggccatgtgaaatgtagtttttcttcacctaaacctttcttactccaacctacccttgatctaactatctcttatcctgcctatcagatggctctacataaaagaagctcatacattcccaattacctacacgttaatattaaagaaaagaaaacctttgattcttgaactgatctgggactaaaagctaaactgcaaactaaaccgtctgcatcccttgtctactaatcttaaggacgagattatttttaaggggtagaatttgtaacacccaaaatcatattttgggacttgggcaaaat

SEQ ID NO: 50978 - DNA, 453 bp, Zea Mays
tctatttgttgtgtcacctactacaaactagacgcaagtaattgttgaagaagtatgaaacaaaacaattatgtagttgttacaaataacatattactttaatttatcgggaggaaagcctaatgctaggcccacaagttcgcatagtactcgtccttctacctttggtacttagcttgctacctttgatactctgtctattccctcaacgcctcttgtagcatggtaatctccatgtcctggtcggagatgcgagaatgagacgactgcgaggatgatcatacaaatcatcatccttgacgtatcagctccctagagtcaattgaagaatcaaatatacccaaccaacaatggtgaagcatagactcggtacaatagcaagcatatgagcataacttaaaatttggaatgaaatattgttaccgtccatgggcttgtcttcttgcactagca

SEQ ID NO: 50979 - DNA, 565 bp, Zea Mays
cgctgcctttggccacaagagagtactcttcaaaatcagcctatgatcggatcgctttctatctggttccatttgttttgaaccagctcagaggatttggaagacctgggcccctcagaaatgcaaattttttatttggttggcaactttgaacaaatgctggacagcagaccgtttggcccggagggggctagattatccttataaatgtcctctctgtgaccagcaggatgaaacaatccaacatgtccttgtgtcttgcgtttttgctagagaaacttggacaaaggtcctgatcaggtttggtttactgcctctggctccagatagtacagatgaagtgtttcagaactggtggagggcatcagaattacaagtgcccaaaactcaacaaaagggcttcaattccttggtgattctagtggcatggtggctatggaaacactcgcacagattcaagataatatcaagttttggggaatggctggtgcaaaggatctcaggaggttgtggccctaggattggatgttgttggtgctgctcgcagcacccctgtacatagttg

SEQ ID NO: 50980 - DNA, 828 bp, Zea Mays
ttgagatcgatccttccttttaaagctcaagaaaggatctcttacaaggaatagagctcttacaaggaacacgtaaaaaggtaaaaaagaaagggtctttcgttgatgagatcttgcaatgcgtcgatattgtgagttgtacttgccatcgtacttgtcgttgcacttttagatcagaatactctctgttgcttacgcgagaacagggcttcgtatcccgagggtatccgatcttgaccgaagggcaccatgcagttggtagcatagtgtcgtctgcaagttttcgggatgggtcgatgctatggaagtttcgttcgtaccctctacttttgccaacccttgttcctcgtagcccattcgtcgggttttcctttgtctctcgtacaagggtggtggtgctacatttgtcctagatttagaggagcatggggcttgctggagaaaaagggcaggtcctgcctttgtcatgttgtgtagaatgggacaatagtggacacatgtatggagcgatggtacgatcgtctagccccgagaggccctatctaacctgaccgatcctctcctatccatctagagtaggcataattgcatcacagtagctcacctgtaggtacctctaagcttatggcgacgacatcaactcgactggcgtgatgagaaaggagatgctcatgttctgctcctctagccctagtgtgcccagcatctttgtcggcgacatcgcgtttggctatgacgtcgacaacggtgacctctcgtgtaattccactggcacggtctgcctaggccgtgggagcatgtcccttatggtgcagcttgatgggttta

SEQ ID NO: 50981 - DNA, 514 bp, Zea Mays
ggtcaaccctggtacacgccgccgtgcccaggcgtgcagaggaaggagacgacaccgggaaccgctgatctaaccaccaacggtcgcgattggcgcacgtaccggttcgaccggaattgatctgggccgttgaatccctggcaatcggttaggattagatccacggcagggatgcccttggccgtcggattctgatgagcgctctcgattaaaaaggaacttaccccttcgtcattttaaatccgagccgtcggactttaatcgtgtggttcggggtggattggatcgtggtcattcgtggaccgtggatctctgatcgtacagttgtcgttgcgtaccggtttataaagcgcccagacctaatctgcaccattggatttgatctgtgcggtcggcatgcaaccataccccttcgcccgcctattatgcataagagcccccgcaaaatccaataactaacccgcagtccacacagtgggagttctcagtcttggtgtcttttgcacagaacccc

SEQ ID NO: 50982 - DNA, 333 bp, Zea Mays
agggatcgtgtgattttcttattttctacttttcacgtacacattattattttgtttggtacaatttattctccattttctagcacattttcattttcggaatttgtttagggtcagatgaatcaagagcagcatactaaattactgatgattggcaagcattattcctactcatgattagaattggccctttgcctttacaagaaaattctagcagatcggttcttaatattgacgagctgtttctaagtgatggtatttctaacaatggccactcggtaaccttgagatgattgccaaggtcgcagttgtgttccatgatgtgaatgtggc

SEQ ID NO: 50983 - DNA, 863 bp, Zea Mays
aaggaatgcagtctggtccaagataaaccagcttagggcaacccaggttaactgaacaatgcagaggcatggaatgctaacttgcatgaagatgttcattagttacatgcctagctaaaccgaatcaacctgccagaatctgaggaagcagatgcagcagtagtagatgatggtgtgaaagtctctgaggtcggcaatggtcaggattagtctgttagcctattgttaggcgctagactagtttattttgcttagtgttcctaggagtaggggtggaacatatggtgtaaatcctatgatgtgatggcttctaacgtatgtgtgacgaacactcttttggtctggcatgtgtacgctagcaaaacatttggcttgaatgcacattttatcttatgaagaatgtgatggaaatgttgtatgttcttggaatgtgattcttgcctttatgattatcatatgaagtcttcttctatgacatcttatatggcatagtttccttgtttcacataaagttacgacatgtctcaacacctactcatgataaaatatgcagatggtgactacccgtcatatcaacctgggattgggtggggcttctggtagtggcaaccaggatggtaacgaagaattacctcttcctccacctccaccctacacgcccaagtagtttttcgcacagtttctacgagctcaaaggaatatggagaatctacagtgaaacatggaagcagagcttcgcaacattgctgacaacactcaccatggacaacctcagggtgcgcatggagtcaatcagtacatccgtttcaaggatttcatggacactagacaacctatattcaaggaggcagcggaacccttag

SEQ ID NO: 50984 - DNA, 274 bp, Zea Mays
gtggagtaacaacataaccaagaaacgagacacgtcgtgtgcaaaagatgcattttttcatgttagcaaataactgggcaccacgcaatgcatcaaaaacaacacttaaatgttccaaatgctctttcttagatttgctgtaaataaggatatcatcaaaataaacaaccacaaacaatcctatgaagggcctcagaacttcattcatcacttgcataaaagtgctgggagtattagtcaatccaaacgacataaccaaccattcatataaacc

SEQ ID NO: 50985 - DNA, 385 bp, Zea Mays
ttttattacaagccggaatagctgaagcgagtttggagagggcctcgcgaccgggatggccgaggcgatggtgccacaggtaaggttgcgcagagctggcaacaagggagtgagcgacgggcagctggaaggggtagagcggaccagagctattgcacctgatgatcacgttccgcgagaaaagatccttcacagaacaaccatacgggtcaaactccatagagcaattgttatcgacagtaaattggcgaacagaaataagattcttgataagatgaggcggaacaagaacgctatttaaaacaaggggggcaagttgcgccttgccggtggcagtgacaggcaagagcgaaccattaccgacaacaatggatgtgggagaggg

SEQ ID NO: 50986 - DNA, 488 bp, Zea Mays
gtctgatgtcccacggttccagcggtaggcgagatgggttacatcaccatccaattgattggtggctcagttggacagtgatatgttggacactaatgaggaacaagacagcaatgcagattgggattttacaattgcaagctgggtgtgggtgtgattttggttttgttgctcagatattgcggttgcgagtaagtggtgaacccgggggggctaattttgcggtagcttgttaagctctagttggagtatagattggttcatgacttcgaattgtataagttcagttgatgctctttttactgtataataacagactggtttctttgtgccaacattttccagttcctctgaaaatgaaaccaatgtctgttttatatctgcagaatcataaactaattaataatgagatctgatggaatcataaacgaatatctgttttatatctccagttccccaggtcttaaacaatggacctcactgaagac

SEQ ID NO: 50987 - DNA, 363 bp, Zea Mays
agcgggcgtgttgcttactgaagttggattactgaaagagagaggtctaactgccgaagccgtggtcacagattttgtgttcaaaaacattcagccgctgaaagacagggcctatccggcatatctttaccgagggctggccgactcaacccgagttactaataggagaattccttctgtggacttggtgagccgacttgaaatgatcctcaggggtaaagtttcgaacgttggagctccagtggcatactcggcttggaacccaccttcttctcaagccttcactctttttgtgtccaatccacccgtgacagatagcaatttgggtcttagagtacgaccttctgttgaagaggtccgttc

SEQ ID NO: 50988 - DNA, 456 bp, Zea Mays
cagagactcagtgaatagtgcccccaggacggcgggtttattgcaagaaagcacagggtctcattcataaaacggtgcggccaagggttaccgattaatctcagccacacgatctattctggatggcccagatttaatgcgacgtgatcaactccccaccatcgatccgagtatcaaccgcctagaaccgccctacatccaacggcgccgatcctacttagaccaaacgctatcgtgttttgatctctatcgcacgatccaatccaacggtcaatagctcatcgtcttcaattggcagactctgaacagaatggatccggccgccatgcgcggcatagcttgccgtgaggacgcacgtcgaggacctccgcacggaccatgccactaaccggacttgagacagagatctgcccgccgtgagatcgatagccgatttaacggccaggggcctccctt

SEQ ID NO: 50989 - DNA, 374 bp, Zea Mays
ggcaaacaagacagtgccctcctctagcatcattatgccctcgccataagaagcctcttctgaatttgtcaatagcatttagagcccattgtggaatatcaacagccatagccaagtatacaagcatgctagctagcacatgttgcacctgcactatcttgccggctcttgtcatcaaatcaaccttccaactagggagctgatccgcaatcctgtccacaaatggctgtacttgctccttggttagtttccaaagggatagagggagaccaagatatcggtagggaaaggaagaaacctcgcaaggcagcaactcatgaaccacagttaagccgtcctcaggacattggataggatacacattggatttctga

SEQ ID NO: 50990 - DNA, 487 bp, Zea Mays
gaagaacagcggtggaattttcttttgctttccagaatacagcgacgcggcatatcagatggaagagagaaagcggtggagagataaggcgagggaagggagatgtacgcatgggatttttgaagaagagcctgcacgctagataaggctgagcggccagcaacttcaacaaaaatcagagcgatgaaatatcagagtggaggataggaacgcagagaagattttccttccgtgcgtggatgagaacgaagactagaaaaatctgcgtagcgtacgtgaggagataaggagagagagcactgtgagaagatttttcttctcggattttgaaacaggaaacagaaatggccagcaatattccgaacatcacgaaaatttcggaagagcccggatagataaaaataaaaacgatgtcgaactcgcgatcgacgaaaccgacgcgatattaaaatcgcgatcagcgaagataattaaaatttagcgtctg

SEQ ID NO: 50991 - DNA, 284 bp, Zea Mays
gggtccattttccttacaccgtccatacagtgcttcgaatggcgacatcttgatgctggcctgatagctattgttgtatgagaactctgcgtagggtagactggattcccaacttctatcaaaagctagcacacatgctcttaacagatcttcaaggactttgttgactctttctgtctgcccatctgtctaagggtgataagcggtactgaaatctagcttggtgcccatagctttctgaaggcttgtacaaaatttggaggtgaactgggttcccctgtctg

SEQ ID NO: 50992 - DNA, 295 bp, Zea Mays
gatttacaaaacttgaacttagtgaagtctgttgaattttgatgggatccccagaatgtagtggagtcaacacaaaactgatcatggtgttaaatcaggaacattactgttcaaccatattagcaccattgtcgtcaactcgtcaagaccgtgttttggacacagaaaaataagtcaaccttgtttttttctggcttcaagattactaaaacatggatatggataaagtaaggagtagactgagaagacagtgaggtgtagcatggatatggattgtgaattctgcctcttgatg

SEQ ID NO: 50993 - DNA, 446 bp, Zea Mays
cccagatagagtcattccctttttgcgtccggggtagtccggttacaaaatccatgcctatttcctcccacttccattcgagcactggaaggggttgcaataggcctgcaggtctctggtgctcgacttttgttcgttgacaagtgtcacaccgggccacatattgtgctatctctttcttcatccctctccaccagtatttggttttgaggtctaggtacatcttggtggttcctgggtggatggaataggctgagttgtgagcttcatcgagcaagacttcccgtgcctctccttttggtacacacagacggttcttgaaccaaaggactcttgttcgtctgtcctgaggtccggaagttgttctttgcgagcttttgccataagtcttgttgtctctgcgtccaggcgttgagccttgcgtatgaggtcttctagcattggct

SEQ ID NO: 50994 - DNA, 778 bp, Zea Mays
aaaagaatgtgttaaccactggtcttatgtagagacaacttttattttactcgatcttttaccaacattacaccaatacacacactagcacatctcaagaccaccaaaagcaaggctggctagctgcgtggctggtattcatataattaggattgaactgcaagcgtttggtcatgatcgtatgcttttgcgtggcatgcatgcatatatgaacgactatagctagctcatacagtcgccaacagccagccattcaccaacacaaaaaagcttcctttgtccattccgatccataaaccctagcaagagctaagtacgcaggtgaagaaaagtttggttccgatctagagctagctaggtagcttcatttatggtttgcatgcatgcatcgcttcttccatatcccggccgggccatcggccctctcagaacgacacatacatctctctctcttccaaacgacaacacatatcttgatccaacatgcatcggatcggccacactgctagaacatgctgcccgatgtatatgcggctggcctgcaccacccaccgaacgtacgaacgtatatacgcgaccatcctatatatatagtatcagatccgaggctgctggtctgctagttgagcttgagcaaggagtcatcgagtggagagagtgacacacatgacacgtacacactacattggccagcgtacgtagtagctagctagctgcaactggatcatggcagcagttggcagatccacaacaacattgtacatcattttcggtggcc

SEQ ID NO: 50995 - DNA, 300 bp, Zea Mays
gtgctccagcgccgggtggagaagatgccccgtggccattagatcaccagtgagcggttgagattagatcaacccatacccttcactgtgcttgatggtgtccgttggatcctgaccaatgggctagattataccagggcatacctccttcgttgatggaattaggaccgtagatcaggtagcgaacgtgtaggattaaatcagacctcattaaaatccaaatgttgatctccgatcccgcggctaccgtttcatactggttcggtgatgcggggatctaatccatgccgtcggttttaa

SEQ ID NO: 50996 - DNA, 402 bp, Zea Mays
gttaaactagtatagcatcttctggtggtgactaggcggaggtgcatctaaacctatccgaatggaactacctctcccaaccctcttacttcacgctatggtggttgctacaacaatcatctcctactaattgcgatcaagcctattgtgcttctcgtgcatcaactcgataattatgctcttgcccttattgttcctagaagtatgtaatgactcttgctatttgtccccacctaatggaggtggtccaagtctcttggtctagccatagtagttatctaattgactaaccgccgaagcactaaccaactataatgactaaactaacagaaaattcatcactaaaactcacttctctgaccaccaaccatctatggattgtctagtgactactgaatttac

SEQ ID NO: 50997 - DNA, 290 bp, Zea Mays
cgatctagcttttgcaaaaagtgtttagccgcacgtgctgatagctaaagataaataattccactaaacagtgggtgtcgctttccatcccctcattgattgcatcgtcttctgtcttaccgtcctcaacatatttcttcttggatctcagtgtactacccttttgattaaccgtgggtatagatgtccgacaagcccgaaggtcgaaagcccgacccaaaacacgttttggtttggtacaacccttttaaaatgggccgctcatcacgaataatcgggtcagtctcgga

SEQ ID NO: 50998 - DNA, 755 bp, Zea Mays
gtccgagtggtggagcgcaccctccctaatcctaagatgagaaggaggcttagagatttgcatgaacgattgaatgaacacaaggattagagtggtttgagccgccggagcgtaatatccaacatcaattgtgtgctgtattgctttgagagtcgagagtctaagcctctcttcccctgctacagtgcaagcccacccttttatggtccaaggggcacgttacaagggagttgagccccgacaggtggacccaagagtagttacaaagtaggacgtgaggcgtcagataagcctggcgacactagatcttcttgagtgtgtatctcctcttggtcgtcgtggtggtccatggagtaggttgtggtgtagtctgatatgctgccatgtgtagggcactaggttgtggacgatgttgtctcgtcttctgcacctgtctcttcatgcttcggtaaggcacaaggaacaatgaaagtcataatgaagggcacctagacgacacattgagtcaatattattgccttggtaatgtgcggataatagtagaaatcgcatgttgcaaccctggcgtgcttcgcgcatttaatgcgggggatacgctacatgttgctggcataggtaagtatgcatcccatatgcacctaatgttggcaggccctatgttagatgcttacgtcaggcaccgtccgacggcttacatcaggtacatctggccacactttggcaccagacctctgtctggacaatgggtaggccca

SEQ ID NO: 50999 - DNA, 878 bp, Zea Mays
gaacttcggttgctacaacattgtgtatccaaaggatacgaaggctccggttctcagctatcgtacaaaatggccgaccggttggaaaagcgaatggttttacataaaggcagacaagaaaagaagggagaagctaatgactatggtcttgagtccattgaaaatgagcttcgggatgacaaggcccttgtgccatatgcagcttggctccccatgccaggtagccaaagtagaattcagagtggtagcggcagaagtcagcactagggatctagtgcaagaatatttggcaaatagagtatttctgacctctagtggttgcggaatgcctaagaagaaggatgggggcaaaaagcatgaacttgttcggctcccctaccgatttaaatttgagaaacaattcaagaatccatgcaaagagtggttagaaatgattgaaacaatgtgcaatgacattcttggcaactacaccaagaaagaggaccagttaatgactgcttccttcggcactcgaccaaaacgaaggctgaatcgagtgatgaacgcgttaaatttcgaatacccagactatgaaaggcttgacaaagggggtgaaggggtgaaaaggaaaaggattgtgagcatcctaaatgggaaagctgccaggctagtaaaggaggatgagaatattttgaagaaggcaaaaatagcccctgagccgaaagcagcaatctctaaaaagcggaagcttgacatgactccctctgctgagccgagggtggttgagacaagagaagaagctccttcaatgccctctacttccaaagtagcggaaattttaaaaggtaatgacagattccttgcccatcaagctgataagtcctctgggaccggaattg

SEQ ID NO: 51000 - DNA, 649 bp, Zea Mays
gtcgtgcttgcctcgtcggcccatgcggcgatgtgctagaccccggcgcgatgctccgcctggagatcttcaagtgccttctttgtcgcctccaccgcctgggacctcggtgctgcctgcaccgcctggaattgccgaatctgctcttccagcttgttcttcttctcctccgcctcgagctcatgctcggccagcaacttatcccacctttcaaacatttcctccctgaaggcgaggtccttctcccgccaggcgagatccgtcgcccgcttatccaaggaagcatccttctccttgaggttctcctcggctagggcaatgttgctggccttgtcccccagctcccgctcccatttttggatcctctccatagccgcggtctgctgcgtccactgctcttccaggatttcgttcatggcactcagcttggcctggagcactgtaacgacctcctccctctagttcaaggcctcctccttcttggccaacctcttctccttctggctcgccttcagttcccgggcgtacaccttctggaggtcctttttgtagtccttgcggtcccactcaagctcggaccgctcggaggcgaactggcgggacgccgccttggtgcgctcctccagctgggtacgccagtcgctgaggc

SEQ ID NO: 51001 - DNA, 1323 bp, Zea Mays
ctgagatgttgccgtcttcctccaacggtggtgttcccatcgctatccgctgctatttgatgggaccaactatcatgcttgggttcctcgcaagcgctggcacatgtgtggcctgtgcctccaagagttcctcactggcgagcttccatgcccaccttgtctcacggctcctgtgcaccctcaaatactagaaaaggcaactgatgaaaggcaaggcgaaacctcttgctgattttgatgaccccattgcatcatacaagtctcagttcagtgcttacaagttatggttgaatgaggatgctcctgttggttctattcttgctgctagtgtggaggatcggtttgatgcagaaattgttcactttgattggtctcatcagatgtggtcttctctttgtgatcgctgagtgtactggtcactctatttaccttgctgctattcgttaggatcaattgaacatcagggagattacacagtggatgagttctacaactagatgtctgcaatttggctttagctcgatgctcttggtccgcagttgtcccctagcacctgtgagttttgccttgatcagttgattgaccttcagtctcatcggatatatgacttcttgactcaactttgcaatgagtttgagcctattcgtgcccaactgctccctcgctatccttctgtttcattgatggatgctcttgcagatgttcgtaatgaggagacttgtcttcgtgcagctgttttactgccatcttcagtgttggctgctcgttctgtgttctcttgacctgctattactccatcacctttaccttcgtcaacacaccctcctacacatggcggggggcggtggtcttcactacaactaccatggtaaagatggtcatgtaaaagctttttgctacaaaaagtagaaggtgcataaggctcagactcgttcttcacaacctactagtagtgccagttttagaggttcttaggggagttttgctgattgtcactaaggagatgctgatgctccatcgcattgctgcctctttactgccaggtgctgctagttatgtgaccgtctttgactctatcaggttctgctgctgcttcttagtcttctactaagggaccattcgagtacttgtgcgtggattcttgattctagtgcttcttttcacatgacctcattacatcgatctttcttctatgtgtccttcctcgttcccttattgctcatacaattgatggaccctctctctttgttgctgggtaggacactcttttgttgaaattttttcatgttcctaacgtttcctgtgttccaaacctaactttag

SEQ ID NO: 51002 - DNA, 564 bp, Zea Mays
tctatttttagttaggcaaaattgcgtctatagccttctcaacatactactctccaaactcagtgtcctatcttatcacttcctagtccctacttcgtttcccccatcctagtgctgtgtggcacgattggaaaccaatggcacaggacactgagtttggagagtttacatatctggttcggccagtttaccagggcactctgttgctccatgcgcataactgtgaggggcgccgagggaggtagggagacagcaggttcgatggagcactatgacagacaatcagtaagggaatgagtgctagaatataagactgataactgataggggatcagtattagcaaaacagactgtggagaatgccaccgaggcaactttgccttttctttaccgtcattctgcagttgttccagaaccttttatatttaggggtacatttggtttcgtggccaaaatgagcttgcttagaggtgcaagctaccagatttaaccaatctaccctagcaatgattcactaatggttgtttttcaaatatttgtggcaagttattaggcaaaagaatt

SEQ ID NO: 51003 - DNA, 698 bp, Zea Mays
ctctgtgcccacgagctgacgtgtgggccctatctgtcggctacatgtccgcgcccacgttgtgaaccggctggctgcgcaatggggccacgttgtgaatcgtgcccacgtctctgctcactgccgtgtgggccctctgcgccatccttgtacacgcccactaccacgcgggacctacgtgtcatctcccacctccgctaaggttggatccacgccgccataccggcctccccacatgcgccgggaatccgttcccaacctcaacccttgagtccgtgctcagccgtcatattaatctgcaccgatccccagttttgtccgctccatcctcgccctagtagacacgacccgtgagctcgcctttagatttgggagcaccgccagaagccgccatagccatctaccgccgccgtccccgcttagcacccgtggtgcgctcccggacaactcgacggtggtgtggaccgtgtctaggggaaattgggcgcgtggaacctctgtgtggagggaattgctcgctggcccttactatccgccgtcaagccgccccgcttcgtgggcagtctcgtcatcaagccaattgtgagtacaaacctcctacctggatctaccgtcgtcctagctttatttggcacctagcgtctcgggtaatggcgcaccgtatgtcatcggagggtctcctagccatggcgcgccga

SEQ ID NO: 51004 - DNA, 619 bp, Zea Mays
gtcatttagtgcactaaaattactacaaccaattaacaacgcattctccacgataatcacccaacaatttgcgttttaaattagacatcacataagcactactactttttacccgcgatcataaccatgcgcaattgggctacaacatcccaaacgggtgcaagaacgctagtttctagttttaaccccatgattattccattaatcattttaactacttaatcgacatcgaccgacttaacattcatctcgacggtccgagcaccacaattcacgaaaatctatctagatatctagcgtcacatagagagcctactacttcacattgcaattcatacagaaccgcaaggtgacagtaataacacacaggtaatcgacccttctctacgaccttcagttaggtcaccaaccgacgacatgtcaaccgcaaggtgactacgaaggcatgtcaccatttcatcacacccattcatcgcctatatgcgcactaattcatttcgtacgacacatgcactcaaaatcaattcaccctagacaaaatacacttatctcttatttaggcgcagacttaacacctttcgagataaagcgtcactataaacaccttacacataattgc

SEQ ID NO: 51005 - DNA, 1034 bp, Zea Mays
gtgattaagccttgatcacatataaaatttggagtaaaatgagctcaaagttgagctgtcagtcacactgataactgaattatggccaccagtgacattagcaagactttgaggttgaattagagtaggatctagtgatcggttggggatggttactatagttgaattgtagctggactataggactacaactttgttaaaggtggattagcaagttattacatggaattttgagatttgggcgctgcaatctgctctgtcaggtgttctgcataacattctgatggtacagtaactgacatagatcctaggtgcagctcccctcgccgctagtgaaccgcgcgctcagattcgtgccggccgccgcgattcgtgcctcagataagtggattacgctcggccgtgaaaagatctttgttgcagatgaactcgggacactgtggccgctctgtcgtccatccacttgcgccggtgacgtggccaagcaaccgtcgtcgaggtatacgtcgcctgccgtgatcgcgacatgccctgaccctttaactacgtcgcagtgagttgccttagcccacccgttcatcgtcggtggtcttgccacggtaaagtccatgaatcgcttgcgctagtagcttcttcccactccgaccgccagcacaatctcttcaaattgaacgccaccgccctcggatcctataaattgagcgtgccatcagcttcgctaggtattcaagcatctagcgcacccactcgtgtctcggattgtccaccagagagctctaatttgagatttcctcaaatccgacatgaataccgtgctgtgagagctcaccgtggccagctctccacaggttcgatcatgccctcctaactcttgtttcagtactcttatgtgctcttgatactccttgatccatccaattgagctagaacacgtagaatcactgggaacgcctcggtctagccgttgatcgcactatcactgtgggcagagagattaggggctagaaccttgaaattagttgaggggaaatggt

SEQ ID NO: 51006 - DNA, 615 bp, Zea Mays
gcaagtagttgaatcattgtcttagtattgttgtatttctagtagtattctcttattgctagttgttgtgtgaagtttggatcttgcttagggtttaattattgttgatttttagaaaaggccaattcatccccctcttgggcatcgtgatcctttcacacaaaaagtgtgtgcgcccgatccaccctggcacgattggcagactctgtcttctcgcggtaggcatgcatgctcttcacctcgagctcaagctcggcagcacgcttgcgggaagcttgggcctaagcacaggtgctctcggcctccgtctttgcctcggtagcgacttcttttttcgtcgttgagccgacgactaagatattaattctctttctcaagcattgtcaccttatcaagaaggttttggctcttattcttggccgctgacttatcctgatagcttaggtatgttgcatctgaaggcgctcaattttgccctcgagccatttcctctcataacgtagctgtgaggttgtaacgtccaccagcgccccggacgcaacatggtcgaaaaagacatccacctaacgttacattaaaaaggtaaaaaaactcacatagcgtagctgtcgcgcg

SEQ ID NO: 51007 - DNA, 694 bp, Zea Mays
aatggagtcaggaatctgctttaaaaatttgagctcaaacggagcaccgagcgaaaagttatgcccgttttatggaaggtacctcaagttatagttttcaagggcacaaattggtaggaaccgtagcggcggctatagagcacaggggcacaaacctccctggtataagcaataggtaagcgtcagatgatgaaacaaggaggggctgcaatgcaatgcggcttgcaacctaatctagggctagcgtggcgagaattcacacaaggcggctagcgagggcaaattgagtaatgtggtgtctcgacttgtaatctaggtaaggtggatgggatagcggcggaaacaaataacaacgatggagcggttgaactacgatgacgacacgacctaaaccagcaacaagactcgacacggacacaaactcaacaaagcaatctgaaacgaaattgcaaggctaaacaagggttctaggacaggggaatattttttttgtatggcaattatctggagttataggatgaaaaacctaaactaaactagggtaagcctgacggtaatacctgagtctttgaataccacttgataggaatgggggtgcccgatcttccgtcaggtgaagataactatcgatttggtggagatgtcacacagacgatccggcatccaatcaacacaactagaaccccacaatcgc

SEQ ID NO: 51008 - DNA, 434 bp, Zea Mays
ggatatgagtccatcggcataccagaacatggctggggaaatccatttattgccgacgtgtctggcacaattgtttcagcgcctaatttatgtgataaaaaattaggcatgtgagtctttcctaatgcatgcgccatcctttctatatcctctatgatacttttaatccgattatcaaaagaaattttaatagaaggaatatcatcgactgacctggcatcacctttcgtggggagctattgcagcacggatgacatgtaatcggagtctatttccctctcctttacgaccttctggtggcgatctaccttgaagtgtgagaggtaccactttttcgccaccttgagcatctgatcttgttgtcgttggatctcctcatccatcttcttcatgtcatcttttaagttttcatgctctgcggccgataaattagt

SEQ ID NO: 51009 - DNA, 733 bp, Zea Mays
cagtgaactcatacaacccatacttggtaataaatgttgtctttggaatgtctgaaggtcgaatcctgagttggtgatatcctgacctcagatctatctttgaaaacacgctggctccttttagctggtcaaacatatcatctattctaggcaaggggtacttgttcttgatcgtgacctcattcagagctcgataattgatgcacatccgcctagtgccatctttcttctccatgaataggacaggggcggcccaaggtgaggtgcttggtctgatgtaacctttctctaacagctcatcgatctgcttcttgagttcaaccaactctggtccagatactcggtaggctcttttagaaatgggggcggtgccaggaagaagctctatggcaaactcaacttttcgctctggtggcatacctggtaagtcttccgggaacacatctgaaaattctgacacaaccttgataatttcgagtgaatctggctccttgctatcaatagtcatatgatgacaacctcctttccttggcttaggtgagactaactcagataccacttcttctcctagtggggacaccaacttaattgtcctcttatcgcagctgataattgcttggtacttatctagccaatttatccctaggatgacatctattccctgagtacccattactatgagattagtgggaaacgctatcccccttatttccacacttacattcaagcaaat

SEQ ID NO: 51010 - DNA, 861 bp, Zea Mays
aagacacaaaagtagaatgagggaccaacttgtgtggtgctatggagttagtgttgaggtaacatcagcatcgaaacacctaatatgatcgtaagtgagctggtgaccatacagagcaaagtgtgggggtgcaaaatcgtagtgtcttggtgggatgctagttaagaaggtaggtggcggtatggagggcctcaacccagtaaggaggggcaggtgagcttggaataaaaggtattacattatgttatttgtggtgcggagaacacacttagccttgccattttgttaggatgtgtagaggcaagacatgtggaggagtaccacatgagagtggaagaaagcacaaaagggcgagttgtcaaactcatgactgttatcacattggacacttttgatggtggtaccaaattggatggtaacataggagaaaaggtaagctatagtggagaatatgtttagaagaataggaaacatctaaaggtggtgggtgcaatcatcgactataccaaggtaatacttaagatttgatacacatgggatgggtgagatccacaaatcacaatataaaaggtcaacgtgatgtgaagcatgaaactataatatggaaaagggaggtcagacctaacaaccgagttggcaagcatgacaaatatcagtgagtaaagcacaattattataggaaataaatgagctattatgaggcatgtggggacctcatgaccagtgtggccgaggcagcgatggcaaagctaggaggatacactagtgacaaaggtaactgctggtgacaacgagaagtagagtaagtagagagggctagagctattgcacctaggcaatcacgttctgcgtcgtgaggtc

SEQ ID NO: 51011 - DNA, 669 bp, Zea Mays
cagataattgccatacaaaaaaatattccgctgtcctataaccctgtttagccttgcaatttcgtttcagattgctttgttgaatttgtgttcgtgttcgagtcttgttgctggtttaggtcgtgtcgtaatcgtagttcaaccgctccatcgctgttatttgtttccgccgctagcccatccaccttacctagattacaagtcgagacaccacattactcgatttgccctcgctagccgcctcgtgtgaattctcgccacgctagctctagattaggttgcaagccgcattgcattgcagcccctccttgtttcatcatctggcgcttacctattgcttataccagggaggtttgtgcccctgtgctctatagccgctgctacggttcctaccaatttgtgccctggaaaaccataacttgaggtaccttccataaaacgggcataacttttcgctcggtgctccgtttgagctcaaatttttacagcagattcctgactccattctggggtgacccaaactagcttatggcctgtttggttcggtcaaaaaatttaaaaaaatcgggaagataatgaaaaaaattatttaagtgttttcaggaattttagagatcctttgtgattttctctaggccacaatacaactctgtttcaagtgaaatttta

SEQ ID NO: 51012 - DNA, 1545 bp, Zea Mays
ccaaaatactccggacctgattatgccatcttcgcaaccgactacggagttgacaggcacccagtttgaggaaatacatgaaaagcaacaacaaatgtgtcgtgcatttgagggctgccctgacgatttggacgttactgcgcccatggagacaaacacaaactcaaacgcggaaaagcaggtattatatacaatctcatcatggttacattatatgttaatttccaatttgcatccaaatattagacaaaaccataataatgtcaacaggattaccattttaatgttggcattaatatgccgagggacataaacatcccacatcaacatataccagactgcaacattatgagctcatatccgtctccccacttgccgatgtttgacgtcacaccgcaaaaacatgtatatgtttcatctttgttttgtccattgtaatctcaattatcgattaaatttaattgacacatgactgagggtttaaacatagtatcattgattttttggggcagggaggtgacattgatgcatctcatgacactccaacttacacgggccccctttttgatcagacacctagtggtcatgtaagtactccaattatacatttatgaccttcatgcttcacataactcattcataaattactatactctctacctgcattgtgtttcaggttgcatctggtgaggaaacacatagcttgcacactacacatgtgcactcactgccacgtttaacagtgtttgactgtgctcggtcgctccgtgattttttgtgctcctcaaaaatcgacccaaacaggttttagtctttaactattaagagcaaataacatgtatgatgttgcagacatatataatgactaacatatctgtttttacattattatataggaaggtcatagaatttggtgaatgtattggaaattgtctcgatattcaacaatcatttgcagacgggatgtgtctggataatcttttcatgcagtgtttcattcagtgttttcgcgatgaagatctaaatcattgcccgtccatcaacaaaacagacttgtactggatgtcaatgttggtgtatgtaaattaattaatacctacctaattttgcaataatttacatacagttttatatgacacagtaattatgattatgcagactctcctcaattttgaggagcatgaacgctacagcaagtctcctcagattttttatcaaactgtccttgatgcttacttggacaagacactgccccagctggacaactttgttgactacaaatcagtataaatctttatctttgtatcaaggttttttctgttatgcaattatattcatcactcacctacacactaatggtatcatttcatatctctaacttatgatatttgacagatcatggtccctatacttcatatgggccattgaacattgtatgtcatcaatattcagttccggtgcattcacattttagattccaatccatatggtccggaattgggtggtactacatggaagatgtttcattactcccaaaaggacata

SEQ ID NO: 51013 - DNA, 442 bp, Zea Mays
gcatgagttcttgccagaatgtggacgtgaagactgtgtcatggtccaagaccatggactggggaatgccgtggaggcgaacaatgttgttgaagaaagcctgggcgactgattcaactgagtatggatgtgccaatggaatgaaataacttgttgaaccggtccaccacggtgaggatcactgacttgccatggacacgaggaagtgcttctacaaaattgagtgcgacatcagtccaaacaccatgtggcactgggagcgaaaggaggagactcgccgggtgcacgtgctagccctgacagaccacacactggcacaccttgtcctgcacaagctgtttcatattagggaaatgaaaatcatgccggaggcggtgaagtgtgcgctggacgcccttgtgaccatcctcatggactgcccccaagatttcctacagcagcg

SEQ ID NO: 51014 - DNA, 578 bp, Zea Mays
tttttttcttatacaaattttgggccttacaagttatttcattacagtttcagtcattctattacattctcagttcttcagtcattcaaccatttcgttacagttttagatatttcattatcatttgagttattctgttatagttttagtcatcctattgcatttttagttatttagttatcgttacagtttcagtcgcccggtcaaagcacaagcgcatgagggttcgtgtgcatgggtggttgcattgtgagggctgattggggtgcggaagcagcgcaccgatcggtgtgcagggctaagtctggggagtggactaataagacgttgggtggtagcacactttgggggataagctaggttggtccaagtgatggaatctttggtccatcaccgtaggtgataaatagcgctgccatatatgcctaagtggtaatcatcccccaaggtgatggacctcatggtccatcagctagaataaaaggtccagctgaactaggccaaataattcatcacactatggcgcgcttaattggaccaaccgtcgcacgtttattgggatccgcacaaggaaattg

SEQ ID NO: 51015 - DNA, 1025 bp, Zea Mays
tcatactcaaactctaaaaagcaggtattatatacaatctcatcattgttacattatatgttaatttccactttgcatccaaatattagacaaaaccataataatgtcaaaaagattaccattttaatgttggcaataaactgtcgagggacataaacatcccacctcaacatataccagactgcaacattatgagctcatatacgtcttcccacttgctgatgtttgacgccacaccgcaaaaacatgtatatgtttcatatttgttttatcctttgtaatctcaattatcgattaaatgtaattgacacatgactgagggtttaaacatagtatcattgatttttgggcagggaggtgacattgatgcatctcatgacactcaaactaacacgggccccctatttgaccagacacctagtggtcatgtaagtactccaaatatacatttatgaccacataacttcacataacttgttcataaactagtatattctctacctgcattgtttttcaggttgcatctggagaggaaacacacacctttacactacacatgtgcactcactgccacggttaacagagatggactgtgctcggtcgctccgtgattttttgtgctcctcaatcatcgacccaaacaggttttagtcttccactattaagaccaaacatatctgtttttacattattatataggaagaccaacatgtaggttgtttcttacataaataatgactaacatatatgtttttacattattatataggaaggccatagaattcggtgaatgtattggaaattgtctcgatattcaacaatcatttggagatgggatgtgtctcgataatgttttcatgtagtgtttgattcagtgttttcgcgaggatgatgtaaatcatcgcccgtccatgaacaacaacagacttgtactggacgtcaatgttggtgtatgtaacctttcattaatatccacctaattttacaatactttacctacagatttatatgacacagtaattatg

SEQ ID NO: 51016 - DNA, 733 bp, Zea Mays
atcaatatcctttaggtgtccaccaacaccatgttggttaccaacgaatatatggtctgcatttactatctcagaaggtcttgccttcattagcttgcaagcatcttaatcctaggatttgtgaccatacttctccccctcttatttacaacatcattataatagggagttaagtggtgttccatttaaccactctttctggcacttccacattggattaatttgagtgacacctcatagtaaatgcacatggcagttaatttgcaacttcttgcaaatcattcgaacccaaaggttcagttttagtatgtgatcctgagcctgaatgcttactgcattcattataatttcctggcattctttttggtacttgaaatctccccctaatgcctggaaaagctcatgattcaagctagcgtacgggccgtaaatagattctcaagaagagattctaaaacttaatgatcgatggagaataaattctcacatagatccccagctttctgtgtgcccatacatgtacgctgcggtggtgagattgggaacgtacccaatgtacgcatgggaaatctttaatgggttcccacgtactaaaaaccataggggaacttgtacatgtagtacttgcagttaatcacaagtcaggagcgtgcaaaacttcctgactccaaccataaccagttggaaatgacaattcattactgatggtcattaatgatctgaaattttcgaa

SEQ ID NO: 51017 - DNA, 880 bp, Zea Mays
attgcggttgatcccaagaatgttgcggctgtggtggagtggaagagaccttctagtgtctctgaaatccggagtttcttggggcttgctgggtattatcggcgcttcgtaccaaatttttccagcattgctaagcctttgactagtatcttggagaagggtgttcccttcgtctggtccggcgattgtgaggtcagttatcagtcattgaagagcaagttggtggacgcccctatcctagctttgcctgagagcggtaagcgtttcacagtttatacggatgcttcgcgtattggtcttggctgtgtgctgatacaggaaggcagagtgattgcttatggctcaaggtagttgaggaagcatgaggggaattatccaactcatgatctggaattggccgctattgtttttgctcttaagtcgtggaggcattacctttatggcgagacttgtgacattttcaccgatcacaaaagtctcaagtatatttttactcagaaggagctgaatttgaggcagcgtcggtggctggaattgattaaagattatgatttgtccattcattatcacctagggaaggctaatgtggtggctgatgcccttagcaggtccggggttccgaaggtggccttgtcgttgatcgctgatctggaccgtgtggggatcgctttgtgttatgtcggcaccgctagcaaggagactcagatgcttattcaatcctctctcatggagagagtgcgtgcggctcagtagcaggatcgtctattgtaggaagctcgaaagagggtgggtgatggtaaaccgcgggagttcaccattgatgagaatgatttggttcgtttcaggggccgcctctgtgtgcctcagaaatcagaggtga

SEQ ID NO: 51018 - DNA, 1767 bp, Zea Mays
gcgatgggtgccgtaccagggatcaggtttatgtagaattccacttctctttctggcggcattcctggcaattcttctggaaatatatccatgaattcttctatcactgacatgctttctgttgctagattaaacaccattggatcattggcgggtggctgagcctgacaagagactgattttccttggtggtccgtgagaaggactgtcttgtttgcgcaacttatgatgcctttgtgcttggttagccaatccattcctaagatcacatccattccttgggatggcaagacggttaagtctgctaagaacactaccccacttaaaagaattctgacctaggagcatttgagctggcatagaaggtctgaccctggggttcgggtgaccaagggaatttctaggtgggtagagggaatgccatgcttttccacaaaactagtggctataaaagaatgggatgctcctgaatcaaaaagtatagtagcgggagtaaattcaacgaggaaatcaccgagcactactcccggagcttgctgagcctcctaagcatcgacgtggtttactcgtgcccttccttgatgctgggtcctgttctgctggttgatggaggagggcgccttgggggcgggtgctgaggtattcttggggccattcaccgagttggagtaagcaggtcctgatggcttcaactgggggcagttgttcttgaagtgactggggtcttcgcagtgccaataggcatttgctggtggttggttgcttgcaactgagggtgcctgaaaggagctctgactctgctgactgaaacgtgacggagtgggtcccgctggtctattgaagcttggtcccttgggtggaaacccaaaagatcgagttctctggtgccggtcttgctgctgagctcggaggacttggaatttcctcttgaggtgacctttttcttcttcccttgccctttccacttgtatggctttgtttgagaggtgcgagaagttgagaaaatcttggctggctaggatggtcttgagttctggtttgagccctttcaagaagcgggccatcttcttggcttctgtgctgacgtcatcaggcacgtagcgggctaattctgtgaatttgtgcacgtactcgctgacagatcttccaccctgagttagttcccgaaattcatcttccttgagctgatcgatcccttggggcacatggtgctctcggaaagcagtttcaaactctatccaggtagcatctctgatggcagcgttgaaggtatcccaccaagctagggccatcccggaaagttaatgaggagccaattgaacacgctgattctctgggcatccgatggcttctaacttcctttaaatcatgcgcagccagtcatcagcatcgaggggattgctggatccagcgaatgtgggaggcttgagcctcaggaaatctcccatcctgtcttgtggtcttccaccattcgggcgttgattctccagacttctagcgaggaccttaatgagtcgggtttggttggctagaacttgggctaaatctaagggcagctccggcggtgcggggaggtgggtctcactcccttctccaccggcttctcattcagctcctaggggacaccctgctccaatcccagaggcggtaggcgtagttttatccaaagccatctgccatggggagagagagttactactatgcatatgccaaatttttttcaaccaagttattttattcattacaccagttcattacaagcataca

SEQ ID NO: 51019 - DNA, 773 bp, Zea Mays
atttattgatgccactgtagaagttattcgagccctgactcctcgctatgggtactgtggtcctggtcatactcttcatggcgtctcagttcttgttcatgtcatcacgtggatggtgcctcgatgctgctttgcatgttacgaaaactattgggtcggtggtgtgtgtccccctttggatgagccggaggaagatgatgattttcctctttcctaaggatttgccggtaggcgtttccatccaatgagttagggaggtcattgtcgatttgggccagcacacctccgactcgacttggagtttgcatgaatcgagcaaagttgggtagcagcttacacggaaggaataattggccacgtggttgaaggtcgtccgctcggcaagctcacgctcgacatgctcgtgcacgaaatcttgaacatcatgtcgactctttcgtctagcattcatctgcttaaggaatcctcgctcgtctggggtcggatcacgttggctggcgttatgatgacaccgaatgttctagcgccggttccagtgatggcgcctgttacgctactatgagtcctcccctgccattatggatttgtggttagagacaacatcgccttccactcccccgttgatgacgagctcgtcacggaagtagaggggtggttctggcaccgtagccgtggtgaccacattagtagacttggtgatcacgatagcttaaaaaatcttcgagatcttgggtaggcatgatccgcatgagcgtgaatccatgcgggatgcg

SEQ ID NO: 51020 - DNA, 297 bp, Zea Mays
gcgcacaggaggacaacgtggggcctacaatgacatgagaaagccaggttgtacccatcaagcctcgaggctgaaccatggggacccccgcacatcatcatagggatgtcaggcatgaacccatcacaggaacgagagtgataagcagcaccataccacaagcattgttttgcgcaatcgaaggagggggcccaccatgacaaccgaaggattttttctccctcaaactcactctctccttcgatttgtagaaaatagaccccctctgtaagaaccgacccttgagatataaaggac

SEQ ID NO: 51021 - DNA, 887 bp, Zea Mays
aaaagggtctggtgcggtctgcacacctggtcggggcttcctgtaggtaaatagagtccagggctctaaatactacatctatatatatatatatagggtgatggtaatggaagccctgggcttcatataggtgcgcggagccccagccagacgagccgagcctggtcgaaccgaatggactgatccaggcggcccgcattaatgcactgcagttatgcaattataatagttagtacaaatatgcgtaaacagacgtgggccacttgttcgaacgtgggccggtgacgtgtaacccgtaaattggggaagcgcatttaaacagacagttacgacaacgtaaatctatgtataaaattgcataaatggttgttactcccacgatcagcgcgcccacgatcctaaaattcagcggataatggatatgcgccgtgaatttcgcgtccacgatattggatatacgcatggtaaagggaaaatattcataagcttccaaaaaaagtggacagtacgcatcatttgataggacgcggctgggtgaagggcgtaattgctctggaagatggcggcgccatggggtaacgagtcaataagtgagtatacgacgccgacgtctgttcatcgaccaaatcaatgcttggatatcgtaacaatggtgcaggaagaacaacaagtagggaaccagtttacctcagatgcaagtacgcatacacaatcagctactgctgtagatgcaattactccaccagcagctttgagggccccgggggttaatgatcagaccatatttgaggcatcgaggatgatagtaaatcaaggaggacaacaccttaatactatgcgtactattggtgatcatgaacaggacacaccagtgattctgcagagac

SEQ ID NO: 51022 - DNA, 710 bp, Zea Mays
ttccgcacaatcttcagctctcgatcctatatgagatgcatgatgtatatgtatgaacataatggaaaatagcacaagatgctccaagcacacgatagtgaactaaacattaaatagcgagacaccgtgaacaaccacacactagcgctagttatatacacgtcatcgggcacacgcaaacaataccaccggaaaaacgacgaacacctcctatagttaatcaacgcaaacatgacattacaagtacatgcatttaccatattctcttgatcattcatcggttagtttattattaggccagttaagtacacataaattcgctatgacttccaatcttgttgcttatagacaatttctccacctttaggaccgttagcagagaagcagacccctaacagtacccagcagatggaagaaaaatagaagagaaggggggtggcagctgtgagacttgtaggggtgggagtggaaaatggttccaagtgcaagaggagcacttctatttatagaaaattgctagggttagagttatctttagcttgcttaggggagaagcaaatgttgcttctaggctaaggaaactggattttggcagcgatttattgctgcaggactgaaacatgtgcgatgaacgaggaaaaccggtattaagatgacagacgaccgagcacttattttagaccaggaattttggcgtcacatgaaataat

SEQ ID NO: 51023 - DNA, 415 bp, Zea Mays
atccgagtcatatacaattctgctagcttggatcccgtgtaattagtcctcacaggtatgaagtgagccacttttgtcagtctgtccacaatcacccaaatggagtcataccctccaggagtgcggggtagtccaacaatgaaatccatgccaatttattcccatttccacttgggtatcttaagcaggtgcaatagtccagctggtctttgatgtttggccttgactctttgacacacatcacacttagccacatgtgcagcaacatctctttttagcccatactaccagtacttctgcttcaaatcccgatacatcttagtgctaccagggtggatagagtaatcagaatcatgggcttctttcaatatagtctcatgaaggctatcaatctccgtgacacatatctgatcct

SEQ ID NO: 51024 - DNA, 379 bp, Zea Mays
caaacataacccactacactaaccaagactctaggaaggcatcaccatgcctcaacctgagtcatgataaaaaaactaagagcaaggacaaacccttagcaccacaccacatctgacactcatcatcaactaaagagaaggccttagcgacattaggtggtaaaccttcaaaaacacactcattgcggtgcctccgaatactccaagctcctaagatcacaagcgagttaacgccgatgtcttcatgaacgcgattaactgaagcatttcaccaagcctcgaaattatttttcccgatgtctggggacaacgcagccaagcccatcctttggaagaggtagaaccaaaagttgataatggaagtctttcaccattttaa

SEQ ID NO: 51025 - DNA, 411 bp, Zea Mays
ggtgtatggtatgtttcttatcaactccatacctgcttcagttttatttgactctagagcatcgcattcatttataactgagtcattcgtggaaaaaacataacataccaaagcaccctcttaagaagatgttacatattaattcaccggaaggtgatatgaaggccacacactaatgcctccatgttaatctcaagattcaaggaatagattttctagtcaacctagtggtcttaggatccaacggtattgatgtgattcttggatgtgactggttgaaaagttgtgatggagtgatacaatgtgccaagggaacaattatgttgacaagtcctcaaggtgaaagaatccaagttagcacagatatgtcaacagatgcaaaaggagaaacaatggtaaatcacttggaag

SEQ ID NO: 51026 - DNA, 579 bp, Zea Mays
gaaagttggaagatgatgtctagccatgtaaagagaatgagaattggccaatgtccataactcttccaagagtttagccagagggcaggggtgggggtggagttaaagagttcattgctggcaaaccatttagccttaggggctggtcattgctgctaatccccaccttaatttagtagtgttcatgttaattaggctacatatcctacggtgaaggtctaacacaagtagtatctaggtatgaggagcagagttgtgttagagaagtgagtgtcaaaatggcacattatttcatttttagtttcatggagatacccagtttgagcagtatctaggtatgaggagttacaaatttgtttatgttatgtattgtcctcttgcgtcatactgataagagaaccgtgatgacaaaatccacctgttttggtgtttaccttgagccttttaaaggttttcattaacatttcatcatgcttcacaatcagatgtgtttcattttcaaggaaaatgactacattacatatttacattgattgtgaactgaatcagaagtgaatgtttgtgtcactgattttctga

SEQ ID NO: 51027 - DNA, 660 bp, Zea Mays
agacgtcgcagtggacaacccgtttactgccagggtctttaccccgttgagcgccacagtagctgcactccggtgactcaccttgcttaggccgccagctttcttcccaaaatttggagccaccgctgttaatcactataaattgatgccccggcttgctccgttagcttatcacgaacctagagcacccactctcgcctccgattagccaccatagcatctgaatttggtttttcccccaattcgttcgccatcgtcgtcgaggagagcacttccgtggccagcgtctcctgaggtagttccaacccaattaccgtctgttctagcttccttagggtatagtggtgctccccatacttagaatttgaacgctaccgcgcctagtcatcaggaacacctcggttcaccgtcgggtctcgtcgtcgtggacagaagaactccgggtcggactagctcaattaagggatggactagggtcgcttgggatcggggatgctagtctggcgcttggtttactcaatcatctccgttcatggccggttccagcaaggagatggccgacgggtgagcgcgccgtcgccagggacttatttagtgaagaaatagaaacttaggggtctaagtgcaaacgtcagtgagacaaaggaatagtgccaaggg

SEQ ID NO: 51028 - DNA, 672 bp, Zea Mays
gtgcaacatgctcgcgcttacttgacttagggtgaccactataccctactaacggagcaatcgacttaagtcggcgtcgacttaagacggtgcaacatgttcgcgtttacttgacttagggtgatcactataccctactaacggagcagtcgacttaggtcagcaacgacctaatacgacgttacatgttcacactgactcggcttaggagaaccactataccctgctagaggagcaatcgactcaaagtcagcaatgatttaaggcagcatgatacatctacctatcctaaggcgaccattatgcctaactggccaagcgattggcataagtcaggaaaagttccaaaactagcgcaccacatttactttcacaattgttcaggatgactgttataccctgacaacaaaaacaatgagtacttcaggaaaagaggatgttataattatcagtaccaaggacacgttctagtgccctatccacaaaatattcaaatacaaccatcacaaacacatagaattcatagtacactcagtatttcgtaggatgtcactgcatcgaaacatctctgttggcaatgttttccgcaggagcaatcgaggaagaaggacgactcgaggcatcaggtgtagccttgacgtcggcgacaatgtcatcaggaaccactacgcc

SEQ ID NO: 51029 - DNA, 366 bp, Zea Mays
ctggagagtagtcatcgtgcaccgttgcttggcatatccacggttgtgagtggatctgtcgcgtaccgtttcgttgtgggatctgggccgcctgttccagatcggacggttccggtttcatcccgaatcattataagtcccaatctaatccgagccttcggtccacgatcggacggctgatctcgcgccataccccttcggcctgaagttttgcataaggaaccttatgcttttagtgaatcaacccgccgtccagtgcacagttccctgagtcttaggagtaattgcgtcgtagcccctgcactttgcagtaattgatgcgaaatccagagacccaggaaattcaataattaaatatagaaattg

SEQ ID NO: 51030 - DNA, 283 bp, Zea Mays
ttcacgagcaacaagggacttaacagaggctagaacattaagcaattgggtatgttttaacctgaggagcgctggccacggagaggttgctgttacggtgttcttgagcggatttgggggaaatccaaaattggagctcacgggtgcaagattggaggcaatactgggtggtgtggtgcgtgatgatcttgcggagctgacggtgggctcaatttataggcctagtgagcggtggtcgtgaatttgaagaaggacgcgcggcggtcggaggaaggggagttca

SEQ ID NO: 51031 - DNA, 1053 bp, Zea Mays
tttcacgttttcatggtgcaattgtagattgatgatgatgtcagaactcagaagctgcagcttacatgtttattgctattggaaactcgtcaatgtaaatttcagtgtaactgggcagatgagtaaattcagtgtaataccatgatactatagattactaccagactcaaagcaatttaggtcgggaatcaggttatgatatttagactcattaaataactttattgttattgacactactattgttttttgaattttagtaacttatgtgtaacgtatacagtgatctgattagtgtcacctgatgagctgtgtttcgcgacaataatgtcctgttggctttgataactttgttttagggctctcaagcttgctgaacacgaagggcgaggaggggtgggcaccttttcattctccgacaactctctctctaatcattgacatcctgcttgagcgaggtatgacaattccagttcctaatgcttttattaagtttcgacatgccattgcatttagacaaacaattatgcattaattagagctccttgaaatttaaaattttgtcaagtcatttctatttgttaatggtcaatttcagaatttatccaagcttttacctctgttcttaactgtaagttgatttggcttcttcagggatatagcttttgctatgcatctatattacactatctctagatacatagtaaacctatggatctagaaaagctaattccacttataatttggatcggagaggggattaattagcaccggaatttcgcctcaagttaataaacactccatccttgctcctggaagtatcactttgacttgggacatttgaagcaaactacacgcctccaaacactgcgctggttatgtactaaaatggtttttagcattgtttagtgtcatgctcatcagctaactagataatacaaaggaaatacaagatcatgacagggtcaagtgcccatcattcatcctatcacaatttgcaagctacatgttagaaaaggagaacagctgggcctggtgcagaggtgggagcag

SEQ ID NO: 51032 - DNA, 712 bp, Zea Mays
atcgcctagacaaggttcgaacttgagacgtttcaaatatagaaaatgatccaaaccactgcagtagagttgaacatatgatatgctattgaagttagtcatctaagtgctattaggccactgattgttcgcatgcccaattccctcaccctctcgctagcccaattcatggttgtctgctcgttactgcacggtttagcaccacatcggcagctcaaggaggtgttgtacaggttaaaaactcaagatcgcttaccacttcaagcttctatacactacatgtgtatatttgtttgtacgatacgatggctgtctattgggctcccgttaacttgctgtctattgggctcccgttaacttggttgagctcgttgatttcctggctcatttggacaatctttttagttttttggttaatattgctagccgacctttttgcttatttttgttaagattgtggcgagcaacgtatgaaatctagaacaaggaaaacccaggaaaaaacatcacatcttatagcaactccaacagcctatgtaaaatacattgaatcggtaaaaaagacaaagcctgttgaagccgcatcaaacatcccgcgccgctaggaaccagccatgacaggaacaatcctgcgccgccagcatccagcgccgctagcaacagtgccgctagcatcgcacaattcgcacacatccactatcgttgctatttc

SEQ ID NO: 51033 - DNA, 778 bp, Zea Mays
aaacaactcatcatggtcgcctccaccgaagataatggattcggggtggtatctaagtgttaaggcatggttctttagttttgccacctctttggcacttagttctcaaccacaaacatgtttgaagtcaaattcaatttccccttcttcctcgtgataggggatagttttggcttctcaggccactaggggcctcaacttcaagtattttaggctctatggccttggttgccaacactattgcttcagcagtctttgcctctataggttgtagggtcgtgattatttcctctattgagctagcaaccaccactgcttcacacactattccagaacctttgccctctttgcccttcatggttagtaacaaactggtcaggtctgattctagtgaactcaaagtattgaacggtaaaggatgggtcattacctttaatattcacgtcgccccaagtgtgagcctgacggactcctgatgtcctttgccatttttagggtcttccatcggttttactgatatttgtcttttctctttatgaggctgggattcttgattcagaatgagaagacccctcaccactgtcttttgctacctttgacactttcgccacctttggtttctagcattttttgtttcttcgccttaaccgatctgattgcttccctcttcatgaggctatcggttctctttctccttatcccggcattagcctcttcgcttatcttcggataatcggggtattcaaaccctagagcattcataactccattcagcctt

SEQ ID NO: 51034 - DNA, 420 bp, Zea Mays
tgctgaagctgttgtcgttgattttgttttcaagaatattcagcctttgaaggatagtgtctaccctacttatctgtacactcgtgttaatgaccccactcaaattaccaacaagcgaatatctgaggaggacgagctgagtcgggttgactcgatgctgagaggcaaaactttgaatgctagtgctccccttcgtattctgcctagaatcttcccccagtggtaagcattgttgcctatgagctcctgtatttgtcatgtgtagtgtccttactgtgtcattttgttgccgcagaggcacttttcagagttcatatccaactcacctgtccaagacggcagtctaggtcatagagtgcgaccttcttcagaagatattgaggccctcattgctgtgtaccagggtctccctgaagagga

SEQ ID NO: 51035 - DNA, 548 bp, Zea Mays
gtgagcctggaatctattcagcaatgaaatctgctaatgcttgggattgaatcgaggacttgtgaatgaagtttatgatgaactcgttgagttctgctgcccactttccaattttgcctaaagcgtatctattccttatgatatccttgagacgttgggatgatggcacagtaatgtcgtagattggaggtaatgtcgaagctttcttgaagccattaggactacatataggagcttctctgtcttgtatagtttcttttagatgggatcaatactttggatatgaagtaggtgggcatatgccttttcacaccttcgcttacaatttcttgaaccaaggcggcacttacagttgactgcgaagctgatacaaagagtaaaagagtagcccctagcgaaggtggagaaagtgttgttagctttattagatagtcctttaactcttcaaaagcttgttgccgaggaggaccccattgaaaaacctctgctgattctaggacctcaaagaatgacaagcttcgttcatcagatctggtatgaatctgttt

SEQ ID NO: 51036 - DNA, 710 bp, Zea Mays
aaaaaatcgaagtcttttccaaaagactctccatgcaaaagtcgcccaagggtgcagccggaataacaagcacgaaaaatcaaagtcttttccaaaagactccacgcaaaagtcgcctacgggtgcagccggagtaacatatacgaaaaatcgaagtcttctctaaagaactccgtacagaagcctacgggagcggcctaatcaacgaaagcgcgcagcttcatcacacaaaattatggttacatacttacagcgagggcatcacacattacattggctcaacctttaggatgatacccatctccctatagttgaacaacattatcctcaattcctcacccgcaaacagacttcgtagctccccctcacccacactcgccccagccggcgaggacaacaattcccgtttgccagtcccgtccacacgaagacgaccaccctccatttcaccacgatgacgcctatcacttcacaacaactcacccactctccatttcgccaccgcccttcgccgtctacgcccagcactcgcacccggaagatcctcagcacccatcacacgaggagaagtcttcgctgcagccacatccaacgctgcaaaataatccaagtcctcctccgaagactcctctgtccacacaatcgaactcccagaatcatcagactcaaaacacttagacacagaatcatcagaatcgtcttcagcaacc

SEQ ID NO: 51037 - DNA, 350 bp, Zea Mays
ttacgccgtgattcacgtcgtcgccgcgattcgtgttcactggtgaggggataatcacgacggagtaaaaatcttggcactggatcagctcgggctcgggcgctgatgaggttcaccgtacccacttgctcgtcgtgcggtcgggatagatttcgccgccgttgatcgctcgccgttgtgtgccacgtgtttaaacgctagcccacgtcgcggtgaatcacggtatgcatgtccggtgatcgccggagggctgccacggtgaaagccactcatctcgagcgccagtacctcttttcccctccggtcaaagaaagggaaattggcttaaaccttttcctatatgaattttg

SEQ ID NO: 51038 - DNA, 729 bp, Zea Mays
ctagaacactggccattctcctccctttcctaggagtcgccgctagaatagttgatgtccttgttaactctggcagtgatggagaattctacagctttggctgctggtcacttttcaaactttctaattttgacttctctagttcagcggtggtagcttcagctgccgtagcaggtattactccacagctgagaaggtagcttcgacagattcaacatcctctatctttgaaccttctacaacaggtagtgcaacatccctctccaaaaaataagactttggccgatgaatgacaatattcattcttttgggttttgacgcagtagaaggggcaattgatgtaatcctcctcttcgtcccttgctttcgagccggaaagcagtaatcggggtacacaaaaccaataacatcaaacactctatttagtcttttctttccacgggcaccgaaggcagtattcatggcttcgtcttcagcctccgtgtatgcccccaacagatcatcagtagtcgcctcaatagcttcgagccattcgtcatctggctccctaaactgacttctatagcggtatatatatttcaaataaaccaggccactttcgctcgagctatcagtgttctccttcgtcatttcccattcattaacaaggggccatactttgaaagctatgtgttcttgaaccaagtccctggtgctaatgtaactgcacacaatgttgaaggccaccaa

SEQ ID NO: 51039 - DNA, 344 bp, Zea Mays
aactcttcttgtttcatatggagcactccttctagaacatagtgctcacggaatgctagcttgaattcctcccaagtgatctgatgcccagtcggttgaactactaccaaatttgcccaccaagtactggcaggtcctcttagttgttgggcagcaaataatggcttctgcgtctctatgcagcgaatcaacccaaacttttgttccatgactcttacccactcatcgtcttctagaggttcttctgctttaataaaaagcgggggtcgagtctcagagaattcctagtatgtagtttcacggtccttgcggaggagctctgcctctgtgctgttggaattgat

SEQ ID NO: 51040 - DNA, 515 bp, Zea Mays
tgacaatgatatttttgtggtggcttcgaccgtggctgctgatgacgattcatttggctctgtgtctaagtgttttgagtctgatgattctgggagttcgattgcgtggacataggagtcttcagatgaggacttggattattttgcggtgttggatgtggctgcagcggagccttcaccgtgcgcggagggttccgaggaactcccaggcgcgagtactgggtataggcggcggagggcggtggcaaagcggagagtgagtgaattgtcgcgaagtggtaggcgttatcgtagcgaggtggagagaggtcgtcttcgcgtggatggggctgggaagcgagaattgttgtcctcgctgattggggtgagtgtaggtgagggggagctgcgaaatctgttcgagggtgaggaactgaggataatgctgttcaactacagggagatgggtatcatcctgaaggttgagccaatgtaatatgtgatgccctcgctatgtgtatgtaaccataattttg

SEQ ID NO: 51041 - DNA, 1315 bp, Zea Mays
aaggacaccccatacatccatgtgtctaagtctgaattcagttgcataaggctgactttggagctctgtatttctaaaaatacaaggaatttgcctagggtcaacacatcaaacttgtagagctataataggagtgcaattttgcttaagtaactaagccatgatcacatacaaagtttggagtaaaatgagcacaaagttgagctgccagttgcactgataactgaattatggttacgagtgacattggcagtacttggaggtcgatttggagtgggatctactgatcaattgagtatagttactatagcaagattttagctggattatagggctacatttttgttacagagaggttaacacattctcacacaaaaatctgagattagggtgctgcaaaccgtgatgtcagatgctctgaatgactctgtgatggtacagtagcagaaatatccctgggttcagtccccctcgccgccggtgatccgcgtgcccggattcgtgctggttgccgtgattcgtgcctggcacacagtggatatccacggggaggtaaaagatctcgctggggagcatatgtggtcgcatgggaggcttatcaccgcgcctgtatccgttgcaacatggccagaccgccgggttgccgtggaaactccgatgacctcggttgtgccacgccgtggcttgttactgtgcggtagtaatcgtggcacacttaagagtacaacctttgagccattgctccggtgaacgccacgaatcctttgcgccagtactcttccccctctccggtcgccgcgcgtcttctccaaattagcctccaccgctcatgaatcctataaattgtgtgtgccatcagctccgctaggtagttgtgcatccagtgaaccagctctcacctccaatgatcccctacagctccccaatttgagacttcccccaaatcggtccagaacatcgtactgtgtgagctcgccgtggccagcgcgctacaagtccgttcatgccctttgttccctcgtttaattactctgatatgctcttgatactccctgacccatccagttgagttagaacctgtaggatcaccgggaacatctcggtttgtctgttgctcgcgctgtcaccgtgggcagtgtgattaagagctcgaaccttgcaattacgggaggggaaatggttgtttagggttgaatttggtgtcaagcaaagggaaggattagtcgttgcctatttcggccagtacgagctcgccggagctcggcctgtcgccgttcaccgtcggggctcacgggttgtaaagaatagaaagggg

SEQ ID NO: 51042 - DNA, 721 bp, Zea Mays
gcaagtctgactaagcgagaggttcgattgacgaaaatgggagtatgtatgtcagagcgcgtatgtaatccaccacgacctattggtggatagtggctcaaccacttcgtagctattaagtcaacaaaggacactggataaaccgctgtaggacatgactgagtgtaacggcgggctccagggtggcctaggtgtgcatacagtaccctgacggaggaagaaggcgtcatccatggcgtccctcgactgatgggaacccaagaggacaacgaactacacgacaatgcgtgacctttattctcttgaccgtaaggctcttgtaatagtgttggtctttgaccttggcctataaaggaagggaaatggacacgattccgaggacgagcaatcacacatacacatcactagcacaagtcaaagcacagagcacttataaccgcacacatattcacacactagagacttgggagctcgatccctctctcgcccgtttgtaaccactactacaaaccagtgcaaggtaacacgagcaggtcaactggatttatggatgttatgcccaaactagaataaacccttgtgtcctctttgtacaccatccgctcgaagacacacatagcacaataattactagccagtggtttcgaaacaccaacagttgacacgccaggcatgagcatttttgcccgtctcgcaacatgtttccatcacacaatagcgg

SEQ ID NO: 51043 - DNA, 413 bp, Zea Mays
tggacaaattcgtagtggtttttatctatgacatcttggtgtactcaaagaacgaagaagaacatgtcgggcatttgcatgtagtgcttcaacgtctacgagagcaccgtctttatgccaaattgtcaaaatgtgatttttggctaaaggagatcaaagttttgggtcacactatctctcaggcaggcatagctgttgatcgtgataatgttcaagaggtgatgaactggaagccacccacgactgtccatcagattcggagttttctaggattagctggttattaccgaagattcattccggatttctctcgaattgcgaagcccaaaactgagctgttgaagaaagaagccaagtttgtttggggtcagaagtgcgaagatgccttccatgcattgaggcaacatctgacc

SEQ ID NO: 51044 - DNA, 686 bp, Zea Mays
ttcccaaagcgagcgacactcccatccttagtagcaaagcctaaccctggtccgccagttcccctcttgaactgactgaccatcatgcccaactagggctcactgcatgacacccaactcaagatagatcgaaggtatgtgttttcttcctaaattcgtgtcttgtcgtgtctgtaggtctcaagggcagattgcaaaccctcacaaagtgcacactacatcggtacaggggcactcactgagctagccttttcaagcaaagctatccagcgtctctctctgctagttcagactgcaagcgaggacaaatggtacacgcacccaacaggatagacctagatctcaactcgtcgcgctcatctagcaaggtggagtacttggtctcaaaagtggtgatgttcgacatgtgtagagcgcactcatcacattcagtctcatcggacacctcaactgaagctctagcagactcaagtttcctaagcgtgctctcgtacatggatctaaactctcttctctcacaagcagcctgcctaagcaacttatcctgattatccaaagcaacattcagctcttctatctcaacgacgagatcatcggcgaaaggtagtaccttagaagtagtgtcatcgacgatgtctttgtcgtcgctggtgccgaccgcgtcctcaccaagttccatggtgcag

SEQ ID NO: 51045 - DNA, 717 bp, Zea Mays
cctaaccactatattgaatatttgttgatatacttgctagtttgtaagtttgcttgttcatgttgtgtagttaccggagcattcgtgccatcccatgaaggccagttccgcgagtttatgctagacggtttcgcaagctctcaccctttcacctattatagcatggcaagctcactggatccctttgatgcaaaattacctatgttttcaaacacatcccttagcctattattttatgtagtatatgattttgctactaaaagacatgttagtatggccacccagtcttagaactttgccgcaattcatatttatactacttgacatttttattacaaaatgatttgagaaaaggtgtgagtttttcaaaaaaaatgttttgaaaatgggtattatgaagggttataacccttgtcacctttgaataggatgatcagggactccctagtttgggcgggccttaaggtgttggctcagccgggttaggtgtgagcataaaggattgtccctttcgcataaatatcagtttgtcatcactccttacctatactcttatcaagtacaaccactcgagactatatgggcagtcgctttatccgatcttgcactgtctgcaccccaaggttatggtggatgggaagcactagaaggacaagaaggggggataattttgtcctggtttgggtgaggtggtggccttgtaactttcggtataac

SEQ ID NO: 51046 - DNA, 536 bp, Zea Mays
gtgggggtggcgttcgtcgttgaccaccatgtgctccgccatggtgtgctcggttggggaataagagattagagccatcgatcggctagcaaccggttaggatcagtgctgggagtgggggttcttcgggccgttgatggacgatgcagtggccactatcacataccgatttgttttaagtgaagacagatcctggcgcttgttttctgatcggacggattagatttaaaatttacttcgacagattgtgaccatagatcttggatccaagagacgcgagagggtaccagttcgggataaattgatctaatctagaccgtccggggatgatcggatggataggagcagccaataccctttcatttagacattttataaaagagcctatgtattttcactgaatcaacctgccgtcctagcacagttacacaacatttaatttaggtcctttttttagcagttgggtccctgcgctttcacaaaatattggtcgtagtctagaacgaaataaaataaggtaaatccatatagaaaat

SEQ ID NO: 51047 - DNA, 808 bp, Zea Mays
tgaggcctttctcgggattctcccccatttcggtctctacaaatacctttatcattgtcggcccgggatggctgggggacaacaccagcttgttggtggcgcaagtctggaacttcgtcgcgggaggaaagcagagcacctcggcattcccctcaaggacatcattaaggggtggcgtctcaagtggttcattgtggagaaccattgcaagtccctccccctcggtcagggaggcagccagatgttcgcacaccgagctcgatagaatctccgaccccttcaaagataacagaggctaaagtactgcttgtcgaggtctgcttgttgaaggatagtggtttgactgctaaagttgtggttgctgattttgttttcaagaacattcagcctttgaaggacagggcctaccatgcttatttgtacagcggtgtcaatgattctacctgggtcactaacagaaaaattcccactgaagatctgatgagctgactggacatgatcttgaggggtagagtttcaaatgctggtgttccggtggcctattatgcatggaacctaccaccacttaggccattttctaagtttgtgtctaatcctcctactcgtgacgtagcctgggtcttagagtgcgaccctcttctgaagacattgagaccttgattgccccacttcatagtcttctacaggataagaagcagactcattttgagatgccggctagcactgatgatgtggagatagatgttgtgtttagcttgctggctggggaatcgtccgactcaacccacaatgagccaatggccatcac

SEQ ID NO: 51048 - DNA, 323 bp, Zea Mays
atcgaggggaaacgttcgttaggtgttgaattaggtctcagtcaagttagagcactggccattgcttatcttggtcggtacaggttcgccggagttcggatcgtcgccgctcaccattgaggacctcgagttgtgaagagttagaacgtggagggcttcggtgtaaatgtcaacgactgaaacaaatagtgcacatgattcaaatccctgagggcctcagtgcaaaaccgacacgcgggcgcgcacgcacgggcgcgttctgccgatgctgggccggctcgggccagattcagcccaaccctgttcatgtttttcctttttct

SEQ ID NO: 51049 - DNA, 705 bp, Zea Mays
ggaagcgagcgagtgtgatgcgtgcgtgtgaaacattctgttacaggttggagttttccccgagtttgctggtgtggagtacgagaatttcatggccgtggcagagagaaaacggtcagactacgatttctttcacacgtcggacgcgagcattctgccgcgtggtgatgtagccatcaagggccctgctgttcgtctctttaaaccatttgatgagctctttgttgattcacaggttggtacaatcctttttcatgtatactcaacgccactagtactaaagcaccattctggatctttttcaggattttgatacggatgctcttgaaaaattcattgaagtgtctggtttccctgcagtggttaccttcgatgctgacccaaccaaccataagtttcttgagagatactacagcactcctagcgccaaagtgagtaatacaactgtgattatgttctgtttgctctttcaaaatttgaatatatgagctgtatgtatgttgggtggaggagctaggttttcatcattcatttacctttgcataagtatagataatactttcatatctactgaaatcaaatatggttgggcaggcaatgcttttcttgaacttcagcgacgacagaatcgaggccttcaagagtcagattcaagaagctgccacgaaattcagtgctaataacataagttttttaattggtgac

SEQ ID NO: 51050 - DNA, 455 bp, Zea Mays
tccaaggacacgtgtgtacccaaagctagctagctctctcgactctggaaggtggaaataaacgggagctgacgcgtgtcatgatcgtcgagcaaagagccctgcgcgtacgtacgtacgtacaccgctcgctctcgtccaagagacgtccatgcatgcgatagaatgtagtatagtacgtgtgctacgtacgagctaggtactccaatttgaatcgatcctcagtgcatgtgcgtatacatgaacgtatgtaatggtgcacgtagtatatatatgtcctgctgagatctcgatcgataccaaaaacgcgtgacgcgcgcgaatgatccgctgcgcgtatatggtgcacgtttatacgttcttagtactactgcctactgctgcatgcacaccctagctagcttcctcctgtacgtaaagtcttcaagacaaagttcggaccagagaaagcgtgc

SEQ ID NO: 51051 - DNA, 450 bp, Zea Mays
tgagaggactaaatgatcggctacagagaaaaatggctgcttgtattgacttgacgtatggaaaggctgtcagcacagccctatctattgaagcaaaatatgcaggatccggaaagaacaagggatttggtggtgagaagactaatcaaggtcaagcaaaaaggcaacggtttattctctggccttctaaccagactcctccacgtgtaccaactttccctttcaagcagccaataattattcgtcccaataaagcccccactgccccaaatcagccgggtgccccaggcactcgattccctgccttgcctagctcttcaactgggtgttttaattgtggcaagtctggacatttcatcaaggactgcccatatcccaagcagaatcaagcaaataatcagcaaggatcgggaagttcatctcaaagcaagggaaatgttaagggcaaaa

SEQ ID NO: 51052 - DNA, 512 bp, Zea Mays
catgtcggcatctagttttattaaacctgattctgaatgggctagccaagttatagcacctgaattcctagttttgacagttcggagaccagaccaggatgacacaacatgtaagtctttatagaaaaaccaaaacattctatactttagaatgatgggatgtaattattctaagaggaaaaatcatgtttattgtctatcaaactatagcttgagcaccaaaccttttttacgacagggcaaagccctctatttcattaagaaataggaccaaagagttcaatacaaggttcacaaccataagcaacctagtcaactcacaaccaacaagtccagaaacgctacgttaggaacccctataataccgagctaactcgatagaggcaagaaacgacctgaacgcgtcacaccacatgcccccaacaggaatcagaatttttgcttattacaggattgcactccatccagaaggcaagacacgcaacattcagagcaccagaattacataaccg

SEQ ID NO: 51053 - DNA, 699 bp, Zea Mays
taccatttcctctgatgttgctggcatactgacattgacttcaattctttctccttgcggactgattaatgtaaccatcctcttaacacaggatattactccatcatacttggtcaagtagtctattccaagtatcatatcaattccacttgattccaaaattatcagctctactagaaagcataggcctctaatttcaatcttagtctgagggcattagtgattggctctaagttcacctcccggtgatcaaattaatagtttcctcttcaagggatagtttggtatattatgttttccacaaatgactttgttacgaaggagtgagatgctccagaatcaaataaaactaatgcaggcatggagttaataagaaacatatcatacaccacgtcggcatcctcatgaactgattctgttgtcacgtgattaactcttcccctactctggttctgcggagtcttgttctgtgcagatccacgggcaggtgtgttctggtcaatcctctagttgctgttcttctggggtgtctgttgattatgccttgggcagttattagcatagtggccaagttcgccacacttgaaatagccattaggttggactggggtagttgtgctgttgtttttggctggtgtgttcacgacacttccttgatgattatgctgttgaccattagacctttgaccggtctgagtg

SEQ ID NO: 51054 - DNA, 469 bp, Zea Mays
gcgaaggcacacagtcttatcatacaaattatagttacatacatgcagcgagggcatcacacattacatcggctcaaccttcgggatgatacccatatccctatagttgaacagcattatcctcaattcatcgccctcaaacagacttcgcagctctccctcacctacactcgccctagccggcgaggccagcaattcccgcttgccagtcccgtccacacgaaggtgaccaccctccacctcaccacgatgacgcctatcacttcgcgacaactcactcaccctccatttcgccaccgcccttcgtcgcctatgcctaacactcgcacctggaagatcctcatcacccattacacgctgagaagcctccgccgcagccaaatccaatgccgcaaagtaatccaaatcctcatccgaagactcctctgtccacacaatcgaactcccagaatcattagactcaaaacac

SEQ ID NO: 51055 - DNA, 862 bp, Zea Mays
caaacaaccacagcttgctggcaagcctctgaatccatgcatccttcatcaccttccattctgcacttacagcagcagcagcagccgccgccacagcttgctgcgcttgttgtgcgacctcagctcgctccatggaccccttctgcttcagcttgcaggtcagtcggcatattactgatctctgctctccactgcaagaagaattttgctagaaagaaatgcatagttgttagctcgtttcttactgttctgtttatattttccctccctttgttttctagataagcggatgtatgtcagttgcgtcatcatttatcactgtccaatgtccatagacatcacaacaagcactcgaagatttgggactgttccaacaaggtatgttctggtctttccatggctttgtagcttctataggcgtataccatatattaccatctcagtaaaagacatttcagcttcctggcccaactcagatgccctgcaggttcccaaaactcatcaaactctgaccatggacattatattgttatttagctatttaggctggtcatcatcatcctgtcacttgttttgaaaagcatgggttcacgatactaaaatatttaatgccatttttttttagcaccgagctgttcaaaacgacaagcacttgagaagagttctccctgcatttatgaatacttgtgaaactctgaccatgaatgtaaccttagatattaaatatacatgatggaatgttcaaacttttgtcttctccaaaaatttgagtagacgtttcatttgtggaacctattggtaaaaattcgagttttgaaggccaagctttcgagagcagggttcccaatttcgggcagaaatc

SEQ ID NO: 51056 - DNA, 1154 bp, Zea Mays
cagttttcacgtgtaaaatgaagctcccgccaaatttcaaaattctaaacgctattaaacaaattacaacagatttgaactaaaaatatgattttgacccataaaatgaactaattgcaatcatctaaatatgatttacaatcatatgaactatagtatttgaataaacataaacagacaaatatggtacatcttgcctatcccctacaggctgtttccatcttcaaataccagacgaacaccagctgtttgaagttgaggtatgataccagacgaataccagacgaataaacagaaaagaatagatcaatctatacaatcatatgatttacacttgatcaacagaaacaccactgcccggtaaacaccactgcccactgcccagtaaacaccactgcccactgcctagatcaatagaaacaccactgcccagaaacaatcatatgatttacacttgatcaacagaaacaccactgcccaggaattgacccagtaaacagaaaaaggatatgacacattgttttgttctcctttaaacaaattacaacagatttgaactaaaaatatgattttgaaccataaaatgaactaatatgcaatcatccaatcagcaacaatttcttaaactataaacagaaactgtaaacataggtataaatgggaggatttacaagaaactgtaaacatgaccctttagaaactgtaaacataaacagatactgttggcagaccaaccatttgtgattccatatccagatccagtttctcatgcatatccagtttgtgacagaaacaaaattgcctcagaaatcatgagagtatgcagaccaacaaacataaacagaaactcatgagagtaatttgcctcagaaattattatcaattacaatcacttgatcaatccatgagagtaaatacaataaattgcctcagatttgtatgaataaacacctcatttgaccatacatgggaaaacatagggcagatggagaaatcagattaaaggatagagtatgtttggttgcctgacccaaaataaaaccaagagcaaggaaaacaaagcagtaagtcaacctcccatgaatggtcatcagtcaaatatatttcatcacaggcaaaattcacaaaatgagcaaggaaaacaaagcaacaag

SEQ ID NO: 51057 - DNA, 536 bp, Zea Mays
attcaacagtcgttatgattgcagaagtaagtgcagtgtgatggttttgaaacttcttcctatttcacggggcatagagatcgccctaagacgagcaatcgcaaacgtgcttatgctgaatcgaatagtcacgagcatgccgtgccgatttaagtcattactaacttaaaccgactgctccgttggtagggtctaatgatcaccctgagttaagtaagcatgagcatgtcgcaccaccttaagtcattaccgacttaagtcgattgctccgttaatagggcatagtggtcaacctgagttaagtaagcttgagcatgtcacactgccttaagtcattgccgacttaagtcgattgctctgttaatagggcatagtggtcaccctaagttaagtaagcatgagcatgtcacacctccttaagttattgccgacttaagccgattgctctgttaatagagcatagtggtcaccctgagttaagtaagtgtgagcatgtcacaccaccttaagtcattgccgacttaagtcaactgctc

SEQ ID NO: 51058 - DNA, 348 bp, Zea Mays
gacaaggtcggcctgatccattcccgcttcggatcttttaccccctccgcgactatcacctcgccagagagcacgaatcgtagcaccgacgcggatcacgacgcgagggtcaccgacggcgaagtgcactgcatcactgatattttcagacactgtaccatcaggatcttcttcagggtgcctgacagggcacattgaagggcgtttttcttgaatttttacgtgacaacctgctaatgcaactacatcaaatttgttgtccaatgtaccagctttaatcttgttattaagaccttgatcatacattcactgaatcccccgcaaatcggtctcaaagttcatccaaac

SEQ ID NO: 51059 - DNA, 621 bp, Zea Mays
tcttttaacattgtgttgcattgtttcttgattgtgtttagcgatcgaaaacaagtaaccaacaccaacaacttacaacactccctccctcataccaggtttagagtggtatagatacttccataaaccaaaatgtggaaagatcccaagtaatgattcacatagatgaatggagatgtcaattgtagtatggaattcgaattcaaatgagtgagatctatggcatagaaataaagcaagccttggacaattgagcaaataggcaaacctaacccacaaacaaagaaaggggcaaaaactaatgattcatcaatatctttagtagaggttctttcccctcgccaacttttttaggcacccaaatccttaggggagaacacacatttccactaattgaagaagatatgattcagagacagtggacttacaaaaagaaaggaatggattggggatctgaacattctcatcatatgcaagaatctccttagtgttttcacgctcgctcaaggttttcttcttcggggctatcactggtaggataagtggtgcgattaaatttaggaggcgattaaagtattggatctcaaagtcagtagcagcgcggcactagaaatgatatta

SEQ ID NO: 51060 - DNA, 553 bp, Zea Mays
cggggaggttgtttccaccttttcatttagctttggcacattgtctgtctcaatgtgcctgggtcggcgcgtcaaaactttgatcttcttcgacctcgacacactagaagatgccgaggtaactgctttcctttacctcccttgcttttgcgtgggatagcagtagtctaggtacacaaacccgataacatcaaacaccctgttcaatctcttcttgccgtgagcaccgaaagcagttgtcatagcttcgtcttcggcctttgaatacgctccaagcagctcatcactagttgcctctgtaacatctagccagtcatcgttcggttcatcaaattggcttctttatcaaaaggtatacttcaatagaccaagccattttgactagagccagcgacagcctcgtttgacatttcccatccacttgcaaggggccacactctgtaagcaatatgctcttggaccaagtctcttgtgccgatataggtgcacactgtgttgaaagctgcctggcatgcttgcatgtcattcccaagtgcagtgagtggccttctaa

SEQ ID NO: 51061 - DNA, 334 bp, Zea Mays
tccccgtgtaccacaacttgaagcctgtaccttccacttccttcgccttctgtcctttccacttggtctcttgaacgcataaaatatttacccgtctcctcaccgcaacatcgactatttctcgtaacttacctgttaaggaacctacgttccaactacctacacggaccctagttggctcgactagcttccttatccttcgcacccgccgaggaagatgcaaagacccttgctcattttccactacacccgggcgccgatgtagcgcgccactaaggatgcgacgacccgatccttgctcacttatcactggctccagatcaagagacggcgc

SEQ ID NO: 51062 - DNA, 360 bp, Zea Mays
gtggaaacacttaatatgtgttgctagcaccatccgttcattaactaggatgtggcaacacttaatatgtgttgttagcgacatccattgtttaaataggatgcgacaacaattaatatgcgttgttagtggaatgtattgattaactaggatatggaaactactaatcactacaacaacaagccaaatcaatgtcgggcacactaatttatgttagctaaatttagccgttgtaattaatatgcgctgggctcgctaaaagtctataaagatgtgtttggttggtgagcggacgataacataacagttcaattcctatttttgtgggtttggttatccatggagaaagagtggacttgc

SEQ ID NO: 51063 - DNA, 723 bp, Zea Mays
ttgaaagccattaggcacgcttgcacttcgttcccaattgcgattgatggtcttctaatgccgaagcgcgaccaaatgggacgttgaatgatgcccctcacatcctccctctgattcagatcattctttacgtaaaaccattgcttcatctaagagcccagccacttcttccgaaatgttggcacaatataatttgcctcagagcggggcacgaagctataacatccaaagttgttatggtattgttcttttccggttgccttcgtctagtaggatagctcatgaatattgcaaaaacacctagcatccggctctagcccttgactcctcatagcccgtataaaaaccccccactttgataagggcttcaggggcaagttgatgaaggtatattttgaatgccttcagaacttcaaccaacatcttgtgtagtgggaagcgaagcccagctttcatgaagcttttaaagaccaccacctcatcagctttgggaaggggaacagtgctttctccccccccccccgaccctcactatagaaatataatgaaaatatttgcccttcatcgcttcgatttgcccttgcttgacagttgacttcccaaaaacgacatggcttggcctccatgaccgatcttcggcatcttcatttccactctccacatcaaagttgtcactgtcactggaatccctagaatactcagctagcatctcatcggtaatct

SEQ ID NO: 51064 - DNA, 388 bp, Zea Mays
atctaatcctagtattgctaaggtatttcaagtcattagagatgaggttgtagcctggcgtctagctgaattgtccggtctgagtgcgttgtggcctctctgacccctgtagccttggtttagtttctttaatggatcccttctggttttctgtgttctggcctccatgataggcccctgtaacctataatttggtccatttttgggccttttctcttcttaatataatgatacaccgctctcctgtgtgttcgcgaaaaaatatcttgtcaaattccctcttcgttgcatagcttgaaaagccatttgagacacttgttttggatgtcaaggttcataacccctaaactaccttgctcccttggttggcaaattaaaggccacttta

SEQ ID NO: 51065 - DNA, 575 bp, Zea Mays
gaaagtttgcttgttattctattcatatattccctaactgtcggtgtttatgacctgaccgtgcaccacggggttccccacgtagtgcttttgagtaggacgacgtcattgattgcgactcgatggtacatgctggcatacgtcggagcatacaagagtttatacaggttcaggctgcggaaatgtgtaacactcttctacctgttgaggctgagtatttagtgttgctagtgtacaagggttacagacgagctgtgggcagtggagggtgagttctctagttgatctagttgtggcgtggttgctatgggaaagctagtgagctatgaggcgacgatgggatgtgacgagctgagagatatgagccgagatgagatcgtaggggcacctcctcgaccttatatagacgatcagagggttatcccttataagtcgtgatgactataactctacttgaatcctcattttaatgcggcatgcattcttacttatctagatttcagttgcccttcatctgagtcatctccgagtatctagcacttctggtatgctcaaccttcttgcccgaggcatca

SEQ ID NO: 51066 - DNA, 684 bp, Zea Mays
ctccgctacattattggacactgaaaacaaaagctggagtgcatacttaagttgttcacctccgagagcaataaatagaatccctgcacctgctccttgcagcttcagcgagccatcaaagtacattctccatacttcagcagcttctgggcttcccgggacctggtgctcagtccattctgatatgaagtcaaccagtgcctgagtttttatcgtcgtgcaaggtcggaactctatgtcatgagctcctagctcgcatgccccacttggctattcttcccatagcttctttgttgtgaagaatatcacctatcggaaatcctgtgactactatgactttgtggtcgtcaaagtagtgccggagcttgcgagcggttagaagtatcgcgtacaacaacttttggacttgaggataccttatctttaaggacccgaggacttcgctgatgaaataaactagatgcttcacgaggtatgcgtgtccttcctccgcccgctcgactactaacgtggtgcttaccacatgagtcgtgcaggagatatacaagagcagttcttctgccagctgaccgggcgtagctcagtgcggtggcttgagtactggcggagtggtcaagaacttcttcagtgcctctagagcttcttgtgcctctatggtccagtgaaacttgtccaccttcttga

SEQ ID NO: 51067 - DNA, 823 bp, Zea Mays
cagtgatccttcaggtcctagcttaattggatgggtcgaggagtatcaggagcacataagtgtactaaaacaagagagcagagggcatgaacggacatgcagcacgctggtcacggcgagctcactcaatacggcgctctggaccgatttgggggaaatcctaaattgggactctctggtggctaatcggaggcacgggtgggtgcgttgagtgcttgactacatggcggagctgatggtgcactcaatttataggattcggaggcggtggctcgtgaattggagttggcgcggtggcggccggagagaagggagagcactgttgcaagaaattggtggctttcaccgtggcgagctcaccggcgatcaacggacatgcgtaatacaagttactgcgacgtggtaagacacctaggcacgtggcgtgtggtcgatcgatggccaactccggcgatcttatctgaatcgcccgtgaatcaggcggacacggtggccagggttgaacagtggtctaagttcatccttaatgcgatatttctcatccccagcaactatctatacttcactgagcatgaatcgcagcgacatcgccaatcacgatgcgggatcaccggcggcgagatgaactgaacctgagatattttcgatactgtaccatcagtttctcattcagtcatcctggcagaccactttgtagagcctagatctcccattttcatgtgaacacttattaatccatctttaacaaagttgtagctctatagtcaggctacaaattgactatagtaaccatcttcaattgatcactagatcttactctaat

SEQ ID NO: 51068 - DNA, 343 bp, Zea Mays
cagcggtgaccaaggtgtagcatgtagctctggtgtcagaagtgaagcctcaggtcgtaaattattgtcatgattatggccctcatgattctggtccttgtagttgtactgatctttgtgcgcttcgatgttacgcattccctgagctgcttcgtcgatcttcttttgaagctaagagagacaaagcatatttcccttcgcttctccatttgctgatggattgcttcgaagtcgttatctcacaatctagttcctagtcttgccattctaggttgatgactttcctcttttgattccttgcctccctgatgagagcttcatcgtcttggttggggtccaagca

SEQ ID NO: 51069 - DNA, 539 bp, Zea Mays
cttcataagattacccccgaagctcttattagagtggggtttttatcttggccatgaggagccaaggactagatccagatgcaagattcttttgcaatattgagttgtcttatcagacgaaggcgaccgtaaaagaacaatatcacaacaattttggttgttacagcttcgtgcctcaatctgaggcgagttaccctgtgcccacgattcggaaaggtggccaggctcttggatgcaggagtggattttcgtgaagaatgacctgagtcagagggaggatgtgaaagggattattcaacgccctatatggtctcgctttggcattaggaggccatccattccacttgggaatgctatgcaagcgtgccaggcggctttcaacacagtgtgcacctatattggcacaagagacttggttcaagagcacattgcttacaaagtatggcctcttgcaagtggatgggaaatgtcaaaggaggttgccactggctctagtcaaggtggcttggtctatctcaagtataccttctgatacagaa

SEQ ID NO: 51070 - DNA, 1049 bp, Zea Mays
tttcgcttgggattgtgaagctaaagctctagctcgagtagcagaacttagcgcatccctcaaaacctgcaagcgtactacaacaccttgcatgaagaagtgcatgtattgtatgatcggcttcacccgaacatgccacccgatgtggcagcaatgggagctggaccatctagaacagcaaatgcaggatctgatggggggattgacctttttggagcccctccttccatgaatcttgcagatgaacggtctcttgaagcaggcagtggaatagctaaggacgaagaggattagagtagtatagtctaagtactgtacttatgtaaaataagtaaggaagtcgagttgtataatggagtatgtatattattactgttccgcaatgaaataaagatggtgtatgtttggcatattttatttccaaatgtttctttgcctcagatgccatcccggacctatgctcatgatgcggcaggtacatcccgcggtggggaggacactcccaatccaccacctgtacctcctaccctggccgaggctatcactgccttgatcaacgccaccgccgacaacacgcgctttctgcgcgaaatggcgggcagccaatttcaacaacacggaggaagagttctccctcaaggaccatgagacactacctatctagagttctccgaaacctgcccaccgctcttcgtcaaggcagaggaacccctagaagctgatgaatgggtgcgggtgatggaacaaaaattagggctaatccgatgcaccgaggtacaaaatcccctatttgcagctcaacagttaagaggccccgccaacacctggtgggcaaacttttctgtcatccaacctatgggacatcaagtcacttgggaagaattcaaattggcatttaaggaacattatgttccggaaggagtgctacaaatgaaactggaagagttcatccgactgaagcaagggggagattctatgatgcagtatctcaataaattcaatcacctctcccagtacgccattgatcaagtggatacaggcttgaaaaa

SEQ ID NO: 51071 - DNA, 520 bp, Zea Mays
acattgtagttggttcttcagtcctttgcgcgggaggagcagtttttcttgattcagcagctgaagaagcctccccgccaaactcaggcaccacagtcggttcaatatagcgtggccggtgggtaaggaccttcaactttttacccttcggcgcaggctcgtctggagtgaccgaagcagcagttttcctcttctttccctgacctcgcagtgggtaacggtagtccgggtaaacgaagccaatagcgtcaaaaactctgttcagtctcttttttccccggcctccgaaggctgtggataatgcattgtcttccgccttggaatacgatccaagcagttcatcactggtaacttcgatgcattttaaccagtcattgttcggttcatcaaatctatccccgtacctgaatgtgtacttcagccagaccagttcatcttcactagattcggtgatggtctccttcagcatttcccagctctctataagcggccatactctgtatgctatgtgctcttaaac

SEQ ID NO: 51072 - DNA, 413 bp, Zea Mays
gttggagtgggtcgggaggtaggagggggtttgtgagccgttgatccagccctatgcggtggatatttgacgacagcagcgactctgccggttggatccgtgaccgtcgatgcgggatcgtgcgcctaggattggagtcggtcaccaaaaatataagccgtagatctttcatccaatgggcgtgttcccgtaccgattcggcttgtggcgcgactaatctggagcgtcctgggtggatcagacggttgatctacttccgtagacttgggttgtggcggttttacatatgagcccccgaattatactgaaattaacccgccgtcctatcggtagcactctgagtcacagggatttttgtagctaggcccctgcggttctcagattttgacgcctaatccagagcctatttaaat

SEQ ID NO: 51073 - DNA, 2882 bp, Zea Mays
ggctatttgatattccacatctcgctggtagatggttccatgtctcacttggtgattatgtttcacttcattctcatataactgaagtttctaatgccacttattcccaagcacttacctggttcatagttatctttgcagaattaatgctttgaaggtgaccagtcgtagacacaacgacagttccacacatcccatctaaggtgaggcatcaactttttatttttctgtggaattcagtacccaacctgagcgcttactacttgttgtcgccagtatactttggtcattttttgtattgcaagtcacatgacatgtttgaggcactttggtcctgggacattcaccagaaacatagtagccattgttttctaaactaccatcggtgacgaccaaatcatcaggtggcatattactccatgcctgtttatttctttcacctttatttatgctctcagggttgaagtcgagtctttctcacaagagtctatactaaaaacctgcacagaaaatgtactctcagcaatgtacttaaacaatagaaattcactgcatttaatcaaatggtttgaaacaaacatatcccatccctgatgaaaagcaagggaatcagccaccttcgatacgaggacctttgaaaatcacccctctgaatctttaagatataaaaagttgattcgtcaaatactccaatctgggtgcaacatttggtggtatcacctgcacaaatatatgaaagaaaaagatagtagagttgtaatggaaagtagcaacaaacaaaaccataccagaaatttctcggcattgctgcatacgaactttaaaaatgcaatgggggtctgattatttctttccttgatgccactaaatattttcatttccttcatcctgccaccatgaatcttatcactatcattgcaccacatcttcttttttcccttgaatagtgtgtgtggtaatttttcttgcttattttatagttagagccacttgatgtacccatattctcatcagatatatcaagcaacacatttatcctattctgtttgtcatgtctcatcttaaactccacgctctcagtgatcctcaatttcttctctttaacaagagaagtgattggtgcagtctccttctcagtactggtattcgctggccttttccttttcttttctataccacaaaatgttgtgaacacaatcccccttctttactccactgtcatatttcatcttgctgtcagcagtctgcatcttcttcccccggtatgttttgttcagctttttctcattcttctcctcacataattggctggacaccttgcttttcaccttagtagcagagttactcatattcctccccctcctcgtcatcatccctttgcatgttcttcccagtgctggcattgtgaagtttcttcttcctctccttctcaagggatgtggtgtggaccttcttcttaccttcaaccttactacagtcatccgatataattatcttttccatgtcttggtcaacacccatcatcttgttcttgctattggttttgtttagggcatccttttccctcccctgctcacataaagttgcaagcaacctgctctgaagtttgcattttctttttataaccaccatcatgtgaaaaagttaaacagacaccccaaaaaaaagaaaaacactgatatgatctgaccagtgtacaccgtcatcagtctaaatatgaaaacatagaggtaattaacatgggagcaccactaaccctgttgcattttagaaactgatcaaaagttgtcgacctgtcattgctctgtcttcattttatctcctgaaatttgttgttattggcccattgctgatacagagctggtttgttctttttgtgacgtgggtgcaaatatctaccggaataaggagaatagcccaagagcgcattcgcttcaagtgacgtgagtggaaattctgctgcttctgatcattttgtaattcttggttactttagtaattcaatgtatgcctgctcttattttacctgttaactcatctacgtgtcttttgaatgctgtaaacatctttctcatgttattatattttaattcttccttttcccctccacacgttctatactttagatatctgaccaacaaattctagattatttgatagttcaatctgtacagattggtatttttactctgcattttctctctcggatgcacaaaactacacatcattttatattaagatcatcaataattttgatgtttgaataattcccagcaatttttaatagttcaaagcataaataggaatatgattcctacatataagtacctaaagtttgctagaaaaaattggaactgatactggtagataccaatctgcagtcacgccatcctctctggtgattgttcttaaatcaacatgttggagtggatcagctggtcaccctgaccctacttaaataaagagcattaaagtggttggctcgtcaccctgaacttttttctagcaagaatagaacaaatgcttgccaaattttattagaggcctccatctttaaaggattggtcaagtatcccgtccacctaaataaacaaattgagaatcattcatgttagcatgacagaattgtagaagagtaacacggtgtcaaagtaaattgtttggatataatcttcacttgaacacaacaccgatggctaaataattttgataccaaaactgaggcaattcaataatataggtgtatgtctgtgtgtggttctacggaggaatttatgatggtaggtgttctgcttcacttctttctcattgttgaagttgtcccaggttgtattcactcttagaacccctctattatttatttttgaacaaagcttcctttt

SEQ ID NO: 51074 - DNA, 425 bp, Zea Mays
gtctgtcagtccttgcccaagtaaatcttgaaattcaaaatcttcttcctccaaaatgtcttcagcttgtttttttccccttttcagtagctgtgctcgccgcggccacaacagattcttcctcagtcatttttaggagtatgttatcaataacttcaagtgtctcttccaggttcggatcttctgtggcctcggtttcagccccggcagcttcggctgcgccagtttcagcttcgaaggtttccgctctggtggcttcggctgcggcgcctttagcttcggcggtttcagcagtctggtcaatgacaattcttgatgccggtgtcggtgacggtgtcccatgaattacatctgctatttgaataatccttcgttttttcggcagtgcaggaccttcgtctgccgaagctgccttgtccttctga

SEQ ID NO: 51075 - DNA, 272 bp, Zea Mays
gctagtttgagttctcaggctccaaaccacatacagcagctctctgatccactttcctgcgaacttttcattcttgtcgaagactttctttctgagcgcctccaatatcatcccgttagctctttcgacttgcccgttggctcttgggtgcgccaccgaggcatatttgatctgaatgctcttttgctcgcagaaatcgaagaactctgagctggtgaagttggatcccaggtcagttatgatgttatttggtatcccgaacctgaatatta

SEQ ID NO: 51076 - DNA, 512 bp, Zea Mays
caaaaattcttgcactagatctctagtgctgatttctgccgccacaactctaaattcaacttcagctacctggcatggagagccaagctgcatatggcacaaaggccttgtcattccgaagctcaaagtcagtggactcataaccatggtcatcagcttctccctctttttctcgtgcggtaactaagaactggtgcctttgtatcctttcgatacgcaaaattgtaacagccaaaattttcgtgaagaccatctgccctggccttcgtgtggtaatgcaactcgtgcacccgacagaaagcttcggcattagggctcatcccctggcttcggagggcccagatgtagacaccaagcctaacaatcgcgttgggtgtcaactgatgaaggtatatttcgaaatgcttcaaaacttatcctatcatatcatagagaggaaaccgaagcccagccctgaagaagcttttaaacacaacaacctcatcatccttcggctctagaaccacttcttc

SEQ ID NO: 51077 - DNA, 505 bp, Zea Mays
tacgagctacatagccttggccgggccagtcaggggtttgacgcccttggcatcaatgataatatcctattgttcatcttggtaactaaagtttgcttgatcacttttttggtgcacaatgttgtcaatttaacattaactgtttgtaaactacactactaaaacccatttggatcaacatgccaagtgcagatgggttgttcttattgagcttatgtgacattaagaaacaaaatcaaaactgcattgtgcaaaagggaaagttgtcgctattgtaccaagaaaaacagagtttatgacacaaagaaaagctaggcacttacatgtttcccacactttcaagtttcataccagttgataaaatggatcaaattattatatggatacaaaactaaacacgtgacctacagttcatcaatacattcttcctccaagattgccttagaacctgtctcaaccaagaagattcagcaacaccaaagattagcagcgcttgtgcagtacc

SEQ ID NO: 51078 - DNA, 925 bp, Zea Mays
gatccaaggttaaatatttattaggcactaagaaatcaaggaaaaccatgattaaaaatacaaggaccactgtaaaaagggtaaagaaaattcaatggactcctaactgctagaataccactacaaaaataatagacaccccaaaccctcacaataagtgagctcaacaattaaaacatggaattggcccatattctagttaaatcataaggaagcctaaaattgtgcaacagtagacaaataaatttttacccaactattgatgaagtagaccaccagagaaaaatacaaacctatttaaaaatgtaaggtaacactcattgccccctaccccatgaaaaaggccatataatccaagaatttctacccccttcccttaagcaaaaagttgccaaattctagaatgattgctcttgcacaaagaagataggaaaaattagagatatgttgtttgacatttttcaagtatagtggtagtagaaagcaccccattggccaagaactttagaaaatcacagtaaaatgacccataggtgttagtggcaaaaatttggtacaaagtcatattactacacctaaataccagcaaaaataagctttaaggaaaaatccaccgttaaaggagagttgtagttcaaagcaccccctctgccctacaacttgataattttgtacaaagggaacccttaacattttgaacctacatttttaaggctaaaagttatacaccagtgagaagctactgtactttttacagaatttttggaaatttacagaactaggttgtagttcaagcccaccttaaaagcataaaagaaaaggagaagaagagataaattgggaagaataatgaatctcacccaatggattcagctaggaatcatgataaactttcactaagacattagaggtaaatcagcggaac

SEQ ID NO: 51079 - DNA, 769 bp, Zea Mays
gctcattctcgtcaacatgacccaagcaaggaaggagattcctagctacagcgacgggattaaatgttggctaccaagcaagactaggccaccctagctcgaggagatcaacctagatatgttgtaatgctatgaccaggctctcaagaggctaaccaatgagcttcttgtgtgcttcacgtggactcactccagtggtgacaaactcacccgaaaattattgagatgtaacaaactaacatcatctctagttgtcgataccaccgatagagggtgtttggtatatgtttaccatatttacttcatattcttagaatatactgtaagattatggggaggctacactagcacaaaacaaaattttcgaccccataaaccaagatctactgctgttaggtcatggaattaccacaagacgtgcaggacaacgaaagccatcttgatgtagacgaacacgtcaagcagtgtcgtgcagtcgccagtgtccttcacgacctcgtgtggttttcctagtgctctagatgtagcacctccaaggtatccacatgtataggaaggaagcatcgcgtaccgacctgttaggtttgcgacggaggcttggcgagggcgagatgggcgcgactgctggtttgctggtggtgaattaggttaaccctaagcacgcgccagcccctcattgtatatccattgtagtgggattctcactccgaggcccatcagcaaccctaaaacccagtctaatttcagatccaatccgagttaggcttcc

SEQ ID NO: 51080 - DNA, 389 bp, Zea Mays
ccggtcacacagacgtatggaactctaggtctcaccggtctcgagctctgtacttcactggacgtctcgatctcgccgtctcaggtagtcggactggccgactggtggtggtggatggagatgggcgatgccaacgggcacaggcacacagcacagggaggggggcggctgggtgacgcggtacgtcaatctgggagtgggtgggaaacaaagggtggctagggttttgcttttgccgtttggcttaggctttcagcaatgggtttgggctgttgggcaccatacgcacatgcacatcacatgttcaatggctggattcacatgtacaagttttggcttgcaatttgggccaacggcctataaacagagaggcctctataatgtgtaca

SEQ ID NO: 51081 - DNA, 328 bp, Zea Mays
ggtatttccatgcagagctcgactaggttgagttcttaggctccaaactacatacggcaactctctaatccattttcccgcgaacttttcattcttgtcaaagactttcttcctgagtgcttccagtatcattccattagccctttctacctgaccgttggctcttggatgtgctactgatgcatatttgatctggatgctccgttgttcgtagaaatcatagaattcagagctagtgaaattggatcccaggtcggttatgatgctattcggtatcccaaacctgaatattatatcttgtatgaattccactgccttagctgaagtt

SEQ ID NO: 51082 - DNA, 310 bp, Zea Mays
ctacgacaggttttggccgccatagcccatagctgttctacaccttacttttatcattgcagcatgtaaattagctaggtgggtaatatttggggagttccatgcagaatgggtataggggaggggaagacttggctaatgatttttgtgtatcatgcctgtcctgtgccctgtaggaagagtttggctaaagaattaatgatattgcgaaaaacagagctgtggattgatgcatgataagagtgcttttggtacctgtcttcgatgttgccatcccatgtgacccagttgtagaaactatctaccatag

SEQ ID NO: 51083 - DNA, 480 bp, Zea Mays
caaatatgcaagcaagaaggtcgttctacgcgatcagctaacaaagaattcctggtcacccgctaaaacaaaacgtcccgaaaggcggcaccacaatcatcatttattcatcttgtgatgcctggatacttttcacctgcctactcatcgtcgatgtattgtcttgttcaaatgtggaacagtacaacgatgaacccatgttacttgcatagtccctttgcctattcaggccggggcaccttcattatataccttttgatctattgatcagatggtcatggccgagaaagatacaatccaaaacgatgtttatgcattgaagcttaattgaacgatcaccctattggattgaatagttggtgacttgcatcaggcttagtgtatatgcttttgcttttatcaacctccaccaaaaggcagggggcatatgttgaacacaaaaaatgtccttgcggactgtccagccttgagaccggacgg

SEQ ID NO: 51084 - DNA, 495 bp, Zea Mays
aattaccagaacacaataaagcttttttattacaatggacaggggtatcgaagaaaatagtactattaataaataccgttaaagaattcaagttcattaattattccatttgaatcacgagagatcttctacccggaccaaacagccaacaggtggggaaaagaggaagaaaagggcagcggcactgcggcagaacagtgaatgaattaactagacacatttgaactgagaatcgatgttggcaggggacacggccgacgactgcaccagcaccgcctgccttgctcgttctccttttccttcctagttccttttcttcgtcctcaccaaccaccaccaccacacccccctgttgtttcctcttgattgttcggtttgttttacaagttccttgcttgcgtcgccagcaagcaatcctctttcctcccccttccatacccgagggggagtaccgctaccgcgccacgctgccgccaccgtcatccgggcggccac

SEQ ID NO: 51085 - DNA, 304 bp, Zea Mays
ggagatagagttttcattcgtcaagacaccaaggcagtcattgatggtaacttaatggttacaccacctcatgttctaatggggcctcgaatcaacgagataagcaatggggaggaaggagaacatcggatttgacctccgatgtccaatattagctcccgggagatggatacacctcaagtactacattcacatgtaagttcaattattgtatttgatagttgtttgagtagattgttatgagcataatcattggtacactctacattgtcaatgaattgcagcaaacaaccattgatctgaa

SEQ ID NO: 51086 - DNA, 296 bp, Zea Mays
tgtgttgggtaatgttcctcatgtcggcgcagctgcctcgaagcatactctattactcgtccttcttgcatcagaacgcacccaagcccaatgcctgatgcgtcacaatttacatcaaatggcttctcaatgtccggttgagccaaaactggtgcagtggtaagtaatattttcaattgttcaaagacctcattgcacttgggagaccattcaaacttaacatcattcttcggtagctgggtaataggtttaaggatcttggagaaattcgggataaacctgcggtaagaaccagc

SEQ ID NO: 51087 - DNA, 496 bp, Zea Mays
gtatatttttttttgtctaagctacccgtcctccatctacaagtccaaaggaatgcacacaatacataagaaaaagagataatatgatcctctaaggtctgacttgcatttgcactgatggaaaacatgagaattcagggagaaaatctagaatctataatccaacaaatcaacctgtgttagcttcaaaacaaatggcctaggcgaggattagaagaatgcaaactcttgggcctctgattcacccaattacagtcaggcaacacaccacataatcttagcggctagggactatgacgaggagggggtcaattaatcacatgtgggggcgtctccatgagagaacggtcaagcgacatctacagcagcgaagattcagaaaccttcaatccatcaaattaacatgtaacttcaaaacaaatcccctaggtgagcattggaagaacgcaaacccttgggcctttgactcacccaattccaaccgacgaaaccttag

SEQ ID NO: 51088 - DNA, 1859 bp, Zea Mays
gtacccatcatcaccagttcgccttccggtgtagtagccacctcggtataataaagtcgtccagttttcttcacatttttgcccactgaagagttagccgtgtttccctttccttgatttgtgttcccggaagtctgtggaatgtttgatttgttttgcttcgggtaggggcagtctttgatgaaatgtctggacttgccacagttgaagcagccactccaggaactgggaagggcagggaaacgagcaccacgggcactcggctgattggtctgggcgggggcaggagtagggcgaatgaacacgggttgtctgaagggatatatgggtgggcgaggagaagaacggtttggattgaaaggtcggattaccaaccttgttctcttttcaggtccctaagttgatctttcacccgcatatccttttgactttccttgtcccgcatttttggcttcaactgacagcgttgtgctgacagccctgctatatgtgaggtccagacacgttgccatcttgcgctggagtctgtcatttagtcccctcatgaagcaattcttctttttcaagtctgtgtccacttgatcaatagcgtattgggagaggtggttaaatttattgagatactgcatcacagaatctcccccttgcctcagacgtatgaattcttccaacttcatctgcaacatgccttccgaaacataatgttccctaaatgccagtttgaactcttcctaggtgacttgatgtcccgcaggctggatggcagaaaaatttgcccaccaggtgctggcgaggcctcttaactttgagcggccaataggggcttctttgtctcggtgcatcggattagcccaaacttttgttccatcgctcgcacccattcatcagcttccaggggttcctccgccttgacaaaaagcggtggatgggtctcggagaactctatatatgtggtgtctcgtggtccttaaggtggacctcttcccccgtgctgctgaaattaatttcccgccatttcgcgcagaaagcgcgtgttgtcggcggtagcgttgaacaaggcatcgatagcctcggccagggtaggaggtataggtggtggattgggagtgtcctccccgccacgggatgtacccgccccatcatgaacatgagtccgggatggcatctaaggcaaaagaaacatttgaaaatataacataccaaacatacaccatctttattacattgttgaactgtaataattatacatactccattatacaactcgacttccttacttattttacataagtacattacttaaactatactattctaattttcttcatccttaactgctccactgcccgcttcaggagaccgttcatctgcaaggttcatggcaggaggggccccaaaaaggtccaactccccatcagctgttctagatggtccagctcccattgctgcaacttctggtggcacgttcgggtgcagccgatcatacaatacgtgcgcttcttcatgcaaggtgttgcagtacgcttgcaggttttcgagggatgcgctaagttctgctacttgagctagagctttggcttcacaatcccaagcgaaagagcacgagtttatggcccaatcaatggtcgtattgcgtttcgaaatttcctgttccaggcgaataacttctgctgataattcagcaatgcagcggctatcgtgcgcatgctccctgcatccatggcatagctcagacctgagtcgctccactctagcctccaaatccccgatagggtcgttgcttccactgctacttccttcatgcctagaggccagctggtgcctaggtacaccatgtggtccggttgatttgtgttgag

SEQ ID NO: 51089 - DNA, 441 bp, Zea Mays
gccgtgattcgtgttcactggcgggtggataaccacggcaaagaaaagatctcacggcggggaatggataggatcgcgaatgggagtttatcgccgtgattatagtcgctgcgacgtggtcggactgccggagtcgtcgtggaagcgtcggtgacctcggttgcgccacgccgaagcttgttactgcgcggtagtaagcgtggcacccttaggagtattctccttgcgctgttacaccggtgacagccacggttacagccaccatgttcttccctatctccggccgccagcacatcgctgttaaattgagagctaccgacctcggggactataaattgagtgcaccatcaacttcgttaggtaatcacgcatctagcgcactcacccgtacctcaaataatccaccagcaagcttcaatttcgcatttcccccaatctgtt

SEQ ID NO: 51090 - DNA, 1125 bp, Zea Mays
ctggagagtccgtgggtggagtcctgacattcccccctttaaagaacctgcttgtccccaagcaggcgcgcgaggaaaggcttgccgcaaagcagtagtatcctcccatgttgccagagatgccggcaaaccggaccactgaaccaacacttgagtttgaccatcagatgccaggcgacgtcgcaacacacgctggggtatctgaaaactgtccaaggaatcaggtaaccgagcaacagaagtagcatccggcaccgcgcgcttcagctgggacacgtgaaagacaggatgaatagtggaggacgccggcaattccaatttgtaggccacaaatcccactgttgacaacaccttgaagggcccaaagaaacggaaggccagcttctggttagcacgatgggcgagcgaagactgaacataaggttaaagccggacatagaccatatcaccaatttgaaaggaacgctcagacctcttcttatcagcctgcaccttcatgcgaagttgggcacgagccaaatgctgtttgactaaatccatcatgactttcttctcctctatccattcctgcagtgagggaatcggacagacagcagaagactctactccaaagtgacgaggagcgtaaccatacaagacctcaaagggagaaaaaccaaggctgagtgccaactggaattataccaaaactcagctaaatagagccaatccacccatttgctggggcaagcattcacaaagcacctcaaatatgtttccatgcactgattcacacgttcagtctgaccgtctgattgtggatgatacgcagaactcatgttgagagaaacccctgccaatgaaaagagtgtattccacaactgactggtgaaaatacgatccctgtcagatataattgacgtaggcaaaccatgcaacttttaaatgttctgcatgaagacatgagcaactgaagctgctgtgaatggatgtcgtaagggaattaagtggctaaacttggaaaatttatccaccaccactaagacacaattcttgccatgagacggaggaaggccttccacaaaatcaaggctcactgttcgccaggcgccgtcgggtatagccaaaggctggagcagtcctggg

SEQ ID NO: 51091 - DNA, 569 bp, Zea Mays
tttttcctctacccgctggtcgcgcaagctccagctcttgtccgtaccggccaccgccccagcctgtcgatctcatctccctgtgattttttatcagctgtcggggggagaaaaatcttccctgttcttatcccctcgtcgccctgctcagattttctagccaccgctgtactgatattttggcgcgcgatgcctattccttgcgcgctcctctctgccgagcggcttcttcacgcgtgtctctctctccctggtgcctgctcgcgacaagctcctgctcccttccgtggtcgcgtgctcagctctactgcaggccgcgcccagcttctctccctcggcgctcacagctctctctctcccctagtccctgccatggccgccgttccctggtcggagtttcttctagctcggatctcctccctacggcgcccgagctccatggctgctgcgttcttcagccgacgcgtcctgccgagtccctctccatccccacggcgtcctgcttgcccagctttcatctatggccggagccctcccatgtcacgtcccagccaagcccctgcctcgat

SEQ ID NO: 51092 - DNA, 332 bp, Zea Mays
ggaaagtgagagcatgagcagtgcacttgtcaggtaaatggttgctaaatggctacggtacggtaaggatgggctgtacataaagcaaattttcgaatcggcacatgggttgtaaatatcggagataactatgtgctatgcaggtaggatttaaaggggagaagagacgctaggttatgtcagccatgtacgtgagagcaagattaagcatgcagtatgaacattgaatgtgttgtgctgaaaattccttaatatgtaggatctagattaagcatgtagcgtggaagaactgggctgcggcttgccattagaacccaaatatcctcaccaac

SEQ ID NO: 51093 - DNA, 820 bp, Zea Mays
ttataccctaaaattagtcctaggggtgaatatgcaaatatccaattaaaccctatttattttaattataataaggacggcgggtttattatgaccaaacagagatcgccactcgcccgaccaatccaaaatcaacggtcacacaacaccacgaaccggtaagagatcgatctaatcgccacggttgataacagatctaacggctatgacgcgaccccttacccatctcaccttaccgcagaccaaacacggcggcgccaccgtgccccgcgccgaagggtgcaccggcgatgagccacccatgaaccgatgccctaagctctaattctaccagtgccacgcgacgaggaggacgaggcggactcagacgaggactacttaccgagggttaggcttcaacattcctttcccatagggacatgcgatccatggtggctcccaacttccgatgaggaattgcgacagcgccagagatcgttccaatcccatgacgcaatgccaaccatccaacaggccggtgattcaccctatctcccagccaagcaccgaagccaatcaacgactcacaatcgatggcagcacggagcggcttcctctgtgctctcccccatggcggctctgagctctcacggtcgtgcggcgttagcaggacgagatgcagaggagtatggggagctaacttaagtacccgagaggatcatgtagtggcccgagaaaaaggggaagagggttgagggagatgcaagattcacgggcgggagatcggcgaagtctgttggcaagacgctcctgacgactcggccccaccgcacagcgaccg

SEQ ID NO: 51094 - DNA, 865 bp, Zea Mays
ttttgatacagatgaaaggttaagttgctacatgaaatttggagcaaatcgcccccaaataagctctgtcaagtgctctgaatggtgttctaatagtacagtgacctgacgaagatcgctagattcagtgtatcgccaccggtgatcccgcgccgtgatcatcgccgccattgcgattcgtgctcagtgaagtgcagataactgctcggggtaagaaatatcgcgttggggatgtgctcgggacactgtttcgccctggccgccgtaccccccttgccttacggccggtccagataacctcgccggcgttggccgcttatcgaccatgcgccatgtgccttagggtgttaccatgtcgtagtaaaccactgaagcgtgtccgttcatcgcctgtgaccttgccacggtgaaagccacgaatcccttgcgccagtaacctcccctctctccggccgctgcgcgtcttttccaaaatcagccaccaccgccgatggaaccaataaattgctgccctagtgagctccgctaagtagttgggcacctagtgaaccagccctcacctccaatcgtcccccacagctccccaatttgggatttcccccaaatctgtcaagaacaccacaatatgtgagctcgccgtggccagctctccacatgtccgatcacaccctcctcgctcttgtttcagctctcttgtgtgctcttgatgcttctcgacccggccaattaagctagaacatgtaggatcaccgggaacgcctcgtttcatccgtagtttgcattatcaccgtggacagagcgattaagagatagaactttgcaattgattgaggggttatggtcgttaagggtacaattagatgtc

SEQ ID NO: 51095 - DNA, 983 bp, Zea Mays
ggaaaactatttacccaaattttgtcagctctaccggaaatgttctcctatttttctccttatttctgaggtttaacaatttgtgatgaattttcggatgaggcaccgcggtttgaggagctgctggtatagggaggttatcgggtcaatcatactatgttagctttgttgggacccaatgacatgtggttaggtgggcccaatcaccagagaaggagggagctcaggtgcacaacaaaatagtaggtagggaactgtagcgtattgttatgtgtgtaccgtccatgtacagtgcaggcatatttataggtaaccgggtaggtaggtggatcccttaagtactgttataccccaagttacctgctacaactctagaatattcctccttacggggtcattacattgatcagaagtacaatcttattagacatactatggaacctaccccaaggaggggcatacaaacggggcccaaatggagacgaagcgcagcctgggccccaccattgagcggcatggccttcgcccatgcagcgcccttcgctatgtgaagccgagcctttgacctctctaggactgtcgtcgtatagaaatgtccgagactatgggggcaccttcgcgaggttgcaacgagcccccttttaaacagtgtggcctttcgctccgacgtctctagcagctctggttggagacctcaatactagtaccgatggaagtactcatcgctttgtgtacctgcgacaaaacctgttcgattgatgttaaaggtctaaccgagggggtgataagccttcactccaacactagccccccgaggggctacttcatcttggtgagctagtcccgaagtcttttctaggagatggtcaaacggtgctctcattaggttgaagtggtccttgagggggttgaaatatgaccgttgggaagtgatgttttattgtgggaccgatggtttcccgaggcgctttcttaggcctata

SEQ ID NO: 51096 - DNA, 597 bp, Zea Mays
accgctcgcggactctataaattgaccgtgcccccagctcagccatgtactcaagcagctgctgcacccacctgcatcccaaatccctcactagcgagcacaaatttcggattctccccaatccggttctagaacaccgtgaactcaatctcgtcgtggccagcactattcaggtccactcataccatcttcttccccgattaagtacactcataggtctacaatgctctccgacccacgtaattgcgctaggagctctctggtcgccgggaacacggttgtctcgccgtgatgttcacggccaccgtggccagagcaagccattgggccatagatggaattaggttaggggaaatgctcgggataggtctgatttgatgtccgccgctcgggaaccctagccgttgccccattcggtcggtgcaggtgctcgccggagctcggctgtgcgtgagcgccgtcagggacttcaaaccgagaattgatagaagtttgaggacttctttgcaattgttagtgactctagaaaatagtaatcgacgccctttctgattagccgaaaccctgagggtctttctgcatggatctgggccgtgt

SEQ ID NO: 51097 - DNA, 583 bp, Zea Mays
gactatatgtttttgggcaatagcaacaattaattattattactgaatcaacaggtgggatgatgcggtgggttttgaagaggatgttgaagcacttaagaaaatgctgctgcatcgtgaagatggcaattggcaaaacttaatgttcatctccatactcggggagagtggtgtgggcaagtacacccttgtagacaagatcttctttgatctggcagaagacgacaccacaaaaaaacgagaaattttcgtgggcgaaagaaataactttgctgttaaagtctggtacatgatgcctccaggttccagcacagaacatctcctccgaattatctacgtgagagtagaaaagcaactactaaaatggcgagccaaaggagatgcggcaatagcaacagaagatatccctgacaggatccgtgacctcctggcaaataaaaggtacatattggttatcagtggcgtctcctccaaggccatgctcaaccgcctgagggcgtgcttgccggacgatgcctgtaatggcagccgggtggtcctggtgctggacatcgagagcgaagtggtggcacagcgggccaac

SEQ ID NO: 51098 - DNA, 574 bp, Zea Mays
cacctctagctccgttaaggcatcacgaagccaaagcatccgctactgcctccgattagccaccagagagctccaatttccttttctccccaaatcagttttccgcgcccgtaagcacctcatcgtggccagacgcctgcaggtcagttccagcatccttgcataatgttctagcctccattaagtcttctgttactcataaacctatccaattgtgctagactaccctgagtcatcatgaacacatcaaaatattcttggattctgccatcatcgtggacagggagagtccaactcgcttttatgcaattgatggaggtgaaatggccgccaaaggtagaattcggtgtcggccaggttggggccctggtcattaagtatcctagccgatacaagctcgtcggaaatctgcgcatcgccgtccaccgtcgtggacttcggagtgtgaagaaatagaagcgcaggggtttatttgcgaacatcagcgactgcatcaaatagtgtcttggactctttcgggttgtacaaaaagatagggtcttccttgcaaagtctgcacgcgggcgcgtgcgcg

SEQ ID NO: 51099 - DNA, 489 bp, Zea Mays
ggtaaaggtaccagatctagaaggttagggtatcaaacgtttacttgcgttgtcagagcaccagatccacctactatgggacactggagtaccgaaccaaggatggtgtcatggcacaacacttgagcttgagcagatcgagagacgaggggagtcgggagcagactatcgattacggaaacgactgggagagccacagaggaaacaatgagagagaaggagcagcagatccaccgactacggccatgagactgagtcaccggagtaccagaccaagccaccaaggatggcacaacacttgagcttgagcagattgagagatgaggggagtggacgagcaggaaatgatagggagaggaaagaatgaggcatagagcagtacaacgatgaagactcgccggcaaccgtcaacgccgagattagaggcgaggcgaaggcggcggcgatggagcagacgaagacgaccagtggaggcgccaggcgatggcg

SEQ ID NO: 51100 - DNA, 455 bp, Zea Mays
gttccccactgatctaatagttatgggtaatcaggatgcgactatagatgtcatccaagtgatgaattggctaaccacatatcaagtaagtcttagatgtgacaagaggacggtgaatttagtgtccttatcaggagaggaagtgttattggagttggtcttgtctggaccaaggaaaggaagctgtcaccaagtcactgcccatattgaggaaatctaaccatcataagctatcaacgtagtatcagaattcctagatgtgttttctgaggagttaccaggcatgccacctgaaaggaaagttgtatttgcaatagagcttatacctggcaccgcccctatttcctagagagcctatcaagtgtccggaccagaattggtggaactcaagaagcagattgatgagttgttagagaaaggctacatcagaccaagtacctcgccttgggcagccc

SEQ ID NO: 51101 - DNA, 435 bp, Zea Mays
ttgggactgcaaacggtttaaaacaactagctgacgtaacacacacgtgaaccaaattaaatgtggcatgtatctaaaggtgattgttaccggctagattgtatcggtatcgactgaatcgtctaacaagaaggtgttatgtttaattgacttatcggtaccgatctgactgtttaacgaaccaatctagcgtgtttagcataggtgcatagctccactctagctagagcaactctacttcaaaattttagtaaggagtagctctgctctagagttttgatgtcgtttggtaggaagattgcaatcagctacagaaataaaagtgttttctgtggacaagtttacctgagagccccgctccgccgcgacgaggagtcccgcccccacgtcgacgaggagccgcacctcgtgccctccagtacgatcaccacctcc

SEQ ID NO: 51102 - DNA, 292 bp, Zea Mays
ctaaaccgcccaggggacatccaatggcccacgatcgtcttctactctacaccctcgttcaccggcgacagacgacagaaacccgagcaccgccgcggcgccattgccggctcacgcgatacgacgctagcgtgacctaaactcgaattcaatctgcgctacacgatgcacaagaaaaagggaagagttcggatagctgctcaccgacaatcgcgacccgtagtgccttggccacgaagaggtgctgttctccgccgcggatgcgttccggtgaaaaattcgccggtgccag

SEQ ID NO: 51103 - DNA, 514 bp, Zea Mays
gaccgtccgatctagatctgacgctccttgttttaaataaccacacacgcgcctcggccgttggatggctgatcgatggcccagcccaaaccgtccccagtttctaatggtatccgttggatgagaatccagcggcacaaacttcatctcttcccatccatcccttcgcccgttgcggtggcacgacgcccgcatggtgacaatgatctggtgagaacccaatcccctgattccgcgcatgaaactccacgaaggatgataaacgtaagggagacgatgatgaattaacagggcaagcccttaccggtaatcgcaggacgcaggacgcctgctcacggcatcaggcggatccacggcgagaaattctagtcacgccgtgtaataccccaatagtgagaataatagatgatacaagaaatgagaaatataaaagggtcattagatcacttgtgttgttattctcatctttgcatatttcaaaccatgggattaaccctgactacctataaaaata

SEQ ID NO: 51104 - DNA, 953 bp, Zea Mays
acgacgtccaataaatccaaaacacatgacatattgtgtttctccttatatatatacagtactatgccaaccatctgtagaaacagaaataaaaaaaaaatcatgcacccgtctctctctctccctccctctctccctctagcaggagtacgaatttacgatacgcctcgccctctcaataaatgcggattgcaccacctcaacactcgtccgcaataactccttcctcccttctccacattctcttccacttccacctccgtccgttccccttctcctcctcctctcctccccttccatgccctcttagcttctgaaggtctccgccacctcctgctagctacccttctgagctttcaagctttgctgaacgcacgcgggcggacgcggtaaagcatcacatcttctttgagagctgcagggaagagatcgataagagttctattttttgcaaaggcacacagacatatatagttcttctgctagatctcaccgccagtcagctcgcagcgaaggttccctgggctaccttgtcgctggatctgttgctggtcgtgttgttacttgtcaggcaaggtataatatatctccgtacagctaggaataggattgggtagtaggggggtacgcatgtgccagtgaagaaatgggaaggagctagtgtggaggcagcaagaattagggttggagaggttccgcgagaggagaaatgatgatcccggcgaggcacatgccgccgacgatgatcgtccggaacggcggcgcggcgtacgggtcctcgtcggcactgtcgctcggccaggtaatctttgggcttggtgagatcagaagactgccttttagtttcatctctcttttctttgggaaaatcagaacacgttgttctcttgtttcttctgcgctctctttcttgctctggcctctgttgggtaaatttcttcgtttgatttgag

SEQ ID NO: 51105 - DNA, 688 bp, Zea Mays
aattttctaaaatgaattgaactatcatgactaggtaaatctatctttggctaagtccctggctcattccagttgtttgagtctataggatacgatctatttattaatccaacgcttcaaattccatgatctagcataattttagcttctccaatcctctataaaaagaaaacaatgtggcgcttcagttttctcaggccaacaactttcattcgtcgcttccaaattctcctccacaggtgacccttcatcttctttcagagaacttttgccctagagcttgcttctgccaccattaatccttcaacctactccatattcactgctctcaatggtcgccactcatcggcacgagtttgggccttcctcaataaagcacaaagaacttcaagctctccatgttgggggattgttgcaagagggaaggtgatctagtgatgactccatggcaaagaaccctactcgatgtcaaaccaagaggagatcatggtcttcgctccattcttagagaacgggtttggcctccctacctccaaattatttcgcgaccttctttagctttatcaaatcgagttggttcacttgaaccctaactccatcttgcattttgctattttcctcatacatgagaagccaacctagacacttctcctttatttcctctattccaacacatcttatctccgtg

SEQ ID NO: 51106 - DNA, 494 bp, Zea Mays
ctaataccttgggaggttccgtcacaatctcccaaaccctccgatctagaagatgtagtaacttgagtgctctctcatgatcatcatagggctgttgtgccttgtttgcgcgcatcttgttcacaattgactggaaccgagaaaaatggtgtcgatcatgtctctagccaactgaacaaagttctcatactctcgtcggtatgtctcaaagagtctggtctttacatgatcattgccctcatggaatttcttgagggtgaaccagatctcctgagtcatagccaaatgaccaactcgctcaaacttagcaagtgagaggcacaagaacaaagtgttttgggccttgttgttcaaatcatgcgactctacctgtagaggcgtgatccacgcaccctaggcctcgaaagctacgtcaaggcaaatctcccaaacttgatacctgatactatagagatatacagacatgcgaatcttccagtatgggtagtttgtcc

SEQ ID NO: 51107 - DNA, 356 bp, Zea Mays
tgtagaacatgcatcctctttcttctcttcatttgaaatctatatattgaaacaattaatggtctttcatatatgaacattaaaatttagatgctataaaatttaagttattaggcatatttctagttacatcttcatagttgggaatatagtcggcatcaagctcatctgaagtttttttcttccttggaggtataggaggaaaaggattgtcatcactagaactatcctcctccccgctgccttcaccggagctgctcgttgtctgccattcaagtttgaccgcgtcttcattaactctgttagacgcaccggtgcagaacacatccatccagtaggtatctagtgcacagctg

SEQ ID NO: 51108 - DNA, 718 bp, Zea Mays
ttgcatgtcacaagaacatacctcctagtgtaactgatcgatggcacagctaggtcgatctggcatgcgaggtggccggatcttcttgaacgaacgtgcatacatacatacctcaccgattatcatcgtaccgccctccttaactctctgctaagtaagagccctgttcacgccacatggaaattgttcatcctagtcctagaggcggaagcaatggtcgatcgtcggtgcaaggctccctgccttcttcctccaatggtagatgtggatgcgagcgaaacccatgctgacaaccgattagatcggagggagagatcatctgcctgctcctcattcagccaaaacagtttgacctcattcagaagacaaaaccaagttccaagatttgtacaaaaccttttgagccaaaacagtttgtccccctgatcctggttgagttctcattaaagaatgagaaagatgagtacaaaatggattttgattatactgaaagttgtgaaaggggagaagaacagcctaaacttaaaggtatttgttccggaaggagtctagaaatacacaaaagagcttcatttttgtattaataaagagagagaaacaaaaaataatctcgtacaaagtaaccaccttaccctgtctagaggatatgtggatgcgaccagctttacttctaaacaaaagcagcaaagagttgaggttaaggttaagacagaggcaa

SEQ ID NO: 51109 - DNA, 391 bp, Zea Mays
gtgggggaaggatctggggccgtcgatgcatttatgctcggccaagatcagatcgggataggattgtcgtgcaccgtcggatccacggttgaccgctaggatttaaagctgcgtatcattttgctcgggcagtctgagaccgtagatgtgagatcctgcggtagaaagcgattctgggttgcattaaacgcctaccgttagatcgggatcggagggggcctggtgccgtaccgattcataaggctcggttctaatcgtggccgttcatgcatgatctggcggccagattcagaccataccccttcgccatacacatttcacagaaaagaccccctgttactttagaataaacccgccatcctcattcactattcactgaggcttggtaagc

SEQ ID NO: 51110 - DNA, 287 bp, Zea Mays
gtcgatggcttgctcgcccacatgccggggcctgcagggcgctgatcattgccatccggagcgtgtgggatcggacgaaacaataattggcgcgagtgatcggatcggatacacggaagcacaggtgtgcatcgtcctgtgcgtcagtgcgtgtcgacgctaggtctagggtttactatcacaacgtgacaaacacgttcatgcatgtgggcgcactacacccctactaattgaggacactttgatctcacatgtgtgaccttctgtatcgtttcgctgcaattgca

SEQ ID NO: 51111 - DNA, 510 bp, Zea Mays
acccttatttttaacgatatatattaatttgtacttcaataaacaaattatttagcatgcaaatttactattttactcaacacaatatgtacaaacctgtatgttcccactgtttgcactcgcatgtatactccccagcttctatgtccgctgttatcttgaattgatgttgtccccacacaattttattagaccgttttgtatgttgtacgatccaatctttatcacaaccgtctgtgtcctttaatattttgtatgcagtggcgtatttcattgattcatcaaatctattcataacagctctggtgtatgctctagacactcttacttcgaacctatagaatgtatctgttgtcctcggtccctataagacgttattatcataattaaacaaagtattttacataaacatgtatgccgtacagtaataataataagcacgacataccttgctcatcaatgcatcctttgattctttcattttcctgctgtgcaacattttcatcattt

SEQ ID NO: 51112 - DNA, 466 bp, Zea Mays
gaggagtcgtgataccttttatcatggagttttactttgtcttggttattttacatgtccgaatggagcggtatcggatagatactggctgctatcgatttcccctgctatagtgtccggaggattcgagacaaacaaaaagattagtcaaccaaacaccttcctagcctcatatatttccatcgacaacaaagtctttaccgttaccgtagataacaaatcatatccatgacatgaataagagctttgttcctatgagatgtataaaagtagtaacttgctcgcgcggacacgagtcttttaacaatatgtttaaacaaagtgatatagcttattggtatcacctaggtaggtgcccgtgtaatgccacggaacataaattttgaacctccaatggacttcatttgagacaagtgatgcccaagaaaatgggggtaaactaacacagctatcacttgcattactt

SEQ ID NO: 51113 - DNA, 793 bp, Zea Mays
gaaggcgtatgacgaagggaaggatgcaaagtaaagcaattataagctcgttgcaataaaataatagtaaagcattgtgccatctgctagtgtatttgaattgtaacatgttctaggaaagatgctaatggaccaagagtccaacacgaaagaatacaaattccgtatggttctagctcacgggtttgaccctcaatcacaactaaaacaactaaatgtgaaatttcccgggtacctatcacaacaaaccacgaggagttgcaactggtagcaagtagcaactataaattcagaaccactatagcagggcacctagttcatgcattgtgattacctgattgctttcccatgtggcgtgattacctgattgctttcctgcctactgggagcaatggagagtggagcttccacttcatcgaatcatggtaccttcatggcttccccttccgactgcgcatcgccagatcccgcaacgacccaaccttcaccatgaggagctgtgccaccatgggtgaatcatacctgccgccgttggccctccctcccccgatctgctatgattccttgaccaggccttggtccagaaacaaaaaggcggtgggtaaatagccgcagagtcgagcagtggccgcagaggcaagcaaagaggccagtgggcagtggcgcctatggaggcgtgaagcaggagagcgtcgggtggcggagaagcaagacgacgtggacctgacgaagagtgggcttggggaatgtctgcaaagtggaagggggaggggaaggatggaagggccaatgg

SEQ ID NO: 51114 - DNA, 719 bp, Zea Mays
atctagtgggaatggcagttctgtaaatagggcagatttttcagcactagtagaaatcaaaggcgcgtttcaaaaggagtaccatcaaaagagctcgaaatattctgaattttttaccactaatccaaaaacataaaggatggaggcacacaaaattttacttgaaacagagttgtattgtggcctagagaaattcacaaaggatctctgaaattcctgaaaacacttaaacaatttttttaattatcttcccgattctttttgaattttttgaccgaaccaaacaggacgtaggcgagtttgggtcaccccagaatggagtcaggaatctgctgtaaaaatttgagctcaaacggagcaccgagcaaaaagttatgaccgttttatggaaggtacctcaagttatggttttcaaaggcacaaatcggcaggaaccgaagcgaaggctatgaagcacagggtcagttttagagataggatttgttttctggatatggtcagtttagatataggatctgttttgtggatattgtcggttgtagagataggatctattttgtgaataggatcggttgtagagataggatctgttttgttgatagggtcggttgtagagttaggatctgttttgtagatagggtcggttttgtaggatggaagcggatggatacaatcaaactgaaccaaaacaaatctaatccagcaaccaaactcaacta

SEQ ID NO: 51115 - DNA, 1533 bp, Zea Mays
gaggcactggtccacgggctgagcattacaatatcactcggcatcaagaagctgatggtatatggtgactcgttggtggtcataagccagataaacaaggattgggactgctcgaccgattcaatgggcaagtactgcgcagctgtgtgaaaactagaagacaagttcaagggattagagttccatcacgtggaaagagatcacaatgcagcagcagatgcgttgtcaaagctgggatccagtcgggcccaggctccacctggaatcttcgtccaagaaatatcacagccaagcatcctcatggatcaagtggagcagtgcaatgccttgagttagccagaggcagaccccaatgactggagagagcctatcatcaggtacataaagaatgaagaagagataaatgacaaggctacgacagaatgcatcgcaaggcagtcagcccactacaccatcatagggggcttactgtatagaagaggtgcaggaggagtcttcatgaaatgcattcactcgacaactgggagacaattgttagatgaaatccatgtcgggcagtgtggggtacatgctgcatcaaggactctggtcaagaaggctttcagatccggtttctactggccaactgcgaagagcgatgctgcagagttagtccagaagtgcgaagcatgccaattcctatcgaagcaacaacacatgcccgcacagtagctgcagaccattcctttaacatggtcgtttgcatgctaggggatggacatgatttgacctttcaagaaggctcagggaggctatactcatatactggttgccattgacaaattcacaaaatggatagagtacaagccaattgcctctttgacctcagccaaagtagtggagtttatccaggatataatattcaggttcgggataccgaatagcatcatcactgacctgggatccgacttcaccagctctgagttcttcgatttctgcgagcaaaggagtatccagattaagtacgcgtcagtggtgcatcctagagccaatggtcaggtggaaagagccaacggaatgatactggaagcactcagaaaaaaggtattcaacaagagagaaaagcttgcaggaaaatagatcagagaactatcatacgtggtctcgagcctatgaactcaacccagtcgagccctgcatggaaataccccgttcttcatggtttacgggtcggaagcagtgctgcctgccgatctgatcttcggggcacctaggttggctttcgaaaacataactgaggcagaaacaaccaggttgaaatacattgatgtgctggaggaagaaccattgaacacagtaattcagtcggccaggtaccagcagaccttgaggcactatcacgacaaagttgtgcggcaccgatcctttgcagtgggagacttggtccttcgccgaattctaacgggggagggacgacacaagctgtcaccaccatgggaaggaccgttaatcgtatcagaggtcacacagccaggatcatatcgacttactcag

SEQ ID NO: 51116 - DNA, 279 bp, Zea Mays
cgccgggtggggccttgcgccgcctctctgcttggtcaaagggtagaaggcgtgctcgtgggcatcggatccttgcttgacggctaagattgttgtgtgttccggttcggatagatgccatctaggtcgccggattctgattgggcgtctcgaaccaagtcgcgattatttaattcggagccattgtttatagatctaacgatccacatcgcacaccgtctcctttcagtcggattagtctgattagatcgaatggttgtaaatcaaacataccccttt

SEQ ID NO: 51117 - DNA, 869 bp, Zea Mays
gtttgtagcagaccgtctccctacatatctagaatcttcctcaatcgtccgttcgagttaccactgggagtttagcctatcaggtgatcgcaaccgctctgcccgatatgctcgtgctcccgtagcgcttaactcgggtgttggtcttcgccggcttagattgggcttgcttggcctagttgcactcggctgacccatccgtaggatgacctaggaggagacctgctagggcctagggcgcgttttagtgtgcgtgaggacccgggggatatccattccccacaggtcataattgcatgcgtcctcgagaagtgatcaaatgtcaataagtcaaatgtgtatatgatattaattctgggtatatccacatttacatcaggtataagcattcaaaccaatatggttactcctcaatgatttctggcaaactccatacacacaggagtacacacttattgttattattaccaaatacacagttgtgttagccataaaatattataggagctcatatataacatttgtcgtttgtagcaagtagttgacttcagatcagccaagtagactaaccatcaaggtccagtgctcataatgacattcaatggttgcattgtgctttcaaacacataggaaaaaaagtgtgagcatataatggtagtaaaccgcacaacatcaggccaatgatgccaagaggatattttaatatacagagacgtatagtctagctcattttatcattgtccatggtttatccaattactcgtatcgcttttaaattgagtatcgatttatataaattaacatttttaggtaaaataattttgagagagaaattataatagtagtcaattatttgaagtataggctgg

SEQ ID NO: 51118 - DNA, 653 bp, Zea Mays
ggggtattgaaacgagagcgaggagggcatgatcggacctgtagagagctggccacggcgagctcactcactgcggtgttcttgactgatttgggggaaactctaaattagagctctctgggggacaatccgaggcacgggctggtgtgttgggtgtgtgattactcagcggagctcactagggcggcaatttataggttccatcggcggtggcggctaattttgagaagacgcgtggcggccggagaggagggaggtcactagcgcaagtgattcgtggctcttactgtggcaaggcctcaggcgatggatgggctatctatggtgattaattgtgatgtggtaagatggctgacggcgtggcataaccgtgaggaatggcggcacgacagcgatggtcgcacggccacatcgccgggcaagtgggcacagcaaccaggcgaaacagtggcctaagttcatcctcaacgcgatatttcttaccccgagtagttatctgcacttcaccggacacgaatcgctgcgtcggcgtgaatccgagcgtgggatcaccggcggcgagggggctgaacctgagatcttattcagtttactgtactatcagattttcatcagagcgcctaacagaccgtattgcagagcccagatctcag

SEQ ID NO: 51119 - DNA, 529 bp, Zea Mays
ctgggaccggccatgaacggtgacgactgactaaaccaagtgctggactagcatccccgatccctggcgaccctaatatgtcccttaattgagctagcccgacccggagttcttctgtccacgacgacggcgagacccgagggtgaaccgaggtgttcccaacgactaggcatcgtaacgtcccaattctaagtatggggagcaccactataccctaaggaagctagaacagatggtaattgggttggaactacctcaggcgacgctggccacagaagagctctccacagcagcgatggcgaccgaattgggggaaaagctaaattcaggcgtcgtggtggctaatcggagacgacggttggtgctctggcttcataataacctaccagagctagctgtgcactcaatttatagtatccaagagcagtggcttcgaatttggaagaggaaagctggtggccgaagagagggggtgagtcaccagcgcgagctaccgtggcgttcaccggggcaacatcacaggcgatgg

SEQ ID NO: 51120 - DNA, 856 bp, Zea Mays
gccgtagaagcacgtgctgccgtcaccccatcggaccgaattggggatgacccgatgtggacatccatggaagcattagaaagagagcatgcctgaatatcctcgggggttggattacagcttgcactacccgtaggggctaggtcgctaccagcaacacccttgagggctgggtagctgccagcgccacccttgggggctgggtcttctgcagcagtcacttctgaggaggaaggcccttcagccacctccatgggattcaggtaactcggatcagtgtctttgcatgggagactgccctccaaggtcgacaatgcgcgagacaccactcaggttacctcttgcccggcagaaccaagcaatgaaagcccagcatctgggacctctaaacagacggctacgatatcagcttcaggaggtttcgatagtatgtcttcaggaatgacctcctccagtgcttgatcaaaatatgatatcgaaagcccctgaagactgacaagtgccgacagagctggtgaggaatatcgctaccccctcgctgcctctgtagaaatggttgttcttgcgaatcagtgggatttcttcttcttcctcctcttcatcctcatcaaacatgccgccagtagcctgtgcattatcactacctttagtgtcaaccttgggaatggcgtccgccgggacatcatcagggatcgatacagaaggaccagcatcctgatccatgatagtcaccgaagttgcctcttcttccttttctcctcgacaggtgcagtcgggcggttcactcggcgtgaacgctttgggtgggcaccttcaagtttccgaatctccgcctcttcaccaaattcttgcccag

SEQ ID NO: 51121 - DNA, 2404 bp, Zea Mays
ggagcgtaaatagagcctagtttccggcgcggatcagccgccccgtccacttcgcggtgtcgtcttcccatttccccacctccctcccagtcccaacgtcccacagcagtaccccacatctctctctctctctcctccctgcctgccaagtcccaacacaaaaccctctcgtcgtccccaacaccgcttcgcctcgaccgcgatgatcacctcccacgcgcggaggtagccgccgagcagctcgccgccgtccatccagaggctcccgccgagggtttcctcgacgcggctcttgcgcgtctaccgtacgtaagtacgttggtcgcgtggttttcactcgagttcctgcggattggtgcgcgcgctacccgtgtggccgtgtccccgactccacatgagcgaggtgcggaaaccgctcctttctcgccttctccctcattactgctatcgcggaaggttctagctagctcgcgcccctctcatcctatgccttactgcgttgcgaggaactgacggtattgtccttcgtttgatccaacgtatatgagcccgtagcgtacgtctcaatttagtctgactgacgcatggctcacgtggttgtgttgtgctcggcgagagccgggcgtggacgcgtggttgccgccctaaaccatgggattgggacggggcttccgaatgttctcatctgataggtgcgcgattgtgctcgtaggttggtttgggtcgcgtactcgtgttattatgttatgcgaacgacgaggttcaagttgtagaagattctaccaacctggtagcgcctttttgttttttttttggtcggcagatgactgctgtgtacagttgctttattggtgtctcactgtctctgaccatgttgccagctttcccatgcgcgcgccaccaaaagctcggtgctggatttctgaatcttcaagcttgggctagctgcctagcttcaaaacggggcctctatttccgttggttggttgaattgcctgacgtgattcgtctcagcatcatcaaattgttgtaccgagtgacaaggtaccacgtacatatctgtcatttactggttacagactgacattacgtttggaaacaatctctcatgcttaattcacctcaaggtttagggtggtgactgcaagtcaccgagatgacgtccttgtcacgcacgctgtctcggggcgggccgatgcagtcgccaggggctcgccgcatccaaaggacgcagactgctgtgaattttggtgagcccatgtttgacagcgaggtggtgccgtcgtcgcttgttgagattgcgcccatcctccgtgttgccaatgaggttgagatggccaaccctcgtgtcgcttatctctgtacgctatccctctctgttcctcccatgggacactacaactttcagaaataaaaaacccattaaaaggacatggttaaaaatgttatcctacataatgtttccagtatactgattgatgtgtatatctgcaataattgataggccggttctatgcattcgaaaaggctcacaggttagatccgacttcaagtggtcgtggtgtccgacagttcaagacagctcttctgcagcggcttgaaagggtacgggtttgaaatagtgcttctagtctgtggttgtttgcatctatgttcattctgtatttgtcacatctgcactaccaatctgcctctctgtgcttcagtcctttagtctgcctttcagttttctgcatctgcatatatgcttcagtgccctgtgatgctgttatgtgtcaacattgacatatcttctgtgtactatctatcacatgctaataatggcaccatttccatgagccatgatcttgaaaattagtactttattgtgttaacaacagttactggaaataccgtctcattagaaaatttggaaagttaaaattgtttggttttggttttaaaaagaaaaaaaaatccatgtgatgtttagccaactgcatagtttcctgtcaagaaaaaagggaacttttatcttatatacatttcttacctcctgattatttgctttgttaggagaacgagcccaccttgatgggaaggggacaaaagagtgatgcacgggaaatacagaccttctatcatagctattacaagaaatatattcaagcactccagaatgcttctgaccaactggatcggtatgcatcctatgtttttctttaattccatattctccttgtccataaatgttattgctgcgggatttacttcattcatgcagtgctcaactaaccaaagcctaccagactgctgctattctgtttgaagttttaaaagcagttacacaacaacatgctgttgaagttgatcatgaggtataacgtagtaatcaatggacttttgcttccctttgctggttttg

SEQ ID NO: 51122 - DNA, 1047 bp, Zea Mays
tgaagagaaatgtataggaggacatgtggctattatattgaacatccctggtgtaagaaaaatggcacctagcaagggacataagtgattttggtggttgattgacaagatgatttaatggattgatgtggcttgctagtatccaagtgaaagcatttaggaccctgattcgattttggatattgatgatgaacaatcattatgactaacatgtgttttgtagcaacattactttagtgaggtcacaatgatgttggttgattgggcaattatgtttttcatgcccttattgatggtatttattttgattttcaaaggatgagcgcgaagacaatgatatcgagggacacttagattagttgtaggttctttatttttactttggtcgtactataaagagggtataataggcatctttacctagttaggtctagtgcgtggatgtgatgcacatgtatggaaactagcactatacaacttagataaaacccaaaatagattagaatcaaaatccaactagaatatgatttgaattggagcagtttgtgttaagatgcactcatcgaatgtgtccaatgatgcacgtgatgcctattatgttccattttcagaagggaaacatggttggtaccttgacgttatgtgtgcactaaaccactgtgtgtcagacagagtgtgttgagtgggtgttgtcgggcatagtgtagtgcactcactagatgtgtttggtagtacactagactagtgcacacatcattcgaccagagagcttatcaaaatggttatatcgactttatattcatcaaacatgtctagtgagcgatagatcagctcaccggatgggttgtattattagcgactagtttcaaaattaatcctgagagccccatcatatgtgtgtagtgtggagtcgtctatggctgcatcagttagatacgatgcacccgtggcaactgagtagaggggcaacaactagtttcttgccttgggcgtatatatcttgtctatctcgtgcatttgaggtccattgatattgtgaagttttac

SEQ ID NO: 51123 - DNA, 608 bp, Zea Mays
cgccctatatggtctcgcttagccattaggaggccagccactgcccttgggaatgatatacaaacatgccaggcggctttcaatacagtgtgtacttacataggcacaagggacttagtccaagagcacattgcttagagagtgtggccacttgcaaatgggtgggaaatgccaaggaggctgctgctggctctagccaaggtggtttagtctacctgaagtataccttcaggtacaggagccaatttgatgaaccgaatgatgactagctaaatgccatagaagagactagtgacgagctgcttggagcatattcaaaggccgaagatgaagccatgacaactgccttcggggcttgtggcaaaaagagattaaatagagtgttcgatgttatcgggtttgtgtacccgaactactgttatccttcgcggaaataagggaaaaagaggaaagctgctacctcgtcgacttctagtgcgtcgaggttaaaaaatgttaaagttttgacacgtcggcctaggcacattgaaacggccgacgtgccgaagctaattaagggggccactcctactgcagagccaagtcgctctatgctagtcgaagctagg

SEQ ID NO: 51124 - DNA, 670 bp, Zea Mays
gtcgtactataaagagaactcaaagattcgaacggttacttaagtgccagtaggtgaattaactccatgcatatgtattaaacctagtgaagttatgaaactccaccttatgtatgtttgtgaaatgccaactcatatgaacaagtgtgagggaatgttggagttaccaagcatgaaaaggatggaagaaaaagggctagtggatgcctctaacaagcattagacactaacatggataattttgaacctgcatagtgctagttcgatggctaacccaagcctcacacaagacaggatcgttggaccctagcctttggatcctgaccagttcgacattctctagctctctcgtatgattcaatgagctttagactcaagtttgttggtctaaatatacaaatgcgacaacataggacaatataggtgcactgcttatcagaacaattttgttgttaggtgggcaagaaaattcatacagggtcgtcaaaacttgagtgttggtccaacgaggactgttggaccaacctgatgtagtttggagctctctagtcattatgtgtaccgtcggacattggccaacattgttctgatggtgtttagactctagtcctcagacgatatgtggttaaatagggatgtaaatggtatggatattatacatccaaattcg

SEQ ID NO: 51125 - DNA, 344 bp, Zea Mays
gcaatatattgtcctacagagtattattgtaagaacacacctatgcgagctcaatgtttgtcgcggtttgtaggaattgggaataacttaagaagctcatgagacaagagtataacctatacgctccactcgcggggtaggcaattggtagcctagtatcagtccagacatcaagtttaacttgttcacaccaaactaccaattcaaggcttagtccatggtacagttgtggatgagtctagctagttgttctaggtggatgttcaatcttagccggtctccatcaaaaagttggtatattgacagtactttggtacgggaaggatgaaatgtgcctctgagat

SEQ ID NO: 51126 - DNA, 642 bp, Zea Mays
ctgtattgcttatattgatctgagcttaaggttacaaaatcgagtgctctatcaaactacatggtgtgtaatcgttttgtaggggtacctatcccgccttatatagatgaagagatcaggttttacaagttgacgctcatcgctacccctacacatataggagtcagttccgctttgtggataccgctgcatgcatggcgatattgttccgacttatgggtgacatagaactctctgctggcttcaccggcaacgattgtttacgacgccttggtgctcaagcaagctttcccccatccttgggtttaagttagccgaccaacctacgagcttcattgactagcccactcatgccttttaattgcccatgaactcaatcgatgttgtgaggatctagggaatatctatctcccacaactggtaacattggtcacatagttatcaacatgtaactaaaaaatcccatgacaatacatcactactagtcacacaccgcctcaacatggcgaggtggtcgagcgcgtgtgtcgcatgcttgtctccttttccagcttctttataaattgcttaaggtccctgttaattcctaaggtggaattaaccttctttgactccctagcattacatatacctctaatattt

SEQ ID NO: 51127 - DNA, 935 bp, Zea Mays
taccacccatatagcatccctgccccgaggagaacgaggtaagccaaccacaaaatccatggtgatatgctcccacttccactccagaatttccaatggtttcaataaacctgcaggcctcttatgctcggccttcacgcgctgacatacttcataggcgaccacatacttagaaacgtcaaccttcatcctcttccaccagaagttttgcttcaaatctctgtacattttggttttgcctgggtgaacggtgtacgacattttatgagcttctctcaagatgtccatcttcacctctgatttctgaggcacacaaagacggcccctgaaatgaaccaaatcattctcatcaatggtgaactcacggggtttactatcgccgaccctcttttgagcttcctgcaacaaacgatcctgctgctgagccacgcacactctctccagaagggaggattgaatgagcatccgagtcccctctctagcggtgccgacatagcacaaagcgacccccatacggtccagatctgcgatcaaaggcaaggccacttttggaaccccgaacctgctaagggcatcagccaccacatttgcctttcccaggtgataatgaatggatagatcataatcctttatcaactcaagccaccgacactgcctcaaattcagctccttctgagtgaaaatacacttgaggctcttatgatcggtgtagatgtcgcaagattcgcaataaagataatgcctccactattttagggcaaagaccaccacgaccaattcgaggtcatgagttagataattcccctcatgcttcctcaactaccttgaaccataagcaatcactttgccttcctacatcaacacacaaccaagaccaatacgagaagcatctgtataaactgtgaaatgcttaccactctcaggaaaggctaaga

SEQ ID NO: 51128 - DNA, 663 bp, Zea Mays
ctggccgcacaccatataccttattttttgcactcaactaatttataagtttgaatcgtatttagataactattttatttaagcaatgtctagtgatacactagcgaaaataaacagtcgagtgttcgacgtagggccggcactccaaaagcgtactcaactatccggcaccacaagctccattgcttacgaacccttccttcagttccagtcctttacctttttccctcggagctctctgactctctgagattttttttttgtcttcatttcaaattttgtggtttcctcccacattcccttcccccgctcccctccaggctccagccgctcgcttcgattcgcttcagctctgccttcccgtctcatggccacctaccagcccacgcccggtgacgccttcccagcccgctgctgactgcaccgattcacccacagttggccttcaggcaaccctagcgtcgccgatccgccgctccggcgagatgccggtgggccacatcgccgtctctcccgccgccgtctatggagaacagggatagcttcactcgccccccagcgccctcctacgcccacggaacccaaaccgctaagggcgtcgcggtccctaccggcggggacacggccgccaccaacctgacgtcgtcgtcagggttgtcctcg

SEQ ID NO: 51129 - DNA, 478 bp, Zea Mays
gtgcaagcgtgcctaatggccttcaacacggtatgtacttacatcagtaccaaggatttagttcaagaacacattgctttcaaagtatggcctcttgtgaatgaatggaaaatgccgaaggaaactactgaaggctctagccaaggtggcttagtttatcttaagtacacctaccggtacagaagtcaatttgatgagacaaatgatgattggctagatgctatagaggcaaccagtgatgagctactaggagcctactcgaagacagagacgaggccctgactgttgccttcggcgctcgagggaaaagaagactgaatagagtttttgatgttattggatttgtttatcctgattactgttttcccactcaaaggcaaggaggaaaaaggaaagttgctacttcgatctcttctggtgcgccgaagccgaagagggccaatgtcctgacccgcaggccaaaacctagatggatgaa

SEQ ID NO: 51130 - DNA, 804 bp, Zea Mays
gtcggccaccactgcaccaacgcccacgcgcacctataaagaccgcccgatggcctccggccaatgctacccaaacccccgcaaccgtgcccgagtgatcgttgccggtgatcaccagaatcgctcacaccaccgcctgcagttcttccctggcgcacgacaaccgtgaccatcattgcccaagcattccctgccccaaccaaggccccctacacactccccagagcctcatgaaactttccaacaaactccctcacttgctatccaaccacaacggcgagccaccgctcccacatcttcgccggtgaacgtggccaaggccacccagtgcaccatcatccaattcctcctacccatggcaccaccgtaacctagtgaagctccatggctactcaattgaagctctaccaccaccgacaagccgaacaattcaccgtcattgagcttcgccgcctgctcacgtggtccgagcgactccgaccacctctggtcgcgacccgaccattgacgtgaccctcacgacatccctgacctcaccgaccactcttcgggaaccctactgccgctagtaagttgcaccgtcctaaactcgtcgtcgagcactgttccgagaagaggaggaccgtgggttaggaagtagaaataaacagggggatatgcgcaaaataatagactcaaatgaatagtgatgcgagggtatatttgaaatagaaagatgggttttcagccaggggtctcggcgcaagatggttttcttttccatttatattaaacactttatttaaaatctgtagagaacttata

SEQ ID NO: 51131 - DNA, 384 bp, Zea Mays
atcgcctgaaataaaggaaccaatgaggtcatggtcaaccggacctcattctgttgaacctagatataagtgattgataaattttcctagcaacacatatatgtgctctaataaattgtacaaatcaataagtacataccaaaaatgactgctacagaaatgatgatcctaaaatgtcgaggacttcacactataggtttgtcatgacccattatggattgaatatcttttggctattatcacacgtgattctaaaataccaatgacaatggttatcaaagatggctcactatgagaactatttatgaattatggtaggtttacaacatagccaggagggaagacgggtcaggacggagccgcttaactccagatgcatctacg

SEQ ID NO: 51132 - DNA, 633 bp, Zea Mays
aatgcttctacctgatgtagatgtggatatacccgggattaatattgtatccacatttgacttattggcatttgatctattcttggggacgcctgtgaatatgatccattggtcttagtcaaagcatatgttctgattacagattcacgtgatctgtaataactctcctccgatgaactcgccctgcaggtgatttgcctcacgaagaggttcatcctgatgatgaaattcctagcaatgcgcgcaatatcattgtgctaggaatacggaacaatgaatcttttgtttttgggaaatgacgaagatcattattaaatgtgggagacaaatgtgtcgacacctatcttgcctctctagattgcaaagggatccaaaacaaagtcctaggcatgagtgcttgcaactctcttatcgggtcattgataaatgcaatcgaggttgaaccgataatcgcaaaatgaaagtcgtgagcttgaagttcgaacatttatgggcactgttgaaataatgtgtggtgaatgtgatggttcaagtggtcttgtgagagacccatcccacgtatgtgttgaataaacactgttccgctatgtaatatatctggcaaatggcagttaataggattctgaagatccg

SEQ ID NO: 51133 - DNA, 753 bp, Zea Mays
cccgctactgccgaagccacagtgggatcagccgaggagccaattccgaagacaacagtggagcagccaaaagccgaaatagtcgatgtgccgaagtgtcctgccgaagctagggcaaaaatggctaaagagccagaattgagggaatcaacagagcaaccgaagctgccgggggtattgaaaattcctgcagtaactccaaaggggaggagaatggcctgcgtactagacgttgtcatggaatcgacaaaggtactaactcctgcctctatagaagtacctagcatgggtgagaaaaatacaaaggaaaccgtcgaagctatcgtagctcgagttgaagctgaagctgggccctcagttcccgcagaaacagggcatgcagagcttgttgaaaaggatactgaacaggggccttcggatgctgcaaaagctccgttaccgttagaagaagagagaaccagcaaagaatctaaattccctgccgctgaagcttctaccgagggattggaatttatagtgcatcacgcggcagggaaagaactatcagaggagcaggttgccgaagctaggcaatatgttaaggatctgaagtatcccccaggatccctggtgtttaatggcactgacgaagacaattttttgtactgccttccggacaacaaggaaatatctgtttgccgggagatggcagaaaatataggattcccaaagctagagcttggcctgtctgccatgtcgaaggatgaccttgca

SEQ ID NO: 51134 - DNA, 1977 bp, Zea Mays
gcaccgaggccccccgttttcattccatttacaaacgccggtccacgatcaacccccgacgagcatcagtcatccgccgcctagacccatcaacgacgaccatctctgatgaaactgagccctaccaacatggtcccagagacttacctactatttcccctaatttaatcgacctcaaacacctagagcctcactagccacgttgatggcggatcgacgagctccggtgaggtgtatcgaggtctcaagcacggtagggttcaatccaaggtgaccatcgatgggaagaacctggtgttctaggctaccaatggttgaacgagggaaacaaagggtggcttgggtgcataacagataggcgggactgaaggcaagctcaatttaaagggactcaccacgacggtggtcaatttgaccgcggaatcacggtggcggcgatagcccgaggagctccacgttagctcaacggtgtccttaggtcaataacgtggcggacttaccacgaaccccatacggtggttcaacacaagggcctccaagcagctccgtggatggccaaagcgtccgatggcttgctacggcggcggtgaatgaagcacggtgaggacacctgatgcccatggctagagcggtaactcggtcactgaatctgaactagagatcttttaccacttcatcgatccacgtctcaatggcaccaatcgtggggtgagctcgattcacggcgaaggaatgtcggtggcggacgcactgaactcgatcttattcagtttactgttcatatcatactgagttcagagtgcctcacaaagcaaattgagagtcatttttcttcgattttcattcaacaaaccaccaagtcgactatagcaaagttgttcccctatataccagctcctattttgttacagagatcttggtcaagcattcactggatcgagcacaatttgattccaagggtgatccaataccactgtcagtttttgtgtcaaaccgatactcgattgacagtccaacttctaatcccttttactcccatttctgtacagttcttgggctcaatccgggatggacaatgagtctttggaagatgatctagcttattttgtggcactagatttttctgtcacagagtctccgtcaagggtcgccccctacggcggtagggacttcggccagggttgcctcaggtgaaccacagggtcagagaaggattggggtgtcaaaatgatgtgtgggaatgcttggtgagtcttatcaaggtattggagtcccccggagatatctccgaatgggaatggagaggtctcatctccgaagtggaacacagttggaggaggggacccatcggatcatactggcatcgatgtccgggttgtgtttcagggagggggatctgcgggctctttttgacggcgaagagttgagactgatgttgttcaatttccatgaagccgaccttatcccaaaacaagagccaatgtaatatgtgttttgctattgccgttctttggtgaatttaaccgaaaacactgcccttgccccctttgccaaaggatggctatcgggacacttgtatttgaatgattttcctatgtgtattgtgtatcttggacttgaaatatgatgttcctctcgttgtggtatcgttaaaatgtatttgcactatctcagctgcatcctttgatgacttcacactcttaggtgtcgttaacacgtttgtattgatccggctgcgcccttaggcgacttgcgctaggatataaccgtatgtcttggcgaggacttcgtacctttgtgatgcatctgatgtgttgatccagctgcaccctcaggcgacttttgcttggatagaaatatgtgtctcttggacgacttcgcactcttggatgctgttatgcacttgttgtgctgatctagctgcacccttatgcgacttttgcttggataaaaaaatatgtgcctctaggatgactt

SEQ ID NO: 51135 - DNA, 346 bp, Zea Mays
taaaaatatgacggggtagatctcgatgaatgatccagagattcggatgataaagtcacaacatgattcacaagtaaaagattaccagatccaggtgaaaagagaagtcatcaacccagatggcttctaggttgagcagaagagaatttaatgaggattttgggacaaggttttctaagaagaatttgggactggatattgttctgcgcaatagacaccatccaaagttttatataatttttttaacataaacaagtgcacaaggaagctttaggttcgactagcggtccagctatgaggttctctaagttgtgcaggtgtaaattcaagggtaaacacacgaggg

SEQ ID NO: 51136 - DNA, 402 bp, Zea Mays
tgatgatgatgatgatgatgatgatgattttgggattcctcctccgcctccgcctcctatgcctccacgctcccatgatcatgaggctgggagttctcgtgctgcccctgctcctcctccggctatggaccctgctcttgcggcgattctggccaacctggcagccgagcaggcccggttatccgagacgatgctctcgatgttttagagcatgcaggacaggcaggatgcacttcagcagcagcttattcatgatagggcagagaatagggcattcatggccctcatgcttcagcattctggtatctcagcacctccggttcagtctgctccgccttcttcgcttcacgctcctgtggtgccttcgatcttgtctgcaccccctgctggtacctctccgct

SEQ ID NO: 51137 - DNA, 811 bp, Zea Mays
ccaagtagtgatttctatccaccccattcttagttgtggatttgtgtgctgcgcaagtggttgggttagcttatttggttaagttcctattcagcgtatgaggtcgtcattggtttactccataggacttcttggtacatggcagttaaatcgcaggtgcgtttatagtttattttccaacaccaacaccttttggggttcagctgaatccccattccccaaccaagtgcccctgcactggaacaaggtagtatacacagtgacatagagagttctcaacaggaacacatctggaacttccattagtttattttatcctctaaatagcttgtctgcagcaactatatgtccataacaatttggttggggttggtaaggggtgcatgaatgggagagaaggtacaatgttaggatagcttaacatacattcgaagtttcctgttctgtagttggctgatacctaaatgttttatgctgttgtcataatgaaaacaaaccctattgagctggcatggctccatccttgcttagcgctgtgatgacatcctagtggaaaaagtgttggccttgtgacaagcaaggccagttgctatagttgtatccacaatccacttatctcccaagtattctttcactaatctgacctctgctagcaattataatattaaattgataaagtgactaactaaccagacatactgcactccgattttcagtaattataatcacatccttacatgtgacagttaaaatgaccaaccagaatactgcattccaattttcagatatgattgtcacacccttacacctt

SEQ ID NO: 51138 - DNA, 581 bp, Zea Mays
cgaccagagataggtaagtggaaaacaaatacattcaagacagctggtcggttggtcaaaatcggcccgaccttcgatcaattattgtctaagtacgtgaaagagaaggccggctcgagggaccggccagcaaagcgaccccactcacctgtccatgagcaacgtcaggtaaggctaattggaccacctcaccaatcggaagaaatgaaaggtcatactgtgcaattgagacctaacatacctgcatggacacctccacctatgccatatccatacacatacatgcctccaccatatgttccaaatcaaatgtggggcatatgccaccatattcgtttgggatgacacagtaccccgcttgggggggcaccccaaacatccgtattcaacaggttggcaccaccagcacaagaccaattgagcgccgctcaatccggtcaccaggcacagacccaacaagattgccggactactcgacctccaaggccgaccaatccgataggggggcatatgcctgcagcaactgaaagaacaacaaaaaaggacatcatcaaaataggtactgcagatgttgtcataca

SEQ ID NO: 51139 - DNA, 784 bp, Zea Mays
gactgtcaccgcatactgtacggtatctgtttggttcccacgcgatgccacaggggaatcgaatcatatatgtgcgtgcgtggtattcgtagccctgatgttggatggaggacgcaatattgccggacaggaaggcacgcacggcggaaatcctattgcttatcaattgatggtcgttttagctgtatgaatcggacaatttgtgatttgaatgttacgtgtatgtgtgttttttatgatttgtttttggatattttaaaatgctacgcgtaaataattaacttgaatcctgaagaaccggtgaggtaactagatgcggtaaataagagccattacaaattctcgacctgcgagaacactgcgatttgattccatgacccaattcaaccttcagagactgtaaaaacactccaaaaaaacagatcaaccatagatcgattgacagctcctaccaaatcccaaagaagaataagagctcaatcggaacaaaaagacttgtttgaatccaaactttcagaagaaactctaaataacccacttaaggtctagtaaaaaatttggatctaagttcgaagaaaacaccgagcgacaatgctggactacaatttttttagaatgctctcaaattttgcacgcaacaatatacaaggaagaaaaggtgaaccgtgaagtttgagtagaaaatgatcaaaactcttccagcagtgccgggcttgagagcggtagtgcagcgcgaacaaaacttcacagaatcttttcaaattttgtagacagtttgcgcaga

SEQ ID NO: 51140 - DNA, 724 bp, Zea Mays
caatttttaacaaatttctaaagctctattgtaaaagaaaaaggaaaagcttcaatagtgctgggccaattctagcccaagcggcccaacaccagagggaaaacgcgcccacgcccacgcgctggttgttttgcgcaaagggcctcgaggttctggctaattggaaacgagtgcagttactgtttttctgagtctcggacgatttgcacagaggtccttgaaattctatttctttacattgactgctccccgacggcgaaccgcgcgagagccgtgctccgtcgagctggactgggcggagcacgcaaggattggtgctcaccgacgactgactccagattccgatctaacccgaggtttcccccaagttaatttcgtaaatgggtgactggttctctttggccacggtgaccgtgaatgttgcggatggatcaacgcgttcccggcgaccagagggttctcagcccaattacgtgggttggcaagcatcattgatataagagagcacttaaacgaggaagaagatagtatgaacggacctggtcggtgctggccacggtgaggcattctcagcggtggcggaagctaacttggggaagaattcaaaattctcgggctctagcgaatggttggggctgatttgtggtggctggttagcttactgccctacgaagattgtggcgcactcaatttataggcgcatcgggcgacggtgacgaattcg

SEQ ID NO: 51141 - DNA, 874 bp, Zea Mays
cggttaaagcaggccatggggctgccccacggccacgctcaacgaggggatccatggaggattgcccacgaccacgggcgcagggaacgcctagagttcgagcaccactagccggcgggatagaagaacatgacgacgtgaaatatacactatctgtggctgaatcgaatggaataacatggggattaggaggaaggagggagaatcaatttgtgtaggcaatcccatggaatcaaattctgaaccatcatctatggcagctgctatggtttcgcaaggagacttgtcgaggaagaaagagacgaaatgttatttctcaccgtaatgagtgccatttgtgggtaattaacgctgaactccacgtttacatttgaaaacaagttttctagaatgcctgttttggtgctccacaaaatggtggaatttaactcaactccatgtttcgttttattttttggagcagaattgttggagtttaggccatttgacaatcaaatcgtggagcagaggggagcagtcccaaccgccgtgaggcagccggagagtcatggtatcttcaatggctaaagagtctaaggtaaagggaactcggtagagtgttatagcaaggtataggattctgtaactaatttttacaattacaacttattggtaggtagtgatcgagcttagctctgactgtccaagttttggtagttgaaagtgttgctgatgcttttagaattcattcatatagcgcatgattggttaggtgcacgcgtgaagccacgctcgtgcgggactggccggccaaatacgggcgttggggtggcgtacgagcatatgcagctaaatagctccaaaatgacttattttacaacaactcatgcaacac

SEQ ID NO: 51142 - DNA, 875 bp, Zea Mays
tcaccggagttgccgtgctttgctgcggctgtgccacgctccaagtcttccaccacgccgtccctagctgtaatagctcaccggtaaccgccgtagctcctcaactggtggtcaccggaggaagcgccacggtgaaagccacccatcccttactccagtgtccctgttccctccggccgccagcacggctcggtcgaattgatcgccaccgcccccggagtctataaattgagcccgccgttggctccgcaacctgatcacgtaccccagcatccagtatcgcccccaagcttccaaccataagctccaatttcaaatttgccccaactcggttctaaaacaccgcagggtcgagctcactgcggccagcccaattgaggtcagttcatgttgctctgttgcttgttctaacatccctaagctcttctcaaactccccaaccctttagatcgagctaaactgccattggtaactgggaacacacgattctattcgaagtctccgctgtcaccgtggtcaggagcatttgggtagccatccttgcaattgatgtgggggaaaagctcggggtaggactaatttggtgtccgctgcttggaaaccctagccgttggcccttttggccggttcaggcgctcgccggagctcgacggggcatgaacgccgtcgaggatgggtcgggtaaagaaatagaaaaccgaggactatactgcaaactgtcagcgacacggtgaaacagtaacaggccttatctccagttagcctagaacccggggtcccttctacaaaaattccagagcgcgcgggcgcgcgtgggcgcgcgacccggtttactgttgcgttgggctgttccgggccagaatcagcccaacact

SEQ ID NO: 51143 - DNA, 693 bp, Zea Mays
gtgccagcagtagtagctttatttctcgaacatggacaccaattttggtatagggaatttagatttctttgatggcccgtgaatcccttgatggctgtggagaagatggatcccttgctggtggcgtagacagcgggtctccaagaggatgaggaggagaaggtcgtggagtcctaaatgttgatgcttgtggcggagacggtgggttagaaagaggatgaggagcaccatgtgaatattgaagaggtgatgatggatgtacaataggtactaaagtttgaggaggcggagatggttggggatgcgacgacgatggcgttggtgatcaaccaattcgacatcccttcgaggccgaaggatgaaaattttgatggcttgtccaagtgtctcaataccttcgggcctagggatgtctagcatgtcgtcctcagatccttggacgaccattgtcacttatactctgcaataatcatctggaatgtcgcttccatgaaacttgcatcctaggatcgcaacgcctatttctacttccttcgtacaatgattgttaattccataccttataactagtgtgcacaccacatgccttgtgatgtcatcaactggataacagaccttattttccgttgtcgtgacagagcttgggacggtcgtataatcggtggaagccggtggttgagctgctggaattat

SEQ ID NO: 51144 - DNA, 613 bp, Zea Mays
tcatagtgctccacgcgaggggcgtgattgcttagattttgcgatttgactacatcacagcagtcctacgtcgtcgtgtgatccaaacttcacaaactctcaagctaaggctatcttcaaggatatactataaatcccccccaaccgtattgtcggtgtttcgaacctagctttgacaagtaaatttgtgtgcatgttctgggatctggacggtgtgcgcggtggacacaagatttatataggttagggcagaacgtccctacatccagtctttggcggcttgcactacccagacctttgctgatcaatgctcgtagtaggggttacaagtggacgagagagggaggagaggctcccaagtctcttgtgtggaggaggtggagctaagggctacagagctagagttctaactaattcttcgcttggcgatggggctctagtatccaagcattcgtcgatgtccccctcctcctttcgccggttcgtccgtctgtcatctctgtgtgcctgtcctctctgtgtggccctctattctctctgtgtgccactccattcattcttttggggcccaacctcctccttttataggccaaggaggggttggtcagcggtg

SEQ ID NO: 51145 - DNA, 366 bp, Zea Mays
ctttaatgaagctcctgtaaacaaccatttcatcttctcgcgagtaggggcgacactatcccctccaactctcactatggaaatatctcggaaatatctctctttcatagcatcaatttgactttgcttaatggatgattttccgaagatggtgtgacttggtcgccagggccgattttcagcatctttgtcttcactttccatatcaaagcttccgctatcgtcataatcttcggaaaaattagctagcatttcagttgtaattttttcgtgtttgttttctccatagcctcgtaaaaaccagctagcgtaggatcagcaaccttcttctcgtcagccatttgatggacacttgatcgaatgccg

SEQ ID NO: 51146 - DNA, 1049 bp, Zea Mays
tagggaaacactgtgaggctgctcgacggcgacacactcactctaaaggggagcacacacaatggcaaggacccccgcaagcgacgatatgacttcattgtgttcactctcacttgttcaccgaagttaggggagaggacaaagaaaagggaggatcttgggagagagggagaggagagcaaaggacgcgtgcgccaggataagaaaatgacttggggtttcccccgtggattaaaaaaagatggctcataaacctagcccagacgaactcgggtgagcgttgaccgtctaatttttgatccaagggcgcagggaggatggattagttttagcccattcgcggtctaggccctaagttgcggctcactgcacatgcgtggggagaaaggcctcgcaccctaaccggagtgagacagtccatgtgacagaaccgaccattttatacgagcacaagtataatagcaatcacttaagtgatcaaaccatcacacatgagccaatataaacccggtagtccgccgaacctcgatagatttggatggagcaacatattcaatcaagaccgtatatgattcaatgaaccaaccacatgttacacatagtctgaaaacactttcaaatattacataacatcggagtacatggttattacaaaccaaaataagcagcgaaagataaagtagtttccaaaagtcatcttagtttaaacacatagccagtctgatgattgcatcccacaaaagcatccttgagagagagggggctaataagagcgccattgcccgtggcttaataacttagtcatcatccacagctggatccaggcacaacttgcaataaccatggtacatcacatcacgtgcaacaattggaaataaaaccctgagtacgaggatgtactcaactagacttacccgtccaaaaccagaaaaataagaaattaaaagacaccaaggatcatgcaaggctttgtatggagttgactctttattttggaagagtacaagaattaatgtggttattagcaacttaaggggtatcatgactat

SEQ ID NO: 51147 - DNA, 593 bp, Zea Mays
gttgttttagcgttgggtgacggtgcttggagctcggaatgccttgaatttgaagggaggttgtcgtctctgttggttggcatgtttctcacctttccattgtgctccatcattgagaatggctttggatcggcggcgtagctacgaggggtggagtggatgcacaataattgtggtgcgtgttgtgattagtggttgtagggcgctacgatctttcgtaaactctgctagaaaatgtcttttgaaagtatatttcaagctgatctccgttctacaagaaaagctgttgtaaactggtatgatgtgcctacttttgctccttgaggtcctggcataaatgaatgagcatgccactattggtgccccgtacacactgctttaccggacagaggacagcagcgccctggactattcgcagtcctctctctgtatctcactttgcgtcgtatcgctaaaattctaaccctacatttttatttgatttcctgatgaattgttaatggacaggtcagtagaccagctaattgttccctatacctcttaaatagctattgttgctagttgctccaacccagctaaatctagctaacaac

SEQ ID NO: 51148 - DNA, 476 bp, Zea Mays
aaagaaataagaaccgaaggaagtcgcatgggccaaatctgcgcaattcggcccagctccaaaccacgagtgtcccaccctgccctcttgcgctggcaggcgggcccagacatctgtctccttgtgcgcggagtcatcttgctgtcacgtggggcccagtggtcagtagcttcttcctcaggattacccgatgcacgagaatgctgcagcggcgcaacaacctgtgcgcgcggatcggggggagtcgggcattgtcccatctctctggatgtgtaaatactgaatgcgactctctctcgctcatctcatccatgccccaggaatggtgtcgaagcagtcatcgtaggaagggggaaatcaccactgaagcttgttgggcggagcaccctcgctcctcgacgttagcgccgcatcttccattctgagggactgtccacgtgtgctgacccaaggtaccaaatcaagtgcacctatct

SEQ ID NO: 51149 - DNA, 323 bp, Zea Mays
gattggtgaacaaaggaatctcccaggtaccacgctggggacaaacggagttttctactgtgcctgtgtataaattggtacggtggagaaaagcacacgtgacacggcaggttaattacgtggcctccaaaggctttggaagagcaacgtgcgccctcagcgagaccgttcatggtgggtggctgctttcccgatcgatcgatcgctctcctctcggccgcttccatggcagcatccgaaagagcgaggtagacataaagctcacgcgtcagaaatttggcgcattgctgcgctctcctttgacggcagggagctagctagct

SEQ ID NO: 51150 - DNA, 509 bp, Zea Mays
tattttcaaaaaggttggaaggaaaaagaaacaactacaaagggaggacactcacatgaaagagaaagacatcaagagcaacaacacctacttggataatgagatcttcaaaacatcaatggtgtggttgtgagcattctaaatctttttcattgtgaggataccaggcataaattgtttattgcaaatcttataagccttgatctagatgtataatgcttctccctacacatctctaaaatgaatgcatctattcatctcattaaaattctttgatgcatatctcttgggggagcctatgtctatatcttgattatgttgagactattgctttatcctagtaatcttatatagtctcttgcacgagaataagtttctcatgatgtatgctactacatatcaatccaacttgttaaaataatgtcgctcttatcaaggattgttgctttcattgctaaagtagcatatttattggattctcctatttttgagcttatttgataatctaa

SEQ ID NO: 51151 - DNA, 358 bp, Zea Mays
ctgggggctactagggatcgtacagaaccaacacgtgggcctagtcctaggaaagtcaaaaggatcacagctgagtaatgacttgtctataaagttgtaccacctctgcaaagtgtataaactgatatatcatcaccaggcctctaactcctttcctcgatgatgagggagcaactagagatgatgaagttgattcaaaagcagatccagctcagcagatgtctcctccatctccttctcagcatggacagtactagcagcctggcccaggatattttgatccttatttccatcagatgcagcaagggctccaaactcacatggacaaccagtatcacgatatgatgactcatatgga

SEQ ID NO: 51152 - DNA, 517 bp, Zea Mays
gccactgatagacagctaggaaatgctgaaagagaccatcactaaccctagcgaaggcggcctggttcgattgaaatacacctacaggtttggagaccagtttgtcgaaccagatgagttacttggagcatattccaagtccgaagataatgcactatctgcggccttcgggagccaaaaaaagaaaagattaaatagggtttttgatgctattggatttgtgtaccctgactatcgctacccgccacgggggcagaaaagaaagggtgcaacctctggaaaggttgctgcttcggctgctccaagcgagcctgcgccgaagagtaaaaagttgaaagtcctcacccaccggccccgttatattgagtcggccgtggtgcccgagtttggcaggaaaacttcttcagctgttgctccaaaggagccaattccttctacgcagaaggctgaagaaccggccaccatgccgaaggcaccctcagccgagcaagctgaggcaaagactggtaaagataag

SEQ ID NO: 51153 - DNA, 517 bp, Zea Mays
ctcaccggcggtgaggatctttaccgagccatgtttatctgatggccacgacgcacgaatcgcgacgagcggcgatcaacggtgagggaccaccggcggcgagcaaagggatgggatcttcttcagttactcgttactgtaccatggcaagcgcttcatcagtcgcctgacaaccaaagttgaagctgagtttcctctcgacttcccataacaactccaaccaagatctgcagcaaagttgtaaagcaacatgccctctacaatcttgccatctgatgttgccccaaaaagccactgcatctggtttgaaattgggcttgaagttcagggcaagaatctgttagtctgatattcagacagaaccagactgacagtccaacttgggttgagattttctctatttttttcataaggacatggcttgaacccttaaacaaagttgttctcctatgattgggctatcaacttgatgtggtgacctagggcaaaaaccctatgctttgaaagttacaaagcc

SEQ ID NO: 51154 - DNA, 626 bp, Zea Mays
ccaagacacatcatcaccatggctaaaataactcacactagtgtactgtggactaatcacctgtgtatctcaacataaacacttattagtccacataagttgtcaatcaattaccaaaaccaaacagggtctcacagccctactagtggcctgcgcactcaggcctagtcctgataggtcatgagtgcgccattggccacgggacgtgtgggccataagtgtgccacagtttgaggggctcgtaggccatgagtacccagtggcatgaggggtttgtaggttattgagtgagaggcagacccgtggccctgctatggctcagtgccaagcacagttaatccggctggtcatttatgtcgtgtcggtctctagtcaagtgcaggatccactcgagtggtttcccttcgacacaccctatccttccatctagttccaccacgcccgaccctaggctcggtgccgcggggttcatccaggacaagttcttctagggtagacgttacctatctcctccgactaaccatcaggccccagttgccagaggtcttttccccggtgtgcttgctgaccgataggccccaggaaccgaggatcatatcctcgacaatagcccctgagcccttgag

SEQ ID NO: 51155 - DNA, 833 bp, Zea Mays
taatagtgaaatgtcgaataattagcagctacgaaacgttcacaatccggtcgtatttaaacatgttaaaagaacttttaagataatactataatatgtatctttttatttatttgttgcttggtatgaatatttttagatgtgtcttgagtttatatattgatacaatttttatataataatagtttgatggacctctattttaaatttgccctaggcccctaaaactttcggtccgccgctgccaggtagaggccgcggtggctgtggtgacagactaggcgctgctgtggcggtggctgccatatgccggaccgaggcgacgaacatggagcactatgtgggatcgtttcccaggcttagcacgcgatgtttttggacagacagggaaatagaaaaatatatgcgtcttcttcttcctctcgcttctgggaatgatgcctttcaggcttccatggagaggaggtcgcgcgactgtgatggcgatgacattgtacttcacccatcttcccacgctcgaaaagataacagtctctttcgttccgtgacttccaatcgtgttccatagcactctcaaagcacgccaccttgaatctcatcctctcaatcatcggcactaattcccaccaagatacatgccatcaagagcctcctctccctcctccctccacccctccccgtcaaacgccgccgcgccacaaagagcacccccacctctcgatcgactgcttcctcaaacgctgttgcgtttctcgcgcggaatgccccatctagtagtctgcccacgacccagctcctgaccttggcgtgcccgaaactgcagcttcgcgacc

SEQ ID NO: 51156 - DNA, 518 bp, Zea Mays
cgacgcgccccctcccttacctcgtctccccgcgcccgcgcggaaccaacccagtcggccagccctcgcccgcaaatctcgctccctccaccacgcaggacccagcccccatccctgcgccccttccaacctcgacgcttctttcattgacggcacccacggcccaccatgcctcgccacccgtcttcggcgccctcgcctcgcccactttctccccacgccgtcgctactggctacccccgcccacaacaccgccatcttcttcctcgctcgtgcccaccgctggtagcaccgccccctcccttatcctcgccttcatggccgcgcggagatggcctgctaccgccgtatttgtccacgtgacgccaccaccggctctgcacctctccctgcttggttccacagcgttgtggaagccgacctggccggatgtcctcgccgtgccacggatgccgcatcccacttcttgctcggcgaccgtcgagcgtcaacacccactccctctaggcgagacagag

SEQ ID NO: 51157 - DNA, 598 bp, Zea Mays
tccacgggaaagagagagaagagagatacttacgctgacatatggggtccatatgtcagtcttaggctctaccgtgaaaccgtagtcacccgaacaacgattaaggaccagattgacacactttaaaattttgtggaccggagtgacacaaggagacaagtttaaggaccgaaaatgtattttactcaaaaaaagaaacaaaggctctacacactacaaagcagatgaacattaattttaccttaatgtttttaatacacaatttatcctttttgatgaattaaatcctcatttttttccttgcagacagcaagctggatcatcgctagtttattttctggtaaattgattccattgaagaaagatcgctgtgcttcatttcgccgaatcaagatgccattgttccaacaaaagcaacatgtattttacatgagtcaagagatatgatctctgctgcatcacatagctacaataccatgggaatctcaaatacttctcactgaaacatgactgctatgcattcactctgatgaacctcttttaaaagaagagtttgtcacagcatttttttgtcactcagaaatccctctgttcagca

SEQ ID NO: 51158 - DNA, 466 bp, Zea Mays
ggagaggaggctgaagccaccgaaacaaccctgatttccgaagttatgaaataatcgggattggttgtgacagagggcgctattgacgaagatgcacattctgctgaggttgaagaagttgatattgaggaagaaaatgctgatgaagaggaagactataacactctaatcccagcaaagcccagccacctagattttgaaaaatctactgtctctaaggccgatgtgcccatgatgatgaagctcggttacttcggggagacagagaagaaacttctttgttttaccagcgaagaaaccaccccagaaccaaaaaatgacgaagtagtagttatcaaaagctttttcaaagctggattgcggtttccgcttcatgagatgattagggaagttttggataattatgaaatttatcttcatcagctgactcctaacgctatcgttaggctcagcatcttcatttggg

SEQ ID NO: 51159 - DNA, 431 bp, Zea Mays
ccaaaaccgagcacgttcaccttgatctctatctcaaaactctaagctcccattgacaaaaatgtgtctaactaaccactctacctcataccagaagatggcatcgggacgcgtgctctggacacgtcaaacccgggatcttctcttgatccagtcagcaaaatttgcaagcctccacacacaaacaacaaaggaatgtcaggggaagagatctctcaacgggatcatggccataatctcaaagatttggaggcaatacgcgcttgaacacgacctctctctacgctgcctcgtgctcgacgctgtgccagacgccagagcgcgcactagcgctcgcccgcgcacgccccgagcgcttgtcagagcctcccctcggccgcgctcgcccgcacctttaaaaccacccccgggcgcgcctcacctcaccccgt

SEQ ID NO: 51160 - DNA, 289 bp, Zea Mays
tgtctacagaactgcactgaaacacaatgattatcaattctctggagtccagtatgaccaatattcctcttccaagccactagtatgcccccattgtttcctatcgaaggcaggaacacaaattctgtgaattcgacgccaagcatggatagtatatctcttctagaaatagattgcattttagtctcttgacagcatacaacatcaattttagcagaatcaaccagcattctcacagcatcttgcctgatcgaagagttaagtcctctcacattccagaaaagtattt

SEQ ID NO: 51161 - DNA, 1377 bp, Zea Mays
aaggcccggtgtagttgttcctgatgatattgttgctgacgtcaaggttgcgcctgatgcctcgagtcgcccttcttcctcaatcgcccctacgaaagacattaccaaatagagatgtagtgatgtgtttagaagatactgaatgcatttgtgaactatatgtgtgtgatcattgtgctcggatactcgatggatagggtactagaatgtgtccttggtgctaaaaactataacgttttgtttctgttgttagaattcaagagtcatcctgaacgattgtggaagtaagtgcatcgtgatggttttggagtcttttcctgatttacgccaattgcttggctggtaaggcatagaggtcgccctaagacgagtagttgtgagcatattgcaccgtcttaagtcatcaccgacttaagtcgattgctccgttagtagggtatagtggtcaccctaagtcgagtaagcgtgagcatgttgcaccgtattaagtcattgccaacttaagctgattgctccattagtagggtatagtggtcaccctaagtcgagtaagtgtgagcatgttgcaccgtcttaagtcatcgccgacttaagtcgattgctccgttagtagggtatagtggtcaccctaagttgagtaagtgtgagcatgttgcaccgtcttaagtcattgccgacttaagctgattgctccgttagtagggtatagtggtcaccctaagttgagtaagcatgagcatgttgcaccttaagtcattgtcgacttaagctgattgctccattagtagggtatagtggtcactctaagtcgagtaggtgtgttgattccaagtctagtcaagtcaaagttaattgataaccaatagtttgaatgtcttcgagaatgaaatcttttattgatgacgtattttccaattacagagtacaacgttgctccgatagctcttgctaagggtaaaacttcctgaggtgctctatatttcatgaattctccacttccgtgccatccatttgagtaagtcgatatggtcctgtccgagtgacttcaaataccatgaatggcccttcccatagcggtgacaacttgtgccgcccttctcccgttagaattcggtgaaggaccaagtctcccactacgaaggatcgatgtcgtatagccttatcatgatagcgcctctgggtctgctggtatctcgctgactgaattactgtattcaatcgctcttcctccagcacgtcaatatcttctagcctggtagcttctgcctcagctatgctttcgaagaccagccttggtgccccaaacctgaggtcgggaggtagcactgcctccgaaccatagaccatgaagaagggggtgttttcatgcagagctcg

SEQ ID NO: 51162 - DNA, 486 bp, Zea Mays
catgatgttgagtagcatgcaaactagcaccaggatagccacccattgatgggtaagcactttgattatatgttggatatccagatggtgggtaaccactatgtgaagagtacataggtgaaggatatggatatgatcctaatgggggtggagccatagatccatgttgtgcatacggatatggatatgcaactggaggcgcaaatacatatgatccagttgaatgtactggaggatagacagtcggaggataacatcctttgtcagcatgatgattgtcccttccacctcccatgttctgtcaccgagattattgtttgaagaatattggtaagtaaaaagtatacatactcataatgaggtaataattaatataaggagtaattgtgattatacccttctctgaccttgcaattgtgattttacccctcgttttcaactttgttattttacccctctattttgaaaatgaagacgctgtttgcc

SEQ ID NO: 51163 - DNA, 749 bp, Zea Mays
tgatgagccatcttgagtattgatatgaatgcatatcttgtgtgctttgatctttcccaaagtatgtattagtgtggagatggaaagatcaacttggtggagcacagtgatagtgtgcccatacttgtctattgggaggagacttaggatctttcttataacatctgattgtgtcaattgtgtaagtccgcatgaagaagcatttaaaatttcatttcaagatggtagcattcctcacactcactcttagccccctcataaagtgcacaaatgtccaaggatagtgcatgtgtgtctttgtgattccgcactcggttgaacataaccttgcaaggacctataaagagggtgtattgggcctttgcattctaatttttgtagtgcatttcatccttaggttttgggaggccttaagtggtagctctaaaaacaccattatcaacaacatcaaggcaagccaccatatgaattttcaatgtgaaaaatcttctccctcaaacacaacatggggtccatccccattgtacatctatactctacgcaatgaagcctaatacgatgagcacaaggatcatatactaactgaaaagatgaagatatccaagatggggtgaattgcacttctctaaaatttcttgcgaaaattaaagcctattaatggaccaacttcatcccttatgcctagaagtctttctatgtaacaatcaagagttttgcaccctaggttctaatgctatactagcatcaca

SEQ ID NO: 51164 - DNA, 478 bp, Zea Mays
cgagtctccaccgctttgccaagtccttgtccagccgttatagccatcggctcagcatgggtcgagtcagatgagtccccagccagcatactaagcacaacatctatctctacatcgtctgtgctagctggcatctcaaaatgagtttgcttctcatcattgggaagattccaaagaggggcaatcagagcctcaatatcctcgggagagggtcgcactctaagacccagactaccatcactagcaggagggttggacacaaatttagaaaatgacctatgaggtggcagattccaggtagaataggcaacaggagcaccaacatttgacactctgccccttagaatcatatccagtcggctcactagatctttagtggggattctcttgtttgtgactcgggtagagtcattgatgccactgtacagataagctgggtacgccctgtccttcaaaggctgaatattcttgaagacga

SEQ ID NO: 51165 - DNA, 663 bp, Zea Mays
agcccaccaaactgactttatagacatcacctcggctagcagatcatcatgagattctagatcttcaaatctggataacttggctggagtaactctgtattattctaaatagttggggcatgcaagatttccacgaagacctctaggggtacaagggaccttgagcagcctaacttttccgggatttcaacttcttcattctttgctcatagaacatatgagaattcaatcccatcgaatttatctttgaggttctgaatctcctggcaataattcatcattcaatccacattgaaagttcaatctttgttgacttggttaattactagcaacgagtcacctagaactcggacccatcgaatgcccagagtgatagcaattcttaagctgagcaacatggcctcatactgagcaatattattggttgtaggaaagtgtatttgtagtatgtacctgaatttctcaccttttggtgaagtaacaacaactcacgctcttgctccactaagctataaaggtccatcaaatttgactgtccagtgatcaaggggcttcatttcgattaggacgtgtatctcggtcaactttgcaacaaaatcactaagagtcttggccttgatcaccatacgaggtttgaatataatgtcatatactcctagctca

SEQ ID NO: 51166 - DNA, 522 bp, Zea Mays
gtggggagtgggctgagtagtgaagcaccaagaaaaagttagatcaaagtctagttttcattaaatttagtccaacctactatataaaggtttatttattttattatatatctaagtctatataaaagtttatttattttattatatatctaagtctatgtataagagtttataaaaatcaaggtggggttgtggcccccattgctcaccccttgcgttcgccactgctgggcgattaaattatatatcgggtactcgtacgccaatatgactacataattaatcggctgagctatggtattggctgagccctgacaacacgacacaatatttctgtcatatgaacttggttgcgtcatgtgattgttaatcgcactctcgcttaatcggaccactcccgtagagttggattgccatcgccgagtcacatatttttttgcatgccctgtaggcactatctgtctaccacgagccacaattacgcctgttgcgcacgttgcgtggatttatcgtgtaccccaa

SEQ ID NO: 51167 - DNA, 385 bp, Zea Mays
tgggctatgctataggaaatgctgtgaactgggaaataaaaaactcgagggtggtaagacagccctagcattgcactaagaagacgacctcatgcaggtcaaaaaccctccaaacctctgccccacccgtttacaacagaaacatagcccatctaagaacgaccatgattagggccaggctttagacttgtgctttagtgttggacagacaaggggattatttttaaccctagcctaagaatttgctgccacagagatttaaattcaagacccaaggaattctactcaggcgacgacctaaccaactcatctagatgccttttcactatgaattggaaatacaccagccatttaagtgatactactactgtagcaccaactatcc

SEQ ID NO: 51168 - DNA, 336 bp, Zea Mays
gtcggcggggttcaccagggaccctagctcgtggccgcgggttcaccgaaggatggtggtggctgagcagcacgaaatcactcatcggagcatggcaccgtcacagattctgcacctcgccgtgatcaactcacctacaatagtgccaaggcctcgatgtgtggtccatagcattcgttggatcacacaaaacatttttagggattggaatgggtgggaaatcgctcgtgtggtgcgtaatttgtcaccgcagttgatcgtccgcctcggggccacgcaacgtcgtggtcagcttccctgaccgtgctaaactcggtatgagcatctcccttctgt

SEQ ID NO: 51169 - DNA, 473 bp, Zea Mays
cacaatctccccctttttggtaattgatgacaacactacacattttatccaagagaggttttgattttcaaatcttcctcataccctcggtataagaaggattttagagatgagtttcaaaagacttatctttatttgaagttccatccaagagatagataagtctcaacaaaactcagagtgtaggaatagctccccctatatgtgtgcatgatatttctagttgaagatatgacacacaacacacataatcgatcggagttttgatggagatctttctataatcatggttatcgaggcatacaagaagtattatgaaaaataagcgcaacaaatttaatcactcctcgatcaaccatttacagaataattcgaactaatagaaacataagttaacagacatagttcgatacttcgatccacaaaatatcaccagacatttgtcagttccacaaacacaagacataattcaa

SEQ ID NO: 51170 - DNA, 1760 bp, Zea Mays
gtaacttttgtctttacttggttttcattaggtagtcacagttgtattagcagtgagaacaaaaaggaaatcatcatgagacacttggcatgggcgcccgatggggcaggtgatatcaggtctggtgttgcgtgcgcgggtggcttgacgggttggataacgtcttgcttggcattggtgtgtccccccgtgcgacgtgttcttctggtgctctgctcgaggtgtggaaccgtctgcaaaatgggtagtttcttcgctcggggtccgaggcagtcagaagtcggagcggcggatcctcccacgtggtaatggtgggcctatttgataggcggcagatggttgggttcccttcaagggctcgaggcggttgggagatagagaggcgaatcctcccacgccgtggtggtggtgggcccgtttgacaggcaccagacgattgggttcccttctggggctcaaggcggtcaggagctagagcggcggatcctcccattgcttggtcgtggtggacccgttttttgggcaccactcttcctccctacatctgtgtatataaatagaagaaaggttccttgattcagttacgcttactgtctctttgtgctcttgcctccattcctaccctagagcctccttgtcctcgtgctctctacctgcttgagcgctccgcttactccttttccctacatccatggcctccttcctagtttgctcgcttcatcgaagtcgtgtcctaggtttgcagaagaaggggttccttcctcctgtggaggccttaggatggcggttggaagatgagggcgaggtgcctcagcctcgggacgacgaggtggttatgctctcgtccttctacgagcgcgggtttaggctgcccctggacccctttgtgagggggctgctcttctactagaaactggagatccagaatctccaccccaacatcgttcttcacatagtgtgttttatcatgttatgtgaagccttcctcggcatcgaacacaactagaaactttggcactatctgttcagtctgcggttgttcccttgccgaggtagctaatcatttatcggcatcatcgccatctagctacgctccaacccgcaggcaagctacttcaagatcccactcccatcttccattcgctatgagggtgagtggttttacgctaggaaggtgggggcagcgcttcgctgttcaccagacggattccgatgtctagcgtcgagtggaggccaagtttaagaagagggtggagcatatcctgaaggggatcaccacatgaaggatcaggaactcaccggtgtgtgacagatccacacatttatgcaacatcgggtttagctgctcatggcccatcagaatacgatgtggcagtacgatggcttgaaggaccccgatcgccactcctctaagcccctttctaagtcagaggtcgaggcccacgtcagggatgtcactgcgttggcatcaacgattttcatagattcggattcacccttccccatagcaaggggatttgagtgatttggtaggtttccttctgtggtctttctgtttttgggtatatttcgttggtggtggttgtttgcaccacaggagcttgggcccatgagtccctcccttcctcctctccccaaagacgccacgatcaaggtggagaagaaacgaaagagggagtcagaggtgaaggccctagcagcatgcaagaagtgtcattaggcaagaaaaaagagtagaaggctgagtgtatgtctcacac

SEQ ID NO: 51171 - DNA, 428 bp, Zea Mays
tgacaatgagatttgtgttcagcaggggtactagtatgggctcactcataatggtgaatcatttggactcgacgagaaatcaacaagaaatctgagacacggggttatacagattcgagttcgcaccctactccagtgtagtattgatcatagtattgcttggggcgtgttacaactagtgtgctcatgtgtagaaagaaggttgtcctgccctttttatagctcatgtgtggactttacagtaggaactcgtattctactgagagggaactcaacttgttgcttctaggtgacatatccctcctaaagttgtcctatagggtcatgcgctaccatacccctgatatgatgttccatcttatccgtccggcatacgagtccctatagctagatcgatgtcgacgtagcggcacctggcggtcccacag

SEQ ID NO: 51172 - DNA, 546 bp, Zea Mays
tgcttagtaattagtcactcgttctttgttacttatcttctctggttgctcaccaacctaccggtttgaactctattcttcagggctagccggaacaacgccctcgtcactggagaacgtcgctgcggcacggtttcccaatgaccaccgctctctggtcttcacccgttccaataatcacgtgcaccagctttggggtgagtcattgatcattttcctactctcaattccacctctactaccttgtctagctcggtacattagtcaccggaccaccgtgccgtcgtggtgagccgcatgctctctgtagaacatttccactgtttttcctggctccaatagatgcgcaatcgattagaacacggtttagagcaggtttagactattcccgttcccgagccttcaccaccgtatccgtaacctccgactcgccagagctcggacgagggcgaggaccagggtttgtaaattcaaaggaagataggggttatttgcaaattcgctgactcatgtgaatagctctttggaccggtttgctgttatttc

SEQ ID NO: 51173 - DNA, 533 bp, Zea Mays
cgattacatgaaagcgaacaacacaaattactatcgacctcactatcttacaaattccatgtgtggctctcactgcgtgtctggtggcggcaccccacggcaccggcacaaagaagttcagatttgcggatgtgggtcccgtgcacgactgcctggaggcgagcgaagggagggcgacacacatcccagtttctacttgggtctgataaggacatgcttagtagctccaaaaaagttgtcgttgcataagaagtattagaaaattaaaatagttaatcgaagatgttgtggtttatgtgatttcagtgtcaaagatggcgaacaatcttttatattcgcaaaatgaagaagggccacatccttcagccacaaattgatagtaaataagttgtctgccatgaggcttgagcgagtaatagtaaaacttatttgttcgaattgaacagatgcaacataccagtgattggttcatagtaaccttgttaattgtcactaatgtctttctttttatctaatccataattctttgaatt

SEQ ID NO: 51174 - DNA, 687 bp, Zea Mays
tgggaagctagctgaagctataggaattcctcgccggagttgaggaacccgctgaactcacgctccatcgtggctagtgacaaccgtgctgcgattcatgttgaatctactcctgctgcattcgccatcacctagggatcgtgtagatactctagaactcgccctagggctctgcgtatctatccgggggtactcgtctgagtgctccgtcgcgtgcgggataccaccaccgcgttcggccaacgtgagggacgagaaggccctcgaattcaccgtaccccttcgagcgtggctggtttggtaaagagcccatgtactttattattataaacccatcgtcctcccttacatgaaaataattacaaaaaggccctggaattgatgaaatcaaccccgaaccctctggtatttgtgtacatggtccaataagacaccagaattagtaaaataaatcagaaaagttttttatatagaaaacaaatcctaaaatttaataaaatcataactttttttctaactccttttgatccattacagttgcattaaactcataataatattgtttatcattcaataaccttatttagtatgaaacatattgttaatgcaattaatttgttttatgtgtgacaccaaaaccctcagaaaatcataactctttaaccgtaactccgatttgagtaattc

SEQ ID NO: 51175 - DNA, 530 bp, Zea Mays
cctgacattcactaaaataatggaaagcaaattataaaaaagaccttgacataaagtacaaatcgttatataagaatcatagaataacaacgacaatcaaattattttaaaaaaacttcgcataatgtacaaacgttaaataagattcgtagaatggaacattaattaaaagaacttcacatgatgcacaaacattaaataaaaatcatagaaagttgacgcacaacgactaccgcccggagctgcacgttgtcaccaagaagcatgtgtgcggcggcctgccacgtgatgagatctggcggaacggggatggaaagacggacgacagtagcaagttgcacaccgatgtgtgcacgaggcgaggaagcacgatcctgtggcccgctgagaaatggctgcgcacgggacgggaggggcggacgacggtagtaggtgagacgccaacggccggaaggagcgagcgaggcaaggtgaatagacggtgcaggacacggatgggcgaacagtgggagtaagtggcacgccgacta

SEQ ID NO: 51176 - DNA, 290 bp, Zea Mays
gcggcggaggcttctccacgtgtgatgggtgatgaggatgtttcgggtgcgagtactgggcataggcggcgaagggcggtggcgaaacggagagtgagtgagttgtcgtgaggtgatagacgtcatcgtggtgaggtggagggtggtcgtcttcgtgtggatgggactggcaagcaggaattgctggccttgccggctggggcgagtgtaggtgagggagagctgcgaagtctgtttgagggcgatgaattgaggataatgatgttcaactataaggatatgggtatcat

SEQ ID NO: 51177 - DNA, 462 bp, Zea Mays
atggccttgtcgcgctgagccttcaagatgacacagtcatcctccaaggccttgacagtgagacgggcggcctccagctcctgcatgacaagcttcttggaagcacgcagctccttgatggtggaatccttggtggacaacaacttgccgagtcgagagacttcatcctgaaacacccgcagttcatcgcgatgatggtccaagtcagcatagtaaagcgatggctcctctccaggatggtcaaggagttactagcatcacgatacagcctgtctagatcacaagatgcaacgagtgcttgttcctcctcctgcaagcaagaacaacactaaacattgaagcaaggagagcaaagcagaagcagccaaggaaatttacctcgtgtgccatcttctcagagtcgagttgtgcattcagaaaggagtttagggagcgagcaccgtccaggaaagcagaagtttc

SEQ ID NO: 51178 - DNA, 524 bp, Zea Mays
cctggattcgacacaacctctctgcaaaatgcagggttaaggcttgttttggttattccttccttaggccactcatgtggaacccgccaacaccgagtctgttacgtagagctaaagcatgacaccaccaatctataaacttttagttctccaagcctggagctaagtgctgcagtccatctattgatagcgctgaaaaccacattttccttgcaagcacacaagacgtgagtaaatgttgcaccgtcctcttggtcacacagtggacagcgctccaagtgttcaagtccatggcgggtaaaacgatcagctgaccagcaacggtttaaggaagccaatcaaacaaagaatctgcatccaggtggagcacaggtcttccatatttccctccatgtcccaaatttcactgatcccacaaagaaattacggttggctgattttgttgtaaactcaccggataaggataccatccgtatatgctggtcatctattgctggagtgagctcaaaactgaatagaaggta

SEQ ID NO: 51179 - DNA, 355 bp, Zea Mays
agaaggaggacctgcccttttatagctcaagctagggtaggaccatacataagagatttgttctctactcgtaagaggacgatctgttgtctcggattgacgtgtcgtggtccataggatcgtgcgtagccgtactcctggtatggcgtattgtcccgctcattcgtcatacgggtccctgtagcgagtccacctctaatgtcttcgtagtagtgcacaacgggtcccgcgggtcagtctcatggtatggtcgtgtgtagcgcggcttcgcatgtcgtcacgatcccttgtcacttgtcggcgtgtgtaggcatacacccgatatggtgtatttattccgtcctttccggtacgc

SEQ ID NO: 51180 - DNA, 432 bp, Zea Mays
gtccggctgcacccttaggcgacttctgcgcggatagccttcgcgatagacatcagatttttttcgcacttgttgtgcttagtccggctgcacccttaggcgacttctgcgcggatagtcttcgcgatagacatcagtttttttgcacttgttgtgcttagtccggctgcacccttaggtgacttctgcgcggatttgtcgcacgcgagggtggctagcgcttagcctcgcggtgacctcggattggtcgaatatcgaaggccgtcgtcgcggtctgttttcgacgcatgtttttgcgggggatttttcgcacatatattacatggctccgcctcgttaaaaacctcaccccccgggaggaaaagagtgcgggccggtacaagattgttttttggcgaattacaaaggcgaaatcagccccgattagtcaga

SEQ ID NO: 51181 - DNA, 944 bp, Zea Mays
caagccttcgccattgcccgccgcgtggctctgcctttccaccgcgtcgccgtgactctctggggccggaccatcgtcgccggtgaggtcgccacgacgttagccacgggttcatgcgcaccggaacctccctgcccctttccaaccaccgcgcatcgtcatccaaattcccggccaccgtctaagccgcctataaattgaccctgcagcgagcttcacaacatcatcacccacctagccacgaagaatcgttagcaatcgtgcaccggtgagcttgaattccggttttcccccaaattgattctccgccgccgtgaaccacaaactaccgtggccagccctccataggtctgctcatgccctctttatttctgttctagcctctctgcacgctggtgatactcgacaaccctcacaattgcgctaggagtcctctggtcgccgggaacacgatcaaatgttcgtagtctccgctgttctcgtgggcagaagagaatagatcaccattggtgcaattaagttaggggaaacgttctccaggtagcgaatttggtttagtccgaagctgaacactggtcttggcctcctccggctagtctgtgtgctcgccagagctcaggtgcacgcaacgccgtcgaggccttggccgtgcgaagaattagaaaccgaaggggttttatgcaaaccgtcagcgacacatagaaatagtaaaagaacacgtttctagttagccagaaccctgagggtgtttctgcaaagccgccagcacgcgggcgcgcgcgcgcttttcccctctagactgggccgctggggctgaaaccagcccaatactattcagtcttttcctttttcttttttaggaaaactttgaaaacctatagaaaattgtagaaaaatcttaaaattgtgaaaccaattttcctagacttcttattttccatagt

SEQ ID NO: 51182 - DNA, 1103 bp, Zea Mays
aagattttcagtgaccgatgcaaaatctgagaatgattatccattgaagaccatgattatttcactaaagggctcgagtacgcctagcatacatcgacaggaacccaagcaaaaaatatgaaggaggcatatcaattcagaaaatccaaagagaatgaggctttgcgagcaaacacttccccgaaatttagacatgaaaaaacccagaaaggccaaaataaaccacatactttccttataacatcaaaccattcacccaaaggacataatattgtgccatgtttgatgaggccgacaaagagggcacaataggcccaataccagaaagagaagttttgttgcgatacataagcagaccaaaagatgtcgagaaccgaggcacagcggatactggctgtgacgagggagaaggcgaagccttacagcccagccgaggggcaagaccccgcgtcatcttcctcttctgaaacctccctctgatcttcagacgaagcactcggctcgtccctggaactagacgaagaacgaggcctctggatggcagcgctggaagatctggagctgtttaatgcatcaaggctcaacttggaggggtcaacattgcagaactcagtgcccaacttcttaagagtcttgtgggagaaagagggcggtgatgacctagcacagcacggacaattattcttttttccaaagcaaggcttaaagcctttggccttttctctgagcctggcactccttcttacttcagtgtcaaccaagatagtacgtttctttctgttaactgcttcagtaggcacagggggctgggcatcctcctacaattcctgactaggagggagcaaacatttggagggaatcttgataggtacagtttccatgttgggttcagtgaaaacagaaagggcacccgacaacagaaattttttggcccactcaaaagagtccggcctcagaagcaggcccataaagaaagctgcccacaattttggcatagggataaggtctgagttgggggggacatagctcagcccaagaggagaaacgttttctggccatgaaatcttcataggcaggatcatggatgggttgttccaggtgaa

SEQ ID NO: 51183 - DNA, 1585 bp, Zea Mays
caatttctaattgaaattagttgtttctctgttcccctggactgggcgcatgattacataaacgtgcaggggttaggctgaaatgttcttaagactcagtcacgctcagggtggacagcgggttaaatcatgtttcctccagggtttcttttgcaaaaagcgctggccgaaagggtatcgtatgagtatggccgagcagattacaatcaacggtccagattaaaagacaaatcggtacgcacagacatccctccgatcacgatctaacggccacgagttcaatactactcgatcccatctccagtgcccatccaaaatcggacggtacacggcggcttcaccctagattgaatcctggctgttcatattggatctaacggcacccgcgctgtcttctttcttactacagctaggacggcggcgcgtgcacacccgatggtgagcccgccgaagtggccaagacaacgtttcggtacaagaatcccaaatcgactagatgcaacacaatgctggtgccacgatggattgatctggtgaacccttaccgtgtgccttatagccgagagccacggcgacgatacggggcagactcaagtagaagtgccagcaacggtgagaaatcgccgacggtcccattgatcatgcgctccaagcttccgccgcacatcctcctcacaagctccgtttcccccccccccccccgaccagtcgacgaggccagaccggcaggcccagcagggatcttccatgacaacacgcacttttctcgcctcccactccgatctggctgactccttctccctcaggcctcgacgccacgacggaagaggccctctcggctgccacggttgtgcaagatggatgaagggcatgactggattatatagagctggtgcgagcccgtacctatgctcatgggaggtcggttgatgcatatccatcggctgggttcgttacgcagaacacggaataatcccaacaactgagctatggtagttatgcctgagtacaacagctggttcgacgctgggttcgttgaagcatcgcgcagagttggttacgagctaactccgatgtctaaggcagatccacggaagcagatgctcctgacctttgagctccacagcacagtgcccccaggaaaaccggtcaccatgacgtctgctccggcaagagtaaaaaaagaacttgtgcatggtgagggaaattggccacggctggaatctggccgatcggcccgcttgggctgagaagagctgggaacgggatgggttaagtgattaagcacgtgagtgggtgagttctttttctcttttttttcattttcttctatattttgtttgctaattcaaattacattcaaatacagttgaattcccaattcaattagaatgcacagtcaagaaattccagcatgaatgaaagttattaatatactaattattttatcactttattcggattttttttaaatatgtaatacacacatatagtttacaaaatatcatgaaataatttaacatgattcttttatgagtatatctatacactttaaccaggaataatttagtttacataagtcttt

SEQ ID NO: 51184 - DNA, 393 bp, Zea Mays
cgccatgtacctatctgttgtgagatcttccccgctaggaagggagaggaggagccaatgaggaaggtgccctaccatcatcatcagagattgcactagagggtagtgatgatgcgtgcggggaggagcaacggtatggttaggacaaagcaattaggtggcgagagggaggtggtggtatgccaacgtggcatgcacaaggtttaacaagtgggggggaggattcgggccacgtaatagaagaaaattaatggtagtttgagcgcctgaaggatagatccaaagaatgagggttatgaagcctcatttgggagttgtctcgctttttagagccaagttgggactctgctagaccctgtgttttagatctacctatcagaaaatgagtttgag

SEQ ID NO: 51185 - DNA, 349 bp, Zea Mays
gctcaactagcttccttacccctcgcacccattgagacagatgtgaagacccttgcacatttgtcactacacctaggcgccgatgtagcgctccactaaggaagcaatgacccgatctagatcacgatacgacgcgccaccaagggggtggcatcctagcccttgtccatttaacaccatactcgggttctgatatggcatgtcgctaagagggttacacctcaatggttttctattgggttccatatccacttgagtggctaaaatttttatagctggcttgccacgtctaacgcaaccctcctctttgtacctggacttggaaccaggccatgctgcaccaacatat

SEQ ID NO: 51186 - DNA, 409 bp, Zea Mays
aaaggctccttgaactgtttctcaaatttaaagcgataaggcagtcgcacaagctcaagtgccttcttcgttccttttagctttggcatgctaaattcacttaaagtcggagatgttctgttagccaaatattcttgaactagatctctagtgctgatctattcagccaccaccctgaattctgctatagcttgttggcatggtggccccgacgtcatgcgacacaagggcctagtcagtccgaagcttagagtcatcggacacataaccatttgcatcagcttctctctcttcttctcatcggccttgaaataaaaccattcactcttccagccggttggccacttggtacgatagctgaggaccagagccttcatatctttgcgatacgcaaaattatagcaaccaa

SEQ ID NO: 51187 - DNA, 667 bp, Zea Mays
aatttttcagattgtgttctttctcgttcttgattgtgtcttcgatttgcaagcaaggattagccttcgtgacgaggtcaatcaagtagcgcacggttgataaccagagaagtggtgctgcgattgcggggttctagtcttgttgattggaagccggatcgtctgtatgacatctccactaaatcgatagttaccttcacatgacggaagatcgggcacccccgttcctatcaagtggtattcaaagattcaggtattaccgtcaggcttaccctagtttagtttatgtttttcatcctataactccagaaaattgccatacaaaaaaaattccgctatcctagaacccttgtttagcctttgcaatttcgctttcagtttggctttgttcagttcgtgtccgtggtcgagtcgtgttgctagtttagggtgtatcttcgtcgtagttcaactgcaccttcgccgctatcccatccaccattacccagatcacaagtcgatccaccccattaatcgacttgccctcgctagccgccttgtgtgacttctcgtcgcgccagccctagatagattgcagatagggaaatttttccctaaccaccgctttctagtcgtgcctctcaaaaacataacttgaggtaccttccttaaaccgggcataactttt

SEQ ID NO: 51188 - DNA, 292 bp, Zea Mays
cgggagagcgtccaagacgccatggagacggtggccgcgcgcttccagcgtgaccctgccgatgccgagtagttcatacctacagaaatgaggctagggctctgcttgaaggcagatgtaataacttttggttttgtacaatactcttgagaactattaattaaacaacacttatctgtatgctatttgtcctcgctgtgtgtagcgttaccaacttctccctggtacttggcccccctgggatgtaggatcattgtgtcgaggctggataccagtattcctaagggaaaat

SEQ ID NO: 51189 - DNA, 678 bp, Zea Mays
ggtataaccacatgttgggtttctctagttaccaagcataagactctcctccgaggcgatgactaataaaaaagcgaataaaccactacactcattcttggcagacaaagcactatggccaaaggaactagacaaaatacttgtggctcgtcggctcgtgatcagctcagcacaggtcgactcgtttcaattccatcatgagctgagctagcatcttagcttgcttcgtgaatgagccacctcgagctacagtcgactcagttcgtgagctcaaataagctaggatttgtcagcaaaaccgattggtggagatgttttgagggaagatgttttgaaggaggataagaaatggttgctgctagctcgattggtggctactttttttgtgggatccatgtcctagtgttcaaaatgttgtgtactaggctactgcgttatgttgcatattatttacatatgaactgatgaagatgttacgcgtatgtgctagtggcatgtgggttaaactaatgattggcggatagtgtgttaaattggtatatgtgaatgtgcctataggttaaatagctgaacatgagtgttgcatacttgtgttggatggactgatgagtgatggactatgttaatttagtgttgaattgttgtactatataaaatgtgagcattataatgctttta

SEQ ID NO: 51190 - DNA, 731 bp, Zea Mays
ccttttttcttttttgagcaacaggactcttgagtcttcaaagatgcaatgcaagacacagctacgaggtgtgaacatcgatagatcgtgaaacgtacgtacgtactggtatagaatacctgtagacatttttcatgtttaatttaattcagaaaaaacaagcaatagtaaatttgtaacagtatgtgtgagtgtatatgtgtatgtgtatacaattgtaggtagcatgtgcgtgaaaactatattgatcgtgatagaaaccactagcaaactcggagatgaaaatatatgtccaacgaagggactcataccaagacatttgagactccattcacacgaatcgatattatgtgttgctcggattgatggatcacagattcacagccggtgcaagtagttgtcgttcgcattattatcccccggacatccaccaagatggcaacaaacaagattagcgaaagcagtagaaaaagaagacacaccagtcaccagaggttagcaagcagtcacattgatggtcccctaaaacttgatcgctcacacacccaagcaggtgttgtggatgtagacgctattctcccgactctctgtgcatgcagaggatcgggatggggaagctttgatatactagtgtttcaatgaagactatgatcgtcatcccctaaaatgctctcatttctcaatcgtttgatgtatcagtgcttcaatgaagactgtaaagctaaacatcc

SEQ ID NO: 51191 - DNA, 535 bp, Zea Mays
gccttctaaaaccgggtgtgacataaacgcatcaatttcttacgcaattctctatgataagatgggggaacaaatctatcgcgcatagctaccttaagatcttcccaagtcgtaggtgctctaccatccccaactagaccagtccaccagacaatagcaaaatctttaaattcactagtggcttgtctaacttgatgtcgttcaggtacaaggtgggcaacaaatttctattctatcgtcatttcccaatcaagatatccctcagcatcataatgacccgaaaaagatggtatagaaaatttaattttagcataatggttatcaggagcatgattgttattaccttgctggcagtgttggtgtggcatacccttatgtgttttgatgaagacggcgacgtaggcgcaaatctctggtggccgcttcatcataattaccttcttcatcaaacaccgcatcatcgagaagtcgtggacgaggaggtggtggtggcggtgcttgttgttgcgtctccaacacagcaagtctatcgacg

SEQ ID NO: 51192 - DNA, 425 bp, Zea Mays
gtctgggttatgcactgtatttttgggcatattaaactgccccaacaactatagcgcatgactgaatttgtgatatccttaactgccatcaaactgaatctggaactgggtgcagtttcagtcacattttttggacagattttgggtgaagttggagataaaaaaactgggtgcttttgtggacaggttttgggtgaaattcaagttctaaaactgggtgcttttgtagacagattttgggtgccttttaggacatattttgggtgaagttgaagataaaaactgggtgcttttgtggatagattttgggtgcattttaggacagattttgggtgaagttgaagataaaaaaaactgggtgcttttgtggacagattttgggtgcatttttggacagattttgggtcaagttcaagttctaaaac

SEQ ID NO: 51193 - DNA, 765 bp, Zea Mays
gcaaaattattacgaagataacgcaacttgaacggattgaaacatacttaaaatgagaaagttatagattatacaaatttgtttggatttatttgtctattaaaaataattttcgaatttaacttctaggtttacagcgacctaaggacctcagacacaaatttatggacagataggggttagactattaaaaaccggacgcatacgtaatattcttagaactatagaggacggcgggttagtttcaagatttcctgaggactctttagaaagtttgcctcggcgaaggggtacgagtcaatctgtgtcgtccgataaaaagccgagggcccaaatttaaaacaaccccgagtcgaccacgcgcgcccgatcacgaatccatggtccagactggatcacgcgaagggatacattctgatctaatctcggccgtctcctggccagatcaacggtgcacaagcccccaagccaaacaggtattcaatactcgatctctgtcgtccatctgtgatcaacggctcataaccaatctggacgaaccagcatccatacctaatcgtggccacacgcttgggatccaacgcccagggatccatcgacttgaatcgctttcacaacgtttaatcctggtcgtccgttgctggatcaacggagtcagcgcccatcacgccatcacccatcgtccccagcccagaccgcggcggtgtccccaactacggtggcgaactgcgtacccgcgacggagtaacgccgacgagcgaaaac

SEQ ID NO: 51194 - DNA, 514 bp, Zea Mays
gaaaaaggagagcatatgttgttagtagaacgaatgatacatctagctttaccattttggggagaggtgtagggacatgacatgcggagaatggtgcatcgagtgaggaggaacgagcgcatggtggagccattgaattcctgcccattatcgcattgaacataggaaaagaaggaagcgactattgcgactattagagtgtgttcctatatctatatgtatgtgtaggtgggctggcaccagtgttgggctgccgacccatgaaggttagagtttcctgtgtctatatatatatgtaaccatcttctatgcattacaagcaagcctagggtttccaagcgtcatggggacctgagaagcgcttaggttggatccatcatcatcactccaccgctgcgcttggagcaacccgtaggaacaggagatggagaggaaaccagtgccggggaggggatgtgagtggccgccgggcctggagtaggcacggggttgtggggggcagaggcaccggtgg

SEQ ID NO: 51195 - DNA, 811 bp, Zea Mays
cctcagcgtccccacaacgctgcagttcgccgatatcttcaccaagggactgccgaccagtgtattcctagatttccggtccagtctcaacaaatgtataggatagagttgtgactgcgggggggtgttagagtacctattagggtttcagtcctcccctgtgtatttactctctcaccctcattgtaatgggcttggcccatctaactcaggctatatatcaatctcccaaccccttgagtgggttagggtttccattattctacatcggtcagccccatgcacacgatccttgctacgtcgacgcacctgacactgctccttagtgaaaagcaggcgcccaagctcatctgtcgtctccatgcagaagcggctctccgccacatggagccacccgacgagctcctccaacggcattgtcttgaggtcgcacaacatctcgatggatgccgcgacttgattgaacttcggtggaacgacgcgtacctcctccacctcctcgccgagctcgcgcatctccgagacgagggagcttagtctcatggcaaagtcgtccaccttctcaccatccttgaacttgatattctcaaagaccttgagcagcctttcggcgttggcctcccgaacacgtgcatctcccatgcgcatgcttctcacagccacccacgcctcctttgcgctcttcttcacagcaatccccgccttcatctccggtgacattgcgcgcaggatggcagccaacgccctccaatccttggcacgctccctgcacacggcctctaccgcatcccatagctccatcaccttcaac

SEQ ID NO: 51196 - DNA, 602 bp, Zea Mays
ggcctataccgaattacttaacatggaaagggatggcgggttgataagtcaaaagggagagggttcttctacaaaatcaccacgccgaagggatatcctgtgatctaagccgttggatctaaaatcgatggcgcagattagacacaacataaaacgaactggtacgcgctcgcgggcacaggatccttgatctacgatcagtatctatcaggacgcgatccaatatggaccatctgatccgcccaacggccacgattcattgaagtgaagggggtaagggcgatccgattccagccgttgtttcgcagatcaacggtcagatggtcatcaccttcaccgagcttcagtacgcccacgcgcactacaccgcggcggcggccatcgtcggaccatcaccaagcgcgatacggtggccaaaacccaatcggcgacaggtacacgtagtacggaatgtggcgaacgtgatcggagctacatacccgaggaagagcgacaatgatcagtgcccacggagcagggcggctacgcggcggaaggtgaaggacgatgagaaactcacgtcgtcgtggggcctcgcgcccccggatttctccccgagcaca

SEQ ID NO: 51197 - DNA, 715 bp, Zea Mays
tgattaaccacttttcctcgcgtgtttatccctctaatctcatgacatatgttggggaacgcctagaaacgtgtccagacctcccccttatatatatatgaaggggtacgaccgattgtgtggatcaacaatcgaatcaaatcaatatatcttttgtttcctttacttgtttccctaggagtagaaagtaacatagccttcttcacctctcttctactctacgtcatctggaggcatcttagatggcctgccgatcctaagacagaccctaggatctctcctccctgatggggtcccttccggggggcgatatacaggtgccattgtgaacgttgccacactacgcacacgcagactgtccagccaccaagcgtgaaccgtcctgatcagcataggaaaccccactcctacttctaggttacggaccgtccgaccctaggaccaacacactttttggcgacttcgcttgggataaggcagttagatccattgaatcgacccctaatgaccagtcgtatggaccactccaatatttcccctagtaatatcatagagccaactatggaggcactttcagctaatgaacaacaggaattcgaggagcacatggagcaactgatcaaggcggccacgacgaattacttggccaatttcaaggtgggcaggaaccagaaagtcgttcgtatatgggagactaacttggcgtcaatccgac

SEQ ID NO: 51198 - DNA, 410 bp, Zea Mays
ggactaaccaagtgctggaggatatgttaagagcttgtgctcttaaacatggaggaagttgggataagagcttaccatatgcggagttctcgtacaataatagctaccaggccagtttgaagatgtcaccgtttgaggctttatatggcaggaaatgcaggactcctctatattgggatcagactagagaaagacagttctttgggcctgaacttatacaagaggcagaagaacaagtgcgaatgataagagagaatttgagaattgcacaatcaagacaaaagagctatgctgataaccggagaagactactggagtttaaggagggtgatcacgtgtatttgaaggtgtcaccgatccggggtatgaggagatttaaagttaaaggaaagttgtcccctcgctttatt

SEQ ID NO: 51199 - DNA, 663 bp, Zea Mays
ctgagcggatccaatctactaccaaaccgccagtggctgttttgtcatcgttcgacggatctgttttggcacgtgtgccgctgtcgcagaggatcaacaaggcagatttcaaccaagatcctatggttccgacagacaagttctaccagattgaactgaagaatatagttctagatcaacgattggaatcctccgctagagtcacaaggttcagaaaatcaagtcaagatcaatctattactctattggcaagaagatcaatctggctgcacccgaacttgccgtagtaagagggcacactagtcagcagtcgttcatattattccgggatagactcagaagcaaaaatgccctcgaagttgtttagataaaaagcgagaaatctgctatgacctgtggctggagggaatgtcaccagctcttcattgtgtagcggcataaggaaatttgagcaggcgcatgcatatatgtgcgcacacaaaagagaagaaaaagcaagattttactccgctaattacgctgtgtcgggtggccaactcaactaaacagcgcatacttcgtcacgaagggtcaatttctattcggcgtgcagatcctacatagtccataccagttgtccaatggctagactactccaaacagctaagtcattttaattatgca

SEQ ID NO: 51200 - DNA, 501 bp, Zea Mays
gtctgaagtaccatagcaaagactttggaacctcatcgactgctcagagaaaccaaagagctcccaaatccaagcagtatgaatagtgacatcctcacgctcaaagcgaaacctaatccactgatggtcgggatcaatccaaacagtagcatagaatattctgacccgcttctctatgtatcaaccaccaaaagtcagcagtgagtacagacctagtagataggtgatatggccctcaacctcttaaccaactgttgaacacaaagctgtcaggtctagtcgatggtgagccctcaaggcaatctgagctatcagctgagcacggtagaaagactcctgggtccgagtactgaagagaggagcgactgtaggatttctctgagctggaaaccaggactccactggcacgtgtttgaaatggcaaactctagtggaagtggccctctgaaggtcaaaaagtcggggatcctcagcaattggtcgaacctctttctcgtcgcg

SEQ ID NO: 51201 - DNA, 354 bp, Zea Mays
gctgctttggtggggaagaagagtggtaaccgcacatccataaaccaacgtccagattagaactaggacgtactgcttcacggattgatcctaggccgtttatcacagatcaaatggggtacattagaactctttttattaaaatcctaccatcgaacttagatccgatggtcagcccttcgtaccgattcacagtatgttatgggacatcgattgttcattgggcggctcaggtgacttagcgggattagatctaatcccgattgtaggttcgtgatctaacgatcaaggatcgggaataccccttcggctgaagccttttgcataagagcccttggatttttaggaaaccaa

SEQ ID NO: 51202 - DNA, 870 bp, Zea Mays
cgaagctattatcaaagtagggatttttatatgggccatgagaagccaagggttagagccagatgccaagtgtttctacaaatatccacgagttaccatatcagacgaaagcaactgggaaagagcaataccacaacaattttggttactacagcttcataccccacgctgaggccagttatcctgtgccaacatttcggaaaaagtggccaggttcttggatgcaagaatagttttatgtgaaggttgacctgagtgagagggaagatataaaaggggttattcagcgccctatatggtctcgcttcggcatcaggagtccggtcattgcgcttggaaacaacgtgcaagcgtgccaggcagcttttaatacagtgtgtacttacatcggcacaagagacttggtccaagagcatattgcttacagagtgtggctacttgcacacggatgggaaatgccaaaggaggctaccgctggatccagtcaaaatagtttagcctatcttaagtaaacctttcgatacaggagccagtttgatgaaccgaatgatgattggttagatgccatagaggtgactagtgatgacctgcttggagcatattcaaaggtcgaagatgaagatatgacaattgccttcgaagctcggggcaaaaagagattgaatagggtgtttgaagctatcgggtttgtgtacccagactactactatcccacgcaaaagcaagggaagaaaacgaaagctgctacctcgacaacttctagtgtgtcgaggtcgaaaacggttaaagttctgacacaccgacccaggcgtatcgagacggccgacatgccgaagctaagtgaaatggttgctccggtcacagaaccag

SEQ ID NO: 51203 - DNA, 363 bp, Zea Mays
tgaatcctcctccgaatcatccgcctgctgggacagatgtcgtggttgctgctcagatgcaactactgcagtagacggctaacaccatggcggagatgcaagctcagatctaccaagatcgacaatagccaccacctccaccacgaccagcaccagatccacttcagacagatgattggttgaagacagtggacaaaatgcttaacattgctcagtgcatcgatagggagaaggtcctctatgcatcgggtcgcctcactagccccgctgcagactggtgggattcttattgtgctgcagacaccgctattgacaccattatagcagagttttccactaattttaggaattatcatattcctg

SEQ ID NO: 51204 - DNA, 444 bp, Zea Mays
aaatatttctagacacagagaatagtcgtgcaggactgcgggttggtttctcagaagcccgagggctcataagcaaaacgccaaggctgaaggggtatggacagatcctagccgttggattagatgcgaacgagccagattagatcagcgcggctgcgaatcggtatgccaccatggcccctggatcccgatccgacgatcgtagtttaatgaaacctagatcagatctccatcgcacgattccctcgcaacgacccagattcgctcacgtgaaagggtatcccactgtctaatctcagccgttcagagatcaatcaacggccgaagtgtttctcccccaaccgaaacagacgacggcggcgctccgcccgtggtggcgccatcaccggcgagaatcaccaacggcccgaatgaccaaatccgaagcccaggacgctgctacac

SEQ ID NO: 51205 - DNA, 543 bp, Zea Mays
aaaaagagagattccctttataagtgtcctaaggatttggattccttccatgacaccttattcttttaagaacttggaatatctctctatatctagaacatggcaataataggataattagtgtaaagcatgccatgaggtttttacaataatttcaagcatgtagattgccatagtatagaaatgatgaatatgcaatctaccatatgagaggaatttcttcaaagaatggtgacataatttacaaacatttgaagtgcttcctttttctatgcgactccacaagacacataagaaatagtaatttaagatacttgcacttaaaagcataaatgttaccatcctttggctttcctctatgttgtaggccttgatttttccgcacaggataattctttatttcctacaacatcaatatcttcccccgagatgatatgagttttagacataacaattcaaaataactttgggtcaatcttggatatatagatcattgaagattgatagcttgagttaataaaaattgaattgactctctcaagc

SEQ ID NO: 51206 - DNA, 605 bp, Zea Mays
cgcacgacgtgttggttagcgacccttgcacccttgaatggtaataccgggcctgtcactcttagtggcatggctgcaagattggtagagatggagcatgtcagaaaaattggattcaggcctaccactcttcctggtctgttagttgtgactgaaaaacagactgatgggtagccataagtaagaaaatgcaaacagttacctacgggaatccttcgagcattctgggaggctagttttggaccttcctttgtaggaattggagtggagtgaatggttgtcgtcctgcaagcagcaaatcaagatcaacagtcaagtgtgagcgatttttctatcacaccacaggccaaccgcatcgcctaatagagtttagtgtttcttgggataaatctttcaagaatcactatcagttcaccgtcatatatcaattgacgaatcctattgggtaactaataatacattacccgggttaataaatctcatcaaccaatagatgtcaacgcaaaccattgaaagaaaaaaggagattatgttaccttgggagagaaacatgcttcctgtcaagcatgacatttctccctccattttcctctaagctaacaaac

SEQ ID NO: 51207 - DNA, 653 bp, Zea Mays
ccttcgaaaaacgaaggcccccaacagggttgatgggaggattggcagttaccaaggctccctatttcttcttcttgggtgccttggtgctcctcacaagtacaaagtcaagcacaaattcgcagtcgacaggtgaatttttgaggtgggagtcacaacgaaagcatatttagggttacaagtgcaagcaaaaaggcatgacagatatagcaactgaccgctcaattctagactatgaacctattattatgtcgtaactcggattttcaactggatgagtaaaactaccaagaaccgatggatagaaacacagaaacaagggcaagggaaagcaatcagacaagtcttcaaacacaaacatatatatagggagagtaagttaatttttacataaacgaccaattcattatgaactggaccaaaagatagccacgccacccaactactgccactatatcaagctacctaagcttgtggcgatccgccaccattgccaccgtcgtcgccgtcgttgccaccatcaccgctgccgaccttgccattgccaccactgtcgtttccacccttgccactgccacctctgttttctccgcccttgtcgctgtcgccgccaccgctgatgaccttatcgtccttgcccccctccttgccac

SEQ ID NO: 51208 - DNA, 330 bp, Zea Mays
cagacagttatcagttgtgataagaggacaatcaaattggtgtccccattaggagaggaagtggtgaccgagttagtcctgcctgagccgaagaaaggaagttgttatcagatggctgttgatagaagtgaagcagacccaattgagagtatcaaggttgtgtccgagttcccagacgtgtttccaaaggacttaccaggtatgccaccagagcggaaggttgagtttgctatagaacttcttcctggaaccgccccatctttaagagagcttacagaatatctggaccagagttggttgaacttaagaagcagattgatgagctgtcag

SEQ ID NO: 51209 - DNA, 505 bp, Zea Mays
ctgacacttcgcagaaaggccctcgatcttctatctcttcacaggggaaggtcctcgacaacggcgcgcgttgtggagctccggcgagcaccaagaccggccaaacggaacaagggctggttccaagctttggccgaaaccgaatccatgccccaaccattgattcccctaagttaattgcacaaatggctacccaaatgtccctggccacggacgcagcggaagtaatcaatagaaccgtgtgttcccagtgatctacggcggtttagttcaaactaaagggccaaggagtttgaggagagcttagggatgttagaacaagactagagacaacatgatcggacctgatttgcactgaccacggcgaagtgttcttgcggcttgtttgaaccgatttggggaaattgtaaaattcgcgctcgttggggatcaactgagggtaattcttggtggcggggttcttgactaccctacggagctagtggcgcactcaatttataggcgc

SEQ ID NO: 51210 - DNA, 669 bp, Zea Mays
gttgtcctcatgctctccctgattatccgaacctgctcctctgcttcttgcataattttaggcccaaagaactgtctttcaccagtctgaacccaatacaacagagttctacactttcttccatacaatgcctcaaacggggtcatcttcaaactggcttcataactgttattataggaaaactctacgtagggtacactcttgtcccaactgccaccatgtttaacagcataagctctcaacatatcttctagcacttgattagtcctttcggtttggccatctgtttagggatggtaggttgagctgaagtttagtttcgtgtccatactctcttctaatttctgacaaaactaggaggtgaactaggatcctctgtctgatacgatctttttggcacgccatgcagacacacaatttatgacatgtacaattctgccaatcgagctcccaaataagtggtcttcactgggataaagtgggctactttggttagcctatccataattatccaaatagagtcatacccagcaggagtgcggggtataccaacgatgaaatccaagccaatctattctcacttccatttaggtatctttaatgggtgtagtaatctggctagtctcttatgttcagcttttaccctctagtaaacatcacacactgcta

SEQ ID NO: 51211 - DNA, 540 bp, Zea Mays
cccctttggtgcgcaatgatctccccaggaacaccatttagcaagattctagtggaggaagtagccaacaacccactaacaacatcacaccaaatctgcctgaccccatcttcctcaaaacctcaatgagaaacggccatgacaccgagtcaaaagccttggaaatgtccaacttgaagaggatacgagcttgcctttgctggtggaggtacctagcagttcattgaaccaacatgaaattgtcaagaatgaatcttcttttgataaaagtcgtctgattaggtgaaaccaatgcattcaaatgcacaaccaacctatttgccatcaactttgtcaccagcttggcgaagctatgtatgaggctgatcggacgaaaatccttcacaagggctgcaccatcaatcttcggcaagagggtaatgaaagccgaattgagtagcccaaaatttctgaatttgtaatcccagacacatgagaccgccgccatcacatcaagcttgataacagaccaacaagatttataaaagcgacccatgaaac

SEQ ID NO: 51212 - DNA, 724 bp, Zea Mays
ctttgcaaaactatcttttagtttctttgcacagtccatggatacttcgtagcatttctctctagaaccccaaagttcttcaacattattttccagcctggagcttgtccattcacttatctcttgttttgcctttgcaagttcaaaattttcgctcatttcggcaagttttttccgaaggtcttcgacttcggcttggtgagctctggattgtgcattaagttttgcttcgttgctcttcagcttatctactaaggaaaacaatattttatctttttcaagcgcctcgttcttagtgtaataacttctgcctgaaggttcccaagggctatttggcagctttcgtcttctactttcttttgtacccttaaggccttgcttaggattaagccctacaaaaataaaggattagcacacaataataagaaaagatattaaaagtaatatgcttataaactaaaacatcctcaccttcagactgttataagcaaggttgtctacaaggtcatccttcgacatggcagataggccaagctctagcttagggaatcctatatttctgccatctcccagcaaacagatatttccttgttgtccggaaggcagtacaaaaaattgtctttgtcagtgccattaaataccaaggatccttttgggtactttaaatccctggcatattgcttagcttgaacaatatgttcttcggacaactgttttctcgaag

SEQ ID NO: 51213 - DNA, 857 bp, Zea Mays
ctcatatttttaggatttttctaccattttctataggttttcaaagttctactgaaaaagaaaaggagaaaagttaaacagtgctgggccagaagcagcccatacggcccagcccagagggaaaatcgtgcccgcgcgcgcgccagtggtgactttgcgcggagacccccgcggttttgcatatctagaaccaagttcagcgtactgttgtaacgggtcactgacaaactacaaagaaacccctgaggttctattcctttacaccgcccgatcctcgacggcgagcagcacgacggggctccggcgagcccgcgtaccggccgattcacgcgaggaacggcgtccttcttcatcctaacccagattcaggtccccgtgaacgtttcccctaagttaatttcaggaacggctatctaaatgtttctggccacggtgagcgtgcggatgaactaacaacctacatgttcccggtgattcatgggatcctagctcaattggacgggttggcgagtatcgcagacgtatgtgaatgcttaaacaagggagcagagggaaggagctgacctgaactgagctgaccacggcgggcttggttccgcggtgttcttcgatcgatttgggggtaatcccaaattggggagctgtggggaacgattggagctaagagttggttcactggatgtatgactacctagcggaacgtgctgaggcttcaatttatagagctagtgggcggtggccgcgaatttgaatgaagacgtgcggcggccggaggtagggaagaatacggtggctgtacccgtggcgttcaccgacgcaacggcgcaagaagaatactcctaaggatgccacgctta

SEQ ID NO: 51214 - DNA, 486 bp, Zea Mays
aaatatagtaatattggattcatctttttgttttcaggaaatccctcaattaaaagcaatggataacagaataaagcttttggacctatgtggcacccacactagaggatagcagtcgagtccaacaaaacctttcggctttcagcattggctcagttatacgaaggttcatacagttttggaacttcgaagcccaaataggactgggaagcaaacttaaaccaagagcgcaattaaagaattgcagttatgcaaccatacggttggtaaaaaactgaagacactgaaggggcaatgcttcagctcataacacagagatatgtccctgtattttagagtaacataatttcaaggaacaaagtccacaagaaagatacagacatgtgactaagtgatgtaagagttttgacaagaatcccgtgccatgtcatgcaacaaggaaagcttaacacttacatctcatagccatgccttcctatccagtcc

SEQ ID NO: 51215 - DNA, 418 bp, Zea Mays
gagttatccaatggattaatggcgaggtcgaagccttcgaggagattcttagtgacagaggggatttttgtgcttttgccggggcccaccgggccttgtctattttggggaatgttgattgtgatcatgccaaggttgtggttcagccagattttgtcttctcagccaacgatgttagaaacccttcggccgaagatactgcactaggtgggaagttttattctaaagtatggctgaagggtggctgagaaatagccaatgaagccattagaaaaatgataaagattctcatgacgccttagaagaggctaaaaagttgaagaagctgttgaacgggccagacttataggtatatcctttatagcttaacttcgtaaatttttgtagcttcggtactaacagatatttgtgtttaaat

SEQ ID NO: 51216 - DNA, 1165 bp, Zea Mays
agtcataagtatatgaaatgtgaacaaatacatacacagagagttaagacacaaaactaggtgatttagagaaaaaggggtcaaatggcttgataacgacgaattgtgccataggaggtttgaaatttgaaaagaggcatgaaatgacgtggaattgagtcgatacttcacagataggtatatatgattaaatatgagtgaagtgtgtgcttggtttgaaggagagaacgacattttggcacttggctcagaaacaattgctataaatgagaaacagtggtgtatttagtgtctgggatatcggataggcgtggattttggcgagggagttactggaggtgtcatgtgggtgctgaaaaaactgggatcgatttgagcaattttgagtggtttgggcatttcaccgaacacgtgacgtgcgaggttttgggttttgagtgaaatggctatttgggggtttaaaacctcccaaaaaggagatggacacctgcaggaggattcaagagaggacaagacaagcacccatgcaattgattcacagggaattgcacaaaatctggatttggcacaaaaggtggaaagcacccatgcatagagctccactggtagaacagagaggggagaatggatttgcttaccagagagaggagaggaaggagcactgggtggaggagacccttcgatcaagcaccccaccggtgatcgccggcggcgaggtggggagaggagatcaccagagatgagcagaggcagagagagcagcgagtgaaatgagagcctgggcgctgctcgggcggagaaggctttttaaaaatgggtcatgggcacaccggatagtgtacaatgcctgtccggtgcacaccagacaacgcatagtagctgttcggtgaaccactggacagagcagcacagaactggatctacgcgcgcccaaccggtgcaccggacattgcactgtgcagtttcctgtgcacaccaaactgtccgttgatccagacagagggaattttgaatatttttaagaaattttgaaccaaaccaaatcccaacttataagcacacaaaagaacacttggtgggacaggtattggtaccctcacatattctctcatattttttaaaatactttgccataggctagatagtttttagagaaaatagtcaa

SEQ ID NO: 51217 - DNA, 453 bp, Zea Mays
ttcccggaagcttctgtgtgctaattttatatttgactcaacaaccttgtgatcgaatcggcggctacgattgcgcacatggtttaactgttaacgttgtttttaatttgtccaggtgttaaatgtaagcggaagcttgaggcagaaggtgacgacgaatatcagttaggctaacgccaccccggtaagtcagagttgtctattcacatgcatgcgctggcgatgacaaataatccagcatgtgtgctaattaacctagctagctgattctcagtcgggtgttgactaactagaggcagccaagttggaatgttaagaggtcgtagaggcagatgtggctgtacatggcgagactacctgtacatggacgcgaccggttttgtgttagagtatgttttaacatactcactctgtttttagactataaatgattttaattttattaataatcaa

SEQ ID NO: 51218 - DNA, 407 bp, Zea Mays
tcggaggaagggtcaaacccatctggatctatagtaagtattcttttcttatatttgcgaaaggatgtttttgtcatttgaattcgtgacctcctcgtcacagggcaacagctttaccactgtgtgagtaccccacttcatatttttaaaagaattttaagttttaatagtcccaaaactttgaccaatcatatataaggcataatgagtattatagatgctccatcgcatgcatgattttaataaagaaatgtttcaatctaactaaatgctttatagaatcataccataaatgaaagaaggcaatcaacggcattcaacatccactcatctccatttgaattttcaacgaggttgggatataccttggaaagcaacaacattgcctatttcaagaaaacaaacaa

SEQ ID NO: 51219 - DNA, 370 bp, Zea Mays
aaaaattttcacagctgtcaaaaagatgctcctcgacgaaaaaagggcaggtgggccgacttgttacccgaggcggtctgggcgctaaacacgactgagtgcagggcgaccgggttcacccctttccgccttctatatggatcggaggccatgaccccgcaagaattaaaacatgggtccccgcgaacagttccgtcagccgtccccgacgtggacgagcccacttcgaaggatctcatcgatagagaccgagtcttcgccctacaggctctacataaataccaagcccagacaaaagcatggcgcgaccatgcggtcatcccgagggaattcagcgaaggggaccatgtactcgtccgaacagctcgga

SEQ ID NO: 51220 - DNA, 1063 bp, Zea Mays
taaaattgtggcccatgcccaatctgaattttttactcgatttagaattatggcctagcgcccacttgggtcattgttcgggttgggtcagattggtttttttgtgtgggttgggccaggttgatcggtttggtgtctgtgttcagatctacgtgtctagtgctggcactatacaccacattggacatggaactcaaagaacttataaaatgggtccattatctataacacccaccagacatgtttggtattggcactaaatgccacactttatggagaactcaaagagcttgtaaaatggctctatcaactcttaacactcaccgaacattcaaagagcatgagttttgatacatcagccctaacacgcaccagacatgttcgatggtgtatctagtgtgtgcaccaaacaccagacacacaataatgactagtttagagctgttggaaaatatagctattgggagtgcactgaacatgttcgatgtgggtacccgtggtgcattcgacatatctggtgcccctaaaatatgctctttaagagggtaacgattagatttcttttcagttctatagttagaccttgcgactagtattggcctatatctctaaactccattcatgtatattcacctcttgagagctaagaaacacaatccacttatttgcatcctttgaatcttcatttgggtgagattggataacccctagtgcatcacatatagttcttgtatcttatggcatgcacaagtggacgtctagggttggattgacgctcaacgcatggttgtgtggcggcgtggccgactcggtgcctggcccattcgcgacccagacgtctagctagggcttccattacactccatatatataatgatatttgtcaactagggtgaagcttcgcccggaccgtcccaccatgccttccgtgcgcccgtacaagaccaccacaacaccccctacacagccccaatgttagcccaaatttgcgggaccccaaaaaaggatttgggtttgttttcagcgcctgacctagagatggaaaacctgatagtcacttaga

SEQ ID NO: 51221 - DNA, 882 bp, Zea Mays
gaaggacggcggtccacctcaacgtgtactactaccctgccagtggcagcgccagttgatgtgtctcgcttgctagctcgcagtcgaatgttgggctgtcggccgggtcggtagctcaacttgtttgggcgtaggcggccgcacttggatgcgcgatccgtgagcatgaggacatctcgtgacccggccggccttcgcttttacggaccggctggggactggccggctggctcatggtcctttgacttgcattgcattaaacaaagtctagtactactactctaccagactggcagctgctggagccatggtggtggcccggtgggatgggaggtgatcgaacggccggtgggtcagtgatgattcggtcgtttgttcggttcttgtctgagctgttgccaatcattagcgggcgaacgggagtgttccggcggagattgcgcagcccttttttccagctaatttcccatgcccgtagcggcggggaatagataggactatacagctcatctataatctattgcggggacagccagtgccaggaaatcattctcggaaggatcctgaagccaaccacgagtagaacagcatgtcgacctccttggcatggcagaggagtatcatcacatcggcttatctttcgaggaccgttccttccgatgagatgcggcaggcagaggataagcaaagggggtggggccgcaccagaaactgatctttcgaaccgtacgcacgagacggtcggcatccatccttcccaggatccggatcatgccatccccatatccgcgagacgtcaggcacagcccaaggtcgtctgccgcacgacgacaaacccgcagtgtcggcaaggctggtagtcactctagtacgagtgatcac

SEQ ID NO: 51222 - DNA, 294 bp, Zea Mays
ccagcctccgccccgttctcccatcgtcggcaccccgctccacacccgcccccgcctgacgcctacccctcgtgtgctcggcgactccccctccgcctctgtcctctcgccggccttggcgcctgctctctccgccgtgggtgttagacggaggggtcccgctcgttcaccatgcaggagctcctcggtcaggcaccgccacacgccggattcgagctcctccccacatgtcgcaagatgattcactgtgcactccgccgctctctgtcacgacgttgaaccatccaacctcgc

SEQ ID NO: 51223 - DNA, 408 bp, Zea Mays
gctatatgctcgagtagcccaacttggattccgagaacagagctacgactattagcggaccctggatcggatttggcacaaacatgcaaaaaggtcactcctgggcttaggaggcctagttaaataagtcaaagaaaaaactgaacactttgttgtcatagtgtcacgggaattatctagaccactatataatctaccaatttaaacattgcaaaacccacccaaccaaatcaccccacctacataacctccactgaatctatcaaacaaattgcatctagacttaacacaccatcaaaacaaatgtttcagatcgctggataacccccactcacttagattcaatgaataatattatttgaatcattcccccctcttgtgaccccactggccccccatcgtgccccc

SEQ ID NO: 51224 - DNA, 640 bp, Zea Mays
cctctaaccgttttctcacgcataattttttgttcggtcggaatcggtaaacgggaaagtcgaaaacggataacaaccgataaatttcggtatatcgaaaacagataaatccgagcaaaatagctcgaaattgatcgggaaacgataactgtaatcggaaaagctcacaataaacaaatcctaaccacacagttgttcattcatatccacatacaagtctcattcacaaaagtacacaaaacacaatcttgtccacatataattggtcatacactcatacatatccactcttaaattttaacacacaataacacattagtcttaaaacacgattgttcattcacatccacatacaagtctcaaccacacaaatacacaatacatagtcatgaccgcacataaatgatcatacatgttcactgaagttttaaccacatagtatataagtcttaaacacacgatacataaactagaaatcatgtggcatgttgtctggatcactccatatatcttctatgacatctgaaaccctaaaccctaataggtatagttcttgcctccttggtaattttgtggaccgggaaaatacggttaaaatacggattttcccgagaaatccgaaaacggaaggtaaatatgt

SEQ ID NO: 51225 - DNA, 573 bp, Zea Mays
cggcaaggaatgcccgaatgatctacaagtctgtgatgttgggcaactcgttgcactgcttggagaatcgtcggatgtactagtgcagggtttcattcagcttctgctggtagctccagagatcccacgagtttctggggcacacgtatgtgccctagaatttccccctggaaaccctgaccatgttgtcccagttgtggatttgaacgagttgaaggtgcttgagccaggctcgtgcgacatcagacataaataggggcatgttacgaatgatgagattatgtagtttgtaccttgcaactgacaggccaggcaatagtcggcgagccatagctccagcttcgtttctcccgagtacttgatgatggtagtcggtgcccggaaccgagctaggaacagtgccttgcgtatagcttggctgaagacttgggggcctagaggctcaggtgaagggcttcggtcttccccactatcgtagcgaccatcgcgccgagggtggtagccatgcatggcgtggccgaactttttgcaatttaacccttttttttgaaaaatttcatgtttgggcccctg

SEQ ID NO: 51226 - DNA, 408 bp, Zea Mays
tcaccttcggcaattctgcctctgtcggtgggctcaaaatttttggcatcatcattagtttttccacttctggctctctggccgtatcattcttggctttggctggcccgactataggcaccttcggcactacagtcgattcttcagcgctttgcacggtgggagtagcttgttttgcttcgtcagtcgaagaggtcccttcaccaaattcaggcactacggccggttcaatatatcgcggccggtgggtcagaaccttcattttcttgcccttcggcacaacagtggtgatcgaagcggcaatttttctcttcttcccttgccttcgtaatgggtagtgataatcagggtatacgaagccaattgcatcaaacaccctgttcaatcttttcttgccccgacccccga

SEQ ID NO: 51227 - DNA, 538 bp, Zea Mays
cgcggtgtcatataggaaacacgagaagtcgaaaaggacccctgaagagactattgatgaaagggtacaaaaggctattaatgacgtgatgaacaaaatgaagaaaacagaatgcatatcatttgaactcaagccagtccacatgagtccgcctatagtccctagcagcgtaggatctgtgcaagaattcgtatcgggcaccaagtaccctgtagacgatattgttgaggacaagccttgctttattcatattccaatcaatcgatctgggacaaaaacaaaacaagctgctactggtttggtaaaaccaagacttgttaactacaaggataatcctgtcccgccacactatgttgtggtccaagttctagagatcacagacagtggttgtgaagattgggagatagactttccagttgaggggatcataactttgcaggaggcaatgaacgagttggtcctttggcatcgatgcgacatcaagttgggtgatgagccgatcttaagccgtgtatcgtgtcataagtcaccaacgccg

SEQ ID NO: 51228 - DNA, 326 bp, Zea Mays
gcaaggtaagactcccaccaagactgtgctgctcccctcagctgtcggggaccgtacaacaccttctcacgatcgttgcactgagcagtgtgcaactcacgctccatggtacgcagccaatcttctgcgtccatgggattagcagagtgggcaataacaaggggatggcccctcatgaactctgcccgcttgtctctgggcacttgtggcatctggacttgcactggaggctgaggtgggggtggctgctgctgcacttgctgcatcgctgctaaggtctgaccaattgcctgaactgcctgcgtttgcatcatgaacatctgctc

SEQ ID NO: 51229 - DNA, 315 bp, Zea Mays
gttctaaggtacatgtgacacttaagctctctaaacttaaccttccttgaacatttcgactaacttgttgagatcattccttagtgcccattttccaaggccataggtctctaatccttaaagagagatactctaacctagggtcatgaatcccatttaccgagtcagagcatcacatcacatgtttgtattgaaattttttcctagtggatgcatcctatgtgtatcatacataatgaaatgccaatgcatatgatgtcatgccaaagttttagttctcttaacacaaggggtgttacaggtaccttatgtcgg

SEQ ID NO: 51230 - DNA, 726 bp, Zea Mays
aagcacgtgcaagaaaggagaaaacttttgtctagacttcagttttcaatatcacaaaaatactatagtattcgatggactatggtatataaaattctgttttctaaagaccaaccaaacagttttatatctaaaataccatggtattcgtatatactttagtattttgggtctaaaagaaactatagaattacttttcttccaaatatgccttaagtattttgttagtcgtgctatggaccgatagcttagcccacggactggcaaaacataactcgtaatccctactactaattaagcacctaacgtgggcgctcgggcgcgtccatgcccccgccatgttttcattgccgtgttgcccccaccgtcaagtctcgcacctcgcctccacctagattccaggaatgcgtagaaatctgtccgctaacacctctcctccaatcccggtcgccagccaacccataccaactctcgagctccaatcccggccgccatgcctcgcctcgattccttactctccaatcctggcctccaatcccgaccgcgatcagcgcccgccgccaacacctaccaaaatagagctccaatcccgttcgccctagccgctacatgccatgcgctgcttcgccgctagtgctccaattctcgcccgctgccaacgcctaccaaaatcgacctctattctagattcgccatgtgcacgactgtggaggagctcgtcatcag

SEQ ID NO: 51231 - DNA, 531 bp, Zea Mays
tgtcgatcacagtttgatggttcatgcagggcacggcggaacacaatgaattatacaagtttgggccaccatggggcgtaataccatatattttgtgggtttctggaggttgtattgctctgagtttgacggtttacaagggattgctgaaggtaggaaatgaaggtcctcttgtgacctagcgaggtctaacccttttgtaggggtaccactcagccttatatagccagccaaggagatgtcccaatacagatcaaaacattcatgcgagtctatccactacctgctacaattgcgttgaatcttccggtcgcacgttggcctctcccgcaaagctcgcacccaccttgcatgaggccgagtcatgcaacattgagttggccttattgctcacgcgtgggagtctaagccagcttcagttacctcctgccgaggcccacgatgtgtcccttagagccttattgggggccttctaggtggcctatgaagtgggtttgtgtcttgatgacccaaggggtatctatcccccac

SEQ ID NO: 51232 - DNA, 440 bp, Zea Mays
gtgcactgcaatgcttgctaaggaacatgaacttactcaatggcagacactagttgtttaactattgaagctggaggaaaggtcagttttgttgaacaagttgattcagttggtatgcttgaggaatcctcgttctctgaggggcttatttctaggacctaggaccacgaagttttgagtagcatacatgaagatccagctgattaaatagccaattgtgcttataacaagaaatgaaatgaaatagagaatttaagcatccaacaaagaggccttttgtgtacttaacaaaaaaggggtttcgatactaactgcagaactatgaatattgtccctaacagctcccgcaaactcaatatccagtccaatccaccagaatcgattgctccatttggctgtgtttaacacacccaactgccccagttcatcataaaaaaaat

SEQ ID NO: 51233 - DNA, 420 bp, Zea Mays
gtgggaacgaaggtgccgaagatcagccctggcgaccgagtcatacaatcctcgggagatcaaccatcaaacaaagtcaaaattatgcaatgaagggaaggtacttccacgatatttttattgtgagggctgggggagatagcaatgtccctttgcccgaagctgacgaagtagtcgtttacagaagcttcatgaaagcgggacggttccctttagataaattgttagttgaagttttgaagactttgaaatattccttcatcaactcacccctgaggctattatcagaatggggatttttatatgggccatgaggagccaggggttagaaccaaatgcaagatgtttttgcaatattcacgaactgtcacacgagacgaaggccactggcaaacaacaatatcacaataattttggttg

SEQ ID NO: 51234 - DNA, 404 bp, Zea Mays
tccaatggcggctagggtttactattgggcttcatccttttttggcccatctacagtaagcaatataaaccgcttgcctcccctgccgaaaccctagcgctgccgtaacccaaaccctgcctgcgcccctgcccattgtctgccctctaccgccgtcatttgtccagtgcattcaccggcggctgctccaatacaccggcgccggctctccaggactccaccagcgttgtctccagaccagcaccggtgagcaatgacgaagaggacttgatgactggtgctggtcccttccttctcccccttttctatcttattatcagtatgtctacactctgcggtcagttgttcttgacttcttggttcttaccatcacagcaccagtgcattctgcagtctctagttac

SEQ ID NO: 51235 - DNA, 455 bp, Zea Mays
ttcgaatgggatgttctgaataagtcaagtctggttccaaagtaacatccaccacatccatggttcgatcaggaatccgaaggcatttcttcaactgagatacatggaacacattatgcaccgcagataatgattcaggcagttgaactctgtatgccactagcccacatttctcaagaatgggaaatggaccaatatatcggggtgccaactttccttttaccccgaatcggctaacacccttcatcggtgatactttcaggtatacatgatcctcagcttgaaagaccaaaggtcagcgtcgtttatccgcataatttttctgccaggcttgagcttctttcaagtggtgtcttatccgtcgaactttttcctccgtttcattaaccaagtcaggcctgaaaaaccaccgttctccgggttctgaccaatttaagggtgttcggcatcgtcgc

SEQ ID NO: 51236 - DNA, 566 bp, Zea Mays
ctttacacgacatgtgtaccgtgggttgatttctactaaccctaggggcccgactgtaaaatgtcacggccgaaatggtatggaaaggtatccaccacctgatttggttccgtcgcgccagattagattgactcggctatgaatcggtaagcgcccgctgctattggatctgggatccatggcccagatccgtccacgccaacacacacacgaaccaccgatcccgagatcgacagccaccatttaattggggacgagggggtatgttgatctaatcctagccgcacgatcagatcggatggcccggcgtcatcttcaaccttctgccctccaacacgacggtggattgtacttcacgacggcgcttcgccgccgagcgcggacactgcgatttaatgccccaagacctcatccgaagggtactcgcgtagaggagagtagggcagagagtatggaggtgatcttaccccggattcgggacgatagcggctctgtccacgtggttgtgcggtccacagagatttcccagcgacggtgagaaattccgcctgtacggagccgcctcc

SEQ ID NO: 51237 - DNA, 652 bp, Zea Mays
ttgggctgcatcaggagaccaagaggcccaggaagaagagtgtgaaggtgtttgggcccaattgggtgaattagagtggtgtgttttccttatataaatatatcacagatgtgtgcggatgagtaggaaatgtaataactgaactccatacttgtcctccaagttgaactctatctcctacctattccttgtgttgttcgtccaattcttcttgccgtgttccaagttcctacttcccagccagcagctaacaagtggtatcaaagggcagtcgttcttgcttgttgggatttcactctggatcctccgtcgtgccaccactacaatacccgcttccgccggcagcaagtgatggtgaatccggatactcaaattattttggatgagatcgctcggcgtttcgcagagcaggaagcgaagttagatcgccgcgccaccgatcaggatgcgcgctaggaggcactattttcgggccatacggcggcgcaggatgctcgcgtccgtacccttgagcacgccacgggtgcgcttgaggaatggaagatgggcatcgatggcgtggttgatgatcttcgtctggaggttggcaaaattgccaagcattgtgagagggcgctgctggatcaacccaacctgatgacgggagtacttg

SEQ ID NO: 51238 - DNA, 371 bp, Zea Mays
gtgagagggagggggcggctagggttaaggggggaaactaatgggctcctcaccgccggatcgagatccacggccgaaacttgctctcacgtctgctcccgaccccagcgcacaagtccaacaagtattctactgttttactggtgaatgcttcctaaaaactccaaccccaactacacagatcacgaaagaaaagggaaaaataaatttaacttcttttcagaaaattgggtatcacaggttgcttcctactcagggccccaagtgaagtcctttgtcccccgcaatgttcatagaaatggcaggcttcgctcttccgactgtgaaatgaatctattcggtgcccctaggcttcctttcagtttttgctc

SEQ ID NO: 51239 - DNA, 1102 bp, Zea Mays
catgttggtaagggagcaaattgttatgtgcgtacctttttcggacgatcgaggccctaggaaggcacgaagctaatgccacatgtgcctgtcatccaagtttgggagcctcctactcctagataactaggtgtccgaggcacggagtgttagctccttgaatgccttggtgatggtgttggtgttggtagggtggagaggctatatggtggtctccacccacaccaatccacttttgacggtaatgataaagtcaaaactgtcgaagcgcacgtttgcgcctggaacctaactgacaacgttgtggccgtccacaaccgtgagatggaaataaaagtgtcatgacgtgcaaatagcccctccctagtgcaccaactaacggtgtttcataaccatcagctagtaatggtcgtgctttgcacatctcggtgcggatggtgtgcaaggtggacacaaagatttatactggttcggactgaatgtccctatgccagttgagtaactcgtgttttaccctgcactagtatatagtagggggttacaaacatgtgagcgagggatcgagctcccaagtctcttgtggtttagtgctttatgttgacttgggctacgtgtgagtttatatgttttcctatgtccttgaaccatggtccttccctcccttttgtagaccaagatgaaagaaggatcacattacatgagccaaagtttgagtgaaatgaacaagggttggtgtcataatgtaacttcttgtcctgcatggttttgccggccatgggacgacatggatgactcttccttcttctgtcagggtattgtagccacatcgatgttacattgaagcctattattatgctctatcgtgtcatgttgcaatttatccactgccttttgttaacttcttaatgacggagcggttgaaccggtgttagtcgccacgccatgacaggtggtgctcacatcctgacataccaactcccatgctgccatttagttcgcacgcctcaattagggcctgacatgcaagttcccacgtctatagtggccatcgtagcatgatccctacaatttcgggcatgtgtggtcgggcgaagcatccgac

SEQ ID NO: 51240 - DNA, 584 bp, Zea Mays
acatttgattcaagaaagaagaaattcttttcaagcaaaagaaagcccatttctgaaatggattgctacaactgtggagagcttggtcatcttgctcatcaatgtaacaagcccaagaagaacaagttcaagggcaagaaagaatatgacaacgatgatgagaaaaaggaaaagagattcttcaagaggaaggatgggaagcacaagaggttccacaaaaagaaaaatggaaagacatatattgttggtgactagctcactgacattgagtcatcaagtggatctttttcaagtgaagaagaaaatgatgaaaaagttgccgccatcgccgaggacttctcttcaccaccaccatcgccatcatcgacttctcacctatgcctcatggctagaggtgaacggaagggacaaatgataatgatattactgatgatagtgatagtgatagtgatgatgaatttgcttcaccttcctatgatgaactagctgacttgctaaaagaatacactcaaatcattagaaagtcaaaagctaaatgtgatacgttgaaaaataaaaatgaatctttgaatgccaaatatgac

SEQ ID NO: 51241 - DNA, 609 bp, Zea Mays
cacgtgtgagattttttatcaaaaaataaaataaagcttccttagccatcaaaaaaggtccctcattccttctaccgtaagtaagccaccagcccccaatttcctttaaatcccctcacgcccaacctttctatgttgtttccccacgctcatctcttctacctcaagcccctcctccgccatggctggcctccctgtctccttcccccacgacaacagcaggtcactagccacctccggcctcctccccaagcacatgtagtagccgctcacctccctacttcctcatgttagcgcccactggcaccaaccggatgaggggaaggggatcagagaaaggaggcgctgaggacaaggaactggaggaggagatacaggaatgttgattgtatttcttttcttgtctcgcttttccttaatacaaagtcttatatccccgcaacacacacccaaccctgaattacatattgacccactcagggcccatgattctggtattgggcttcggcacacgtttgggccttgcttccttgccgtgtccagattccttctcctccatggctccagtgttagtttgcttcatctgttgagctggagtgctgacatctc

SEQ ID NO: 51242 - DNA, 306 bp, Zea Mays
ggtgtcaacctaccatacatattatcccaaacaacatcttggatgaataagacatagcaatgaaagaggggtcaacttaacatcctgaaagttcccttttgaggggaacacagatctggatgttgcctagagggggcgaataggcgaataaaaattaatagcaaaaacttagaacatcttactctactcgaagcagtgtatgcagcggaatgtagtcgagtcgagtagatcgcagcagagtagtagtccctgcatcacaatcgctagcacttcataaacgtcttatactaagatgagagcagaagt

SEQ ID NO: 51243 - DNA, 796 bp, Zea Mays
gcagccccggccttcaatttatagagggcttaggcggtggcgcacaatttggtcgagcagtgctggcggccggagatagggaataacacggtggctgtaaccgtggcagtcaccggtgtaacgggcaaggagaatactcctaagggtgccacgcttactaccacgtagtaacaagcttcggcgtggcgcaaccgaggtcaccggcgcttccacggcgtctccggtagtccggccacgtcgcaacgactataatcacggcgataaactcaaattcgcgatcctatccattcccaacaaccttgcttactctcttaagcaaagttattcacctaagatagatctacatagttgatgtggtaacctagggcaaattctcaataatttggaagatatagagctccaaagttgagctaatatcactgaaaatcagacttaatcatttgagaaaaagtgtggctttttgcatataagcccaaaacttagggtttagactgcaaatccacctatttgtgaaccataatacttaagatgctttattaacatggtttttgcactttagcccaaaagtggattaattttgcacttaaccccctagggtttggatttagggttttcaagggtccttttcagggtttttggtatctcagggatgtaaatgtaacttagacctatccttagtaatatttatgactatttcacttaatctttggggttttctctatttagtccctgttttgcccttctaatccccatttagggttaagtaccctacactagggtcttatttgcaaaatgc

SEQ ID NO: 51244 - DNA, 520 bp, Zea Mays
ttaaaatccaaacatgcgaaggaaatgataaatacatcaaataggaaacaaaaaaataaaaagaagaaaaatgcaagccgtgtgggcctaaacccccatggtgctggcccaaaacctttcttccccttgctgaaatcggcccacaaactccacctgagatgcacgatgtggccggaatagtaagatttgtttattagccggggtgatgtcacgctgacgctaggaatgacatcacctgcagtgttgttccgctcgctgacccgcgcgtcggtgccgtgattctcgggaaagtgctccatgaatctctctggatggttgggatccgaccgcgccttggggctatataacctgggctcccctcaatcgatcaacagaagaacacccgcgtcgtgtgccagggcgatacgcagagaaagggagagaggaccagtgaggaagtagatgtgtcgtagcacggccaggatctcgcggactgcctcgtgcaggactccatgggcctgctgcggacaccgccgcagtt

SEQ ID NO: 51245 - DNA, 760 bp, Zea Mays
cttgagcaatgttcttgatgtacttagagtgcttctccatcatctcagggcttaggaatttcccaagcacctcctccaccatcatcttcttgtatctagatattttcatgaattagtgtaactgaagtagcatttatcatcgtgaaagtctggagcatcaatttgaccacttaatggtttgtttacttcttgctcttgtaattgtggatcttgttgatcatatcgttgagtcggttgtacatttcttgcaggctctctaccttaatcatggcaaacctcccaagctctccttcgaggagctccaccttagtaatcttggtgatcgtgtcaccttcatgtgcgaccttaagggtgtcccaaatgtccttcatgctctctaaatcgttcaccttgttgtactcctccctagacaaagaagaaagtaataccgtattgacttgagcgttgtggtggataattggttctgcttccaacgaattgtagtccccatcgtcgctatctggtatctccatccctacttcaaaaacatgtcatatgtttgggtggagtgagtataaatgccctctcatactatggctctaccaagaatagtcttcaccatcaaaatgtggtggttttccaagtgaaaccgaaagtataggatgggtagtatttggaggaatacaagagtaattgaaagacatgagagagtagtttgttttaactgtctttcttttgtgccgctttttatagagggacccattgctacgtaagcataagc

SEQ ID NO: 51246 - DNA, 442 bp, Zea Mays
ccgtgttgttaggagtgcattgcacctgtccgtagtgattcagagtagcgtaacgccgagttgggggaactcgccggacttctcagccgtagaagcggcggcgctgccatcgcggggtaggaggggaagggtgtatcattcgaccgttagatggccgctgattcacggtgttgatcgggtacgtcggttttgaatcgaacgctcgtgcttcgatcgggattcgtaaaatactggccgctgatctttgatctgacgattgcaatcgcataccggttcgcagttacgccgatctaatcaggaacgttcatccgcgatctatcggccgaaactaaaccatactgtttcgacccccactttgcagaaagacccccgaagaaatcactaaacaactcgccgtccacatacattgttcactgagtctaggattttatgcgcgcttgcc

SEQ ID NO: 51247 - DNA, 686 bp, Zea Mays
gcctcctcactagcgtgctgctaagaagttcaaggatcggtggtttacgagtattcgaaaggtcaccctcctcaacaacatctacaatattcggtctgaccaagtggatcatataacgcacaactgctccaagcgacaaagggtagctttcatagcaggcacggtaaagctggattaatgttggagcacatgcgacgtgcactttgtcatcaaccaaagtggtgcacacgacacgatgactccgactccgggaataggagcaaatgatctcgcctcaatgtggagggcggttatagttccacatcctccaataatattgaaccagcacgccctattggtcgttatagggcaagagcgtaaccccctagatttgcccttgaattcgatccaaccaaggtagctacaagtgggagttgatcaaggtcaccacaacacttatgttctatagattgtcttggactcctctggtgctgtaatttgtaatcttatgtgtcatctatgtatatctatgcatgattagtaagaggatgtagagtattacatataatgcaatctaaacctctataaaaatctcggtgtgttaagctcttgctgtcatgatctcattctcagacatattggtgttaggactcgctctgtttcctggctatcatttctctgatactcttggtactatgttgtctttg

SEQ ID NO: 51248 - DNA, 522 bp, Zea Mays
gaattttaatatttttgtgcagagaaaaccagtcccattctaggcctcaattttttagactgtaatatatacaccagtgagaagccactgtaatgtttacatattttttgtaaatttttaaatcagagttgtagttcaaatccagtccgaaaagcataaataaaaaaggaaaaaagataattagtcaaagtgatgaatcttacccataataatttcagcaaggaccttgataaaatttccactaagacactgaagtcagtggagtaccaaaataatctaaccacctaaacttgactgtacctgactctaaatgactaagtataccactaaaacctccaatagaagggtttagctttatatcaataacttaatcatttcaccatgccatatcattactacattgcatgtcatggcatacatatatcttattcattgcatttattagagtgcaacctcgctgacggagagtacgtgctcattcccaagcaaggagttgtctaagaagaagtccaggagccagct

SEQ ID NO: 51249 - DNA, 605 bp, Zea Mays
ccaacaatctttttaatattatgttgacttgttttcaactatgtatagcaattgggaacaagtaaccaacattggcacccacctccgttacgttgaactcattaacgaccaccttcatcatgccgccgaagaagacaacagcgctagaggttgttcttgctcctctggacaccaaccaagactgagttcttttaagagaagctcgacgccaaaaatggaaggccgctagcccaaccccacaggatgaggagctagaccaagaaatcaataaccttgaagccatacaccagtaggtggaaaagagaagagaaaaaattcttcgattatctgagctgcaaaagaagattggtgaagcagctgaagagatgcgacacattgcacatgatactgagcatcaagagtatcaacaacaccagagagatctttgacaggaaggacccaaccacgaaaatatgtggtatgaagcttttaaccatgacaatattgcttttgatgaagcctctcctttagctacagagctgcaggcagtatcatggccaccttcatacaatccaccttaacttcccatgtatgatggtcactcagacctaaagcagttcctcatg

SEQ ID NO: 51250 - DNA, 471 bp, Zea Mays
gcccccgccaaccatgaaagctcaagctccatccagcaacactattcttccttgaatctggcttacatcacactcaaaacacagtgcgcgagtgtatgcgcatttgtcttccaggttgaaataaaaaggtagttcgatcataggtttggatcttggagctggtccacctccatcatcatcagagctgctacggctgctacagtatacatgacatgtagcctcctacttggccatcagggacgacaaaatgagggggccatggtaggtgctcctacctccgggggttggtggtcgacatgctgccaatacaaacaatgcaatagccaataggtttgctttgcttctccagcttccaaaactcgtcctgcactcgtgcctgggaaacgaaccatgcgacgccagttcagtcttaagatcattcagaattagcatacggtcaacgggttcatgacgtttcaaggacgatgacaa

SEQ ID NO: 51251 - DNA, 693 bp, Zea Mays
ggtaatacgccaccgctgctctgctctaatgggcgaggtgggcgctggttcgtctgctactagggttggctgttttggtgggctaggccgtgagaattatgcactgggccgatagaagagctcttcacgaagggtcaaggagatggagacattgggatattcccatgttggttatggtcgagctgcgggagcggagaccaccccacgaccaaatggcgaagttgtggtcttcgaaagcttatttgctgccagacttcgcctgtcgtgtcatcagtttctacttggtgtgcttgagaagtttaaggttcagattcattagttgacgccgaataccatggtggtcctaagcaagtatgtttgggcaaggaccaccttcgatggggctgcgttagttgaggtctttgctaagaattactacttgcactagaagaagaggtctataggtggggttgttgaccagttcaggagctacacttttacctcgaagacagggaagaccaaagagaaggtagtggagttagccctcggcctcggcattactgcttggacggagaattggttttatgtgtgattgtcctaagggcgaggactggcctcagcccaatgttatgtctccatttcaggtcgaggcctttccctgttatgctgttgctaaaagagatcatgacaatcgggccttcggttttgctgcaa

SEQ ID NO: 51252 - DNA, 467 bp, Zea Mays
gatttgtgacacttggacaggagaacatggtgtgtagattaagaaaaatccttatatgtctcaagcaggcaccaaagcaatgtcataagttcgataaaactttgacatcagtaggatttgtggtaaacaaagctgacacttgtgtgtactatcagtttgttggtggtaagggagtaatattgtgcttgtatgtggatgacatactaatcttttgtactagtattgatgtgataaatgatgtgaaattatttttatctcaaaattttgatatgaaggatttgggataggcagatgttaaactaaacataaaactgattaagggtgagaatgggattattctgaaacaatctcattgtgtggagaacattctgaaccgctttgggttttctgaatctaaaatttcttttacaccttttaatcctagtctaaagcttcaccagaacaaaggataagaaattaatcagtgg

SEQ ID NO: 51253 - DNA, 764 bp, Zea Mays
gtttgaatgggtacgtaattgggtgcatgtaacacgggaactgtagtcgtcctaaagacactgttgtacaaaatattcctaagatgtggcagataaccaagggtaagtccataatttatggatctaccctttgattatcctataaatacccttgtccgaatgggatgagaaccattgtttcacatttgttgtccctcttgtttggatccccggtgcaagatctcaacacttgtttatatatagggcaggtataacgggagccctgggcttcggatattaaagagagcccgagtcggttacggggtctggaccgctgaaccaagcacgcgtgagtataatggagacgagatagagagcatgcaggacagacggcgccgtgacgcggttggttaatggctaggcggtaaacatatggtagtgggcggaattatagggattagattccacatgcaaacgtgcttactctgatacgtgggcgcggaatttatggatcttgcatggggtataatggcaagagttaaagataatatcgaataagatgttgaaagatatggcataaaacagatacgctataaatgttgcatatatagtatataccgtttggcgtaaaacattgagtcattgtgcgtaagtagtgtgttagggatatttgtattacatgtacattgctataatatcggtacgatttcggaaataatggaaataccctggaaacatggatgcggttacttgtttagtatagcatccgtgattgaaataatgga

SEQ ID NO: 51254 - DNA, 297 bp, Zea Mays
gggtgcaaaagatgcaatgggtgtaaaagtagtagaagaggcaatagggaggatccgtgaaactatcgccttttggtcagccacacccaaaagacatgaacgatttgaaagggttgtttcacaagaaggcattaaatatgataaaaatagctcttgatgttaaaacaagatggaattctatgtacctaatgcttaatgttgcactaaattacgtacatgtgtttgatcgccttgcgaagaaagaaaaattatgtttttcttttcgacctacagaccaagattggtgcaactgatggt

SEQ ID NO: 51255 - DNA, 431 bp, Zea Mays
gtaaacgagaagcaagctttcagggctcatacacaatgcaagtgacaatacagatcattgaaacctcatgaaagcagcaccttcacttcactgaggcatgaagcaagttgtgcaaacttttgttatgttgacagggaacacgcttcaggcatgcagccaacggcccaagacactgctccaaatgtatttccaaaatggtaatttgccagcttgggcaaaaccagcgtacgcaatattatcagaacaaatatatgttggcacgatggcatcagaagggtaagcaggtagttgggctgcatgcagcaaacaaacgtccgcgttccacacctgagattctgagaccagcatcttgtccacttgccatgtttcaggggttacctgaactaccgatctgtgatgtcagtgctcacatttaatatcgccatggaatc

SEQ ID NO: 51256 - DNA, 364 bp, Zea Mays
cccggatgcgttgagtgcagtaggagaagacgactgtgcgagggtgagaattgcggcggagtgaagcaacctataatggcgatgaagaggagcgagggcgcgaggttgctcaggcaagttagctttgggttgatgttcgggaaaggataacaatccttccaagtctctgtgaccaggtataacaaatcatggggtgactgcttcgttctcccggaagcaaagcaaagcaaagcattgctttgcttgagaaggtcaacttggcaccttgcgacagcatgatatttatacctgaagttgcccagtttgaccaaatggctcaaagttccagaacgtacgtgtctaattcaaattgtaaaggtaaaac

SEQ ID NO: 51257 - DNA, 451 bp, Zea Mays
gtaactttcaaagcatagggtttttgccctaggtcaccacaccaaatttgtaaaccaatcataggagaacaactttgtttaaggattcaagccatgatcctatgagaatattggagataattaaacctgaagattggctgtcaggctgattcagtcagaagttcagaagttcagtgcaacagagctaactttggacttgaattaaaccttgatccagtgctcaaataggtttaatccctatagtcgatttgtagctggtacatagaactacaactttgatgcagagacttagacttgttgccacatgaaattggcaggaaaaccccctgcaaatcgctctgtcaaactgtctgaaccaagctcgccatggtacagtagagctcaactgaagaagatcacgattcacccctcctgcccatcgccggtgaccgtcgccgtcgattaccgctcg

SEQ ID NO: 51258 - DNA, 325 bp, Zea Mays
agatgagaccctctgattgttcctcaataggtttcaaacaatgaggaactgcatccctgaagtcgctgaagcggccataattgaagacttctactggggttccaacgactcggccttcgtccgggccatactccagaaagcgccagccacctccgaacaattgttccaggaggcaaacatctacatcaccacggatgaatgggcccaggacctcatcaggggcacaaaatccgcgccacccgtgccatggcaggatgcgaaccagcagccagacatgcgctgggagaagaggcctcacgaggaggtgcacaccggtggccacctg

SEQ ID NO: 51259 - DNA, 733 bp, Zea Mays
aaggtgcgtgtagttgcaaaggagatacaacgcctcccagttcgttgttggctctaccgtcgcagggaagaatcaccttgcactaaccacgcttatgcaagtaaccgtcgcagagaataaatttgctaagccgtgcagaacaatttagataccagggagcactaggaaacactcaccttcagctatgtatccttagtaatcctgttgtggcccacggcttcaatggtgtatggcgtatggctcgataccgtgtccgcggcttcaatttacatacaagttatagatgattaccgcgtccgcggtccatgaatggcagtggatgctcaaaaagaaagggaggcgaggtgcaaaagtaaatgcagaagtaaaaaatgttgaaattgatacagatacggtcaatatgtaatattgtctcttagtgtccgaagctaatcatggtgcatatagataatgatgtgtggatccctcgcatgacttcaggatctgcggacacaagattcagaacaaaagaaacacacactgcttgtaaaatacatcaccagcttgtaaaacctaaagaacatcctaaactctacggcggatgatccaaagcacgtgtatttggaaaatattatattgccacaacatcagattatccacattaaaaaaagacaaggctgcaacttgagagttagatttagtgcccctatatgccttactcatgcaaacaacgaactttagatttagatctcga

SEQ ID NO: 51260 - DNA, 359 bp, Zea Mays
gcatcggtcatctcgcgcttctgcatcgactcagggtttgtttaggagcaaagggagaattgagggagatagaatccttgagggatggtttgggagcctaattcctaggagggaatctagctatttcccgtggacacaacccacgtggagatggacctcgcggaaaaaatttggcccatttggaagatagctcgccggtccagctagcgccctcctcgatggatccagccaatccacccaaggaacactccctcaacaccagaggctgggcaagtttcctatccagactgcgagcgagggagaggcgacatgagctccatcgtctgtaccgccagcgttcgctccgctatcgtctgctc

SEQ ID NO: 51261 - DNA, 588 bp, Zea Mays
aattgatcaggtcaatactgacctgaaaaagagaaattgttttatgagaggcctcaatgaccggcttcaaagaaagatggccacctgccttgatctctcctacagcagggctatcagcacagtgctggtagttgaagcaatgaacataggcccagggaagtcgaagggctgcggaggtgacaggtccaaccaggggcctgaaaagcgacaaaggttggtaatctgacctttcaatcaaaaccgttcttcgcctcgtccaccctcctagataccccttcaaacaacctgttttcatccgccctaccactgcccccacttcaacaactcagccgagtgcccctggtgctcgtttcctcgccctcctgagttcttcaaccggctgcttcaattgtgggaagtctggacatttcatcaaagactgcccatatccgatgcagaacaagtccaataataagcagaaccctaggagttcaagccaaggcaagggaaacacaacaaataattcagcgggcaagaatataaagaagactgggcgaatatactacacacaagtggccactacaccggagggagagccggttatgatgg

SEQ ID NO: 51262 - DNA, 604 bp, Zea Mays
gggattgctagtcgtagtacaacctccgccgaggaattgcacctctgcgtggccaggactgctgccgccataatcaaaggtgaatacccctcacctcgttcgtctagttgtgcgcagcgagtagtgcgtgtccgtagtagcggcggggcattcctgtggccggatgaccttgccggagatgttatccgctatagcataacgccgcctcggggtaacgtatgggagcacgtcgaggacgatggccgctggccgttggctggccaaggtacggccgtgatctgatccgcgaacaacccatcgttcgaagaaaaccctaaccgtagatctgtgatcccacgactcggattaaacctggtctcattaaatcgtagacgtcggagttggatccagtggcctagattgcgtaccgattcatgaaaatctagattaaactgagccgccagtttgtaatcggatggctccaattaccatataccccatcgctgggacatttttgcgttagagtccctactcaatgtaaaattcaacccaccatcatgtcagttgttcactaagtcttaggaattttaccccgagacccctacgcttcacagtaattgacgcc

SEQ ID NO: 51263 - DNA, 401 bp, Zea Mays
ctttcaggctgtttgaagtctgaatttggattgccagtgggtttgagcagactttgagctcaattctaagcatgatctagtaagaatttgttttggaatactataacaaagatgaagatggtatgttagactaccactttgctatagagccttggattggttgccaagcgaatttaggagaaaatccagcttcaggtcgctctgtcaggtcgactgaagatgaatgccattttacagtgatctgaataagatcagatcgacagctcaattcttcgccaccgatgaccgccgcgcacagattcgcttttttggccgtcgtgattcgtgctgaccgattggataatgctcaaggtcacgtaaatatcgtcgtcgtggataactccggccagtaaacaattccg

SEQ ID NO: 51264 - DNA, 708 bp, Zea Mays
ctactcaacactgaattaatcaatgtgagcctacccccattcgaaagatgctttcctttccaactgctaagtcttttttcgaatctttcttccacccttttcaagtctgcatttcttagctttctataatgaatttggatacctagatacttcaacggaaactccccttcttggcacccaaataggtctatgtaatggtccacaacttgttgagcttgaccaaaacaaaacaactcattttatgaaagtttatctttaaccctgaggcttgctcaaacgcacataacaagagcttcatgtttcgagctttgtccaggtcgtggtccataaataaaatcgtatcatcagcatattgaagttttgaaataccctaccagatgtggtactactccaacaatttgtctatctgctttggctctatgtatcaaaatagctagcatgtcagccacaaggttgaaaagcaatggagatagggtatcaccctgccgaagaccttttcttgtttggaaataatacccaacctcatcattaacatttattgcgacactccccccctgtaacaaaagatttcatccaacttatccatttagatgaaaaacctttcattctcagagtttgaaacaggaaaggtcatttaaccttgtcataagccttctcaaaatctatcttcaagatgactccactttgtttctttcgatggagttcatg

SEQ ID NO: 51265 - DNA, 552 bp, Zea Mays
cggaggtgttggagagggagaagcactggaaccaccttctttgttatcatgtgagtgaggaggcacaggggaggcagtggtggtataccatgatcatcatcatcagtggaatctgaagaggtatcaactgcaccaaaaggaatcaggcttcgatcctcaatttgcttgattgcctcatcctcaacctgacgctcgaaggctaaaggatcctccaaacgtctatccaaggcacgagctcatgtatgagtctcataggtgagggacggtagatcctaacaatagacgtgagtgaccaagaactgtctagaaccgaggaggctagatcagctacacaaatatgtgacaaaggtcgtgggcatatggcagctattgatgagcacgaagatcgtccaatacggtgtcccgtatctcacaaatcagaaaatccataacgtctaacacgtagtgaaaaacaaaaacaactaggagccagagctgaatatgagtggtggcctctctatatcccatgataggtaaaaggatctgtctcattaaagcatgcagaaactttgc

SEQ ID NO: 51266 - DNA, 446 bp, Zea Mays
tgtgaatgtcgcttttgtgaatgtaaatgggtgttgcaaatggaaatgtgaacgtgtgaattgatgcatgtgtgaatgtggatgtatgtattgatattctggatggatctggtgtgtatgaaatctgttattttatgaattgtgggaattaacgaaaacatggagaatattgatctccctggaacttattatttttcgacgacctagttgtggctgtcagacttaatgcataaaaaactgatgacgtgctggtggtcgttggacttaaatggtcgttacttctgacagtcctctaggacctgacggactttaatgcattatgtccaatggctctccgatgaccgtcggacataaggcgagtgaggtctactggatgtcaccggcgccgttacctggttaactgccgacggtggccgtcagaaagtcttattttcgaccatttagaa

SEQ ID NO: 51267 - DNA, 380 bp, Zea Mays
cgtttgaacgagaaatagtgccataggaggtttgaaattcgaattgaggcatgaaatgacggggaattgagccgatacttcacgaataggtttatatgagtaaatatgagtgaagtgtgtgtttggtttgatttgaggcgaagaaaatggaatttgggcactcggctcggaattgatcgctcgaaacggagaattgtgtgaaaatgaagcctgagatatcggattggcatgaaatttggcgaatatgttacgagaggtgttgtgaaggtgcctgaaaaaattgggtttaatcggagcatttttggctggtttggacatttcaccgagcacgtggcatgcggtgaattagggtttcggggaaatggtcaattcaggctgtg

SEQ ID NO: 51268 - DNA, 634 bp, Zea Mays
cgaaggtagagattgacgaggcggccgaagcctgcagaagggcctttggtactgtttgcttttttattggtacgagagatttggtccaagaacatatagctttcagagtatggccacttgtagagagctgggaaatgccgaaggaaaccatcaccaagtctaacgaaggtgaactggtccggctgaagtataccttcagatatggggaaaaattcgatgaaccaaacgatgactggttgaaatgcatcgaagccacaagtgatgaactgcttggatcatactccaaggcagaagataatgctctatctatagccttcggaggtcggggaaaaaagagattgaatagagtttttgatgctatcagttttgtttaccccgattacagctacccgctgcggggacgaagaaagaagagaaaagttgctacttcacccaagattgctgtttcggccaaactagatgatcctgcgccgaagagcaaaaaattgaaagtccttacgcaccggccgcgttacattgaaccggacgcggtgcccgagtttggcggagagagttcttcggctgctgaaccaaaggagccgatccctcctatgcagaaaactgaagaaccggctaacacgatgaaggcaccctc

SEQ ID NO: 51269 - DNA, 365 bp, Zea Mays
attgaaacaagtaactgatgtgctactgtcttagtcatgttgattgtgattgattactctactctgttgtgtttgtcttgagtgtctgcttgcttgttttggtgttaagtgcatatgagtaacaatgatagtaactaatataattaggttatatgtaagtaactagtgcacgttcctaagtagtaaattaaattgttgaagtctagtaagtaatcaacttcaatcaacgtcaatttagcaagtgtcactatatggacgagaaacaaaattaatgagatgttaccatttccaataattgtgctgctaatctgagtattactaaataaccaacctcaatagattagtataataagtagtgtgattaa

SEQ ID NO: 51270 - DNA, 991 bp, Zea Mays
ttagacttagatggtttctcaaaatccatttataatgtagcgatccattgttagacgaaaagcggagaagagaaacagatttacgattgaggcacgacgcacgaaactgttgttttaataaagttgagaagagatagagatgatgtgtctcacagtctcataatgaagggaaggaggtcccgcgagatttcaaaccatttccttttatttctaagtaatttaaacatttttaatttttaaacttctgcttgcaacccaaaatcaattgctgagtttgtttcagatattcgacaccaagagctctgcacgctacttaacatacatggacgtcgtagctgaaggaatcgaatactttgtcgtacgtgcttgtaaaaaaacaatgttgaagatcatgcacagctcgagttaaagaatatgcgccctttcatgatgaatgttgattgatcgatgatttcgtaaccgattggtgcaactcgagttgaagattatgcgcactagtgctgctcctgatgcccgttttcaatttccatgcgtccctttgtgtcatctaaggctgtctccaacagagccggtaaaatgtcctctaccctaaatatagcgtatatatgtatcctgtaagcgtccagcaacaaacgttaaatcatccgctataatatagcggctctctctctccctctatttctggcggacacacgacgctggctatgcactattcaatcacgaacgccaactccttccattctctcctgcgcttgctcgtcgtcgtcgtcgtcgaagtcgtttgagctctcgactgctgagctggacggcctcgccgccttccctgtccctgcccccggccatggagcagaagatgtcgaaccatcaccaagctatgcgtccgagagggagtagacgagagacggcggaggcgggaggtcgacggctggggaagacattggcaaggtgaacctcatgatgctcgtcgccaatggctggtgctcaaggaaat

SEQ ID NO: 51271 - DNA, 787 bp, Zea Mays
aatagtggaggatgtcctcatcattcccaccttcttaaaatgggccctagctctgataccagatgatacacccagcccaggtggggttggccgaggcccaataaattagggttgcccggagcccaacagttctttatgcacacccaactcagggaaaggcccaatcaccccaaaagactagtccaatgggggaagggtggctctcccttttaaagtggcttcctcctcccaagttaagcaaggtgggataattctgaggctcacacggtcgccatccgactacaattgggccaactgggctaattgcgtctttgccaacgggtaatagtggaggatgtcctcatcacctaataccctgggagattccgtaacaaaacctgtactcattgatttaatctataccgctgatttcacaatccacggccatgacatcctcttctacctcccgactcagttggtgacgacgctgcgcccccaaggcaatgcccacaccgaacctgatgacctagggcctgctcgacatgcgtgtaagtgcaaaatcgcatggagatcacaacaaactcaagagggtgaatttctcaggcaatagcacgatggtgatgtcggcccccaggtgaggcggcaccacggtaacgtccaaaccagtgctcgacccacaaattgcatgagccctggaatcatagcctaaggagcactacaggcatggatgaataaagcagaagtggctagggatttctcatgagaggttctagcgttgtggtctattcggtgtcgaagttcctgcctg

SEQ ID NO: 51272 - DNA, 438 bp, Zea Mays
ctttgccacgttggcagaggagctgaggagttccgatgtccgagcaactgctttcttattggcggggaagagaaaacgagaaggacacattgttcttcctaagcacaagaaccccatacaattgcttctatcggagccgacaacaatcacaatagttactcaatgatcttttcaactctaagactctgtctagatgacaacaaccatcgaaagtaacccgagcaaatcagccgtcatgcctagaaactccaaaagaacgtgtaaactaaccctaaaacaaatattagtcaagaatagaggtttttttactccaacaactctctcattcttcataaaaaattcgcgtcctgcatccacagcctactctccctcatattttggtgtgtttcatccctccccaatccattcttcaacgtatcggatcatccagagcctccc

SEQ ID NO: 51273 - DNA, 556 bp, Zea Mays
cggagacaggtggttctgattgttgaaagcttggggtgaggcgagcaggtgtgtggagaggctatctttatagcctggcgtgctccgttgagatggaaatgagagggagagggtggtgcaggcgaagtttgcctgtgatggccatgttgccctcagggtgttactggcgccattcaggaggaatcaggtggatgccgagcagaacttccggtgtgcgatgacggcgaggaatttgatcgggctctgtggggcaagattcacgacgaagtgtctgctagttaacaacgaagaatggatggaggttggggatgaaatgtgggtcccatgcgctagagagaacgattgtgagagtggggcgagggctgacgcaggggacgagttgtcatcagtgggctttggtgaacatggagcaatgccgatagggggggtccgcttgttagtgggatggaggcgcagccgtgggttttgggccaaaaggccgttgggccggctaggttattgttttatctttttttcatatttgaatttaagtttcaatttcaaattcaaatcaaat

SEQ ID NO: 51274 - DNA, 554 bp, Zea Mays
tgctacattattgattggaaataaacttacccagaagcgcatgtccatataatgctttctattctttatgatttcacctttcggcctacgtgactctttattagcaagcaatcgaacagccatgtcaaaacattttagagtcatatctagatttatacttaatatgttctataggtctttgacagatatttctatcttaaaaggattgaaacttcgcacccatatcatcctgtaatgtagcatgacatgatggaagtctatatcaagactctacgtaattggtataaataaaatagacaaaacaatgagcacttactctaatgtcctatcgtcttggattgccataatgtaatcacatagcacatctattaaatcggctttagtcactggcatgtcttttgtggaaagaccactcattaaaaagtcgtctgtgcacccatccgccgatacttttgtaggagttgttttatcccattcatcaacaaaccacctttgtaagtctgcttgagtaatggggccatcctcatcttccatcaatacctcgctattatcaa

SEQ ID NO: 51275 - DNA, 297 bp, Zea Mays
gaagcagaaggaaattgccgaagctaaggcgcggcagagtcagccgaagcaagtcctccacactgcttcgtgttattccccattcatcccagaatacgtagggaatcaacaacctacgacttctgttgcttcggcaagccattccccagcttcctggccccaattgccaccaccaccactaatccacaatcaacagccagaaggacgcaatcatactcaacaacagcgcaaccttcgggaggagtccaaaaaactcgcacagtcaacatcactgtgcctgagtcgaaacatatttac

SEQ ID NO: 51276 - DNA, 492 bp, Zea Mays
gggagagggggtcggctagggttggggaggagaggggggctcccatccatcggatcgagatcaatggcccgaactcgctctcccatctgagctcccgaccccagcggaaaaaatgccaaaagatctactgtttccatgaggaatgcctccagaaactccaaaccccaatgccacataacatgaaagaaaagagaaaaagaaatttaacttattttcagaaaattggggtatcacactctaccccccttaaaaagaattcgtcctcaaattcgaccatttctaagcaaagcatccaaggtaccccatatagcaccaccattcaaaacatgggtccattattggtcttaattaacacaagaacctctacctcggactaattgtctaaggaaactacgcaacctgatatcaagcatgaaacaacatgcaatgaagctcaaagcaagtcatagatgcaatcaacactacgatttcacaccatcaaatttggatgca

SEQ ID NO: 51277 - DNA, 392 bp, Zea Mays
atcgcagatagtgtactccatacgtgccccacatcctggacacacgtcccattgatcctcatgtgtgttagcatcataatctgctccattatattcacatgcctattgatgtccccaagtatcagccaccgtagttggttactcgacttctctagtcccttagtcaagatccaacgctcgtccttcaccgcttccgatccatcgacacaaaccggcatgactttcacctgtgtcattgaccagtgccttcgaactccatacctatgcttcacaaaccaagacatatgttgcatacacaatcacgccctagttagtccgcacgacttgacccaatacactactccgttgacaatcactcatcgcaaacctgaaccacaagggcacatattaac

SEQ ID NO: 51278 - DNA, 394 bp, Zea Mays
gtcaattgataaccaatagtgtgaatgcctttgagaaggaaatcttttattgatgacgtattttccaattacagagtacaacattgctctgatagctttttgagtcttgctaaggataaaacttcctgaggtgctctatattccatgagttctccacttccgtgcaatccatttgagtaagccgatatgatcttggccgagtgacctccaacaccatgaatggcccttcccatagtggcgataatttgtgccgtccttctcccgttagaattcggcgaaggaccaagtctcccactacaaaggatcgatgttgtatagccttatcatgatagcgcctcagggtctgctggtatctagctgactgaattactgtattcagtcgctcttcctccag

SEQ ID NO: 51279 - DNA, 562 bp, Zea Mays
cgatggtacaatgactgaaatagattgcagatgcatcccccttgccgccggtgatctttacaccgtgatttgcgccatcgccgcgattcatgctcactggtgataggataaccacgacgaagtaaaaatcttggcaccggatcagctcgggcgcggatgagattcaccgtacccacttgctcgtcgtgcggccgggatagacttcgccgccgttgatcgctcaccgttttgcgccacgtgcttaagcgctagcccacgtcacggtaaatcatggtatgcatgtccggtgatcaccggaggactgccacggtgaaagccactcatcccgagcgctagtaccccttttcccctccggccgccagcacatcctcgtgaaattggacgccaccaccgttggaggctataaattgccgcccccgtccgctccgctaggtaattgcgcaaccagtgaagcaacccgtgcctcaaatcctcccctagaactccccaatttgggatttcccccaaatccctcaagaacaacgagcagtttgacctcgatgtggccagcacgtctcaggtc

SEQ ID NO: 51280 - DNA, 338 bp, Zea Mays
ggaaaccaattctcttcgatagagtactgataaccttcgctccagttcggtctcggaggcatcctaagctttcatcgtcaataccaccgaagagcaatgctcctggttgatagccacatgatattgcataatctctcagctcttccttctcagccttagatagcttttgaccaattatgttttgaaattgaaatctttttcctctgaagtatcttcggcgatttccttctcttttccaggcactgtggccagggtctcttcggcggctgcagcagcttcttccgcggccatattcaaaagcattttatcaatatcagaaaatgtgccctccagatttg

SEQ ID NO: 51281 - DNA, 697 bp, Zea Mays
attccccacctctcaactcaaatttgtcttaagtactggaacataccattaactcctgtaagctaaatggatttcccccagttcatagatgtaaaaccataatatatcattttcttctagtatgtatagtgatcttgcttgatgtggcctttcattcttgcaaacactcctgcagttttaacatttgagtttttaagttctctagaatgttgaattccctccttatctcttgtttgcatcattatcactctagaatattgatgtaacaagcccatgtattggagctgttctggaggctgttgcgcttgagagcaatttatggtttactgctggggttttagttctctaggagctgatgctatggctgcttgccgcggtcatttaatcctcctatagcggaggtgctggtggtgatttttgtagtgtttggtggtgcacctttagctaatcatttgctagttgtgtgtgtgctgggttagggaaaaggcattctgcctctctcccttattttattctcttcttaattaaatgacatgcagctctcctgcatagtttgagacattttttaagcatggttttgtattacagtatgatttcaagtaaagctgagggagttgtactgcacaacatacaaaattatgtagatctgaagttagttgtgcaatatgttgctagttgttgttgactgcacaagtta

SEQ ID NO: 51282 - DNA, 417 bp, Zea Mays
taggggcatcgggtcccaggggtacatgatgccccaagattccactggggtcggtggagcgggtggatgtaggaggtctcctgggagatcaccggctctagtgagagccctagaacacatggcatgattggaccttgtcaaggatgagggccgccagtgacatgtgtcactatcagacaccaccgatgcattggcgggggctcccatagggtgagggctagatagaatcatacatggcatgggacccccacacagtcacgtggcgggggtcctaaccatgtattcttctcctcatagtagggtcttcttgatacgatccaccatgatggtcagattcttaggccatactctgtgtcgatcagttatgtgtactgcatggggtactcgtacctaggggtcctgatagtgcccctaggc

SEQ ID NO: 51283 - DNA, 497 bp, Zea Mays
taaatctagaggctcttgtgaaaaagtgcgcggcaaaggggtatggttgtatatgggtcgtgcgattacagatagggggcttggattaaatcgcccacgacctaaaccggtaggctactatatttgttagatcaaggatctaaggcgtagatttaaaattgccaaactgttttctatgcgcccggactacatcgaacgacacggatgaatcctacgaatcggtatgcatcagtatgatctcatccgcacacttgaaatcaatggcaatcgggtactctcccacctctagcgcgcaggccagcgacacgggattcccatgcggcggcgcacaccggtgagcccaccctgcccagcgaacgaaagcgtgattcccaaatcaactaggtgctacgcgttgctgagtgaatgccaaggatagggacgagtatcatatcggaatttggggccatgacgaggtcggtcgatggtgcaccacggatccagagatcgagctccac

SEQ ID NO: 51284 - DNA, 778 bp, Zea Mays
gccgaagctttttaccgagtgcatgagctacattaccaaacgaagggcagagaagacgaactacatgaaaattttggtagttataacttcgtgtatcgcaaggatacgaatgatccggtcctcagctatcacaccaagtggtcaactggctggaagagtgagtggttctatatcaaggccgatgagaagaagagcgagaagttgaagacgatggtcatgagcccactaagtttaagcttcgggatgaccaaacccttgtgcaataagaagccagggtcaccatgccagctggtcgtagcagaattcagagtggtggctgaacatatcagcactagggatgtagtgcaagaatatcaggccaacagggtgtctctaacgttgagttaatggagtatgccgaagctgaaaggaacaaggaagaagaatgaacttgttcaattgccctatcggttcaagtttgagaaacaattcaaagagccttgccaagagtggctagagatgattgatgtgacaccccagtgtcacttagggtttcttccttaagctaacccaaaccattatcacatgtaaaccattatcacatggattctcgtattgacaccttgtgtgatgagttgagcaagatgaagattgaagtaattccttctggtgctttgtctcacatttccgttgagcaagccttacaagaccagatcatcatggcccagctcagtgacaagggagtgcagatcattaaggagaacctccatcagaagaccgagaagtataaatgtttccg

SEQ ID NO: 51285 - DNA, 278 bp, Zea Mays
cagaaaacgagccatctttctggcctcggtgctgacatcctcgggcgcgtagtgggccaactctgtgaacttgtgcacatactcactgactgtcctcccgccctgagttagctcccggaactcatcctccttgagttgaactatcccctggggtacgtggtgctcacggaaggctgcttcaaattctgcccatgtagcgtctctgatggcttcactaaaagtgtcccaccatgctaaagccattcctgaaagctgatgagctgccagctgaatacgtt

SEQ ID NO: 51286 - DNA, 980 bp, Zea Mays
atcgttatgcgcttactctttgttttctagggcttaattctaagcaaggctctaaaggcccagaaggaagcagaggatgagagctatcgaatagctcttgggaatcttcgctcagaagtcatcacactaaggaacgaagctcttgaaaaggataaaatattactttccttagtggataggctgagatttaacgaagctaaacttgctgcacaagccgaagtggaagaactaaaaaggaaggttgctgaagcaaccgaaaaatttgaagttgaggtagtgaagcatgagatttgcgagatcaaaagatcaagagcacaaaagaacgctgacgagcttcgtgcttccaaagaaaggtgttatgaaatatccttagaattcgccagaaaattaaaggacaactttactagggttggggcatattcctcttagcagagattcatccgcgacgaccctgatggagttgtccagtggattagcggggaagccaaagcttttgacgaaattctaagtgatcgaggagatttttgcgcctttgctggtgcacggggggccatgtccatcttggaaaatgttggttgcgaacatgccaaggctgcagctcagtgagaatttgttttctcagctgatgacataaaaaacccttcagccaaagcttctgcattaggtgggaaattttactccgaggtatggatgaaagataggcgtgagatagctgatgaagctattagaaagaatgaaaaagaatctcacgatgccaagaagaagccaaacgagctgaagaagctgttgagcgtgcgagacttataggtacctttattgaggtttagcttcgtaattcgtttttagctttggaattaacaaacatattttatgatgtagctgaactttcacccccaccggagccatacaaccccaaagccgacccggccttgaaggaagcgctagatatgattaaaattgctaatgaagctgttgacgaa

SEQ ID NO: 51287 - DNA, 297 bp, Zea Mays
tactaatatgactttgtaccaagttttagccattaatacctattggtcatttttctgtgattttgtaaagttcttggccagaggggtgctttctactatcactatacttgaaaaatgtcaaacaatagacttacaatttttcttatcttcttctttgtgcaagagcaatcattctgaaatttggcaacttttttcttaggggagagggtggtagaaattcttggatcatttggtctttttcatggggtagggggtaatgtgttttaccttacctttttaaataggtttcatattttt

SEQ ID NO: 51288 - DNA, 763 bp, Zea Mays
ctcatgaggagttaatggatgatgtataatagattggaatgttgttttaaaatccttatcagcaaaccttgcatataattcatttaagaatggcataaatctgttctggacatgccataaacacagtctgtgaactgtttttggaaatacagttcttagagcaattggcattgcaggatcttgatctgcaattgctcacaaactattattttactttcacaataaattatttgacttttttgcataacaaattgacataccacatacctgttagcataactctcggaccctcgcatcccatacatgttttgaatgaattgaaagcccattcaaaagtctgaaccgtttcatctcccaacaaaacaaatccaaacactgtacactgcagatggctgttagctccaacaaacatgcccagtggtttatcatatatatttgtcttatgtgttgtatcaaatgtcacagcatcaccataatctgcatattccctctgcatacttgcgtgtgaccaaaaaatactcactattttcccatcattgtctagctgaaaatcacaaaaaaattgtggattctgtttcttgcattccgtaaagaaagacaaaagtttggctacatcatttgcgcagttttctcgtctccttgctgccctcctacatttgtatgcacaaaaaatgattatacaaacatttactatagtaatatttatggcacttaatatacacaggaaacataaaaatattgcttacatgtttttcagattttg

SEQ ID NO: 51289 - DNA, 456 bp, Zea Mays
ctaatatttcttcaagataatctagtcagaaaatctgagaaatcaacatatcagccgagtctccttaaaaacccaacgggaaaaataagaagagtagtcatactgaactctagggagataaactcgtatcctagttcaaatacaacaataactatgtcataatgtatcatcctcgaaaaccactatgggaaaaatagatgatacgacataggccttgtgttgatgttgcctcgttaaaaactttgaataagaaacccaaacagggaaaaactcatgcaaagaaaagagtacaacatgatgcagaaacaagttcttcagatcaagaggagactccccctgatctttacaaatcactaagtcatcccatacctgctctcaaacacatctaaaatgtggagtaagtagagacttagttcgtaacttgtttttcatctaaacaacacaaagtaatattat

SEQ ID NO: 51290 - DNA, 1511 bp, Zea Mays
aatttagatttgattgagatcccccttcacggcttagcgtacacctggacaggcagagggaacccctcctgcagaggctggattggtttttcatttcccaagaatggtcgatcgtttatccggattcctgtgccagaacgttgccgagagacatttctgaccacgttccttgcctggtctcttttaagtccaagatccctaaaccaaaaaaatttcggtttgaaaacttctggctagaattggacggcttcttgaatctttttcaatccacgtggactgggctcccttgccttcctgacaaggctaaaaacctgactgctaagtttaaatgtgttcgaaaggttctaaaggattggcagagatcgcttccaaaaattgataaaatggtgcaaaacatcaagctcctgattgatttggtagacaatatggaagagcgtcgggatctttctattgaggaatggaatttcagagatattctgcagcaaaaagtggtcatgctgctgaaaattcagaaaatttattggaaggagcggacggctattaagtgggcaactgatggtgacactggatctcgtttcttccatgctcatgccaccattaaacacaggaagaactcaattgccactttgactgacgagaatgggattattcactatgagcatgaacagaaatctagtctcctctgggatgccttcaaacacagattgggatcgtccaatttctcgggaattgattttgaccttccagagcttttaatccgtaatgaagagcttcatgagttagaaactctgttcgctaagctagagattgacagcattataaaatcattaccttcggataaatctcctggtcctgatggtttcaatacgaacttcattaagaaatgttggcatatcattgctcaagacttctatgatctttgtgaaaaattctatcatgatgaagtctgtctgagaagtattaatgggtcctttattgttttgatcccaaaaaaggagaatccacagaatgtgggagattataggccaatttcgctattgaacaatagtatgaaaatcttaacgaagcttttggcaaatcgcctacagtcgttcatgtctcgtctaattcataggaaccaatatggcttcatcaagggcagatctattcaggattgcttggcttgggcttatgaatacattcacttatgccactcctcgaagaaagaaatcattgtgctgaaactagatttcgaaaaagcttttgacactgttgagcatgaactgattattcaagttttgacccacaaaggctttggccctaaatggattaactgggttcggagcatccttctttctggcacttcttcagtgttgctcaatggcgtccctggtaaatccttccattgcaaacgaggtgttaggaaaggagaccctcttttgccactgttgtttgtcttggcggcggacctttttcagagcattattaataaggccaagcttttgaatctcttgaagcttcctttacctgct

SEQ ID NO: 51291 - DNA, 312 bp, Zea Mays
ggcgtgaccctgctgatgtcgagtagttcatacctgtagaaatgaggctagggatccgcttgaaggcggatgtaataacttttgtttttgtaagatgcttttgggaactatcaattaaacaactcttatctgtatgctatttgttcttgctgtgtgtggcgttaccaactcctccctggtacttggcccccctgggatgtaggctcgatgtgtcgaggctggatgccagtatacttaagaaagaattggtgacctggcccccaggaggtagtctcgactaggacctggacctgcacacagccttggctaggg

SEQ ID NO: 51292 - DNA, 521 bp, Zea Mays
gtaaaatacagagatagcatcctgtagaaatcaaatctgtgtcctagtcgataaatatcacggcatagtgtttgttcaccatttccatttgccaccttggcctcaaagttggatatttggttcattccaacatcacgtcctttgcccaactgtatgtattcatgatgtgtaacatttcctcgacgcagagttgaattgaaacctttggtgtcgatataacaactgtaaacttaatgggcagaaataagcaactaagtttttgcataatctcagaaaaactaacctgcaaatatatcttcgctaaggttgataatctttgatgccttgcttatgccaccccttgtcagatgaaagagtctatcaaaaacatcaggatggccataatgaaatcgtaccctgcgataaaaaaagtttgttagacttacactccaataataatgaggatcgccaaaagaagttagaacaggagcattcaatgctatcgcgtttgaactctaccactcccataaattatataaact

SEQ ID NO: 51293 - DNA, 716 bp, Zea Mays
ggcttcagcctacgtgtcaagaccttcgcccttcttcggcttcggcgcgctagaagaggttgaagcagcaactttcctttttcacccttgccttcgaacaagaaaacagtaatcagggtaaacaaacccaataacatcgaaaaccctgttcagtctccttttcccttgagcgccaaaggcaactgtcatggcttcgtcttctgtcctcgagtaggctccaagtagctcatcactcgttgcctctatagcgtctagccaatcatcatttggctcgtcaaattgacttctataccggaaggtgtacttaagataaaccaagccaccctgactggagccagtggtagcttccttcagtatttcccattcatttgcaagaggccatactttgaaagcgatgtgctcttgaactaaatctctggtaccaatgtaggtacatatggtgttgaaagccattaggcacgcttgcacttcattcccaattgcgattgatggcctcctaataccgaaacatgaccatatggaatgttgaatgatgcccctcacatcctccctctgtttcagatcatttttcacgtaaaaccattgcttcatccaagagcccggccacttcttccgaaatgtaggcacaggataatttgcctcagagcagggcacgaagctgtaacagccaaagttgttatgatatttctcttttccggttgccttcgtctagtaag

SEQ ID NO: 51294 - DNA, 1560 bp, Zea Mays
tgaatcctgagccatgacaggataatcaggatagaagaatccgatggcatcaaaaacatgattaagccaacgtctctttcggcccctgaaggcccggtgcagagcctcacattgcattttgcttcaacataatccagctaaccatcgttgggttttccgaactcatcttcgaagctatacttatattgaagcctaattagccgaggctcagcatccgaagcatcccctttcgacacctctggcatgtccccactcagctgccaaaggccacgtttaaaagctaagtattcttgaacaagatccctcgtcccaatgtaagtgctaactgcattgaaagcaactatggcagcttgggctttgaagttaacattacacattggtttcttaaatccaaaatttgtggaattgagagattgaatgattcttgatatgtcagcacgcgtagtcaagtcattcttcatataaaatcattcttttgcccactcattcggccacttgcttcggtaggccaaggccaggaacattgaactccttcggtatgcaaagttataacaaccaaaattattatggaggcctcttgttgccttcatctagaaatgcaattcatgaatatggctgaacgcctcgtagaaggcttcgacatcaaattctattccttggctttgaacatcccagataaaaattgctaaacgcactatagcatttggggtaagctgatggaggtagatgttaaaccgcttcagcactgcaactacttttttatgcaaaggaaacctaagaacagccttttagaaacactaaaacacaacaacttcgttgtctctcgaactcggcactagctcgtcaccccctaaccgcacccagtcaatattgtcaatgtagtcgaagcggttaattatctcgatgtgcccttctttgattttggacttcccgaaatccacatgggtaggcttcgtcagacgaaggattgtgttatcctcttcaaaatatattcccatgctgtctttagattggttcagcgagctaacttcggcttgtggagcagtggctcccattgccggaacaatttctccagcctaggcctctagtgcatccttcggaggtgtcggcgacatctcgagtagcactataagtgtgaaaaaagcaagcgatctctgaaactagctaaggctggttcgggggcaaacaaatagtgttcagaattagcttcgaaggcagagcgagcactagcaccagggagcacaagtagcaaaagtcgtactctataacgttgggcaccgcccccttttatacgcaaggtcatctcaccttaattgtctcaccgaatgaccattgggtcccactgcatgtcaactgatttcataatgagctttagaaaggtgtttttcggaccttcgacgcaaggcctcccaattacaaattattgcgatctaagctcattataaaataacgaactcatcccacagtgggttactgttggggggcctatattgtcgaaggtccttggtcttgttatgtcacaattgccttaagggtacaaggttttgctggagatcactt

SEQ ID NO: 51295 - DNA, 786 bp, Zea Mays
gttgaggaaggctagggccacttgccaggcgttgattacctcacatccttcgagcttttggtgtctcttcgaagcgtagtagtcatacccccaaaaattagtaggaagtcagtttcacctgagaatgtgggaccccttctcctttgatcttcatccttctagggcttgggcctcttctagggcggtgcctccttgcttaggaatttcctaagcaacccgcaatccttgtaggcgtgtcggagagggtagcggtggtttggacttgggcctcaaggagtttttcgaaatggtcagtggctcctcggaccgaggcctcctttctttgtagcctgtcgcagccactagcatctcggcttgttgccaccggtctttcttctttcttttgttgagttggctgccgaaggcatcgtcaagctcattatagtgttttgccttcttcttgtggtggtcgaagatcactctcacctcatcttctcctgacacgtggttggttgcgatgtcgagaagctcctttgttgttcacaggttttttcaccctagcttatgcaccagggtctttttggtggtccccaagatgaaagcgctgataacgtcggcgtcggcgaggttagtcagcttgttgcattgccatgagaagcattggatgtaatccctcaaggtctcgtctgatttctacggatagttcttttggtcccatgggctgcctaggcgtacatatgtgccctggaaattcccaacaaagatttcctcgaggtcagtccaactttggatacacccatgccttag

SEQ ID NO: 51296 - DNA, 507 bp, Zea Mays
gccggagtcatctccgccccctaagccctcctctcggccggagtcctcctcgccgcgaatctttccctcgccgcctgatgctctttgttgcttcagtttgcttattggaggcttggttcagtatgtagtttacatttgtagcacatttacttcgttttgcagggtgtacgttacgtgtgctgtgtgcatcatcagttgtaaggcaatgcaaggctacttgcattgagatgtaaagatgcatgttaatgcagatttttcgtctatgtaccttgtgaagaaatgcttcagaaaaaagaattgtttatccaaaaatatgattgattgtcattcgttcgttggggttccagcctgaggttgtcttataacctttccttgcgcacaggaatcgcttccatttaacggctccagtgttatcaaatctttgtcgcctgatacgaataggaaaaccaatgtcatgtgtatagtccatgtaaaatttttgagcggcttcaacaccatcaaatagca

SEQ ID NO: 51297 - DNA, 568 bp, Zea Mays
aaaattcacccggtattccatgtttctcaactaaagtcatgtgtgccagcttatacacctgttttcactgagttgccaacttctacaataactgaagatgtagtggcaatacccgaagagatactcgagcatcgattggtcaaaaagggtgattttgttgtggtccaaaatcttgtgaagtagctcggctttaccaactgttatggcttcatgggaggaatacactgttttgaacactaagtttccacccgcaccaatctaggggcagttggttctcttggggggagcgatgtttaagtcatccgactaatcgagattaaccagacccaccgatgtgattagttcgaccagaaaactagtcaacgattagtcacgactagttgttcgatttgaactagggcaaccacattagacgtgtctttatagatgggcttttggagctaggctacaaatgtgggcttctagggttggccaacaggcacataacaaaagcttgaagcgatggacgccaaacacccactcacgctcccacagtccttcgctaagagcgccgccgccgccccacaag

SEQ ID NO: 51298 - DNA, 317 bp, Zea Mays
attgaagccctgggcttccattagtaccaggaagccccaacccgtaccagcgtgcatcctatcgggcatgggttcttactcgaacagattttagcgtaaaacgtgaaccaaaacagagtaaatgattatgaattttagcgtaaatcgtagatttcttttgaaacggtgaatgcggcccgaaaattacggcgtaaaaatctcgcgcgtcccatcgtgaccgggttctaacttggacagattttaccgtaaaacatgaaccaaaacagcgtaaatgattacggattttagcgtaaatcgtagatctgtttcgaaacggc

SEQ ID NO: 51299 - DNA, 540 bp, Zea Mays
ctttagaggatgaccatgttgttatgaaagcgatgtgtgacaacgcaatggacaaggctgtctgcgccgagcaaatcctgatgagaagacctagtgttgtggtgcctaaggacatcgttgttgacgttctcgctgcatctgctggtgtgagcagaccttctttctctggtaatcctgctggtgaggttccttgcaaaaatgctcctgcatagtgatttgttcggatgagaaaatacttttccttgagttagtattcttagcgagacagtgtatcatggattttatgtgcgtgtgatcacactacgcttgaaccgattgttccattaggagggtgtcgagatcaccctcgaatatgtgagcatgttgtattactttgaggcgttcctgacttgagctgactgtcttgttagggtatagtaatcacccctagtcatgtaagcatgagcatgtcacatcgacttaaggtgtacccaacttaagtctattgctccattaatagggtatagtgatcaccctaagtcgtgtaagcgtgagcatgtc

SEQ ID NO: 51300 - DNA, 471 bp, Zea Mays
aaataatttgaagaacattgtcaggggttggttcagccccgccagcagatgtcagacttcttgcatctggctcgctgacctccaaggtgacttgtttgctcgaagtcaaagaagcatgcatcgccattaccccatcagatcgtggtggagacgacccaacatggacatccatggaggtgtaggaaggagagctcacttggacaccctcaggggctgggttgcagctcgcgctacccaccagagccggatcactaccggcaacaccctttggggctgggttgcagctcacgctacccactagagccggatcactaccggcgacaccctcgggctgggtaactgccagcaccatcctcgggggctaggttttctgcaacagccacctctaaggttgaaggatcctcagtcacctccatgtgagtcgggcaatcctgaccaacgtcttgacatcgaagactgccttccaaagtc

SEQ ID NO: 51301 - DNA, 802 bp, Zea Mays
aattaataaactgaattttatccaactacctgtcgcgtcctttctgctgaaattacacaagcagctcaggttcgcggaagcggaatcggagtccgcacgacgtcgatcatggcttcaccatgccttgcttctacttctgattctcgttgcttttgctgctgttgctggattgctgcagggagtaggaagaggaggaggaggagcctcagcaccagcggcatcacctgcggatgccatccaaatggacgcgcaggtctcgactcactgcggggtgccatacacagcttcactactcgccttcgatcccgtccagcgcctcctcgctgttgcaactctgtgagccccattccaaaccccgccttcacattagtacatcacaaccaaccctaaaccactgccacacaattcattcagttgtaaactagagctttgctaatttatgttctccatccctccaaatcagttaattgcgttataacaaaacaaagaaactactttgcataagcatggaaacaggttatttagttgttgtatgtctcaaagacctagctcttattgtgtaattgttgatagctgttcttcactacaaactgcagggatgctaggataaaaatatttggaggtgataacattgaaggcctccttatatcatcgaagagtgtgccgtacaagtttttgcaggtttggctcttaactatttctcttgtccaccaaagataaagttatacatagttacctcgccttgttcaaactagctatgttctttgttgcctattatgtacaacaactaatactaagtaca

SEQ ID NO: 51302 - DNA, 453 bp, Zea Mays
atgaggaattcgaggtgactcaattgatctgcacgcccctagaagccaagccatggttctcagcgatctggagaaccccccaatcaccagccgatgcaccagcgctagcgtaccgaggttttcccccatagcggacctgatgtcttccttctgcgacggcggcaatcttcctcccctatctcattggtggccttcgttccacacggccaaatattgggttggcgccaccaatgggaggaagaggtgcccggggctctatccttttatagccaaagacgggtttgggtccgagccaacgcggaccaagggattgcgcccgagatccccgtggtaacctaggcatcccgatatagagcttgggggcgatgctggcaagatgggcccaccgggcggtgtcacacccaaagcgcacgggggaagtgagagcatgacacaatggccccactaggcagc

SEQ ID NO: 51303 - DNA, 528 bp, Zea Mays
gttttgtacacacccgtatgggttttggtcggcatttgcgtcgtattgcctgctcgtcggacctctccaccgttgaagtgcggcggcgccgccgtgttccaggtcgggattgggaggatcgttggtggccattgatcttgcgctgaacgacttagattagatgcaccgacaacccttcgctcgggctaatcgaaccgtagatcgtaggatggatagtccttacggggtcgcgggtattttagatcatagccacatatctccgatctgacggttaggtttactcgcatgattggtatgcgcctgatccaatcggcgccgttcgtttctaatcggatagccgtgctcggccgataccccttcgtgggtcaatattgctaaagagcccctctgttttcctagattcaacccgcagtccactcgggtgttcccctgagtctggggaattcttacccgagaccccctgcacttcccagaaatctgcgcccagtccagataattaataaaaccaggaaaatcatttagaaaata

SEQ ID NO: 51304 - DNA, 858 bp, Zea Mays
ctgggcctcaattgcagaaaagtgcaagggtttttgggtaaaatcccacagacacagactaaacacgtagtggaccgcgggttgaatcttatctttcgaggggcttcttatgcaaaagtgcggtcgcgaaggggtaccattgattttcagccgtccgattagaggcgagcgacccagatttaatctgctccgcggatgcactgacaagcgcccccaaacgctcagatcccgatccgacggtcccagatacgtttacatgaaagggtacactagatctaatcggagccgttcgtgtcccgattaacggtcaccgattcgtcccttccctccgacaagaccaagcacggcggcggtcgactccgcggccgcgctccccaccagaggtggtcaccggcgattcccagccccaaatctatctcctgactagtgctgcatgtgtggaaaatccatgtgaattaagtggggtgctccataccgcgaatcgacgctgggtcggcaacggccacggtgaaacacgagctcggcggagaactccactctggcgaggaattccgggtcacccagtggttcgattcctccgcgacggtagtagacagctccctggagacgcggcgaagctcctcacacaggcgtactatacccagcgcggcaacaatgcagattaggtctcggcggcggaattctcgtctcccagctaatggcgcgtggctgctgcgactggctacggtgcccgggtccgcgcgagaggatggaagagaggaggagggaaggagaggcgcgacgattcggcctatatgggcgcaaggtcgtgtgcggtgctgagcgacgaagccccgggtcttcgggcgtaccagccgc

SEQ ID NO: 51305 - DNA, 714 bp, Zea Mays
cggaacgctatgttctcatgtctctcgctggctgagtttgagcgagttagacactttgctatggctcatgagatctggtccaccctcgagagattccatgagggcaatgatcatgtgaagaccaagctctttgagatgtactggcgagagtacaagaattatgttcagttggctagagagaccatagagactatgttatctcagttccagtccatcatgaacaagatgcgtgccaacaaggcacaacttccctatgatgatcatgagagagcgttgaaattgctacatgctctagatcagaggctttgggaggttaaggtattggcgatcatcgagtcacccaattacgagactctcaccgtggacaagcttttcggaaagctcaagtccaccgagattgaccaccagactcgggccaagatcgagaaccctgctgcacctaccatggccctagtctctagatgtggttctgcttctaaccactcatctgctatgtttgctctatcttctttattgtctatcacagaggagaaggttgagagccatggagatgaggagctagcgtttgtggctagtcgattcacgtggtttcacaacaaccgtatgagctggcaacatggcaggtcaaaggatggatgctacaactgtggcaaccctgaccacttcattgccagttgccccaagaagggcaagcaggaggctggcccacgcgac

SEQ ID NO: 51306 - DNA, 420 bp, Zea Mays
ctctgttagacgcaccagtgcagaccacatccatcctagtaggtacctagtgcacagctggttccatcaataagggaacttggagaaaaggtgattcaaaagaaatcgagcccaaacccgcctccgtgtccctcctttcctccccaaacaggaaggcagaatgtctagtaactgtgaggtcctagagtctttactgcctacgaaggacgaaattccggagcaggatcggaccgggaagcacagagcagatagaagtgcactttccaatgcagttagacagagaaggcatggatgtgatgttataatgctgaaggaccccaagaagagattatggcctatcatttaccaccactacccgttatttgtgggtttcaccgagggctggaaacatttggtggcagcaaacgatcttcggactgg

SEQ ID NO: 51307 - DNA, 564 bp, Zea Mays
ttgaattcaaagttgaatcaagttgaaatggaaatagaaattcgaaaaggtgaaagaaagtaaaatacaaaaaaatggaaaagaagaaacccgcgtgtgggctgattctcccccattcggcccactatcccaagcttctaccggcccaaactgatactgcgcgccaaccctcccttggagtctatgacctgcgggcccacggggccaggaaccccttcttcctctggtagttgggatacgccgccgctgccggatacgatggtgcttcgctcggttcggagattgtggcaaacggatcaccgagatcaccggagcatgtgccctcccctgctcggacctttctccttccgccctgggtataaatccaaggccgcgacccttttttttcctctcctccggtctgcacgaacgtcgggggaagtattgagtcgagctgtgcagagagaaggttagggagagagaagagaaagggaggaccgctgctcggtactacttctgggcgagcagcgttacgcctggggcaaccagagcgccacacgctccatccttctgtccacgctcgcg

SEQ ID NO: 51308 - DNA, 637 bp, Zea Mays
agctagggataaaacttcctgaggtgttctatattccaggagttcccaatttctgtgccgtccatttgagtgagacgatatgatcccggccgagtgacttctgctactatgaatggtccttcccataagggcgataacttgtgccgtccctccctcgttagaattcggcggaggacgagatctcccaccgaaaaggatcgttgtcgcacggccttgtcgtgatagcgtctcagagtctgctggtaccgtgccgattgaattactatgttcagccgctcttcttcgagtatatcaacatcttccagcctagttgcttcggcctctgctatgctttcaaagatcaaccttggtgccccaaacttgagatcagcaggtagtactgcctctgacccatagaccatgaagaaagaagtgtttccatgcagagctcggctaggttgggttcttaggctccaaacgacgtagggcaattcccttatccactttcctacgaacttttcatttttatcgaagacctttttcctgagtgcctccaatatcatcccgttagctcgttcaacctgcccgttggctctcgggtgtgctaccgaagcatacttgacctgaatgcttttttgctcgcagaaatcgaagaact

SEQ ID NO: 51309 - DNA, 677 bp, Zea Mays
gtggagcgctatgccagggggagagggatgctcaggaacgtctatgtcgccaacgccttggtcgagatgtacgccaagtgcggcagcatccaccgggcttggaaggtgtttcggggcatggggacgcagagggatctttgttcttggaactccatgatcatggcgtttgtcgtgcatggcctctggacggaggcgctgaccttgtttcataaactgagggtgaggatgtcttgcttgcacttctcttcttatccctgcttcattcgctttgcatccagcttgcttgaccaaatatgcttcgaagcaccaaactagtgaccagtaaccttaaatccagattatgcaccgtagttggtatggctggagctgattttactctgtttagatgacaggggcaaaaccagatggcattacatttgttggagtcattttggcctgtactcatggaggcttggtggatgaaggcaagctgcttttcaactcgatgagaggggagttcggtcttaagccaagaatcgagcactatggttgcatggttgacctgctggggcgtgttggtctgttaaaagaagctaacagtctgatcgcgagcatgccaatggagcctgacgccgtaatctggggagccctgcttggagcctgcacttccatggcaacttagaactagcgaaaacagc

SEQ ID NO: 51310 - DNA, 377 bp, Zea Mays
cccccgagctgatggagtctgctcgcacctctggtggcactgtgtgtcgtgcctggctagccatcgaggagcaattcctcggcaattgcgaagctcgtgcacttcgcctcgacgccgagcttcgtgttttcatatagggcgatctctccgtcggcgactattgtcgcaagatgaaggggatggtcgaggcccttggtgatcttggtgaggtcatccacgaccgtaccctcgtcctggacatgttgtgtggcctgaatgagaagttcgcccacatgaaggtccacttcaagcgctcaaagtcgttcccctccttcgccaatgtccgcaatgatctcatcctcgaggagatcgactctaacacgccacctccgcctccg

SEQ ID NO: 51311 - DNA, 711 bp, Zea Mays
agacagtctaacatctacatggaccggcactgcacatagggaacatcatgacgaatctagggatgtgcttattaccgagaatggtgatgagatgaagccaggcccaaagtgagctggctccgcggcgaggaaatattctggccaccaattaccagcacgttggtgtcaggttcctgacaagccaggaacaagaagaactagagaagaacagagaacataatggaaattggagtagtagaattgtttgtattcaacttgtcagtcgtacagtcgttcttctattccctttatacaaacatgcaatcacttggaccaaatggatggcagatagcgactattgggcctggacacatgacggcccagctccactttaccgccagcaccattctcaggagccgaactcccgccatcagtcatgacgacttctcctgggctgctgacattctccctccttttgaacactgcttgcccccaagcaatgactgctggaaactgactacgtaaggcgacctcatcttcccaggaatccaaagacgtgtcgcagccggaccacctgaccaggacttgagccacacaactgcctccacgcgatactgagtgccactgcaaaatgacttcaggatacctcagaccatcggaaacagcagggagcagcttgctgactggagaatgaggcttaatgaaatttttgagctatgaaacatggaaaac

SEQ ID NO: 51312 - DNA, 635 bp, Zea Mays
gttcggtgaaatgcctaaaccagctaaaattgctcaaatcgatcctagatttttccagcaccttcatatcacctcaagtagcatattcgccaaatttcacgccaatccgatatcgcaggcaccagtttttcacaaatccccatttatagctattgaatccgagccgagtgctacaaatccactttcttcgccataattcaaaccaagcgcacacttcactcatatctactcatatatacctactcgtgaagtatcagctcaattccatgtcatttcatgcctcaattccaatttcaaacctcctatggcactattgctcgctcaaacgtggttttcgcgtcgtttgacctctatatcgcaaaatcctcggtttttgtgtcataattctctgtatatgtatttattcacatttcatatacttatgactatgtgactaatacgtgctcacctcttctgtcatttcagtgatctcgcctgcccgtgagcccgtctcctgtcctgcctggattctctctctcgtgaggtttccaggtagttatccgttcttttataatcttagcagctgctatctctcgtgcttagtttttcactctcctatgcaacccttaggtcaagatggtgcgcatgaagaatgt

SEQ ID NO: 51313 - DNA, 2027 bp, Zea Mays
ctcttcattgttcagcaaaaagagaagctttggaatagaacagacaaggccaagaattcattttatctgagaaaatcaccatataactagcttttgatgaagcaaatgatgataactgcttggcaagaatgaaaataggactggtgtccgccaggatccatcttcaacaacagatattactgctctcatacgaagaaatcatcaggagtagagaggatacaacaggtctctacaagatcttcatatttctatcacaaattatcatcactagcagtctagtggtcaagacatatgactcttctggtgccaaggaccaaggacatattaatgcctaatttagcttcaagctctgtgttgatgtgggatttcatggctatttttctactcttcttacttctggtagatcatatatagattatggtaagcatgtcaaggggtgaaatccaatgtagttctgctacataaaccccaattttatttccattcagtattgacctttaccatttggcttactgtataccataccagtcaaaggactatcccaagtcaattcaacgactataagtatttacaattctgagagatgtatgcaacacaagcatagaggtcctagataggacgagtaaagtggttcgacgggaacacacaatagtttttcacacaaacattgtgaaaaaaaatctcagaattacctttccatgtactcgcaacttcgtgttgctatggtactagccatttatctcaaagttcgcttcatgccgttcagcgacaaatagcaatgtgctaacatctgattgagcaatgtatgactgagattctagcatttattcatctgataaggtcttattgcttactaataaaatcccaatttgtgatattttctgtgccaaaaaggctttcatgtattaatattgaatttcttcaggttacttcgggtaaaactttatacacgaggagagagcagagatttaacttatctgtgttccattgtatttcgatttaattttcccagatttaatatagttgttatggccacttggcgatatatataaatatacgatgccacacaacataatcaaacagaatgtaaagtgaaaacaaaattgtttacgaaggttgcacataatgtgacttcaggaccttgaacaacccaccgcaatccacgcgagtacaagctctagcgtatctggcgtcaacgcgtgtgcggccatcagggctacgacagtatagcaagccttcgtaataagcgcaacaggcacaatattggctcaatagtcgggtacacgataagtccacacaacgtgcgcaacaggcgcatttgtggctcgatgatcatgacagacgaatagtgcctacagggcatgcgaaaaatacgcaactcggcgatggcggtccgactcaacgggagcggtaatcacatgacacagccaaattcgtacgacacaaatatttagagcgattttattatgcatagtataaccttcacatgtatttcaaataattttctgctatttactacaggaaataaagcagaaaaataatactgaaattaatatactaacataaacacatcgagtgcaaaaggtatttactcattttaaagcatgtatttttctactaattatttactgcaggaaataattaattaatgtataaactgcaactttaaacatgctttatttttattgctatttgcaatagcaaataaatagtataaataacatagatcatgtaaaaaatactaaagttgattaattcaacatgaatttatgggaaaaaattatcccattagttacaactatattttttttggttaatggacgagatgatgcatgcaggtcatgcatgggtataagccatcacgtccatgtgtcatctgccaaacatatctcaatttgcatgcgaggcacatgactcaaaaccgttttgaccgggtacaagagcccatgcacggtgatagattggaaaaagatggcagatttggtaatatattgcatgcacaagtgcgccaccatgcaccaatacgt

SEQ ID NO: 51314 - DNA, 358 bp, Zea Mays
gaacaactcccgaacctcaggacagatgaccaaggagtcctttggttcaaaaatcgtctgtgtgtaccaaaaggggaggcacgagaggtcctgctagaagaagctcacaactcaacctactccatccacccaggggctaccaagatgtacctagatctcaaaaccagatactggtggagggggatgaagaaagagatagctcagtatgtggcccggtgtgacatctgccaacgaacgaaggccgagcaccaaaaacctgcaggcctattgcaacccctcccaatacctgaatggaagtgggaagaaataggcatggacttcgtaaccggactgccccggacgcaaaaagggaatgatt

SEQ ID NO: 51315 - DNA, 344 bp, Zea Mays
gttattcttattgctgcaaacttcaactgctcctcttaatccacgccgattcgctctgccttgcgctacatccgcgaagctagattgtttagtttggcttgaaatcgatcgcctgtgggaattgggatcggtggattgagttcagctgggatggtacggttatttggcttgctgtttccctggattgaagcatattgggtatttttgggttcgattgtgtttgcggcgcgagacggggattcagaagattggcgttcctcgagtgatccgattgcgagcatgctgtgaagcacttcgtggagggtttcgcctcgctacccaggtgcatggattgggggattatt

SEQ ID NO: 51316 - DNA, 331 bp, Zea Mays
gcggggtgtgaagcggaaggcctcaacacttgagggacacggtggttgtgcgggctgcgtaggagcatctgttcaagttcagagacttggaacaaatcgtcggtgtcaggtaaaagtctggcgatacctgggcggctgtagaagcagcagctggcttgagcagtgagacgtcgaatacttggatgtaccagcgatgtatgtggctgtagactgagacttcacgtgtggtttgttcatgcgtgccatatcagggccaggtgacggaggcttgcccctggccaaagaccgatgctgtacaggggaggtctgtctgattcaggcgctcgtaacc

SEQ ID NO: 51317 - DNA, 781 bp, Zea Mays
ttatcatttgacttcttgttttaacgcctatccagggttctagtgtttctaatttgtgataaatttaaggttttgcttattcaccccctaggcgacttttagatatatactgagggtatctaaaagcaactcgataaatgagaccctaactagtgggtccaaggactcgaccacggtgtccagggactcgacccatatgtcaatgagaagcctgacctaccaggagtagataaggacatgtgatcctatccggttagaagataatattgatatccttataaatatggtaaaacctagatgacaagggtaatttgcatgtatagatagatataaaagtccttgcatttatgggttggcttggctaggatgatctatatcattatctggcgatcagccatataatcttcccgtaaccccttctagaacacaaaaggacagacaaggtgccttagaatggcattatcgagcgacagaaccagactatttccaccatgataagcaatctactaaagagccaaaatatgtcagcgatgttctaggcgaggcagtcgccaccatcatcttcctgctaatcagacacccaccaaggtcaatgacgacatgacaatgtatgtggcctaacatgggcataagttgagtgttcatttcctacgttctttcaggtgtgtggtgtacgtcaaggtgaggaagccacacctaaagaagcttgacaatcatggcactctagttgtcttccacagctataaccaggcaccaagacatggcaattctatgtcccaat

SEQ ID NO: 51318 - DNA, 429 bp, Zea Mays
gggcgcgtgcaagagatgcagtagttgggatattttggatcgggtattggacactagagccgagtggggagttggttgtgtttgaagcgtttttcgttgttggtcttcgacttccgacccattgtttcgttgtcgaggttctagatcgctttagggtccaacttcatcaacttatgcccaatgccatggtggctctagcaaaatttgtgtgggaggtggtgacttacggaggccagccatcagcagaggtcttcgtgaagcactattgtctgcattggtagaagaaggttgctggtaacaagattgggcagttcggcgcctgtacattcatgacgaagactgggaatacttcagacaaactgattgaacttatgtcatgcaccaagaatagttggggcaactggggagattttctggttttatgtccaa

SEQ ID NO: 51319 - DNA, 607 bp, Zea Mays
ccttgggccgtgggaagcagcccgacaatgtctaggccccagcgctgaagaggccatgtgtgggcgatgagctttgtgaactgcgaagggtttcccgagcatggagaaaatttctggcaggcttcgcaggacctcgtcacccgattcgcggcgcaaatcatagcgggccagtagaagccttgtcggatcaccttggcggctagggccctaggccctcgcgtgagagccgcaagttccgatgtggacttcgcgcaggatctgggacgccttcggtctcggtgacacatttaagcatgggttgactgaccccctttttgtaaagccgtccctcaatgagtgcgaagtcacggcttcggtgtttgaggcgcttggcctcgttgatatcgctcggatggtagtatccccgaaggaacaaggttattggtgcccgccagtcttcggtcatgatgaggttgactatgcggtggccctcggtgtcgttggtgatttggaggccctctaggctgcggacggctggcgtgccgatgacgtggtagaacacgtcggagggcagggcctcgcctctggtggctgccttggccaatgcgtcggcctcctcattcttggc

SEQ ID NO: 51320 - DNA, 453 bp, Zea Mays
aactgacctcacaatcgccggaccagacgaagggaacacccttctccaagagcctagtcaaaggcttagcaatgctggaaaaatttggtacgaagcgccgataatacccagcaagccccaagaaacttcggattttagagacactagaaggtctcttccactccaccacagctgcaacgttcttgggatcaaccgcaataccctgctgattaatcatgtgccccaggaaagccacttcggatagccaaaaggcacacttctttaacttgccatagaattgattcttccttagggcacccagaacgagacggagatgctgttcatgctcggcctcggtctttgaataaatcaaaatatcatccaggaacacgaccacaaaatcatccaggaattcatgcaacatcctactcattgcttccataaaggtagcaggggcattagttaagccaaaag

SEQ ID NO: 51321 - DNA, 610 bp, Zea Mays
cgattctaggatctcgatatagaaaattatcatgggcccaccaattgggaccctcgccttggggccccaaaccctggcctctacccttgtaggggcttggcaccgagtgatagtgacttgacattggggcaccccaaaggaataactacaccataaattttgtaagaagccactaaggggtctagggccatgggatgtccctggctagaagaatctaagtcttcgggccctcttgtgccttgaggcactcatgaacaatctaagcccttaggattcctcgtgccctcgggtgctcatgaagggtacgaatactcggagcaatccgaccacgacactagggccactgctggcctgaatatctctagcctcagattatgagcacgactaagccccgaaccctttggtgtctatagcctccaaaggaacaagggacttgatgcaactgagtgtaatcttatcacaagacgaaagggtgtgcttgggtccatcgaggcagtatggcctaaaatcaagaccccacaccaaaaggcctgctaaaaagtccatagcgttagcttatcggataagccttaggtgcaacacattaaatgtgtgaagtacggcattacag

SEQ ID NO: 51322 - DNA, 665 bp, Zea Mays
ctagaccttattttcaatgggatcgtacatactcttagagcatctgcagagttatctaaaaaaagtgaccctgaatatctatttaggaagttgctaaacaggttttgggagagaaaatttgctatccaacagatccttatatccagggacttaatcaaatttgaatctctgcattgacatattccaccaatcacgtacagctcaaagagtgcaggttgttcgtttatgccaagagccaagtgcagcctagtgttagtggaccgtttctttttcccaacagcaggtgatcggtggccagatattgtgctccaacgtactgttgctatgcattccaatccttgcttccagctattgtttgcttcatcaaattctatccaggattttttcttcatgattctgtgcattccaatccttgcttcataatagactactgttgtttgcttcatcaatttttgttcaattttttttcttcatgattatgtgcattccaatccttgctgcctgctgttaaggacacaattatatagagtttcactgcagaggctcgtaacatgtttgaaagacaatttgacgtgttctgctactctctgttttagtccaatgagctggagaaaacatttgttcctatacagacatatcattgtgatcatgagttgccttgctta

SEQ ID NO: 51323 - DNA, 649 bp, Zea Mays
gagcttcgcatcttgaagaaacttgtgtcgcaggagctagaggttgctcgtcgcgatgtagaggcttcccatcatgatatcaaggtcttggaggacgatcgtgctatcatgaaggcatggtgtgacaaagcaatggataaggctatccgggctggccggattttgatgaagaggcctggcgttgtggtgcctgatgacattgtagttgatgtactcgttgcatcgggtactttgagtaatccttctgcttctggtgaccctgtggacaaggttcctcgcgaggatgctcatgcacagtaactagagagtgagagtgtacattgatttgttcaaacagataataacttttcattgagatggtatttttcgcggttttttgaactcttgtcgaatgttgagttactctcctttgttgagtgtgggtagggcatagtatgcgccctgggctttttgctgcttaattgatcgtgtcgcaccgacttaaggcatttccgaattaagtcgattgctgcgttggtggggcatagtagtcaccctaagttatgtatgtgtgagcatgtcgcgctgacttaagtcgtttccgacttagaccgattgctacattagcagggtatagtaatcaccctaagttatttatgtgtgagcatgt

SEQ ID NO: 51324 - DNA, 521 bp, Zea Mays
ggcctatcatcctcaaaccagtgggcagactgagagagtgaaccaaatacttgaagacatgttacgggcatgtgttctggaattcccacaaaaatgggatgaatgtttaccattggtggagttttcatacaacaacatctatcaagagagcatcaagatggcaccctttgaagctttatatggacgacggtgtcgtactccattaaactggtctgaaccgggagaaaagtggttcttcaggcctgatatggtaaaagaaatggaagaaaaagttcaacgaattatacataatttgaaagaagcacaagctcgacaaaagagttatgcagacaaacgacgccaacccttgtactttcaagttgaagactatgtgtatctaaaagtatcaccaatgaagggtgtatctcgtttcggggtaaaagaaaatcttgcaccccggtacattggtccatttccaatccttcaaagatgtggaccagtggcgtaccgacttcaactatccgaaacattgtctgcagtgc

SEQ ID NO: 51325 - DNA, 377 bp, Zea Mays
caaggactatgacctggaggtacattatgacccagagaaagccaatgtggtagcagatgccttgagtcggaaatcgcaatgcaactgtgttatgatggattctcgcatcaacaccctatgtgatgagttgagtaaaatgaagattgaagtgattccgttgagccaactttgcaagaccagatcattatggcccaactcagtgacatgggagtgcaaattattaaggagaacctccatcataagacagagaagtataaatgtttctgccaatatggatagggtatattgtggtttgaaagcagattggtagttcctaaaaataaggatctcaataataaaatcttggatgaggcccatctctccaaattctccatgca

SEQ ID NO: 51326 - DNA, 851 bp, Zea Mays
cccaatatcaggtttcgttaggttttgttctatcagggtaccttttcttagttaagttgattctgaaatctgtggaaaacgtagtcaaatacatttttgggaatgcacctcattcagttaaatgtatgttttcaaataccgtaaggagtcttttagggtcctatattcttatatatctttgttcgctgttcgaaagtgactctaaaagactcaaagcaagattgccgtttattagtgctattgtttccgctttagttatgagactggaggaattcaactctcaccatgttgttcggaggacctgtgttttatgttacagtttgaggcgctcaaacgtttaggtgccaccatgttcatggattgcctgtcaatttcatcttatgttaggcaacttactaagccctttctcttatcgtgcacttgcggccagtttcttgaatgtcggctaaatgtcatttgggagttagcttcattcagtgattggttatgttgctagcctgatgagatgtgtatgccaaccctatgccttttttttatctgtttctggaaggaagtcccgttcttggctgttgattttgatttattgctcaaatgatacaaaccttggcgttgcgatgttcttctcagcctcaactcgtaacgaccaaacagacataatgcgccagaaacctaatgctgatggtggccgctacgattctgcaccatcttctgcaatctacagtgtctaccttttctactcgaatggaaatacaggctttagaatgcatcagatgagtttacttctttaccccgtgacctgccattctatgatcttttgggggtattttctaatgcatgctgcctggttcctg

SEQ ID NO: 51327 - DNA, 497 bp, Zea Mays
ctttaggactctgatcaagtgattaatgccgtggaacaggctgctggagatatatgaccgtgactttgctcacgcacacatgcacacattcaccgtaccgtacgtcgatctatatatagcagagacacgcacaccacgatacgtgtcataacaactttgaaagtacgccagaagtcctaatagtggactaaacctgtgcgccacttttttcctatttttggagagaacaggtcgatggagaggaaaacctagctagaagaaaaatcacgagtcgatctactacattatacaaggttgcttattgggggcgctggttggatctgtggcgaatggcgaagcgagaagcgagaagcgacagaatgggtagtagtacgtgaagattccgtggtgggagatacgacaacaccctcgaaactggtccttaattaagcgctgatgatggacggcaataatcgtgttggctcgctttccatgtgtgcgtattaattggggtgcca

SEQ ID NO: 51328 - DNA, 591 bp, Zea Mays
gacaaatttgaagggctggaatttcatcatgtggaaagagatcgcaatgcggcggcagacgtgttgtcaaaactaggatccagtcggacccaggttccaccgagagttttcgtccaagaggtgccatgcccaagcatttcctcagatcaggctggagagtgcaatgttttgagccaaccagagtcagactctaatgactggagggagcccatcctgagatatataaagaatgaagaggaactggatgacaaagctgcagcagaacgcatcgcaaggcagtcagcccactacaccctcattggggatgcactgtacaaaaggggcacaacaggagccctcatgaagtgcattctttcagctactgggaagcaactgttagatgagatccacgctggacagtgtaggatacacgtagcatccaggaccctggttgggaaggtctttcaggtctagtttctactggccgacagcaaagagtgatgcagctgagttagtccagaggtgtgaagcttgccagttcttatcaaagcagcagcatttaccagcatagcaactgcagaccatacccgtgacatggccatttgtgtgctg

SEQ ID NO: 51329 - DNA, 329 bp, Zea Mays
gcttggcccctagagacctaaaccttatcctgaccaagggataggtcttgaaatcctgctcggcaaggtccagaagcataatccagaggattgaaggcaatcataacaccccataggtacggttaagcaccataacacagggttgtgtgcagggacgtctttttaatccaggtcaccaggcgagggggtgggtcggagctgtcacaaggagggacggtcccacccactactcccctcacaaggcgaggcccggtgctgccacatattctacgccacgagacgtgagccatcggggaagcccgacacaatcctctaaaatatagtgcgcc

SEQ ID NO: 51330 - DNA, 437 bp, Zea Mays
aaacaatgttgtagatatagacacacaatggtgacattgatgtctctgtttctgtgttgcccttggcgtctagggaaggatgctaccatgacctctttgttaggtttggtgatctttgcagtgtcacacttggccaatccgaggcacttaggaataaacaaagtgttgatctattcttgtgcacaatgtgaacacataaatagagagggttaggagacataccatcgtcttggctcggtggtggtccctggtcgccgtcgtcgggacgctgccgtcgctgccgtcgtcctgcagaggagagacggtccgagccaccgtaggttgtcgcgcttctagtcactccgacacctaggcgatgggtcctgtttgtagattagggtttagggcaaggtactagcgttgacttttcctgcgacccttaatcctttatatagcgt

SEQ ID NO: 51331 - DNA, 727 bp, Zea Mays
gttttagttctggtagaaaaagaaaaagaaaagctgtgaacagtactgggccgaaagcagcccaagcggcccagcctgaacaggaacagggacgcgcccacgcacgcccgcgcgcgcgacgactttgtagaaatacccctgataacctgaagaatgtgcgaagaaccctcggccattatttaatgtctcgctgacagcttacacagaggcccccaaacttttgtttcttctccaactacgcccccaaccacggcgcgctcgtcgttcgcccccgacgcggcccgtactggccatggcctgcgatggctgccaagtctagctattggggaggcataaccgaccaagggtgacctaggaacactcgtcaatttgacatgaacacactgagacgatctgcccacgtgcacggcggaaaccgtgaccacgagctcatgttcccgcttaatcatggctgaattgaacaaacggttaccatgatgagcttcctgggtgtacaaagctactaaaacggcacttggaatggacagagccttactagagtgggttgccatggacgagctattcacgtcggcgtaaagacccgagttggggggaaatggtgtcgtgacggctctaggtgaaattgggggtggagcttggggctatacagctgtaggggactctagtttcaccgtgcacactcaatttgagaggaggggtcagagacagcgtgaatttgggctttgat

SEQ ID NO: 51332 - DNA, 315 bp, Zea Mays
gcgttgcctaggtgcagcgcagattggagtatccccagcttccctcataaggccattaccattgcttgactacgaccccgatgtgcactctctctcctttccattccccggatccctggcaaccccaaggctgcagcccgacatggtcaaagacaaccacaccactgcaacgaagcgacgggataccctagatttatagtccgaatgcaaggccgaggaacaacaaatcccattgacccgcctaaaacctcggcatcagttaggatttggtattcgccacaacggggaggacgggtctgagcgctgggggccacc

SEQ ID NO: 51333 - DNA, 368 bp, Zea Mays
gcctggtccgagtgctgggcgtaggcggcgaagggcggttgcgaagcgtagagtgagtgaggtggatggcggtcggcttcgtgtgggcagggctggcaagcaggaattgttgtcctcgccagccgttgcgagtgtaggtgagggggagttgcgaagtctttttgagggtgaggagcttaggataatgttatttaactatagggagatgggaatcattccgaaggttgaaccgatgtgaggtgtggtgccctcactgtaagtatgttactatagtttgtatgatgaggccgtgtgccttcgtgcatccggctatgtctataggcgcgcttgttgaattaatctggttgcacccttaggcgacttttgca

SEQ ID NO: 51334 - DNA, 434 bp, Zea Mays
tcaaggacagaaaagcagctcgaccgagtacactgcctccacccagatttggtactgctggccacttctagcgcacctcgatgaattccaggttttacatttttaaataaatattttgcataaggcttaaagatttaaaaaaaattaacggtgttatatacttgtgaaaggaggtagtaccattgaagatgataagcttcgtcaacctgtctttgcctgcagcagatttgtacttgagccatgaacctcccgctgccacatggtacagaccacttcattggtggataaacagggagcatgtgcactgacacaggccaaacaacaacaaaatattgctaataatacttaatttctccatgtttattattatacgggccatctagtaggattctagttagttttaatttgtgtaatagcataacatgtattcgtac

SEQ ID NO: 51335 - DNA, 631 bp, Zea Mays
aaaaattaatctataaaaaatataaaactaaatgaactttagttatgcattattggtgagctgaataatgtaagtgaaaaagaagcataactattagtatcttcatgttgtggatcatgcttcgtcgcagcccttagaactttgcctatcatttctccaaatgcctcggatagttcaatctgcttggacacaagcatgtgatggctttgttgaagagaagcgcagtacttgtcaacctcctagtcatgcgcatcaaacaatgattcgaacattggacgatgctgggtgggtagacaatttagcttgttgccaatcaaatatttgatgcgtggaacatatatgttgaatatctcagaaaccagccgttctggaaaaataacataacaagtctctgtgcggctacgaaaatgtttaaatcccagtgataactgttagcgtgtattagaactataacatttgtatcaacatcaaaacaaatgttaatgactaacctctccatgaccaaatggttctccaggttggcgggagccacgtctgtcagccctagtcaaatcttttatcgtctcgttgtcaaaaaacttgataaggggagtaccatacttgttccgaggtgacgcagtgtggtgtaaat

SEQ ID NO: 51336 - DNA, 705 bp, Zea Mays
ctttgacataaaaccattcagtcttccaaccagctggccatttggtacgatagctgataactggagacttcacatctttgcgataagcaaaattgtagcagccgaagttctcgtgcagcccatcttctctagctgttgtctaataatgaagctcatgtgcccagcaaaagccttcggcaagcggctctgccccctggcttcggagagcccagatgtagacgctaagcctaacgatggcgttaggagttagctgatgaagataaatcccaaacttctccaaaacatccgcaatcatctcattcaaaggaaatcttaattctgctttaaagaagcttttaaagactaccacctcatccttttctggcttcggagtaatttcatctccgccaaagcgaatcggtttctttttggcttcactgaaatagcctaacttcatcaacttaggcatatcatcttcggtaacagtggacctcccaaactccaagtggctgggtttagatggtagggcactgtaatcatcttcagattcaccttcctcagcatcaacctgctcagcttcagtggcaggtgcaccttcatcagaaacatcctccggcactaccagccccgagcgtttcatcacttcggaaatcggagcggtttcagcagcttcggcttcttctccgtcacgtgtaaccctggcagtggaacgtacccttgccattt

SEQ ID NO: 51337 - DNA, 346 bp, Zea Mays
cgagttctctctataagacctgccatcttagtgtccaggcgttgagccttgcgtatgaggtcttctagcattggcttgacttttaggctgccattgtctcccagacaagtattcagttgagctgattctttcttccagtcttccaagaagttggtttctttcttcccaaagggttttcggctgtgggcgtctgctatcttgttggcctcccaggggtggtagtggatctcaaggtcataatctttgatcaattctagccatcttcgttgacggagattgaggtctggctgagtgaagatgtacttcaggctcttgtgatctatgaagatgtgacatttgttcccaa

SEQ ID NO: 51338 - DNA, 586 bp, Zea Mays
cacctagggtttcttctttaagctaaactaaaccattatcacatgtgaaccaaatagaggcatgaacatcaaaaattaataacaaaggttgaagtgagtctttttcatcttaagaaattctccttaatcatgtcatgaacctcaaggtaagaagaactctcaaaccctaattaatcctaagtgaaccatttaagcacataaagggaatttgggaaaacacttgggaaaaatacaaaattttggtaagaaccaaataacaaagttgtagtgcactaaataaccaacaaaatatagtcagaaggttttgccatttggattttccaaaatccccaaagcagacctttgaaccaatgccctatgggaaattcagaattcagagtcttgaatttcataaccctcttgcaagatcaaatgtgttccctgttttccaaaactcgaaaccaaaaagtccatatatcaaagtggtgccaaatttccttgaacacgctctggaaaaatttgaactcaaacaaaaaccgtttggcacgattttggcaccgtttgtccctgggaccccggctatctgacactggcaccttggtgacgc

SEQ ID NO: 51339 - DNA, 643 bp, Zea Mays
cctcaatgtagcgaccaacttggtcgacaaaggaccagagcatacatcgctggtatgttgccctagcgtttttaagccaaaaggcatagaaatataacagaaggatctgaagggagtgatgaacgaggtaccgtgttggtcgctttccttgatggcgatctagtgataacccaagtagtaatctagataggagaggagctcgcatccagcggtggagtcaacaacttggtcgatgcgggggagtgtgaaaggatcctttggacatgccttatttaggcctatctaagcaatacacatcctccatttcccaatttcttcttaacgagtaaaagattggtgacccacattgggtggtgcatttcttttatgaatcctatcgcttagagttttttgatctcttcacctatcgctttgcactgttttcatcgaaacaacagagacactaggcaaccagcctggccattggttggatgttcaagaagtgctcgacgacttcccacaggatccctggcatgtctatgggcctcgatgttaagacatctcagttggactggaggaagtcgacgagcatgtttccctatttgtcggagagtgctaccccaacgcgaacccgcttggtcaagaccgtgaggttgaccgggac

SEQ ID NO: 51340 - DNA, 395 bp, Zea Mays
ataaatatccaagtagaaaaccctcatcacatttcttctcaaatttagagagccgactttcttttctcaaaatatagcatttgtaaccaaatactctaaaatatgagatatttggctttctaccaataagcaattcatagggagttttcttcaagagcttgtgacaatatagcctatttgatgcgtgacaagcggtgtttatggcttcagcccaataagaatccgacacattatattccgctagcatagacctagccatatcaatgagagtcctattcttcctttcaacaataccattttgttctggggtatatttggaagaaaattcatgttccttgtcatcacaatattcatcaattctagcatttttgaattctgacccattatcacctcta

SEQ ID NO: 51341 - DNA, 554 bp, Zea Mays
ctccctagtcgaagctgtgttcaggtttaggtcccagtcgaggctgccccctggggaccattcccaactcttttaggtatgctggcatccagtctcgacaagtcgagcctacatcccacgggggccaggtaccaaggaggagtcagtaacaccacacacaacagggacaagtggtacacagataagtgctaatactgcttgataaatagtactcaaaagtaccttacaaaaaacaaaagttattacatccgccttcaagcggagtcctagctccatctctactctacaggtatggactactctgcaccagcagggtcgtgttgaaagctagctccgagtggcttgccagcggcagcgaccacctctgcaccagcggatcgccagcggtggcgaccacctcagcgtgtgcatcatggcgaggaggccctagccctcgtcctcctacgggggtgaggacaagaccatccaagcacgcgtccgccacctccacggtgtacgacgtcttgtacgaccccctgggcggcgtcggagcagcgtggcctgcggtggccggc

SEQ ID NO: 51342 - DNA, 770 bp, Zea Mays
gcctgcgcgtagggatgcccagcacgacatcaattagacaggaagattctggtggtgaccagcacaatggggatcacaaaggacctgttcggatgtgggaccctccccgtggccggatctctcgtgattgagcgggctctgaaactcaggcaagaactctcatgtgcttccctgtttccttcacgtagctagtagtatttggtttggctgtgggagcacttgaagcaccgagcttgagctctggtaatggcgacttgaggggggggaggtctcccacaccagcgtgttcgacagacagagggttgaagaagaaccgtgggccactagatttcgcatcggtggatgaggttgacctttgagcgtacccccttgtggcctgtatcttggtcgttgatcggtattcaacagccgcgatcgcgtcgcgcataacccttcaggcgggaaaatcagaaccgtggattgcctgatgggcggcccagatcgtataccaattcgggtgtgattcaatctaatctgggccactagttttggatcggacgactgtcatgcgcaaataccccttcgtcgagcctttatgcataagagcccttcaacttttacaaaactaacccgccatccttttccgttgaagctaatcacaagcaagtccctggtttttacaaaatcacccctgagtttcggataaatagtggtcgcagtccgaaggttagtaaaatggttcaaatcaataaggaaaatgattttttagtttaaaaataattcttgaaact

SEQ ID NO: 51343 - DNA, 498 bp, Zea Mays
caaaatgtggaggtgaacacggcgtcacggtcggacaccatgtactgcggaacgccgtgcaagcgaacgatctcggcgaagaaagcctgggccactgactccgccgaataaggatgcgctagcggaataaagtggtagtacttgctgaatctgtccaccaccgtcaagatggcggacttgccgcggacccgaggcagggcttcaatgaagtcgagcgctacatccgtctagacgccttggggcaccggttgtggaaggaggaggcccgcaggatgaaggtgctcagacttatgacgctggcacgtcggcacgccctcacgtagtcctggacgacctgcttcatattaggaaaatgaaagtcacgtcgaagccggtgcatcgtgcgttggacaccctcgtgcccctcctcgtggatggccgccaacaactcctagagcagtgccgaggctggtggcacatataggcggcctgtgtagtggatcatgtcgtcgatgaccg

SEQ ID NO: 51344 - DNA, 287 bp, Zea Mays
tccaaaggatgtgatgaaagcagtcttctcctcatcttcttttgccaagcttatctaatgatatccggagtagcagtctaggaaggaaagcatggagcagccagcgatcgagtcaactacctgatctattctagggaacccgaagggatccttcggaaaatgcttgttgagatcagtatagtcaacgcacatgcgccaatcaactttattctttttgagtacaagaaaaggatttgctagccactcagggtgcagtacctcccgaatgaaccttgctgacactaagc

SEQ ID NO: 51345 - DNA, 790 bp, Zea Mays
gaaacaggcgcgaaataaaaaatatatcattacatcgattaaaaataatcttcatacgtgtcggggttagccggatcataaatctcatcatcactatcaaccatttcataatcaacaccatctgaaggcgcaagttcaccattaatgtcattgccttcaagtatttctaagtcattctcattttgcacctcatcatcctcctcatcaacaaccatttcaatatctacttccattctgatagcttcggttaagtctatctcaaatcgcccttctagcccattttcttggaagacctctccgtcatatgtgtcagggtctaagttataatcttcatcgtttggaacagacaatttaccgtgcggtgataccttatacacaacatttcaacccttaagatgttcttttgtttggcacgcatatgggagataatgcacttgtgtggcctgttgggccacgatatagacatcgtgtcctggtaaggtggaatcctatcgaatttcgactataccaagaatagaatgtgtccgtctcgtcacttcagggtcaaaccaatgacatttgaatatcactggagtaagaggtttggaaccatgaaaattgagttcatatatttcttcgattcgtccaaaatactcgacctcgtcaaggccaggcgtaaagactccagaacacgttgtttttcgattgggccaactttggtcgtagcttgttgtgcgaaaacggtatccattgacgtcatacccaaaatatttcctgaccctataagcaaatccattggctatttgtctca

SEQ ID NO: 51346 - DNA, 337 bp, Zea Mays
gacgcagaccgtgtggttcatgatgatcacaggcacagcatatgtaccacgagaactaaaaagcacgcacacggatcagaaaagcatagatcggatacatagatcccatataattcgacgcaagtttgcatcaacacctggccgtataattagtcgctcctcatccgcagaaatgatggtcgttgaacgattctggcaaaccaaccaaaccacaaccttgtcctttcaaagtatccaatccacggaacaattcatcaagagcctgactgacgctcgcatgcgggagggaagccgtgggagactgccagactgagacagtaaacggaacaggtgtgca

SEQ ID NO: 51347 - DNA, 547 bp, Zea Mays
tgtgtgtgtgagatcgtcgcggtcagtgctccacaggtccgatcatgttctcctcgctcttgttatagcattccagtgtgcccttgaagctcgtcggcccaaccaactgaactgaactggagtagatcgacgggaacactttgaattgtccccggattgcgcagtcaccttgagcagagaaattgggggctagaaccttgcaattgatcgaggggaaacgattgttaggggttaaattaagtgtcagccaagctagagccctagtcgttgcctattctggccagtatgagctcgctagagcccggtctgtcgccgttcaccgtcgggtatcgcgggttgtgaaggaatataagtgcgagggtctcggtgcaattgtctgtgagacagagaaatagtagaaaggagtctttacgagttgttcaaacagccaggggccttttcacaagaccggcaacgcgggcgcaggcgcgcgcgtatttccccgttcgtgggccgactcgggccagttttagcccaccactgttcgccctttctctttttctttttc

SEQ ID NO: 51348 - DNA, 582 bp, Zea Mays
gtatagatctaatgcatatgcaaggaattgatccacctagtggcacttagatagacactatgaactttgagttcccctcttaataatatagctatctatcataaaccaaatcatgcacttgttgtgtcttttaaagtcgcctagagggggatgaataggtaaaacctaaaaattataaactttgaacacgaacttcacccgatgttagcgttagaatgagcagtaatgaaatcggagtgcagaaggtagttcttcttgccacgagttgctcaattaatgaggatatcttgggagcttaggccccttgtccttgaccgtttgattctttggtcctgtcattgttagcacaaaacagagacaaaacgacaacaaacaatgtgaaccctacaactatctctcagggtggtggtggtggtggaatacaaattatgaagcgtcttaccctgctcttacaacgttcttaccagcactgcaggtggcaaacggtgaccggtgtgactatccaacgagcgtgggtgtgattgcaaaggagtacctgttctgctcgagagaaagctggagttctgggaaggctgactaaat

SEQ ID NO: 51349 - DNA, 531 bp, Zea Mays
caaaaagttagctaaatggtctagatgtaggaccccatacgctcgaacccagatgcaataaattagcgaatttgagagccaaattcaccattacgatgaagctcttcaaaggtgcgccatcaactcaagttcgatggattttatgaaaattgcccaccactattacttaccccacgtttcacatcacttatttctttcacaagtctacccccaccatgatagttagtcgtgcccctccaccgaccggatgtgccctccacccatgcctttaccagtagtgccccgccttgactggtgtgcgttgcccgtgtcgattcaccatacaaccataccgtactcttgaccaatcatgcctcacccatccctatcgcccgccctaggtgatcttctctctctcccttgccccgactgaccatgccctctctccctctctcctaactgctagctctctacgcacctagacatgagtgtcacatctgccctagtcactagcaacaaccctaccttgctcatgcatcaacaacaaacttc

SEQ ID NO: 51350 - DNA, 491 bp, Zea Mays
ttgaggaggacctaaggacgctagaacaaatgatcaaagcgctggaactgacctggagaaagctgtccacggcgagggtgaccgtgcggggtttttgagcagattgggggaagtccaaaattggagctcactggtgatcgttagagggcaatacttggtggatgggtgcgtgatgatcctacggagctcatggtggcctcaatttatagtaagcaagagcggtggccgggaatttgagcgacgacgcgcggcggccggaaggacaaggagttactggcgcgcgattagtgtccggttaccgtggccatctccccagcgatggacataggattacagcgggtcacgacgactcggtggaggtgccagggtacgtggcgtcaagtcgtgaggcggctgtcgtcagcgagcttatccaaatccaccgtggcgagctcggtacgatggccggaattgtttaccggccggagttatccacggcgacgatatttacg

SEQ ID NO: 51351 - DNA, 375 bp, Zea Mays
cccaccgaccaggctgccgctcgtacacgccgcggcaccgcttcatgggggccgaatcgtcgacgacgacgacgcgctcccggcagctctcgctgacgatcggatttgcttgctttcgtcgacaaccgcagccaacagggttctttgcgcgggtgtttctagctagtgccggaatgcaagattaataatcttggtcctcatataggaggcggaactcgcatgctcgctagctggattctgaatcggttggatcaggatcggagtccgtatcctccttggagcttccatgcctccaatccaatcctgccaagaccgaagaggcggataacaaactgcttatgtcactacacgccagggtttacaattgagtttatg

SEQ ID NO: 51352 - DNA, 385 bp, Zea Mays
cttggtctgatgtagcctttctctaatagtttgttgatctgcttcttgagttccaccaattataggctctcttagaaatagtggcggtgtcaggttcaagctctatggcaaactcaactttacgctcgggtggcatgcttggtaaatcctcaggaaacacgtcgggaaactctgacacaactctgatagcttcaagcaagttggcctccttaccatctacagacatatggtgacaggctccttcttctaaatcaggcatgaacagttcagttactacttctttcctggatggggatactaactttattgtcctcttgtcacaactgaagttgcttggattctgtgcagccaatccatccctaggatgacatctaacccttgagtt

SEQ ID NO: 51353 - DNA, 308 bp, Zea Mays
cggtcaaagagccataaatgtgttagtcatgcacaaaaatacatgggcctttgaatatcatggcattggagagtcttattagtacgacctaggctaatttagctcagaacgattggggttggagtaaacctggtctgagtgactagttcggttctcgctttggccgatctaaggctagggtcgacttggtcatgataatcaagtcgaggtttgcttgttgaccaaggtcagggccaatctggttaagataatcaagtcggagtttgcctgaggcgacctattcgaaatgaccaggacaaggcctcctt

SEQ ID NO: 51354 - DNA, 314 bp, Zea Mays
cctcaactggacaagttcgtggtggttttcatcgatgatatcttggtgtactcaaagaacgaagaagagcatgtcggtcatttgcatgtagtgcttcaacgtctgcgagagcaccgtctttatgccaaattgtcaaaatgtgatttttggctaaagggaatcaaattcttgggtcacactatctcttaggcaggcatagctgttgatcctgataaggtgcaagaggtgatgaactagaagccaccgacaactgtctgtcagattcgaagttttctgggattggctggttattatcgaagattcattccggattt

SEQ ID NO: 51355 - DNA, 622 bp, Zea Mays
cttttaccaatcagaataaatggtgacgtgtacagctacagtagtagggagaatattccgtacatgttttggaccagagtacaggaacacatgaagaaatgatttctgaaaagtcgccagcgcaagtgaacgactcctcaaaataaccaacgtacccacaatataatgagcactacgaattgaagcagggctccaattgtctagacgcagtcacgcagatgcgctgctattttgcgacagaaaacggtgagtgcagaaaggtaagcaggttcataaattctcaaaatcgccaatacagagaagtgaaaacaagcaatacagacaaatgcactaaacctctatgaacatcaagagcataatgcaatgcggcacaaataaataagatcaaacccaagtcgacctggaaacgatgccctctgtatgtcagggaagataagggtctcctccatccttgcgtgctccagcatcacctccattgcgtccccgtaccacttgccgagactcctgacctcagcaccctctacaacgctcctccccttcccggacttcttccccttcttgaccatctccaccaccttcgccgccacgccctcgaggtgcctctccgcgctgcggtgctgca

SEQ ID NO: 51356 - DNA, 876 bp, Zea Mays
ggcggcgaggggagcggttgatctgatctgtccagacactgtaccatggcgatgcttattcagtgtgtctgacagccaagatttagggccagattcctcccaattttctatgaaaacatccccaagtctctacatcaaagttgtagtgctacattccagctacaaatttgttatgggaatcacgctcaaacttgcactggatcatgtttaaatccgagccctaattccatgccattccactgttaatctgaatttcagatttcaagcagtctgacagtccaacttcaggctcatttatctcaaatacttacttaacaactatgctcgcactcttaagcaaagttgttctcctatgattgggctacaattttggtgtggtgacctagggcaaaaaccctatagtttaaaagctacaagactcaaaagttgagcaaaatctctgcaattcagacttaagccatttgggacataagaagtgatttttgcaaatagacccaaaacttagggtttagcttgcaaattcacatatgagtgacccaaatgactcaagatacttatttaacttggtttttgcactttagtccaaaagtggactaattttgcacatgagcccctagggtttggttttagggttttccaggggtccaattagggtttttggtacttcaggggtataaatgtaattcacctttattcttgggataatttcatgacttttcccctaaagcttttaggttttctcaatttgggttatgttttacccctttaatccccctttagggttaggtgccctctctagggttctatttgcaaaatacaacttgtttgaaatttttacctagtaaatgcactctaggtgtgtcaaacatatgcaat

SEQ ID NO: 51357 - DNA, 394 bp, Zea Mays
ggcagacccagtggtggtcaccattgtcaagtcagtttctcccagaagttaaatgcgctctctatgtgcaacagagcagaaattaaaacccattacgcagatacataaagagttacggcagcaattagaaccaatgcaaggaccgcagcgatgatggctatttcacctgttcttgcaggcgacagaggatccatggatggaccaatcagcagactgttgaagatggtgcattagtgcaaaatcaatttcagatcttgactgctcagagtttggctcatgagtcatgacttcggtgctggacattgccggggatctacagagtatgtcttcgttctgttacgtacataggtctagtactagcagtaggaaaaaacggttatgctatacgttagca

SEQ ID NO: 51358 - DNA, 545 bp, Zea Mays
atagcgttaggagtcagctgatgaaagtatatttcgaaattttttaggacttcccctatcatctcatttaggggaaaacgcaaccccgctctaaagaagctcttaaaaaccactacttcatcattcttcggtgctggggtagtctcttctctggcaaatcggacaagtttgctttcagcttccccaaaatagcacagtttcatcatcatgggcatgtcgtcttcggacacagtagatttctcaaaatctagatggctaggctttgttgggatcaaaatattgtaatcttcttcactttcatcaacattttcttcttcaacaacagtatgttcagcttcggcatcaggagcaccttcatcaatagctccctctatcacaactagacctgatcgttgcatgagttctaaaattggagctgtctcagtgacctcggcctcttctccctcacgagacacccttgcagttgatcgcactctggccattttgatggtttttacaatttgacgaagctagctcgtctgacgaagttaactttaaatgatgaa

SEQ ID NO: 51359 - DNA, 718 bp, Zea Mays
aaatcactctacagtaaactgtgtaagaggataagctagttatggtatctaacattattgtatcacttgatggaggtacaggattgcttttccctacctattttattcgtgatgtgacataactttgaagactggtgtggacaggcatctgatacattcatgcatctatgcatgtggagaaagcacaagcaaagtcccctccaataattcaggtcttatcattcaggactaggtgttgtcgtcagttttcaggcctatcttcagatcgtccattgatggatcttgatcccctcaaatcgaggaaatgctatgtgccttgccagcttatcctacgcctatcttttcttttcctcctctgcttttgtataacagatattttactactccatcccgacttgttcttttggtcagcagtcagcacctatccatgccctgatcaactacagtaaggaaaataacagacaacgatatctaagaaaggaaacactgatgtacatatattcaaggactgaagtgggtccagcaataaaaacatctcatgtggtggtagacagaaataaacatgcacatgataagacaactccattgtctttattatagatattattccagcaatacctggagttgtactatgatggactcaacaaccacaatcaagttgcacagttaggccctatttggttcctctagtcacctttctaaactttaggtattaaac

SEQ ID NO: 51360 - DNA, 512 bp, Zea Mays
gcatagttaccacaaaacaaaagttggctgttagggtcaattgggggatggcggctgtcgaggctcccttcttcttagtcttgggtgccatgtgactcctcacaagcacgaaatcaggcgcgaagttgtaggggcagatgaatttcgaaggagaagacacaacaaaagcagcactagggttttcgccaaagctgtcaagtggggaggtatatatatacaaggcctattacgacaacagcgcaagagaacccgttcttggaccgaaagaagaggcattatgtcggacaaactaagttggatagaaaacacactttgaagcaaaagtcattcgggagcgatcggtcgctaatactaagttttagtacacaaaaacaggaaatcaacactagtgaccagattctagacacagaaactcgatgatcagatagaagacaccagcaactttattatgcatgggaggggcatcattacacaagaacgatcatttcattatgaaatgaccattacaaaag

SEQ ID NO: 51361 - DNA, 1057 bp, Zea Mays
agaaccaccgaccaaacgtgaaccaaatgctatttgagaggggaaatcaatcgatccactctctaatctaatagatgtttgctatcttttctctcaagtttttatggttggaatcaaagatttgcttggaagcttgagagagaacattggagagagggttgaacacttttctgttatgtgatggtcaaatgcgagaaagaagtagtagtagccattgtgcgtgaacagatgagtacttatactcagagttctaacggttatgttaagggcaacactaccactcttaaagggaatatggtttaatagtttgaccaactatccttgagtctccctacgactttttataaactcaagatacaaaacataaaagagtttaaaaacattgagttggcaaagcctccattagtgattgggggtccttcaacttgtataacatccttcctatttgattccatgcttgtcatatcaataaatatcattagttctctaaatcggtggtcatcaacaccaaaaccctcattagggcctgattgcattcgtagagcaacacttgagtatatatatcaatctcaagttcatgcatgttgtaagtggtggctctagttggcctacactactagtttgtgaacttgggtccacctactgtctagggttgaatgtttttgttcaaaccttgttcatgcccatatttttatttgggttgatatagggagtccatgctcttttgaattaatgttagttggatgactccttcctaaagatattgtttccttgactatacccaacttttcccatgatgatgaatcactttagcacgctagctaaggtgtgttgcaagactggtgatgggtagacctgatcatgggtcatctgctctaacttgtccgaaagaaacatacatatgggtgtatcgtgttaggttcggtcttgatttttgatccatgaattgagccaatccaaagtagaaaaaactaagaaatatcttaacttggggagtcccttagagctctccattccagccttgcttctttgttgctagctattttttatatctttt

SEQ ID NO: 51362 - DNA, 350 bp, Zea Mays
aaaaatgttgtggtgtatgttgtgtctcggattgcgataataatgggctagacgacgtgtatgttatttagcggcctatatcgttgctctagttagccgaattgttagacgactttggttaagctcgtgatcacgatgattggcttgttgtagtctaaatatgcatggttatggtcgtggatgaaaggtagtagtgttcatgtgatgtctaagttaaaatgcaaattactatgtgaagagcgcatcgatatacacatatataccgggtttgattattgtggtgaatacgttgttgattgtatatggtaattctagcgtacaggataacttgtataaaattagtaagtcta

SEQ ID NO: 51363 - DNA, 441 bp, Zea Mays
ctcaagaatgttgcaaccctgtcacttctgaagataaggtagatccctagggaatggggcctgagagcataggtacgatagtagtcgaacccaccgatgatcgctatcaccggaattcttgaagatgtcttggcaacatttgtgggtatatcattcttcatatgctgacacacgtcttcacctgaatctttgtcgccaaagaaatcatcaatgacacacgacataatattaggattagtctggaacaatggtgttgtgtctcatgtaccatatttgttcccttcatatccatatttgatccctttgcatgcacattacgtccctcatcatgcatatacccaaatcaacgattctttcataaaacctcaataaaccaaatgagaaatatttgttttacatcattgaatataacatcatttttgtagtcgatgcacgaaaaat

SEQ ID NO: 51364 - DNA, 441 bp, Zea Mays
gtggaagtggagctaagatctacagagtggcgtcctagctaagtcttggctcggcgacggggatccggcctccaagtcctcgtcagttctcctccttatgtttgtcggttcgttaggggtccattcttctaggtgcgtgtctattggggccttattcttacgaaggtcctcgaaacaccaagataatggttgctttctggtatatttctaagtattacaggtaccatcacccagagtactttcggatggataagtcagagggaaagaagcatgcttcagaatattaccaagaagaaacaaaggacaaaatatgaagtatgacgaagctgaagttctcacaaaagggaaaagacaactttagcctcgttatgcagtatagctcaaatgtataggcttgatggtgtcaattgtaatttcacaaaagttgtactccacaactac

SEQ ID NO: 51365 - DNA, 390 bp, Zea Mays
ataacatctatgtgcttcagtagatgacctttcacccattcatactgaggcataagttgttgacctcggaactcaaagagtttgggctcttcatttccataataaaagcagcgcatgtgctagtacttgtgggaggtttttagaggacaatcaaggtattaacaattgtcttgaagttgaatcccaacacccccaaacactatgtgttgctctttgtttgggtgagggcgtaagaagaagatgtgttgaaatataactaagaaaagtggaatgacaagaaaggctttgcatagatgggaaaatggtaatatgtaagatagagttagggtttagatgaatcaatttgattttgtaatattggaagaggtcatggaagaatttagtggctgg

SEQ ID NO: 51366 - DNA, 284 bp, Zea Mays
gttaactgtgcgagcttcggactgctcccgtaggtcatgttgttgctgaggccgaagatgcccttatggctactgatcatgacttgaggcaggcgccagtggtgggggtggtggtaactgagcccaggaagcttgagagtgacttgctgaagcagcagaagtcgtgggttgttgattgcctacgtattccgggatatatggagagtagcacgaagtagtatgcaggacctgctttggctgattctgtcgtgcctcggcttcagcaatttccttttgcttttgga

SEQ ID NO: 51367 - DNA, 628 bp, Zea Mays
gtagtgctttggtgtgaatcgatgtactaaccagattatgagtttgtgttgtacaatcatgtctcttggattgtggtgtgcaggtgtgcagtctagggacggtgattgacgacaaaggtgaagatcatgtgggttcgtgttgatggtctgggagcaatgaaggatgagtgttgggtcttcattgagggactagagaagcggggtgactagccgtggtggctaacacttgggacatgcaatggtgtgaggatgcaaaggagggatcatgttgccaacgtgatcacagaccaacaggacatgtgtctaggacatgggggatgcgcacgtggtgctttactcgcagtagttttggtggttgggcctcaaaaccaccaagcgctatggagggctagtttcatcaagtgtgggccttaaaactcggtggtgcggtctggtgggaatcagaggcggcacatggcatcatcgtgtagggtgcatcgaggcaaagcaactttgtgaagagtgcatggtcctcggatgaaaaacctagggtttggtctattttgccctggccgagtggataggctctgtgtatctaggggtagtttatactagtgaaataacccccctataaataggtgggagggct

SEQ ID NO: 51368 - DNA, 494 bp, Zea Mays
tgttgatgagtttattcattgaagcacaatttcccttttgttaaaataaatgcaaaaggaaataaaagaaaaatattgcatcatgctggtattttgttgtgcacttaatgtgtgtggaattcacaaaacaaattgaattttgaagtttgagttagttgaatttgaaatttggaagtaggaataaaagcacaaaagggagatgaaaatagaaaagaaataaaccctcctggtgacttgggctgaaaccggcccagctaacccaacgtttcagccgacccaatagcacccgtctgtcgcctctctgtagcgccgacaacctaggcccaccagtcagtctctctggatgcgagcgcgtgagcgtggctacgctggcatgagggccatactgcgtcagccacacggcgcacgtctttatcactcgggactgctccgcgtcggcgcaatggactaccgcatcacctgcaaccactctcaccgagattcctggccctagc

SEQ ID NO: 51369 - DNA, 388 bp, Zea Mays
cgagtagatagtgcggctctggtccatgccactttcttgattgtagttttaattagtatgtgtagttatttaatccctatttaattaggcttcagtgcctcggattcctagttagtgctgctccactgctagtagtgctccacgtgctcgaattgtacctatttgtttaagtaggtagtggaggctcctttgtttgtactttttgtcttgtaatgtttgtaatttgtgcttgagacaaatgctctaattactaacaattatctcttttttgtcaactaggatgaattcaaacactcatgtggaagctcttgaggatgatgtccttaatgctcatgaagatgagagaatgtttccagagtttgttgaaaatagtcatgcacgtgggtat

SEQ ID NO: 51370 - DNA, 548 bp, Zea Mays
gcacaatctggttcaaaaacagaatatgtgtccccggaatagacaatctccgagaaactatactgaaggaagctcatgacttagcttattcaattcaccctggtagtaccaaaatgtaccaagatccgtagaagatgtattggtggtatggtatgaagaaaatgtggccgcacatgtggcctattgcaacatctgtcagagggtgaaagctgaacaccagagacctacatgatttctacaaccgctgcaggtacccaaatggaagtgggaagaaattggcatggatttcattgtcgatctaccctgcaatctagaaggttacaactcaatttgggtgattgtcgatagattgacaaacgtagccccgctttatcccagtgaagaccaattacaccggggccaagttggcagaattgtatatcttctggatagtctgcctacatggagtacctaaaaagattgtgtctgatagaaggtcatagttcacttcacggttttggcaaaagttgcacgagtccatggacacaacgttgaactttagctcagcc

SEQ ID NO: 51371 - DNA, 493 bp, Zea Mays
gacgtcttacgcaaaagttaaagtgcatttattaataaaccgtgggttcaaacgctcattggccaaaaacgagccacaaagagggccacagagtttgtagccacagaggaccgacgtggggtgatgcgtgtgcaggggaaacattcagcggggtccacatgttgattttcttccagacgtgagggcgtgaggcaaaggaatctgcatgcaacatgcaggtggggccatgggtggttttcattttctatttgcatgtggccaagagatttgtgcgttttgtctgtgtgcatgtgggtggggtccatgcatggtttcctcttctctgttgtatattcgcatgacgctgagaaaaatgaaaaaatgaatcgtgcgtgggtgttgcatgccgaatgcgggtggggtccacacgatggttctcttccctctctgcaagtctgcatctttctcctaccgccgaacgcccaggtctgcggcgccttcttctacccccggt

SEQ ID NO: 51372 - DNA, 931 bp, Zea Mays
gccgccacatcttgactccacttgacggccgatgggcgatgggcgttgggacgttggctcgatcagcgaagttgacttgtactgcagcatgggcacttcatcatttgtgtaggtccacatctccattttcaggtgagcgaccgacccatcgagcgggaggacaatgagcccaacccccatcggcaacgtaaggaggctttggctgttctagtattcactctaatatatatgggttaagaagaattagagttgtcctctgtgtgatcaggaacctgaaacaattgatcatttgctaggcagctgtaacacatttagtaaatttggcctgcaagcattggcccctcaagtgggcaggctttcctttgatgactggtaggaaacagtaaatagccgagtggagggtcagattagaaaagagttgaactctgtcatcatcctctgtgcttggtcaatttggactcaccgaaataggtgtgtttgatggagtgtccccaaatttaaatgttgtttcggcagtggtggatgatgaattgcagaggtggagtatggctggagcaaaagggatatcctacctgcttgctatggctcctgggtcggagcagatgaatgctatgtgtgggttaaggtcgtgtatccctctgtttctagtggtgtaaataagtagttttaggctaggttttttggcttcttagttgcctaaaacctggctgtttcttttgaacttaacttgcgaacctccaatgaacttcatttgagacaagtgatgcccaagaaaatgggggtaaactgacacagctatcacttgcattacttgccctatgcgcggaagaatctgacacagctatcacccatgaagatttccggttaacttgtggaaccggacttcatttaagacaagacaacaataccagtgttgagcttgccactcggc

SEQ ID NO: 51373 - DNA, 476 bp, Zea Mays
tggtctggtcactttagaggccagtgaaccagacgcccggagtctgctgcctactgatggggccgaggttcctccgagtcatgcctttgatatcattcccgttgatccccctcatcaagcaatgtatcaactcttactgctttgggtcttcctttgttcctttccaatcttcatgtgagtcaactttcgctttttcactgttcccactggcaaactagcttttttgcttatcttttcattatcataggatgttcttggtggtgaatctgcccaactgaggtcctgtggtgctcctgtccccgaccaagtttcgtctctgatgcagtggaatcctctactgcttcaaaaacaaatagatgatatgagggcgtcaaatattggttagtgagctcacagtttccttatttgctttcattgctcggctcattataaatcttgcgcttttcttctgctgctttattagatttggctcgacg

SEQ ID NO: 51374 - DNA, 632 bp, Zea Mays
gtatgagttgcataattagacgcatttgcacaagcaagataataagtaaataatcaaattatattatgcatgattggttttatttatgcatttaaaatttagtttgaaaactcaaaacaaatttgaatttgaaatctaaaatctgaaatagggaaaaaaaagaatcggccatcccgtcaacccacgtccacttgtttgcttctttttacctagtttcatttccttgcaatgtgcatgtcccatgaagacgttaggttcacataatctaagaaaatcacgtgaacccggaatattgctgcatggtgctgtgttgttgcgaacggttgcccggaatatcgttgcatggagccgagttgtcgcgaacggttgccgaccatcgcgctaacagtggactcaggatccagaagcttctcttccgaagatttttgcgatcgggtaaaccagattatgccgaagtcgacgttgctatttatctcccttcagcttgggctctacctccacatatataaatactgaccctaggaacacctctgctcaccaaccttgggatactcgagcgtcattgtagccaagagagaaagaagttagccatgccagaaagcagcagcagcccgagcgaagcgctcagaggg

SEQ ID NO: 51375 - DNA, 320 bp, Zea Mays
ttagaatcaaagtagataaaaaatccatcaaaaaggttagagttttcttagtttttaagcaatggatctaagtgttcgtgagaaatcttcccaaactatccatccactcaaatcaccctcaaacacgcatggacaaaaaatctgtcaaaagcacaagagagggagacctagaagcaaaaaactaccaaaagagtctaaattgattcgaaagaaatagatggcatgggggtagcccttctcttattataaaactgttacacatgtccatgtctacccttatataatttgtttgaaccacttaaccttaggggcataatgat

SEQ ID NO: 51376 - DNA, 435 bp, Zea Mays
ggttggggagtatggttatgatagatatgaatgagatagactacatgatgtaggtcaaaagtttgtttaatgttaggtgagaatagacagattatgcaatccatcatgactctattggttggatcagatctcatgcatgtggctgagttggtttaaggcactagtttagttttaagtgcacgaggggtatggccttatcttttataccagcattaagtaacttactctagattagatcataatagattagataaaatctagattaggttggatatgactagattagactagttaagatctaattaatttgcattagatcatggctgttaaactagggtggataagtatgcttattaggataagatggatccataaagataagatggaatcttttgaggttagtaagatctattaggatatgatagaatcttttcg

SEQ ID NO: 51377 - DNA, 500 bp, Zea Mays
atgacctgagtgaaagggaggatattaaggggattattcaacgtcctatatggtctcacttcggcattaggagaccatcctctgcccttgggaatgatatacaaacatgccaggcggctttcaataccgtatgcacctacataggctcgagggacttagtgcaggagcatattgcttatagagtatggccacttgcaaatgggtgggagatgccgaaggaggctgctgctggctctagccaaggtggtttaatctacctgaagtacaccttcaaatataggaatcagtttgatgagccaaatgatgactggctagatgccattgaagcaaccattgatgaattacttggagcctactcgaaagatgaagatgatgccatgacaacggccttcgggactcgaggcaagaaaagtctgaacagggtgtttgatgtcattggattcgtatatccagattactgttatccttcgcgaaagcaaggaaagaaaagaaaggctgct

SEQ ID NO: 51378 - DNA, 480 bp, Zea Mays
ctgatttgtctcataatcttcaggtgccagttgctgtgcttgataccaggttgaggcgtcaagcggggaaagtccagaatcagcttttgattcaatggagtggatggcatccgacattggccacctgggagggagaaagcgacatcaagcggcgttttccattcgctccagcttggggacaagctggcgtttcaggaggggaaaatgtcagcgtaccggcggatggagatgcaagcgtcagtgtgggagagagatggggaatggagccaggtgtgcgcgctgatgggcctaggagaagccaacgggtgacacggcccaacgtccggctctcgggccatgaatgggtgaaatgatttaggcccagatggtttagcagctaacagagagaagaatatacactgccgtggagaggaggaaaggattggactggaacttggaactggacccggctgcgtccggcgaaccgacggtgtgccgtcg

SEQ ID NO: 51379 - DNA, 405 bp, Zea Mays
agccagatccgaagccgcgtgaataataaatagagtactacgcgccgtgtgttccatcatgcctggcctggccatgtcctggtcccctcctgcgatgccgaggaacggattggacttggagagatgatgatcgaggctggctggttgtgtctcgaatcgatcgatctcccccaaccactgctactcgcacaagaatatgcttggcggccagaaaaggccagggaaaagccaacatactagctccgagctgtgtgccctgtgtgtctgtgtgaggcgccgcacgctcccccaccgcaccgctagctacgacgagtatactagtagctaattaatcgcctgatgctaaactaatcgtagccccgaggtagacagcatcattacgctgtctgaccgtctctgatacag

SEQ ID NO: 51380 - DNA, 410 bp, Zea Mays
gtcgaaggctttcttgctaggggtcagaagccctgagtgcacacaagcgcatcagtatgatgtagcccccgagcccccaagtcatacgtgagggttgcttgggggttacttagttcctggtgaagccattggactgctttttgccaacctcttctgtccttctagccatgtcggatactttcattatgtgttgtggctcttgttctgaccctttggtttggtcctagagtggagcatcgctttggtcccgcacggagttgcctagtggtagcgttcgccggagtgggtatagtctctagggatagacctgtacagaaatgctcgggtgcagctttcgtcgggtgtagtctcaagggacagactcgtatggagttgcctggaggcggtgcctaccaaagtgtggcttgaat

SEQ ID NO: 51381 - DNA, 902 bp, Zea Mays
aggaggcaaaattgaaatcaaaagctgggtacttaagctgggtacttaagctgggtacttagatgtagagcgaagtttaaaataggagatgagaatttaggttagaatagctgccggagacagcagtcttattaagagcctaacaagctctgtggactgtcggtctctagagtctgtaaacaaattaaaaaatagataataatgccgcatgtggtcgttgttgggaactaaccacgcagtttaccgtgcagctccctaaacacgtcacgtacattggcaaacaaacaattaacgcgtcgacgatgttaatatatgatcgtccttatccggtctccaaggctcgggggcgccccattggctgggccggcgagggaggttggtgacaacagggggcttggttggatcatggatgcacgtgaaaggccggccagtcgtacgctccgctggtcaggtccaaacctagtcgtatactgtaagcaattgtttatcactgattagtaccttaacctggtgtggtgggttaaagcgaggaggtctagatttgcgctagtttgcctccgatctactacgtacgtttctttcttgcgttgctgtgccgctgctgccgtgtcgtcgtcctatagcaggaaggaaagaagacaaaggccggttaagctcacgatgataatataattattatattatcatcaacggagttaacacgcccgcaggtgcagcagatggattgatcgataggttttcgttgtcttacgttgtgtgtgtgtgtacacatcaattcgaccagcccagcaattgtctcaacacataaagaatgtccacttcattcataaaggatgtccacttcattttctacatgtacggtgccataacaacacgtactactccatccgtcctaaaatatt

SEQ ID NO: 51382 - DNA, 585 bp, Zea Mays
aatttatagggatcgttggcggtggcagggaatttcagtggagacgcgtggcggtcggaggaggaagaagaacactggcgcagtggcttggtgtccagcgccgtggcaattgctccggcgatcaacggggagcaagagtgagtcacggtgatgcggtagatagacagagacacgcggctagccggagtggcgtccagctcaccgacggcgatgatctttcctaccccgatgttatctacttgccccgagcacgaatcttgacgccggtgtcacgaatcgcggcacaggattggtcgtcggcggtgagagtttcgcgctggcagtctgatcttgttcagagtactgtgccatcgaacccttcttcagttcatctgacagagcattttcagagcaacttttctccagattttgcatgagaacttcatcaaccctctgtaccaaagttgtagccccatattccagctacaattttgttatgggaatcatgcccaaactttcactggatcacgtttaaatctgggtgcaaagattgacccatcacactgtcagaccaagtttcagtcatcagtcagcctgacatcctga

SEQ ID NO: 51383 - DNA, 337 bp, Zea Mays
ctcggtcgtctgttttcggatggacggttgtggtctcacgcggggtaatggctcgggtgagcagtgctggaacgtcaaatcgggatcggacggtcctaatggcataccggtctggttgggcttggatctaatctggtccacggggagtgtatcgaacggttgtgaatcgctccatacctcttcgccatgccatttcactaaagagcccctggaaattttaattatcaactcacggtcctctcgcgctactcactgagtcttagagtttttgcgtcccagcccctgggttctctgtttatcatgcgtggaaaccagggtactatcaaatcagagaaag

SEQ ID NO: 51384 - DNA, 527 bp, Zea Mays
gacgacgcactgcgtgtatgtcgacaactgcccgtcgttgttgcggaggtagaaccatcgaccctgccaccctttgtttgatgaggtgagggtggcagggatgtacatttgcgctcggtccaagcgcagtagaagcgtgcagccaccggccctcaccgtgtggcgcaccttcttcccgttggtagaaagtgagaacggctctgcccggaataggtggagccataagtcccaatggagctcgatccccaggtacccctcacagatgatggtgaagatggccgcctgagtgatgaagttggggttgaaattgtggagctccaccccatagttgtgcgtgagtgcccacatgaagcggctcacaggcactccgaacccccattcatggaagggggtgaagctcaccacgtagcccgtaggcgaagccagctcctgctcatcgcctgacgcaaacaactcgggttgcggcccataggagcgggggcggagcagcgcggtgtccacccatgcctgcaggtcctcgtcggtaa

SEQ ID NO: 51385 - DNA, 712 bp, Zea Mays
gagatataccttcatcagcttacccccgaagctttaattaaagtgggggtttttatttgggccatgaggagccaagggctggagccagatgccaagtgtttctgcaacattcatgagttatcctaccagacaaaagcaactgggaaggaacagtagcacaacaacttcaggtgctacaactttgtgcaccgcattctgaaagaagtggtcgggttcttggatgaaacaatggttctacgtcaagaataatctgagtgaaaaggaagatgtgaagggtattatctagcgtcccatacggtcacgcctcggcattagaaggccattaattgcaagtgggaacgaagtgcaagcgtgtttaatgactttcaatactgtgtgcacttacatcggtaccagggatttggtacaggagcatattgcttacaaggtatggctgctcgttaatggttgggaaatgtcgaacgaggctggtgccggttctagcgaaggtggtttggtttacctgagatatacctaccgttttagaaatcagtttgatgagccgaatgatgactggcttgaggctgtcgaagctaccagtgacgatctactggcggcttacacgaaggcagaggatgaagctatgaccactgccttcggtgcttgcgtgaagaggatgttgaatagagtttttgatgtgattggattttttatcctgattactgctttcctg

SEQ ID NO: 51386 - DNA, 884 bp, Zea Mays
cacttgtagagaaatgggaaatgccagaggaaactatcagcaagtctgacgaaggtgggctggttaggttgaaatacaccttcagatatgaaggtaagtttattgagccagatgatgattggctgaagtgtatcaaagctacaagcgacgaactgcttgggccatattcaaaggcagaagataacgcgttatctgcggccttcagaggccggaagaagaaatgctgaatagagttttcgatgctgttgggtttatgtaccctgattaccgctacccgctgaaagggcaaaagagaaaagtgcaacttctgggaaaggtgatgcttcagttgctctaagtgagcccgcgccaaagaggaaaaaggtgaaggtccttactcaccgaccgcgcttcattgaaccggccacagtgcccgaatttggtggtgagacctctacggctactgaagccaaaggacctgctcttacacagaagaatgaagagccgactatgatgccgaaggccgataatattgaagaaatagaggccgagaaaacaaagatattagaagttacaagcccttcggcagaaatgacagtgccgaaggcacaaaaagatctcacagcgactcccaagagaaaaaggatggtcaatgtactagatgtgctggagacaataaagtcttcaagcaccactccgaagaaaactgccgaagcgccaaaaacgcaaattgagacaaaaccatccgaagacgaagctgcaaagagccggaccgaggccgaagctgggccttcagagcccgccaaggagaaatccttggaaatcgaagaagaaacgaaaaaagaggctacaaagcaaattctgtctgaaaaaactctctcttcaactcctaaagcatcttccag

SEQ ID NO: 51387 - DNA, 571 bp, Zea Mays
ccgagccacaggctctcactctctctcagctctcctgccctctatactctcttgtgatctccactgctcaccgccgacgatcaccatctccagccgtgctccggtgatctcctccagcgtagactcagcctccttctcccctggtgagcctaccctctgccttcccctctctctatctatgctgagaagtctatcaatcccatttccaccctttgactcaattccaaattcttgttaaattcatgtgaatcaaatgcttggatgtgtccctagtgctctcataaatccccctgtaagttcctagcgccttagggaacgtttcatcaactctaatagccatttcacctcaaacctaaactcccgcacaccaagtgctcggtgagatgcccaaaccagtcaaatttgctcaaatcgatcccaaaattttccagcgccttcatgacatcactagtaacatattcaccaaatttcacgccaatccgatatcccaaactccaaatttccacaaatttccatttctagcgattgattccaagccgagtgccacaattccactttcttcgcctaaatt

SEQ ID NO: 51388 - DNA, 380 bp, Zea Mays
cttttagtcggccagcagccagcgggtgactgatcgagttacctctcgagaaggactgcgatgggcaccatgaggacagacgcggctacctggcggtagaagacgaagacgaagctgttgaatccgtggtccattgctgccttgttgataacgaacatgccggtgatgatcacccgtacgatgatggccactatgtaaggctttctccagtcgtccatttcgatctagtttacagataatctgctgttacacagctagagacttagagggcttaaaatgtgtttctgatgctataattccctctctctctatgtatatagcattatagctgctgagttctcgtggaacttttgataggatccgaaattaatagtaataaa

SEQ ID NO: 51389 - DNA, 544 bp, Zea Mays
gcgactcatgggcactaagctgcacatgtcatctgccttccatccctagtcggacgaccagacggaggcggccaactgcatcatcattatgtacctctgctacttcaccggcgaccgtcctcgacaatggcttcgctggctcccatgggttgaatatgtgtacaacacgtcataccagtcttcgctccgggatacgctgttccaggtggtgtatggtcatgacccaccctccatcatctcgtatgagcctagggagacaagggttgatgcgatcgcacgcgatatggaggagcacgaggccttcctcaccgatgtgcgctatcacctcaagtaggcacaggcggtgcaaaagtgccactatgacaaggaacacaggacattgacctacgcagtcggtgactaggcgctccttcgtctacgacagtgtgccccgtcctcgctgccccaacagacgacatgcaagctgaagccctgcttcctagggccatatcacatcatcgagctcatcaacaacatcgatgtttgcctggagctaccctcacag

SEQ ID NO: 51390 - DNA, 384 bp, Zea Mays
tgggaggttatatacggcatgatgatgggacgataggacctcagctcatattgctgcatcagcaaccactaaacaaggacaggttagcatggtcacctttttctctccaagccttcgatgtgtgcttagactatctttaataatatcgtctatatctcctttttctctccgagctttcgatatgcttagggcatgagagacagttgatgtatgtacgtgtattaaaaatggatataaacaatatagactgataagtcatacaatggattgtctatatacgttgattgtgtggttttaaattcatatcgtatcttgaactagctgcacgtgtatcagatcgttgataaccatctacttcacagtacaactgacttcgaaaacaaa

SEQ ID NO: 51391 - DNA, 721 bp, Zea Mays
ggccaacccaaggcgggagacacagtcacgactcggttgaggccaaccccgggtgggagacacattgactacttgcccaaggtcaaccacgggcgggaaacatagacatgaatcgcctgaggccaacctcggacaagcagcacatttctgacgcgctcgagggcatctcgggtgatgctccagaaggtgccaagctccgtcgaccaactctacaatgcgggccgtctcacaaactctccgcccaccaaggtccaaaggcagatagactgaccaactctccactaacaaactcgcccgaggccacacccccatgggaaacaattcatgactcgcccgaggccaaccctgggtgggagaagcagtcacgactcgcccgagatgaaccccgggtgggagatgcagtcatgactcgcccggcgggagatgcagtcatgactcacccaaggccaagcctgaatgggagatgtagtcataactcgcccgaggccaaccctgtgtggaagacacattcaagacgtgcccgaggccaacctcggacgcgagatccaatcacgacttgctcgaggccaaccccgggtgggagatgcagtcacgactcgcccgaggcccaccccgagcgggagatccagtcacaactcacccatggccaaccccgggcgggagacgcagtcatgattcacccgaggccaacctcgggcaggacacacattcacgacttgcc

SEQ ID NO: 51392 - DNA, 687 bp, Zea Mays
agaaacattactttcttagtgcatgacatcaatgttgtgcacaagaatcaatgacgacatataagggagctcccacagaccacatttatgtgtccagttgcggtccactctgaattcttggtgcttgtcccctttttcatttaggacaaggttgttcagttgagcataaatttctgctgcattcagacgttttgttggtcctttcgtgacaacgatgttcttctttataaagtttttcttatcgctcctaaaggggtgtctcctgggaatccagcgtcgatgacaattgaagtaagtgatctttccaccatgagtaagacggaaacaatctgtatctgaaccgcaatacggacatgtcattctaccatgtgtactccaatcgacaaaaatagcatacgtcgtgaagtcatgcaccgaacacaaatatgcgactcgaagtttgaatatctattttttaacgtcatatgctttgaatccttgccagagcttcttcaactcttcaatcaagggttttaacatgacattgagtttctttctaggtggaaggttgtataacaaagacgggccaacatgagtatgatgacgccatttgaaccaaaggtgtgaagccatcggtcgcgaggccgattcgaacatttctcgatttagcagcaaaatctggatcaaacgtgtcgagagccttccaag

SEQ ID NO: 51393 - DNA, 444 bp, Zea Mays
aaaacttagaaacacaaacctaaaattgtcagataaacagccacacgagtaattctctattttgtaaaccaagtctgtttgtgtttcagagaggtgtggtgttcagatttgagcgctcagagaggtgccttacatctcatactcgagcatcgcaagatctgggcggggctggcgcgtagaatgggaagtactcgagcatcgaaagatccaggcggggctggcgcgtagaatgggaagaatgagatggcggggtggtcctgcacttgcgatgggatgcgggccgatggtggtactgtgcgctggatgacgatgaggggattgggttgcgattccttccatggcggcgagacgtggattgcgtttggggcgagcagaatatgggcggggcatccgcggtgcatgagaagaacgattaggcaatgagtggtcctgcgcgtcgtcggc

SEQ ID NO: 51394 - DNA, 532 bp, Zea Mays
taaaaagatacctcatgtagttcttgacataccaaagaagtgaaagttaaggactgctcttgtcattcaagagcaaattacaagagtagcaaattcgacatcatcttttacatcaaagaagtaaagagagaggtcaccattaaagaagcgatggaccttgtattaggttgtggggcaggctatggaagcaatgagcatgacattgctacataattgtttgtgaaaaaggataaaagagagatgttcatcacacttcctactagaagttaggtttagttggcttactagaaggtttattgataagtacagaaataaggcctagatttggtattgatatgtaattttgctttgtttcaagttcttaatttgatattcatgtgtaatttgactttgtttcatttatgtgtaaattttttgtttggctttgcttcatttatatgttatttcaacatggtctgctctaatttcagcatgttttgtactaatttaagcatgtatattcatttgcagatgtatgaaagtggtagtgata

SEQ ID NO: 51395 - DNA, 322 bp, Zea Mays
caaagattatgacctcgaaatccactaccaccccggaaaggccaacgtggtagcagacgccctcagcagaaagcccttcggggttaaaggagcaaactttttggaagattggaagaaagaatcagctcagctaaatgcatgtctgggagacaacggtagcctggaagtcaagccaaatctagaagatctcatatgcaaggcccaacgcctggacgcagaaacaaccaagctgatagaaagagcacgaaaggagcaacttccggacctcaggacagataatcaaggagccctctggttcaaggatcgcctgtgcatgccagtg

SEQ ID NO: 51396 - DNA, 611 bp, Zea Mays
gaaaaatgacttatttggatcaaggcaagcaaaaccaactagcaactcacttgaaacttcactgaactgatggcacgactctgtattgattttatcaagaataacaaaaaatatctcgatgcggtagtagtgaagatttgtgactgtgaatccatctcgccttgatcgacctctaataggtacttctgcatccatgtctaccacagggaatacccttattagcacaaaattccttcacatcttcaaagaatgactctcaaccactatctgtcctcatcatagccattcgggctttaacaacatcaagtaactccatggcaagaacaatatcaacactcttcctttgcaacatttgagagagctcatttgtgattgcaagcactttcaacatcaattttagaatgaaagcaaatttgaaactctccattttttctatcaaccttgctgcttgtgttagtacacgaccatcttcatggacaatagcaagaacatgcaatactgactcccacattgtttctaaacgaagcaaggctaaataatgtgaaccccatctcgtgtcaccgcgtctagcaagattggttgcttgatgaagaccctttccagtaataaat

SEQ ID NO: 51397 - DNA, 418 bp, Zea Mays
caaggagctcgggtgtgcaagcggcttgggaaaaggggaggtgctggctcggctcggcctcgtcgtaataaggaggagagatggtcgggccatggccgcctagtgggccatggcgacgggcaacagagcctgaagcatagagctagtgtaggtgtggcgtggctagacctcgcttggcagggtggatgtgtgctctaaaggaccggtgaggcaaccaaagaggggtgaatgtgagccaccataattctcttgcgagaacagaaccatgacttgattcccaatttaacccaaaacctctagggactcacgaagcaccagatcactgtgtgattcaaactagcgtcgattgaatacaccaaaaaccgagtgccggcgcgtggcatcacaatgaagggtgcgttaaggcaaagcaacttcg

SEQ ID NO: 51398 - DNA, 644 bp, Zea Mays
gaaatgttagtcctggtacttgcatgtcgtccctgcacttccctttcagctttgcaagcaagatggaacaaatgggttatgttagtgtactctttataagcaaggatgtcctgaatttcccgatttaacccacccaaaaatctagccatagcaggttccatatcctcctctaaattgcaatgtagcatgcccatttgcagctcttgatagtattcttctacacttttagtaccttgttttaactgttgcagttggtttaaaagatcacgtgcatagtaagatggaacaaatctagccctcatgatccgtttcaaagcatcccaagtttgtggcatgttatgaggatttttcttgccatgttctatccaccaaacagaagcaaaatcagtgaattcactagttgcagccctaacacatgcattttttggaaaatcatgacaagtaaacttttgttcaacagccatctcccaagtaagataagcatctggatcatacttaccatcaaaagagggtatcttaaattttatcttactgaaagcaatgtcattgttatgtacctcatgtggacgctgtccacccataccttgacggttacgacgtagacatcgttggcctcgatcctcaacttcggtgtcagcagcata

SEQ ID NO: 51399 - DNA, 326 bp, Zea Mays
ttgttgttgatcaaatgccactgggtgtcttttaattttttactcgaatgtccatttagctcctgaagacattttctgtgacatcatggtgtgtttttcaacttccattattctacttgagcattaatgttttaagcagaaacacattataatcctcagtttactcccaaagttgtgccaatatttgacatgtttactcggtgtattttcacaggtacaatattaggtaactaattatgccttatgtgcctatgagttttgtttctgtctgcagtttatgctatatatctgaatccgatccatccagcactttctggttgtctaag

SEQ ID NO: 51400 - DNA, 857 bp, Zea Mays
atacctactaactctagtgccaccgcaactctcaacgtcatcttcaagatcgacattcgccacgtcattaccaaggtctggagaagtggagtcagcctccagttctaagccggatgagcgccaaagctttccttttctcctcttcgtctcggtggacatggccaaggagcctacccagcgtgtccgcttgcgacgagcgctaccagggctgcaaattcttttctgtccatcgcacacacgcccgataacagcatccgcagactcaactcgagcagacctagatgactctccaactagtacattcagaactgtgttcacctcagcatcattagcaatagactgcgtctagaagtgggtctgtctctcctctttaggaaaacccctatgcatagtgatgagggcctcaatctcattcgaaagaacgtcgcactctatggcctaggctcccgtcttgaacaggtggattggacacgaactctaaaaaaggcctctacgataatgagattacacattaagagcactacatatggcaatacataaactcttacatgctagcacttaccatcgagggaagattccaggcagagtatgaaggaggagcaccgacgttcaaaattttacccctcaacatcaaatcaactcgactcagtacgttctccttagatatctacttattggtaactcgagaagggtcgttcacccctgtgtacaaataaaccgggtagactccatccttcaaggttgagtgttcttaaaaatgaagttgacaatgacgacttcaacagtcaggcctctgttcttcagtgcagatatctcaacaagcaaaatcttggcctcaacaagctccgaatcagtcg

SEQ ID NO: 51401 - DNA, 376 bp, Zea Mays
tttcgtagggtgagaggttggtgagaccattcactaggatggacgacgagtcttcggaagatgatctagattattttgtggcgctagatttatctatcgcagagtctccgtcaagggtcgcccccctgcggtgacagagacttcagccagggttgacctaggtgaaccatggggtcagagaagaattggggtttcaaaatgaagtgtgggaatgcttggtgagtcttcgcaaggtattggagtcccccgaagacatcgccgaatgggaatggagaggtcttgtctcccgagtggaacacggttggaggaggggacccgtcggatcatactgggaccgatggccgggtcatgtttcgaggagggggatctatggact

SEQ ID NO: 51402 - DNA, 1901 bp, Zea Mays
tttattgaggcataaaagcctaaggttgaaaagctctccaattgaatttggaatagtctcaataggcaagcttgataagtctaatactgcaaggtactttggtttggaggaaatagaagaataccacacagataatgctctgctggtgtcgaatgtaattaaggtgcgaagcctggatggatcaatggttgatggaatgcccttgctgcattggagcacagccactcgtcgagaatatgatcccactagcactgcttcattatttccaccataagttgtactgaaaccctctcttttagattggaaaatggcaagttcacgcacaagatcatgcattcgaatacatttaatcctaccaaagcagttcctctctgcaacgtgaagcatgctccgtcgtataagttctttaagataactttcagcagtgtcttctaagctgcatgcccctttttgttcaataaatccttcagctatccacaatctaatcaatctctttctgtgtattagatagtcttctggaaacatagcacaatacaggaagcagttcttcaaatagtctggtaagtatttataacttagattcataattttctccacgcgattaaggttctcattgttgtgtagctcccagataagctggtcataaaatagcttccactcgtcaacattcttcggtctcagcgacaatatgcttcctattgccacaagggctaatggcaaaccatcacatttctccacaatgtttataccacactgacgcaactctggagggcagatatggttttcatctttcagaaatgccttcctacaaaatacatgccaggaatcatcgacacccagaggttctactttgatcttacaactacccttagctagtgaagctacctcctcaattcttgttgtgattattactctgcttccaaggccattatctacaagaacttctttaattttaaaaaaaacattagccatccagacatcatccagtatgatcaggtactgccttttgtctagagtttttgtcaattgctctcttagttctgcactatccattgttccaagatcaaattctatcttatctttcccgatgagatctgtcagcattttcttccatatatcttctagtctatatgactgagagatagaaacccatgcacggcagtcaaagttggatccttcatttttgtacacattatttacaagagtgctttttccaacgccacccataccccagacagcaatgatccgaagtgatggatcttcaaattttaatgaactaatcaaggtttgcttattttcatcaattcctgcaagctcctcgtcgctgattgtgtaatcatgtccaggaagatacatttccttttcagtttcatagcttcctgcaggtataccactcccgccatccaagggtttagtccagcggtctctactttccgagagttgtttaagctcttgctttatcttcttaatctcactagcaatttcatctagtgaaaccagacgccgaggcttcttggctatcttcttcatgtaatcccagcatgatcccatctgatcgtgtgtaccaacaacgtaaataaaatggtctacagtgtcttccatatcataagccagtcttcggacctgccctatccatgtttctatcacttcgcttttccagcctttcctgccgatttccttgagaaacgcccggataagctcgagctcattactaatcagtttcatgtcatctgggagtgctgccaccgactcagacttctttgcaagcaatggtttagcaaaacttagggtctctcctgccagagctatggcaatcttcttcaggacgagaagaacagcaatctctgccatcccttcttattcgatcagacttggaataaggtcaaggctcaccttatagc

SEQ ID NO: 51403 - DNA, 413 bp, Zea Mays
taatttatagctacaatcttttttaaactgcagacgtgttatgttttattcaaacaatacaagctttatttataggtgggatataatcgtcgtgggtatatggcctgaactgttgcaaaagaaaatgctctacggtgggtgttagctagagaaaacaagagcataattatcggaactatgctgcgtcgtaacaagctacacattaaattatattatccttaaacatctttgttggagtaaactcaatgaccttctttagtaactaagtctactactatatataacaataggatgcttgcaaacctcggaccatagcactgttgaattcgatctagatcatcacaccacacaacggttgcagagtgagtgtttcttgcaataatttagaaattataattaagtaatcatgttat

SEQ ID NO: 51404 - DNA, 989 bp, Zea Mays
tatagtggtcaccctaagttaagtaagcgtgagcatatcgcactgtcttaagtcaccgccgacttaagctgattgctccgttagtagggtatagtggtcaccctaagttaagtaagtgtgagcatgtcgcaccgtcttaagtcactgtcgacttaagctgattgctccgttagtagggtatagtggtcaccctaagttaagtaagcgtgagcatatcgcaccgtcttaagtcaccgtcgacttaagctgattgctccgttagtagggtatagtggtcaccctaagttaagtaagcgtgagcatctcgcaccgtcttaagtcactgtcgacttaagccgattgctccattagtacggtatagtggtcaccctaagttaagtaagcgtgcagatcgagcataaaaagacttaaggtataatgctaagtggtcacagcagagtatgaagtctttttattgatgacgtacttttccaattacaaaatataatgctgccccaatagcttttgaaatctagctaggggtaaaacttcctgagatgctctatattccatgaattccctatttccgtgccatccatttgagtaagccgatatgatcctggccaagtgacttctgctaccatgaatggcccttcccaaagtggcgacaatttgtgtcgtccttcccccgttagaattcggcggaggaccatatcttccactgcgaaggatcgatgtcatatggccttatcatgatagcgccttagagcttgctggtacctggctgactgaattattgtattcaatcgttcttcctccagcatatcaatattctccagtcttgtagcttcagcttcagctatgttttcgaagatcagccttggtgccccaaacctgagatcagcagatagtactgcctccgaaccatagaccatgaagaagggagtatttccatgcaaagctcggctaggttgagttcttaagctccagaccacatacggcaattctct

SEQ ID NO: 51405 - DNA, 341 bp, Zea Mays
cacatatgaggcatcaacaaccttggttttagctataacagccatgactattaaaaaccacatgtcaacattaacgtccacttacaatagtattgaaaactgcatctataatcatattacattaatagtatatcaaagacaggaaactaaatttcatttcagcatacaccatcaaacacttcatagctcatatatgaacctcatttgaaacaagtataaattgtattaaccaaaacaaatctgattattacatatgagatgtatttccatatagtataaaatctgaaaaatctttacaacaatgatcacactaggactttttgtctaactactacttaatc

SEQ ID NO: 51406 - DNA, 541 bp, Zea Mays
gcaagataataaagttatctacaacttttctatatgacttttccacataaaaaataatttagttcattaaacagatagcacggcgaaaacagtgtgtgcagcccaaaacagcaactaaaaaattttagctcctatttactttaagaattgccatgttctagagacttgaattactctaacactttaccatttgttagagttagaacaatcaaatgaggaccaataagtcgatttacaaatttcatccaagtcatttcgtgcgctagagttaccacactcaattaacaaacacattcaccacaataattaaacccggtatacatgtgtatcggtgcgctcttcacacattaatttgcatttttaacttagacatcacatgagcactactacttttcatccgcggccataaccatgtgcattcagaccacaacaagcaaatcatcgcgattacgagcttaaccaaagccatctaacaagtcgactaaatccattatcatcgcaattcgagacacaatatgtatataacaatcacttaacgcaa

SEQ ID NO: 51407 - DNA, 771 bp, Zea Mays
aagaaagagttcaaagacctgatgtctcaaatgctatcgaatcctcctctagaattgatgcagcaattggcgagtgcgatgtctgttcaacagatgaacactccacagatgcaaataattccagtagctcaaccgccggcttccaccgattgtacgaccgtcccaagctctgtcgcatcaacgggaaataaggtccgctatccagttgatgacatcacaaggcctatggcgtgcacactagttataagatatggtattaacaatcatcgtacgaagaaagtagccacatgccttgcgatcccaggacgcaagttccatggaagcgacattccagaagattattgcagggtagaagtgacgacggtcgtccaaggatacgaggaaaacatgctagacatccctgggcctgaaggtatcgagacacttggacaagctatcaagaatttcatcctttggcctcgaagggatgtcgaattggttgatccacaacggcagtcgtcgtcgcaggcccaaccgtctccgcctcctcaaactgctgttcctattgtacatccatcatcacctcctcaaagttcacatgctgctcctcatcctctttctgacccaccgtctccgccacaagcatcaccattcagggctccaccttctcctcatcctcatggtgacccactgtctacgccaccagcaagggatccaccttctccacagccatcaagggatccacggccatcaaagaaatctaaattttctataccaaaattagtgtccccg

SEQ ID NO: 51408 - DNA, 1768 bp, Zea Mays
acagagtagaaaagaatgtgaaactgatgacctaccagcatagtgaatatccaagaatggattggttccttctcttgctattctccttgaatttacaggagatctactgccatctgcttccaaatctgctgagctgagatgccaggctcttagagtcactgcaaatgtcacttctccacccggtttaatagggagcgcagatttccatgtgctatgagcaatcgaaataacagaatcctgattcttccctgacaatgcaacatttgcttcttcaactggcacggttccggcatttgtcagtgttatcagaacatcacgaatttctccttcataaagaagaatagaaccatctccacccacaacattggcaattaacaatggcagaggaggaacaacagaaatgctaggaaagttgacactcttgaacttgctagagccacagcatctgaaaggatcagaaaggacaagcccttgtgcagctccaaggagcaaacaatcgacctctttgaataggtgttctgtaataacaccaaagcaatgaacaatgcacccaggaattgatatttgtccgacttttgttggaataccagataataaaactaattttgaagtgttaggtggaagactaacgctaactggaaaggcatcaaaattcccagaatggacagagagatagatgctctccacaactatgtcgaagctgcaagggtttgctaactcaaccatgacttgaaccggctcccccacaatccaactaagctcttgcttggaagtcccagaagctcctgctttgctgaaaggagtataaatgaaaggtcctgaaggacctgcaccagcccaccactcctttttatgtggattccgttttactatatccctttgagaagggtgaagcgggaaagaatgcaacctgggaaaaaaaattataagttaaaaaatcccagaagatagtaaagactaattttaccatgagcatcttccagtcttaaaagtagtttcaacagtattcattctctttttctttcaaatataacaataagataataatgatgagcttaagcatacctgataaaaggaagacatggatcggcacagcgtgtgcctgttggaagcttgtcagcagcgtttgcaagtgagcttgctaggccactctgaccagctggtgtgatgagtgggtaaaatgatcgaagaagacgagctgcagcgctccatgatgagagtggatctgccgcccggatcgacgatatcaatatttctcttagaaccaccatttgaagggtactccattgtgactcaaacaatgacactatagactgagggtgcacctttccagaatcagtattgccagcacgaggttccttaagaacatattgcaaacgaaacatgaatccaacaatatttagtatatttatgcacgattaattgatgattgattctcaatatgctgcaagtgcacagtcattttttttatctcaccttggacggatcatgattcattttcatagtctttcggctttggacatggtatgcatttgtagtcatagttagaacctgcatagcactcatagcagcatatgcattgtcttgctgaaggtacaactgtgcaacttgtcttgaaaaaaaggccgccttgcgcttataaccaagtgtaccaaaaagtcttgcaatttcaatatatagtatgagccgatcactggcatcaataagagccttggcaccatcagcagctcccattaacaaatctgagacctccttggcaagttctcgc

SEQ ID NO: 51409 - DNA, 793 bp, Zea Mays
gtcgccgataagctaccgccgttgcgcaccacgtgtctcagcgcgggacttcctcgcggtgactcactggttgcatgtccggcgatgaccggagtcactgccacggtgaaagctacctttttcccccgcactgagctcgcctcccctctccgaccgccagcacccctcggccgaattcgtcaccgaccctccatgcgcctataaattgcgtgtgccaccagctccgtagagtagtaagctgcccagccaccacgaatcagcctcggtcattcactagaatccacgaatttggaattcttcccaaaactgtttccgccaccgtagaaccaagctcgccgcggccagcccaaatcaggtccaatctcgccctctgcgttcttgtttcggcactcttgtttgctcttgataatcactgacccgtccaattaagctagaactccattggtcaccgggaacgcggtcgagtgtccgcgttaaccactgtcaccgtggacagagcagggtagatcaccgtttatgaaattagtttgggagaaacagtccttaggtcttgaatttgacatcggccaaacctggacgccagtcgttgcgtggatcggccagtatgcgagctcgctggagctctgcgcaacgccgttcgacgtcaggggtgtttttggagaagaaatagaaatcgaggggcttatctgcaagttgtcagcgacacggtggagcagtaaccaaacccatctccagttagttaaaaccccgagggcctttctgcgaaatttccaccgcgggcgcgggcgctccc

SEQ ID NO: 51410 - DNA, 729 bp, Zea Mays
agcaggcactagcgactcaccatagagcagaccaaccctagatcacgcacgcaaccggccccaaacaaggtctgccatgtcgagatcattcccagcggcgttcaccggcggcaccgcggcgttcccaatgagacactgcagtagagatgaaaagggcagcgtcatgagcttcactggcttaaggagattaccgaacacaagtgacacaggtgagcaactcctcgagacgacccgaccacagtgagatgagaaactgatgagctcagtcaccaaaaaaggagattgacatgcgatgaacaagagcagatcgaacctgatggccggggagagtaaacaccgacgtgaacatgaaccacaacactcacacgatgcactctcgctagaactcaagaacgagaagagacttcactgccctggccctgcagcgactagataaaagggtagtgcaaagtgattgagctcggccggttcacagtagagaagactttgatggcgccagcacaacatggctcaaacacgtggctaagcttccaagccccacgccaacatgcaagcagcaccaaagcatcgaacttgggctggttcacaggcacaccacaaatatccactctgcccagaaattcagacatagaggagagcagataaggacccactgttcccagacagtccaaaacttagatatttcagtggggagaggcatctcccttggccacgcattttactcttatc

SEQ ID NO: 51411 - DNA, 728 bp, Zea Mays
aaaatattatataccttcaaactattataagaaaggcagtttgcaagttcatccttcgacattgcacataggccaacctctagcttcgggaatcctatattttttgtcatctcccgaaaaacagatatctccttattatccggaaggcaacatagaaagtcgtcttcatcagtgccattaaacaccaaggatcctgggggatacgtcaaatccttggcataatgcatagcttcggcaatctgctcctctgatagttttttccctgccccgtgacgcactataaattccaatccctcagtagaagcttcagcatcagggaatttacactctttgctagtttttgtagcatttgaaggtcttgcatcgatattcatttcaacaacctccgtaagccccattcctgcgggaaccgagggcccaacttcagttccaacctgattcatgtcggcttcggcagtttccttcgtattcttttcacccatgttaggtacttctgcagaagcaggagtcagtacctttgtcgattccatgacaacatctaatatgttggccattcttctcctttttggagttactgcaggaatttctgacaccttcgacagctctgtctcttgcggcgggctcagaatcttcggttgctctgccgatttctttgattctggctcttcggccgtttttgctctagcttcggcaggacgcttcggcacttcggccgtcttggctttttg

SEQ ID NO: 51412 - DNA, 620 bp, Zea Mays
atttgacaccatcccataccctcaaaggactagggtgtcagatttctccaatttttgggcaacacgcatgaacacatatgccagtacttagcatagctaggagaattggccgtcaggaagcctttcatgttcgcttattttcattttcccttactagcaatgcattcgtgtggtatgctgccttgtctcctaactctattggttccttgagtgatttagaacataaattgcatgaacaatttttctatggggattatgaattagagttgtttgatatggcatcgctttgacaagggcgagatgaattagttaatgattacctctagaggttctaggatactagaaacatatgtttctagatccatgtcatagataagcagttagtaaggcaaatactcaaagtaaatagacttcttattgaatgtagccccaggagttggtttgatatcctttctttttttccgtcttttgtcttcttcccgaaaacaaatttgattttgctgactatttcaaaaactctttgacctttattgttacctgatggagcactataatgtagctcatcattattgttgaagtacttatccatctttcgcaggtggtacctatgcactttctat

SEQ ID NO: 51413 - DNA, 368 bp, Zea Mays
gaaaaattaagagaagataaggacgcattagtgtatactagccttcaataaaaatggaacatttgcttaccgatcatttaaaatagagtgcgggaccatacaggcatccatctgaatctgatcacgaaacattagaaacatgagtgcaggatcgtaaacacattctgcggaaatgacaggaaggacaagatatagcttgcagacagacgacgcacctgaatacaagtgcttagatagtgcagatgcctgttgccaaacgttacagacatctgaatatatctcaagttttcagttcttcataaaactactatgtaaaagctaaatcagtatgcccatgtcaaagattcgatgtttacgtgtaatcctaa

SEQ ID NO: 51414 - DNA, 1275 bp, Zea Mays
aatctcctacccacaaggcagggaataggcgcccaatcagccacacaatctcctgcccacaaggcagggaataggcgcccaatcagacacctccatgatctcattccttatttaggtggcgcaacaccttattgattatttctttccataactaaaagacggataggtggggcagcacctagactttattctgggcagattcatcatgagcgtagatggcgcatgcactttaggaaacttctggtccttcattctttagaatcatcatgaagttcaattcacgtgcacgggctcgagtgagtggtcctggtggcgcctgtgctggttcagttggggtagccattcctttgttggggtagatgtcctcatcacgtggtgtcttccatccactgccaccacagaaagaatagtgtgatgcgcaaaaaggccctagcgtgcaactatcaatgtttcaaattattggctagtgattatcgtgctttgcacgtctgcggatggcgtgtaaagaagacacaaggatttatactagtttgggtggaatatccctacatcctttttgtgttgctcatgttactttggactagtttgtagcaggaggttacaaatggtcgagtaggggacgatttcccaagtctatagtgtacaagtacgtatgagtgttctaatattcaattaccaaactagagtactggacatctcctcgagcgtgagtttctcccatgcatttataggctaagatgggaatatgccctattacatgaggttatggtcaggcgaaacaagcagtggttaggcaacatcgtatactttgtcgttcgtcaggattcctgctgttcaggcgacactgtgaatgatgtttaccttcgtcagtcctggcatggtagctatgcacgagtcatcctatcatagggtgttatgttccattgcatctcacagcgggctagccagtgtcacttttgacttcccttcatgggaatggttgagctgatgttagtctccacaccacgacgggtgatgtctccattctgacacacttgctcccatgctatttttctagttttgtgccatgttagagttgacttgcaggtcccatgttcatagtggttgaggcagtacggtcccaagaattccttgctcaggcgatcgtgtgaaatctttggcccctcacccttaggtcgggtgagaccgagcttaagacggagatgcttgggtccctggcccattcatggttgagggttggacaaggcagagctgtctgggtccctagccccttcg

SEQ ID NO: 51415 - DNA, 448 bp, Zea Mays
gaagaactcattcgcaaagcttagcgcttgggcgccgagatgacaggacttgcagaaaaggctagcaaagaacaactcctggatatcaggacagatgaaaaggggaccctttggtttagaaaccgtctgtgtgtaccgaaggaagaggcacaaggaatcctgctagatgaagcccacaactcagcctattctatccatccaaggtctaccaaaatgtacctagacctcaaagccagatactggtggagaggaatgaaaaaggaaatagcttagtatgtggcccggtgtgatacttgtcgacaaactaaggcagaacatcagaggcccgcaggcctactgcaaccccttccagtgcccaaatggaaattggaagaaataggcatggacttcgtaatcggactgccccgaacccaaaaagggaacgattctatctgggttataattgacc

SEQ ID NO: 51416 - DNA, 413 bp, Zea Mays
atttcaacaggtggaggatttggaggatttatttctgtttgttgttgcctgacaatctttccatcttggtattgaccatcgaagttagagacatatggtaaaaacagttttgcaaggtagaacgaataggctaacaattgattatgaactaaagattctttggcagggtttaatctgttgctttatattcagctaagggtaactagttgtataaggtgaatatccaagtttaaaaatagaatttgttaagataagttaaactatatggtgtaggtcaaaaacttgtttgacatttggtggggacagacagattatgccattcatgatgactctatgggttgggttaactcttttgctcatggttgagttgatcttatatgctaaattaacacttggctagaagggtctaatct

SEQ ID NO: 51417 - DNA, 374 bp, Zea Mays
caacgacgctagtgttgacgttctggatgtgcagttgggtatgatgtagctagtagttggtgtagccttctgtacttgataatactttatggtacactaacatgtgtttgtatgactacttggttgatgcatggacctaatagtggccttgagtaccttgctcccaaagacatggtgacaatgtgcttgtcaatctacaaaaacgcacatcacatatttaatgtgttgtatgagagacttatccaatatgtcggggctatgtacctcctagtaggcactagacatgggatccctactttgaggtcttataaccctcagtgggaccagacacacccttatatcttgtggataggattacacttagttatagaaac

SEQ ID NO: 51418 - DNA, 1366 bp, Zea Mays
atgatttttatgatagttatggatatcataaatcacgagattctctttttgttgtgcatgcaagacgctggtggtcgtacttcaggtttaagcgtaaataactagccaacctgagagacgttgataactctaatgcgttgatcgtaaaaatcctcaagtttgagtataaaatagtgttagatatagcggaaatgttgattcacaccaactaacaacccccacgtccatgcatccgccataaatcaagggatttgattaggggagttgattagaggatttaattaggtgggttgattaggggatttgaatttttatgacaattatggacaccataagtcatgagattcctttttgatctacacatggaaaatatggcatgtgtttcactggtgcgcgcagttcaggtttgagcgtaacaatcttcagttatgtgatagaccaaaccattgacatgatgcacactgaaaagaatgttgtccaggcactttgggcaacatttatggatatttatgataagtcaaaggataacgtaaaggcaagagtggatctggcagcgttttgtgatagaccaaaccaagtgatgaagccgcctagtggtggaaagacatggagaaggcataaggccaattttgtcctaagcagggcctagagtaaggaagtactacaatggatcaagatgttaatgttccctgatgggtatgtagctaacctgagtaggggatgaacttatctactctgcgagtcttagggatgaagacgcatgacttccacatatggattgaacaaattcttccagtgatggtatgaggctatgtcctctgagcatgtctggctagcgcttgtagagttgagttatttcttctgccaactttgtgcaaaagagttatctcggaccgtgattgtagacttggaaaaaatggcactcgtattattgtgtaagctggagaagatctttccactaagcttcttcaatctgatgcaacatttgattcttcatctcccataggaggcacaaatggggggcccatgcagggacgttggtgctatccaattgagagatgtttaaagactataaaaagaaatgtagaaataaatgcaaattcgaggcttccattgctgaggcatacatactggaagatgtgtcaaacttcacaacaacttactatgatgacaaacagccgagcgtgcataatccaccccctcgttacaatgatggcaacaacaatttttgaggacaactcggaagtgcaaatggttcgaccaccaagaccctaagacatgaagaatcgtgccatatcatgctgtatgtattgaccaaccttaaagatgtgacgccatacatggagcaatttcttcttgaattctg

SEQ ID NO: 51419 - DNA, 384 bp, Zea Mays
cctggctctgggtctggggtcggtcgacacgggcacacagacacagtcatgcctctcttacgattctgggcgatcggatggccacctttatttgtcgctttcccagattccctagctagccctcagcccctcacaagcttgccactttttgttttccgtgggctccagctccagctccaggatcatgcttgccgcccatggccccttcttctctagggtgagtttggttgcgggacagtaaggggatagtcatgttctcaatccctgatcccaaccaaacaaacttatttaagagatcgtcccgtcccatcccatcctatcattgcaaacaaacgcactctaaaagtccagtctagacgactagactcctctcttctagttcca

SEQ ID NO: 51420 - DNA, 528 bp, Zea Mays
ctggattgatctacatagtgttttgctacttttgattgtcctgtggggttcatgttgaagttgggatcaagccacaatgctctcgagtagagaaatttttattggctcccattcatcccctttggttgcctcatcggtccttcaattggtttctgagccggttaatgattaatccaccctaatcagttcttgatccacggaaggcgacatggaatgaggtgttggcaaacctctgttcttcgatgggacaaactacccataatggaagatttgcatgtctatgtatctttagagtatcagtcattgagtataagagatttgccctgatgctgcttttgaggcccagagtgctcggatcacgcctctgcagatagagtcgcataatttgaacaacaaggcatgaaatgctttgttctcatgcctctcacttgctgagtttgagcgagttggtcattttgctatggctcgtgagatctggtcccctcttgagaaatttcgtaaggataatgataatataaatctagactc

SEQ ID NO: 51421 - DNA, 415 bp, Zea Mays
tttctagtcaacaaggcgtactaatcgaaggctggcttaataatgatagtgaaaatatccaaactctcaaagcatcggatgcaacagtggcaccaagctctaccaagcatcggctgatgtgttccacatcatcagtgcaattttgaccattaaacttggagaacatccggatgcaatactcaggtgggaaaggcgtgaggttgtatgtctctagtagggcttggagtaaataattgccttttttggtgttttaccgaaattatctcgcatgatctcactattatgtctctagtagggcttggagtaaataattgtttttttggtgttttaccgaaattatctggcatgatctcactaagtttgtctatgattcatatagttttagtttgttcaagttttgacttatcgacatacc

SEQ ID NO: 51422 - DNA, 1420 bp, Zea Mays
accatctttgacatttatagtattcctaagtgggctggttgattacaactcaacactataatcccttctaatctccctacaccgtgttacctgcagatgtatagtcgtgacaatcccccttcagatcttgcttgaccccaagtacaggcctttagaaatcttgatttgaccactttgaaatcttcccatgttgcacatgttgatggaacacttgaccatctgatgagaacttagacaatagtagtgttcccttccatgaccagtctgcgatccaagatctccatcggaacgatgctcccactgtcgagatccactgtctgaggaagagtatcaaagtcgagtataagtgggcacaaaaggcttgagttgtgagacatggaagacaaggtggatctgagcttcctgtggcagttccaaacgttaagcagatggcccaatcctctccactaccttgtaagggccaaaatatctgaatggcagcttagggcatggtcgattggccactaactgttgagcataaggttgtaatttcagaaacagttgttctcccacataaaactctctaggaactcttttctgatcagcataatgcttatacctcttctgagctcgagtcaaattagcctttaacatctcattatgctcagatatgtgctgtagaaattgtatagcccccacatcctcatctcgtctgaatattgggacagcaagaacagatgcttcattgccatataaggtctagaaaggtgaacaacccaatgatgagtggaaagatgtattataccaaaattcgactaataatagccaagacttccatttctaagggttagagtgcatagcacaacgaagatacatctataaacattggttaaccctctcactttgtccatctgtttagggatgataagttgtgcttaatgctagcttaatgtctagtgatttgaacaaatgcttccaaaacccacttgtaaagaccttgtctctgtcagacaccactgtcttcggcacaacatggagcttaatcactgagtccatcatgagttgagcacttgagctaccccttgagttgtaaatgggtgctttgaaggaaagaagtgggcatctttagtaaatctgtctaccaccaccagaatagtatcatacccctcaaattttggaaacttctctatgagatccacggtcaggtcttgccaagctcccttaggcactagaagaggttggagtagcccaggtggcaacttcctttctccttttgcctgttgacagactacacattgcttcacaaagagctcaacatttgtcttcaatcctttccaacagaacaattttttactttgtgataggtaggcctgggcattcggtaaaaaccgaaacttcggttcgattatttcggtttttaaaaacttcggttttcagaaac

SEQ ID NO: 51423 - DNA, 610 bp, Zea Mays
tagcaacacaaggtggaagatgagaagtagcggtgtagccatagaaattgaaggatttatttgttggatgcgactagatgaagcttgaggcaatgatgtgcatggtaaatcctaaaatagcagacagtttagaaaaaaatataatcgttaatgaaaattaagggccgaacaaaatagaagaactgaacaaatagggtacatgttagcaaggagaatatatgtgcaacaaaatagaagaactgaataagcagggtacaggttctttatcacagtgtagtagtgtgtcgctatcctatactcagcaagtttaggagaaaactaatagcgtgtggctagaacatgcatgtttactagacctatctatactgtttcatgcatttcattctaccttctctatctatagacatgagctgggaactagagcactgatggctatccaatggatctgccgcatactacatatctgatcaactcctacggagaatattatgaattgaaccgatatcattcctaagtatcctgagaggggttcgccaagttttattcaaaacattgaacactaataggtgttgtttatgagtttacaccattcaaagagcactagacaacc

SEQ ID NO: 51424 - DNA, 578 bp, Zea Mays
ttcgtctgttaactgtacttcagcataagtgttgaaaaactattggctagcttcgtcttaagaactcaaattgctagaattaggtctactgctagactaacaagtgagggcagagaaaccgaagcaatagaattagccctgatcttggagattatgagagattctagaatggttactcaggggaaagaggggatggtgccagagaaggataccattgatgccgaagctaagactgttgatgccgaagctaacagtgatgatgaagatgatagcatcctgagtccgagcaaacctagccatattgaatttggtaaatctacagtgaagcctgaagatccggttttaatgaagaaacttggctattttggaaagaatgatgatgggtttgataaggttcgcaggcgacgaaatagtcccggaaccgaaggatgatgaagtgatagttttcaaaagcttcttccatgctaggcttcggttccccttatacgaaatgattagcaaagttttgaagaagtttgaaatatatcttaatcagctgactccaaatgctatagtcagactcagcgtgtatatttggg

SEQ ID NO: 51425 - DNA, 385 bp, Zea Mays
aaaagatcaaggttctgacgcaccgaccatgatatattgaatggttgtagtgtctgaatttggtgaatggacctcttccgctgccgaagcggaacaagatgctcccgccgttcggagcgctgaaggatcgactgtagtgccgaaggtgcctatagtcgggtcagccgaagccaaagatgggtggccaaagagctagagttggaaaaaacaatagtgttgccaaagagcccaccggtagaggcagaactaccgaaggtgacaaaagctcccgccacaactcccaagaggaggagaatggccagcgtgctagacactgtcatggaaaccacaaaggcattaactcctgcccccgcgaagaaagttgccgaagctgctacggccctgg

SEQ ID NO: 51426 - DNA, 352 bp, Zea Mays
cctagttcttcgtagcggatcctcttgcggggaggggacaatgccatggcagggacttgagcttcagggggatcccttccttctagctgagcttctagggctacaatccttgcgtgtgcatcctccagctctaagcgtaccctggagaggtcttgggtagcactgtccaggtcggtgttaagacctaccaccacaccagttagggtgtagaggcgatcttctccagctccaccaggaacaatgctggtctggttttctccatgaagacacagaggaagatgtctgtacttcatgttgtgcatctgctgccggaaagtgtggctaagggaccacagagatcacctggcagcat

SEQ ID NO: 51427 - DNA, 435 bp, Zea Mays
gcgttgtttctgcccgagttctagcgcgtgtagtcactcgtccatgcctgctcttgccttggtcagtgcacaaaacctcttccccttcccttaagctacagatcttgtgtggtgctcaaagtatttggcctactggttccagatatatggagcactcaagtaggatctgtctcacagcacgagtctgaggcaaatccttggttttgtcatgtctagggcccgaatcccaatgccatcttcagatatgtggtagagtggttagtttagcacatatttgtcaatgggagctcacgattttgaattagggatcatggtgaacgcgctcgagtttgggtgagggggctgaatttcagaaatatgaaattctcatttttatagaaggcttccacttgaatggcttgtttgggatttttaaaaatccttttgggaaaactc

SEQ ID NO: 51428 - DNA, 281 bp, Zea Mays
ttatgcaactagcataatctgtctattatattaagtagctagttgttcctcttttcttctccccctcttaccttcatctattcttgtttcctcttcccttacaacaatcttacctttgttcatcctttcttctcccctctgtagcttcttgtcttgtttaatttaatggattaatgcattatattatgcagctacctccataactatcttctttttatactatgcaggtagttaatgcattatattatgctgctacctccataactctcttcttttattct

SEQ ID NO: 51429 - DNA, 802 bp, Zea Mays
gataaatagggggttagattagggttccaaccctcggtttgaaattttgggatgttacaaacctaccacacttaaaggaatctcgcccttgagattcagacagggctcgagaaaaggtaagggtattccctcctcagagagtcctcactttcccaagtagcttcctcttctccttctctgctccactgaactttacagagtctcacttctgagttgcgggtctttcggattgctgagtcaagaatctttattggcttttcccggtactggagatctttctgaatttggattgtctctgcctcgatgtggttctctggtacttgcaggcacttgcggagctgggacacatgaaacacgttgtggatatctgacatgaattctggtaatttaaggcggtatgctgcgggtcccactctgccaatgatggggtaggggccaacaaatcgcagtgctagctttcctttcatttggaaccttttgacaccacgcatcggggaggccttgaggtatatgaagtctccttcctcaaatctgagttatctctgtctgttgtctgcataacttttctgtcgactctgagcttcaagtaatcttttgtggatcagggcaactttcccttcggcctctttaacaaaggcaggtccttccagtgtcttctcccctacgttggacaacattagggggggtctggcactttcgtccatacaatgcttcgaacggtgacatcttgatactggcctgatggctgttgttatatgagaattcggcatacggcaaactggactcccagtttctgtcgaat

SEQ ID NO: 51430 - DNA, 521 bp, Zea Mays
gcgagctgctctctttcctggatgcctactcgagctaccactaaatcgccatgagggaagctgaccaacatgcgactaccttcatcacccccttcgggacgttctgctatgtctccatgccatatggtctgaagaacgccggagccacataccaacggtgcatgctccggtgcttcaccgaccaaatcgggcgcaacatagaagtctacgtcgacgacatcgttataaagacgaagaaatccgatgacttcatcgccgacctggaagaaacattctccaacctctgaagattccagatcaagttgaaccccgagaaatgcgtcttcggggttcctaagggtaaactcctgggcttcatggtctcggactgtggaattgaagctaaccaagagaagatagaggccatccaacgcatgggtcccatccagaacttgaaaggagtgcaaaggttggtcgggtgtgtggccgtgctcagctaattcgtttctagactaggagaaaaggggatgccctttacaagc

SEQ ID NO: 51431 - DNA, 638 bp, Zea Mays
taggtgtgctattggccaactggaatagccagacacgccgcctgcaggatggcttgggcgccgcctgccagctgagcggacagggcacattaaatgctgaagggtcacatcgcctgtcagcggggtagtcagacgacgcgtcctctccacaataaatgcaagggcagcgtggcccagcggccttacgtcaggcccatcccgcatgctcacgtcatgcatagtaggccgcttgactgcactaggtcttcgcgtggctagggaataggaacgttttatggacaagttcgcaccaagctgggtttggacacatgtcgtccctggaccccttcctgggaagggtccgggtattctctgctccagaatcctgggatccagcggtgagtagtccggaccccactcagaagggtccgggacccatctcggagatccgcccgtcacgtacgagggtccggtgctttccttgcagtaggtccgggcccactgcatgtatcctggagcatgtccctttccctgaacacgtggcaaccccggggcggccgatgtggcacgactgaggactgttctccgcgcaaccatagacttaaccgccggtgcaacaccttcatattgtaacaaggggtacccctgtttcaaggtac

SEQ ID NO: 51432 - DNA, 704 bp, Zea Mays
tctctttcgaccttctcaagtgatccaccgatcaacttgagccctcggttcctttgatttgatcttctttctcacaaggtactccatagagattggagtctctttctagtcgtacacaatgaatgagagtcacaactccaatagaagcaagagggagaaagaacacacacaatagcacaacaacaccaaatgacgaagaacaaaacaacacaactacaacatagctctctctagaccattctcacgagcgcttggatctctttggagtgttgctctaatgtttaggaatcaatctctagctcttgagtgacttgggtgctcgactaggctgtaggagaggtatttatagccccaaatgccccaaagagccactgaaggacttgtaaaattctgctctgtgcgggtgcactaaaccagtctagtgcatgactagacctccaatgatctctcgctatcaacgtgatctatcctgagcttgctaccttttggagcaccagaccggtccggcggaccaccggaccaccacgtgttagctagtcgttgggatgaccattgaggacaaaatagccgttggaccctaaggtccggtgcgctaggccacaaagtcaagtttgtagggctctctggaacttaggtccgatgtgccaccgaaccggttcggtgagctaccgtgcggcacggtacaactgaaaaatgcaactttg

SEQ ID NO: 51433 - DNA, 458 bp, Zea Mays
ccaggattcatcgtcgacattgggggtttcgaatctagtttggttgcgcggaggcatgttatgtggcgacctccggatctgtgttgccgatgtggtgctccatctcgacaataggaaagtatctttcccctattttttccttgtctttgtggtgctaatcttgtatgtcatgtgattggtaaatgaaggtgtcaaaagaaattaaattgtctaggatatacgcatagagtaatttaggtggctttccatttatgtgacgtaagaattagagtaaaatgcaaggatgctaggtgtttgtgttctagctggtagaatagatgaagcctatatgcggggtttagtaatttctgggtgtatgcgtagcgcgattaatgtcaactcacaggttctgaattatcactcgtttataataaacacgatatttgttagtgatcctcttgtgtcgcgcacgtgttttg

SEQ ID NO: 51434 - DNA, 395 bp, Zea Mays
gtgatcttaagcttaggaggtaatctcctattgagaaagtgtaaagtgggcaagagcctccaagttgtggagcgccttgtagagactcaatatcacttgagaaaagggaaaggggaatcaagtttgatattggctatcacttaaatgagggtagggttgagatatactcgatccttagtggacttctcaacggagacataagtttcattttgaaaccgaaatctaggaaacaaattatcgtgtctcttgtgctttgactttgctatttgttttccctctccttctcaagttcatacttgccttaatatccattcatgttgctaagatcatattccgcacttacttttactagcaccaattttcaattgttgaactcaatctcatcccacactaac

SEQ ID NO: 51435 - DNA, 795 bp, Zea Mays
ccacgcgacggcgacgacaacgtggtggcagccgtcgaatccacggaccaccttctctccggtagggataagcaccttctcggcggcttcgcaaatcttctttaccccatcgccgtcggtgtgggctcggatcttctttactgccacacatgtgaaattgcacaggatcttctttaccccggcggcgtgggcggtctgaccatcgatccaataagaagcgaaggccgacaggtaatacgcacgagcgctggctaccaacaaccttcaccatgaaagcaagacgtagagcctagttcgcagtttggcacaccacgagtcccagtctgtgatccctcgcacggcacgatggattgattgattcgtcattggttgcaaggtcaatcccgcgtgcccggccgaaacgatctcgtccctggcgggtccggtctcgtgcgcgtgcagtagttagagagaaatttcgatgtgtgcgcgtgcagtagttatgctctgcaatttcgtgcgtatacagtcagagagcaatttcgagatcgtgcgcgtgcagtagctatcctctgcaatttccatgcgtgcctgcagtagtcagagagcaagttagaaagcgagccgagcctttgagatgttcttggatgtgcttagtctatctacattactttcttaatagtttgtagttctagacagtttcaggctgcaaccaactttagtaattgtttgaagtattcaacttctttcatgaattttaggaacagacgactcttttgtttattgttatctttcctttccctgcatagatccttc

SEQ ID NO: 51436 - DNA, 849 bp, Zea Mays
gttcgaaggttgttgagagcaatagtgcagctctctcttcagcattcttttgcgcccttaaggcattgctaagtattaagccctacaagaaagaatgaatggattaacatgagaacaaaagactctaatatagaatccacaaacttcaaaattcacaatttttgcaccttcaggctgttgtatgcaaggctatacgtaagatcgtccttcgtcatggcacagaggccagcttcgagcttcggaaaccccatacttctggccatttcccggcagacagataattctttgttgtctgggaggcaatacaagaaatcatcttcatctgtaccattaaacactaaggcccctttcgggtacttcagttctcgggcatagtgtttagcttcaaaaatttcttcttcagataatctttttctcgaagaatgtcaaataatataaccaaggtctttggaaggtgcttcgggagtaggagcggtagctttttcaggcaaaatctgttctatagcttcttcctccgctgccttttctccaatttctgagggtttctccttggcaggctctgaaggctcagcttcggtgctagcctggctcattgtagctttggcttcggtcagttttgtttcagtttcaattggcacttttgaagccttggcaatttccctggagtagagcttgaagcctttaccatctccagcacatctagtacactagccatcctttttctcttgggggtcgccgcaagacctttttgtgcctttggcattgtcacttctatcgaagggcttaaaacttctaatgtttgtgttccctcaattcttggctcctcaactttatcagtctttggctcag

SEQ ID NO: 51437 - DNA, 412 bp, Zea Mays
gccatctcgaatagtggtcaaagcagagggtggctcgagcgacaagaggctatattgtcaatgaaagcgggggagggaaataagaggaaattacgaggcgtagtcaaatgcggcatggtggtaagggaacaatcatgtcaacaacggagggacaagccaccaccggtcaaataaatgtggaccgaatgcagagagaaggcgagggagcgatcgaaggagatcgaggagaagccaaaggaggatggagaaatagggaaaagctagatcagggcagagcgatgagccaccaccagtcgaatgcaagcaggatgtaggggtagagaagaagggggaaatggggaggaggcaagaccgaatgtggcatggtggtggggcgtggcccaattaagagtggagcgacgagccatcgtcg

SEQ ID NO: 51438 - DNA, 602 bp, Zea Mays
tggggaagaagatgactcgaggaccgttgatctccgcgcgaacgatcctaattagatcccttgtgcacccccttcgaccgagatcttgaccgttgatctgctaatcggatgggcgtaattgagggagaagggtaccggttcggactaagggatcgtagccgttgatctagtgctgggcggttaatattagatctcgcgtcatgaattttgatctgtggatcctagatcctatggacctcatggcataccggttcagttaagctaggatttaatctggtccattgaattatgatcggacgggtctggtgggaggataccccttcgaccaggtttaattgcttatgagacctcggggttctaggaatttgacacgccatccaagcacaaagaaaagtaattgcagatcagtcctaaattttgcggatttgaccttgggcttatacaaaataggcgccgcaggaaaatcaggaaattgttttagggtataaagtgattcaataaacttagaaaatccataacttttgtgatctaactccgttatagtccgttccagaattgttggcttcgtaataaaattatctacacattagtatccctacttt

SEQ ID NO: 51439 - DNA, 491 bp, Zea Mays
ggccagagctccgaagtcctcgacgtcctcagcacgctccatctacagcaacatcagtcactcagcaaaaaccacgcatacccacacacactaccacacaaaaaatgaccctcacctgctctttcgcctggtcggatcgctccctgaccgcctcccgaccatacggaccccacatcctatcgaaaagtgcccctgctgactgcttcaccatagggtcgtcggccttgaagatctcacgttcaaagttcttgtctgattggtcgaagacctcgtagtgcctgcagccctcgcgggacaacgcattcatggccccctcacaggtgataagggaggcaaatgacatgaaaccctccacaatggtcgggagcaccagcagctcctcctgcatacattcgaggaagcgaaggcctgcttcctggtcgggtacatcgaagtcagcgatccgctcacccagcttgtggtacgatcccacgaactgtgcgtacgtccgc

SEQ ID NO: 51440 - DNA, 413 bp, Zea Mays
tttttatcggttaagggcattgtctccggttaaggtcattgtcatcggttaagggcattatctccggttaagtgaattctcaccggttaagggcattgtctccggttaagggcattgtctgcggttaaggctattgtcaccgattaagggcattgtctccggttaagagaattctcaccggttaagggtattgtctccggttaaggctattaaagccagttaagggcattgtatccggttaaggctattgaagctggctaaagtcattctctccggttaagggcattgtatccggttaaggctattgaagttggttaaggtcattctctccggttaaggctattgtcaccgcttaagggcattgtttccggttaagggaattctcacctgttcagggcattgtctctatatcc

SEQ ID NO: 51441 - DNA, 853 bp, Zea Mays
gtgaggttccgacgatcacgtttttggtgagtgccggcgacaggaactgcctaggctctttctgcatggatagtacttggaccaatcgacttcctcctcttcctgcattggatatgcaatgttggactgaacatttacttcaactgttactatgtatggttctttacttttttaactatatatactactatgcttctctctgttttgcacttgattaacacatacgggcgttccggcgattcatgatgctctcacgccatacatacctcacgcacgcagaaccaaaaaatggcacaagaaatgctgatagcctgatactgcttggttaattgggcgccaaggcaaagcggtgggcgcgtgacctggcacctggtcacactcacagacattagttaattggagcgcgagggatttatccgttggttcatcctctaccttcttatccttatccccccgcgccctgtcgctattgcaaccccaggcccacgcagcacgctacgagagtggcagtaaaccctttggtctgcttgactggatggcatggcatgccaggtgcatgcatactctagagtcctagcagtggtaaacaacaaacaaaaatagtttatcttaatatttcgcccaactttctgcgcttaggccaactctaaactcgtcaccgtgagaccaaaaaaaagagcatatccgcgccagtttcttggattccatggaaaaacggggccatccgatctgatgttatccaatcggtccccgcaccagcggtccagctcggcaagtgactgagcaagctagtgagtgacaggtcagtccgacgcggactcacccagccttatcttatccacaccggtgtgtg

SEQ ID NO: 51442 - DNA, 832 bp, Zea Mays
gtgacccttgttctctccatggaaacacaatacaacttccttggttgtgaattatgattaattaaatcttcttccgaagctttagccccatcttcctcctcttagagagctagtggtcaaaatttgctttggaaaggttgttgttgtgtccctgatgtctaggatgagtcttgaggctaattttattgtgcttgacattggctagatttgtcttcattttggtccatattctagatgcttcgaacatgtctaggatgaaatcttgctctgaagcccctagcggactctgcatatttctatgcgtcttgcctacgctaatgaaaatcggtgtctgctctgatgtactcatccaacttttgcagcagcttcactaaagaggggggaagtttccgagcaaagtattgtgctgctaggcttggacgaagtcccttgattattgttgcgatgacaatatcatccggaacacttggtgcttgagcccgaagttgaaggaaccttcagacataagactagaggtattcatcttgctcttcggtacattgaaacatggcttgagcagttaaaggcttcatttggaagccttaaaattttgtgaggataaggtccttgagtttctgccatgacgagatcaatcttggccgaagagaagaataccatgtttgtgctacattcttgactaccatgaaaaatgattttgccataactgctgagttaccgccatatgaggatatgctagtttcataactcatcaagtctattaagccatcatacattgggagctagggtggcctttatagtggtggccatggtatggtttgcaagtctgatgcca

SEQ ID NO: 51443 - DNA, 372 bp, Zea Mays
gcagcctcaacaacgggaaggggggagaggtggagcttttccacacgttgacagggaggtcaacatcatattcggaggtcatggagcgcaagaaagcagaaggcaacaaaaacttaatgatcagcaagttctagtggccacaaacagtgctctagctccttaccgatggtcggagcacacaatatccttcagccgagctgatcagtggcttaactttgatcaccccagcaaatatctggtacttgtggatctagtgatccgagaaaaccgggttaagaaggtgctggtggatggtggcaacaacatcaaaggtcacctttccctgaacgctttaggccctgggggtcgccatcgacgacctcactgagtcag

SEQ ID NO: 51444 - DNA, 557 bp, Zea Mays
acggagttagggtgcaaaagttatgattgaaacgagttttaggactctttctatactaggaaactatccaggggtgttattgtgaatactaggtactaatttgtaaattctaggaccttagagtaaggctttgtctgtggacgaggacgacatgtttatacaaagaaaagacaggggctctttagcaattgacgcgcaacgaatgggtatccttgcgtctgggccattggatccatgtccgatggtgctcattagatttgggcactttatgaaccggtacacgcgatcaaccgcacgatctcgatccaacgcacaggattccatgggccgaaacgttatcctagccgcatctcacaagatcaatgaccacgatttaaactgtgaactggtatcctattgatctattcctagccacctatcctatgatctacgaccacgattttaaattactaagatctattcgcatccgtttgatctcgaatcgatggctcgaatattccctagcagaaccggtatgctcctcccaatcccagccgttcatccggccactaacgacc

SEQ ID NO: 51445 - DNA, 357 bp, Zea Mays
tcgccattaatgattgctgaaattgccactttatatgtgtagagaaatatttggaccgacagatactaaccaatgggttatagataccatattgcttaagcaaaagaatctaaactatggcttctaaaattagtctcgaggccatggtgctaggtactaaatccaaggtttcaagtatatacatgcacaacatctacgaaattctgatgcaaaggtgaaaatatgttagtatagaagaaaaagtatataaaggaatatgtaactgttgtgcaatcgattataatgctaaactacaccatgaatatctgacaagaaaaaggaatatgtcaaagtaatgaaccaagtgtttagtgcttg

SEQ ID NO: 51446 - DNA, 939 bp, Zea Mays
ccaaagccttgtgggccgtgatgggcctccgcctcatgactgctctagcccactattggagcgaaggccatccgcccccctcgatcagttttctttaacatacactggacaggttctatcacagatacatgaggtctctgtccaagaagcgtcgaaggcttcgaggggggctcctcatgacttcgcgaaggcgccgccgccatcttggatcgttctgagccaaaaccttggtgaggattgaagagccggcgccccagagcgaagactgtcgcgcacaggcgaggaccgcgccgtccgatggcggtgcccatgctgcgtcctgctgaccattcgagcccatttgtaagcccgtccctggggtagggtttactgtgtatttaatcaagctgtacttaacatcatcgtaatgacatgtaatgaccccatagggtggaatattctagggctatagcaggtaaccggaggcataattatacttagaagggcacgcccacccacctggttacctataaatacaaccacactgtacattgatgggacacgcttaacaagacgctatagttccctgcttattgttttttgagcactcgtgtcccctctttctcgagtgattgggcccacctgaccacgtgtaagtcggtcccaacatttggtgcccaccgttcgtgctacgacaaaaacaaacccgcgagggtccccaagaaaacgacttccaaggccaccacctctctggacgatgcggcaaaggcaaccctcgttgagaagaaaggcaaggcgaccctcgtcggcgaagttccccaagtggcacccgaaaacgatggagcagttaaaacaagcgtcctcacacagagaacccacccaccccgaaggcaccgttcacacgtgcagctctatgggcctctctcggaaccctccgccaggttttacccctcagagtct

SEQ ID NO: 51447 - DNA, 491 bp, Zea Mays
aaataagttagccataccatcctcaccctcgaagctccgtacatgcgagtgtcctcgctgttagggtccacatttacagatgccttttccttatcagagctccatacacctgctcgcaattggtaatttctcattgcaagtatcagtcgttcgttaagttcgtgtatgaggtttatgttgttccacattgttaatggtggtcagtcacaaatcaatttgctataccatcctcggcctcttgaactttagttacatttcatcggaaagcatacttgtggtgtgtagtgatacttattttgttgtaccgtgctgcatatagaccatatgcttgctacaattactctaaacaatacaagtggtagctacattttctgtatacatgatgttcatagtatctcatcatagaattatccatgcattcacttcttatggtttccttatttttattttgccagtaaattctaatcttagttttggaaacacaggcttca

SEQ ID NO: 51448 - DNA, 576 bp, Zea Mays
tataaagtggctcatgcatccaccggttatcgcccaagcctagcacggctacataagtgttggttgttgaattcatgtgttgtacactaagtcaatattgtatctaattaacatatggtgcgtagcttttacttgtttattattttagtttttttattcattagtgttaggtaaatggttcgttaatttataacggtttggtgaaagatggatgacatcacgcgcctcgccctcggcattgtctctgcctcctcctcgcatatggcgtccccacaacctcctcgcatcgtcccccacctcagtatcgcccatgcgtcctcctcgtgtacgacatccccgtagcctcttcgcggatgccatcctccacctctgcctcgcctctgcccccaatgacacctgagctcccagggatcagcatcgaacgacctcgcacgttgtggtcgccgtccttcgccttgtcgcctcctttgccatcctctacctcagcgtcgcccctgcctcctcgcatatgtcatccctatgccctccttgcagacgtcgtcctcaacctcacccctgcccctgatgactttcggt

SEQ ID NO: 51449 - DNA, 980 bp, Zea Mays
acatatttgtgaaccaattgacttaaaatacttatttggcttggtttttgcactttagcccaaaagtggactaattttgcatataagcccctagggtttggttttagggttttccagggttccaattagggtttctggtatcccggggtataaatgtgattcaagtttattcttggagtcattttatgacttttaccctaaagtctttaggtttccttaacttgggttaagttttacccctttaaccactatttagggttaagtcctttaaccagggttctatttgcaaaacaatacaacttgcttgaaatttttgcctagtgaatgcactctaggtgtgtcaaacatatgcaaatgctaatgctcatgatgtcatgctcaagttttagttatagtaacaccaggggtgttacaattcccgatctaacggtgtacgagcgccaccaccctcccccaagctaacgcagcggtgccgccctagagctacggcggaagctcgccgacgtgcccacgattctcctcccaagcgttgtgaacactgaaatcgattgatactacgtgactaggaggacgaggcgagtcgattggatgggtttcttaccaaggatgcgcagtacaggggtgtggccacggcgatgggcggaagtacgacgatggcggaatcacggtgaggaattgccttcaattcaccgctgcctgtggccgcttattgaccggacaatcttccccccgatggcgcacaccaccacggcctggttttggtcaccagacgatgccgtagccaagatcccgaccacggcggcaatggcgcagccgcttctctctctctcggtttgggctctggcgggtttgtgaaatagggggtacagatgcgatgcaagagtttataggcgtaggttggaccagctcacgcccggttttgcagcttggtggttgagattcatctgccatgcgcgcggaatccggcaatggccgctgca

SEQ ID NO: 51450 - DNA, 919 bp, Zea Mays
acgactgcggtggcgtcggagacgaaggttccatctccgaaaaaagactgatcagttattttgaaggtaatggcccttgattttcattttttgactggtttagtttgtagcatggtgtttgtttttattttaaaactttaatataggagaaggaaaaagccgaggagggagggattactaatgttccgaatcgggacgaagtacccctgggtaccatggagccgaagatgtcaaccagcgcgcaggatcagccgaaggcgagaactggcgcaacaaggacccctcgaaagggtaaaagaatagccaacgttctgaaggctgtccttaagcctgcaaagatggcttcgcccacagcggcaaagattaccgaaggtcctctcagcgcacctgtcgctgaaaatgtgactactgagttgaaggtggttgcctgcgcagaggcctttattaacgaggacaaggctagttcttcaaaagtctattcaacgacaaatgttggcccagaaaaagaacaagagaaaaccgaagcttctgcagctgatggtttgacagaggaaaagatttcattagcaaccaaaagagcaccgcctgcgctccacgaatatattattcgccacgcctcgagtggaaaattgactactgaacagattgatgaagttcagaattatgctgaggatttgaagtatccttcgggctcccttgtatacgggagcaatgatgaggatgactatctgtactgcctaccagatagtaaagaggtcgaagtatgccacgagatgatggataaaatgggctatccgaagcttgaactcggattatctgcaatgccgaaggatcatcttgcggactgcttagcatacaacaatttgaaggttgttatacatctcttccccccccccccttttattatgatggttcagat

SEQ ID NO: 51451 - DNA, 409 bp, Zea Mays
ttcaataattatcccaaaacaactaactccattacacaacttgtatcacgaacctacttgattacttgaagcgtctactcgaaatcgtgagcacaaccatacactatatgcgaagcataatttaacgaacgcataacgcattgactcgacttataaacatagaggaagcgatgactactttggcatgtcaccacctctctatttaagccaaaacaatttctacctacaccaatcgaacattcatgccgagcaacacctatacttccctgtctcgcatacaaccatgttgcggcgtgcactcgagacacttcaatcaatgtagcacaaccactaatatatgaactccagcacacgttttatcaatacatccaccgtgcaaaagagcattttctacattactcgttacatc

SEQ ID NO: 51452 - DNA, 501 bp, Zea Mays
aaagaatacaacactcggcaaagcctcggattccggtagtgggaacgcagaaaaaaagagaaggccgagagtgagtgccgtgggatcgccgccgtgggtggaggagagcagtcgggcggagtcaggggggcggtcctgggtgaatcgccgctctgcccaggggggattcatccggtgcttcgcaagaacggcgggccggcgcaccgtcgtcaccactgaaccacaaggcgtccgtcgctccacccagggataacctgttcgaacctgggcgccggtatgttcccaaccgtgtagagcgacgtcaccttcacgattaggcaattcgatccgtgcttcgctgtggctgcatgggcggtgctcgtcggggttgcgcattgatggcgctgcggcaccgtgtccggtcgtcgcggggcggagctctccttccgccgccctgtcatgcggtcgggagcaggaagacgcatggagtccattgatctggtgatcagcggtggctataga

SEQ ID NO: 51453 - DNA, 560 bp, Zea Mays
gccgccagcgcaatctcttcgaattggacaccaccgctcatggactctataaattgagcatgccatgagctccatagggtaatcacacatccaaagcaccaactctcgtctccgatcatccactagagcctccaaattgcccatttcccccaaatcggtcaagaactccgccgtggagcctctccccatggccagccctcctcaggttggttcatgcctctctattacatgttctagcatctcttaggtcccctgttgcttgtagacttggtggattgaattagaccacactaaatttcccggagcaccgtagtttcttctcggttttcgccgtcatcgtaagcaggcgtattccagcctggattggtgcaattgattgaggggttagtgtcgtcaagggtagaattcggtgccggctaagttagggatccggtcttggcgtatttcggccagtatagactcaccggagacacgctcgtcgccatccaccgtcgtggacttggcactgcgaagaaacagaagtagaaggggttttccgcaaacgtcagtgaaacatatga

SEQ ID NO: 51454 - DNA, 629 bp, Zea Mays
ggtgcgggcgcctgcaggatatggcgatcaaaagcctatggccttggcggctgggggcttaggcttcgatcctcgttggcccctgtggtgctggctgtatcaatggtcgtcgtttggccccttccatacctccccgcccctccctaggttaggcatgctccacgctccctcacttgtttttaggttccaatggggtgggacctgctccaagcctgcttcagacttgagcagtcgtcttgcagaggcgtcgttagttattggcactgtcgtagcgctctgtcagccctaggctcccgatgccatggtgcggggccttcggctcacagtcgcatggcgaggtggagcgggttttaggtttccatgtaggtctcccgttcattctagcccattctagaatactccagtggttgcaatgttccaacgtgtacgagggagccatggcggtctagccttgccgtaggtaggatggtgtggggtgcggactgcttcgacacgcgtttgccaaattactcgtcgtggcttccccgttcgccattgaggcagtactcgcttccctgtagagggacctcggccgctccgagaggggtcccatcctggtggcaatccctcgcatggtgggccgaggtgag

SEQ ID NO: 51455 - DNA, 1913 bp, Zea Mays
gtcggctagggttgggggggagatagtgggctcccatccaacggatcaagatctatggcccaaacccgctctcacatccgctcccgacctcagcgtaaaagtcaagaaaagttctactgcttcactgagattatgcctcctaaaactccaagccccaatagcacagaacacggaagagaaaaaaaagaaaaataaactttaatttttttgtaaaattgggtatcacactctaccccccttaaaaagaattcgacctcgaatttcgacgcttctatcggaacgacaaaagaaagattagcgaagaccaaaaactcacccataacaaaaagttcggggtacttctgcggcatcagctcctcaagttcccaagtagcctcgcgctcagactgattagtccacaagaccttaacatacttaattgatctccttctcatgacacgctccgaggactccaagatacgcaccggacaacactcaagagtcagatcctgctgcacagcaatcggttccaactcgatttgatggtcaggatcccgcaaaaacatcctcaacatagagacatgaaataccgataagccaagctgccaactcgggccaagatagtgaacggtccaatgtatctcgggctaagctttctggagacaccgaaccgaacaactcctttagtaggtgataccctgagaaggacttgatcacccactgcaaattccaagtcccgcctcctcacattagcataacttttctgacggctctgagcggccaaaatattctgacgaattttcgaaccttctcagatgtctactgaacccaatcaggaccaactagagatctctctcccaaagtctcccagcacaaaggggagatacactgcctgccatataaggcctcatatggtgccatcttgatgctagcctggtagtttttgttataagagaactcggctaaggcgagatgatcctcccagctacccttccaagatagaacacaagcacgcaacatatcttccaaggtttggatagtttgctccgactgaccatcagtccgagggtgaaaagcgacactaagagagagcttggtacccaatgcacggtgaagactctcccagaatttggatacaaatttggagtctcgatctaaaacaatggacttaggcaccccgtgaagcctgattacttctttcatatacaagggaaccaactctgaagctaaatttgtggtcttcatgggaataaagtgcgcagacttagtaaagcgatccactaccacccatatagcatccctgcctcgaggagaatgaggtaagcccaccacaaaatccatggtgatatgctcccacttccactccggaatttccaatggcttcaataaacccgcgggcctcttatgctcggccttcacgcgctgacatacttcacggtggccacatacttagaaacatcaaccttcatcctcttccaccagaatttttgcttcaaatctctgtacattttggtttcgccagggtgaacgatgtaaggcattttatgagcttctctcaagatatccatcttcacctctgatttctgaggcacacaaagatgacccctgaaacgaaccaaatcattctcatcaatggtgaactcacggggtttaccatcgccgaccctatttcgagcttcctgcaacaaacgatcctgctgctgagccatgtgcactctctccagaatggaggattggatgagcatccgagtctcctctctagcggtgccgacatagcacaaagcaacccccatacggtccatatctacgatcaaaggcaaggccacttttggaaccccggacctgctaagggaatcaaccaccatatttgccttccccgagtgataatgaatggatagatcataatcctttatcaattcgagccgccgacgctg

SEQ ID NO: 51456 - DNA, 675 bp, Zea Mays
gaggaatcgatctctctccatcggttgacaccgaaagtgcacaaaagggagatcatatgctccatatggacgcggccgagtgagtcgactagtcgcttgtctccataactatgatgatgatgagagagcagcctctctcctgtgtgtttgtgggctctactttattagttttggtgtgatgtgatcacgacgggaacctgtcgcacgtattgtgttgtgtcccgctgcctcttgttattggacgaagtagtgttaacctgagtggcccccttttaagattctttaatgactacaagtgacccccttttttattggcagcaagcactacgttatgcaggtactcatttcagatgtctagttttttgtactgcgtacacaccttggtaaagtttgggcccttttacgttcggcctgggacgaaaatctactgcctatgatagtgtgataggcccgttagtgctgcaaacgggcctcgataggttaaaattagatatcgtaaaagctcaaggcccacctataaaaacatgcagatataagagtataaaaataatggaagccgtcgtgccaccaaaggtgttcagtatggggctttcgaggatcaattaaaacttgctcccgacctccggtctccgaagagaatatgtccattttatttgctcatatcttcgtcacgac

SEQ ID NO: 51457 - DNA, 1263 bp, Zea Mays
gacgatttccaaagaaccccccacattctaatccttggcagaccaaggtccccgacggcgagcggcgcggcatagctccggtgagcttgtgtaccggccgattcacgcaaagactggtgccctacttcggctgaaaccgaattcacgtcctaaccattgtttccccctagttaatttcaagaagggcgacctaatttgctctggccacggtgaccgtgcgaatgatcaaaggaacaacgtgttcctgatgatccatggtggtcatgctcaatcagaggggtcgaggagtttgaggaggacctaagaatgctagaacaagcgatcaaggcgctggaactgacctagaataggctggccgcggtgagatgttcttgcggcgtgttcgaaccgatttgggggaatttagaaattggagctcactggtgatcaaccgaggacaatacttggtggctgggtgtgtgatgatcctacggagctctgggaggcttcaatttatagagcgcaatagcggtggcgctcaatttggccgagaactgctggcggccggagagggggaggattactggtgcagtggattcgtggcaacaatcgcggcagcgctcaccagcgatgatcagatggttatagtgagtcacggcgacgcgacggatgtgtcctgatacgtggcgtaaggccgcgagacgatgatcactggcgatctcatctaattccaccgcggcgagcttggtacggcgaccgaaattgtttactggccggggcttatccatggcggcgtgctacgagcgttatccgatcaacctgagcacaaatcaagacggcgacagcacgaatcacggcagagatcatcggtggtgagctgagctgtaaatctgatctgtttcaggttactgtaccatcgcgagttcctttcagtgcacctgacagtcaaagtttgggctcaaatctctctcaaatttctatggcaaccagtggatcagccagtaacaaaagttgttgtctgatgatccaacaacaatcttgttgtagcaaccatggccaaattctcattagatcagggttgatttctagttcaaagttgactcagtatcactgttagtctgaatttcagactgcaaacagcctgacagcccgactttgagctgaattatctccaaattcttcataacaacaatgtttaaccccttaaacaaagttgttcacctttgatagatctacaaaattgatgtggtgacctagggcaaaaaccttagaatttgaaagtta

SEQ ID NO: 51458 - DNA, 1016 bp, Zea Mays
aaacacatttagcaatatggcagtcgaaaaacagatgttgaatggattcatttaacgtacatgctacacatcgaaggcagcctttccattgtttcttcactaaattatcagttgttagaactaaattatttataaggtaccacataaagattttaatcttgagaggaattttgattttccaaatgggatgattttttggaaccacatgtggcctaacaagagtcctatacatagaacacactgtgaacttcccatgctgatgtaaggatcaaataaaaatatccctttgatcgtttagttgagtattggtaatcaaggctatgagctgctgccaagccataagattattacccaccaaggatcgacgaaaggccacatttattgtatttgatcttaaaacataagcaacagaagctttctttttgcggactatatcatagagtccagggaaaagttccttgaacgttgcgttaccacgccatttgtcctcccaaaaacgaacttgagtcccatccccaattttgaaaaggcctaggcgaagaaaggtatacttaacacctaacaggcctgcccaaaaatgtgaatctccaggcatatgatccacctgggtgattgttttatttatcaggtacttattacgaagaattgactgccacataccctcttcattaattaatttgaaaagccatttacttagtagacatttattttgaagatcaaggtttatgattcctaaccctcccatgtcttttggtgtgcaaactatactccatttagttaatctatacttctttttatgcccctctccttcccaaaagaaacgagatcttatttgatctaatttctctagaaccttccttggaattttgaagaaggacaacaaaaacatcgtaatactcgttaagatggagttaattagcactagtcgaccaccaacagacaacatttttcctttccacccattaagccttttcttaaatctttctatgatatcattccaatcttcattactaagc

SEQ ID NO: 51459 - DNA, 423 bp, Zea Mays
agccttcgggggtcggggtaagaaaagattgaatagggtgtttgatgcaattggcttcgtataccctgattatcactacccattgtgaaggcaaggaaagaagagaaaaactgccgcttcggacaccactgatgtgtcgaagggcaagaaaatgaaggttcttacccaccgaccgcgatatattgaaccggtcgtagtgcctgtttttggtgaagggacctcttcaaccgtcgaagcaaaacaagctgctccctccatgcagagcactgaagaatcgattgtagtgccaaaggtgcctacagtcgggccagccgaagccaaagatgatgcggtcgaagaaccaaaattggaaaaaacagtgataatgccagaaattctgagcccaccagcaaaggcagaattgccgaaagtgcaaaaggctcc

SEQ ID NO: 51460 - DNA, 780 bp, Zea Mays
cgtcaacaaatggatcctcatcctcaatattctttgaggcctaaacaagaagtttgagtgcattggggccatcatccgacgctactccccctgttgcaagctaaggaaatggcagactccctagctggcttgggcgccgctgtcaacaaccagattcttttcctcaacattctccgaggcctgaccaagaagtttgagcatgtcagggccatcatccgacactacttacccttctcgtcctttctcaaggtctaggacgatcttgttctagaagagctcaacatgactgccattggcactgctattgcttcgataaccttcatggccactcctctgccagtcccccccactagcttccctagccccttactctactctggcacactcctctaggaccaggaggaagcccactcccacctagaatatggcaagaagaaagggaacagtcagggtaatgcttcctagctgactttctacaacccatggacgagcatcatcaccatgtggcccagctcggctcctggtcacccgactttcttggctccgacattccttgttgcgtctacctagcatcgacgtcttggtcaccctggctcggatgtgttatctagtttgtctaatgcttcaactatgccatgtaataaaagcacacatgatatttgtcacacctgtcaggtaggaaaatcatacccgtttacctttctctagttctttcagtcaagcttcgaagccatttgagttggttcattgtgatctgtgggcatctcctgttgttagcgt

SEQ ID NO: 51461 - DNA, 474 bp, Zea Mays
gaggaagctcttgaaaactactatttcatctttttcttgcttcggagtagtttcttctccaccgaagagaatcagctctttcttatcttcgctaaaatagcccaacttcaccatcttagaaaagtcagcttcggagatggtggactttccgaagtccaggtggctaggcttgctcggcactgcactgctgtaatcatcttcagaatcggtctcttcaataccagcttgctctgcttcagcagcaggggcgtcttccggtgttaccaacccagatcgcttcattgcttccgaaataggaacagtctcaacagcttcggcctcatctccctcgcgatcgacccttgcagtagagcgaattctggccatttgattatgatttacttgaaacttttggtgttggcttttttgtcttttccgaagctcttactcttgcgccgaagcagattcacaagcgaggtttcgtctgagcacgat

SEQ ID NO: 51462 - DNA, 1028 bp, Zea Mays
ctcaatatcttttttggtttcgcggagacaatgagaaatctcctaggctgagacgctgccagtcatcatgtcgcgttagcaaaggtctgtgagataaatgtggccgagtcaggattcaggaaaagcgtcatcattcatccagggtttggcgtggctgcatctgcatcattagtactagtacgtactactgtactgctttgggtttagcacgtgtgagccgtgccatgcagtctcggtacacgcatgcatcattgcgccgtagtgctttgttttgtcgcaaaattactggttccattcaaaccatatatatatagtacgtccggagcactgcttcttcacgtggcacaggtaccacacggtgagaagggacgcagacgcatataatccatgattcacaagccagaccacgcaccgtgcagacatgccgaacttcttcgtattttagccccctttttatttcacgttcacttttttatgggactgttaccatgttgggcactttgagtgtctgcgtgatgatctaccacgcaaattttctgcttttgcttccggtggctagttttggactctgagctaatatatcatcccagccagccgtttgagatctgtggaagcccaagtactcaaatatcactcggcagtgtaggcgcttttgtgaagtgttttgcttagttagaccggtgtgtaagtgattgctctaggatatgtttagtgattagaagcgaggaataggcacctccaatcattcgtgtttgtgctcaacattggccctgattggttgttgtaccgttgaagacaggctcgtacctgaggagtcaggtttattatgcacaggctaagctcatacatatgcttttgattgattgtttgcgtcggtacattcaggatagatacaatctctgtttggttgtgtgtatcaaaacatatatatagaaaagtgtataaataaatcttcaaatattacataacgattgtcttggtgattactaacaaaaatcttaaaagtatgactataaaatcagtttgat

SEQ ID NO: 51463 - DNA, 319 bp, Zea Mays
tcttaaaaatcaagtgcatcaggtatagtccaacacacagagctgtttggaccgcatcaaaacaaacagagaacacccataggaaacagatccacgcatagttacctccaaactcgatcccaaaatacagataattacatctcgtacaagcattcacatagggggaatcgagttaggaggtatggatcagatgcacattgttagctagaatggtcctgtagttatctcacagcaggcgggaggggctgcagggccgctcctctagccgagcgcgactgcaaggccgctctagccgagcgccactggccaagcgccggtg

SEQ ID NO: 51464 - DNA, 443 bp, Zea Mays
ggaagaacctccccagcgtgaagcacgacgatgaaggaacagacgccggaatgttcagtgacatcacgaggctggggagcgggatccagcgtagcctgtatcctgggatgaagttttagaagtgggagaaactcccgacgagcgagtataccgagaaagacggaatttttgccggcgtgatcgccgacaggctcaggaccgagagagggagcaagccgagcaaggcgcaaggttgcgccgagagaatcctctctttgcttgaaaccagaaccccgacttcacccacgcaatgaacacgtcgagtgaagttggaggggtgctggcccagatagctaatggcctcccacgaaccccagacacagaagtctatcggcggctgcttactcgggcagctaatcaccttctacccatcgctcatcccctgagcaacctacgccacgcca

SEQ ID NO: 51465 - DNA, 612 bp, Zea Mays
tgcctttcagtgcgttctgctatacttccaagccttttggtatgaagaacactagggtgatctaccagcagtctatccagacgagcctaacagaccactaaggcaagagcgtggaggcctatgtcgatgatgtggtgatcaagatgaaggaaccaaacaacttcattgacgacctccatcaaatcttcgacaacttgaggcgctaccgctagaaactcaacctggacaagtgtgtgttcagggtaacggcagggaagctgctcagtttcattgttagccacctatgaattgaggcaaaccaacagaagatcgatgctatcttgcggatggagccttccatatctcataggaatgtcaaatagttgatgtgatgcatggcagccctaagtcgattcatctcatggctcggtgaaaggggcatgccattctacaagttgctcaagaacgtggataggttttagtggactctagaggcacgggatgcatttgatgcactcatgaagttcttggcagcaccaccagtcctcaaccacccaatcgagcgaccatagattagctggttgaggatccattgttgtacatcttgtgtatgactcacgtggtgagcactgc

SEQ ID NO: 51466 - DNA, 3493 bp, Zea Mays
acttcctttaaaattggaacagataaatagcacatgaattgaccatctggatgcctctcacatcgttcaaagttttcagattcaacctcagaatatgatagtagtgtgatctcatttgtcgtaggcacaactccctcctgaagatactgccttccaagtaaagcatttataaaagttgactttcctgagttaaattcaccctgagataaaattacaggaggatttgttcagaatgagtggtaaaatgattacttggcgaaaaaaaatagttgctaagtgtggaatatgtataatataatgaagaacaagtattccttgtcctagggtgccttcagttgatgcagctcacttcttcaaatgatggggaagcactttcagagatgttcccaagcagatacagaaggggctgaattctttcatcattttaatggcctgggaagtatggaaacataggaatgctttttctacaaacatgcaggagagctgcataccattatattaagaagaagcggaaacataggaatgtctgtgtgttttgagggagttttggcaagcattcaggaactcctgaaaatagtggattgtgattgtagtttatgttgcatggcaggtgcttgtttgccccagaaccttaagttttggttggtagactgatccccttggttatgatatcctttttgtcagtgacgtgtgtttttgtaagcatccaagtgcaatgttatcaaaccgtctatgttagactcctgtttagggtttggcttgtgccctcttgtatttacctgactacccctgtgtaatgggcttggcccatctaacgatctatataacactcacccaaccctggattagggttagggtttcctctcattccaacttggtaacagagccagttttccttttcctcccaccacacagccgtcgctagccctctgccaggtccgcctgccagccaccacctcctccccctctgaccctcgcgtggttccggccacctgacgtcgggcgcaggagcgtcctccctccgctcgagccaagaaggttgtcagccgtcgccaggatccgcgacgccgaccaccgatcagcctccctcgcgcatctatcctagatgccatggcactgatcagcctgattaatcacgtctaatcggaattaatcatgactaaccgtagtgcatagttgatcgtcgtagcactgatcggataagggaattctcttgcttacgggctcataccaaactgagtatgttaggaaaataaacacgacccagtgtgtatgcttatactacatgtgcttctacgcatgtggttagcttaggagagttttttgtttgtttatgcaaataaagggccatctagcacgtggacatgtatgcggttgaaccagaagaggacatccataagcatattttcttagtaaaaggggtggactatagaagaactcacataaaagaaatttttttccaatagtgttttcaagtcatccaactaatcacgattagtcggactaatcattaaactgaacccgactagacccaccaaggcgattagaccgaccagaattctagtcgtccgatttggtgtgggacgactagattggacttggacatgtgtttttagatagcttttgagatttatggttgatgcagttgtgggctctaggctgccattgctgctgcatctgtgggctcatggattgctaatgtggccttttagggttgccaaaccaggcagccagctacaggcagaccagaacacatcgcatagagtcattcgtgctgccgcacatttgcagtgtcacccgcaagttctaggcggtcggtcgtgctaccgcaatgtcgttgccgcacacaagatccagttctaggcaatcgcccaattgcagtgccgcccgcaaattctagacgaccgtccgtgctgccgcaaacccgcaatgccgccgcccacaagatccagttccagacgaccacccgtgctgcactattgtcgccccaggcgatgccccccgtattcaaggttcatcatctaggcctacctcttgtgtatctgccgatatcaaacaccgaaaagatgagtttgtcttgctgctctgctttacttgcattaggctcgattagtcggtctggtcgatgactaatcgcaactagtcgactggtcggtagttatacgactaggttcgactagatgacttgaaaacaataatttccacccatacaaaatgtgaatatgtaaggaggtagatggcaaaatgaaccaaaaaaggcactaaatgatagtagaaattaaatgggaatttcatgaaatgtaagatattgaaaacaaatatttcaaaccacataggtaaaaaatacatgcacaaaatattcataacatactagtattccttgtttgagaaaagaagatatattaagaatgtcgattgcttttgagggagatgcaagccatatcaatgtggcttccctatagcatcatttgatgatttatataacataacacaataatcatgtctaatgtcatttgcgtcagtagtatgcatgcatgtcatttaaatatgagctagtaatggacgttgctgaaatcaatgagctatgtaatgaacgttgctgaaatcaatgagctatgtaatggatgttactgaaatcaatacttgatgtaaacccaaaattaccacaataaccaacaaaaatggctcactcaggcgagaagcagcatccactagaagctcaacctcctccatctgtgtgatgacaaatcggcaattacattcaagtcaaaatatgctaaagatggtgagatgaagtataattgaattcattccagggcatcttcaactaccaaatgtgtaacgtaagatgatcaccattggtgctgccttgcggataatagtgatagcttcgttcagaataggcttttctatttctatcaactttatcacttcttcatccaattttgtaaatccagcaactttagtcttctcgcaatcacgagttaggaccattacattattaacatcttccagcatcccagcagaagagtaactcgcttgtgggagttcctcagctgagcccacctttgtgaagtctttttttataagatcgtcattgaggagttccatgccagctaaggatgtaacaactccagatgcaccagattggagcaacctggatgtgaagtcagaataagttccttcacttaaatgattcaacgtgacgaaaatcggaatcttcacatgttgaccaacaacatcatttataacatccacaaaatcaccactgccagtatttacaatcagaaaatcagccccttcagaacttgaagcgcttaatgcagagtttgcagattgtatccttctagcaacaatagggagatatatggagtcagcatttgatttcatcatcatactccttgcaacaatagcaggaatacctgcaccaaaataacatcttaaatacaggaatgttgcagacagttactacttagagaacgaagcacaagag

SEQ ID NO: 51467 - DNA, 368 bp, Zea Mays
ggatggggcagacctctttttgccagtctatcagctgtccaaaccctgtttttgattgccaaccatacaaagaatttgtatcttaaaggggcccaagtcttcctgacacgtcgccaagggccaaaagggatagatccaacaaagagagcatcataggccgatttgctacaataagtaccatgagcagagaggcgctagatgtgttggtctgcgatgtaggttgcaaaactaccccatcaaccaagttccatagttgcagatactccactaggaccgttaacacaatcctccccgaatatctgacacccattgacgatttgtgagcccatcggctactgttcttcgctttaaagcccttctagaaatca

SEQ ID NO: 51468 - DNA, 514 bp, Zea Mays
atcaaattagattcaagaaagaagaaattttttcattagtagcaagtgaaagcccatctcagagatgaaatgctacaatcatggtaaacttggtcatcttgttcaccaatactccaagcccaagaaaaataatttcaagggcaagaaagatgactcgagggatgatgagagaaaaaagaacaaagcattcaagagaatagatagtagaaacaattccacaagaataagaagggtgggaggcctatattgttggtggttgattcactaacattgactccacaagtgtctcagcttcatgcgattgtgatgacgaagaagacaaggtggtattctttcagttgggatttattatccaccaccatcattctctatacacctatgacttatggacaaaggtgaacgatagatacaaagtgatgatgatagtagtgttagtgataacgatgaaaaatttagcgctcccacatatgatgaattagttttatttcttaatgaatacacacaaatcgttaga

SEQ ID NO: 51469 - DNA, 885 bp, Zea Mays
gccaaagtgcaagacaaagtagtaaaggtgatcattgatggagggagctaccataatcttgcaagtcatgagatggttgaaaaaattggtttgaagttgcagcgacaccctcatccatatcatgttcaatggttgaatgaatcgggagatatcaagattggttataaagtgaaagttccgttcaagattggagagtatgttgacagagtggaatgcgatgttgcacccatgaatgtgtgtcacatgcttctaggaagaccttggcaataggaccgatattctcagcattatggaataacaaatcagtacacactagatctgaaagggagaaagtatgtactcaagcctatgacccctcaacaaatcatggttgaacacttacaaaagaaaactgaaattagtgcagcaagtaaaggaggagaagagcaaatgaaattaagtgtcatccacaattcggactttgaagatgtgtttccataataaacactagctggactacctccaattcatgggattgagcgtcaaattgatctcattccaggggttgcacttcctaaccgtccaccatatcgaaccaatcctgaagaaactaaggagatacaaaagcaagtgcaagaacttcttgataaaggttttgttcatgaaagtttaagcccgtgtgctgttcctgtgattttaatacctaaaaaagatggatcttggaggatgtgtgttgattggagagctataaataatgttgtcgttcgctatcgccatcctattccacgactagatggtatgcttgataaattaagtggttctacaatttttactaaaattgatttgagaagtggataccatcaaataagaattaaaactagagatgaatggaaaactgcatttaga

SEQ ID NO: 51470 - DNA, 323 bp, Zea Mays
aacaaatgccatattttcaccgatcacaagagtctgaggtacatattcactcaacctgatctcaacctccgtcagcgaagatggttagagttgatcaaggattatgacctagaaattcactatcaccccgggaaggccaacgtggtagccgacgccctcagtcgaaagccattcggaataaaagggaccaactttctagaagactggaagaaagaatctgcacaactaaatgcatgtctggaaatcaacgacagtctcgaagtcaagccaatgctagaagatctcatcggcaaagctcaacatctagacccagagacggcaag

SEQ ID NO: 51471 - DNA, 1150 bp, Zea Mays
ctctatggagggagcgcgagatcatgggtccacctagcataagtttgatgttaccaccaacaggagacggatgacgaagcagagaagtgccaatggtcacgcaaccaagagccacaaccattaccggccgcaaggccaagggcaactaaaagaagaacacacataagaaaccatcaagctagtagagacgatagtgcaaaggtaggatacctccccgcgcatcgggcgtgacactttcgatgcatagatatcacctttgcacagattttagatgacctcacaaccaccactacaagagcggccacatatgacaaaacacgggcatcctagcttcgcctccaacaaggtggacggcacagaagcgccatcaaaaccggggctgacagaaagtcaagaaaggctttcgcccataaccaacgtggtcgtcgctgcacggccatctgaacctttggacacaagtgttggcacagaggtctagggtagcccgagggaaagaagtcggcgatatagaggccaagaaagcactcaatcacaaagatcttaccggaggtcatggaaattaatacctcgatgacagatatgacacatagatgaaatgactgtcaggagacggaggtggaacccacgggcttagcggtgggatatgattggagaagggcggtggcgggggccgtggtcactgggaggcgacaacggaggacaaagagaagaaaaaaaggtgtgggcggaggggagtaggagggcctagactcaactataccaaggacgatgacagtggtggaggtaggtggcagcagaggtgtgaggtgaagaagaaatagtgggaggggggaggtgggtgggcgccggaccatgacagttgtctggggatagagaagcccacggagacggcggtgaggatggggtgagacggagcgcgagggagtactcctttttagatcacaagaagtttgtttgtattttaaaaaaagtttgagccaatttagaaaaaagtaaaaatgacatgcatgtaaagatcttgagcattgtcctgtgtaacgcacggatattaaaacatgggaactaaattagatcttttcctccgccttgtatagcttctgcggactagttttaaaactctattttttcaaaagattttatttttctgagt

SEQ ID NO: 51472 - DNA, 398 bp, Zea Mays
aaacaagattgcacagtttggatcgtgcactttcacgccgatgaccagtaagacttcggcggaggtcgtggagttagttccctgttctcgcaacaagtggggcaactggtgtgcttactagttttatgtttcgggaggctgaaaggatcacgatgcccaagagggggggtgaattgggcttttctaaaaatcaacactaattaaaacctaagcaagagcccagcttcaccccaacaactagcactaagaaaataatactagaaatacaacaatgctaagacaatacttcaattacttgctaaacaaatacacaatgtaaagtgcttgaattaagtgcggaatgtaaagcaaggtttagaagactcctctaatttttcccgaggtatcgaagagtcggc

SEQ ID NO: 51473 - DNA, 304 bp, Zea Mays
cccttatacctaggtttaggtacacaccaaaataaacaattttttgtatagttagcgtggacaaatctaatgaaaactaggttttgatctatttttctctcgacgcttcactgctcagtccactcttcacctgagccatttgattatcttccctagcgcaagctcactcgtggctcactcgcttcttcgatcatcgacagaccagtaagtcggtaacctaacccgccgttgtagcgcaccttgccttctcatcactcatcagctcgtcgactcatcgggatcctgcacacaacgttgatatttt

SEQ ID NO: 51474 - DNA, 446 bp, Zea Mays
taaagaatgaatttgagttttcagatctcgacgtagttcttaggactcctgcaagagatatatccataaagaaagttggaatccatgactcacgaatttgatatctattagccaaccactcgttgctctgaagaccataagcatctatgattccattccaccggttctcaaattattctctagtttctgaaccccatacaaaattgttcaatgcagcccaaaaatctttctcatgattaagtggaggaccaaccttttcaggaactttctccatactgtgccacatacagaatctatgagttgtatttggaagaatagttctaattattgatttcatgctagcatcttcatctgttatgataagcctaggggctttccctcccattgcactcaagaaagttcgaaacaaccactcatatgactcaatcttctcatttgctaggaaa

SEQ ID NO: 51475 - DNA, 634 bp, Zea Mays
gtagaagccacctagcgcttgcgccagtgccttcttcttcctctggccgccgcgcatctcgcccgattcaccagccaccgccgttgagccatataaattgaagcctccaccagccccacaaggtcatcagctacccagcctccgagaatcgttagcaatcgttcgccagagctcgcgaattttgaattcgccccaaatcagttctccgccaccccgaaatccacctcaccgcggccagccccatttcggtcagttcatcctcccctctccctcgtttaagctttctcatatgtctacgatgcttgccgacctgcgcaattgcgctaggagccctctggtcgccgggaacacgactgtctagccgcactgctcacggtcaccgtggccacaacaaacatattggtcattagtgaaattaggttgggggaaaggtttgggatgggtccaattccgtgtctgttgctagggaccctagtcattgccccagtcggccggtacagttgctcaccggagcgcggccgcgttcaccgtcgtcgtggacttcaccccgcgaagaaatagaaatcggaggacctctgtgcaaatcgtcagtgactcagaaaaacagtaaccgaactcattcccagttagccaa

SEQ ID NO: 51476 - DNA, 652 bp, Zea Mays
cagagatcaaagcctagcaaaatgctctgtcagacaactgaatggagttttgattgtacagtaattaaagatctttggtgcgttgcaccttgccgccggctaccccgcgcatggatttgcgccggcgatacgattcgtgcccgttggcgcacggataatgcctcgaggtgaaaagatcttcaccacagatgagattgggagctggctgtcgtacccacttgccttatcatcggtccagataacctcgccagagtttgccgcccgccactcgggtgccacgtgcctgagaggtttaacacgtcgcagtaaacctgtgttgcaaacccatccatcaccgaaggccttgccacggtgactgccacgatcacctaatccggtgactcttccctctctccggccgccagcacgccattccaaaattaggagccaccgcccttggacactataaattgagcataccactagctccgttaggtaatcacgaaatcagagcacccgctcctgcctccgactagccaccatagctctctaattcctctcttccccctaatcgggtttccgcgccaccgtgaacgccgcgccgtggccagctctctgcaggcccgttcacgccctcctcgctcttgtttcagcacccttgtgtgccatagat

SEQ ID NO: 51477 - DNA, 665 bp, Zea Mays
ggctgatcaaggtgggctatgatactgtcaaccaagtgtgttgacgtgctaaaacatatgaaattgttgctggaaagattctcaccaaatcaatgtaaactgaaattttcagcaacacaatcccctttcacaaatgttttcacgtctttttttacttctttctcttattcttttttctctttttttataacactaatggggtgccgagatcaaaagcaatgacacaatataaatatgatggtggtaactagcaacttgaggaactttaaacaacacaaggtaacagtaccgtcaaagggttataggtttttttatgtggctttggactataggacaaaacaaaaatataagatggatgaagactatgataaataagtggatggcagtaagacctaccgtgacaacaaaagctttgataccagatgatatgtacctgattatattcggtactagggtggcccgatcttcacgacagtaggttgataaataggatggttgggtataataagtaatggaatgacaaggtaaatttgctgaagaacagcgagtaactgactttataccagatcttggtcggaggtgaccaagcgacggggagagagacaccgaaaccgtgtagacttcgactcgatctccgaacgaccgcagaactacaaccagagcta

SEQ ID NO: 51478 - DNA, 583 bp, Zea Mays
caacaaaaattatgcaaacaaaccctaattaactaagctatcacaagcatcacagttcacgtgctttagtttcaaaggcatcacaactcaaaaggcaaaaacaaaatatactagaattatccaccataagtagcacaagacaatctaacaaaagtttggaccacaacagaattatccaccaaaggtagttcataccattatagtctctagtaaacaagaatagataatcactaagcaagcagatcatagagggtggagctaaggcggtacatttttgtctattgttttatgtgttctctatcccgcttgtgtgactaaaacgggtaaacccgtgttttcacgagattttggaaatacgaacaaaaacattgaaccgttatcgttttcctgtgaatacggaaacagaccaagtaaaaacgaaatatggtttcttggtgaggggaggggggggttcattcgtccatttttcatctctacctaattgtgcacaatcccaactaccagtaaagagcagcatctccagccactttttttcttttctgaaaacacaactcattcatgggactatggaagtgcacactct

SEQ ID NO: 51479 - DNA, 431 bp, Zea Mays
cggtgagcaaggctatctctgcaatattgtatcacccaacaagatccaatatgagcatactcgtgctctgctatggccatagtcttttggatcacttggagcgcatatacaattgctgagatgtatgtgtcgacacttgtagctttgaaataacacaattctctagttgacataaagtcattttttatgtacccttatgattcctcgtgaaatcccaaaacgagaatcaagggcttccgataacctagcctcatcagtgcgcattgagctaggttgtgaatgtcttccattcacaggataatccatatcctttaggtgtccaccaacactaggttggttaccaacgaatagatggtctgcatttactatttgagaaggcctagccttcagctgcttgcaagcatcttaatcccaatttgtgaccatacttc

SEQ ID NO: 51480 - DNA, 966 bp, Zea Mays
cctccccctcccgttatggcgccctgcatgcaggcatgcagctgccctcccactcacgctacatgcaagtcgtactgtcatcctgcataacgcacgggcacggttgtagactgcgtacgtagatgttggtattggcgtagccggcggctgtgagaacgcgcacgacatcaacttgtctgctacgggagcatcggcagcagccagccccagcccctaggtcctcctactcccagcttcccaggcgagaaatttatttgtccatttgtccatagctagttggagctttgattagtcttggtctgactacctaagggagtgtgctacgccaatacacgacatcctctctccgcatgcagagcaggcaacctcagcccacgactcttatatattaaaccataccacgtatccattgttttcaagtgatttgttcacactcgacaaagtcggatgatgtcgagatgaaacgacactaatgttctggcattacagtaccaaacaagcaatacaaactaaactcgatccagagcgtctcctcctcctcctctctctcggttgtttagccacacatcactggctgcagcgcaagacggtaatgcttatcttagccaactaatgacgtgccccccctcatccactcatgctacatgcaagctaccgaagccgatcctcgtggctccctccactcacgctgcatgcaagcatcgaagccgacttacccaacaactgctatcggccattatgtactaaggaacgctatgcctaatgacgtgtgaacccagccacatcctgggaccacgcgtcataaggccatacgacccgtctcttctccatgacgtgtgagcaaactggctcgcgtcacgtgcacgttctagaaggacccgcaacgcgctaagcgcttcactaacaaatggacactatgataccgtgcccccgcataacgctcccccgttccccgcctcgttgtcc

SEQ ID NO: 51481 - DNA, 498 bp, Zea Mays
cttttggtatcatcatcctgaagaatgacaaaggcaggcactgaggaatgtggtaagataaaatatgaaataaaagtgcaaggtaaaaaggttttttataccttactaagcagatttcgagattcatctctagccagtgctcgaccgcccttcgcccagatctgggtaataaatctgttaccaatactttgggctttggccggaatgtcaataaggtcggctggagacaggccaatgtttggcctgttgacggcccttgcatggttgcacccagattttatgaaagtggcagttgtaccgtgagaagctaccagcgcacagaattcaccgtggccagttatgaattcatcgaggacgtcaacctctttctcgacgcattcaagtgccccggggatatctttggcagagagactagcttcttcggatgcaactccaactgaattgaatatactttttaatcgagcagtgcattgagttgcgaagtcaaaacatttcttc

SEQ ID NO: 51482 - DNA, 321 bp, Zea Mays
ggcggccgggtcgacggagatcgcggcctctacaggcggcgcggctctccctccccgaatcggtaccatggtcaccatggggtccaagccgttgtcagggacatcggtcccgtcggggggtggcctaccctcaccaagaccaactacgtcgggtgggccgcggtgatgagggtacggctccaggttcgccacatgtgggcagcagttcagtacggcgacgtcgactactacgatgatcgtcgggcgctagatgccctcattgctgcagtcccgctcgagatgcagttttcgctttcctagaagcggactgccaaggaggcc

SEQ ID NO: 51483 - DNA, 410 bp, Zea Mays
gagattattattgtctatgaccttggtgaccatggggagcgagggatggcctaggcgattgtgccatttagacacggttggtttgtcaacagcatttgcctgcttgagtgaagaatcggtagaaaggggatacaatccacgatgacatggccccctaagaatcgttctcctcgtatcctgatccttgatgagaaaaaaatcaggatgaaactcaataaatgcagagttatctttggtaagacgatgaacagagactagatttttagcagctttaggaacatgaaggacattgtttagatgtaagctacgggattgagttggaacagtagtatgaccaacgtgtttaatttccatacctgaaccagaggcggtgtggatctgatcattcccatgatacttctccctcatcg

SEQ ID NO: 51484 - DNA, 601 bp, Zea Mays
cggtgactactatgactttgtggtcgtcaaagtagtgatggagcttgcgagcggttagaagtaccgcgtacagtagtttttgaacatggggatacttctttttagagggtccaagaacttcgctgatgaagtagaccggatgttgtactggatatgtatgtccttcctccacccgctcgactactaacgcggtgctcaccacgtgagtcgtgcaggagatgtataacaacagatcttctaccggctgattccgcgtggctcggcgtggtggcttgagtactggtggcatagtcaggaactttttcagtgcttctagagcttcctatgcttctgtggtccactgaaacttgtccacattcttgagcaatttgtagaatggtatgcctttctcgcccagccttgatatgaacctgcttaaggctgccatgcatccagtaagcctctgtactttcttctgtgatcgcggcgcttccattcacatgatggcctcaattttttctgggttggcttcgattcctcggtggctgataatgaacccgagtaacttccctgctggtactccgaaaacacatttctctagattgagcttccaccggtatcg

SEQ ID NO: 51485 - DNA, 784 bp, Zea Mays
gcccacactaggatgacggcctgtggtaagtattgtgtgtatctagtgcacttattctaatttttttcgtttttactcacaatggctctagggtctggccaactagttgcaacctaggcgaagcctaggccaggggcaccggttgacctatgggcctagttctgtgctgccatcgatggagggagggagatcaccgaggcatctacctctggagatgtcacagtagttgttgtgaggtagctgcattatgtaagttatttctctctctttttttacgaagtctgcttgtggtaggttgttgctttcgctaaccaggtggcatttagcacgcttgtggaccgcgtgatttcatagttgcgctttgagaagaaatagctagaagctaaggttgagcgccttcggaccaagaataccgaggctatccaggacaagtctgttgccgagcttaaaagtcaacgactcttggagaatgctagcacccttgagaaaagaaatgaggaccttagtcactagctagtcgagctgaaggacacgatgtccaagtcgtagtcagaaacccaagccgctcaggagcgcaccactgccttagagctagaagtaaaggccacaaaggcctatcgcgagaagctagaggctgcaacgcagggcgacatggaccaagctcattcactttttgttgaggcatatcgcgacctaggtgctgagacatcccccttctataagtctgggaggagctggacaccctcttcctcgactggctgtaggaggaattggtgagtctccc

SEQ ID NO: 51486 - DNA, 817 bp, Zea Mays
gttccatagtgtacgccaaaagtgactcaaaaactttacatcacgatctaaaacaatagtagaaggcataccatgcaagcgtacaatctctttgaaaaagaggttagcaatatgaacgacatcatctgttttatgacaaggtataaaatgtgtcatcttagaaaaaacgatcaaccaccacaaaaacactatcgctccccctctttgtttgaggcaatcccaaaacaaaatccatcgaaatatctgcccatggaaccgaaggaatagggagaggcatatacaaaccatgtgggttcaaccgtgacttggcattttgacacgttgtgcatctagcaacaaagcgctcaacatcacgtctcaaatggggccaaaagaagtgtgtggacagcacagcctccgtcttcttagcatcaaagtggcccatcaaaccaccaccatgcgcttctgcaacaacaagagacgaatggaaccaactggaatgcataggcggttagctctaaataagtatccatcattaagcacatatttattccatgtacgtccctctttgcaatttaataacacatctttaaaatcatcatctaatgcatattgtcctttaatcgattcaagtccaaaaatacgataatcaagttgagacaacaaggcatagcgcctagataaagcataagcaatcacattatcactcccctttttgtgtttaatgatgtagggaaatgtctcaagaaactccacccatgtagcatgtctacgattcagatttgtttggctacgaagatgcttaattgattcatgatccgaatgaataacaaattcc

SEQ ID NO: 51487 - DNA, 319 bp, Zea Mays
ggtccgcgagctgatctcgcaggtggcggacgtcacttctcaactcattaattctgtcaccatctgcgacccatatatcagtcctgcagtagagttccgcttggagccgatttacttgtgcttcaagatcccctatcggatcgttacttccactactactatcatcatgtcttggggccagctgatgacatggcacaccaatcagtacagtatgcttgcgcgcagttctcctcgtgcgcggcggcatttttctaaggggggaaattttattagcataattcttagcatgatgcatgtgtaattacagaatcaaccttag

SEQ ID NO: 51488 - DNA, 467 bp, Zea Mays
acctcgaatgaagttctccttagaggaataagcacctacttttgcaaagctgtttttcaaatttttcacgcaatccaaggatttttcgaagcacctttccttggactcgcgaagctcctcaatatttttctctagcctagcttgcgaccattcactaatttctttgctggcttttgcaactgcatagtttttattagcctcggcgagcttttttcgaagttcttcgatcttggctttttgagcttcggcctgagcattgtatctagcttcatcttctttcactttactcaccaatgaaattaaaatctttatccaaagcttcgtttctgagctcaattacctctgagcgaaggttgctgagagctattgtgcagctttcgtcttcggcgttcttttgtgccctcaaggcattgctaagaattaagccctgcaagaaaaagaaagaattaagcatgacaatgaaatac

SEQ ID NO: 51489 - DNA, 1072 bp, Zea Mays
agacctatgaccagacccgacctccataggcgccatgaaaagaaaaacagaggtctgctgcagccgctgctgcgaggattgagattaggggcgactctgcccctgaaccgtgtctcaggggcctcaccggaggttggcgaagctggggacagaagtaattgcactaaggataaccggttgcgattgaattcctcgccggagtacaagcgccgccgcggatccactctcctctgtggacaggctcgcaacctcttcaaacaccggtgagaaccctctctgcagtttcgccatcttcccctctcagttttgtatcgatcaatttttagattgggcggttaggcaccggatttcgtgctcgtcggcgtaccagccaccgtgggagctgagctccatcgccggggcgctgtcgggttggggaaaagagcctgggcgtcggattaggaacgtccggtctggattagatctcagcgtacctgttcactagggttgatccagagtgtttgcggttgatcggacgaatcgggcgattaagggtgatggcgtgatgagcaccgtcggatctggatccaaggaaccacgcgcgtaacggttcgtggagaagtaggttcaatctgggccgttgatcggaatacgtgcggtcaggaatagagcggggcgtggatggatcctgatcgccgatctgggatcctggggctgataacacttaccgcttcacttattacatcaatctaatatggatcgtacgttctcgatccgtcggccctaatttcaggataccccttcgcgggtcagaataacataaaagcccctggatttattgagaataaacccacagtctgtgttgactatgctctgagtctgtaggatttttacgcagaagcccctgtactctttagatatctggtgggcagtccagagccaggtggaaatgggaaaaagaatataggaaatgattttttaatataaaaataaatccagaataatgtttaatgtctagaaaattcatattagctcctttttagtccattatagttcctataatttggtagtaatattgtccatcactgagtaa

SEQ ID NO: 51490 - DNA, 448 bp, Zea Mays
tgatgtttaaacttgctttgttcacatggatctggtatatgatggtgtatattcttgatgatttgttcacatgggcagatgggctgttatgtttttactcatgttcgatggtagatctttccatatttctatatttctgagcaatgtatgagctggtcaatgatggatctaggtatacttgaatgtgaacattagttggtccacctaaaagcacttggaggcacaatcgttgttgcagtcgtgctaaatgtatcctacactatttacccgttggcccatggcttatcaatcctaaaatacactatcatgtaccagtctgctcctcgtcgtcgtcgtctgattatggggggagttgctcttgtcatcttgtgttagttatcacttcttggttgttcgctaggtttaagcgtcgtgaatctgtaactctgaatatgtccctctgcatctg

SEQ ID NO: 51491 - DNA, 504 bp, Zea Mays
agcgtgcgcgccattggattatgtgttgatgacccagattagattgattagataccggttcggtggagtcgattatagtcgttggatctagatcgtgcgtggggtgatgaatccggctgtatttaaatctggggcgtccgtccagatcgtgcggtccacgttgtgtatcgattcaatctaatctcacgcgtcctatttggatcgtgcggctcataacgcaccataccctttcggcttggcgactttgcataagagcccgtaggatttaccgaaataaacccgtcgtccactgcggggttagcctgagtctagggattttttttctggaatagcccctttgcttcctggtattggtgcgcgcagtccaggaaataaagaaaatagggaaaaggagtttagaaatttatttttggtttaaaaataattgcagaaactcatttaattcatagaaattcatagtaagtccaaatgagtccattccaatttctataattccataatatt

SEQ ID NO: 51492 - DNA, 577 bp, Zea Mays
ttcgtcaacagatagatggtattgccgcacgggaggttacctattcctaacgatgaagattacaacttagacccggacacatatgatggagagttcttccaagaagatgggctagaagggtgatttgagatagacttaaccgaagctatcggaatggacgtagatatcgaaatggttgttgatgaggaggatgatgaggtgcaaaatgataatgacttagtaatccttgaaggcaatgacattaatgacgaacttgcgtcttctgatggtgttgagattgaaatggttgatagtgatgatgagagttatgatccggctaaccccgagacatatgaagattatttttaatcaatgtaatgctatatgactttttatttcgcacctgtttttaaatacatctttttatatgtggtttatttgtttactcttaattgtaggtttttggacgaatatggagggcggtagttggttgagtaggaggaggagggggaggaggagggggacggcggacgaggcagagaaggcggcgcagcaggacaaccttgtctagcagcaggcggcgcagcaggacgacgac

SEQ ID NO: 51493 - DNA, 451 bp, Zea Mays
agaatttatttctgtatcttacactatgaatttaagatagtttttatatctaaactttagaaagttgtaaaatgttcagttcctccaaaacgagaggatctcaacgggctcctaatagccaatttcagaattgtctagctgaattgagggtgggtcgcagttgcctcatgcattcttcctggcttgttgaccgaacggacacagaaatggtgtgcaggagagtaggagccgtgctatggtaattgccttctctttgaggcttgccgagggcttgtcgtcgtaaaagttttggtaattgccttctctgtcgcgacaagcctgcgcttatctggcgctggctggaactgaaaccttgccgcgcaactccggatgcggcgggcggcggcccagaactgacgtcgtggaatccatcagcgaagccctcactatgcagcaaaagacatcgcggcaa

SEQ ID NO: 51494 - DNA, 506 bp, Zea Mays
atatggctcgaatgcgtgcgtgatgttgctttgaatgcattaaggattggtgtagctcttgtgtattcaatgtgctagttggggggtatttatagcctccaaccacccatatagccattggagtgaatgggctaagaattagattttctacgtgtgcaccggacagtgcacagtaccggtcaggtgcaccaccagaccctctgtccctctgactggagcaggttaccattctaacctattagtggcaccgaaccaccaacagtaatggtccggtgatcatcgaaccccaccacgacgacatagccattgaagaaccaatcgaccgttgaaccatgtcagacggtctggtgcgccaccggacttgtcgaatgttatagcaccaaagtgcccgaaaacaacgtctctacaacaatagtcgatgccgcaccagactggctccttgtacaccagactagttcaacactttcttcagttgaagtcctgttgcaaccctctctacacactcg

SEQ ID NO: 51495 - DNA, 535 bp, Zea Mays
cccacttcgactaaaatttacctatggtatctggattggccaccctttgaagcacgaggtgtcttaatagtatattcattaattttacttttcgtgtcctgccattttcttgtttcactttggtatttgctaatttgttcaattgcctccggcgtaacctcctctacaacatatttagagacttttcctagtcagtatcttcggccgcacaggtaacccttgttgatttactctttagttcttctaaggaaactacttcatcttcgaagagaagcttgaacgggctgaaaccagtggaataggacattgcattattatgatgccagactaccttgactaattcattgcgccacttacccttcaacaatccaactaatgattttgaaaaccctagcaagatgataatattggctcttttgactaacccgttatactatggatgccacactaatgcaaagtgcatggttgtgcctacttgatgacagaaaagtgtaaatgctttgaagttgaacttcatgccaatatccatatttag

SEQ ID NO: 51496 - DNA, 521 bp, Zea Mays
cgccgtcaagctcaggaaagcgagcaggagctagctgagcaagatgctaggcttcgacagaagaatccgctcctcacccgaaacctgtaccctgacttcacccgagcattgaacacgccgagcgaagttggaggggtcctggtgcagatagccgatggcctcccgcgaaccccaaacgcgaagggctatcgacgggtacttactcaggcagccaatcatcttctacctcttgcccacccatcgaacgatctacatcacgccatcaacaaccgatgagacgcacagagcaacatcagtgcttcgcgcgatcgtcggcacaagaatgaaataaggcgtcggggggaatacgaccgcgatcatggtgtagcgacacacaaccgtgcgaccaggatcgaatcaccagcagcctccactaatagttcggtccagggacggtcgaggtgacctaacactcactcatctccccaagactgatggtgtaatcatcgacaggaggatacgtgtggggtctctgggccatc

SEQ ID NO: 51497 - DNA, 434 bp, Zea Mays
ctgccagcgacggcggtgccgcccgaggtcacggcggatcctcgccggagccacgcgattcggccgatctgggaccctacaacgtcattcgaaggcccctacgcacaattcggacgatggagaaacatattagggctcaccgtaggtagggatggcgacaagggagtgatccacggcgtgatgcgacgccgcggcggagcactatcgtcggtgagcaattctaggactcggcggcaccctacactttcgaagccggtcgctacgcaatgcgtggacaaaggtgcattccagggagtgtctcataccggtgctattggcgcccgaatccaagtccacccgcggcggagatcgaagctccagtgagcgattcgtcggccacagctcggcaacacacccgcgtaaaccacgagcgcaatcccccaggtgtagcggag

SEQ ID NO: 51498 - DNA, 375 bp, Zea Mays
tcattaccaaggcaacaatagcatggaagggtcaaccaaggaagtttacctcatgcgccatttttttagagtcaagctgggcattaagtgaggaattcaaagaacgtgcaccatccaaaaaagcagaagtctgggccaagtcggcttgactttgagaatacttctcctcaaggtcagagcattgttgggccatatccgacaatgcagctgaaagggaatgcatgactaagaacaagttgatcaataaaaacaactagggaagttataagatcactaaccagcattcgacaccttcaggccatcgatctgtttctagagcagcaatggattccacttcattagagacagagcttgttcgggaatagtggcgccgca

SEQ ID NO: 51499 - DNA, 466 bp, Zea Mays
catatgttatgagaaatagaaatgagaaaatttgttatttttagaacttgaaatttgatataatgtttgagtaaattatgaagtacatttataaatttcgaaaattcttattgttttttgatagtttgattgcacgacaattgagaaactagttgcactgcacaatttaactgttcatggcttcgtgcgctagtagaagtaatcggcttctttgagccctgtttttctcttcttttgtcccctggcaatctagtcatattttctaatacttagatggaagcgcatcatattcccatgaaagtggctatcaactgcttccactttagtttacttaaaatgatatgccttttgccctgtatgattgtgagtgattttcagatactattgcgtgcgagtactacatggtcctgaattcatgtatatttgtgagtattaaatagtgttttggctctcaagcagaacaaca

SEQ ID NO: 51500 - DNA, 357 bp, Zea Mays
tggaggcgagaggtaagcgcggagaccctgcacgtatcctcttgtcgatgatcatgtcgtcgatatcggactgttggttgaggctattgttgactcgatctgggttgcgcggctgtgtgccggtacaccatgatctcgggcgtattcctctcggcgccttatctcattctcgtgccgacgattgcgtgaagcgctgatgttgctctgtgcgcctcgtcggctattcatggcatgacacaggtcgtttggtgggtgggcgagaggtacaagatgattggccgcctgagtaagcacccgctgatagccctccacgtcgggggtccgcgggaggccatcgactatctgcgccagtactcc

SEQ ID NO: 51501 - DNA, 491 bp, Zea Mays
tatccctcaacatcataataacccgaaaacgatggtatagaaaatttaaccttagcataagggtcgtcaggagcacgattgttattaccttgctggcggtgtggcataccttctgtgttttgatgaagatggcgacgtaggcgcaaatctctggtggccgcttcatcataattaccttcttcatcaaacaccgcatcatcgggaaagcgtggacgaggaggtggtggtggtggtgcttgttgttgcatctccaacacagcaagcctgtcgacgatctgggacaatcgtcgatcaagcctctcgtaagtcttgccaaggttcatgtcaatgaaggcatcatgcactgacttgtggaccgtctcctccatttgctccttcaggagcttgttgtttgcctcaagatcttagcggctaacacattcatcgaagtctatagggatccttgcttcttctttgtcgtgtgccatcgaaacacagaacagcaaacaaac

SEQ ID NO: 51502 - DNA, 403 bp, Zea Mays
tacggaacttaaagcgaagttggccagaagaaaccctttcgaagctatcgacgatgccctattctctgtcttatccccactccacaagaagttttgctatggattctttggatctattaccagacttcttggttaggttgataggattgttctttagtattaagattttcgactagatcggtaatggcgatattatattataagtggttttctaatccctaatattgctatataacccttgacttcttatactcttgttttctcgccattgtatttccacccttgctcaatatctaccttgatatattaaatctttgcctctctacttttctccttgataatgctttctccctaactcactttatatccttggttgtatcatttatcctcactttattagttc

SEQ ID NO: 51503 - DNA, 708 bp, Zea Mays
gggaagtaatcccgtacatgtttcttgtccccgagtgcccccaatgcgcccgaagtcgggcttcatcaaattcgtaagttccacctccttattaagcccctttgctcctcgattaggttattcctttttaaaagagttcttctgttggcttgcagccttttgggttgggtgagtccctagcttcacttcctagggacgtgactggtaaggggataaatagcacttgtattgagcatcaacaatgagacgattcatcctagctggttgcttgacatcatcgagccttgcaccaaatcagaagggattgtgggaccgagaccggtatatccatgaagattgacacagacgagggtgcctcagatttgtcgtttggttctaagaggattcgttcgagcctccccatgatggatttgtccacgttcccttcaaaaagaagggggagtcatcctcccacacggccgatgtgggttttgttccctcttcttctgtcgccttcttgtcagggttcccaaccttgaccgacctccttcccatttgtgagggattagctcggtcgtcctactatctaggtcagatgagcctgaactcatccttccccagcgtcgcagggcgggccctctcctagggtgatctggcaattttagcaagtgactattggcctcctctttcggtagatctagtaggtggccctagtctacccattccgca

SEQ ID NO: 51504 - DNA, 297 bp, Zea Mays
caaattttcatagttgtagacagtggaacagattaattacgagtactcatttcggttctagttatctcggtccgatttaattttgcagcacttctatcgtggagttctagtaatattcacttgggcaaaaatacaagagtggatcgggattccaaattcatattctcttaatccataaattttaaacaaacaccaggttcgacatttcgcgaaataaatacgcgagatcgatccggcatcgaaattgtgaacccttcggaagcgaagtcacacatcgttcacgtgggcgagaggttg

SEQ ID NO: 51505 - DNA, 1381 bp, Zea Mays
ccggcgaacaagagtatgaagttgaactgttgtcgtaaggagtgaaaccatcagtggacaagcctagacgaacactcctagcgtctcttgaaatttttgggtcaaaacgatccaaagccttccaagcatcgccatctgatggatgcatcataatgtctgggtcttggctctcacggtctccttccttatgccacaacattagcttcgcagtttctggggttaaaaacaaacgtttaagccttggggtgatggacatatatcgaagttgtttaactccacttttgtagcaaaagtagctccatcctcttttagtacctccgcatatcttgatttaccgcatttctgacaatgggtgtccgcttcatattccttccagaacaacatgcaattatcttcgcacacatcaatcttcttatacttcatgccaagaccggacacgatcttttagactggtataagtcttttggcatcttatggttcaatgggatgagatcaataattagattgattatatcgttatagcaattattcgagaagttatactttgccttcattgccataagacgtgtaaccacctgcaacacagtcacagtggtgtcgtcatgctctttttcctctgatgcgtgaagaagcttataaaactcctgcacttcctatggtgtagcctgttccgaggccaatgttggatactctctactaatatcagccaccaagtcatccattcgatcctcctcctcgtcatcaattctttctgactctgtgatattcttctctacttctccatgtgagcgccacacaagatagttaggcataaacccattcttgcaaaggtgatgctccagttcttcaatctttctcacatacttaaaattccgacacttggtacatggacacttcaccacacgaggtccatcagaaaatgcgagatccacgaattgttttgcaaccctaacccattcctttgagtgacctaaagtcacgctattgaatccatcatacatctcccttcttctattgtcatccatttccaagactaaataaatcaatgtataaaaaatgtgtacataaacatcattaaacaggcagcagcgctaggcataagaaaaatactttaaccaaacattgaacctaccattccttaatctaaaatgaacatccatcaattataacaactacccaaaaataccacatcaaatttaaactaacaaactaattctaatactatgcatcaattaatcctaaaaaagaagaaagaaataccttgtggtggcgcggcggtgacggcgaggtttacgacatggaaggcaaggcgtggagagcttcggtgatggcgaggttgagggcgacgacacggtgttgactgccggtagtggagggggag

SEQ ID NO: 51506 - DNA, 1007 bp, Zea Mays
tccggcagcatcgaatctcggttgctcctatcaaaccgtgaggatcgtaacagacctaagaaaaaatcacctagatcttcactgttgtctggccgagcccctatcagacccttacccctttcacgcgtatatatgttgtccccgtgagtttccttgttcatctaccaagtaagtcgtgccgtcgggatgtgtagcagggagagaagaatatgctgctggcgccgtgggatcccagctaaagcttcattgctcggcctggtggggatcggggtgcaaccacgtagctaagagaagctgtgaggcaacgttgggtgaaaggaagccatgacgccacagctcaaatcgctcaccggaactgtgttgttgctgcgcgtcgtcaccaagtcactactaccaccatgatcggtatgggatccctcggtagcctcgttgacctctccgctacctatagctctcgtccatatgtgcgttggtgagccaggtcgtcgggtcactgaaatgctggcgaggcccgccgccgtgggaacacagggcgccgctgctctccggatgctgggtgcggagaccgttggtcgtttgatgtagggccgagatcagatttgtgtctaccctcttcatcgtttaaatccaagtcgtcggtctgtgatcaagcggttcgggtagggttggagtcatgtgcgatcgtcgaccgtggatattagatcgtgtggccgacgtagggtaccggttcaggtttaactaaaaatctaaccagcaccactgatttcgcatcaaacggtcagattgcatccataccccttcggtcgcacctgttttacaaaagaaaccccagaggataataaaattaacctgccatccatactagtgtaaggaatattgtagatcaattctaataatttcacaaaagcccctgatctttaggatattggtgtgtgcagtacaacagaagaggaaattaagaaatcaatatataaaatgattttagttgaccaaagttaggaaaattc

SEQ ID NO: 51507 - DNA, 504 bp, Zea Mays
gttgtcttaaggtgtgaaaggcatcttggcacctttggctccactcaaatttgactcctttcttcaataaacctttcataggctttgcaatcctagagaagtctggaatgaatcggcgataatacccagctaatcctagaaaactccaaatctggtgaaccgtggtaggaggcttccaatccattacctcttgcactttatctagatcaatgaccatcccttcttgagaaatcgtatgacccaaaaacttaatctcctttagccagaaagcacaatttgagaactcaacatataaatgatgatctcacaggcgcggaagtactgcatgaaggtgcttggaatgctccctctccgtcactgatgaccaccacgaatttatccaattcaggcatgaatactaaattcatcaaatacattaggtatactagtgcattggtaagcccaaatgacatcattagatattcatatagcccatatctggttgagaaagctatctttggagta

SEQ ID NO: 51508 - DNA, 3408 bp, Zea Mays
ttatgaagaaacatttggatcgcgatccattaccacccctaacctcgcttgactctcctctacttagcttaggggtgttaatcttcaagttaggaccctgtatgttctggatgccgtgtcagtcatcctcgacgagttcccagtttggtgcacgacgatctcgccggcgtcgacactatctctgtccgagagccccgacgatagcccggtgcacttgcactcgggagcgctatgtcaagctagggtaagagacttttcccctggtaatccatgctggaaaggacgtggtgcgcgggtgtgttgagtcacataggcgaaagtggcaaaactgtggcgtatttcaaaattcgttggcaatgtgttatggacaatctaaaactggcatttggagagttgacatccgtaaggatggcaaagagttaattatctagcttggggaacgtggtcatgttccatggcactaggtggcggcataggcgtgttatgctttggtggcggcacgggtaaggtgagcgcggcgtgacaacctctgcggtgacttgcgcgaggatttgcacaatagtttagtttgcacttgctgatgtcgatgacgagagcgcaacatgatggattcacaccgggggacgacggtctagagtctaacaaccagatctgttcaactcagatcggaatcgtttgtcggagatgtgctttcgagtgacgaccgtgaagaggcggtcctagaggagcttgtggctgactcaggtgtggtggcagttgcgtggaggcggcgggaggccacgcatgcacatcgacgactagaatgtcgtgcgagcgcagtgcctgcacgaaggccatgtgtgtgcaacgatcgtgcgaccatgatgtgaaggccgtgcatgatttgtggtgggtgtgcgtgagtggtggaggcggtaggcagtgcgtgtgctgcggtggcgtggcaatggtgcggcgaggccaggaacaacaccaacacagaggtgattgagagcacgtggtggcggtgcgaagttggcatggcgaagacacgaaacccacacatgggcaatggtggcaatgaggccgtgggtagtgaaagtgagcaggtggcagtggcacaacagcataggggccgcacatgctatggagggcgcaatggctgtgtgatctatagtggagtagcaacatgtggttgcatgggctgtggcgacttggaggctcaagagttgtcatcctcgtcgttgctattatgactgatggtttgccgacgatggtccaactcgactagatgtgaatcattggtttctctgcctcccctctgctatgatcgtgctatcaggtgctctattttggccgacaaagctaggatggttgtggtcagggcgaaatcctagatggcgacaattgtagatgtcgcttcctcttaggagacgtccactctgtcctatatgatagtttcattgtgtgaaaacactgtctatttgtgggccgacaatagcaccaccaattggtgttgcaccttcttgaaggtgttgtcttttgtgtctagcgccccatgattggtggtggcaaccacttgtggcctattagaagttggaactgctatgtccaggttgatgagcttgacaatgatggctcaaactcaaagttgtgtttggtttgtgtggtagtggttggcaaggagaaccatgtagactttttatctagtcggttattggacttggtggcatattggtgcttgacgagctctatcgcttgtcatagtgggttttggtggtaatgaccatacaattagagaattaatgagatttatcaagttgacaagcatgttaaataaaaagaggacaatacatgtgatagttttttttttgaaaaaggacacggcaagagctttgccatggccaaaaatttattagaaagggacacttacaaacactggataggaaagacaacactaggggagagggggggggcaaagaaaagaaaagaaacactagcaaaacagcccactagaaacccagcacgccacacaaacaaaatgctaaaacgctaaaactaactagaagctctttgcgggttgaaatcttctttgacgaaattggccacttctcgctcgctcttctcaagaccatgaaagattcttcgatttctttctttccaaatctcccaccaaaagtaaatacagagaccatcgaattccttgcgagcagttttctctacttttagtctgcacttcctccaccatccatagaccgacgagcactggtccaactttggcagataggagaggttgtaccacgagctgagccaactccaacacgattttgtgaatatgcaatcttttgctagatggcccaccgtctccggttctcgcttacaaagcttgcagataggatcattattccaacctcgcttctgaagattattggccgttagaatttttttatggagtagggtccatgcaaagaaccgacatttaggctccgtcttcgccttccaaactggagaaagtttgagcttggcaaaactcccgtggaactgagccaggtaagcactcttggtagagtattcgccatctgatgtccagcgccatctaattttgtctacttcctcaatatttatatggacttcatggatggcttcccaaagtctcacaaattcaattatttcagtttccccagaaaccggagaaataagagaaatccatgtattgtcgagcagggccttttgtaccttagtatattcctaattactaaaggatacaacaatcgactcagatgtttacatttattttacatttcgaattttagtataggaaaatccacactattgagaaggacacatgcataggtccaatgtgtaaccatgtgctcaaaagttccaccacgacatcctaaaagcctagcccgacactacctcttgttttttttcctactcttggatgctctgcttaagcaatactgttgctccttgacattgtcattgtcacgcatagctcggcactaccatgacttgaatatgacacaattgggtagggaaggggtatatctaccactttcctgctccaacagttacttttcgacctaacctcattgtgctaaactagaaagctctcttcctctctcacaccattggaacacctcgagcttctctcaaccttttcacttcaattctttgagagattgagcctttaaactgtctagagagctcaccaacctgttcttcaactccaagaacacttggttcacattcaagctagttgttgtatttgttactcttagagccgtgctcttagccggtagtgtcgcctgtggagcttgccatcttgtgtgacagcctcgaaagtttttaatcacccccttcaattgagtaaaaaccaatcatctcaagagcagtgttttctggtcgagtgactagctggacgac

SEQ ID NO: 51509 - DNA, 405 bp, Zea Mays
atattttcatatagtcaaacctatgcaagaaactaatctatctagatgtgaaactacggttttactagatatgttgatatatctaccaccaaagagttatgcaatctagtttctaatcctatcactagaccaacaagataaactaggaaagtaagcacacaacctatatacgcaataaataaattgtgaaatcttaattcagatagaggtgcaaactttcggtgatgactccaatatttttatcgagatgtcgataagctcacgctcccctagtccttgttagagcctcacaagagccaagctctcggtcggtaactctatagatagcctttaggacttccccacacacaagtgtgactccatgatggcctctttcggattgctcctatcatcttcactatcgag

SEQ ID NO: 51510 - DNA, 344 bp, Zea Mays
gaatgaccaaaaatgagagatttaggcaagatcaacatccgatacttgagaacgggtcatagcagataaccagataacgaggcagaatcattaagggatccagagattcggatgataaagcaaacatgattcacaagaaaaaggattattagatccaggcgaaaggagaggtaggcaaacaggatcagctaggatgatcgacagaaatgctatgaagttttaggggcaaggatttatggaaagagacatggccttgatagggtttgcgcaactagacaccaataaaaattttttttttgacacaacaagtgcacaaggaagttttagtcgatttaggggtcaag

SEQ ID NO: 51511 - DNA, 320 bp, Zea Mays
tcgaaccatcgtactaacgttgatgccaatagaattcgccagagcttagttgatagaagagacaaagtaccctgtcgagcatgcgtgtcaactcgtcagagaacattttgctgccagtgaggccatcttgaggagcgactggtacactgagactactggcacctccaatacgatactgctggtaaaacttattttaggctactggcacctccagtacgacactgctggtaaaactcatttcaccctcctataggaaagggaagagacaacattctttcgcatacgcagacatagagccaacattctttcgcataaagtcc

SEQ ID NO: 51512 - DNA, 274 bp, Zea Mays
ctggctcgccttctccaattcattgtaagccacatgaggaacaaagcggaccatcttgttaaagcccacttcatactctgtgacagacttcttctcttgcttgaaagactgcaaatcaatcttcattttctctaggaaggtgactgggtagaatctcctctcgaactgcctgatgaaaacatcccaggtcaggactcctggtgaggaggagtgagctgcctgcacgcctctccaccaaattggagcctcccccttcaacaactgtgtgccaaaa

SEQ ID NO: 51513 - DNA, 426 bp, Zea Mays
cttgtccctagattacctctgtctatctcctgaatagagagcgatcgatcggtccctccgtccctctttgttgttctacccctcccttttatagctcaggggaggagagtgtgatacatgtgtgttgggcagtggactctgctcaacattggctcaaatactcctagctcgtctcagtcttagtcgtatatagtgcacgtcataatgaacctcattgatcataatgatgtctaccatatttaatacggtggattgaagtcgtatcctagttgtctagtgtgagatggacgtcctgagtaggagcgcacttggcataggggcgtcctgtcccgagaggtatcttttgcttgggacgcttcaccatgggatatcttgtaggatgtatgagaagtcagaggcggagatagaggtgtagggacctgccct

SEQ ID NO: 51514 - DNA, 555 bp, Zea Mays
cggattccttcgacgcaccattctaagaaataagagatagaacctatgatgagcaaggatcaaccacgtttgagaaaaagacgcataagagattgagcatgcacttcaaccgttcatatgagcggttcaactacaacgaacaatatcaaatcgctaatctcaacagtgtttgtgacaaaatgaagatagtctaagtgttgcaatcacttaaactaaaatgtacccagcgaatgatacataagataatcaagaacgcgtaggatcgagtacaaggaaataacatagaacaatacctcgatccaaagatggggtcaagatctcccaacgagatggagggagatgatggaaacacgccgggaagaacggatctccaaccacacttccaaaatgggtgagggctcgagtgagtttggagaggagagaggagaaaataagatggcggcggcggctgagaaacaagactgagaaggggaagaggagagagggagaggtataaaaaggagaagagtcggccgccagaaaaccgaaaaccggttcaaccggtttcaaaaccgg

SEQ ID NO: 51515 - DNA, 1019 bp, Zea Mays
ctccggatggtgtacgcagtgggcataagatttatattgtttcaagcagaacgttcctacttccagttatcggtggcttatgctaccggcactattgatgatcaaagctcaaagtaggggttacaagagagcgagagagggggaagaggctcccaagtctcttatcgtggtggaggtggagctaagggttacattgtggagtcctatctaagtcatggcttggcagtggggctccggcctctggatcctcgtcggtgcgtcctcctgggcgtattctcgtctaagtctgtcattgtgcgtgtgtcctctgtccgttttgggaacccatggtccgggggccaacctcttccttttataggccgagtaaggggtcggtcagtagtggcttccttaggaagaagtcaccaggtgacagtaccaagcgttctaccatgggatgaatccacacgtgctcgtgggccccggggtcgcgtagctgtctcgtattctttatagcggacggcgtgggcatcgtggggcttgagcgccatcattttgagctatgttgacccctgtccttcgtagcctggggctcggtgtggctcattgtgttatgccctgccagcagtctgtgcactcagacctagtcccgatatatcatgagtgtgtcgtagggcggggggtgcacgggccataaatatgtcacacgaggggttcataggtcatgggtgttctatggcccgaggggttcataggtcatgattgggagggggacccgtgcctctgtcacggcttgtcgttaggcacagttaatgtgaccgatcacttataacaggtcagtctcgggccaggcgtgggatcaactcgagtggtttccctctaccacgctcgtcccctgttgggttccgccacacccaaccccgggccggtgtcgtggggttcgtctggggtgggttccaccggggtagtcgttatctatctacttcaactaaccagtgggccccatgaaagggaaatagtctcaatattttctataatcg

SEQ ID NO: 51516 - DNA, 359 bp, Zea Mays
cgggggtattctgatgggttggaatgactcattgcttcagggttcggtccaagaggttaatcttttctctattacggtggagtttgtctctcgtctctctacggatcactggaagttaacaactgtctatggtccttgtaatggatcggatcatactgcttttatcaattggttgagctcattcgacatcttttcaatagataactggatgctgataggggatttcaaattctatcgtttggtggccgaccgaaataaaccaggagggaatgtttcagatatgaataccttcaactctatcgttagtaggcttggtattatcgaaatcccccttaaaggtcgaagtttcacttggagca

SEQ ID NO: 51517 - DNA, 1078 bp, Zea Mays
ttgagatccctgtccttttgaatatcccgaagcaaggtcaacgcactattgagatgagtcactaacggtttacaaagaggacctccaccttccatccatttgcagactaaggtccacgacgatgaacagacctcgccgcactccggcgagcctattccgaccagacgacgctacggctggagctcccgtgcgacagggacgcgattaaacccctaccaaacacttccccttcatcaatttcatcaagggggcattgaatcgatcagtctacggtgaccagacggatgggcatggggatgaacgcgttccgaccaaacgacggtgtggacaaccaaattgaggctggggaaaggttcacgggttcaccagaggttaggtactcacttggatttgggcgaaataggaatcaaagagtgggtcgacagagggggtagtcatggcggcgttttacagagcaagtgtgtgttccggtgatgggcttcggccgaatttcaattggttggcattgagagcaattggagatcaaacgcaaactagaacaagaagtaatttgataaatactgacccgaagagcgctggccacgaaaggggttcttcatgtcggagctaagaacgcgggaggggaaaatttgtggactgcccacagtttcaggtgaaactgagtcaattgcttaagcactgaggtgcgtgatgtggcgaagaaaccgaacccgagcgcaatttataggccatcgaccggatttagatatggatcgcggatttcagatgtgctggcaagcttaccgcgcggcggattccagtgatggcacggtggtcgtcgattaaccggggcctgccacctcagtaacttgctgccacgtcaccggggacctttaccgcggccgccgacgacccatccgagccgcggtggcatccttatcaccggcgagggctgatccttatctccccctctaatgtactgtaccatggcaatccaccatcagatggcctgaccgagtgacttgaagccagattttctctcaattccatatggtaccaaacccaaacacctataacaaagttgttcctctataataac

SEQ ID NO: 51518 - DNA, 586 bp, Zea Mays
attacttcagtcattagctattgtgagaggctctgttctcatccccacagaagatttgcgaagattaactctagtgaaataaattgaggtttggggaggaccttgatgatctaccatcttctatatatgttaagtggtgatgtacggatccacctcaatgaggacgtaggttgttggcaaggaaacgaacttcacagaaaaatcctttgtgtcggttgcacttgcgtggctcactgtctcaacacttgcacctatatatcataccttgtacatactcgtgtggttgcttgcatagttgtagcttagctttcatgttagtaaccttgtttagattgctcctagcttgtttagttggtagcatagttctagtgagtagtgcaggttaggtactccctttgctggctcactagttgctaggtggttgttctaatttgcttgcttggttgagtgtttgaatacttgttcttgcaactagacttgtgttgggagatttctttgttttggttagggtaggcaaactagtggctattaggataatcttttctactaatgccttgtctagtgttttgagcttgtagaacatttt

SEQ ID NO: 51519 - DNA, 850 bp, Zea Mays
cttggtgttggggcatggttaaacaaatacaccattgtgttacgttgtttctctcgataactctctaggcacactcttgctcttcaatatacatgttgccatctccgtcattgtttggttatggtgctgctgacgcagtgacgctattttgttgtagtgtgtaaggtgtggtgatgaaatgttttatgttgttctcatcacaatattgttttaactcaatggaattgaactctaccatggtcactatagaaggcacgaagcttgccaccatgttaagtttttgcaagcaccttcatagaccagatgtcgatgttgttttctgagtgcacaaccgtcacaacattcttcaacttgattcaccatagatagtccttggaccttccctttcatgtagatctcttgaagtgtccaaaaattgagatggccatagcgagcatgtcgtaaacaagcttcatcatcttcctttaccactaggcaaacaggagcaacaagctacatcttcaacaaatataaatgactcttgatacgaggtactcaatccagtagtgagcgctcgatatcaaacacattgcagaatccatactcaattatgatcttctaccccctccaattggactagacttacaatattgctcttcatttttgaaataaactagactttagtgagtaccttgtagctctttgtcttggtcgagagcatcatagagccaatgccctcgatcttgatgtgagcaccttgaggcaccctgtcatgtgatttctagccccccctgtgttgaggatccaaacatcgttgccttcatcgcaattagcaggggtcaccttcttctcattaatacacacacattga

SEQ ID NO: 51520 - DNA, 446 bp, Zea Mays
gaaaagagttcttcttgctaagacttactcaatctattgcagattactttgggagcaaactcaaatcgatggcaagcaagagaactagaaaggggagagggaagaagctaattaacggtgtttcgtacctcgctccgacaagtaggtttattgtgcatgtttcatgctctgtagggcatgcagggagggcacaatatttatacttgtttgggcataacgtccctatctcgtcatcagtggcttggactaccggcaccattaacgatcaaactagtagtagtggttacaagcaaagggaggagaggctcccagatctcttatcgagatggaagtggagcttataagctgagaggtggtgtcctagctaagtcttggcttggcggagctccggtctcctggtcctcatcgacgctcctcctcctatttatccttatgggctcatctcc

SEQ ID NO: 51521 - DNA, 330 bp, Zea Mays
gcagtcgcaacatcccgaggttggcagggtaacttggttcatggtggggcattcatttagttgtgattgtgacaagtgactggcgtgtgctcaggcgggtgcacgaggtcttgtcggagtggctttctgcactgaaggtatcacttcaaggtctgcaacccgacacattaatatagcactcggcgtgcacaacaaggctgtctttgggcagagggtgtaggtgggtcttgccaagatgcacaaacgccaaggcagctagaggcaggcttacgatttctttacgcatgtgttttgccataggtggttgtgggctccctctatctagtgtgc

SEQ ID NO: 51522 - DNA, 581 bp, Zea Mays
aagctggtgatgaggaacacgtcctcccgtagacttacggacggtgagtctagggtgggccatctgttacaaggttatactctcgtgataatttgggaaataattttaattacctaatttagcaaataaaacttttagccatagttttaagggggagataatgcaatgaatgatgagaatgatttttaatgtcatgatgcatgcacgtaacttacgacctcacaacatattcatcctaatgtcataagcggtggcatactcgttcactcatagatacgcgactacacgaactattcgtttcgtggttaatgtacctacagaagatttcattacagcccatccccatgatgcaacaattatatttgaaaagtaaaaacgagctatcgactatctttcataggttgctgaaaataattctactggtccttatacaacatgtatggttgcccacacatgagggcagccgactagtcccggtctgcatggttctacacttacctttcttaccttgacggcgaggcgacaacattttatagtaatcatctaataaaattaatagaataaaaatatgatgcatgaac

SEQ ID NO: 51523 - DNA, 630 bp, Zea Mays
aaacattattttctttgtctacttagagataataaacttgcatcatgttggatctttgtttgtgcatattaaagatttgaacctcaatctagacttgaattcaaaataggaatttatatagaaaagaactgaaaaaagaaagaaccttacacccccgcgtgggccgattatacctggtcggcccatcaacacttgtcccgcgcagcccagccaggggatctacgcgcgctcactcactggcatcatgacccacatcgtcagccgcttcccacccagaacacacgtcctgtgcttcacaaacaaatggaccccactgtccagggtcatcttcaacgtcgccgcaaaagacttggtgtctgttcatctcgatccgtaggtcctgggcagagcttaccggtcaccgcttgcccttgcgaaatccgcggcaccataaatcctgagcccgtgaccgccctgctccctcgccggacccagtgaacgaacgccgagaacgccgccatggattccgctgagagtcttcacctgattcaatgcatatctgatcccttccccgggattctcggagaccggttcgaccgtggaatttccgggatcctgtaacaacctggatgccgatagaagcaaactggc

SEQ ID NO: 51524 - DNA, 305 bp, Zea Mays
cattattccacaaatcatgccagaattgaattgactatccatctccaatcgagggaagagccaggcccttataattgtccaacaaattcaacaagcttctccaccagaaagaccctattcttcgctagctcggtaatctgccaccgctgtaataattgttccaaattagccaaacccatggtagatcagatttgttgtagaacttatgtagatatttcataagtaaggccacattttgagtctccagctttaatacccctaaaccaccctatgatttcagtttaactatcattgaccaggcagct

SEQ ID NO: 51525 - DNA, 301 bp, Zea Mays
agtggacagattataccacaacaaagtttagctgatcggcgaagaatgtccttgcctcaaacatgagaagaaggaaatttagtcctaaaacttagttgcaccgtgtgaagttcctctagctacatgttaatgtactgtgatcgatcttactccaaagggggaaaactactatggctgaaattcactatactgttggtgggctacatgtatttggcatgtaatgataaatggtaacatttccaacattctcttggacatggaccactgacacatataagagtttgatatcttgaattctgat

SEQ ID NO: 51526 - DNA, 441 bp, Zea Mays
tgaaacttgcattgccaacacatcaagagcaagtagtgagaggattggatattcgtcagcttgatttttccaccatgctaggatatcaaatgcattcaggttggctttagaagtcttcaatggtggttgagataaatacctatctaattcagttgattccacaccagcaccacatgactcattgtcaaatagatagttatcaagctcctcatccatgttgttcacaaactgatttaaaattagaggtgcatatccttgatcggtattgttctgtgaaataggtgcagccgaaacatagcactgaaacaagttctttaggacaccaataaacttgtcaatttcagactggtagcccacctctgtctctcttgcttgccatccacctccactgtcacccaatacttggtgaaatattgccagacttcagatgtgctcttcttt

SEQ ID NO: 51527 - DNA, 701 bp, Zea Mays
caacctgtcagaagcacacctgtcagataaagctctaaagaagaagaagaatccttctggctgtgttggccccaataagctagggaaaagtgacaaggagggtaataaacaagattccacatatgaagacaactaatttgatggtgctgctccgggtgtggggattttgcaggacttctcttcgccagactttttggctgtttcggccctggcgtttttggctggttgttgtggtgacaaactttgtgatttctggttgagctgtgtcctgtgctaacagatactcttttgtccacccagtgaatgggtttgggcttcttttcgatgacgaacctgatcattcccccgatgaatagttacaacgatgttactttttctgattggtctgttttaagttttaatgtctgagggatcaattcggtggttaaagggaatggtattcattgcgtcattagggattccagatgtgatattgtctgcttgcaggagacaaagaagtaatcgtttgacagggctgacctcataaagttttgtcccaatttctttgatgcgttcgcttttgttccctcggtggaaaattcgggtagtttcattactgtttggaatagctcaaagttggtgggcactattatttaccagaatgattatgctctatcggttgaattttctgctaattcgtctaacgaatcctggattgtcac

SEQ ID NO: 51528 - DNA, 574 bp, Zea Mays
aagactccgcatttcggataggtattgtagtagaaccggctcacataccgcacaatctttcttgatttgctatcttcgagtctattttgatgatgcaggtccgacatcgagggctcttagtttgcgcaggcctagaacgattgcctcatactccgcaatgttgtttgtacatttatcggagtcatttgtgaatcttagtcggatggcatatctatacttggatcctgagggtgatgttgatattgcagctactccagtccctgaatggccctaggccccgtcacaatggatgatctaggctgtttcattggtcggtggcgaaggggtagcggggacgatccagtcaacgatgaagtcgactaggacctatgacttcatggcacttcagattcgaaggccaggtgatattttgacaactccatggcccattttcctatcagtgcggaggcttctaggttgttgtaaatgtatgacaggctttgctctattagcaccttgattttgtgagctccaaaataatgccttagctttcttgatgccatgaccacaacatatgcgaatttctccatttcag

SEQ ID NO: 51529 - DNA, 786 bp, Zea Mays
gccgcctgtccgccctgctgacaggtgatgtgctgtctcggcatttaatgtgccccgtccactctgatgtcaggcgatgatcagaccaccctacaggcggcgtgcctgtccaatcagacagcgggcagtacgcccataccgccgcgcgcgcgggatggtcatcatgacttgtacgatgccagggaagcttctgctgcacgccaatgctacacaagcggcggatatcggggcaagggagatcgcacaaggtgactgacattagttgctccgggtattccacccgttatgtccctggcccacatgtcggggttcagtgtctttatacgttcccccttgagcaataaaagggagggcacacgacacagatacgctcagactctcaagtctcaagcttccacagcaatccaacacacagtggagtagggtagtacgctctaacggcccgaaccactctaaatattcgcgtgttcatgtgctctgtgatcgcttagcaagataggcaaaattcttaatccccttcctcatcttaggatttagggtgggtgcattccgccgcccggccggagaattccctctccgacatttggcgcgccaggtagggggctaggcattaggttttctattgtttcctcactcagcatgatggtgcaaatcgtggagcaccgggccgagacttcaacggatttcctggtggaggaagaagttgtttcttccacgccataggttcccaaccgtccagtgttgggcactgctgctgtgcacgctgcacggcagcatacaactgcg

SEQ ID NO: 51530 - DNA, 308 bp, Zea Mays
gtccaaaaaaacagatttttcaggtgggtgaacagcagtagtattagcagtttctgggaattttcgtggggtaattagtgggaatcagtgggataatcatgtagagctttgtcatacctttccaacgagtacttatgcgctcgattcggagttataatttaggagatatcgtcgtttgaatccgggtatgttgctgtccaaaaaaacagatttttcaggtgggtgaacagcagtagtattagcagtttctgggagttttcgtggggtaattagtgggaatccgtgggataatcatgtagagctttgtc

SEQ ID NO: 51531 - DNA, 458 bp, Zea Mays
attgtgcctactttttgcgttttgacattgtggtttggtagcaagggtgcataattatatatggagtatagttttgggagactttatgaaatactaactttcatgtggtttttatgtaactgttggtgaattatatggtataagcccaaataatactcgttattaaaattggaatgcatcaaagtgccaaacattggaccgtaagtaaggaattagtcgttactatatattgcatatgtaccttgtccatgtttattactcgtgtgctcgaaagcggtggtccattgacgagtggattgtattgaaaattgcggcaacattaatcgatggaagggacggtggatactacaagtattgggaagcattgccataagtgtgacatgtagaccttcaagatttcgcataacataatggcctttaaaaaagactataatatataaccacatctgtagacaatc

SEQ ID NO: 51532 - DNA, 923 bp, Zea Mays
ttcaccggagttttaccggagcagggagcatcgccgcccgccatcgtcgaccagagccggtcacgatgaaccgctgcacccagctacgttccaccctaaccaaacccgccaccggtttcccctgagtcccatagagctttccaaggctcgagctggagctctgcttcaccagaccagtgaaatcaccatcaccggagttcaagattccgccggtgaacatggacccacctccacaactcgccttggtccaattcctccggaggatcacctcaccaaccttctgtaaagcttgatgactggtggaatcgagctctaccaccgccaactagccagaacactcaccgccgtcaagctccgaccatcgggagacgtagactggtcaactccgaccatctccggccgacccaaaggtactggcatgttcgccgtaacctcctgcgttttccccaccctcttctagaaccgctatcaccgacgtcgagctgcatcgccgtgtcttctctctggccattgttttagctgagagaaggaccatgggttcgatactttaaaaaccaggggctaagcataaagtcactggctcagttgaatagtacgccgagggcttatgtgtgagagaaaagggaaaagataaccagggacccagatgcaaaccatttatccctttacgtttaaacaaaatcctttattaatcctgcagatagttttaaaaattcataacttgtgaaataggtattcaaatgtggtcaaataaattttgctaggctccatgcaagttaaacaggagagaaaaaaatagaaaacccctagtcctgtttaaggaagttgttacttaatttaagatataagttaaaatgtggaagtaaaagtaaaaataaaaatagtaggacttttgtactatggctagaaaatttttggtagat

SEQ ID NO: 51533 - DNA, 808 bp, Zea Mays
tcacaattagcctgataagtgccaaaagcaattgttagtttgagttggaatctcaatagtagtaacttcgttcccgtgcaaaggctctgattcttgccagtagctccttccaaattagccttgcaagcccagctgctgagtttccactgcacccacgtcaccaacaccatatataattaccgctaaataaatgattttacaccacattgtcgaactattaagggtgaccatactaagaggctaaatgttgaggtggagaagagagagtagaagcgggctgtaaatttacagccggcttcgacacaagaatcaataagctttgtgagagataagtggggtcctacattaatactgaagaattaaccattatacgaatggctaaatgacaggctgcaaggaaccttacaaccagcagttggttgtattattaaacttgctctaatagagagacggtaacaaaactcacccgactcttaggctattctaagtggtagtttgatcacacgacaataagactaagatcaaatgaagaatgaaatatgtcctctcaatgacgagtttcatgacacaatttcataggctaacatatgacttaagtgttgtataagtaactgacgtggtttcagaaaccggatgacaataaaatttgtgttcggtgggggatgctagcgcagactctctccgaatggtgaatcactgggactcaatgatgtatctgagatggggattatactggtttaggctggagccctagtccagtgtagtgctcattgtagtattgtgatggaatgtgttacaacttgtgtgc

SEQ ID NO: 51534 - DNA, 421 bp, Zea Mays
atgaaatcctcagtgaccggttataatttggaagaccagttataagctggaaggtggtaaaattgagatatactcggcttatttgccgttgcacggtaccatgtaatttagttacacgctgttatatcagccactacctctgttccttagagaggtgcatagccagaatgacagttttttaggaacgaaggtaatagttgcaacaacgccttctttggctccaaaaggatcctttttggtacgcgccaaaatatgaagctaagtgtggttgaaaagcctgctgagttttcctgaatggtgtatgatcctatgagatgggttcattggttgactccttttgccatggtgatgattattttgaatgcataatatttgttttcatatcagttgctgtgatggcttcaattttattcattttccg

SEQ ID NO: 51535 - DNA, 531 bp, Zea Mays
attgagtgcgaccctcgtcctttgagacttcataacgtgtagtaggcaagcagttgaggcttgactaaaccatgaaaaaattgttgtgtcttgtgtgctatattcttattgtaatttgtgcttacactccactctaaatttttaatctacacttgatcttttgccattggactaattcataaatcaagttggatatctagtgcaagaacttttctcacatctttctactcttttggagcttggctttgcacttatcgttaatgtagatccaattttattttaagttgtgatttttagacatcatctattcaccccatcaaaaaggttgccctatttagaactcagttatgagtccgatctggtgcacccatcttaatatctcaaacgtctggccctaagtggccagggaaccacatcatcaaagttgttgcatccatcgtatccccaaactaatgatcttcagtgctcttgtttatcttttaaagaaaaatatctcacttccagaaagggcattttttatctcgtgcaagt

SEQ ID NO: 51536 - DNA, 457 bp, Zea Mays
aggatgagtatacttatggtccaagtactcgggatgatgtgatggggatgagtataaatctaggcctagtattaagtatgataatgagcgaggtgaggtaaatgtggagtcattctgatgccaaagtgacgggtcactgagaatggagtacaataacctgaaatgaggcaattgaaggttgtccatgtgaaggtacccttagcactaaattatgaggggctcttatgctcattacccactagagatttacaaagagcgactatagtaaaaccatgacatattggagttcctctttagtgtggttcttacatggtcctcattgcaggcttggcatgtgatgccaattagtgcgtgaaccacatagcttggactcgccacaatgagaatgtaggttatcagcaagcaattgaacctcgagatatatcttgtgtcatctcttttcccatgtggttttctc

SEQ ID NO: 51537 - DNA, 424 bp, Zea Mays
ggcatcttcgcacttctgactccacacaaatttgacctctttcttcagcaactcagtaataggcttcgcaattcgagagaagtccggaataaatcttcggtaataaccagctaatcccagaaaactccgaatctggcgaacagttgttggtggcctccagttcatcacctcttgcactttatcaggatcaacagctattccatcctgagagatagggtgacccaagaatttgatttcctttagccaaaaatcacacttggataacttggcataaaggtggtgctctcgcagacattgaagcactacatgcaaatgcccggcatgttcttcttcgttctttgagtacaccaaaatatcatcgatgaaaaccaccatgaacttgtccaatttcggcatgaaaacagaattcgtcagatacatgaag

SEQ ID NO: 51538 - DNA, 741 bp, Zea Mays
cacgatcggtgcaaaagcgcgggaacgacgatctactgcatgcatggacaccacgtgcatgcggcatgcacttgcacgcacgcacgcgcgtgagtgacgcctttcaggccgtgaacagaacagttgggaagctttgcattcagggcacacacgcggccatcgattcgggcaccaaactctcagatatagtagcagctcttcacgggcacagctaaactagcggtctacgggttcgatccatggacggccaggcctgtgcgtgcgttagtggactgtgacaggacagggacgacgatcaactgcgctgcatacattatatattcgccgccggccagttcctgcgtgcatgttgcagctatatagcatgtgcactgtgcagtggttaacttgacatgcggctgctgcttgggcttttgcatggtggtaacagtgtgacatacatgctggtttcgcgatcgacaaaaaccaccgctctgagcgctgatcgatcgagcgccgaccgccgagcatgtgcgcctactatacctagctttgtatcgttgtatgtagttgatccaagttgttgcgggctttaattcctccgcccgcgtacgtgcatgcacgaccgcaatggaaatggatgtccccccatgccgtgccattaacagcgtcaccagcaggcaggcaggcatccgttcaggctcagctagctagaagatgcatgcacggacagtggacacaggagtacaggacacgcacccg

SEQ ID NO: 51539 - DNA, 872 bp, Zea Mays
cattcgtgcagagttagctcgcctaatgtcggcagggttcattagagaagtactgcatccagagtggctggcaaaccccgttcttgtactcaaaaagaataaaattgattggtgcatgtgcgttgactatacatatctcaataagcactacccaaaggatccctttggactccctcgaatagatcaggtagttgactcgactactgactgctctatgttctccttcctagattgctactccggatatcattagatcagtctggcataaaaagacggggagaagactgcattcatcacaccgttcggagctttttgctatacctccatgtcgttcggcctcaagaacgttggagcaacttaccagagggccatccagacatgcttagccaaccactagggcaagcgagtggaggcttatgttgatgatgtggtcatcaagacagacaactcagacaacttcatcgaggatttgcaacaggtcttcaacagcttgagacgctaccgatggaagctaaacccagagaaatgcatattcggagtgccgactagaaagcaacttgggtttatcatcagccattggggaatagaagcaaatctagagaagattgaagcaattatgaggatggagccaccacgatcacagaagaaggtacaaaggctcacttgatgcatggcagcgctgagcagattcatatcaaggctagacgagaaaggaatgtcgttctataagttgctcaagaaggtggacaaatttcagtggaccacagaagcgcaggaagccttggaagcactaaagaagttcctgaccacaccaccagtgctcaaaccaccacgtcgagctacatccgatcagccggtcgaggatctgctgc

SEQ ID NO: 51540 - DNA, 682 bp, Zea Mays
gcttggtcccgtgctgacatgttaggtacgtggtcagaattttaacaacatttatatgttatttgatttcatgcacattataggaaacaaccaatgatggctgctttgttgcaatgtagggtctccaactatgatgggtgttttgatgacttgtcttgatgaacaagatgaagagatggtactgtttatttgttgctttaatgacttgcattgaagagcctgactcgagctgtttttattattttgcaggatgaacatgaatcaacaattgttgattaaccatttgagatgaacctgcttgctggctgctgctacaaactgcttgctgtctgttgggtgctgctagcctgctacaaactgtttgctaattgctatagactatcatgtactcatgttgtaagagacatatatgtatgttgtatgaagtatgcaaatgactaaatgtaatatgtatgctgctacaaactgtttgatgctacaaactgtttgctattgactatcatgttggccttgtttacttgctattgactaaatgtaatatgtatgatgtagcctttcatcatttcatgccctcttttttttgatgaagtatgaatgtatgatcttgtttacttgctattggccttgtttacctgctacaaaccgtgttgctggtgctgcctgtctgctggaaaccagcaca

SEQ ID NO: 51541 - DNA, 546 bp, Zea Mays
ctcggaaaccgtgtgaatacagaattaatcagagagcagaggccacaggtgagggcgggcagatcggcgtttgcgagccgcgacagcaggtgggtgacgactgacgagacgatgcccaccgccgataccgtgatacgtgctcctctcctcagatctaccggtctggcatttcctgtggaggctgctccggcctccggcacgaggaattgtccggtagccatggatcacatgggtggggggtgacaaagggaaagggaaggaatcacatgaccaaaggcagcagcagaacaacaacagaatggcagggggagatgagtagattaacctaaccacgctgcaagcctgcaactgtgtcctttgctgcctgtcagtgcccagtgcccggccatgacagcacatcagttgtaaacaacactgcgtccagctcgcggcctgcgcgcgcgtcggcgcggctagatcgtttacaatggcgcgcgagtttgactagcatagagtattgtctcgccgtttgcttgccacgactctgcatttgcgtcgatcgatgca

SEQ ID NO: 51542 - DNA, 542 bp, Zea Mays
caccccttgtgcttaagagtgttatctaaacaaaacaatatagcttaggtttcaaccgtactctagcatggcaattattgtagaaacaagaattgatttgctcgaatgtaaatgtgtagtgtagataaggattaagaagatcacaatgttttggcgaggtatagaaaagtcgacactccccattagcctttttggagcaatcgcataagagtgttagtcccccttgatccatgtaaggaccaagtggtctatattggattattatttgccactctagtatggtgagtcacacaaccattcacaccttgagttgggccatccataatgtccataaagtgatcacctaactccagtcgcctaggtgatgttgatcactaacaatatcaagcacaaactcttacttgacccaaccaaggctaatgagaatggtggatgcacacttgcttctctcaatggactaatgaggcactaatctcatggttatcaggactcaattatctcactaggaaaaggccttcccttttctccaaatgggttcttca

SEQ ID NO: 51543 - DNA, 426 bp, Zea Mays
cggacagccacgacgtgacgtggccggggacagccctggccatgcccatacctctgcaatacaaccctcgctctcgttgcagctttagccgtcctatggctacgtacgggcgcgctatgagaacttgggaaggtgtaccttgctattgctagtgtgctacgcaacgacgcaagcctgtgcagcctgtcgtcgtatgggtactctactgccagaacctttggtcgattctcgtagtgcccggcgggtaggggcagcgcattgctatactatactgggtgcgccatgccatgagctgcggccatggaagcgggccccggcaggcggtttcttttgagctgtatgtacgggtcgccacgtacgtgtagcggcgcgcaggctatagtttaccgacgaacaggattgatgcagtgtgtagcaccgccgcct

SEQ ID NO: 51544 - DNA, 616 bp, Zea Mays
aaccttcttcctctccggccgccagcacatcttcgcgaaattggacgccaccgccgtgggagcctataaattgccgaccccgcctgctccgctaagtaattgtgcaaccagtgaggcaactcgtgcctcgaatcatccactagaactccccaatttgggatttcccccaaatcaatcaagaacaccgagcggtgtgacctcgccgtggtcagcttgtctcaggtccgctcatgccctctgccctttcgttttagtgttcttgtgtgcccctgatactcctcgaccaactcgattgagctaagctaccttagaacaccgagaacacattagaatgtccgttgatgatacggtcactgtggacagagtgagttagaggtccaatggtgaaattagttgaggggaaacgatcgttaggcctcgaatttggtttcagctgaagtagagcatccgtcatcaagtaatccggtcggtacaagctcaccgaagctcggccccgcgccgttcaccgtcgtggacttaaggttgtgaagaaaggaaagcgcgggggtgttcttacaaatgttagtgagacatgagaatagtggcaagacttctgttctagttattcaaaccgtaa

SEQ ID NO: 51545 - DNA, 1335 bp, Zea Mays
gtaaattggagataattcagctcaaaatctggctgtcaggctagttccactctgaaagttagatgttcagtgtaacagagccatctttgggtgtgaattcaaccatgatctagtgatcaaatgagctcagtcactatagtcgaaatataggtggtatatagctctccaactttgctgcagagtttgggttgtgttaccataggaatctgggagaaaatcaagctccaacttggtctgtcagacaagctttttactgaatctggcgcactgttcatcgtcttcagaaatatcgcgccgtggataagggtcagcccctcgccggcgataagaacaccaacgcagcgtggatggtcgtcggtggccgcggtaaatatcctcggcatcgtggcagaaggtcactgaggtggcaggctccggttaaacggcgacccccgtgccatcaccggaatccgccgcgcggaaagcttgccagcacatctgaaatccgcacttcttctccaactccggtcgacggcctataaattgagctcggactccgcttcttctccacattacgcacctcagtgcttaagcaattgactcaattccgctagagaacttgcgcagccccaaattccctcctcctccattcttgctccgccgcaagggactccaccgtggtcagcgcgcttcgggttagtgtttatcaaattgcttcttgttctagttttcctttgatctcctattgctctccatgccaatcaattgaaattccgccgaagcccatcaccggaatgcacccttgctctgtaaaacgccgccgtgacccaccctcactgacgacctgctcttcggctcgtattctgcccaaaccaaagtgtgtgcataacttctggtgaacccgtgaacccttcctcagcctcaattcggtcgtcctcgccgtcgtttgatcggaacgcgttcgtccctgtaaccatccgctcggtcgccgtggactgctcgattcaatgcccccttgatgaaattgatttaggggaagtgtttgatagaagtttaattatgtccctgtcgcacgggagctccagccatggcgtcggccggccggaattggctcgccggggtgcggcgagggctgttcctcgtcgtggaccttagtctgcaaagggatggaaggtggatgtcctctttgtaaaccgtcagtgactcatctcaatagtgcgttgaccttgcttcaggatattcaaaaggacagggatctcaatgcaaagttggcgcgggcgcaggcgcaggcgcgcttctgctcattattgggccgcctgtatcgaatttggcccaacactattcactagtgtttcc

SEQ ID NO: 51546 - DNA, 324 bp, Zea Mays
tagagatgctacgttttttgaggacaaaattcccatgaaagctacacatgatatgtctaatgatgaaccatcgataccccatgagcattttattctggtagaacacaccgaggaattccatatacataatcctgtggaagatgacaatgtatctactcgaaagagtaagagaccaaggattgcaaagtcctttggtgatgattacattgtatatcttgtggatgacacgccaagtaccattgaagaggcatattcctctactgatgatgacttttggaatgaagcaataatgagtgagatggattctattatgtccaatgcaac

SEQ ID NO: 51547 - DNA, 1234 bp, Zea Mays
cccaatattggtctatggtatcccaaaggtgctcaatttgaattaattggatattcggattcggattacacgggttgcaaagttgataggaaaagcacctccggttgttatcaatttcttgggagatctcttgtttcatggtcttctaaaaataaaaattatgttgctctctctaccgccgaggcggaatatatatcggccgataattgttgtgctcaattattatggatgaaacaaactctattggattatggggtcatttttaagaatgtgcctctcatgtgtgataatgagagtgcggtaaaattggctataaatctggtccaacactcaagaactaagcatattgatatacgacatcacttcttgagggatcatgttggaaagggagatatctctatatattcaattggcatggatgatcaattggccgatatatttacaaagccattggatgaaacgagattttgcacattaagaagtgaaatgaatgtgatagatctctcaaatgtggattgaggttgaacacacatgtgtagtattgcatttcgcttctaaatatgctctctaggcaatttattgggtatttttgataaatttttcattctcgattgatctaaatagttctatatgaaaatgtgtatttctcaaatacataatgtgtatatgcatgcatactaacccttggattggtcgaaatgtccatatatgagcatcaaatcagatttgaaattcaaaatcagaaaatggacaaagtttgaagttttgagtatcaggccgcggaccgtccgcctatggaccgtggaccatccaccgtatcaggatctagacagtccgagtcagcggaggagatagtctgagttaccagggcgtggaccatccgccgcccctacgtggaccgtccgcgacaggcagttaagttcggacagaggcagtcaacttgtcactttcatccgttgccttctcctctcacactctccacacgcctaaaggagactctcgtcgcttgtgagcggaccgtgaagggaacttgcgcacggactgtccggaagcttgcgggaagttcaacaatcatgtcttcatcccggtatttcataatctcatggatttcatcaaatttcttcaaatttggggattcttcggatttcctctctgatctagaattaagcaatggattcacaaatctgattggtggaattgctagttctactctttgtgtatgttgtgcaaaaat

SEQ ID NO: 51548 - DNA, 620 bp, Zea Mays
gtcggccgggaacaagactagccagaggaataatattgagtcacaaatcacacacagaatataatgcacatcgatgcataatatatgcgtccgcctgtcggtctcatcgtcagagtcaatcatcacctactgacgaattaatggacaaaaatcacatcttgctatgcacaaaccgggacttgctaccaactctatcttctctacgcataaacaacatgtaacccacaaattaaatgacgatataatcgcccacttcatgcatgagctaatattgtttttggggggtacatggaaaatcccagtacgtgtatctttttcggtccagctgattattgctgatgaggggccggggccatcggatcaacagtcgcgtctctgaaaccttcactgggatgtctgatgtctctctcccccctctcattctcatgagtaaacagttcaactgcatacatggacgcgagaccttcttcttttctcgcagaagattgctcctttccttgacgcagagattaaataaagcctgaaagcgatgcggtttagatggagttaattagagctagaacatgagttttggaaagtgtttgtgtagtaggccggccagcagcaggggtagaatggat

SEQ ID NO: 51549 - DNA, 379 bp, Zea Mays
caataagggcgcaaaatcgaagcctttttcaaaagcctagccgtgcagaactcgcctacaggcgcggctggatcaacgaaggcgcgcaaccttatcatacaaattatggtcacgtatacacagcgagggcatcgcatattacattggctcaaccttcgggatgatacccatctcctggtagttgaatagcattatcctcagttcctcaccctcaaaaagatttcgcagctctccctcacccacactcaccccaatcggcgaggacaacaattctcgcttaccagtcccgtccacacgaagacgcccactctccatctcaccacgttgacgcccaccacttcgcgacaatccgctcacccctccgtttcgccactgccct

SEQ ID NO: 51550 - DNA, 837 bp, Zea Mays
taccaaaaggtctctgacagacatgatggaataccttcgcatgtgcccacgaatataccctcactaactcacagggtcggtcaactccagtcacggaaacctcagcaccgaagtctctacagtggccgatagactggaaaggacaagacaataccccataccgggtgtatacctacgtgtgctggatagtgacgcaaggtgtatgacaaaatatgaagctatactagacacaaccccgaacctcatcgtaagcccactttgtgggactcgccaggtaccgcaacattgacacagagcaagctatagtaacccgtatggagagcggacgggacagaacgtcgtatcggtagtttggcagagcatgctgccatagacaatgccaggagggctagagcggcccaagggcaacaacccgaggacccccaagtagaatacaagtcccaactgtaaagtccacctttgagccataaaagggcaggacaatcttccttctacacagaagccacacttgttgtaacacgcccctgagcaatataacaatcagcagaacactagactagggcctcgacctaaactataataacccctgtgtctcagttcccagcttggatccccatgatccaccattcggagagagttcgtgtttcacccccaccgatcacaaatctattgtcctacccggtttccgaaaccacaacagttggcgcgctaggtaggggaccacaagcgtgccaaagtgatttttttcactctgatggacagttattcagtgttcgccgagggcgagactttcgctccaggagctggatcacctttggctccctcgacttcctcatc

SEQ ID NO: 51551 - DNA, 498 bp, Zea Mays
gcagcagacacactatcaaagcttgggtctagtcgggtgtaggtcctacccggtgttttcgttcaagaggtgcaacagccaagcatcatgacagggcacgctgaggaatgcaatgaagtggagcaggcaaagacagaaccaaatgactagagggagtcgattatcatatatacaaaaaatgaggaggagccggatgacaaggccgccgcaaagagtattgcaaggcagtcagctcactatgccatcatagggggtctgttgtatagaagaggtgccacaggagtcctcatgaaatgcatccactcaactacggggagacatctgctggaagaaatccacgtggggcaatgtggaatacacgcagcatcaaggaccttggtaggaaaggccttcagggcggctttctattggctggcagcaaagaaagatgtgacagacttagtccagaagtgcgaggcatgctagttcctatccatgtaacaacacctacccgcctag

SEQ ID NO: 51552 - DNA, 681 bp, Zea Mays
ctcgacgccctagaagtcgcctgggtagcagctttcctctttttcccttgtttccgcgagggataacagtagtccgggtacacaaacccgataacatcaaacactctatttaatctctttttgccacgagccccgaaggcagttgtcatggcttcatcttcggcctttgagtatgctccaagcagctcatcacttgtcgcttcgatggcatttagccagtcatcattcggttcatcaaatgggctcctgtacctgaaggtatacttcaggtagactaaaccaccttggctagagccagtagcagtctccttcggcatttcccacccatttgcatgtggccacactctgtaagcaatgtgctcctgcaccaagtctcttgtgcctatgtaagtacacgctgtattgaaagccgcctggcatgtttgtatatcattcccaagggcagtggctggcctcctaatgacgaagcgagaccatatagggtgttgaataatccctcttacatcctccctttgacttatgtcattcttcacgtaaaaccattcctgcatccaggagcccgaccacctcttccgaaatgtgggaactgggtagctcgccttagaccgaggcacaaaactgtaacaaccaaagttgttgtgatattgctcctttccggtagccttcgtgtcataagacaac

SEQ ID NO: 51553 - DNA, 475 bp, Zea Mays
ggggacggcgggtttattccagtaaaacataaggtctcttttgaaagaagcgcacgacgaaggggtattctcaaatcagggccgccagatcggccacggatggcccagattagatcgaaatctaatggcaccaggactgcaggatcacagatctacgacccccatttacctaagcctgatgcgatatcacccacacgttcagggatcaacgaacaacaatgattcacgtcgggatcaaatctaaccgaccatctacgaatcaacgacttaggcttcaaacgcacgagatctattcctagccgtccacatggaaatcaacggtcatcgagtcgtcttcaccccattgcctcatgacccgacgcggtggcgcagcccgtggcggcggccatgaccggccagcgcgctatagccctatggtcccccaaacgtttccccgaagtttgcaacacgatcctgctttcctattgattacgag

SEQ ID NO: 51554 - DNA, 307 bp, Zea Mays
tgccagtgagtgttggcatcgtttacgactccttgttttatccggcgaacgagtaaattaatgtgccgaattaaacaaacagtggcagtgtacagcgagcattccagtccaaaccattctcggcctctccttgcacccggtctagattaaacaaactggccaatgcgggattaccatttggaccggtaggcacgcatttcacagcaacacgccttttacaaatccgatccaatccaacctgcccacgtccgcgccacctccacgaccccacgactaataaaaaaaccaaccgaaaatatcgtactgg

SEQ ID NO: 51555 - DNA, 479 bp, Zea Mays
tgttgcgaaacacccattttgtaccaataacattgtggttctttggtctctcaacaagctcccaaacttcattttgagcgacttatttaattcttcatgcattgcattcacccaatcaacatcaagtagagtttcatctacacggttaggttccatacaagatacaaaagagaaatgttcacaaaatgaagctatgcgagagcgagtttgaacacccttactaatatcacccacaatttgatcaaccgggtgatccttcacaatagaatgatgaattcttgataccgtttgataattgctagttgaagtattaggaggaaccgaatgtcttgaagtaccatgatcatgagtatccataatttcatcattttgttggctttggtgatcttcttcatttagagttgaagatgaaggaatgacaaccacactattttcatcatcatcttcctttggctttatttcaccaatggccattgttt

SEQ ID NO: 51556 - DNA, 455 bp, Zea Mays
tagcttcggctccagaggctgttgtttcaatctgtgctttttgagcttcggcaatttttctcggagtagagcttgaagactttattgtctccagtacatctagaacattaaccatcctttttcttttgggggtcaccgctggacctttctgagtttgtggcactccaacttctgccgaagggcttaaaatttctgatatttttgaaccttcagctttcggctcttcaattctttcagccttcggtgttgcagtcagctcttcagttttctgcgcaggtataggtcttttggcttcagtagccgaagaagcctcgccgacaaactcgggcactatggccggttcaataaagcgtggtcggtgagtaaggacttttacccttttcctcttcggcacaggcttgcttggagcagctgaagcatcatctttcccggaagttgcatcttttctctttcgc

SEQ ID NO: 51557 - DNA, 404 bp, Zea Mays
ttcctattcacccagagagcgcgtagttgcttattagggataacctttattgtttgttcttgttttggtgtttccaatggcaggatccgatgacgagattgaggtagtcattcccacacaattttctgattgtgtcagccgcgaagactttgatgttatttgcaagcgcatggaagaaaatatggaggaaacggtccacaagtctgtccatgatgcgattattgcaatggatcttggcaaagtgctagatagagtggagagacggataaccgagcttgtcgatcgggttgccacgttggagacacgtccattacatcagcagcctcctccaccaccacaaccccagcagcatccaccacggcatcagcaacctccaccacaggctcaagatgacgccattttcg

SEQ ID NO: 51558 - DNA, 602 bp, Zea Mays
gaaagatgttgcttcacattgctagagggtaaaagttgaacatcaaagacctgccggtttgctgcacccgcttaagatacatgaatggaagtgggaagaaattggtatggacttcatcgtaggtctaccccgcacatctactgggtatgattctatatgggtgattgtggacaggctaaccaaagtagcccactttatcccagtgaagaccacatattcaggagccaggctagcagatacatgtaacagatagtttgtctacatggagttcctaagaagatcgtattagaccgaggatctcagtttacttttcggttttggcagaagttgcacaaatgtttggatacaagactgaatttcagctcggcctaccattctcaaactaatgggcagatcaagagaaccaatcaagtactagaagatatgttaagagcttgtgctcttaaacatggtggcagttgggataagagtttgccctatgtggagttctcttacaacaacagctacgaggccagtttgaaaatgtccccgtttgaagctttataaggcagaaagtgcatgactcctctatattgggataaaactggtgaaaggcagttctt

SEQ ID NO: 51559 - DNA, 319 bp, Zea Mays
ccgcaataagacatccagcccacgacgtctgtggcttcgtttttatgggtgttgcaactttaaattagtaccatatggactaccaaatggtgcagaaactggcttataaactcaggtgcggaggctgtagtaccgtttctcagttcgtcgtgtaggcgccccgaggaggcaccaagacagtctgcaacgccacactcctaatctgtgtttgttttttgttaaatgggatgttgggttgcgtgagggtgagagtgacatggggaggatccacgggcccacctgctagagtctgggggcagaacaggaggcagaaccacgg

SEQ ID NO: 51560 - DNA, 850 bp, Zea Mays
cccggatagtccgtgattagattagctcggacaagagtccttatcctttgcgtgcttatctggctaatcatgtgggaattttttggaatacgcctaggaacaggtccaaacctcccttgagggagtatggctgattgatacacaacacaatcgatccaaatcaatctattatcattttgtttaaatttcttgccttacaagtagcaataattagtctttcttatccccgatctttacctctccttgattctttcgtttagagtcatcttggatggcatgtcaatcacaagactactctaggatctttccttcctaaaggattctctcctgggggtgagatccaggtgctaaaggagatccggaagccctttgagcacacgtggacgatccatcaccctattgcgaacagtccgcgtgccacagagaagatcaaagaccctctgtgcagtcacggatggtctggtcacccagcatgaatggtccacgcgccgtacgtcatcccttggttcatttggcgattggccccagagaaagccaacacacttttggcgactccactggagacaaaggtgtatagaactaaaaatcgacctccaaaatggccagttccaaaaatcacaccgtagtttccgcaagcaacatcacgaagccgactctatagagtctatcgactgaagatcaacaacaatttaaagattacataaatcaacgacaagcccaagagcacaagggggtgaaggaaagatatctgacacattttcaggtggaccggcattagaggatcgtccaacagggagggttcgagatggcatctcttctacatgctacatatgccctcaatgcaagtaaa

SEQ ID NO: 51561 - DNA, 590 bp, Zea Mays
ttctgagtgagatctttagtggtgtctgggcctatgtgggaggtgaggagcctaatttgagctagagcttctgtctgattttggggtttcatgtatgcactgaggggattttcaattcgttatcttagtgaaatcacgcatattccctcttacctttggctatagtctgcctctgaactgtgaattcccatccactatttatttgctgtgtggagaaggcgtagaagcgctgtttgataaaaaaaaatctaaacctaaatgaccagaaagttgcattcatgaatattatatcttaatcttgataactgaatgttacttttatcaataatatagtatctctggaacacgaatgtatggttggtttcaatttagctccgtagttggatcacctgtagtctaggtatagagtattgttcgtacgtttatctaggaccgaaagaaagctgcaggattgtaattagcttttcacgtatggatcacgactgggacccgtctggcgaattgaaaccaagttccattttgcttgttaggattgagatgaacctagaatattcttgtccatattgatatggtctgactctaaaaaaatt

SEQ ID NO: 51562 - DNA, 440 bp, Zea Mays
ttggcggcgacgttccacgatgagtcactagggccacctagtggtgctccctgcggcggcgcatactgttcgtggctcgaagacggacggtccgtgaccatactatgggagcggatcttccatatgcgttgatcggtccatacgcattggtcgaacggtccatgatggcacaaggtcgtattcttctttgtaggaacctagatttcaccgaacgacgtagagttacctgtgattcaggagagcactttggaaattttacgaccttttgtgtggttcttcctccctggctccgctaccaaacgaggagcacctttattaagtagtgagaggtacgttttattttatttccacccacacacacgattcaccacacgagacaattctacaaatggcccctccatcatgccctttctcgaccggttcagtgctcctcttgacac

SEQ ID NO: 51563 - DNA, 486 bp, Zea Mays
ctcgagcaggcagggagagggggccaggaaaccgttggaggcagcctgagagttaagacatttgataattttagcgacgagtgagatgcaccagcggttcacaaactagacacgtttaagctccgaattcagaaaaccacaaaacatgtactcaaactttatctggccatgtaaaatcgtccaaaactttatctgtccatacaaaaccgtccagaccaagaccatggatagcacaaacctcctgccacaaacttgatcttttctttcccaccaagcatggatagcacagtctccagcgagccaaacatgaccattggtgagctggcctaacctcaagtgggctctctatgctttaaactttccacattaccgaaaagtactgcaagataggaaaaacagtaacaacgtagacaaatagcaatatagggttcgaaataatgttcaatggtttaaaagttcatgatatggaaatgactagtaaattcc

SEQ ID NO: 51564 - DNA, 613 bp, Zea Mays
gccgaaggaaactactgctgaatctagtgaaggtggcctagttcgattgaaatataccttcagatttagagagaagtttgacgaaccaaatgatgattggttgaaatgcattgaagctaccagcgacgagctgcttgggacatattccaaggccgaaaatgatgccttgtccgcagccttcgggggtcagggcaagaaaagattaaacagggtttttgatgcaattggcttcgtatatcctgattattgctaccccttgaggaaaggaaaaaagaggaaaactgtcgcttcggccaccaccgctgtgccgaagggcaagaaaataaaagttttgacgcaccggcctcgatatattgaaatggctgtagtgcctgaatttggtgaggggacctcctccactgtcgaagcagaacaagccgctcccatcgctcggagcgctgaagggtatactgtagtgccgaaggtgcctacagtcaggccaaccaaagccaaagatgatgtggccgaagagccaaaattggaaaaaacagtgataatgccagaaattctgagcccaccagcagagacagaattgccgaaagtgccaaaggctcctgtcgccactcccaagaga

SEQ ID NO: 51565 - DNA, 443 bp, Zea Mays
cgctaaggaaatttgggacacccaaaagatctctcacatgagagaccaccaggaaaagagagatattggtatctaccatgttagcacctatcaccagctagccaatatcttcaccaagcctttagatgaaagaaggttttgtgagctacgtagtgagcttaataccttagattcgtagaacttggattgatctatagcacacattctttatgtgcctttgatcatgttctattgagttttattgcttattttggtgctcatgttgtagaatgtctccccaaacctcacaagtcattctacaaattatgcatatgttgagggagaggatgtgctacaacttgacacttttagactagtgtgtttgcttaagtgatgttaatgtagtctcaaaggtggattgaaagggaaaggtgaatttggacaacgaagaaggcttccactgc

SEQ ID NO: 51566 - DNA, 299 bp, Zea Mays
gtgcgaatcgacggctcctccgtcgggttcagacccagctcttgctgatccatctactcaccgattaacagccgtcgacttctgattacacattactgctagttgtaagtacagcaagtatatgcgtgtacgcacgtaagtacacgaacgtatagatatatgtacatgacagtacagacaatacatgtgagtatataccgtacactgtcactgatacatagtagcggtgaaagttctttagttgctggaattaagaggcttaaggggatgtttgaatgcactagagctaatagttggtg

SEQ ID NO: 51567 - DNA, 380 bp, Zea Mays
gcagcacaaaaccttctaaaaccaacatgctcaacaatagaaagtgggtactcatgaacacatatcatcaatgcgagttctttcctagcaacaccttgatcaaacacatacttctccaatagaacatttccatcttgtgttttagataatttcaaagtggactgttttagaccttttctagtttgccgagattcacagctatttacgtggctacgcaaatgacttgtaccatttctaaatacagctgatagtgttttgtgacaccaattgcatttagctttccaagtaccacctacacagactctttcaaagtcttttcatacatcagatttaagcttccttttactaccaaccctaacatcctcatctatttcaacagc

SEQ ID NO: 51568 - DNA, 418 bp, Zea Mays
ggaaaacctattttgaaaattagaaaggaaacaattgcaaatatacaccaatctcatcacaatagctagagaacaaatattatgggtacagagagaacggagatacccattgctccaaatgacatctatgtcgagcgactttgtgtcatgagagattgcaacttggtcattgtagacctccagtcttcatgtatcgtgccattgcttatctggtaaagacatctctcgacattgctacatccaaggggcacaatggtaggattaactaatataagtgatacacatgcatatgaatcaattgttactattgcttggtataaaaaagtagacatcattacaaggagtcagggagtgaagtaaaaaaccaaacatgaaatttgcaactgagcctacctatcttcctttgactcgataccct

SEQ ID NO: 51569 - DNA, 938 bp, Zea Mays
gtgcaaccgaatggtgcccttgtccaagatacttgcacttcacaaacacttataacaaatataagatggaaagtgcaaacaagaaataaagcaggacacatgacatagtgatttttccccgtggtttggccaagcctcaaatgcttgcctatatccacgttggagttagacagcatgcttggattctatttcaactccttcttccctttgctcaagtttatcactaaggtgataaattaggacttccactatcttcttgatgccttacatagatccgaggcaaaccacactttggtatctcaatggagaatacttaaactaataaacacttgttcaagatcactactactctttcacacgacaacactatagcacatgtgcctctctctatgactagatcacacactaatcacttgatctacaaagaaatccactagagagggctaggatatgagtttgcacttgctcgctactttcttggtgatgtgttggtactatggggattgagaggggtatatttatagcccccaaggcacaaagagtcatttgcaaatgaactggggaactgcattgttcacaagagcaccagatcgagtcctatagcacggactccatgaacttgattgataccttccatctaacgtttgcacaggaccgatctagtgaaccaccaaaccccgtgccacgtaatctagttgttgcgctacccgttccccgtgaagtagccataggaccctagacgtccaatgcaccgtactcgaggtacaatgcactaggctgccaagtccttctacatacctccctagtaaagtggtcaggtgcacacgaacctaaggtccagtgtgccaatccatgacttcctcttctggcacctctcgtaagatggtctggtgcacacagacctaaggtccgctgcaccccagactactgagttgtag

SEQ ID NO: 51570 - DNA, 337 bp, Zea Mays
atgaagtcatatgttcagtcatgtaccgtgtgtcaacaggctaagccagatcgtgctcgttaccctggttcacttcagcctctaccagtaccaccacaggcttggcattcggttactttggattttatcgaagggttacctaggtcaggtcagcacaattgcatattggtggtggttgaccgattctccaaatatggtcacttcttacccttgcagcaccccttcacagcgagtaaagttgccaaggttttcttagacaacatatataagctccatgggttgtctgttaacatcatttccgatagggaccgagtgtttaccagtggtttttggcaac

SEQ ID NO: 51571 - DNA, 568 bp, Zea Mays
ccaacacccaaccagaatggccaagtagccccagcgcaagtaggaggtcgtgcatgcttctactgtggagaacaaaaccactgggcaaagaactgtccaaagaaagcagctcagcagccgccagcagtcaatgccctagcaagacaaggaccgccacaacaagcaccaggaggccgtggtcaggcctacaaccgtggaaaggtgaaccacctagaggccaaagcaatccaggatgcttaggacgtggcagtaggtatgtttccagtcgaatcctacccaacaaaagtattatttgatactggtgccacacattcttttgtttctgcatcttaggtagaatcacataacatccccatagaaccaatgatcctgcctttaagagttaattcagttgggggaaaagttcagtccgatgggatttgtccaaatctaaggattgaaataaggggggtagacttccccgctagcctagtagtaatgggaactctagggttagatgtcatcctagggatgaattagctacacaaaaaccaagccactgtcagttgtgacaagagaacagtcaaat

SEQ ID NO: 51572 - DNA, 647 bp, Zea Mays
cgcgcgagtccgtagcgttgcacggtgacttggcaaggagtgatggagctatgcatgatttgattgcatacaatcatggaatggccaagtcagcgttgtcactacacttgtacggatggcataggtcaaacaaactcaacaccaacccagtgcgggagtgaaaaagacggttgatagaaactatggtttgttggctatgtctcacaaggaaggctataactcttacctagggccctattttaagaaggtaggaatgatgaggacatcctccactattacctattggcaaagacgcaattggaccagttggctcaattgtagtcggacggtgaccatgtgagccttagaattatcccacctcgcttaacttgggaggaggaagccactttaaaagggagagccactcttcccccattggactagtcttttagggtgatcggacctttccctgagttgggtgtgcttaatgaactgttgggctccgggtaaccctaatttatggggctgggtgtatcatctaacaagaaaacaaatcatcaataagcaagatctctaacacctacatcaacaaggtagataaaaaaaccaccgctacaccgtatttgataaaaaagaaaaataacaaaaagataatagcgatcaaggcc

SEQ ID NO: 51573 - DNA, 863 bp, Zea Mays
gcaaaatgctatatcagaacaactgaagcaacctctaatggtacagtagcgaaaatatcccagggttcagtccccctcgccgccggtgatccgcgcgcccggattcgcgcaggtcgccgtgattcatgtttggcacgcagtggatattcacgggaaggtaaaaagatcgcgcgggggcgtggatttggtcgcagcagaggcttatcaccgcgcctgtagccattgcgacgtggccggactgccggtgtcgccgtggaaactccggtgacctcggttgtgccacgctgtggcttgttactgtgcggtagtgactgtggcacacttaagagtacaatcgtggagctattgcaccggtgaacgccacaaattctttgcgccagtgctcttccccctctccggccgctgcacatctccttcaaattagccgccaccgctcatgaatcctataaattgagcgtgccataagctccgctaggtattcaagcatccagcgcacccactcgtgtctcgaattgttcaccagagagctccaatttgggatttcccccaaatcggccaaagaacaccgtgtgagtgagctcgccatggccaacgctctacaggtccgttcaccccctctgtttcctcgtttcagtacccttatgtgcccttgatgcttctcgaccagccgattgagctagaactcataggatcaccgggaacgtgtcaagttgtccgttgatcgcacgaccaccgtgggcagagagattaggggctagaaccttaaaattggttgaggggaaaggattattagaggtcaaattaggtgtcaaccacttctgaacaccggtcattacgtatcttggccggtacaagctcgccgg

SEQ ID NO: 51574 - DNA, 476 bp, Zea Mays
taactgagttcgtgtcttgtcctactcaacatgaagagaatgtgctctaagaatatggtgcatgactgattgaaagaggagttaaagcaatgctagcagcttatgatggtttgcccgatgaactgaaggtaacacatttggtcattggaaaacctgcttggagttctgagcttgaagatatgtggaatgcactagctggtgaatcaaagattgaggatgctagggctatgatagaggctcccgagcgatcatgcgttgctggggacgatttaggaggccgagtgtctcgaagcgacgatgtgtcgataaaacatcataggttatgagggaggtaccgaagatacaaaggctctggaaagtttcaaagatggatgtactgtccgcttatgttgagctgactaatagtggaaaaaatgttgtggaagaactggttattcaagctgattgcatggatgatgtcgtggaaggggaaaaga

SEQ ID NO: 51575 - DNA, 407 bp, Zea Mays
gaggggggagagtggtttgcggccagattcaatactccattaacgcggattgaagaacaacgttacctactcgaagaaacaaccgtggccactaatgacagtcgcttgatggggagaaactaatgcgacgcgaactgtgcgggctcggctggcagcggctactcgagttctggcggcttctgtgtttctacattctgtttcttgctgctggtttgagaagataatccttacaaatgggcccaacatggaatagacagaggatgagggagagaggctcacttgatggacccacatagaagtgagtggaaaaaaatgtggaaatgggctagccagctggtttggctggggcttgctgggatgctcggcgcgcacacacatagactattgtcgcacgaacgttccatttt

SEQ ID NO: 51576 - DNA, 415 bp, Zea Mays
ggcgggaatggcgttgcgctgccggatcccagtgtgaggggcgggaatagcgtggactacggtggggaagcgcggtgggaaagggcgggggacggtgaagcctaccgtggacgcccaaagtaggtatatatagagtagtagagattttgcgctcttaaacgtgacactggaaaaccaatttgcccattaattaacctagaaaactggaaccgtcaaactgatcattgatcactggttctgaaaagtctacagaaacgtcgccccgcccatatgtaaagcgctgcacgatcaccttccgcgccgagctgcatccatccccacgatccgccgcagggcgccgcaacgccctcgccgcctccggtggccactgacgtgtcaccccactcccttcttcgtcaccccatctccctttccc

SEQ ID NO: 51577 - DNA, 342 bp, Zea Mays
agatattaagatattcgatggggaagacaactccttaggagggacaaacatgcctgacaacgagatcctagaggactacatcaggaacctaatgaggttggagtcaaacccaacgaggaggaggaccctaatgagctagtggacatcgatgagccttggacatcggagccacttatacatggagttcctgatccggagactcctatacatgaggctcttgcactagttgctcatgctctagaggcacctatcctagaggatccctcgttggaggaccctatgctagagcaccccttcacccatgacatatggaggagggtcatccactacatcagtggcctg

SEQ ID NO: 51578 - DNA, 414 bp, Zea Mays
gcctaagctttgtggagcaccaatccttggatgatgggggcatgagcaggagggaggtcaacaacatcatctttgcctccttcatcatcacttgtagactcccaggcctgaggatttgtcgcgggacgagaacgactagaagggtttcgagccgttcgtccgtgagttccttgagacccagaggcctcaccacacatcatgacattgccagatcctcgcccacgcttggatctggaccgagggggagtctcctcatgaatttctggggaactgtcatcagaatcggattcaacgacagatggatttcgacgatgaaccatccttaagatcaaacaaaatacatatggtgagagtgatattgatgttcaggagtttaacgaacatgtttgaggaaagataagtataatattgggc

SEQ ID NO: 51579 - DNA, 447 bp, Zea Mays
cccgaattagagcttccccatgtccatcacgaagtcgtcctcaaatccagttactccaattgacaaagttgtgtcaaattaactaacataacccctatcagaagatggcattgggactccacacctagacaagacaaaacacgagttttgcctcagttctaccctctctcacagaccaaattggaccaaagataacttggtgtccatgacacgaaaccctttgggttctggacctttcgacagagtgaagtgaggggagaagatcatacacagggatcagcggccactccatgcacgccaactagggtcgagttcctgccacgcactgatgccggaaaccgcagcgtcgtgtgcgtgctcgtgcctataaaggccactccatcccatgcccttccttcaccccgttgctcggtcgcttcctcaccggaaacttactgatagcaagag

SEQ ID NO: 51580 - DNA, 843 bp, Zea Mays
gcaccactggaactcccagcctcatgatcgtgagtgcatgaaggcataggaggcagaggcggaggtggaaccccaaagacatcatcgtcagggactgctgcgccctgagtctcgaactggtgaaaagtggtatcctcggcctgagtattaatcactggagcaggtgccggcacaggatcctctagagctggacggtaggccccaaagaggaggcgagaggcctcaagagtaccctggaactgtggtggccgaatcagctgagcgaagatgtgacagagatagtgagcatacggcagctgtcgacgagcacgtagaccatccagtacggtgtcctcgatctcacaaatgaggaaatccacaacgttaatctcggagtgagagaccaaggcaccaaggagccaaagctgaatatgagtggcagcctccctgtaacccatccgtggcagaagcgtccatctcatgagctgatatagaaacttggccgctgtggtgaaatctgtcgaagaacatcgcgacccatctgtgaagggcggtcggaacaaagccatgatgtgagttgtaccaggaccaactccgttgtgagggcgacgaggaggatcagaggtgccatagcacaagctatgaagacgagtcgatgactcgttgaatccaaacaactggcgaatctggctggcatgaatggtaacatcctctcgctcaaagcggaacctcatccactagtgatcagggtctatccatactgaagcatagaaaactcggacccattcctcaacatatctgccgctggtagtcaacagagtgagaagtccaggcagataggagaggtgtacctcagagtcagca

SEQ ID NO: 51581 - DNA, 475 bp, Zea Mays
gttttatttttgtgatactgaaggtcggttgcagcacaggttccgacgttcgggcatgcgcaagcaacccctactgatgttgatattaattttgtggcggctgcgaatgcagtgcctgctaatggaaattcgtctggttctaaaactgagttttggtcatcagacgtgggtgattttgggagcccgttttcgtggattgaggagtcttctgatgaggatttagattattttgctacgttggatgtggccgcggcggagtccttgtcgcagcctgaattgcgcgaagggtctgctcccccggctgggacgatagccgaagaccaccgccggcgaaaaatggtgtcgaagcacaatgttggtgagatatcacgaagtgggaggcgtcgacggatggggatggaacgatcccgtcttcaacaagatcggggcggccaacgagatttgctatcctcgatgtccgggacatgtattgggg

SEQ ID NO: 51582 - DNA, 473 bp, Zea Mays
atctggtaccccagtctagtgggtgccagaggcttgggggatccaagggtcgtgagggccctaggatttcatcctctatcttaaagggagccaaagggtgggaggggccaataggtcaagattgacagtccctagagaatgtgaaaaacaagaggcggtccctctaatgggagcgttttcctatagaccatgctagagacaatactcccctagttctgcctatggccaacatagtgtgcggactatattggagcaatgggacccctgttatcacccgcctttgagagcactgtcatggcgacaatcgtgtgagacaccatccccagtgataagggcatcaatggggccctaagtcaagggctaccatgcatgaggggaccacatgagcagagcaatcccttcaacgaagttccccactgcccctagatgtagctctagcacaagcctatgatgttgctaaagaggtctgccct

SEQ ID NO: 51583 - DNA, 348 bp, Zea Mays
caggtccttaaatttacaaactccatacaaaacttaatttcatcccgatatttatgaacctcgttgagactccctaaatcaatgttggttctaaatccatcgcgaaaaccatagtttggttccaaatttacaaaccgtttggtggttacccaaatgtttggagcaagcaggtgtaggttcgagtgctcgctttgcactattttttgcatggcatggtagcgcgaagggtgaagtcgtggtatcaccagctgcccacattaggttcttaatagattagtatagatagaagaaaaggtcatacaagagaggtacatgttagggacacctgcaattaatataaaataattg

SEQ ID NO: 51584 - DNA, 506 bp, Zea Mays
atgcaagccaggtggacatacactaacctgaggagcattggccacagcgaggtgcaccatagcggcactggtgaccgatctttggggaaatcagatgaactcaagctacggtgaacggtgggtggtggttaagggtgggctagacgcgtaatagaaaggcagagcgaggggaacactcagtttaaagatttcggtcaagcctattacaaattttggctgggatcgagctcgacggtgactaggatatttcaagggcttgtttcaccatgacgcatgatggattattggctcaagagcagtaactggttactcgcaacgactcacaatgatgtggtaacaccttcgagtacgtaatgcagccgcgaggaacgacaagcttcggcgttgacagctctgtcgattgtgcggggaagtgggtacaatggttaagccgaccagcgacccaatccaccccaccacaaaattttcaccgcagacgattatccactgtaatccaagcacaaatc

SEQ ID NO: 51585 - DNA, 448 bp, Zea Mays
cgcccgagggagcgtgcaggacgctgtagacgtggtggccaagcgcttccaacaagatctcactgatgatgagtagtcagatctgcgaagagaaagcaagggttccgctggaagcggcttatcatattttggttttgtaagatacatttaattattacttgtcaggcaacattacaacttatctacatgctactttcccttttctatgtgtgttgttgtcaacttcttccctggtacttggcccctctgggatgtggtctcgacttgtcgaggctggatgccagtatacttaaggaggagttggtcacctggcccccaagagggtattttgactgggacccggacctgcacacagccttagctagggagtttcagtagtgcacccatcggacccattaactggtatccttcatcctttgacttacgcaacatgacctgtaggatctag

SEQ ID NO: 51586 - DNA, 577 bp, Zea Mays
acggggctacgagggccccaggcaccatctttttggatatgccgacccatgaccttcatagcctagggctcagcacggtccgtcgtgcagcgccgtggcggaggtccacgcattcacacctagtctgataaaccatgagtgcaccacaggccgagaggtgtttgggccattaatgcaccatagtccggggggctcgtaggtcatgagggctatgcgacccaaggggtccgtaggtcatgaaaatggatccactcgagtggttccttccgccatgcctggctcccctgtcatgttccaccacgcccgaccctaggctcggtgatacggggttcaatcgagggcagtttctttcatggttgacgtatccacctcttccagctgaccatcgggccctagtgactagggtctcttccctcggtgcgcacactgatcgtcgggtctcaaggaccggggatcatttctccgtcatgaggcttcctctagactccacgtgcctcgccgaaccactacaaccgcccatcgaggactgggctatggcacaatacaagttcgacaatagtggcttctttcctttttt

SEQ ID NO: 51587 - DNA, 298 bp, Zea Mays
acgtcgtcttcagtcactcggcagttatctctaaaacgccgacgtcgtcttcagtcactcggcagttacctctaaaatgccgacgttgtcttcagtcactcggcagttatctctaaaacgccgacgtcgtctttagtcactcggcagttatctctaaaacgccgacgtcgtcataagtcactcggctgttacctctaagagcgccgacgtggtcatcagtcattccaatgctgatgtggcttcgtcatcattcggacactatctcagaagcgtaaatgttgacaataatgactcggcc

SEQ ID NO: 51588 - DNA, 709 bp, Zea Mays
cggtggtccgttgggtgaggattagacggtggagattcgacggtgtccaggtcgcaggatcataatctggcggtcggcggacgaaacagatctcgagtgcgttaggccattgatcgggctgtgtacggataagattagacggataggtaaggggctttcgaccgtggattggtgatcttacggctggaatccaattaaacgtaccgtttcgatgaaatgctaggaaccgctcgatttaaatctaatgtgtgggagtcaatcggctttggtaaaatcttgtacgttcatcacggatcctatggacctcatcgcataccggttcacttaatggctgggggtgatctgggccgttcatttctaatcggacggctatagactcgcgataccccttcgcggtgacgttttgttaaaaagaccctgagaaatataagaatcaacccaccatcccgtctggattgttcactgagtcttagaaattttatagtttaacccccattgttctctgtatttagtgttcggcccaaagaacaaagaaactaggtaaatacttatagaaattgattttcaatacgcaaatgaatccacgaacttggggaattcatatttaatccatcctggctccaagttaattcattccagtgacatttattttggaatattattgtctatcacttagtaccattgttttgacatgaaacttatattaaat

SEQ ID NO: 51589 - DNA, 628 bp, Zea Mays
aaggcctcaatatcctttggggagtgtcgtactctatggcccggattgccatctcgaataggtgggttggaaacaaacttgaaaaaggggctctgtggaggaagattctaggcagaatacgataagggagcaccggcattcgaaatcttgcctctcaacattaaatcaatttggctcaacacgtcttcttcaggaatccgtttgtttgttaattcaggtagggtcattgaccccagtatataggtaggcaaggtagactctatcctttagaggttggatattcttgaagacaaaatcagcaacaacagcttcagcagtcaagcctctatccttcaacgcacatatctcagcaagcagcactatggactccgcaagctctgaaatagtaggggtctctgtccagctgggcgttcagacgtcaggctgcctccccgatcgggaagggagggacttgttgtggttctctatggtaaaccactcgaggcaccatcccttaatacagtccttcaaagggatgtcaagatacttaactttcctgcctcggcgaagttccaggctagcaccgccaacaagctgatgttgtcctccagccatcccgggccgacagtggtagagatacttccaaagc

SEQ ID NO: 51590 - DNA, 721 bp, Zea Mays
gcggcccagattagatccacatataagtgaatcggtacgcgacacagaccgtcgatcacgggatcaacggtccgaaagtcatccaccccctaaatagccagcgccacacgatcctgatgccacgacacggattttatgatccgggaactaatagggaccgtactaatcacattgaacggaccagattgatccgaccgaagcggtacccccttctaatccccaccgtagaaacccagatcaacggtccacggtgatcgcctacctctagaccgcacaaacggcggtgatcgagcatggacgcggtggcgccatagtcagctccccccatgctaggccccaatgcccgaatccccgatttgacggacgctatacgtatagaggatgcttgcgaacccgagggaggtacacaccattgatggaaggcggagaggaaagctagctgcagcacatggcggtttgaccgcgaatatgaactccggcgagcaatcatcataactttagtccttcttttggctcaaggattccacgtacaggttctatgtgcccgaccgaatcaccattggcacccatcgaggcctagcatggtcgaggtctggagtttgtcgatcgcggatgtggctgggtccatggcggtgctcacagggatggatgcctcaacaccgatctcggggtgccgatgggatgggcaagagggtcgcggggtcctgcttttatagccttg

SEQ ID NO: 51591 - DNA, 791 bp, Zea Mays
aaacttggtcccttgggtggaaacccaaaagatcgagttctctggtgccggtcttgctgctgagctcggaggacttggaatttcctcttgaggtgacctttttcttcttcccttgccctttccacttgtatggctttgtttgagaggtgcgagaagctgaggaaatcttggctagctaggatggtcttgagttctagtctgagccccttcaaaaagcgggccatcttcttgacttcgatgctgacgtcatccggcgcgtagcgggccaattcggtgaatttgtgcacgtattcgctgaccgatcttccatcttgagttagttcccggaattcatcttccttaagctgaacgatcccttggggcacatggtgctctcggaaagcagtttcaaactctgtccaggtagcttctctgatggcagcgttgaaggtatcccaccaagctaaggccattctggaaagttgatgagcagccaattgaacatgctgattctccgggcatccgatggcttctaacttccttttaatcatgcacagccaatcatcagcatcgaggggattgctagatccagcgaatgtgggaggcttgagcctcagaaagtctcccatcatgtcttgtggtcctccaccattcgggcgttgattctccagacttctagtgaggacctcaatgagtcgggtttggttggctagaacttgggctaaatctaagggtagctctggaggtgcggggaggtgggtctcactcccttctccaccggcttctctttcagctcttaggggaaaccctgc

SEQ ID NO: 51592 - DNA, 544 bp, Zea Mays
caaacatagtgagttgtgatagccgggacaggctagcctcagcctgaactaattgaacggaccgagctggacaggcacatggtcacaaacacgcccatggtgtttgaaaggtgctgttacctggatcatatctatggatgaaaaaaagaatagacaaggtgtttcaaaggacacctcatatactgtcggtcagattgtctcggaaatacatgacgaatcgcatagatggaattttgccggcataaaacagcttccagagcctcttcctcgtcgctttgcagtttgcacgggcagcatgattatcgatatgagcctaaacctagctggtaccgataatggatcacattaagtcgaatttcagtcatattttagttggcaattcaaagaaacaaatgtgacaagcagcatgtgaaggtgccgtccattatctatgctaaactgtacatacgaacaacaactagcatggccgtcacatgaatgaaaaatgttaacagagttattagattatatccagaggttggtagagcgttcgttacaactagca

SEQ ID NO: 51593 - DNA, 443 bp, Zea Mays
tagacttaaaggactcaagattttaataatatgctagctcaagcgatttggatagggatactatcggattcgtgtaggattaggttatgtatgacaagccatggatgttgactcattaacaggggacagtagtgagagaccaaattaagattaggaaccaaaatgctatactggtgttgccgcctgtccagttggtctggtcattacttcagtttcttgctgcacgtataattgggcgattgaaatgagcattctagaatacactgaatctactacactgtcacatcaaacaagaagagctagtttcagcgtgtgggcaagagcaactcagaatagaaacagctactcaagactcaagactgtctgactgcccgtcctccaactctccaaggctccaagctatcggctagccctttgttgccacataactctcaataattccg

SEQ ID NO: 51594 - DNA, 485 bp, Zea Mays
ccgaaggttaggtccagcggactctgaacaagcttctcctttttctcatcaatcttaacataaaaccactcagttttgcaaccagttggccacttagtgtggtagctaaccaccggtgtcttcatgtctttgcggtaggaaaaattgtagcagccgaagttctcgtgcagtccatcttctctagccttcgtctgatagtgaagttcgtgcacccggtagaaggcttcggcaagaggctctactccttggcttcgaagagcccagatgaagacactgagcctaacgatagcgttaggagttagctgatgaagataaatcccgaaattctccaagacatccacaaccattccatgcaaaggaaacctcaatcctgctttgaaaaaacttctgtaaactatcacctaatcatcttctggcttcagaatagtttcttccccaccgaaacgaattagcttcttctcagcttccccgaagtagcctagctt

SEQ ID NO: 51595 - DNA, 951 bp, Zea Mays
atgaaacatatttttggacagccatattgtgcccagaagttcatgaatttctcgaaaaactaggatagtccaaagcttaatgagcttcttggatttagcttgtgcccaaacgctaccaacgctgcgaagacggacgcatctcacttatccgaagcatctgtgaagactgaagagagtttggcattatgcttgaatgtaaatgacatgaaatatcattataacaaaatcgcgaaagctaatttgtaaaactgctaatgttatctagcataaatcaagcaacaggcaaagcgtacatagaacagcggttatgtaagtcgatttcttaagcaaaaccaaattggcatcagaagggatgtcatgtattcatatcaccgcgggttgggctacaagtgcccatgaactgctcatagcccttgcgcaataatcccagcatcacttgccattggaaaggggtgtgaataaatcttatatctcaggaaaaaatgccaggtagaaacggcaaattaaatgctttttttgtagaaaactgaacaatcacaagactacaaagcaaatgaagtttcctcgcaaaagggtgcagatccaggaccgaaaactgctgccatcagaagggataatacatacatatgttgtgatctcatcgcattcggcaaacacaagccacgaattgctcaaagcccttgcgcaatattcccagcatcacttggcagcaggaaaaacacacacgtagatttggggctacaaggaaatgaacgaatgaagcaggcacgcccaaagactgggaggagagacgaggtacacggggacacggctgtgtctggcaagaagcaacaaatctcccatggttgctgccttgctgattggaggcggcggcggcgttccgggcacagcggtagggttaagggggtggcttaacgacgacgcgtgcgcgagtcatgggctaaatcgggc

SEQ ID NO: 51596 - DNA, 1455 bp, Zea Mays
aacaagttgatttgcataagaattagttagaggttgacacaacagagcattatatttgagactacggatccggataaaatagtcggacgtagatcgaggaatcgggctcggacaaagctcgaataactgtcaagagttcgaataaatgagtctggacgggagttgcgagacgagattgactttcgaatttgagtttgcttcaagaaacaaaaagttttaacaggctccaaatttggctgttcttgagatcgaataattccaaactcgatgaaactctcatgagtaacttgataaatggagataaatgcgataaagagagaaattttcactgagcgtccgagcttaggacaattctcccgatataatatgaagtagacacctcgagtgtcacacgaatcagccctgcagaccctcccctcgtctccgcactatatgggccttacccagcacctgaagcacttgaccttacctcatcgcccagaacaaaaagaaccctaatcgccaccaccggtgggagctcggagggaggagtcttggaacgcgttgccgcaccggggagttcttcgattgagacatgtctcaccgacaaccgtgtcggcagtgatcgctttggtgaggcgaagtcgggcgtagcgtctccacttggtgccgcgaccgggagcgaaaccaattggccgccgattcgagttaggcgtcgcgcatccttcgctcgtcgccgtcaggacgaattactacgtcctacacggtatgcttcctccctgttacattcaccgcatgcctagggacgttccgcaccgcgtattactgaatgggggcagcggtggggctatgaattcgtcgtcgtagttgcctcgtcgccgttcgaccgcattgtgtcgtggacagtagcgcgggatgactgaccatagaaattgagcgtaggatcgtgctcgctgagaactaccggatgggttggaaccgagagaggtcgcccttgcacccgattgccggatttcggcaggcgcactccatgggcggcggtggcatcgccgggaggttttgactggtgacggtgaagactctcgtgtgccattgattggattgttaatgaccaggattgtacgaggggcggtatgtgttctggattggcgtcgtccgtccaatcacaatcgggcgaacccaaggcgatcgcggtagcgttgaatccgagccatgggttgcggatcggaaggtcaggggcgcgtaccgattcagacaatggtggatctaatcctagcggccaagtgttgatcgtactgttggaatctagcgttaaccctttgtcgtgtctgttttgcatatgagcccctgcgctttccgtaaacaagcccgcagtccaccacgagatttaactaagtatgggaaattttgaaagattgcacctgaactcttctgtattattgtgcgtgggccagggtgctattaattagataaaag

SEQ ID NO: 51597 - DNA, 275 bp, Zea Mays
accatcgtgccctgatcggacggtgtacaacagacaggccctttcgttaaacattagccgttgatcctgatccaagggctgccagtccataccacgttaatgaagactcaatttgatctgcgccattgatcgctgatccaacggccagcgtgtgccgataccccttcaaccgtgcgcaaattattaaatagaccctctagtttctattattcaacccgccatccacgccagttcaaaattaattgcatataggtcctgtatttcgcagtttagac

SEQ ID NO: 51598 - DNA, 272 bp, Zea Mays
cagaatcagaattggagatagagccaaatctatcgtaccaagagtacccttccaaggttctagattgcaaagaaagatcaactcgggctaaatcgatcaagatgtataagatccaatggagtaatcactcagaggaagaggctacttgggagactgaggaatttctgcgttacaacttccccgattgcctacctaaggaaattggtacgtattcatgcccaacccctcctcctgcccttcgaatctaaatttcagtaatataatcttgaatt

SEQ ID NO: 51599 - DNA, 456 bp, Zea Mays
aatgtaataaaattaaaatttcaacctttctaacatccccatctcgtgccccttcaaaatcaacatttccaacaagcgtcatttgcaaatcagattgatgttccgcatcaatatttctgcttccatcctactcataagtcaattatagccaatgttacaaataacgtttaaatcatcaaaattgtttgcattatacagaaattgccattagttttgtgccatatattacctgttgcagtgtacgtactggcacatactcctcattatcacaatgtgacacatgttcccctttatcgtttccaacagcctcctcctcaccctggaacgtttaattattacaattggcaacaattaagttgtgaataaaacatagaataattgtataaataaacaacacctacatggttgccctccccagtacttgcaccaccagcatcaccacatcctatatctggc

SEQ ID NO: 51600 - DNA, 605 bp, Zea Mays
tgggttaaaacagattagtccgaattaacatcctcctttaacttaagcatgcttatctccttactgctaccgtagcacttacacttacccctctttcacagatggctccccccaccccgcagatggaggagacacccgcttcagctttgactacctttcccgagagggctttccctctatcttgtgggaggtgctctgctctgctgggtaccccacacccctctgtacacggtgcagctgtacgaggagtactgggtgccacgctgtagggtttggctaaccctgaagtctcaccccctgcagcctgggtggcgttcacttgattccgaaactgtcagatttagggcggacgacaccactgaggccgtggtgctgaaggctttgacaaccttctgcggatatcacccactcgagatgatgatgcacccacttggactcttccccactgagaagagggatgacccgatgtggtgtaacatagtgggcacgtcaaaggatgtgtgggccatgcattcccgaccaggttaggagaatcaccgtccagtgcatgagtgcactataccgcctgtaggccctgcaaagcgatgctttgacgcacctcacta

SEQ ID NO: 51601 - DNA, 347 bp, Zea Mays
tgggcactcctgcctgcgtgcgcgcccactccatcttcaccagtactgcttggaatttgggtatgctgagttcacacttcacagacagaactgcaggcgcgatgggcatgctgatattttagagctcctagccatcttgtttcttttgctgattctgagtaacaagttcctaattacaggattcacgttttctttcctttatttatatgaacaattagtctgatgcttgactactttctgttagataataatagccctggatgtatggttattttgagacacacaacatttttttgaggcattgtggttagaatatccgggcctttgattggataagatgtgttttg

SEQ ID NO: 51602 - DNA, 488 bp, Zea Mays
tgagatagaaacaaagaggttcatgatcatttgcactcaatcttttgcgctagtggcaaaaagctgccggacttggttttgttaatcccattgacaatcccaagtatgtaaaagaataggtaccaatctgacactggaaggttttcgaaagagtattcatcttttgaccaaacgcattgatggggtatatatttgatttgtgtagttgacttttagtctagtggagttagcaaaggagttcaggatggcttcgaggaagaagagatgctttaagcaagcctctaggaccattacggtgtcatcagcatattgaattatagggaaattgtagccacacctatgatgaatgggtagtctgagcaacccaagttcttttgcattgttgttgatgctttggagtaaatcaacacaaaaagaagaggcgagagtggatccccttgtttacacctcttttgtagtggaaaggattcctagggacaccattcaag

SEQ ID NO: 51603 - DNA, 651 bp, Zea Mays
tgagaactccgccaaagaaaggcacttatcccaattcttaccatagtgtaacacacaggctcgcaaaatgtcctcgagaatctaatttactctttctgtctgaccatctgtctgaggatggtacgctgagcttctaatcatagtggttccaagtgacttttggagttgctccctaaaacgtgccacaaacagtgctcctctatcagacacaatagtcctcagaatttcatgcaaacacactatttggtcaatatagatctctgcatatttctctatcttgtgggtggtatgtactagcaagaaatgagttgtcttggttaatctatccacaatgacccaaatagaatcatggtgtcgggaagtgttgggcaatcccacaataaaatccatgcaaatatcctcccatttccaagatggtatgggaaggggctgtaaggtacctgctaccttcaaatgactagccttgattctttggcaagtgtcgcattcagatacatacttagcaatttccctcttcattctggtccaccaatacaaggatatgagatcatgatacatcttgttactgctggggtgcatggaaaatttggaaagatgagcttcatccaatattttctgcctgagttttggattcttaggaacaaccagtcg

SEQ ID NO: 51604 - DNA, 598 bp, Zea Mays
aaaaagcctaaatttgctatctgaaaatataagaaacttgaaagcagatgcatccatgcgggtgagaaaaggcaatgacaggaaatataaggacaacgatgtgcatcaccctgggtagatgagagaaagcgttgtatgcaggggctaggtctggtcccatggatttcgaggtcggggcgatttggtgtgctgttgttgatcccttcgttgaagacacgacgtcatccattgtccagtattttgcatctacttgcaccggtgtcaccaccatcgccgttgcaacctgtgacatggccaagcggatcagagggtagcaattcatacaaggaggggagagatttagaggatgccaccaacctgcttcatgtgtggacacatgattcgacaatgataaaaccctagatgcatgatgggcttgatatggctatgcacgtggagtgagggggaccgccacaatccacctccacaacatcgtgcacgcatcatctgtggtgaaaattgaagagatttgtggccggaggacggaggggtcagggaggcatgggaggaagtgaggccggaggacatcatcatcggggagatcgagtgggcgtaggcc

SEQ ID NO: 51605 - DNA, 274 bp, Zea Mays
gggaagaaataggcatggatttcgtgatcgggctgccccgaacccaaaagggcaacgattctatctaggtcataattgaccgtcttaccaaagtacctcactttataccagtaaagactaccttcgtaggagccaccctcgcccggatatacctcaaagaaatagtcagacttcatggcattccgcgaagaatagtatcagacagaggaacacagttcacctcaaagttttggttgagtcttcagcaagctatgggcaccaagttagatttcag

SEQ ID NO: 51606 - DNA, 495 bp, Zea Mays
accatgctaccatttgcaaaatgaggtactttttgtcctgatttgaagacggtgattggcttctacactggttagcacatggcggagattgtgttagatttgtttttttttttaaaaaaaagatgctacgtagtcatactatttattgcccacgagacgagaggagacgatgcagcgtccactgaactggcgggtttgactagaaacggcacaaaacaaagcgacgggcaacgggccacatggtcttcctcttcccttgcattccatcctcacactcgcttctctgaaccagtgaggcagtgaccccctcatgctcgagatcgttgttgcctccagctacaaggaaggcaagatgcgcaccagcacagtacacagtgactactccccccacccacatgcagcttcgagatctggtagctcagccagatctcctatgctatgctagtacgtgctagcatccaaaaacatgtaacagacgcatcttttccatttcac

SEQ ID NO: 51607 - DNA, 421 bp, Zea Mays
gttagttcgtgagaccatgccgatggcaatggcgccgccgcggcgcgccgggggccgggttctgcgctcgatttcggctggaattggatggagtaaagagttcagtgagtcgttaacttcgcgtggaccgattgaattggggtatggcgctctggagggccgaattcgctatctccggcaaacccgccgccgtgaggtgacctgcgcgccgtgaatcaacgccgaaggatggtgacggtcttctgaccatagattgaagaggggaggcgcagattagatattaggatagcgtttcgcccgagtagtggggtccgttcgataccgatctcgcgtatgtgggtcgatcgcgatattcttaatggtctgggccgttgacctggcatcctacgcctgcgggtgagtgcaggaggtattgatggac

SEQ ID NO: 51608 - DNA, 630 bp, Zea Mays
tgtggggtgcagataactcttaagggtaagaaatattgcgttgtgggtgaactcaggccactgtttctctctggccaccgtacctgccttagtcacggccgcttcggataaactcaccagagttagccacctcgcgaccttgtgtcacgtgctttggtgctttaaccacgtcgccgtgagtcaccttatcccactcgttcatcgccggtgagcttgccacggtaaacgccaccaattgcttgcgccagtgcacccttttctctccggccgccaccgtgccatctctaattcacggaccaccgctcaagggtcctataaattgagtgtgatgtcggctccgctaggtagtcaagcacctaatccatcaacctgtgcctcaaatcatccaccagagctcgccaattcgagatttcccccaaatcggtcccgagcaccgcgcgaagtgacctcgccgtggctagcgtgctacaggtccattcatgccctctgctctcccgttttagtacccttatgttctcctgatgctcctcgacccgttcaattaagctagaccgcgctagatcatcgtaaacgcctctgttcatccgtagttcgcgctgtcaccgtggacagtgtgattaagagctcaga

SEQ ID NO: 51609 - DNA, 900 bp, Zea Mays
attggagtttaaataaatccaatgtttctcttctagatcgctttacagttttatgaaagatgggggagttaaaaataatgtatataaaacatttcgaagtgtagggtgcctataaagattaagatcttattatgacaattatacaacaggaagcttccatctgccatggagcttaaaaaagagggtggaaagggagtactaagtgtgtcttatgtcagaatcacgagaataaagaccatattttctttagttgctctttggcaaagtttctttaaggctgttggaagttgatgtttgactgggaaaagattcctttaattgctgaagatctgttttataaccatgggataatcaaggtaccaacataaaaatgtgtttatttattctgtgggacatgtcatggggcatttggagaaacagaaataagatagcaattgagaaggtttttcctaatggtctcacagttattatgtttgatgctattgggtacttgtagaaatagggaattgtgttgaggtcaaaggatgcatttattttggaggagatgctgaagcacatgaaggggtggctgcagaaatatcaactgaggcatgagtcaacatcggacattggcgtcatctgattttctggggttgttttctgtcagtcctgagcttgggttttagccagtttggaaatatgggttattgttgctgtctgctggagctgcttatgttcatcttgaaggagatgtccctgtttgtagtctggaagatgggtgttagagtggagtttgttttgtttttgtgcctgttgttgggcccatggagctgtgtgcaatgtgtgttggttcctattctgtagtgtttagttcatgtttgttttctggtggttctgattgtaactcagggaatcaactaa

SEQ ID NO: 51610 - DNA, 862 bp, Zea Mays
ataaaaataaagagctaaaacgactaatattttaggattgatggagtatattattttgctttttcgtgtataggtttgctatgcgtataagtacaaactatgtgaagaaacttacaaatctacgcgcggctagcatttgctactagctagtagatcacatgtttttgtagcgctatagtttcttacatagtcccgatttgacctgtaacagaattataaatcagactcttgggttgctgaggacccatcagcaggtggtttgcttcgtactcaaactacggcatcagtaacataattgcgacaataacattggagcacgcaatatgaatatatggaatacgactcttccaacttccagctagatcactgtgtaacgaatcgatcgaaacgtatgcgctgtgctactactcgcgtcaagctcactaatcattccacgtttttagcacgatccgaggtaacaggacataggctaaaggctacgacgcctcatctatacaactataccgtctctcggcgcctctcgttcaaggacaaatgcctcgatttaaggcatgcatgtttcttcgagattatataatctaatttatttaagttaaattatataatctagatagattatagtcttaaacaaacatgcacttaatctactggttttcgcgtggaacaaaaaacatctatccctatcgttgggaacgtgttctttaaacgtgatgtacccgagctaacgctaaaggtccatgcatttggaagacatatcgtattatattgtggttggcagtgaacatcgtccgtttgcacggccgcggttttaggatggttattggacaactaaccacgcacaatagtacacagtgcagttaaa

SEQ ID NO: 51611 - DNA, 434 bp, Zea Mays
gataggtcatcagcccacacacctcacctcttaggcacgcaaccaccaaacttacccacacaacacacaggcaaaccccacacacacacccacactcaatgccctgctagggcgaaagccgacaaaatggaaaggcccttggccccagcgatacaccacagattgaggtcgtcgtcgaccaaacctaatatgcaagacgtagttagtgtcatgtcttctaaggatattggggactccctctagaagaaattcgccttattcatgaaggcgtgcatgatgcaaattcatgtggaccttgctacatcaaataaatgagatatgtaagccgctgacttctttcgcaagatcacgtggctccccaccgagctcgtcgccgatgacacccctctctatgccaggaccggctcatggttttggaaggccctaggctgatc

SEQ ID NO: 51612 - DNA, 647 bp, Zea Mays
cttggattggtgcccctcgtgtcgggcccaactatgctcgggccgggcagggccggcccggcacagcacgttggacatgtatatgcgtgtgtgttatctctcaatagtgtaattatttgttgcccaacttgcaacactgctgctatgggtgtcaatgtgtcataaacttttaggggtgagatcgaagccaacttgttttcttggcttcaatccgtatcagtttttattacttttaggttgcctccaacaggcgccagctaaaaggagcaggcatttagcatgttggctgaagtaggtacttcaactggtcatctataatacaacactttccaatggtatagcaaaaatagcttgcctcatgctcacttacaagaatgggccaccaatttacatcagagatgtctgctcggttcctgtccagctataatagcttttctctcacctggtatgtaatttggctgctctgtttagctactctgttggatggaagatgtatagtgctacagtgaatatgagtagctataatagctttgcatacccttttagctgctccattggaggcagccttacagctctagcaattcaaacagtcggatttaattcgaaacgaacaaccattgtattattaccaaattaagtcaaaacta

SEQ ID NO: 51613 - DNA, 384 bp, Zea Mays
gatttgttcccctgacagtgctttgtcttttgtgtgtggacgtcgcgcggttttaggctagggacagagagttgtagcgtcaccaaggtgccagtgtcagattgcccggtcccaaggtcaaacggtgccaaaaccatgccaaattaattttgtttgagttcaaatttttgtagagtgtgttcaaggaaattcggcaccactttgatatttggactttatggttttgagttttggaaaatagggaacgcatttgatcttgaaaaagggttctgaaattcagaattctgaatttccccataggaccttggttcaagagctgatttggggattttggaaaaaccaaatggccaaactttctgactatattttgttggtcatttagtg

SEQ ID NO: 51614 - DNA, 867 bp, Zea Mays
tttttattaaattctatggaaaataagaaatctaggtaagttggtttcacaattttaggatttttcaacaattttctacatatttctaaagttctataaaaaagaaaaagaaaaagcttcaacagtactaggctgattccagcccaggcggcccaagaacagcagaagcgcacgcgcgctcgcgtccgcgctgactgctttgcgaaaaggccctcggtttattggctaactcgaagtgggttcaatcactgttttctggagttactgacaatttacacaggagtcccccaagttctatttcttcaccgcccgtggtccccgacggtgcacggcgcggcagagctccggcgagcgcgtagaccggccgaacagggcaacggctggcgctcagcttcgacctaaaccaaattcattacctaacaaacgtttcccctaatttaattgtgcaaatggtggcctattctatcctgcccacgagaaccgcgaaggccatgagcatttgatcgcgttcccgatgattggtggtctctcagttcgaattggtgactcggtaagcatcacagagctatgagagtgctcaaacgaggaagcaggggacagggactgaccggaaaggggctggccgcggtgaagctattcttcgcggtggcggcgacaaatttgggggaagtttgaaattccagagctcgggtgaactattacgggtgggagtgggtgctaaggcttcacgatgacatagcgcagctgccccgaccatcaatttatagagggcttcgacggtggcgctcaatttggccgggcagagctggcggccggagatagagaagaatcatggcgcagtgggttcgtgtcctcagtcgtggcgag

SEQ ID NO: 51615 - DNA, 487 bp, Zea Mays
atcaccaaccgcgacccccttctcccttacctctctcctctccgctccccgcagggttcgtcttcgacttaccatcctccttctccctcgctcacgactcccctcttcctggaattctgatcaataactccgcggatgctgttgatttcttgatttcccctgattcagtaatcgcggatggaaggtccacaacgatccactcctcggcgtgatccactcccccagtagaggcagttctcctcctcggcgcgcagagcggcgtgatccactccctcacccatctgctctccatggaattctcgtgtcgcgttctcctcctcgccgcgatccacggtcgtgctagacgcgcttcttccatagacgtctgtggcgctctgctcccctcccaggatggcgctcacattccatcgacgggcctcaccttccatcgacgggcctcaccttccatcgacgtcgaggaagttcctgttcctgcatcgcgtggcgc

SEQ ID NO: 51616 - DNA, 560 bp, Zea Mays
ggaaaatatactcgtaactcttcttctctttcccaagtagcttcatcttctccatggtgacttcattgcactttgcacattttgatcactttactccttgtgacacgagttagtgtattaagaatcttgataggatactcagcataagtcagatcatcttgaacactaagatcctccattagtagctgctcttcaggtaccctgagacacttcttcatttgagatacatggaagaaatcatgtacatccgcaagatgatcgggtagttctagttgataggcagcttctcccactcgctttagcattaagaagggtccaataaagcgatgggatagctttccttttactttaaatcttcgcataccccggatcggtgacaccttcagatacatgtgatcaacctccttaaactctaatagtcttctccaggtatccgcataacttttctgccttgactgcacagttctcaaattctcccttatcattcgcacttgttcttctacctcttgtataatttcaggcccaaagaactgcctttcaccagtttgatcccaatacag

SEQ ID NO: 51617 - DNA, 374 bp, Zea Mays
gcatatccagcctctcgctgtcctcaaagattagagttcggatcgtctgcgcaagcgaggacgaagccgatctctggaatccacgttaaccccccggcccccgaacctatccggcagccccggcaggagcaccaagttctcggggaatcgctcaccgggacgacgggccgtgtgcgtgttacgctcacgctccacaaagcaactggcgccgaaagattcttccggccggctgcatgcatttcctcggacgcaacgaccgcgatggtggatgccacgaggatgcagaggtgtgggagtggagacgcctagtgggatctccgattccggccactagcgcatcacatgacatgacatgctgcggacaaatgcgacga

SEQ ID NO: 51618 - DNA, 691 bp, Zea Mays
ctgaattcctgcttcacatgacccatacacgtgcatgtcaggttgggacttgggagacgatgcttccgtccctgctggtctggatgataaggccaccggcgacgacgtacggtatggctgccgtccgatacccaccgccagctgcgtctatacgtgtagccccccagaggttaccatttgcatgcatgcaaggatgatggtgaccggcgccggtacggtactttgtcgctgtggtttgggaagggaaaaatagccgtctatacgtgtagtatctcaatttgttttgttgctcatcatctataatctataacctattctataatctatctataacactatataaagcaccagttcaaattaatctagatccatacatcaaatgatcctcgctgagatgtattttcttcgtacatccaattttgtacaaacaagaaatcatcttccatcacattaaaccgacaaaatctctcccccctcatttctctctctctcactcatatctaatggtcgccacaaacatccggatcatctctcacgcccctctccacaatagaaaaacaacaaagatccaacggccttgccaacggctttgtggaaaaccaccgacagttatattatatccgacggtatctagcagccgtcgaaagtaacacacttatgtcagccgtaagatataagccttatgtccgac

SEQ ID NO: 51619 - DNA, 377 bp, Zea Mays
aaaaacctaaggataagaaagcttgcaaaccaaagtaccctaattgaaccttaccagtggtgcatttcggtaccactggttgatgaaaacactgtcaggtctcgctaggtagggggtttgtgtgtcacggtgttctaaaatccttcatggtttgactcgagcttgagcgtgatggtgatgatggatatcacttcgataccgcttcaccagcttagatcggcatcatcaccaagtttgagctctgtttgctagctagtttccactagcttagttgcctcctctacctccacaacaatgggccaaagcacccaccctcaaggatcggagcatgtgactccttcccgtcacaccatgctgcatctgctaggtgcgcccga

SEQ ID NO: 51620 - DNA, 556 bp, Zea Mays
aaaatttatacccccaaattcagggcgttacaacgggccacgggtcgcggggagaaaggacagtgatcttctccgccatcaaaacgaaggaagaggcgagaggaagacgaaaggctttttgggaagaaggcgagaacgtcgttcgaaggcaaaggactaaaacaacaaaggtaacggttcgaagcccccctctcggtcagctttatataggtaaggatggagccaccgaagtgtgaatcgaaaacagccagacgacggtcgtttcaaatcccgcacgcacacgtgccacaaacggtcggctgaccggcaatatgccccatcgcattaaatgactgtgtccctttcgaggaaaaacgcgccgagcaccgttccgcatttcgcctcaaaaggtacgccctctaccctcgactactctaccttttatactctcggcaatcgaactggaaagaagcgtcttctgcctcgggcaacccctctcgaaaagggaccagcgaatcggaaaaaagtcattttctgcctcgacatgtcactctgggagggaaaaaaggcaaggaaa

SEQ ID NO: 51621 - DNA, 384 bp, Zea Mays
ggcggcgaacgcacactttgtgcgcttgacgaagaggtggtggcgacgcagctcgtcgagcacggcgcggaggtgatgaaggtgatccgcccatgtcttgcaggaactcgtacagcccgtcatgagtacggaatgccgtcttgtggacgtcttccggccgcatgagtacttggtggtacccggagcgcagatctagcttagagaagtaccgcgcaccatggagctcgtctagcaactcatcaaccacaggaatggggaaggcatcctttaccgtgagcgcgttgagggcgcggtagtagacacagaaacgccaggacccgtcggccttcttgacgaggaggaccggcgaagagaatggcgagtcgctgcagcgaacgatcccat

SEQ ID NO: 51622 - DNA, 504 bp, Zea Mays
caccattgacggattttccggagcacgtcagcgcctctttggcgcttcgccctcgcctctcccgctcgctctaactgatgccaccctcatgccgagcccaaacattaacatcgggagcatcctcatggtcgatctccttcggtcgtcgtctccgccaactgaaccttccatcatcttcgtcgagtagcgcggtggcgtgcgcattcgttcgtcgggcttggagctcgacggagcaccaccgtagacgtcgcgccatctgagctgtcacgtgagtgcgcgagcagagccctcccgtccacccctcggcgagccacgggcgtcaccaagtttgcctctacccactgcaactcgccgcggcttcacccccgtcgagttgccaccagtaagccattggcctcatcccgctcgtctcactctttgttgacttggttagaagaagggccaaagggagaagaaataggaatagaaggggggttttgcaatgcgtcatagactcggttgaat

SEQ ID NO: 51623 - DNA, 451 bp, Zea Mays
ctactgcagataatacccgctttctgcgtgagatggcgggtaatcagttccaacaacatggtaggagagatcctccacaaggaccacgcgaaacctcgtacatggaattctctaagacgcgtcccccactctttgttaaagctgaagaccctcttgaagctgatgagtggataagggtaatggagcagaagttcggattaatccgttgcactgaaacacagaagtcgttgttcgctgctcaacaactgagaggccctgctagtacctggtggggaaattttgtgacaatttaaccagccggacatcaggtcacttgggatgaatttaagctcgcattccttgaacactacattccggagggagtgctttacatgaaacaagaggagtttatccgactcaagcaagggggagatactgtcatgcagtatcttaacaagtttaaccatttatc

SEQ ID NO: 51624 - DNA, 639 bp, Zea Mays
gcaacgggggccacggccccaccttgatttttataaactcttatacatagacttagatatataataaaataaataaacttttatatacacttagatatataataaaataaataaacttttatatagtaggttggactacatttaatgaaaactagactttgatctaactttttctcggtgcttcactactcagcccactccctacccgagtcgtggtgctcatggccacatcgggatcctgcacgcagtacagctactttgacttctaatccgcaccgacagatgtgtaggctattagtgagattctaccttggcatcacagcaccaccccgccctggctatctcacaagggtcctgttgcgccgtcacaacgttaacgcgacaatggctatcgcttgctgccaccgcctttcgcctcgtcgtcgccatctactgtcgcatcgtcgtctgtcctcgctaccccacgcctattgtcgcctcaccgtcgtcattttgcggtggagtcgctgactctccacaccgacgtgttgatgcgcccgcttcgccctaacgtccagtccccgtcagtccacccttttgttctctccaactctcctttagggtggccaaaatgaagtttcaatattcatgttgttttag

SEQ ID NO: 51625 - DNA, 361 bp, Zea Mays
tagcgacaagctatccaattgagatcgactgcaaccgatggcaaaccatccaactatgttcgcttagggacggtcgatattcacatcgcattcacaatctcaatgtatcttaatgaaatgtatatgtgcctagttagttgatattttagataaaaaacaatgcaccaccaattattaactctatatttagatgaaccaaagctaaaaattaacctgctctatgcatgtatccgagtacgtccataggctagtagaacatgcatataggaatggcgtacgttgatcaacgcaacggaggcgcagctacaacaattgatttgcatacgtttcatcacgtttttctataaatcctagcttaaac

SEQ ID NO: 51626 - DNA, 569 bp, Zea Mays
actcttcatacttgaagtgattgtcctttggaacaattcactctaagtacgaagtttgtcatacgtaactcgtaagattattagtaagtgtacatgaagatcgcatgcaaggttgtgacaaagctagacaagataactcatcttaaatgacttgagacttcctttctccatacgagataaatttacaatagtacctttggcttttttacaagagagaaactcgaaggtacttcgaagaaaggattacacagagtcgttcttcctagctccaaaaaggcactttatgcagggcactcactgttcatctatttatggtgcaaaggtacaacttcgtgtgaagttacaaacatgtccattaaacctatacatgcagtctacaagcaatgtaagggcaatatcgtcttttgcctttattgttttggctggagtcttgtaaacaccttctctcggccttgttttgcttctaccttcattttcttgtgtagttatgacgaagctaacatcttcatcttccttcctccctactgtacttcgaaggtattcaacacagaacgaccttagcatcgaag

SEQ ID NO: 51627 - DNA, 817 bp, Zea Mays
catggctcagcttagtgacaagggagttaagattatcaaagaaaagcttccacaaaaggtgaagaaatataagtgtttctgctaggacaacaagggaatcttatggtttgaagatcgacttgttattccaaagggtccgactccaaaaacagatcttggatggggcacacctatcaaaattttcaatgtatccggggagcaacaagatgtatcataacttgagatcactgtattggtggactaggaagaaatgggaaattgacaaatatgttttagaatgtgatacctgccagtgtatcaaagcaagtcactagaaggtagctggtaccctgcaaccactccctataccattctagaaatgggaggatataagcatggatttcattgtcggtttacccaatacttcctagcaccatgaatctataagggttattgtggataggttaaccaagaccactcatttcctaccagtgcatacaacctatagggcaaaaaaatatacagagttgtacatcgatcgtgtaatttgtttgcatggagtacctaaaatcattatctcagacagaggagcctagtttgtggcacgcttttgggagcaactataggaagcactgggtaccactttacttagaagctcagcttaccatccacagaccgatgggcagacagaaagagtgaatcagatccttgaaaacatgttaagggctcgtgtgatacactatggtaaaaattggggtaattgtctttctgtggaagaattctcctacaacaatagctatcagactagcttgaaaatggcaccttttgaagccttgta

SEQ ID NO: 51628 - DNA, 527 bp, Zea Mays
aagcacacttgttgtaacatgtctcaaagcaatactacgatcatcactacattggactagggcgcgagcctgaaccaatataaaccctctgtctcaacaccacgtttgagtgtctatgattcactattcagatgagtccgcgctagcatccccaccgaacacaaaacttattgtccccggtttccaaaacaacgacgtgaggtatgttggtcattccctttatgactcgtacgtaagcaaggaattcatcgctcgttggtgtctcgtcgcgcagaactattgttcggttggtttagtgatacatgaacttcgtgaaatagtgctcttggagcggcaatcccgcattcactagaaaacaaagcgtggcaacgccgcgccaccgtgtaactagtaaaatatttttgtgtagaaaaaagattagcgttggacataggagtgctctttgagtgatgaatgagtggtacacacatgctaccttagtagctcatttgcaaaatattaacaaaagttactatttgttggtcact

SEQ ID NO: 51629 - DNA, 581 bp, Zea Mays
ccgatcgcacttcgagcgcccaaattaggccatcgcgttataaaacagataatacgccccgaccgtccgatccggaatcaacggatggatgtcgatcgtgcactgatctaatctaaaccgcccgccacggatcctacggacacggtctaattgcccaaatgttatcctatcccctagtctcgatcgtcagcgccggatccaacagttcagattgaatgcgatgaaggggtacgcggatttgatccgaaccgttcaacgtttactcaacgctcgggatttgttcgcctccaccgaccggactccggcggtgaggtgaagctccccacggtggcgccatttccgcccacgaccaaactacatcctagcacactattctaaaatctaaatggtgcactacgtagacgagggggtagcgaacatggtaaaagggtctttaccgaaggttggagtgccgaggagggttcgccacggagcaccgacggatcgcagagctcttccgactccggcgagcaattcgctgatgttcagtcgatgatcccgccctttagtgccaccgaagattccctgatggtttgcgcaag

SEQ ID NO: 51630 - DNA, 421 bp, Zea Mays
aaaaagtccgaagacgcaagggggcaggcacaattaatgaatcaaactcatcagcctagcccaagcatcgcagatggtccggcacctacatgcgaacggtccggtgctcagataaacggtccagctaactcagccggacagtccacctatgaccaaaggcgtcagcctctacacgacgcaaggaaaaagacacaaggtcaaagcacatatagtcggctgatcaaagttgaccctacttttgatcagttgctctccaaaaatgctagcaaaaagactgttctacgtgatcggtcaacaaagaaacctcggtcacctgctaaaacgaaacggacgaacaaaacagcccaaaaggtgacgcgacaagcatcacatgttcatcctatgagaccagggtactttccacccgtttatttatcgtcgg

SEQ ID NO: 51631 - DNA, 509 bp, Zea Mays
gctcttcgtcagttcgacactcagggtacagcagctgatgatgatgatgattttggggttcctcctccgcctccgcctcctatgcctccacgctcacatgatcatgaggctgggagttctagtgctgcccctgctgccccttcggctatggaccctgctcttgcttcgattctccagtctatcactcagcaacaggctcatctggcagccgagcaggcccggttatccgagaggatgctctcgatgtttcagaacatgcaggacaggcaggatgcgcttcaacagcagctacaccaggatcgggctgagagtagggcattcatggctcttatgctacagtagtctggtgtctcagttcctccggttcagtctgctccacctcctccgcttcacgctccagttgtgccctcgattctgtctggaccccctgttccttctgttggtccttctccgctccggccggtcactttggcgttcacatcctaggttctcagctctgtctgccctca

SEQ ID NO: 51632 - DNA, 569 bp, Zea Mays
caagctcctcctgcacattgtggagttggttctccaggacatcaatggtgttgtcccagatctccacctgctgctctagggtggcaacacgctggctcaactgttccacctataggtcattctccaccaactctaaagacaagttaaccttgaagtcctcccggctgtcaagggtgagcttagtggtctgaacgaggttagcaaggtgtgccatggcgtcgctttgcagggcctaaaggtggtacagtgcgctcatgcactaaacagtgatcctctcaacttggtcaggatacatagcccatacatccttcacatggctcacatggttgcaccacatggggtcatccctcttctcagcggggaagagtcccagtgggtgcattaccatctccaagggatggtagccgcagaaagtagacagagtcttcagagctgccgcctcggtggtgtcgtccgacctgaaccctatagtctcggagtcaagggaacgctaaccaggctgtagggggtgagcctccagagtcatccagacatggcaacgtggcactcgatgctcctcgtacaactgc

SEQ ID NO: 51633 - DNA, 653 bp, Zea Mays
cattgatgccatgtgtaggagaggggatgtcaccacctggtatgggaaagatgatgttgctaccaccgatgtggggaagaaagtcaccgctgccactagttgtaaaggaaaggatgtcgtcgccatgtgtaggagtgaggatgttaccggtaggtgccggaacgcgatgttgttgtcactgatgtggggaaggaagttgtcgttgccacttggtgtagggggggcgccgccgccgtgtataaaagggaggatgttgtcgcctgatgcagaaaaggtgatgtcgttgtcgctgatgtagaggaaggaagccatcaccgccggtaaggggaggtggcaccacaccaaatccgccttgcactaggaaggccgccgccaccgctactatgtgatctaggtgggaggagaggagagttaaaatggggaaatgatataagctagggttaggggtatttatttatgcgaggtgttaggctaggggtatttactcacgtgagctattttttatgctatgaggtgtcatcacagtgtacacacttatggttttggtatatctttttacaattgtgggatggcagaccgacatggaaaatttaggatttggtaggtctttagggttgtgggggcagatcgaaggccgcgaggttgcggatagt

SEQ ID NO: 51634 - DNA, 303 bp, Zea Mays
cccaaggggatacaccagttgagggcccactccagagaatgggcgtgagggccccagtcgggaccctaggatctgcagctgcttgaacgcagcgtggctgatgacgttgagcccagccccaccatcaatcagcacatgatgcagcttcatgttggcgatgacaagggcggtgatgagtggtagtataccagcccctgccatgttttcggggtagtcggatgccccgaaggagatagtggtgctccgccaccgctgatgtggggctgccttcgggacccctggagtcgtcgaaaggacctcgcg

SEQ ID NO: 51635 - DNA, 418 bp, Zea Mays
ataaagaggaaagtggaaataaaaggttgcccaactaaatgactaactttattaataactacaccaagttgtaggggatacccacaccttggtgacaatcattacaaagacccaaatccatcataagttcatcacgaaaagcataaaaacacatgataagcaaactaaaactaactaggactgaccaagactaagacactaatttaaacatttattacagactctgactctattaatctagggctccaagtctattttgatcctgcagtaatgggtgccataagcatgatgaccatggggcggcgagcggtaagggtgttgagtcccgaccggggtaggggaaccatcctcctgatggcggcgctccgcgcgcttagcacgcatttcctcaatctctgcccgagccttgcccaactcg

SEQ ID NO: 51636 - DNA, 360 bp, Zea Mays
gttagactctagatgtctgatagatgcaaaatgtatgttcgtactgacttgactgcaaaaaaaattgaatgctttgaaatcaaactgagtttcgtcatcgacagttaatgattttgggactctgaagcgacaaataatgttttgccaatagaattttttgaattataaagttattgtggccaatcctttagcttcaatccatttggagaactattccactgctcatacaacatatttcaaatttccttgtgctggtggcagtggaccaattatatccatacccccatctttgtaatggccacgtcggttgaattaattgtgtcgatgatgaaggttgcttctgggcccttgcacatcttt

SEQ ID NO: 51637 - DNA, 824 bp, Zea Mays
ctcaacccctcagctgctgtacctaattcccttttcttgatggccgcgcccggagccttgtcccgtgaggggccctcgttggccgttgacatcgtctatttcccccgacggacagcaacatcggcatagtcatcccccgggtagccagcatacaacaaacggttcaactcaaaaacaaggttcaaactaacatttgaaccgcgaatgtcccaactcctcagagtctccatcttcggcacgtattttcctaaagttttttcggcctcgtcctccactccacgcacaaacgcggccatgttgcgaccgcgtaaatccaccatgaaggctggacttcacaccagctaaccgccaagggtaggcatccggcgaggggttacttcgcccaatacccagccatgtgccaagggccacaccccataggcaataaactccaccaagtcacgcctgctactaaggtgggcagcatgtcgaagggccccttcatcttcgtcttcctccgccacctcgaatcaagggaacaccacataacagtgtgagcatagaatggctggaggcagactcggcaaaccttcgacatcaccaggagccacatagaaccaaaaatcccaccatttaccccacttattcctagcgtaggggactatctccacaacctcagtcgaagtcttcccagtcctcgatgtgaaggtgcacgatccaaattaggctatcttattccctatcttcctcttttgctaatgcaggcaataatttttggcaaagacctccacagacggctgcccgccgtaggaagtactgcccagacatacttcgcaagcgccacc

SEQ ID NO: 51638 - DNA, 513 bp, Zea Mays
gaacattttgtccagccctaagtgatatcgtcctatcgtactatccatttttaatcgagagaattgcctaatgtttccatcaaccgatgcaacgaaaatgcacgagttttgcattagctcagaagcagaaacaaaggaaactacctggaagaaccaggtgcgccctagcctttactactccgggcctgcacgggaattaattaagaaacacgaccaaaaagtatggctgccagcccgattattcttcatttgtttgcgtagacaagtgattccatcggggccacgcgcccttgtgatatggagtgtccagtaatgttttcttctttctcacgttattatgtagccagctatataaatcttcaatcggtagtgttttgttggcgaggtgtttccgactcaggaaaattacataaaaaaattaaaaacaaagtgtaaacagttttctacattaaagtcggggaagacggggccggagaaggcgccgccgccagtagccgtcacatggaatccttg

SEQ ID NO: 51639 - DNA, 451 bp, Zea Mays
gtacagaaccctttaaggcatgtttggaaacaagagtattggaggggattgagggggctataatcccttgttatttaattttgaataacaagggattataacccttttgatccccctcaatactctttcttccaaacaagcccttagagcttattgttggagtcggtcttacaacagaagggggttatacccccaagggattcaagtgacaacaaggtgagaattaactcaatctctctataatgaaaacaccttagggctggcagccatggaggggatccgtcatagagaagtcccttgatatcccctctatattcttgatcactgtcagggacgtgactgattgactgagctcgatggaagcaggaggttgtgattcattgtaattcatttgtgtgattgggccctatgatggccatattagcagtgggctgtattggcctagtattgt

SEQ ID NO: 51640 - DNA, 605 bp, Zea Mays
cagaattaggctgttttattgatgatgaattgaatacatgtatcatcagcttccctgtcctgaaccttattgcatttggtaggttctgaaacaatgtctgaactggcactttttagatgtaaaataatagatctgcttcctgatgtagtgctaagtgactatatttataccgcagcgaagaatatgtttaattttcgggttttctctaactccattgcattttataattgtggcatcttttaaacatccattaggatcagcagtcccttaatgtacaaatataatagaaaaatgatggttaatgatagagtgtacttaacatcagttagatttagtatttcccataaatccttgatttaatcttcttaaggacaggtctaggaccgagtcaccagcgcatccacagagtgaaggcttgccttggtttctctcttgtccaattcccactcatgtaggacagtaggagcctttggcacactgggtgtacttttgatttaagctttacaaatgacctaaagtatttgcaaatttgtaagtcctaactgatgttttggctagtgtaaaagctatttatgttggttgttttaatcctgtttgtgcctgtg

SEQ ID NO: 51641 - DNA, 638 bp, Zea Mays
caaatgtaaacggtgaaggggtatcgcgtcacgtcagccacccgatcaaaatctggtggcccagattacattgcccattaagtgaaccggtacgcgctgctggcctttgggtcctgaatcaacggccgatcgaccccacgccatacttcatcgccgattcgttcgatcggaatccaactgtccggataaaaacctacaacggatatgttgtgctctaatctgagtcgttcaacccgatccaacggccagcggcccttcttcatcaacccgatcccaggaatgacagcgccgtcttctccacggtggagacctcaccggcgacacccgattccatacacctgtgccagaaacccgaaataatatagctacaactgttacgggggttatggcgaagctggacgaaggttcttaccggttgtcgcggcatggagagcacctggccatgaacagcgcgacccgcggcggaggatagaactccgacaagcaattccccattccctggactccacccatacacgacaaggacctggacgccttcggtaagcaccagcgaacgccccagatcacgcacagggacctgaagagcattatctgaggatttcctagcgtggcggctgaggagggagctcgccatgaac

SEQ ID NO: 51642 - DNA, 364 bp, Zea Mays
caaagattaaaccctgccaaagaatcttcagttcataattagttattagcctattcgtctgtctgccaaataattttccttgcaaaattatattaccatatgcttctaacttggatggtcaataccaggaagggatgattatcagacaacaacaaacagaaatgaatcctccagatccttcaccggttggaatcgatcaagtggttgccgcccaaattctggtaatacaacaaatggcataagtggttaacgaaatgcaaagacaagaatgccaggaaatacgttaggatcggctggagatgcgacaagcaataagacaagcacggttggaaagacaacaacaacaacgcccactacctcctcc

SEQ ID NO: 51643 - DNA, 295 bp, Zea Mays
gcgaggacgagatcaataaggactctagcttcggtagaggatgaagatacatgcaaagtatcaaaagactcaatagaaggggtcaggattcaggcaattgatcatattaataaataccaggctgaaacaacaaagtggcgagacaaaaaagtcacactaaaggatatcaagccagggcatttcgtgcttcgaagaatagctaatctagaaactgtagggaaaagctataactcaagtgggagggccccttggtggtatcttcgtcaagaccaggatcttagaggctaagagacat

SEQ ID NO: 51644 - DNA, 444 bp, Zea Mays
gcactttaagattggtaattgtcgttcgaacctacacctgacgtgtccgttggcactttaaactagatacccctccatgtcatatatttgtggtcttttgcccatttgttcaactaaagaaacacattagagatcaaggggaaccttttcctagtgaggtatttgtgatttgctaatcgcaaaattaagtacctcattagtgcatagatagtagcaagtgtgaatccccttcttcattaggcttgtttaggttaagtaatagtttgtgcttgttactcttggtgattgtcatcatctagacgacttgatgtgataaaaaacttagtgatcatctgggtggagattgtgggtgaccaactcatggtgtaaaatgttatgggcgatttatcatgctagagtgaataagaacgaactcgtctagaacaattggtccttatacatatt

SEQ ID NO: 51645 - DNA, 1405 bp, Zea Mays
ctgtgaagggtactaattctatggaaaactccacatcttacttaggtgggagttccgataaatcttcaggaaaaacatctgggaattcacatgccactgggatttcttctatggtggttgcttgggttgcaaaagatgcactagttaactcgagacgacgaggtaaggttacctgaaatagtccagtaccacgtggctccataagtgaaaaggtccatgttgttgtgtcgaggatggcaccccaatccttcatccaattcattctcatgattacatccaaggacagtcctagcataactatcaaatgttctcgaaaattccttccctcaatcctaagggttgccccacggactatacgattagtgaaaacttcagccctagctgaacttatccggtacttatgtcccacttctactggtgattcattgaatcaatgagcaaatgtatactcaaaaacgaatgagaagatccagaattagataatacaacggtagggtgatggttcacaagaaacgtaccagccataacaggttctccctcagcgacctcatctgttgtggtatgatgcacacgagcaggataaacatctgtcttctttttaggacgagggtagaacttagtgaagtgtcctatttgtccacagttgtagcatggcccttaacttgggtagtatttccagttgagcttccctgtctaatctttgtacatggaagagccactttgaaaaccttctgacctttgaatccctgtggttgggtcttcttctgaggaggagggcgaaatcacacaccaggtaacactagcctgaaatttggtagagccatcaatgtggttctatgctacgacgatctagactccaagattctcttaagcccctttgacatggtgtagagattgttgttgttctcctgagtcaaacagtcactcatgaaatcattgaaggaggtacgagaggagattcacgtgctcttcatcatctttgggctcaaacccctcttgaaaatggcaatctttttggcttccatgtccacatagtcaggcgtgtagcgagaaaagttgttgaaagcatgcagatactctatcacttacttggtaccttgagtcaatctcatgaattctgacaccttcattgccatcagactaggtggaatatagttccctctgaaggctgtagtgaaccttgccaagcaattggagcattctcagggtaggcgatgcagtgatgagaccagcacatccctgcaactggtgctgcatactcagtcttgagatcttctgtaagtctcaccaaacgaaacttctgcttcatagtgttaatccacccatctgcctctaagggttctgctgcctccttgaatataggcagtctagtgtccatgaaatccttgaaactgttgtactaaat

SEQ ID NO: 51646 - DNA, 413 bp, Zea Mays
ctcacccttcttctttctataaaacttcttctccttcttccctttcttgtcttggtcctggtcattttcattatcgacacattgagcaataaaataatcgggcttaccacacttgaagcatgaacactttctctttgatttgttcttgttgaggtagtccttgcgtcccttcaaagcggtcttgaagcgcttgatcataagcgacatctcgtcctcattaacgtcggtcgcgtcaacttgcaccaccttgtcgggggactgcctccttgttggtcgtcgttttgagagcaacaggttgcagctcgtagtgaggaaaaggttcattggcgatgttgttgacataccttgcttcctttaccatcatgcgtccgcttacaaacttaccaagaatttcttcgagcgacattttggtg

SEQ ID NO: 51647 - DNA, 729 bp, Zea Mays
gtcctccactcctccgtccaccccctctccactcctcctgtcctccactcctcctgacctcaacggcgccagtgacgtgaaacggggctccggatctgctcgtcttcggtaaccgtgaggaactagtgtgtgtcggctcgatctccactttgagtcggcgacggaaccggggctccggaccggatctaccgactacagctaacggcggcctcagctctgcgtccggcacagaggatagtgacctgatctggacatctggtgttcaatggaaacctctaccttattgtggatgtcgttcctgtgacctgatctgcttattcccttcatccttttttctgtgcaagtcttccccgtgagttgtattgatccgtgaggaacccgtccttttggaaccggtgcttcggatctactactaacggcggtgagttcttcgtgtctggcgcagaggtaatctaatatgttgtgatctatgtagtagtaacttgtttacctgatttatgcatgagtggacaatggtgcttgacagcttgagtttaactgaatagagtaactgatttgtgtactggacaattgtgcttgctgtagaatagagtaactgatctgtgtattgtgtagtagtaactgatctgtgtagtagtaacttgtttacctgatttatgcatgagtggacaatggtgcttgacagcttgagtttaactgaatagatgatagtcgcctagagggggggtg

SEQ ID NO: 51648 - DNA, 663 bp, Zea Mays
tttccattgtaatcgatgtcgggcactgtgggagctgaaatttaggggatcatttttagagggtggtgaaagtaaggtttatggcgatgatatagaagaacccgttgttgcttatagtcttaggttatgtttggttcgcaacacatttttggaatctagctattcccattacccaagactatccggttggatgggattctctctacacactattggatgcccgagatgtaaaatacatagtgtttggttccttatctggattctcatgccatgttctcaatatctcactggacccagttccatgtgactaaattttagtcccatcacatcgactgtttaatgctagttacaacatgaccagccccatccccgacgatgtggtgcacacgggcgggtgccacttccggcgcgtgccttggcacatcgagtccttcgtgagcgtggtggcgtggatttgcaaatactccgactgatccatgtgcgggaacagacactttgtcgtcaccgtcgccatgttcgagccataggccagcaccgatgagtctgtcgccaccaacaccttcggcacgcgcaagcacaccttctgcaaggtgtgcggcatcacctcctgctacaccctgagtgtaacaccctgattttgggggtataaaatttctttctaaa

SEQ ID NO: 51649 - DNA, 617 bp, Zea Mays
gtgataagatctttaccagtaacttgtggaggtccttgtttaccatggctggtgtgtctctacagatgagctcagcctaccacccccagtctgatggccagactgagagggtgaaccagtgcctggaaaccttccttcgatgctttgtgcatgtgtgccccacaaaatggatggattagatttatctggcagagttttggtataactcaagttggcattcggcattgggtcacactccatttcaagttctctatggttattcccctcgccattttggattggattctctggacacttgttctactccctcactggctgattggttggaggacaaagtggtgatgcagaaactcattcagcagcatttggttagggcgcaacagcgcatgaagtttcatgctgacaaaaaacgttcggatcgggtcttcgctgtggggaatttggtttatatcaagttacagccatatgttcaatcttcgttggccccccgatctaatcagaaactggcgttcaaatattttggtccatttctggtcctatctcgcgccggttctgtcgcatataagctccagttaccgccttcatcttctattcatccagtgcttcatgtatcccaa

SEQ ID NO: 51650 - DNA, 595 bp, Zea Mays
caactttggagctttgcatctttcaaattatagggtttttgccctaggtcaccacatcaaaattgtagcccaattataggagaacaactttgtttaaggattcaagccatggtattatgagaaatttggagataatcatgctcaaactttggctgtcaggctggattcattctgaaattcagcttttcagtgtaactgggtcaactttgagtatgaattcaaccttgatccagtgctcaaataagtttaaaccctatagtcgagttgtagctggtatgtagcactacaactttgatgcagagacttggacctgttgtcacatgaacttggaagaaaacttggcttcaaatttggctgtcaggttcattttactgagctcacgatggtacagtaccctaaccggatcagatcgaccgccagctccaaaagatctcgtcgccggtggccgtcgccgtcgattgccgctcgccgtgattcgtgcgccgtggccatcagataagtatcgcccagtaaaaatcttcaccgccggtgagctggacgccactccgacggcctcccgtgcctccccttctaccctacggctggagcagattag

SEQ ID NO: 51651 - DNA, 894 bp, Zea Mays
gagcgccgaaggcaattgtgatggcttcgtcctctacattcgtataagcttccaacagctcgtcgctggtagcctcaacaccctcaagccattcatcattcgacttgtaagtgtatcttagataaaccagaccgccttagctggagacagtagcagtctccttcggcatttcccagtcatttacaagcggccacaccttgtaagcaatatgctctcgaaccaaatccctggtgccaatgtaagtacacaccatgttgaaggccatcaaacatgcttgcacttcattcccacttgcaatcgatggcctcctgatgccgaagcgtgaccgtatggtacgttgcattatacccctcacatcttccctctcactgagatcattcttgacatagaaccactgcttcatctaagagcccaaccatttctttcggaatgttggcacatgatacctcacatcagaacggtgcacaaaactataacatccaaagttgttatgatactgctccttcccaattgccttcgtctggtaggataattcatgaatgttgcagaagcacttggcatctcgctccagcccttggcttctcataggcgaaataaaaactccaactttaattaaggctttaggagtaagctgatgaaggtatatctcaaatgtatttagcacttcgaccagcatcttgtgcaacggaaaacgaagtccagccttcataaaacttttaaatactaccacttcatctgctttaggaagagaaacagtgctttctcctccaaccctcattatggatatatcatggaaatatctgccctttatcgcttcaatttgcccttgtttgatagttgatttctcaaaaacaacatggcttggtctccacggtcgatcttcgacatcttggt

SEQ ID NO: 51652 - DNA, 376 bp, Zea Mays
ccccaactcgcctaaatattctgaagggtccaataaagcgagggataacttgcccttaactttgaatctcctcattccacgaagtggtgacaccttgaggtacacatgatcaccctcctcaaactccagtggccttcttcgattatcagcatagctcttttgcctagtctgagctaccctcaagttctcccaaattatacggacttgttcttctgcctcctgaataatctcaggcccaaagatttgtctttctctagtctgatcccaatgtagaggagtccgacacttcctgccatataaagcttcaaatggtgacatctttagactggcctggtaactattattataagagaactcagcatatggtagactcttg

SEQ ID NO: 51653 - DNA, 593 bp, Zea Mays
gaatggttttggtgcaaacccatataacacctcgaatggagaaaatcccaaagcctcgtgcttgattgaattgtaccaaaattctgccaaatataaccagtcaaaccacttgctaggacaagcatttacaaagcaccacaaaatgtctctaagcactggtttactcgttctgtctggccatcacttttagggtggtaagatgaactcatctgtagtttcagatgggtcaactggaacaaagtcttccatagcagactggtgaatactctatctcgatccgagacattggccactggcatgccatgtagtttataaacattctgcatgaaggctttggctattgtgagggcagtaaaagggtgtttcagagcaacaaaatggctaaattttgagaaaaactagtcaacaataaccatggcacagtttctaaatccagataaagggtgttactgagagcatgctgcaaggtgttgaaagcaatatcatgctctgaagtccacacaaatagcacacctttcttcagcagctggtgtaaaggtttagccaagatagcaaaatgtttaacaaatttcctatagtagccagcaagccca

SEQ ID NO: 51654 - DNA, 741 bp, Zea Mays
acaacaccagcacagtcgagcccattagttgatacacggcttaggtgggatcactatgatagttgaacacatgaaggtctggttcttcttgctaccattgtctggccccatatttttctagtacacttcaccctagcttagatctatcacctcatggagccaactagaggagaagttccacgctaacttttctctagctctagtgagatgtcactctctgacatcaccacccctttgccagcattgagatgagatggtggttgtttcatctagtgttttagagagaccaagaatagatgttactccatttgcctcactaagaggaacctgacagagctaacctttagaggttaactgcgccccacacatggtttatacatcgccatagactttgactccatcagcaagctgctgaccaaggtatcgacttatgaatggcaccatccaaaagcctaccaagagcataagaagtcgatctcctacatccacatctagcaacaaagcgacaactcgactaacgaggctaaagttatggttattgactgggcccaaggggccaaccccatcacatgcccatgaatcaaggcgctcgatgtgctcataggcttcaaccttaacctaaccaagaccgagtagatttttgatctgctcctcaaggagaagcaacttaagttgttaatcgatcactagattccatcagctgaagagtttaaagggtggaagtaatgcaagtggcacaac

SEQ ID NO: 51655 - DNA, 432 bp, Zea Mays
caaggttcgggcggaggttgcggaattgcgtgctgagtgcgcagcacgccactttctagatggtggttctctcgcccctgtcgggattcagcacccttaccgttcaccgcccagtggtcgcttcgactatggtaccccagactgcaggacccggattgattaggatccctagatcgacagagtcagagtctgtaatgatgcttagttcagtgtcttagtctagtcagtcttagttagagttagtttgcttatcttatgttggatgcttgttatgatggacatatactgaagttggatctttgtaatgattgtcaccaaggtgtgggtatcccctacaacttagtgtagttattaataaagtcagttatttagttgggtaatccatctatttccactttcctctttatctgagaagctgtcagtgaagatggt

SEQ ID NO: 51656 - DNA, 350 bp, Zea Mays
cccgatggacacgagatggagaaggtcaggctcagaaacaacagacataagattacctgcgaaaggcaactggctgttggggtcgatagggggaatcaccgcagcggatgaactcgaggcctttcttttgggcgccatctcaactccaacggtgaacagagcggaagccgaattgcaaaaggacagagaagatctggaggcaggaaagcaagaactagggcacagaaagcagaggcagctaaaagcgcagtgcatatgggatattcccgggtcagataccgtttccaaaaaacgctcagtcatcacccggcagttacttctaaaacatcggcgtgccatgtcatcacccg

SEQ ID NO: 51657 - DNA, 365 bp, Zea Mays
atgatggttcaaaagataaggccatacccctcatgcacttaaaactaaactagtgccttaaaccaactcagccacatgcatgaaatctaactcaaccagtagagtcatgatgaattgcataatttgacaatccccacctaacatcaaacaagaccttgatctacctcatgtagtctatctcatccatatatgtcttaaccatattccccaactccgatgatatacactaacttcgaatcaatgagaccaagacaaactcaaccttcagaggcattaccacccaacaaggagttctttctcaccataaactttcttacccctggctattcttaccctaacctacccatcttctataataaaatgac

SEQ ID NO: 51658 - DNA, 421 bp, Zea Mays
aacaaatacacagaaaattactaaggagatcatggagggtttatccgaagattctgatgacagtgatagttatgacattgaaagcggggatgaagactctgaggatcggccgtggcgcccaagccatactatcttcggaaaatcgactatcaagcaaagtcatattgatgccatgagggggagatattttcgcgacatgtctattgtcagagttggaggagacagtactgcccctgccctggaggaaaacgaagttgttatataccgaagcttcttgaaggcaggtcttcggttcccgctgagtaaatttgtggtcgaggtattaaagatattccaaatctttctccatcagattacccccgaagcaattatcaggatggggatatttgtctgggctgtaaggagccaggggctggagcct

SEQ ID NO: 51659 - DNA, 767 bp, Zea Mays
ccaaaaaagcagaggtctgggccaagtcggcttgactttgagaatacttctcctcaaggtcagagcatcgttgggccatatccgacaacgcagctgaaaggggatgcatgactaagaacaagttgatcaatgaaaacaactagggaagctgtaagatcactaaccagcgttcgacgccttcaagtcattgatctgtttctggagcagcaatgggttccactgcattagagacagagcttgttcgggaacagtggcaccgcaggatctcagctgggcagatattccatcaacaaaagcatgtgatcatagatagatgagcagaagaaagataattcactaatatgaacaacgtagagcaagaggccgactcgcctgaagattggagaggaacagtggtagacccagggcaggaggatctgagtcatgggtcgacgagggaaggtcagcaggaacgatttgaagagcactattcggggtgacctcagccccaccaatagacagcaggctccttgcatctagttcaccgacctctaaggcaacttgtccggttaaaactgtggaagcacataccgccgtcgccccatcgaaccaaggtggggacgacccaacgtggacgttcatggaggcatgggaaagagagcccacctgaacaccctcgggggctgggttgtagtttgcactacccacaagagctggatcactaccagcaacaccctcgggggctgggtaaccgccagcaccatcctcgggggctgggtcttctacag

SEQ ID NO: 51660 - DNA, 462 bp, Zea Mays
tcaaaagttggcttgagcatcgggggcttatgggggatagatatcccccgggtcctcatgcacactaaaacatatcacaggccgcctgacgggcttcttccaaagtcgccctatgggatgtgccagtaggatgtagccaacttaggtgagaccaatccaagctgatgaacaccggtgtccgagttaagcgccgttgaagcacgaatgtgtcgggtgatgcggttacaagcacccaaagggctatgcactcggcgataactcgggcggtttggcgatgaagatcccggatatgcaggggtgcaatatgtgacaaagaaggagataagcaagtagatagtagtcacaacttgtaatgggacaactctctctagtcgtgtatataaggccgagggggacccctaccatttcatcttatcaccaaccattctagctcatcttcatccacaaccctcagcttgtaac

SEQ ID NO: 51661 - DNA, 566 bp, Zea Mays
attatttagtcggcttattgtttattgctacacttgcttttagggtttgtttggttcccttctttagttagattaggttgtatttggtcatcgctagctaggctgtggccagtgaatggtttggttgctttgctctatagcgtcgagatcttgagaacaattgtttggttgcccattctctaatatgtggttgcacgcgctgtctttcagcggggccattaggtgcgcctgttcacgcctacgggagcctggctccagagaaacgaaaacaaaatttgtttcctgataccagactcatcggcgttgcttacatgtgggcaacgtggttttggtgctcgttcagccacccaatcagtgacgaagagctcgttatggccaactatggttcgcgtcatacctaagcacctcgacatggcccagaagatcaaccctaactggataacttccctaccaagcccaagggcatgatatgtatattttagattacctcattgttatgacaatataattaatcaaaagagttaatgcacctacatgtagaaaggacttgtaaaagttcctaggaa

SEQ ID NO: 51662 - DNA, 544 bp, Zea Mays
gtggcacgggagcccttcctcactaagcacatggatcacctcggtgaatgcggtgatggagatgaccgaagcgtgggcacaaaggaggcagaaaagcggagagcgtgggccagcacaagcgcagcggcatggagcaaggctttagagatctggatggcgtcgggatgggcctggtcatgtgactaggataggaaggcaagggtgagggtggcgccaaagcggtagttggaagggtatgaccgtatgaggtggaggggaatgaccgttgttggcagaggtggcacagggagaaagggtcttacgcagagccgatgaggaagcagtacagtgaggtgaaggacgtcagcatgccctacgacaaggtgaagacgccggtgtgctggtgtttggcatcgaggatgagacgtggcttcccgacatgaaagcaggtggtggcgaccatgggcaggaccctgcatctgagctttcttctcctcgcaacggctaaaggaagaagggtaagaccatctattgggtctgttttgaaccattttggacctaacag

SEQ ID NO: 51663 - DNA, 460 bp, Zea Mays
gcctgtataaccaagtaggaaatccgttagcaagtgcatattaataaatgcaaagaaactctagcaatatatatgtacatgtgtgcatggttaaggtatttgatatagccatctttactccaaaactattagtaaaagaaaaaagggattaacaacacttgcgtgcgtgagtgggttaaataaaaatgaaagccgtcacgaattttagaaaatagagagaaaatatagggaggagctaggtaggatttggttcagtaacaaagggaaaaaatatttgtgcatcgcagatcggctgcaggttgtaggtattatttgtgtatagtatgaatgagtgcagccaaactataaaattcagcatatcacttgagtaggaggcactgcatgttttgaaaacaggcgaacatagatgcagaaatgaagtatcgtggagcgtagtttgctgcaacaaagcataacttgg

SEQ ID NO: 51664 - DNA, 804 bp, Zea Mays
taaatctgatcaggtcaccgcaactagcatcagagcagaactgttcatgtgggaattccaaactaaataacataagtttgacaaacgaagtatgtgccaactgtcaacccttaagcccatataaggaccataagtggcttagtgagtgctaaccttggggagggttccatgcattgcatattattttctagattctatgaatggttagtataatatgtcgtcatttcgccgccaaggtaagaaaagaaagagtaggaccatgcaaactggggctagtcggttgtcctcatgtgtgggtcaccatgcatgttgtataaggaccgatagaatttcttaccgcaacttagcgaggatagtggtatcttgtcattatttttcaattaatgttgtcgcatcgtggggatgggttggaatgaactttttctgtaggtatactaacctcaatgcgagtagttggtgtagttgcacgataacgagtgaacgggtatgccactgcttattgcgttaacacgaacatgttgtgaggccgtaagttatgtgcatacattggcataaccatcatcttgttcatttattacatcgctcttttttaaagatagggtaggggttttgtctgcgctattaatcgataaaaactttctcaccctaatcctcacccatctgacattgtaacagatggctcgtcgtaggctcactgcccgtaagtccacgggaggacgtgtgccttatcaccagctggctgcacgtgtttctcatcgccgcaactcttttcttttggagtacggtgtgcctaccctactgtgg

SEQ ID NO: 51665 - DNA, 817 bp, Zea Mays
attttctccaggaaggtgaccgggtagaacctcctctcaaactgcttgatgaaaacatcccaagacaggactcctggtgaggagtgagctgcatgcacgcctctccaccaaatttgagcctcccccttcaacgggattgtgccaaaacgaacacgatcaccatacacaatctcgaaaacatccatcttatcctccacataagccagccaatctgccgcctcaaccggagtaccactgccatcaaaggtgtccagcttcatgcccatccactgcatcagagaaaagaccactgacgggaaggggcaccttagccccgccacctggagcagcactcgcagggacagggcccccgggcactcctccacctccagcaccctaagcagcacccgcaggggcaacaggaatagcttgcctcagaatggccaactcctgctgcatggcctgcatcgtggctaacattgccgccggactcatagaatccccactaggaacttgtgggctgccacgagccctacgaggcggcataactgcagccacaggggtaagtgtataagtaaataaaattggcatagcacctcatcaaataatgtcaaaccagcactgacaatatcataatatatcaatagtaaagcagaaaacccatcctatatgtgcagtgtgtcaatttatcattatttcacttgctaggatctacagcctattcctttgatactaactgtaacaccccgttgctcccacacaatgagtgttaccaaaaacccttcccacagattttaaaacaaaaaatggagacaaacagtaaagaaaaatatggcag

SEQ ID NO: 51666 - DNA, 473 bp, Zea Mays
cgaaccccagggtcagaccttctatgccagctcaaatgctcccaagtcagaattcttttaagtggggtagtgttctcggcagacttaaccgtcttgccatcccaaggaattgatgtgatcttaggaatggattggttaaccaagcacaaaggcatcataagttgcgcaaacaagacagtccttctcacaaaccaccaaggaaagtcagtctcttgtcaggctcagccacccgccaatgatccaatggtgttcaatctagcaacagaaagcatatcgatggtagaagaattcatggatgtatttccagaagagttgctaggaatgccgccagaaagagctgaaagagaagccgatggagaagggagtgagacccacctctaggattggagcagggtttcccctaagagctgaaagagaagccggtggagaagggagtgagacccacctccccgcacctccagagctacccttag

SEQ ID NO: 51667 - DNA, 548 bp, Zea Mays
atgatgttgaatataacatacggatacaaagtaaatatgttcataagaaaaaatggattgtacctgagatcttttgggtgtcctctgcttaggtgaacttgttttcataatgttctttgtcttcaaatcaatagcagactttggactgcttaacttaatggaaacttgttgtggtgggatgtccgtgaacgatactcgagactttttcttggggtggttagtttctaaactggaaggttcaacagatttgaaagagcgcttcattgttggagcaggcataaaatcgtcgtcagacgatgcggctggtgttataggcgactttttttacatggtatgctagcgccttcctacggatacaaagaactggtaatgactgtggatctagctgctgcttggtctgggtatctggaagaacttgagattgctgcaatggacttgatttaacttcatcagcatgtttggagcagttgctagatcttctgcatctagaaatgtcaaccgaaaaaacctcttggcttgactcaatagttattctctttggattcgag

SEQ ID NO: 51668 - DNA, 470 bp, Zea Mays
ctttctgatccaatactcaaatgggatgttctgaataagtcaagtctggtttcaagacaacatctaccacatcgatggttcgatcaggaacccagaggcacttcttcaattgagacacatggaacatattatgtactgcagacaatgtttcgggcagttgaagtcggtatgccactggtccgtatcgttcaagaataagaaacgggccaatataccggggtgccagtttcccttttacctcgaaacgatttacacccttcattggtgatactttcaggtacacatggtcaataacttgaaagaccaaaggttgatgtcgcttatccgcataattcttttgccgagcttgtgcctctttcaagttgtgtatgatccgttggactttttcttctgtctctttaaccatgtcaggcctgaaaaaccatcgttctcctggttcagaccaatttaagggtgtccgacaccgtcgc

SEQ ID NO: 51669 - DNA, 591 bp, Zea Mays
cgagtgtgttcatcgagaaagtactggattcaggtgaaaacgtggattgttttctcttaacaaggaaagttgaattgaatgtaggtgaaaacgtggaactggagaaagtactgaaggtaacgaagaagaaatctgctggtagacagatcaccagcctgcaggttagctgttctggttcagtcagtgtgtttttcttcctcctcataagaaacatttttgctcaaccggtttcgcgtcgcagttttcgtgcggcgatcctgctcggatcctgatcgcatcagcaggttctaagatacgagtatctgatggaggagctaagatcaaccgaaagtttgaaggtcagatttcctgccagtgccagagccagactcccttggttaaaacagtcgagccggctgttgtctgctagtacgaattcacattgttatttggtccccggccgttgcaggacgtcgaggctccaaggtcctggtgccgccgtctctgacctccgacgggcagtacctcgtgtccgcaggtgccgactccaacgtctacatctgggacttggacagaccagcaaggggcaaaagccgcaccagaggaccaaga

SEQ ID NO: 51670 - DNA, 519 bp, Zea Mays
tccaaatgcaacatcattatattcatgttgcatttgagaggtggtattaaggtataatagtcaagggcattagtttagtctcctagtctagggttttcttcttgtgtgtctcatgcactctatatatagtccttattgggcctcaatactatcatccggttgagtgttgagtctctcttcatttgtaacagcgactatagcaaatctctactcaattaaagcacgagtttcatgtgtcgtacgtcatgtgtgaagcgtgtagtgtagatttgtttttctctcccacatctcgcctaacaaccagaccgtcaatatttgtttttctcccccacgcctcgcctgacaaccagaccattacctaccaggtggcccgtgagaaaacgctcaagcccaacatgacacaaagacacacgcagcacaacgctcccggatagtaccacctcgctagctgaaggagaacgagcgagctataaaaaaaggagcaggtctcattttcaactcatacctttcttggccttt

SEQ ID NO: 51671 - DNA, 544 bp, Zea Mays
ttaatatttttaaacagtgtgtttgttgggtgtgtatctatacaatttttcttaagcctagtatagaagtatttctatttttctctagattaatatgttttgggtattttcctaatttaaatcaaaactctaaaaattagcacagaaaacatggggttcaatatttttgtgtgacagttcataatatttggaatccagaaaaattggtttgactaattttggatgagtaatactcaagttatgaatttcctaagttctctgctcattaaaaagaataaacagaaatggttaaaggaaataggttttgcatcggggtccctgggtttacttctatctgagttgtttaaaccgtgcccctgaaacactattcacctgagtctctgactacacagaaaaccccctaggtgactctaaatcaaacccgcggtccttcctctattgaaacagtacccgcgatggaggaaagggcggaggggcttactggcagcgagatagctccagtgaggtgtccagggaggtcggggaagtcacggtggtcacgttg

SEQ ID NO: 51672 - DNA, 557 bp, Zea Mays
aggacattgatgtacttgaagaagaacgactaaacgaggtaatccagtcagcacggtatcagcagactctaaggcgccatcacgacaaggctgtgcgacaacgattcttctcagtaggggatcttgtcctccgccgaattctaacgggggagggacgacacaaattatcacccttatgggaaggacccttcatggtagcagaagtcactcggcccggatcgtatcgcctcactcagatggatggcacagaagttgggaactcctggaacatagaacacctcagaaagttttatccctagctgtacttcaaaactgctgggacaacgatgtactctgtaaagtggaaatatgtcatcaataaaaaagaggtttcaaagaaactcagttcgttcatgatcgacttgcatttttacttaactcggggtgaccactatgccctactaacggagcaatcgacttaagtcggcgacgacttaaggcggtgcaacatgctcacgcttatttaactcggggtgaccactatgccctactaacggagcaatcgacttaagtcgacg

SEQ ID NO: 51673 - DNA, 432 bp, Zea Mays
caagaatctcgtcctcgagatttaggaaggactatggaaaagatggggaaaatctatgcgaagctcttcttctctctcccaagtagcttcatcttctccgtggtgactccattgtactttgcacatctttatcaccttatttattgtaactcgagtcaaagtgtctagaatcttgatatggtattctgcataagtcagatcatcttggacactaaggtcctccattggtagctgctcctcaagaaccttgaggcacttctttagttgtgacacgtggaaaacatcatgtacatctgccaggtgatcgggtagttctaactgatatacaacttctcccactcgctttaagatcaagaaaggtccaatgaagcgaggggacaactttcctttaactttaaatcttctcataccccggatcggtgacaccttcag

SEQ ID NO: 51674 - DNA, 511 bp, Zea Mays
aaaaaaaaaagaagaacgagcagcaggattagataagaccaagcaaaagtacaggttcttaagagaaagaagagctcaccgaaagtaactagtcagaatggaactgatgcactgatggtttgagcatcgagaccgacccctctctctacgggaatttattaatttaaccctcaacattttgagtttaatttcagaagtgactttcagtttacctggaattagcagcagctaaacaccacagacagatagctcatcaacgactaacatgttgaatctaaactacaatcagctagcgtccacttggatctagctagccagtatatgctcgatgtcataattatgctgctgcccacgtgagacagttcccagtgacagtttcagcataattgcaacaacgttatttccactagctcatcatgcatgggggcgagctccctctaattaaattaaaggtctccaacaagaagaaagaagcaagatactcaatggaaggacccatttgagtacaacg

SEQ ID NO: 51675 - DNA, 527 bp, Zea Mays
caaaattgaagaaccgagaaccgaagagacaaaaacatcagaagttctaagcccttcggcaggagttgaggcaccgaagacacaaaaagatctagaagcaacccccaagacaaaaaggatggctagtgtattagatgtggtggagacgataaaaacttcaagctctactccaggaaaaattgccaatgcttcgaaaatacaggttgaaaccgagacaaagctgaccgaagccgaagctatactgagccaggccgacgccgaagctgggcctttagtgcccgccaaggagaaatcctcggaaactggagaaaaggcagcggaagaagagggtatagaacatattttgcctgaaaaagttgccgctcctactcccgaagcgtcttccgaggaccttgattatattattcgacatgcttcaggaaaaagattatctgaagaagaaatttttgaagcaaaacactatgcccgagaactaaaatacccaaaaggggccttagtgtttaatgtcacagacgaagatgacttct

SEQ ID NO: 51676 - DNA, 297 bp, Zea Mays
aacaaggaagccaagagctcaaagtttgctcctaaagtggacgagggcttcttgcttggttatgcatcaaacgagcatgaatatcgtgttttcaacagttccactggtcttgttagcgatagatgtgacatttgatgagtctaatggctcgcaagggcacatgtctagtgatgttgcaggaaattaaagaccaccttgtgaggctatcaagaagctagcaattggtgaagtaaaaccactagaggagaacactgacgatgaaagagcttggatgaccaatcgggccattgttggggt

SEQ ID NO: 51677 - DNA, 805 bp, Zea Mays
cgaactacgaatgaaccaaggcgttcccgacaatctaagggagtttagttcaattggctaggtcgatgagcatcctaagcacaccagggtgcagtaacaagagagaggagggcgtgaatagacatgtagagagctgggcacgacgagctcacacacggcggggttcttgactaatttggggaaaatcccaaattgggagatgtgggggacgattggaagtgagggctggttcactgggtgcacaattacttagccgagcaggctggggtaccaatttataatgtccaagggcggtggctcctaattttggcatggcgtgctggcggccagagagaaagacggtcactggtggctcaatcgtggcgttcaccggtgcagcggttctgagatggtaagcctaggcgtgccacggttactactgcacagtaaagagccacgacgtggcataattgaggtcgccgaagttccacgacgacaccgatggtccggccacgttgcacgactataggcgcggttgataagcttcaccctgcgaccaaatccgctccccctcaatcttttcaccccccggtactatcctgcccgagtcctacacgaatcgtcgtgatcagcgcgaatccttgcgcagaggtcaccagcggcgagggggctgaacctgagatctttctgcttactttaccatgagatgcttattcagagtgcctgactgagcattttgctaggcttagacctctgatttccatataacaacttgttaatccacctgtaacaaagttgttggtctataatccaactttgatttttc

SEQ ID NO: 51678 - DNA, 638 bp, Zea Mays
gcgtccgtcctccagctccatggcaccaccgcacctgtaagcgcgccgccggtctcacgtcgtgctgtgccgcaactcgggttgggggtagatgagcgcgccttggtcgttcgtttcctactggacggacaagatgagaagtaaaaatacaggttcagccattgatcggctgacgtgtggccaggggggaagaaagcgtttggtccgttggatttcaatccatcggctaagatcagatcgggaggaaggtgattgtgaccgtagattccggattgagcggatctgacgtcgacgtcgtagcacataacttcgttgttcattagatccggtgcgtccgatcgggatcccgtgacccagattcaatctcgtttcattaaaccacggccattgatcatggatccaatggctaatattgcataccggtttgattaagataacagtttgacctggacccctagattctaatcgtgcggccatgatataaggatacccctttggctgtgtggattcgcataagaacccctgctctttttgtaaatgaacccgccgtcctagaactatagcagagagtttaatataggcccctggtatttgtagtttgaaccctagatttctcggtaatcatggtcgcagtccaa

SEQ ID NO: 51679 - DNA, 555 bp, Zea Mays
tagcgaaccattttagacatcgtaactcaaaaacatgggttggagccgattaatcagtgtttcttaaccattgctcaacttgaattagttaacacacaagtcacctaattagcacatttttggggggtctatcatggaggcatttacacatggcgtaaaaactccataagactacatttgctactaacaccaaacaatacctactgacctattattcgccatacgaacacagttacacgccgcctactagtttctaacataatccttacataactcgtaatcccactactcactaacaatacatcacgcacgacaactaccacatcaaccggttaatttatttggacaccgcctgcctagcgtaccactagtaccccacatttgactcatgctcaacaatacatcctttattcgattatacaacagcgacctaagcgtcatgttacccaatgcgtacatcttttctcgttgcgagtataaccatatcacgacatatacccgcacacctcaatcaaatatcttacgccaccaccactacaatacaccacaacacac

SEQ ID NO: 51680 - DNA, 283 bp, Zea Mays
gccacaaatatatattagtgagccttcccaaagctccacctttctctcgagcagaacaggtacccctttgcaatcacacccacgctctttgggctatcgcatcggccaccgtttgtcacctgtagtgctggtaagaaccttgtaagagcggggtaacacgcttcataacttgtgttccaccaccatccttgagagtagttgtaggattcacaccttttgcttgttgctttgtttctgttttgtactatcaatgccaggaacatttcatttggagctctgtgac

SEQ ID NO: 51681 - DNA, 549 bp, Zea Mays
ccagatagacagacaggacctcacacagcaccgcactgcatcgcatcattcctctgcgctagctagctgctggctgctgcacctgcacgccgcccgttctacgcccctcgagtcagctggttgttatcgtgacaggacggcaagcggtgagcagttcacagtagtccgagaaagagaaagagaaacacacatccaattcctggatccatcgatggagcgatggagcgagcgagctagagctgcctagggccggtacagttcacctcacgcgtcgacctgggccggcctgtgcgcacgtacgcaagtgctacgcaggatacgatgatgtgattgggcgcggcgtctgaacaactctccatccatcatgcatggctagctgctgccgtgctgcgtatatataatatacgggaacatatatgataggcacacgaatggccatcgctcagttgcaacaggatcgattctcagccagcttcgttttcactgctcgctgctcggccgtacgtacgttttgatacgtgagcagaatcaagctgcaaacccgtccgg

SEQ ID NO: 51682 - DNA, 532 bp, Zea Mays
gtctcccggtggccgagtggatgcatttcatgaagactcctcccgcacctcttctgtacagcaagccccctatgatggtgtagtgggctaactgccttgcaatgcgttctgtcgtagccttatcattagctcttcttcattctttatgtacctgatgatatgctctctccagtcattggggtctgtctctggctgactcagggcattgcattcttccatctggtctgtgatgatgcttggttgtgatatttcttggacaaagatcccaggtggagcctgggcccgactggaccccagcttcgacaatgcatctactgttgcattgcgatccctttccacgtgatggaattccaatccttcgaacttgtcttctagttttcgcacagctgcacagtatttgcccattaagtcggtcaagcagtcccaatctttgtttatttggcttatgaccactagcgagtcgtcatataccatcagcttcttgataccgagtgataccgtgatgctcagcccatggaccagtgcttcatat

SEQ ID NO: 51683 - DNA, 1027 bp, Zea Mays
cactactgcagtgagagatgctacctgggtagagtttgaggctgctttccgagagcaccatgtgcctttgggaatcattcagctcaaggaagaagaatttcgagagttcactcaagggggcgatctgttagtgagtacatccataaattcacggaacttgctcgttatgcaccagatgatgttagcacggaagtcaagaagatggcccgtttcttgaaagagttaagaccagaactcaatactatccttgccagccaagacttcctcagcttctcgcacctctcaaacaaggccatccaggtggaaagatgccaagaagaggaaacaggccacctcaagagaaagtttcaaattctctaagctcaacagcaggacaggcaccagagggttcgatcttttgagtttccttccaaggagtcaaacctcagcaagccaacaggatccgctctgccatgtttcaaccagcctggttaaagttccttccacacccagtccgttgcaagcagccaacctccagccaatgcttgttggcaatgtggagacctcgaccacttcaagaataattgtctgcacctgaatacatgcgtacctgcctactccaactcggtgaatggccccaagaatgttacgtcacccgcctccaaggcaccctccaccaacagtcagttaagcaagactcagttccacggtagggctcgagtgagccacgtcgactcccaggaagctcagcaagcccctggagtagtactcggtgagttcctagtcgaatttacccctgctgctgtgctttttgattctggagcatcccattctttcatcgccactagttttgtggaaaagcatggtatccccactacaccattagaagtccctctggtcactcggaccctagggtcagaccttctctgccacctcaaatgctcccaagtcagaattcttttaagtggggtagtattcctggcagacttagccgtactaccatcccactgaattgatgtaatcctaggaatggattggttgacccgac

SEQ ID NO: 51684 - DNA, 374 bp, Zea Mays
agtgtatcattttatttctagctatggttatggaatatggactatgatatttatggtatatgtgcttgtgtttgtgctacggttgtatggacttatggctatttcacttttctggatgctatataatatataggtattgtggttatgctgtaatagtaagtattgttatatgatcaagatttatagatattatcatgttctacggcttgacatgtttatgagtttatcatttttaaatatcgtttttatggttttcgatcgatttcgatgcgtcttcgatcctttagttatcgtttaatactatcgccgttttcgttaccgttaaatatcgtattgctatcgttttcgaaaatataatatgaaagtgaaagtgg

SEQ ID NO: 51685 - DNA, 426 bp, Zea Mays
ccacaaggaacatactcatcattaccggctctccttccggtgtagtggccacttgagtgtaataaattcgcccagtcttcttgacatttttgcccactgaattattagccatgtttcccttgccttgattggagctcctagagttctgctgattgttggacttattctgcctcggatatggatagtctttgataaaatgaccagactttccacagttgaagcagccagttgaagaactagggagggtagggaaatgagcaccagggacactcggctgatttgtagaagtgggggcagtggtaggacgaatgaaaataggctatttgaatagataggagggtggatgaggcgaagaacgattctaattaaaaggtcggattaccaacctggttcgcttcttaggtccctgattggacctgtcacctc

SEQ ID NO: 51686 - DNA, 419 bp, Zea Mays
tattgaggtagttgaggatctcactttcattcgtggtaggggcagcagggggggtcctcccaaccgtttgcctcggcgtgagtttgtatggagttatggtgccctagattctgttggcgagaaaaaggagtatcaaattaatcatcgtggcagggattctgtccgtcgtgaccgggagcatgaagatgacgacgaccctcagaatggtcgtcaccagggcacccgtcgccggcgcagtctgtccggctgggcacgggtgtctcgctgccgtggaggccttgctgactgctacagttctaatggaaggcacagatcatccacccccttccgtcgtcatgggcaggagttgtcagtctccaaatcttgggtccctgtggtgaaagctaagaaggtttcctttgctaaccccctgatctcgg

SEQ ID NO: 51687 - DNA, 599 bp, Zea Mays
gcagagagctggggtgaggagatcatgatcatgagagcatgcgcaatgggtgagagaaaggagacaaggagtgtgtcagtattggagttgagtgcaattaccgcgggggcaggggtaacgctggtggtgctgcaaggtgtaggagcgagtcgagcaagagcaaagagggcactgaaggtaggatcatgcctagacactcatcttcgagaaagctaggcttgcacgatttggtggtgcaaatgagcatggcaatgggtgtggcaccgcgtcaacaacgcagcgtaggtaagcatgggatggtagattgatcacggtgcaacacgacgcaggtgaggtgtgcacatgcatggcaatggggtaaggacggtgtcatgcagggcgaggggtggactgggatggtatagtaatacaattttttggagctgaatgtgcaatttactagtacgaggatgggaacgagaactcataagtttagggagccgagtgtgcaacttacaagtactgggatcaggttgagaccccttaagcctgcacttatattattttaaaagaccctttcctagcatttgtttcatatggaggataatctcccaagttgt

SEQ ID NO: 51688 - DNA, 295 bp, Zea Mays
cgggggccaaagacgaagctatgacagtggccttcgacgctcgagggaaaaagagactgaatagggtttttgatgttatcgggtttatctaccctgactactgttatcctgctcggaaacagagggggaaaaggaaaactgatgcttcgatgtcttctagtgcgccgaaggcgaagaaggtgaaggtcttgacccatagaccgcgacgtattgagacggccaacgtgccggaacttatcgaacatgcaggggttgctcctgccacaaaactaggtcatgttgtgctagttgaggc

SEQ ID NO: 51689 - DNA, 436 bp, Zea Mays
ggcggaaaggtgtgaacctggtttcccggcattcagtcgtgtttagggcccataccacttcaggtagttggtcggcccatttgccctttttatcgtcgaggagtcttttcttgatggcagtaaaaaacttgccattggcacgctcaacgacgccgttggattgtgggtggtacaccgaggcgaagacaggcttggtgccgatggaaaagcagaaatccctgaagtcttggttgtcgaactgtttgtcattgtcgactgtgagtcggatgggactccgaagcggcagacaatgttttgccagaagaatttttgagcggtcttcgatgttattgtggatactgctctggcctcgatccactttgtgaaatattcaacggcgacgaaggtgaatttgaggttcccttgagccataggcagtggtccaacgatgtccagc

SEQ ID NO: 51690 - DNA, 304 bp, Zea Mays
gcccgggttaagcgccatgggagcacgaatatatcaggtggagtagttgggcacacccgacaggctaaaccctcggcggtaactcggacggatggatgaagaggactccggatatgtagggataccgtctgcgacaaagaaggagataagcagggagatggaactcacaccttataatgggataactcttcttggtcgtgtacatagtaccgagagggacccccaaccatttcatctcaccatagcccacctactcacaactctcagcttgtaatcctcatatcaataccaaaaccaccatagg

SEQ ID NO: 51691 - DNA, 471 bp, Zea Mays
agcagtgggacgaacaaaaggcgagctgagcctttctctatttggagcaagcgggaaaggaaggaaggttacgggttttctaggcaccccccgatttccatccagtgaggaggaggtaggcagggcaggactgcatctgcatccggtttagtttgcagaactgagctaggcagtttggtgggtaagtggccagacccattccgtttctgcttctgcccatcggatgcgatcatgcgagccactgccaaaacaaacagaaatcccatctctctctgcgcaaataaacttctgtcaaaacttttgatcgacccagacgaattcttagcactgtcatcaccgggttgcccatgcatatgcgcctatcagattcagagagaggcgccaatgatctagtagattggaagagagagactgttccataaacagaaagtgttaatagaagcatatataagtgtgtaatgcccatatccc

SEQ ID NO: 51692 - DNA, 491 bp, Zea Mays
gtcgtcgagtcatcaatttgcggtaataaacctactcccatcctcattaagccttccgcattgagtagttgggccgaattagaaaaacgggtgcgtgtatacggggtttggcaacgccggcgatggcgccgccgtggcaatgtggttgtgccgtcgtccgacaggggagaacggggcaactgttcgtgaaccgttggattggtgttgacggctcagattaaatcaagaaggggtcgggttgggggcgatagtctaccattgatcctagatcgtgcgggcgttggtcgatcggagttacattaaaccggggcgctagtgtttgatccaacgacacagatcgtgtaccagttcgctgagtggataatctaatcctagccgcaagatcaagatcctgcggttgataatagagaataccccccttcgcggcacattttgcttaagagccctttgaaatcctgaaaataaacctgccgtccttcacgactgttccg

SEQ ID NO: 51693 - DNA, 653 bp, Zea Mays
tagagccttgtgaataactattctacaacactaaaaaaataaacaacatactttgagataataatatacataaatgtaacttgggggggaaatacaaaattgattgggcgcaaaaattaacacataaaataaacagaaatatatacatagtaccagggattttctaggagtcttctgtttaggagaacttttttttgtaatgatattagacttggcatctatatcaaactttggactgcttttcacactcagaacttgtggagaagggacctttatcttctttgcactgttttttctgtaggggaaggtgaggttgatctgaattggcgcttcaacgatggagcatccatgaaatcatcgtcggacagtgtggatggagcaggaggttttctttttacacgacaagctaaagcctttctgcgaaaacgatggactggtgttggttgtggctcattctgcttctgattatgtggattatcatcttgatgagctgagctgctagatcttgtacgcctggaaatgtcaaatgggaaaaacctcctgactggactcaatggttaatctttttggattacttggagggcgatcaatagatctcatgattaaacactgaataaatctgttgaaaaaaagttgtttttaaatacagtaat

SEQ ID NO: 51694 - DNA, 363 bp, Zea Mays
tatatgaaataaaattcaaacgcacatgcaaccttattgtcaaaaacacaacacatcaaaccttggcttttctccccgccctgccgctgttctatccatgcccgtcgtagctctgcgcacgacgccgctgctttgtcgcgcccgaagcttctctgcccttgctgttttcacgacgacgtcgttcttccaacggtggacctaggcttttggagggtatgcatcataaaacttaataattaaccagaaattttgaactagattacaatagagcccaaacatatgcaatatgaaaattgcaagcaacagtgattgaaagataattaccatactatttgcatcttgaaagataattatttaatttgc

SEQ ID NO: 51695 - DNA, 1025 bp, Zea Mays
ctaacggcactctagccgctctctcgctgcagttccgtgccgcggaggctcacaacacgtttgaagaaatgcgcaggagccatggggtcatcgtcccagtggtgatgggtcatgattcttgcggtaacctggctcactcaggctcttcatcggtgacgctcgtgcgatcccggcaatttgcaacggccgtggcctcgtcactgtcgccgcctgtcagtcgaagcactcctcgccgccacgcgcgcggaggggagcccgcgcggatatttgggttaaatagcacctcatacggcgggtttatcaagatagcggaagctccatcgcgaggtcgaggcagatggggtgcgccgaggggttgatgccttgaggggctgattgattgattcagattgaagttgtgggaatcaacgatgggtagagtgcgatggatgtctagtccatggacagtgtgatagtccggatgagtaaaggtgggcgccagagtcctgtggaggaaacattgaacatgtgttgagggatgaaggtttgttctcactgtttcataggcaaagttttttttactgaatttcatgtgagtatatatgaactacggatcaagtagtttagagtctgtttacttggtttaggattatgattttctcagatgagattgtactgttttcagattaatatgactgcacttctgcttcctataaacatatttgaatgtttccacgtgttaaaataatctcttgatttgaaactgggaaatattttaatgatctttcaattcggacagtttttataaccttgaccggactttgtaccttatatgatgctgagttattactattcagaacagaacttgagatcattgtactagcatgctttaccaagttttgcaacgatacctgtcatatactatatatgtgctctttgagttgtatggctacatgtttttttcaatccaagattttctcaaactgtctctaggctttgcattgcaggtaataatgtattggacaagtctgatttcctgcacgttg

SEQ ID NO: 51696 - DNA, 614 bp, Zea Mays
ggaatttgttgttggtgaccaagtccttctcagggtatcacccactaagggagtggttcgtttcggtgtctctgggaagctcagcccgaggtacattggaccgttcactatcttggcccgagtgggcagcctagcttatcgcttgctactgccggattccatggcaggggtacacccggtttttcatgtctctatgttgaggaagttcttgcgggatccggaccatcagattgagatggaaccaattgcggtgcagcaggatctgactctggagtgtcgtccggtgcgtatattggaattctcggagcgtgtattgaggaagagatcagttatgtatgtcaaggtcttatggactaattagtctgagcgcgaggctacgtgggaacttgaggagctgatgcggcagaagtacccggaacttttcattgtgggtaagtgttgttgatttattaatcttttattttttcattccgatagaagcgttagaattcgaggtcgaattctttttaagaggggtagagtgtgatacccggtttgcaaagaagagaagttgggggttgttcttttttttcctcatccggttgttgttttggggatttggaatttgtggaaaa

SEQ ID NO: 51697 - DNA, 371 bp, Zea Mays
tgaaagacagggcctacccagcttatctgtatcgagggctagccgactcaactcgggttaccaacagaagaattccctctgcagacttggtgagccgactagagatgatccttaggggcaaagtgtcaaatgttggtgctccagtggcgtactcggcctggaaccttcctcctcccaaagctttcaccctttttgtgtcgaaaccacctgtcactgatggcagtttgggccttagagtgcgaccctctgctgaagaagttagtgccttggttgcctcgcttggggagattcctgatgacgaacggcaggtccattttgaggtgcccctgaaccctagtgatgcagagataagcgctatgcttgatttgctg

SEQ ID NO: 51698 - DNA, 337 bp, Zea Mays
gacaaagctatcatcttcttctttctccccaccctgcaccgaaggtgttttgccgctaaagctcctacgacacttattgacacgtagacaaccaatagtaaaatgtgtttttgaggacattcgaaagatgaaggcccccaatacgtgttaaaatagcattgaccgagttaggatcagacaaagagtgtccaacatcttagggctcaaaataagcaacaaaagttgagtgagcaaaatgagacatctgctgatacctagagtgagtgactcgcatatcaatctcaccaatcatttgttgaggagggtgatagtgctaaacatacaacggagccatcct

SEQ ID NO: 51699 - DNA, 808 bp, Zea Mays
cgcagcggtgcataaatattgtcgtcgtcgtcatcgtcgtcgtcgtccacaggagagtgagctggggttggagttggtggtgggggacgagcctccagtacgtccatgcgtgtaacaagttcagcaactcgtcaatcaagctgctcaaaagatgttgaggcagagtcctggtatttttaaaagctttagtcatcgcgcgcatcatctccttcaattccatttgagagacacactcatcgtcgttaagtttaggccccttgtccttgtctatttgattctttggtcctgtcattgttagcacaaaacagagacaaaaaggcaacaaacaatgtgaaccctacaactatctctcaggggtggcggtggaggtggtggaatacaaattatgaagcgtcttaccccgctcttacaacgttcttaccagcactgcaggtggtaaacggtgaccggtgtgactgtccaatgagcgtgggtgtgattgcaaagtagtacctgttctgctcgagagaaaattggagctatgggaaggctgactaaatatatatatatgtggcacacaagtcagtaacagatagcaatgttgaataagtgttccaagtactcgtcctagttgctggcctagaaaatgtaatagaacagttggaccaaagcacaagatctctgaaatcaaaggcagttctagtgggaatggcagttctaggaggtacaagtatctagtgggaatggcagttctgtaaatagggcagatttttcagcactagtagaaatcaaaggcgcgtttcaaaaggagtaccatcaaaagagctcg

SEQ ID NO: 51700 - DNA, 653 bp, Zea Mays
actccagcatgatgcacaggttatttatgttttattatagaattattcactttaaatatgattagtcacatgtctcaaagatagatggcaaatcacataagaagatcaactcttttataagctttatagtttgggtattacaaatcctacccccttacaaagaatctcgtccttgagatttaggtagaactaggaaagagatggggaaagtctacgcgtagttcttcttctctctcccaggtagcctcatcttctccatggtgactccattgcactttgcacatttttatcactttactcctcgtaactcgagtcaaggtatcaagaatcttgataggatactcagtgtaagtcagatcatcttgaacactaagatcctccataggtaattgctcttcgggtaccctgaggcacttcttcatttgagacacgtggaagacatcgtgtacatcagcaagatgttcgggtagttctagttgataggcaacttctcccactcgcttcaagatcaagaagggtccaataaagcgaggggacaactttcctttaactttaaatctttgcataccttggattggtgacaccttcaaatatacatgatcaccctccttaaactctagtagtcttctccgggtatccgcatagcttttctg

SEQ ID NO: 51701 - DNA, 357 bp, Zea Mays
tgagggcgtcggctacaacattggcctttccggggtggtggtggatctcaatgtcataatacttaatcaattccagccatcttcgctgatggagattgaggtctggctgagtgaaaatgtacttcatgctcttgtgatctgtgaagatgtgacatttgtttccaatcaggtagtgcctccgtatttttagggcgtgccctatggctgccaattccaaatcacgtgttggataattctgctcatgtggcttgagtaggtgtgatgcataggcgatgactttctcattttgcataagcacacatcctaaaccttgccttaaagcatcacagaagaagacgaaattctagtggatatctg

SEQ ID NO: 51702 - DNA, 417 bp, Zea Mays
ctcgcacactcaccttgtctcgtacaagggtcgaacgtaggttcccaacgcatgcaacacgtcttgcagcaggttggggaagtgccatgtctcgaacattgatgtgtaatgttcggtgacaggcccaaaccccatgaagtagtcctgctgaacaaacattgttagcctctttgttgacgttctccttgtcatcttcttcgtcgtcgtcatcttcatcatcgtccccagagtcgtccgggtcatcgcctccgggtgcaggagcttgaactgctggtgcaggccttgctgaagctgacaatccagctgcgaaggccagcgactccgccaacagggtgggcataggcagaagttcctccgagctatcctccaagatgactccgtgctccactcgaatgcgaggaagatccaccggaattt

SEQ ID NO: 51703 - DNA, 633 bp, Zea Mays
ccaaagcccaatcgcaagtgtacctctgacatgtgggtgtaatagaatcattaaaaggcatagctcatagccgagtggttgagagagggaatataaaaagggagactgctttgtaacaaactgaacctgaactattctgtggcaatacaaactccacagtcgagtgctgttccggatcccatcccttttcagttgagaagtggcagggacgtaacatttggtaccagagctggattttcacctgcattaagaacttcagtcagtttgcactatcttttaatctcgtttcgttactttccaacagtgcttgtgcagagttggtacttgtccatcgtggagacttgagagagtcgtgagtcttgcatggggcaatgatctggtgattgaggaaagtggcaacccaacctaatgatctgtttttcgagtgagccgggccaaaggggatgagctaccgtttcttccaatcaggagcaccataaaaagacgtctttgcacacgcagcgcaagaaaaaaaaggtagtgggcccaccgagcactaactagtgtgccagtggccagctgttcgtctggcgtcgctgtccggacaggacactgctgcctgggcatctccggcctgcgtacagacatttcgca

SEQ ID NO: 51704 - DNA, 715 bp, Zea Mays
cgaacctcgtcccctcgcttggacaccgtgccatccctcctcactactcgggcagttgcgctactcctaccagtgttgtctccaccctcaccggctccatggcttcacccccgccatacatgagctttacctcacccgctgctctcgtgactgtgtgtgccctccacgacggccagctcatccggggcatgtttgtgtccttcaatccagcctgggaccctattctccgggaccgcgtcgagctccaccctcaggcgggccgtcacgtgcttggaccgtttgtcttcccacgtgttgtgatcgcctccctagcggtcgagcccgtatcatctccctcccttcctagtgcctctgtcgaggcacctcgtttggccctctccgctcacaccgtaccttcgctgccacaacctccgtctcccaccaccgattgggtggtcgactctagcgcctccttccacactactactgttagctcgttatctcactcccatcatccacatccctcacatcctcactatcgtcgtgggcaacagttccactctcccggtcaccttagtaccaggtgcgatgcctaccagttgcgttgcgccctcaggtccgtcttcatcgccagctacatggctgacgacaccaggggcaaccataccaggaccagtgtaccagtacctagcgctaaccctcgttgttgctaccatgtcggcgaccgcaacacccc

SEQ ID NO: 51705 - DNA, 885 bp, Zea Mays
cggaggaggtgacggctggagggactgcaacatgtttggtcgatcaaggatcttcaccgacacccggatagggtagactaatgaacggcgcatcatcccaccatcggtcgtgataggatcaacaatttcaagcttaaactccctgggaatggagttcgggctggaacaccaggcggtaaccttgaacacctcacgatgtcgctcacaatctgggtgaagatcagcaatccagcaccactcgttgaggagagcttgcacagttgccaattcccaagcatgggctgggatgccagacacttcaatctcaacttgaaaaggcagagacaccgccgcaaatgagttgagaattctgctccatctcataacatggatttcttgtcaatctcatgaataacatcttgaaatatgtttggatgcttataatccgaataggaaggattcttgaaaccaaatcaagctcgcgatagaattagtggttattctatcaacatcccggaacccttagtagccagcccaatatacctagagtcggtgggccattatgtcctgccatgcatctgtctggtggaccatcctctgctgagaataattaacatgggttttatgaactcaccttctcaaatacatcaaggtggagcagatacaaactaccaacaaaaaccagttagtggtcatgcagtttgaaatcatgttggtccatcaccaattcgacctccaatgggttttgatatgggtaatagtgatggacactttgaaagagatgaccctcactcttatggaaggtttgatggagcaaaggctctccggtggcaaccaaagcttgctgctctcccaattttacaaaatcccatggtaataaccttggtacagtagtgttaaatctta

SEQ ID NO: 51706 - DNA, 589 bp, Zea Mays
ccctaatccatataacgtgggactaggaagctaaagagtacagtcaaccggtggtctatgatgacaacagttacagccacttgctaccttttatcatttttctttcctgcacatcagcattcagtttaagtactcacgaagtacgtccataaagacacactctatgctcatctatactacttattaaggctacaataataatcggttattctgtgttctgccacaattccctgttctgcctttctgattctctcctcctcgcgcatagtccattcccaccattcacactctatgctcatctatactacttattaaggctacaacaataatcggttattctgtgttctgccacaattccctgttctgcctttctgattctctcctcctcgcgcacagtccattcccaccattcacactctatgctcatctatactacttattaaggctacaataataatcggttattctgtgttctgccacaattccctgttctgcctttctgattctctccttctcgcgcacagtctattcccaccattctatatctatatctatcattatgattccccttgccgcaaagcccattttc

SEQ ID NO: 51707 - DNA, 575 bp, Zea Mays
aaataaagaaaatggttgtcgactacagtgcaagctagtttacctttcctctctcttcccatcctttttgcttacctcatttggttgtcctattggaaagagttttgtgctgctatagtagctcgtgggtagctattttagctttgcctggccatttggctgctctgttggagtcagtcttagaactcaacgactctcaggacattcatgcggtggaacttttgcgcatgcaggatgggtgtaatgtatctatggagaatcctaggaaatcttgctttaggtgcttctccccataccatttggccagagaatgccatgttgagatcagatgctggtattgctttttcccaagtcatattgaaatcaaatgtttcaggaagcatgtggcggagcatactgtttggaagcctattgtgaggcccatgtcggctgtttccactctcatagatgaacccacacaatctcccataaaaggtgcctttttgtcttctgacgttaatgacatccattcagtcaccttagtggataaaaccccaactctctccacccggcgatcgcctatctgcgcaggcttg

SEQ ID NO: 51708 - DNA, 538 bp, Zea Mays
taatcaagggtatgaacactaagattgtccaaataatctctatgattatgacttaagttcaatctacttttccaagatacacattaggcacaataaactttagttatcattaattaccaaaaaatcacaaagggtctagatgctttcatcgatcatagcgagttggccaatgggacatatattttgaatcttaactcaatggtactaacgtcgtgctcggacatcacacttgcctatcgcaacatcacaaagaatctgatgctagaggagttcttatccacgatcactaccagtcgaatcctgagaggccgttcactaggatgcctactagtggtcgctcctcttgtagttgtagacctgtcggaggtgacctacatgtgcacatgtgccctcctaggaaggccctagatgtcaacctagcaaactgaataccgctatagatgccacccctatgccctgcttagtggtcaacgaactcaccttcggtgttgcctgatcggggccaggcacaggttacaccaccacgggtgaagcaaac

SEQ ID NO: 51709 - DNA, 516 bp, Zea Mays
ctggaccttcaggaacaacaaatgaaggacttgatggagagttggacctttttaggccccctccttccatgaaccttgctgatgaacggtttcctgcagtagacaatggaacaacaaaggatgaagaggactagagtagtatagtgtaggtattgtacttatgtgaaataagtaagagaagttaagttgtataaaggagtctgtataattgttactgttccgcaatgaaataaagatggtatatgttggtgtgtcatattcttaccaaatgtttctttgcctcagatgccatcccggacacgtgcgcaggatggggctggtacatctcgcggtagggaggacactcccaacccaccaccggtaccacctactttggctgacgctatcgctgccctggtcaacgccaccgctgataatacgcgcttcttgcgcgaaatggcgggcaaccaattccaatagcacggaggcagagttccccctcaaggactgtgtgatactgcctatttggaattctct

SEQ ID NO: 51710 - DNA, 620 bp, Zea Mays
aaaaaacataataccaaacaattaaataaattatacttgtaaggataaatcttcagttctcacatgtgattatacaaacagttatataatatatatcgagctgttgatcaacctcaatcctttcctgcctctcgactgtaaaaaacttaagaacccaccataaagttgtttgttcgtctcgtcattttcgcgaggcgacacccaacaatctagtctctagcggcatttcggagtcatgtcaattgaagaatccgagtgatcgagcgttggattatcgattttatgatcgtattgtctgtctaacatactatctcaaaaaattgttaggtagatcttgaggccataagcctaaacacacacaaaaaaacaaaatctacaaaactattagcgcaacatcctttttatggtaaatattttatatatatactacgcacacgtcagatacacatacccctagctttgcccctgctcgcaagcgacgcttcttccacgctggcaggtcaccatggccacggttcctttccccctagccgagttattgagcgcagaccgcatattcttaagcaattctttccatcatggctgcctgttcttgagctattcctttccaccatggtcgc

SEQ ID NO: 51711 - DNA, 361 bp, Zea Mays
gtcccacggcttagcctcatggcttgatttatacgacacagctttctcctatcgtcgtgggcctcacgtcgtccttccgttctttcatgcacacggattcacccatttggtatggtgcctcgtcctgtcatttccgtcatactggctactgtggagactttggtgttgaggtctcctctgaccggggtcacttcgtcccatcagacagcgtggtatgtccatattataagaggaggcatacagttgtgctgacgactaccgcatgggctcctagcgacatgtcccgctgcggtcggcgtatgcttgcggtaccgttctaggactcgggttcgcttggtggagacttggttggtcgctccgc

SEQ ID NO: 51712 - DNA, 402 bp, Zea Mays
ctgggatctaacaacatttaaaacgaaccggtatgctaggtgcgctgtcggatctacgatctataatctcgattaaattgagctttgcactgaaccgttatgcaatcgcgaccatcggatcgacaatcaatggtctagttttaatgaaacacaatccaccccacaccgtcactcactctgattgacggcttggatctcaggcgccgaagggcggggtaccccaaactaatcttatccgtccgcccgcgatctaatggtcggaggctttcttctccctgcctgacgccgacgacgagggcataacaagcctcccacggtggtgccattgcagtgcgtgatcaaacctcaccctatcgtctgccatccactagaaaccctaactatgaaatgcttacggtaaaa

SEQ ID NO: 51713 - DNA, 903 bp, Zea Mays
ttgataggcaacttcccccactcgctttaggatcaagaagggtccaataaagcgagggtacaacttccctttaactttaaatctcctcataccccagatcggtgacacctttagatacacatgatcaccctcctcaaacactaatcgccttctccaggtatctgcatagcttttctatgttgattgcgcggttctcaagttctcccatatcaaacgtacttgctcttctgcctcttgaataatttcaggcccaaagaactgtctttcgctagtttgatcctaatatagaggagtcttgcactttctgccatataaagcttcaaacggagacatattcaaactggcctggtagctgttattgtaagagaactctgcataggtaaactcttgtcccaactaccaccatgtttaagagcacaagcccgtaacatatcttctagtacttggttggttctctcggtctgcccatcagtttgaggatggtaggccgaactaaaattcaactgcgtgtccaagcactcgtgcaacttctgccaaaaccgagaagtgaactgggatccctggtctgacacgatcttcttagacactatatgtagacaaactattcggggcatatacaactatgctagcttggcccctgtttaattagttctcacaggaatgaagtgaaccacttttgttagtctgtctacaatcacccaaatagagtcatacctagcagatgtgcggggtaggccaacaatgaagtccataccaatttcttcccacttccactcgggtaccttcagtgggtggagtagtcgaactggtctttgatgttcagcttttaccctttggcaaacatcacacactgccacatgtgaagcaacatccctttttagaccataccaccaatacttttgt

SEQ ID NO: 51714 - DNA, 557 bp, Zea Mays
cacctactcagcctggttatgcagagaagtgaaacaaataaaatgtgatttgagaatttgtggatgctgtttctccctcggtacaaccaaccaaacggacggataacgaatatcgtggaccataccatattgtagtatagtaatttgatcgagacttgtcacgatgtttactccttgcagagggccatttctgtatttccccccttcgagaacacgtggtggatgttagttgaacggttggacccagctagaagaggtcatgtgtgtctctgtctacctggctttggttaggtacttgggtgcctccgtgcctggctgcctattcaagtaatatatacactcagcatggcccgcacttgctttcgttgttcttggaacacaaaggggaccaaaggtactttgttatgatcacaaagaaaagcaatgccttcggttcggagcatggcgtgtttagagcaggcctggaggaatatcgtgctgtgacagctaattttttgcacttggttgctgtgatcgtttctcacacacactttatggtcaaagagatattttttttt

SEQ ID NO: 51715 - DNA, 451 bp, Zea Mays
ttaggagcgattttgacttgctaggaatttaaacccactcaatcttttttgatcaatatagattgagattgaaatgaataaaccctaaatttattctaagagcacacaccacagccataaagcatatggctttggcccctctagatgagagaacgctactactagctcgctaggacagttgccaaaaaccatggaagcacatatctgtttgggacttatggagaatggcttcggctgaatgcctgaatcgggccgggaagcacgaagcagacagacgtgcactttccaatgcagttagacagagaaggcatggctgtgatgttataatgctgaaggaccccaagaagagattatggcttgtcgtttaccacgacagcccattatttgtgggcttcatcgagggctggaaacatttggtggcagcaaacgaccttcgggctggggacgtctg

SEQ ID NO: 51716 - DNA, 352 bp, Zea Mays
ggaaatgttatcttgttcgtgtcgacctaataattttaagggagcagtagcaagtgggacaaaacgattgatgtcatgcatgagctaccctaccctttcctgctacacttttttgataaatgcaatctgtcctgcgtgctgctcacttccacgtgttcaatttggacgctaatcatcatcacgtactacttactgttcagtcatcccctatgcaaagtcatttacaaatttaccattcttaggtcttaagccttgttccgttatttaagttcacatggattaaatgaaattgaataaattatgaagaattttgacttgtttgatatttaaacctatttaatctcgtccaatc

SEQ ID NO: 51717 - DNA, 461 bp, Zea Mays
atgatcatattcagtgagactaacaacaactccaccatataaagtaaaggagagagtaccttgagcaaaaattttcttatcctctgccagcttgttcaaaaactatgttcacttgcctaggtgtctattcagtgttgtagtacttaccccttgatggtatagataagacctatgacagaacccgcacttggcttttgtctccataaccccaagttctttcgtggatgtaacaatgaccaccttaaaatacttctagcaatcatccctctttactctattcaccttgcacttggagggggacaactgaataccttctctcgacctattttctcatgtctttgtcttctgagtctttgacaactcatctccattagctaaaggtaggctctcattgtcatgatcaaagctattggcctccgattttgataacaaaacctcccttttctactcctcccattgcc

SEQ ID NO: 51718 - DNA, 418 bp, Zea Mays
acaagcttgaggagcacgagtgaatatattgctattgttgttggtatgtgagaaagttcaactactttcactatatcaatgtgtccttgttccattgcactgcacgtttaatggtaacgagctatggttctctactatatgttgtcttggttgaacgtggtagatatgctatcgtatagcatatatgcttcgtacagtggtatcagagataggtcatgcacaaatcttttttaaatggtttgcatataaacgatatgcctactaaattaaatctacttttgctttggttatggcacgaattaaaatggatgttgtagttgtcggtatagttatataacttgtttgccctagcgactaaaatcaccattgagacataagatcaatttgccttccctcgtggccactcatacaacttgcc

SEQ ID NO: 51719 - DNA, 321 bp, Zea Mays
gaagcacctcaccagccgacgacacacaacagctcggtgggaagaggagaagcaattgaaacacttccccctaaggtcggatggcacgaccctgcggagaagaggaggggacttgagaggacggaggcgacgtcaacgagcttgtcttccttcaaccattacccaacatgcgctattgtcatcctcccggtctagaaagggagcaggcctgggcagaaaaagagcctccttgtatgatggcctacgtcgatgaagtcccggagaaacaacaggggaggaggccgggcttccgtcgtcgcgccacctaagggccttggaacg

SEQ ID NO: 51720 - DNA, 768 bp, Zea Mays
ccagtttggagctccacgactgcctcatccttcgacttcgtgggcttcttctgttaatttcactccaggagcttcctcttccgcgggtgtttctggagcttatgtgctaccctctgcggatggtagagagcagggagacgtggtgataggtacggtctcagatgatttgtttgttgcccatgctctttttgattctagcgctagctattcgtttgtttcggaggattttgtgtcgtgtgctggtcttttagtgcaaaggatgggtcatccaatcgtggttagttctgctaatggctccatttgtagctgtttagtctaccagggttgttcaatcattcttgttgatgaggtcttttcaactaatctcgtggtgatttccttggggtcgtttgatgttatcttgggtatggattggttaactcagtatcgcgcagttatatcctatctttggaagacagtgtcattgcaggcgtcattgggtagggaggtagtattcttggtgagttctccaaagttcactctctccctgttgacccaattacttctggatcgtcggtcaaggaagtcaggaattttcttctccatggtggtggagagtgggactgccttgtgggtgcaggacatccgtgtggtgtgtgattatgccgacgtgtttccagtggagcttccaggcattccaccgaagcgtgatgcggcttttgaaatcaaactgattccgggaacgcagcctattcataaggccccgtatcggatggctccaaaggagca

SEQ ID NO: 51721 - DNA, 858 bp, Zea Mays
atcggattgaagaatccaggtgggaatattttttctagcttgcataacgacactggtatttgtttctccaacttctccatcatatttttacttatttctttggcacagatctgcctgtagaaataacttagctcagctattgcttgccacatggcgtcgggcatataaccacgaaacatgacagggataatcctcttcattaatatatggaagtcatggctctttaacccagttagttttcccgttttcaaattcacagctcttttcaagcccgcagcataaccatcgggaaatttaatttttttcatccatctcattacctcgatcttgtctttagaggtaagacagaacaaggcacgtggcggcttaccattgtcattgagcacttgggttggtcggtcacagagcattgctagatctcttcgagctttcagattgtcctttgttttttcaaaatgcatgcaggtgtgtatgagggcttcaacaacattactttcttggtgcatgacatcaatgttgtgcacaagaatcaatgacgacatataagggagctctagagaccacatatatgtgtctagttgtcgtccactccgaatccttcgtacttgtcccccttttcatttaggacaaggttgttcagctgagcatatatttctgctgcgttaagacgtttaggcggtcctttggtgaccatggtgttctttataaagtttttcttatcgctcctaaaggggtgtttcttgggcaaccatcgtcgatgacaatcgaagtaagtgatctttccaccatgagcaagacagaagcaatctatatctgaaccgcaatatggacatgtcaatctaccatgtgtactccaac

SEQ ID NO: 51722 - DNA, 300 bp, Zea Mays
gctgagccgaggcatcactagcacgtgctgcctcaaggtatgagagtgaatgtggttatttcagttgattcggtatctctacattcggcaagggctcatcagagttagctacgtgtactctctgagtcacagcaagccatcagggagatagaagaggaagaagagaaggtagaagatggtcacatctagatcccatatattaggtctatttaccccgtaattctttatgtgatcccgatctgaccacatcaaatcgtgtcatgttacctatttctgtgcagccctactaatttattaaac

SEQ ID NO: 51723 - DNA, 1293 bp, Zea Mays
gagaaataatcataagatatcacatttaatggacttaagtggcacccaaaccctagaagtgccaaaaaccctaaaaagacccctggaaaaccctgagttgaaaccctaggggttatatgtaaatttggcacacttttggacccaagtgcaaaaaccaaggtattagggtacctcaaatcatatggttcacatatttgaggatttgcaaatcaaaccatgagacttgggcttatttgcaaaaagccactctacacctctcatatgcctaagtccaaaaccagtgaacaaggctgactttggagctctatatttctaaaaatatgaggaatttgcctagggtcaacacatcaaagttgtagaactataataggagaacaacttttcttaagtaactaagctttgatcacatacgaagtttggagaaaaataagctcaaagttgtgctgtcagtcactcttatgactgaatttaggtcaccagtgacattggctagacttttgggtcaaattggagtaggatctattgctcgattaaggatagttgctatagtcgatttgtagctagatcatagggctacaactttgatatagagagtaggtcgagtcactacatgaatttgggaacaaatctccctgcaagttggtctgacagactgactgaataggcagcgtgatggtacattgtccggatcagaacgccagactcagatgcctcaccaccggtgatcgtgcgcccggatttgcgcccgccgcggtgattcgtgcccagcgcagatggataacgacgaagggtaaaaatcttggcgctcggattagctcgggctcgctcaccgttgcgcccgtcgtacccacttgaaccgtagctggttgggatcatcctcgccggcgttagccgctcaatgattgtgcgccacgtaccttggtgtcttcccacgttgcaatagctcgggttacacatatctggtgatcgccggtgagctcgccacggtgaaagcaaccaatctcttgcgacagtgcccttttcattctccggccgccaccgcgccatctcaaattcccggaccatcgctcagggatcctataaattgatcatgccatcagttttgcaagatagtcaagcacccaatccatcaactcgtgcctccaattactcaccagagcccccgaattgctcacttcccccaaattggttttccgccgctgtgaaaaagctctcaccgtggccagcgtgctacaggtccgatcatgtcctctgctctcccgtttcagtacccttatgttctcctgatgctcc

SEQ ID NO: 51724 - DNA, 765 bp, Zea Mays
caagaatggttttatgtgaagaatgatctggttgagagagaagacatcaaggggattatccaacgtcccatatggtctcacttcggcattaagagaccatcccttgcccttgggaacgacatacaagcttgacaagctacttataacgcggtatgtacctacataggcaccagggacttagtccaagagcacattgcctacaaagtgtggccactcgggagtgggtgggagatgccgaaggaggctgctgctgggtctagccaaagtggcttgatttacttgaagtatacattcaaatacaggagccaatttgatgaaccaaacgacgactggctagatgccatcgaagccaccaacgatgaattagttggtgcctatttaagggctgaagatgacgctatgactgtgtccttcggaggctgaggcgagaaaaggctaaataggatttttgatgttattggttttgtatacccagactactgctatccctcgtgaaagcatggaaagaaacgaagagttgctgcttcggcgatttctactacgccgaagccggaaaaggttaaagttttgacgcatcgtcctaagcacactgaaacaacggaagagccaaggcctgctgaagggtcctctgctgttgagtcaagtcaccctgctactaccgaagcaagggtggaatcggccgaagagccaagagtgaacatatcagcggaacaatcgaaagccttaagttcattgcaagaaacagaactgccgaaggtacaaaag

SEQ ID NO: 51725 - DNA, 378 bp, Zea Mays
ttagcagccccggagcttgtggaattgaagaagcaacttggagaactccaacaaaaaggatttatcaggcctgccgcttctccttggggagctccagtactctttgttaagaagaaagatggaagcatgatgttatgtgtagattatcgagacctcaatgcagccaccatcaataataagtaccctctgcctcggattgatgatctgtttaatcaactaaagggagccaagtacttctccaaaattgatctgaggtcaggatatcaccagcttatggttcgacaagaggatatcccaaagacagcattcatgacccattatgggcaatacgaattcacagttatgccctttggtctaactaatgccctcgcctttttc

SEQ ID NO: 51726 - DNA, 330 bp, Zea Mays
caggagggagaggggggttacctatgtttgaataagtccacaagctaactatagaaagtaataggcggctagcgccattagcggcaggacagattgcggcaccgtctagatggttgggatggcaaccatcaagcatgattgtgctgtgattgcctcagtctcctattcccatgtacagacgcttgttttttcctttaaatagagagcacaatcaacagagaatagtagcccttcagtagcaacaaatactattgtgtccactgtgtgttcgtgtgagtttgcctcccatcgatcggagttctaacaattggtaccagagtcgagttccgc

SEQ ID NO: 51727 - DNA, 465 bp, Zea Mays
ccagcagcagcaggagcaagaccgacgacgggtggctccaccgcctcttcatattggaagcacacgtacgtactcgtgcccggctaccaagctaattaagcttcctcgtgttcgtggcgtgggcgctttttatttactgatatatataaaccatgaatctaacgctgcacacgtccgctctcgcaggctgtaattagaccttagtcgtcgtggactcgtggtgatggtggtggtggatcgatgcgtaaactaatcgtctttctgcttgcaagttgcgccaggttcatgtgggggaaagctacgcggtgataggattagcgaaggttccaaacgacgcctagctcccccgggctcgcgtgttttcttggccaggggggatcggcacggtggaaggatgacgtggcaacttcgtcgttgccggcacgtcggatggaaagattgagacattcccttgcttcagtccag

SEQ ID NO: 51728 - DNA, 1708 bp, Zea Mays
atcaattctgtgggacggtagtacgactaagtccgccagaaatactaccccacttaaaagaattctgacttgggagcatttgaggtggcatagaaggtctgaccctggggttcgggtgaccaaggggatttctaaagatgcagtggggaggccatgcttttccacaaaactagtggcgatcaaagaatgggatgccccataatcaaaaagtacagcagcgggggtaaattcgactaggaactcaccgatcactactccaggggcttgctgagcttcttgggcgtcgacgtggttcactcgagccctgctgtggaactgggtcttgcttagctggctgttggtggagggtgccttggaggtgggtgctggaatattcttggggccattcaccgagttggagtaggcaggtactgatgtcttcaactgaggacaattattcttatagtgactggggtctccacagtgccaacaggcattggctggaggttggctgcttgcaacagatggggtgtggagggaactttgaccaggctggctgaaacgtgacggagctgaccctgttggcttgctgaagctcgaccctttgggaggaaatcttggctggtgaggatggtcttgagtttaggtctcagccccttcaagaaacatgccatcttcttggcttccgtgctgacatcatcaggtgcatagtgagctagctctgtgaatttgtggacgtactcactaacagatcttgctccttgagttaactctcgaaattcttcttctttgagctggacgattcccaagggcacatgatgctctcggaaagcggcttcaaattctgcctaggtagcatctctgatggcagcgctgaatgtatcccaccaggatagggccatcccggagagttgatgagcagctaggtgaacacgctggttttcagggcatccgatggcctctaacttcctctttactgtgcacagccagtcatcagcatcgagcgggttgctggatccgacgaatgtgggaggcttgagccttaggaactctcccattttgtcctgaggtcttcctccaattgggcgctggttctcgaggcttctagtgaggacctcaatgagtcgggtttgattggctagaacttgggctaggtctaatggcagctccggaggcgcggggagctaggtctcactcccttctccaccgacttatccttcgatacctaggggagtccttgctccaattcctgaggcggtaggcgtggttttatccgaggccatttgccagaggggagaaaggattactactttgcatatgccatattttttctcaaacatgttatttatttagcacgccagttcaatacaagcatacaaccaccatagattacactatgcacaagcgttttctaaggtgtccccaaactctctaagatcatcaatgctagccagggacacttcctcaacgtcagagaagttctcgatccctagggagggtagtgttggtggggcttcttcctttgggtcagtctgacatccttggctcttgaaacgctttcagttctttttgacgggggcgagcttctttagcctcctagcatagtccattttcagggtccggtatgcctcacgagtattggattcttcgccttctgccatctcaagactgtcttgaagagccgccttttcttctttcaattccttgatttgttgctctaggctttcca

SEQ ID NO: 51729 - DNA, 390 bp, Zea Mays
catccgatcgaagagtgcccccgcggactgctttaccacagggtcttcggccttaaaaatttcacgctcaaagttttcatctgattggtcgaagacctcatagtgtttgcacccctcgcaggacaacgcattcatggccccctcgcatgtgacgagggaggcgtaagacatgaagccctgcacaatagtcgtgagcactagcagctcctcctgcaaccattcaaggaagcaaaggttggcctcttggtcgggcacatcgaaatctgtagtcccacacccagatcgcggtatgcttccgcgagctgcgcgtgcgtccgcacgacttctgagcgtactgaggtctcggccttgtccacgcgactgtgcagggcgttgaacctcgcctcccac

SEQ ID NO: 51730 - DNA, 887 bp, Zea Mays
gtccatggtacagtacacaaagtgctcggattggatcaagtggaaggaagctattgaagcggagttagcctcgctttacaaaagagaagttttctcggttatatttctccgagaaaacttgtgataatcttgttgatttattcacaaaatctctaccatactctacgttttccgacatttattcggtcggatagaatagaagttgacatagctagattgattcaaccgtgtttcatcccaccatgcattttatttctctattttatctgaaaagatacagtatactttagttggcgctcaattaatttctgatcagttttaaaaaggttgctaatcataaggttctcgcgatcacatctctggtgatgtctctctaaaagcactcttcactactccgcgggcgatgtctctaaaaaagcactcttcggactgcatgcatgatgcacaaggaacctccgtttgccgcccaacactacagcaggtatggacgagtcaaccgatcgggatgatacctaccaatgatagacgccattgtgcacaggtgtcgttgttcgtgttcttgcactaactggccaagctgatgcgtgagcaagacagacactgccagcgctatgagagagatgctcatgcatgcatcgcaattggcatgggagtccggacccgaggaagcagcgaggcggccgtagagcgatcgccggtgcggcccggccttgagatcgcgcggaagtggactccggggacccattccccacgtggcctcattgacatttttcgcgtgtggctttcggcccgcggggccctgtgcggacgtgtgaggccctggctcactgcctgtgggagcatggcccaccctgctgtttggttctgggatctcgtgcttttttcgt

SEQ ID NO: 51731 - DNA, 445 bp, Zea Mays
gatccggcgcagcccgtgtcccgagacgaagcctcggaggtgggagaaactcccgacaaacgagtgcaccgagaaaggcgtaactcatgccgccgtgatcaccaacaggctcaagatcgggagcgagagctagccgaacaagatgccaggctttggcgagaaaaccctctcctcgctcggaacctgtaccccgatttctctcaagcactgaacacgccgagtgaagttggaggagtactggcacaattagccgacgacctcccatggaccgcagacgcgaaaggttaccggcggctgcttactcaggcagctaatcatcttctaccctttgctcatcctacgaatgacctatgtcacgccatcaacagccgacgagatgcgtggagcaccatcagcgcttcgcgtgaccgacaacatgaaaatgagataaggcactgggaggaat

SEQ ID NO: 51732 - DNA, 787 bp, Zea Mays
tgactgaagcatggccattggatttatcgtatccgccgactccgtttcttctgccactcacagacagcgtttttcatggccatcacgtgtgaacatctaccacaaaaattttctggaaccggtgttgattttagcgcgaattacatttcaagaaagatgtactaaatcacttgcattggtaattgtaagcgctccgacccgctcacaaatgaatatgattctaatataataattagtcaaaccattttacatttagttatttttatatacaattacgaatgtttatgatactaaattattgacatcggtttcctcatgaaatgtattttttacagtatatacctatattttgtgtattaaaatttaaaaaatattccaaaaagatattgatatactcgtcaaaatttaaaaaagactaagaacaaagcttaaactgcatcttttcatgcaggtagcagtagctatcaggcatccgtttctccgtttgaccggtttcgtttgccagcatatcaaagtctcgttgtcgcctctgcttccatgcatatgataagttttcaaggataggtatcctactccagcagaattctggacatttggcagatcctactgattttagcattgaaaagggatgcttgagtttgagcgcgccggtggcaacgactgctttacggtttacgcactcgattgtaaactctcagcttaaaatgagttgttttaggcaattaatttcgtgctcaaattggcatccgatcctttcttgttgctcaaccaccaaatttgacaagtc

SEQ ID NO: 51733 - DNA, 416 bp, Zea Mays
atttctagcctttagcgggtatatggattacagatcgagagctaaatcaagtatatcactagtgtgcaagtagatcgatcacaaaccctaaaacaacaatatgaacttgcaagaatgtaaatgaagcacactaggcatggatttatctcgtggttcgactcactaccaaggcttacctaagaccacgtcgttgaggatgtcacaaaaatcttaggcttgccaccggggcttgcccttccctcattctcaaattaagagaccaaactctttaaagtgagggtgatttcttagctgtgattcgagtgttacaaacatatctaggttgccacaacacttggcaagtgcaaggatgatgcatagtcgtctaggagcaaggtccaagagtaaaaccccctagaaccatcggccaaacaaac

SEQ ID NO: 51734 - DNA, 833 bp, Zea Mays
gggaggaccagcttctgggatttggccggcgccgatgattctcgaccgatcggccggtagtcagtcccgacgacaaggcgagatgcggatgctcagaagtcagatgcatgcagcagttcgtggtggggaccggcatgcgacgagcggtcgatcggcgcccaaggcccaagcctagccagctaggcaggagctgctgcccgatggatcggcctaacgaacaaataacctcgtgggcgaccagtgagtgggcgaccagttagtccctgtcgagcaaccttgtaagttggagctcgcgatcaaatctttgtcgagtaatcttgcgagacaatgcagatgagcaattctctgccgagcagcctcgcgagatggagcggaccaccagatctttaccgagcaaccatacgagaggggtgagcaaccgaatctcgcgctagtccgactagcataagggaaggacgatccaatggtgtgagtccacgtcagcaagacaagacgggtcactatcaaactatacccgggcctcgagtacagcgtcgaaaggtccctgacagatgacacctcgccgcgtactgtctcaagcaaacgcccaccgtcgaatagggccagtcaatccagtcgaaaggatcttagcatcagggtctctacagtgactggcatatcaggaaagatgtaacagatacaccatgtcggacgtatgcctacgcatgacggcaagtcacgcaggcccataatgacaagcgaagctacgctacgcgctagcgggcaatgtgactgacccgtgggacccaccgtgcactactacgaagatgtgtgttgtggactcgctacaggac

SEQ ID NO: 51735 - DNA, 463 bp, Zea Mays
accagaacacccccgctcgtggatctgctcagaacaagactccacagaaccagagtagaggaagggtcaatcacgtcactgcagaatcagtgcttgaggatgacgacatagtgtatggtatgttcctcgttaactccatacctgcatcagctttatttgactctggagcatcgcattcttttataactgagtcatttgtggaaaaacacaacatacctaagtacccccttaagaagatgttacacattagttcaccgggaggtaacatgaaggccacacactcatgcccccatgttaatctcaagattcaaggaatagaatttttcggtcgacccagtggtcctaggatccaactgtattgatgtgattcttggatgcaactggttgaaaagttgtgatggagtgatatagtgtgccaatggaacaattatgttaacaagtcctcaaggtgaaagaatccaag

SEQ ID NO: 51736 - DNA, 502 bp, Zea Mays
gggcaaggttcgggtggaggttgcggaattgcgtgttgagtgcgcaacacgccactatttggatggtggttctcccacccgtgtcgggattcagcacccttaccgttcaccgccccgtggtcgcttcgagtatggtacccctgactgcaggacccaaatagatttggatccatagatcgacggagtcggaatttgtaataatgcttaattcagtatcttagtcttagtcagtcttagttagagttagtttgcttatcttatgttggaatgtttgtcatgatgaacttgtaatgcagtcggatctttgtaatgattgtcaccaaggtgtgggtatcccctgcaacttggtgtatttattaataaagtcagttatttagttgggcaatccctttatttccactttcctctttatctgagaagctgtcagtgaggatgatcaagtgttcagtgttatgaagattttctatacatattttcttatgctgaaaaactgcagagtcag

SEQ ID NO: 51737 - DNA, 492 bp, Zea Mays
gttgagtgtgattcaatatgcttgttgttcatctgtccagaaatggtgtacatgctcttgttcaattagtgtgaaccatatgcttctgaatcctggatggatgtttcattttagttcaaggtttctgcaggtggacgacaagtagttagccgataagatcatgtatcaatttgtcttcatgttagtctgggttgttgattttttgttcacttcgtttctagatagtagttctgattaaaagtgagttattccatagtgttttgagtctaaattcttcttgaagcatgcttctgccatggttacaattgaactttgaaccaagctgcaaatgatccaagagcatctccatgagctctaggtcacatgtcaattaatttcattttcagttgatttcagttcagtgtgattcaatgtgcttgttgttcgtctgtccaaaactgctaaagtagcttctgaaaatggatgacatgctggacacttgctcactcggaa

SEQ ID NO: 51738 - DNA, 802 bp, Zea Mays
tgttgatgtttagtaccgacaatgcaccatagggtgtaccacgggatgcttttgtgagtcggcaacatcaactatagctcgatggttcgcttcgagatgcgacaaaacacacgatttatacaggttcaggtcgcgagatgcataataccctacatcctatttgcggtgggttgtattgatttgatatctagaggtttacaatgagggctagggtttggatgtttgatgagagagcggggggtgtgtataagatcagatgccttggagggatccctcacctaccttatatagtccggcgtggcatgggttacaagttggtttccttctatattcctagacggtttagattacaatagagtccttgtcttgtgcgccaagtttgttcatttggtcagcctcgggcccaagtcagtcggtcggccctagagaatacgcctcatttgtacctaggggatacctatcccccacaacctcctccctgctgttgaggctggcctggctcggcaggctctccttggggagggggaggcggtagcgactggaatggtcggctatgcccgacagagttcttgaagttcgtgtagttccacggggtgtgtcacatgtccttgtggtatgggcactgagagtcaagaatctcatgaagtgtcattatcccaccacggggtgcgccgcgggctcgagacgctggtggcccagcggtgtgcacttcctcccagggcctcttttcccgacgcttgtccggctgctggtttatgtctctccgaggtgttggggtgcgggcttcgtacctccgatgagg

SEQ ID NO: 51739 - DNA, 336 bp, Zea Mays
gacccaactgccccctagttcggttaggacaggagtgataggacattagagctggacatgccaacgttgacatgccttcggaagcacaagagacaacatacaacccaaaggcaggaaatgccacaccccatcaatttcttcatgtaacaatggctacccgatccctcaaccatataaaggggatgaggcctcctaaaggaactcgagcgaacttggcctacaagccaacttaacattcaggcattccttcacccgatctagttactcgtagaaacacaggcatgagagcctaggctttgccttgtaacacgatcaaacataaaaaaagacttcaac

SEQ ID NO: 51740 - DNA, 591 bp, Zea Mays
tcatttggttcacaaatatgtgggtttgcaacttgaaccctaggttttgggcctatttgcataaacaccacttttgtaaccatatggcgaagtctgattttcagaaattaggttcaactttgggaccttgtaactttcaaacaaaagggattttgctctgggtcaccacatcaatattgtagatctatcataggggaataactttgcttaagagagtaaatatggttgttatgcaaagttaagagaaaaataggcgccaagttgggatgtcagtcggtttgctgactgaaatatggtcaccagtggtagtggtcgaacttgtgatcagatttgagctaaatccagtaggaattcgactaggattgctataacaaagataaagaggatctataggactacaactttgctgcagagcctcggataggttgccatggaaatttgagagaaaattgagcccaaacattgactgtcaggtgcactaatggcagctcacgatggtatagtagaccaaaggagatcagatcgacagctccgctcaccgccgatgagccccgccgtgattcgtgtcgtcggtgtcccgattcgtgcccg

SEQ ID NO: 51741 - DNA, 1006 bp, Zea Mays
aatcgtcaaaccattaacctctcttgagtcattgttgaccttaaatagttcacaaaaatatttcaattttaaaaagcttctctctgtcgatgtaatcatcatgtgtatagtaaataatactcactctgtatcaaaatagaattcgttttgcttctctaatggattcatcatcatttgttgaatatagacataaaaatgaagaactaaaacaaatattgttttagaacagagggagtattcgataggtaattgagatattagtttaacaatctaaacgaagttgattgatagtgcgtcgctctttgtatatttatatctagggtaaataggtttaacgggaaaaggtactagcgtatagtagataggtgtccctctgtccttgggtgccgggtctgtctatttactacacctcgttgaatacttaaaaaaaacgtgtcatctagagcgcttgtgcgaaatagaaagtcgaaataaaaagagcataggagcgcgtctattaacaacatccgataatttgacagcaaggaggtctcccctgtacgccaggatctgcaatggagacagtgaaaaatagccggccaagagcataacataagcagtgattatactggtgtaaatggagtgtggtgggctacttactattgggatcgttggtaaccccataaatcaataatgacatgaccaagatcagaagaggcagcagccgccgagtcaggaaaccgtaaccgtatctttgcatgtttccttgtaggcgccgagagctagggatgactatgctacgcctaaaatcataaagattccagagcctattaatagccgttgccccggctgctgcaactgaacccttgacccgggaggttgtgagaaatctgatccaggtaggaggattagtcttttaccgtgcattgtgtgtaagtttgacgagtctcctttgtggtcttatctcagctttcaacttcctgagcatggatttcaagcatacgaaaggagaaggtgctgccatata

SEQ ID NO: 51742 - DNA, 505 bp, Zea Mays
ggagtgttctataagtgtcctaacaaattcctgatatgttggtttgtttgtttttgctttgcttcatgttctatatgtgttgttgggttgggcaagagtatatcttatagtagggagacaacatgtgctagattgaggaagcttatgtggagtatttgtgcttgagtcaccctaagttgttgaatttgaatcctacagtagaaggtagcaggagaagagggcaatggcggtttagaactacagttctgtcacttgaagcctgagatgtgtgagataaaggtataattggtgaagtgatgctcaatatcattgaagcaaaggaagagattgctaagtgaaacaagtcttcaccattgtttagttgtcacattagttaaaagctaggtctaggttagttatctatttagttgacattgtcatcgtatttgctatgtgtcattttgttgttctaagggtactcttgtcgtcaccaccatacgccacacactaataacacttttgtcat

SEQ ID NO: 51743 - DNA, 489 bp, Zea Mays
gttgtattgcccttttatagctcaagggtagattttacagtgagaacttgtattcttcctgggagtagttcaacctgttgtctttggttgccttagccctcctagcgtcgtccataggggcacgtgctaccgtattcttgatgtggccttccatcttgtctaccccgacttttgtgtccttgtagcttgtctgatgtcaacgtagtggtacctggcagctcccgtagagtggcctcacagcgaggttcaggattgtattcagtacaacttcatcttctgtcatgacccttgcgtcacctttcggtacacattgcctacaccccattatgatgtactgtcctattctttcaggtattccagtcaatgtagaggctacgatgttgaggtccctgtaacgaggtttgactggtcccattagtaagcgggggcacatctgaggatgtattggcggtcgtgtttgacaaaggcccttcgacactgttctcctgg

SEQ ID NO: 51744 - DNA, 326 bp, Zea Mays
ctaatttcagcagccatcactctgaattaaacctcaactaggtggcatggggagccgagttgcatatggcacaatggccttatcattccgaagcttaatctcataggactcataaccatggtcatcaatttttctctcttcttctcgtcagcttttacataaaaccactcatttgtccacccggtcgaccacttggtgcggtagccgattaccggggccctggtgtcctttcggtatgcaaaattatagcatccaaagtttttgtgaaggccatccgccctggccttcgtctgatagtgcaactcgtgcactcggcagaaaccttc

SEQ ID NO: 51745 - DNA, 376 bp, Zea Mays
aaagctctagctgatttcaagtggtttgcctttatcctctcacatgtgtcacattctgatacatattgggctatctccctcttcattctggtccaccaatacaagggcttcaaatcatggtacattttggtgctaactggatgcatggagaatttggagagatgggcctcgtccaagattttcttcttgagatccttatttttaggaaccaccaatctgctttcaaaccacaatataccctttccatcttggcggaaacatttatacttctcggtcttctgatggaggttctccttaataatttgcactcccttgtcactgagctgggccatgatgatctggtcttgcaaagttggctcaacggaaatgtgagaca

SEQ ID NO: 51746 - DNA, 527 bp, Zea Mays
aaaacttaaaattccaacaacctcactcatgcacatgtgttcatattgatactacattaccatgtgctaatgcttgttgtccgtcgacaagcaaatcttcttttgagctagaattaacaggaacaaaagaagacacatatcaaaagctcaaagaagagaatgagaggcttaagatgagcttgacacaacttaaagagaagtgtattgctcaaccttctcaagataaccgtgaccacatggtgaagaagcttgagacgggaacaaccgaagcatgcactaactcccttgaagaaaatgtcaaggacttgaggattgtcaagaagaggaaacaaaagaagaaaatcaatacctcttccaaaagcctcaaccgtgcctccatacaaggtaacatccaaggtaataatcaagccacacttcacactaagaaaaataagaagtgtagtgaatgctttgaagtgggacacttgattaggtcatgtccctacattaaaagtgtcttgattattaacaaggatgatagactttgt

SEQ ID NO: 51747 - DNA, 1483 bp, Zea Mays
gggtacttaaccttaaatagggttctgaagggtaaacaagagacaaatagggaaaaccctaaagtttaagtgaaatagtcataaaatgttcttaaggatggacctacattacattcacacccctgagatatcaaaaatcctaattggaaccctcgaaaaccctaaaactaaaccctagggggctaaatgtaaaatcagtgcacttttagactaaagtgcaaaaactagtaaagtaaggtgttttaagttatgtggttcacaattatgaagatttgcaacttgaaccctgagttttggacttaattgcaaaagagccacatttgaactcttttgactaagtctgaatttcagtgtgatgtgctcatctttgtgaccttgtaactttcaaacaaaagggattttgccctaagtcaccacatcaattttgtagctctatgaaaggagaacaactttgcttaagagtgtaagcatagttattgagaagaaattggagataattaggtctaatgtctggctgtcatgctgttaaaggctgaatttcagactgacagtggcctagaaccaagtttgagagccatttcgaccatgatccagtaagaatctatctagggatgctataacaaagatgaagatggttggtaggctacaacttggctgcagggcattggttatgttgccatatgaatttgggagaaaatcgagctcaaagatgatctgtcaggccaactgaatgaggaatcccatggtacagtgcctgaacaagatcagatcaaccgcgcatctcaccgccgacgacctccgccatgattcgtgccgccgccgtttcgattcgtgctctgggtaagtggataacgctcggagtatgtcgccgtggataagctacggccagcaaaatattccgggcactgtacggtggattcggatatgcacgccggtgactgccgccttccggccttgcgccgcgtgtctaagcatctccaccgcatcgccgtgacttgctttagctccccgttgatcgccggagtgactgccatggcataggacacgaattcacgcgcgccagtaaactccccctcctccgaccgccgcgcgtcattgctcgaattcccggccaccactcacttaacctataaattgagcccgcggtcagcttcgcaacatcatcacgcaccacaccacccagtattgctctcagtcgatcaccagtgagcacgaattttgaacttcccccaaatctgctcaagaacaccgtgaaaacgacctcaccgcggccagcgctattccggttagttcatgctgcctgctctctcgtttaagcattctcatgcgtccgtgttgcttgccgacccacccaattgaactagaccgccaccaatagcagggaatgcatggttctttggttcatccgcgcgctcaccgtggccagaccaaattagaccaccattcatgaaattaggttgggggaaatgtgtgggcgaggttc

SEQ ID NO: 51748 - DNA, 886 bp, Zea Mays
tgtaatttgaagtttatgagtggtagtgaacttgttatgtgtaatgacagaagtttatctgaagtttatgagtgttatgtaatctgaagtttatcactggatgtgtattctgtgttcttataactatgtgttctttttcaaggtgttgttgtatttcgacggccactagaagtgcatgtgtgctgatccacgataactgtaacctgcgcaaaaaaaatagtaccattgtgagcttccctaatttcatcaacaatcgaaagtacaaacaatgtgtgctaaaacaatactcacaacgatagtgggagacccgacattttgtagccttgcattgattctccatggacaatcacctcctttgcaataacctcgatatctccaaggtgagcttgactcaattcctaactcaaactcattattaatcgcatactgcctcatagccagtctgaattctttcatatccttgtacaaactaccaatgttcattatcggattagatcggttgcaaacaaatacccgttcttgtggtacgcaatcagtacagggcaatgcagctgtttcatcatcaaattcatcgcttcggcggacaccagatggtctactggtaaaagcatcttgcctttgagtagtttcacgttcatcttctgctagcaatcctaaccgatcaaacatcactgactcagaggcaatatcttgttctccttcttcttcccatctatcatcaatctgtattgccccccaatcaatttctaaaacctaaaaccaaatgataagacaactatgaagtactcgacgaatggacatcaaacactaaactgctggaaatttgacattgaatcaaacctgcgttctatgttcatccccaaatagaaagtcttgctgatttgac

SEQ ID NO: 51749 - DNA, 909 bp, Zea Mays
gtgaactggaccctatatttctatgttggtaaccagccttaggtggtcctatttttgtttcttggtctagaactccattatggagcttccaaacaattataggatcataccaattgtaggaaggggagtattcatgctgacttggttgttagtatgtggctatttttgtgcatctttgggatggtggtagagctttgatgtgcctatttagatttgttgtgtgtggttggctttgaggtaagtgatctaaggtggatttagatttatttaggttaagctgaactcttctttctagttgcttgtctagtcttgttgcaaaggttgttgttgggtgattcaccaagtaggcagggtgtttgcgtaatatgttgttgctaatgtgatgcgggtgtgctaatgtacaatttgggctagggttaacatggaaatttggcttcagctgccaagaggtggttgtaaggtggttgatttctcttgaaggtccttgttgttggcattgtgagtttttcctatgattgattctttcatggggtttctttgttcctaagccatataatgttatgtgccctttgtcttccccatgacagaaacaataccaccttcatggtttttggttggttgtctagattttgttccatgttttattctaactacttctatgattatcttgttgttgtgaggatcctctgtcatgcttaggatattgttggttgtgctcggttagttgctaggtttacatggatttcacattgaaagcctattggcctaggccccatgatggctagttgtggcctctattatctttgggaggcttattttatctttgggaggcttatttttctaggttagttatgctacttgagttgattatactcttccattcttttgtgaaggtcattgtcagatatg

SEQ ID NO: 51750 - DNA, 538 bp, Zea Mays
atgaaacggattatcgatgctttcgagtccaggggctcttacaagtccataacctcatctaaaaatgaccctgtgcgtaaagaggttgctgcccaattagaacaagtgatcaaagatggtgcagaggaaggaagcgacttacatttctttgcgactcatcttttaatggagaaacattatagagatgtatttgctaccctcaagaccaaagaaggaaggaacgcttggctgcgccatgcttacgagaagaatgagaagtcaaattaggtgttggtagccctgttatgcttcaaactgtcaggctacgagtctttttttcatcatcctgtgtttttacaaacaatttgttgttgtttttatgttgtccagtgtagttacaaacattgagtcctatgagtaatttttttcagtcggagaagtatttcaaatattcgagtttaggtagtatttgcaataataactgttgtatatgtgtgagaactatgttgtacttatgataaatgtacaaccgtcagtttgttgtatgttaaattgctga

SEQ ID NO: 51751 - DNA, 519 bp, Zea Mays
tatgccccttcgaaattgtatatgggttcaaacctattgctccgatagatttgttgccccttccattgcaggaaagaactaatatggaagcttccaagcgtgctgcatacataaaaaagatacatgagaagaccaaggaagtaattgagatcaaagtagtgcgcaaggcagcaagcatgaacaagcataggaagaaagtgttatttgaaccgggtggcttggtttggattcacttgctcaaagagcgttttcctgatcagcgcaaatccaaattgatgccacgaggggatggtccatttcgtgttcttaccaagatcaatgataatgcatacaagatagatcttccaccaagctatggcgtgagcaacactatcaatgtttctgacctcttaccatatacaagtgaagacactttagagtcgaggatgactccttttcaaggtgaggaggatgatatgaccatgccattaagcaatacgttacaacccccaagtcatactacatcaactcaactacaac

SEQ ID NO: 51752 - DNA, 771 bp, Zea Mays
ttatttttgttactaatttagcaaagctatgcaccaagctgatatggcgaaaatctgtaacctgagaagcatcctgtttcttaggtaacaaggtaatgaaggccgaattcaggagacaaaatttgaagacatgacctcagataaatagcgtctaaagccatcaaaatatctcccttgatgatactctagcaagatttatagaagtggtcagtaaagccatctggccctggcgccttgtccattggcatgtcttttatagttgcccatagctccgcttccatgaaaggagcatctagttgagagagctcaatctgctgtatacccaattctgcaaggtcaacggtataaattggttcttcagctttccccagcaggttttcataaaagtctagcacaactgcttgcttgtcctcttgggaaactgctatctgatcaccaacattaagcttgggtatgaaattcttcttcctgaaccttgcttgctgatggaagaaggctgtattagcatcgccgtcttggagatagaggatacaggaccgcaagcgggcaatggttctttcaagggaggccaggccaaggcagtgtagtttaagcttcctccgcagccactcctgttcagagagatcccttgaatcacgctcaatttccagtcgatgtaagatttctttggccatttccatctgaactttgatgttgcccaccttcctctgaccccatttctgcagccctttactgagcctttgcaatttcagaaataggcgctcaactgca

SEQ ID NO: 51753 - DNA, 1122 bp, Zea Mays
acggtaactttgggtggccggaggtggtcatagtcggccggtccatgtctccaggcggtggagctcgacagctacgtgtgctccacctagtctgtggtggtagagctcgattcgatcggtcagcaagctccatgggaggtcggtgatgcggtctaccgaaggaattgaatggaggcaggctgtggaggcgggtccgtgtgcaccagcagaacctttgactccggtgaggtcaattccactattccattgaggtagagtttgggctcgagctcgaggaggctttacggaccattggggaagctaatggtggagctggattgggtggaacgtcaccggagtgggctgaccatggtggccggtgctcagaggcaagggtggtgtgtgcggagctcatcggatctggacgctggcttgggaaggtgtggcaaagggctaagagagcaacggagggcatgaccaaggtcttggctgcttaaatagacgcggacacggtggtggccgaccgatgtttcgggtgcttctacgggcacatccaatgcgcggtgagtgtgctagaaggcaacaaacatgtggcccagcgtgtgatcctattttccctcgcgttttgtcacctcatccgacccgatcacgccaagatcttcgtgtaaggattttatcttataccttaagatttctttggtgtatgggggctaaatgattttatgcactggtttgcaagatatgggaggggaaaggttggtctatctcgcagtccaaacctgaggcaatttggttgtcaagtcgtgtcaaaagccctagtcccaatgtcatcttctaacatgtgttacccaaaatattttgtcacaagtttgtccattaggggcatcggtttaaggtctctatcttaatcaacacttgaggtttagttagaggggctgattttggttaaatgaaaatcctgattttactttgctcttcccacttaagtgacatgtttggggattttgcccaaacgtttttgggtattattcttcataacttttgttaagtaattagtgatctacaacttttattaatgatccattttgtgatttggtgattttattagtgttcttgttgatccctttttggtgctccatttgc

SEQ ID NO: 51754 - DNA, 459 bp, Zea Mays
gtctatttctcctttacattcaatgtacatatcttacaagttacatgaagctaaaaacacaggaaaattcttttccaagaagtgttgagtctcccaggtagcttcatcttccgcatgctggttccattaaaccttatagaatttaagagtccttttttgggtaatcctatccttttggtccaaaattcgaatgagatgttctgaatatgccaagtctggttccaatgaaacatccaccacatcaatggttcaattaggagcccaaaggcacttctttaattgagatacatggaacacattgtgtactgcagacaatgtttcgggtagttggagttggtatgccactggtccacattgttcaagaataggaaatgtactaatgtatcagggtgtaagctttccttttacattgaaacgggtcacatctttcattggcgatactttcaggtaaacataatc

SEQ ID NO: 51755 - DNA, 1264 bp, Zea Mays
aaagcattatgatgactgacctcactacgcagaatcttgtacaagataaaaaagtatgatgttccagtcacaccccggagcaagtatgagacgtactatcaaatactccatcctttcttagtatgcttctacgttgatatacaatttgatagcgtatttatttggcatgtagatttaatatgttattatataagcgtggtcaaaattaaataagctagatttaaaaacaaaattagtaatggtggacttctggacttaagagtagaaaggtaaatatatgtgcatatataagctcggtcaaaattaaataagatagatttaaaacaaaatcaacaggatggatttagagtagagataaaggtaaatatatgtgcaagttcctgaggttacatctgcctacttttaagtaagttcaacatccagcaaaggacatatatacgtgtagaattcttgacgtcacagtcacacctgcctactttcacccatgcaacaaaacgtatacaagctcaagactggcttcatgcagtggattaggactgcccagtgcacagacagaaagatggtgatgcatattacaaatcaactgcaaggatcagctcatgaatggtgggaggcacatctctacgctcacactttggaacgagttcaggcaaagcttcaggacccacatttctaaaggcactttggttatgaaggagaagtttgtagcactaaaactgtaccgagacaagttcatctagttgtcatgaggcgagccctaacaccaagcgacaacatcactttctcaaaggtttagttgagcccctaaagaactagctgatgaatcacacatattggcaaacttctaacaacttgttgaccatgccacaagataagtgccatgagatggaggagaaaaagaagcgcaagctcaacgctcatcaataatcatgtagtagggggactccaaggcggtgatggaaaacagtagagactccatgtttttgtcatcagaattagtactcttatattcaaaactagtagactcggaatcatgtggagcgtcaaaaaaatcaggcatatcccgccattcggcaagaactaataatcctacaaggcaagttgccccggtgccacctaatgaatgttttaattgcagggaaattagccactacaaatactttccaaagaagaatgcatgtatactttccaaagaagaacacaagtacacaacagaggtagtttggcaacataggcagaggcaaataccctagggacaatcaag

SEQ ID NO: 51756 - DNA, 324 bp, Zea Mays
gattgctccgttagtagggcatagtggtcaccccgagttaagtaagcgtgagcatgttgcaccgccttaagtcggcaacgacttaagccgattgctccgttagcagggcatagtggtcaccccgagttaagtaagcgtgagcatgtcgcaccgccttaagtggttgccgacttaagccgattgctccgttagcagggcatagtggtcaccccgagttaagtaagcgtgagcatgtcgcaccgccttaagtcgttgccgacttaagctgattgctccgttagcagggcatagtggtcaccccgagttaagtaagcgtgagcatgt

SEQ ID NO: 51757 - DNA, 1125 bp, Zea Mays
tttactagaaaatcttaggtgctagaaaataaaatctaagtgaggtgcttataatcaaacaaggtgtatgcatatgatgagaaaaatctaggggagttttgggatagataataggaaaggggggttagattagggttccaaacctgggttaaaaattgggatgttacaaacctaccccacttaaaggaatctcgcccttgagattcagacggggctcgagaaaaggtaagggtattccctcctcatagagtcctcactttcccaggtagcttcctcttccccttctctgctccactgaaccttacagagtcttacttctgagttgtgggtcttcccgactgctgagtcaagaatctttattggcttttcccggtattggagatctttttgaatctgaactgtctctgcctcaatgtggttctctggtacttgcaagcacttacggagctgggacacatgaaacacattgtgaataccggacatggattctggtagttcaaggcggtatgctgcgggtcccactctgccaatgacgggatagggaccaacgaatcgtggtgctaactttcctttcatttggaaccttttgacaccacgcatcagggagaccttgaggtatacgaaatctccttcctcaaatttgagttccctctgtctgttgtctgcataacttttctggcgactctgagcttcaagtaacctcttgcggatcagggcaaccttctcttcggcctctttaacaaagtcgggtccttccagtgtcctttcccctacattggaccacattaggggggtctggcactttcgtccatacaatgcttcgaacggtgacatcttgatactggcctgatggctgttattatatgagaattcggtatacggcaaactggactcccaattcctgtcgaacgtcaacacataggctcttagtaaatcttcgaggaccttgttgaccctctccatttgaccatctgactgagggtgataggcggtgctgaaatctaacttggtgcccatagcttactgaaggctcttccaaaattttgaggtgaactgcatccctctatctgacactattttccgaggaataccatggagcctaactatctctttaagatatatccg

SEQ ID NO: 51758 - DNA, 389 bp, Zea Mays
ccttgccgagctaatcaacctgatcctcctgctgatgagcaaaaagtaaaaagagacgcctccggcgagtatccagtttggatcgggatgttggtacttcggttcctgctgttgaagaagtgcctgtgactgaatttattgacgctgaccccaatgggtgtgcctgatctgctgctgatcccaatgtgggtgctccatctgttgctgatcccaatgggggtgctgcctgtgttgctaatgaagacgacggggaggaagaggatgaagttcctttgactcggaaaaacagtcggcagttcatcgctagtggtgaaagtagtggagttccttctcctgctttgtctgctctcattggtctgcaagaattgtccctggctaattttgatcag

SEQ ID NO: 51759 - DNA, 584 bp, Zea Mays
acaaattctatgtataaaagatcctgtctcacggtactatcatccgtttcacaattacttgatacttttgatcgcttatttcttcaaaatacttaacaccacgttttttaagaccacctttccacgtttactcctaaataatactatacgaatgttctagaacaatctatactacctattaagagtgcaatagtagtctgcctcctgccgttctgccgttctgccatcctgcaacctcaaccgtccattccattgttctgcaatttcaaccgttcgatcaccagccgctcgatcccccaccgccgccagtcgtccgatcccaccgcccgatccccgcccccgaggttggagatgcgaggtcgtgcccccgcccgcccccgcgcaaccgccgccatccatctccctctctgccctgcgtccgcgatgctcgccacggcgctcgcttccccggtccccggcgctcgcttccccggccatcgtggcggagtgggtgcggggcctgggagtccgtgtcctgctagatccagttgacgccgactcattgaggccctctgtaaacatcatcttcgcctgtcgtcggcggg

SEQ ID NO: 51760 - DNA, 572 bp, Zea Mays
ggtaactgctggcgccatccttggggaccgggttctctgcagccacctctaaggctgaaagattctcagtcacctccatgggaatggagcaacctagactagcttcttgactctgaagaccgcactccaaggttgacgaggcacaagacgatgctcgggataattctaaccccacatccagaatgtcagtgcaaacgtccatcataccaccatctgttggctcggatagcagatcttcaggaaccatatcctcgagggcctgatcaaaatttgctagggacaactcttgcagaccaacgagagcagacaaagctggagaaggaatatcactactctccccactgactaggtagcgccgactgtttttccgaattaaggggatttcctcctcttcttcctcatcctcgtcaataatacgaacaacacacccagtggggtcagcatcagcagggtcacacccattgggattagcattagcagggtcacacccattgggatcagcatcatcaaggtcacacccattggggtcagccccagtaaaaagttccactggtacttcttcagcagcagga

SEQ ID NO: 51761 - DNA, 1951 bp, Zea Mays
atgctggagaatatgagccttaaacgcccggtgctctgccatgtctgctaggagctactgctgtagggtgtcctggtggtcctgaatggtctgaaacatcaatagcatcagctcagacaactgatgctggatagcggcctgcctggcctgctctgctgcctgacgggcatgctctatggccatatgagcctactgctgagtaagcgattgaagaatagcagccaaggcaggattaatagctggaggggtagcaggagcagcactagagctaccagcctcgtgatcatgggaacaaggtggcacaggaggcggtggtggaatccctaggtcctcatcatcatcagaagaaatatctacagcgacaccctgagtcttgaactgtctgatggtctcatcctcaaccctgatatctgatactagagctggcgctggacctatgtccttaggagctaggcgatagaagccgaacagaagttgagaggcctcgagggtagcctggaactgaggaggctggattagctacacaaatatgtgacagaggtagtgggcatacggtagctgacagcgagcacagagaccatccaacattgtatcctcaacctcacaaatcaaaaagtcgacaacatcaaactccgagtgtgaaatcaaggcaccaaatagccagagctgaatatgcgtggtggcctccctatatcccatcatgggtagcaaagtctgcctcatcagctcatagaggaacttcgctgctggagtgaagtcggtaggagaacgtcgcgacccatctatgaatggaggtctgaacagtgcagcgacgtgagctatagcaggagcaaatccgtcgtgagggcgacaaggaggatctaacgtgccgtagcacaagctgtggagccacgtcgacgactcaggaaatccaaagagctctctgatctgggtagcatgaaaagtgacatcctctcgctcaaaacagaagctcagccactgatgatcagggtctatccaaactatggcatagaatactctgacccactctttaatgtatctgccaccagaggtgagaagagaaagtaaacctagtagataggagaggtgaccctctgactcggcaccggagactgacagaaaagcaggaagatccaaaagccagtgcgccctcaaggcaatctaagcagacaattacgccctgaagaatgactcctcagtcctggtgctgaagagcgacgcaactactgggtccctttgggatggcaaccaagaatctactggtacgtgtctgaaccgacgtacccaggtagcagtggctcgctgaagatcaagcagatgtggatcagcagcaagcggtggcacctcggtcttgtcacactccctgaagcgaggtggaggaataggcggagcgggagcgggagcagaggaagctagagtggtggaggtggtggacacagcgggtgtggtgaatggctcatgagcgacaggagctggcgaagtgtgatttggagtggatactgtggcggaaagagtggggtgagcagtggaggagcgaggccgagacgcgaggcaacgacaggaggaggcagtctgatcagaagaaatttgtaactggcttccttgctcagcctgatctgctgctgctaccgctgcaagtgctgcacgagcggctctatctaggcgcctcttcttcctgccctcttgctgctcaagatatacagtcttgcccttgacctgtctgaaggggcgaggagggtccttgtcatctcctccccgtgacggtgtgacgttcttcgtcctcaccgtcctgaactgactgctgcaagatagtgtgaaaagataagcgagagtagagagcagtagataaggcctcaaatagagtgatagctacctgggaacttctcgagagagaaaagatccaggcaggacaggagacgtgcaagcgagcaggcgaaatcactaaaatgac

SEQ ID NO: 51762 - DNA, 563 bp, Zea Mays
ggaggatattgatatattggaagaagaacgattgaatacagtaattcagtcagctaggtaccagcaaaccctgaggcactatcatgataaggccatacgacatcgatccttcgcagtgggagacttggtccttcaccgaattctaacgggggaaggacggcacaaattgtcgccgctatgggaagggccattcatggtagcagaagtcactcagccaggatcatatcggcttactcaaatggatggcacggaaatagggaattcatggaatatagagcatctcaggaagttttacccctagctagatttcaaaagctatcggggcagcattgtattctttaatcggaaaatacatcatcaattaaaagacttcattctcaaaggcactcgaactatttgttatcaatctgcatgcttactcgacttagggtgaccactataccctactaacggagcaatcggcttaagtcggcagtgacttaagacggtgcaacatgctcacgcttacttaacttagggtgaccactataccctactaacggagcaatcagcttaagtcggca

SEQ ID NO: 51763 - DNA, 283 bp, Zea Mays
gtccttctcactaagagatgaactactcttaaaataaatgaagtacattgaatgtgtgtgcacatgtatgtgtagtgtgatttggaataggagtatatcttccaaccctgctaggtaggaataccttgtagtgtaaatggtgatgagctgtatgatttcttaaaacgataattaggaccaaccaagaaaagacatgctacatgttcttggacgatgtagactatcttgtagaaacaatttgtagcagcctctgaaaagtaaatcttaaagaatgttgcaaacc

SEQ ID NO: 51764 - DNA, 560 bp, Zea Mays
ctaaatcaagtcttttcatcccaagaatcataccctaaccacatcatgcaccccaaagtgagcaaaattctcaaaccctaaaactaacctatttaagccttttaagtaccactaagaaatttagtgaaaaggatatgaaaaacataaaatcatgatttggaccaattaacaaagttgtagtacactaaataagctacaaaatatagttaggaagtttaatcaaaagggttttgcaaaattctcaaaacagccacttaagtggagacatcaaatggaaatcagaaattctgaattctgaaatctgaccttctcatcaaaatcaactgtgttcatctagttccaaggctcaaaactaagaggtccaaataacaaattggcgccaaattaccttaggcacgccctggaaaaatttggagacaaatctcagccgtttgacatgatctagcatggattggcctcgggacgcagcaggcagacactgacggcttggcgacgcgacaactctctgtacacgatcgaaaacctctcggctcccacacaaaaacgacaaagcatacccc

SEQ ID NO: 51765 - DNA, 366 bp, Zea Mays
cttcgacgaccacaaagtcatagtagtcaccgggtttccaataggggatattctccacaacaaagaagccattggaagaatagccaagtgggcttgcaagctgggtgctcacgacattgagtttcggcctcgcactgcaataaagactcaagcactagttgacttcgtatcagagtggaccgagcaacaagtaccagataacccaaaggctgcagaagtgtggcggatgtacttcgatggttcgctaaaactgcagggagcaggcgcagggatcctcttcattgcccctggaggtgaacaactcaaatatgctcttcagttgttattttcagcatccaacaatgcagcagaatatgaagctctgat

SEQ ID NO: 51766 - DNA, 1151 bp, Zea Mays
agcttatccgctacattacttcactgtagttagctttgtacattccggcagcaaaaaatataatatttgatgcccaaattttcgggtacctaaatttttcgggttcgggtagcccgttctacccaatttaaaactacaagcttatccgctacattgcttcactgtagttagctttgtacattccggcagcaaacaatataatatttaatgtaaatatacaatgaaaaccaggaagcaaacctgcacaataagcatttagtttaaatttttttcacatagcatcactcactcacatcaaagcagccgagcatcaatgatcactgatcacagctcacggtctacacagtcacacatcactaatcacggtctcacacatcgttgatccactgtccacactcacggtctcacatgcacaacagacaactcgcagcaacagcaaggcagcaatacgggtgcagcacacaacaacaaggcaacattgtagcaggaaggcgagcaggaactaaacggacatctgccactgcaaagtagccgagcaggagcaacaaatcgggccaaacgggtatttcgggtaccgtaacgtgatactcgattaggcccgaattaaaatcgggtattaagttttgttacccgcatgaattatttgggtactgagcttcgggctaaataggtacggtctcgggtattttgggcttcgggctcgggttttatgcccagtgctaccgtcacccttcctcctccacatccacgccgtcctctcccacacgagtctctagcccggaggccacacgagggacgggaccttctcacgtagctcaagctcacctgccagcgaaggctacgacacatcgacgaccttgatgttgtgctcggggtccttgatgtcgacatctcctactggtcgtcctcctctccgccgcagcagaggggtctcgcctctaccgtccaggacatcatggtctcggtcgccatcctcgcctctaaatccgccagcgctagggagggcgccgcgccacccaggttcgcgtccttgtctgtcctctatctgttgccgctgtcctcccccaggccaccagaatcgcctagggccaggaccgctgatgggtggtacgactgtatgacccacgtgcctagatgcgggccaattttcc

SEQ ID NO: 51767 - DNA, 523 bp, Zea Mays
accacgggcgggaccactgctgcagacccgtttcactcccttgccatcaccggtaatatgcatgtccttgtgttcgccatgtcccttattacatatcgcacaccgtggattaggatttagggcttgtttgtgtagcttcgccgacctccggccatctctccgccgtggaggattgttgcgccgccgtgtggtgtattgggtcggtgtgatgatttttgggccgtcggatcggaaatatgcgaccaggatcgactcaagcatagcgactcagccaaaaccatgggggctcgtccgatcataatctatgggtcatgattagatcccagaccatgacatctagcccgtcgatttaactacttgcggctccaattagatactggttagatctgctcgtggccgtccgaatctaatctgacggcccaggcagccccgtaccccttcgcggatgcatcttgctaaagagcccatgggtttcaccgaaatgaacccgtcgtccacctcgggtcatggttgtgtcggtaga

SEQ ID NO: 51768 - DNA, 658 bp, Zea Mays
catgtattcactgaccgatcttccatcttgagttagttcctggaattcatcttccttgagctgaacgatcccttggggcacatggtgttctcggaaagcagtttcaaactctatccaggtagcatctctgatggctgcgttgaaggtatcccaccaagctaaggccattccggaaagttgatgagcagccagttgaacacgctgattctccgggcatccgatggcttctagcttccttttaatcgtgcgcagccaatcatcagcatcgatgggattgctagatccagcgaatgtgggaggcttgagcctcagaaaatctcccatcctgtcttgtggtcttctaccattcgggcgttgattttccagacttctagtgaggacctcaatgagtcgggtttggttggatagaacttgggctaaatctaagggtagctctggaggtgcggggaggtgggtctcactctcttctctaccggcttctcttttagctctttggggaaaccctgctccaatcccggaggcggtaggcgtagttttatctgaagccatctgccagggggagagagtcactattatgcatatgtcaatttcaaccaagttattttattcattacaccaattcattacaagcatacagctactacaagtcgcactacac

SEQ ID NO: 51769 - DNA, 689 bp, Zea Mays
attggagtcatttcccatctccaacaacgagccgaccatgcaaggggaagaacctccccagcatgaagcacgacgacgaaggaacaaacacggaatgtttggcgacatcacgaggctggggagagggacccagcacaggccgtaacccgggacaaagttttagaagtaggagaaactcccgacgagcgagtacacaaagaaagacggaattctcgccgccgtgatcgccgataggctcaggaccaagagcgggagcaagtcgagcaaggtgcaaggttgcgctgggaaaatcctctctttgctccgatcctgtgaagtcggagtgaagtcagaggggtgctggcccagatggctgatggcctcccgcgaactccggacgcagaaggctactggcggctgcttactcaagtagctaatcaccttctacccatcgctcatcccccgagcgacctacgccacgccatcaacatctgacgagacgcgcggagctccatcaacacttcacgcgaccgacgacacgaaagtgagctaaggcgtcgggaggattatgatcgggaccacgatgtcccagctcaaagtcgcgccactcgagttgagtcggctgcagcctcgaccagtggcccgacccgaggacggtcgagactacacaccatcggctcccctccctgggaccgagctcatgaacgccg

SEQ ID NO: 51770 - DNA, 333 bp, Zea Mays
gtagatttcatgtcgctatggtacatgtgaccaaaacacgctccgacctgctatgctgttttggaatttggaaatgaggtggaggagaaacttccatgcatgggccatggcgcggatgctgtcaacaagtgtcaacgcgtccagcaccaaagcttcttcccgcgcacctctaggctcgagcactagctcctcacaataccgcgctcccgtcgtttgcgcgatccacttattcctcgcttccaatgcatgcgttgcccaccaccatctacatgttcctggcctctcttctcccagcttgttcctctctctgtcttctcttgtatcccgcgtctc

SEQ ID NO: 51771 - DNA, 708 bp, Zea Mays
agggaataggtttcggggatcggggaagggacggggaacactcggccctgacctgccctgttgccatctctcatggcgcccgtgcggataagaaaggtagctcctacggaaagttgatagcgggggtggcgtggaggaaagttgatctggtggatggaaagaggaacggacagggcagcggtggctgttgcggtgtgcatgacggtggccggtggtgcggtggtagtggggatgacgtggaggaaagttgatcttgtggagggcggcacgatggtggcagctagaaggacgggaacgtcgtcgcctcataccttggcatcccgtaggaagaaccttggtgcattgcactcataggggacacttgctagtgctctagtgacgacatgtaggtgcagagattggccagctacatagcaatgtccgccaaggccttcgtagacacttgttagtgctctagtgacgacatgtaggtgcagagattgaccagctacatagcaatgtccgccaaggccttcgcagtggtgttggcggttggtggtggtgggattagcggctgcttcatgaagttatcgtcacttgacatctatgataccagattgataggttctagaatgcgtaagttgtatggataggagtaagttgtatggataggagatcgaagactaggacgtgtaccttcgtcggcacacaggagccgtggtcacacac

SEQ ID NO: 51772 - DNA, 1301 bp, Zea Mays
tcctaaatcaatcaaggatcagaccttcctaatgtatctgatgctgattgatcccaacatcaatcacggcatctcctaccataacagccctggatcctatctacgcaatcacacgccattacaggaagggaatgatgcattacaggaaaggaatgatgcactgctaacacccccccgtcagtcggagcgtcgaagccttggacgttcagactggaccgaaattccatgaagaccgaagtaggtagccctttggtgaagatatcagcgtactgtgaggatgttggaacctgaagaacacgaatttcaccgagggccacgcgctcgcgaacaaagtgaagatcaatctcaatatgtttggtgcgctgatgttggacaggattggaggacatgtacacagtactgatgttatcacaataaaccaaggttgtgcggctcagggggacgtggagttcctgtagtaactgacgcaaccaagtgacttctgcaacggcatttgcaacagctcggtattcagcctcagcactggagcgggagacagtgttctggcgcttggaggaccaggagatgagactatcacccaaaaatacagcaaagcctgaggtagacctgtgggtatcaggacaaccagcccaatcggcatctgagtagactagcagttcagtctgtgcggagggccgaagtaacaagctgagatgaagggtgccgtgcacataacaaagaatgcgctttagagctgcaaggtgaggctcacgtgggtcgtgcatatgaaggcatatctgctggactgcgtaagagatgtcaggtcgtgtgaaagtgagatactggagagcccctgcaagactgcggaaatctgtaggatcaatcactggattaccaatagtgcagacagcttgggattgacatcaacaggggtggaacagggcttgcattcagccatgccagcgcggtcagggatgtcaatcatgtactgacgttgagataaaaacaaaccagctgtcgtgtgttggacctgcatccccaagaagtggtgaagtttaccaaggtccttcatagagaattcctgctgaagtgaggtgatgatgcgacggagaagaacatcagtagaagctttcagaacaatgtcatcaacatatagcagtaggtacaccatatcatctccgcggcgataaacaaataaagaggcatcagacttggcttcaacaaacccaagagagggcagaaaggaggcaaaccgactgtaccaggctcaaggtgcttgcttaagaccatataaggaccggttcagacggcacacaaaatcc

SEQ ID NO: 51773 - DNA, 284 bp, Zea Mays
cagtttgcatgctccatcagttgaaacttctctgctattttttgtccgcttttgtttctgttgcaacagcttttggttcctgcaacttctgtcatgaaagaaaatagcaaaatagagaggaaagcctcatatttgtttcatctgacatcgtcttgatatgttctgtttcatgtaatgatttactttttaatcaatttgttgcggagaagatttagttcctttatttgcgttgccaacaggccaagactaccctgttgttttatcccatttaatctgtattcatg

SEQ ID NO: 51774 - DNA, 374 bp, Zea Mays
cttcggtattagctcaaccggacattgaaaagccctttgatgtgtattgtgacgcatcaggcagtggtctaggctatgttctaatgcaagaaggccttgtgatagcctacgcttcaaggcagttgcaccggcatgaagaacattatccaactcatgacctggaattagctgttgtggttcatgccctaaaaatatggcgtcattatctgctggggaatatatgtcatatttatacagatcataaaggcttgaagtatatctttacccagtcagagctgaatatgaggcagaggagatggcttgagctgattaaagattatgaattggaaattcattatcacccaagcaaggctaatgtagtggtagatgcgtta

SEQ ID NO: 51775 - DNA, 459 bp, Zea Mays
gtcaagttcaagcgcggattggctccaaatcttcacgattatgaccatgatcccgttgagagatctcttcatttgaccttcctttgtcgtttaggtgtggcggcttatgggttttgttgactggagccaaagatatggggtgatcaaatcgggtttgtctcactactgaaatccgagatgaaatccctgacttgacgtgtctagggcacgaatctcaatgccatcttcacacacgttgcagagaggttaatttagcacaactatgtcaatgggggcttaaggatttgagctagggatcaaggtgaacgtgctcgagttctaggtgagggctgaaattcagaaacctgaattttctgatttccctagagagctcccacttgcatggcccttttagggattttaaacaattattttggccaaacttttataatagttattgtagcttaattagtgtatttc

SEQ ID NO: 51776 - DNA, 458 bp, Zea Mays
gacaaatttcgtatatcattgattaagggatttttttaaatttgggaatgggcctggggcgcataacagattgttttgaaagaaactaccatagaaactaatggtggaagtcgtaatttatgcattttagaccttaatgtatataaactctataactatgtcataaaatggtgatcccaatattaatggggatgattttacgaaacaatattgaagaaaacaatgtagcataaaaactgacatagatatgcataaatacttgtacatgttatcataaacgttacaaaatgtaataccccaccggcggttctgcgagggcctagatgcatcaagaaacccccgtctacgtctactccaactttgatggatacaccaccagcggttctgcgagggcctggatgcgacgaggccaaggatggtggagcaggtcaaattgtgattgtacaacctcctatgat

SEQ ID NO: 51777 - DNA, 348 bp, Zea Mays
gtggagctattggagaagctggcggagctaggaggcctcagccatgcctttggccacatcgcagtactcagcctcagcgctggagcgggagacgacgacctgccgcttcgaggcccgggagacaaggttggtgctcaggaacacgacgtagctagatgtagatcaatgcgtgtcggggtagctagtctagtcggcgtcagtgtagaccaccagctttgaagtcaggaggggtcaaaggagaaggccatagtcgatggagccgcggaggtagtgaagagtctgtttgagagcggtgtgttgggcctcccatgaggtgtgcatgtgaaggtacacccgctgaatggcata

SEQ ID NO: 51778 - DNA, 884 bp, Zea Mays
gctttagtgaacaaaccctccttaaccttgtacactggagtgtttactaattttaaacagtgttactactaagctagtgtctccactatttttcttaaccctggtctaacaatatttctatttttccttctaatattaagtttttagcagttttcttatttaattcaaaactctagaaaagaatacagaaactatgggttttactatttttatctgatagttcttattttccaaagtctagcaaaattggtttgacaatttttggatgattattcttcaagttatgcatttactaagttctctgccatatttaaaagaaaaataaattcgaaaatggaaaagaatacaggtttgcgctgaggcccctgggttttctctccctcttctctcacaaaacagtcctcggtctactattggcatgggtcactgacattgcacaaaaccccctggacctagccgaaatctaacctgcgctccctggctgacttaaatagtacccacagcatagattacggcggcgaggcttaccggcggtagtagagctccggcggggtggtcagtgacgttggggaggtcacgacggtcacgtcggtgtgcgggtcggcttcggaggtggtcgaagctaccctggccacgagcacaagtatgaacaagaccatctcctgaatatatactggttaatagacacctttagattgatgttggtacaagagacatgcgtaaagattctgttttttagaaatacacaagtatgtcgctccttttatagcttcaaattacccggtccacgtgctccggcggggttccgaactccggcgagcacgatttcgttatttcggtggcgcgggtcctcggttcaagctcgtgcaagcttcacggcctcc

SEQ ID NO: 51779 - DNA, 1215 bp, Zea Mays
aaaaaatagaagcttacctggtcgatacctgaagccacagccaatacttcccacgtcctcctccatttttccctttattttattcctctagccgatgattagatcatcgtttttttgtctcttgggtcccttgctccggaatggtagccgtgcgcgcttgcaacccggtgttttcctgagatcgacacacggggcccacgatcggatgttccagaagcttctcccttgcgtgatcgtcggactcccatagttgatttctttggcagcagatcataacaaacataaccttgatcaccggatcctcacgtatctgtcttcgccagccgtcaggtctcttccttgcacacgccgtgcaggccgaagttgttgagattctccgtgattgcctggcggcccaccggctgttacggtcgtaacttgccttcctgtgtatatataagatttgtaggtgctattcgctggccacttcatagccaggttcagcataccgccaggtcttgctattgccgcaatagtgatgatggagagagagagagggagaagtaatcgttgccaagccatcacgtgatacaaaaatcgttgtgacttctggacagtcctgggtgcgttattgggtggcactgaggcgctggtgtcggcaggaaaggcggctggtcaaaacactggggaaatcctacgccggtctgaagaaccaccacagagttaccacaccgtgtctcccgtagctagcccacacgtcctcttcttttcttcgttttctcttttgtttattttatggccggtcacttgcatcattatggttcatacaacacgttaagtttctgcatgtttcacgaccatgtggaatgcctatagtgaccgttccgcgtccacagattcttcctcaggattatagacctcttcgatttctggatcatcgaatagatctctggttcatcgttaaaaaaatcaagatgaccagtggcaacgtgagattgaagggcttgattgtaaggtaaaatagtgttagattagaggtctgtcccgtatgatagggttgacgttttccacctaataaataaccaccaccacatacctttttacatgcaagattgctacacagcacaaatttaaatcatgataagttggtaacagcttggtcgtggatttataaacaaatctttcccaccatcatgtcacctatttttgggcagccctattaatttattaaaaatg

SEQ ID NO: 51780 - DNA, 735 bp, Zea Mays
cgggaggaaggaggggctcgtggcagcgtgcggctggcggtttgcgtagtctgttgtgtgagaaggtagtgacggtctcgctgggccgttgaaacgcaatcctacggcgggatattaaagagctacgtggataccaccaagattaggaacgcattcgagcgaagcgttagcggcaatatttcttcctcttttttcttctctacagccatacctcatttttaccttgcgctcgccactgatccttggtgtggtaatgtgatgaggaaggtgaccatattctgttcatccttcattcatcctccatcacaaaaccaaataagagaaggtgcaacttcaatccacttcaaccctgtaatcaaacaagaaattaggtttaacccgtcacttaaaccaaacaaggaacgagtccaacccaacctaaaaaatagatcggttttgacccaacccactttgttccgaaaccaaacgaactactagagagtgggaggaggcggcgacggtaggcgacgcccgcgccagcatcacaacagcgtgcaggaggaaggaggggctcgtggcagcgtgcgactggcggtttgcgtagtctgttgtgtgagaaggtagtgacagtctcgatgggccgttgaaacgcaatcctacggcgggatattaaagagtacgtggataccaccaagattaggaacgcgttcgagcgaagcgttagcgataatatttcttcctcatttttttgttctc

SEQ ID NO: 51781 - DNA, 345 bp, Zea Mays
tggacgacatcctcgacgcccagtgtccataccacaaggacatgcgccacactcttcggaactgccgggacttcaaacactccgtcgggcacggccgacccttccaacctctacctcctcctccgccaaggggagggccagaagaaccacgacaaccccagcagcgggaggagggaggagaaggagcgttcccgcgcgttgacagggaggacaacgtcatcttcggcggacacggatcacaggagaatagaagacaacaaaagctcaacgatcgccagatattggtggcgaccaccggtcctcccgccccataccggtggtcggagcacccgatcactttcactc

SEQ ID NO: 51782 - DNA, 331 bp, Zea Mays
ttcggtcttaaagaccaaactattttgtgacagaccggaccatccggcctcagaagctgaactgtccgtgaccaaggactcatgaattttgtgtgtactcatcatttaaacttcatttaggatttagccgattctccatcggctctagcattacagggatgaaaccgttcttatctatacttatgaactggtaatcagaaaaatctactcctatgagacatgtagcagtctcataagtccagagtacaggggcatcggccacagcgatacaggccgatacatcagcatgtacttgttctacatcatcgcctactgaaagtcgcctaggggg

SEQ ID NO: 51783 - DNA, 669 bp, Zea Mays
atccgagtgggggtccgagctcctttcgattagagtctgctagtggtccagagacacgccccaaaagatacctacgggtgattcacgtggtcccgaacccgtttgatggggtccaaaggctcaatgcctccctaggatgggataccgtcatgaatcgctcccaggggtctcggatatgtcttaaggtacctcaggccacaacccgagctagggccatgtacgggcgtacctatagtcatccctgactctgtgctctgggtcggttatgaagcccttcatcgcctctcttgagagctattctttattaaatatagagaacatagtacaagtaggcatgtatgcctagggataaaagggatgtagttgttctatattccacgcattgtcatagacttctccttcctcattacagagcttgtatgttcctggcttcagcactttggcgatgatgaagggtccttcccaaggacgagtgaacttgtggcgccctcggttgtcttgtcgtaaccgaagtaccaggtcgccttcttggaatcctcgggttagacacgcctctcatggtagcgccgaagggattgtttgtattttgtcgagtgaaggagtgctacgtctcgagcttcctccaactggtcaagcgaatcttcacggttgacttgattgttgcgttcg

SEQ ID NO: 51784 - DNA, 714 bp, Zea Mays
ggcaaaagggaagaaattgagctcgttaaaactttgtgcaacatgcaagaaatcacatcttgcgtttctgacaaagatgtctgaaacacacacttttgacgcttcttgatagtcatctccaacgccttctaccaagcgggaaaaatatatcaaatattcacgccaaaaaggcgctcaaaattcaaacatcgagcaagtagtggctgctaaagcagaaagcaaatcggactggcaccgaagcccgattcatccgcggcgtggtcatagggtcgctcctaccttcaccaacaacatgtaaaaagcaaaggcaaggctggtggactatcagggggcatggctcacctcgcagtggcgagatctgacgacacatgacttgatccaacgcttcttaggcagtttggcctactcctcgctatcgctgtcgtccccggccaggtcattcgcccttgacggagccatcaaagtactgttgggggagtggggcttagctgtagtgctgctctcgggtcggctgcgagaggttgacgacgagcttgagattgcacctacgatagtcggaagctgaggagccaacatcaccaccgtcgtcactggaatcggaactggacgtctccggcgacagcatgtgccggtgggaccgagagggcgaggacggcggcgaggaggggaaaaggaaaatgcttcgacgagctggcaagagtcgagaggaggcgg

SEQ ID NO: 51785 - DNA, 613 bp, Zea Mays
gccaactagggtttcccaagtcaagcataataacacaagatacatctcaacaagacggtgtagagggggagatggatgttgatggccagggagctgaggtgcgagaagaaatgaaaaagacaatgcatttagtggcctcggagtcgatcttccagaagaagggaactttcaaaaggagaaacgggaggaagggtaatgatggagaggttgcagtataagaggggagtatggaaagaaaacaccaagcctcaaaggagatcgatgttgactctaggcccaaaaaagttgaagtgggcaggggatctttctgtgacgatggaggacaagtcgagggggagtaaggaagaaatggagatgctaaatgcaaaggcgggactgtaggagaagttccgcctggcaaaattaggattatagcttggaactaccgagggttggggaatgccttaacagttcatgggcttctggatgtccagaaactggaataccctgatgttcttttcttggctgagacaaaaatggacttcaaaagaattgagaaatttaagtggatgttgaatatgccaaacctggttggaaaaaattataaaggcttgagcggaggactggctctttt

SEQ ID NO: 51786 - DNA, 315 bp, Zea Mays
cctcgaggatttccttggttcgcgtgcaggacatgcagcagctggggtactttggtgacggtgttgggcacgtcccgggcgctgaggagattccttagcctgagggcgaattagttgtgttcgaggcattcttcatcgccggccttcgccttccggcgcatcgtttcgtggcggaggtcttgcagaggttcgatgtctaggtccaccagttgacacctaacgccgtggttgcccttacgaagtatgtctgggcggtgacttcgtacggcggtcaggcatccgtagaggtcttcgccaagaagtattgtctgcact

SEQ ID NO: 51787 - DNA, 300 bp, Zea Mays
cgagcacggcggcgcaaccccgctagtgcattaaacgccggcgaactcccccgagcagccacgccagaggcccataggtgaatccaagggcttctacacagactataggaaacgatgaatactccgggagggatcttaccgtgaatcgcagcacaggggtccccggtcacggtgaagcacgaaattggcggaatccccaactccggtgacgaatccccgcaatcccgacgacgagaccgaggcggcaggcccacagaaacactccccacgggtcggtaaagttaaaattttcaggtttcg

SEQ ID NO: 51788 - DNA, 441 bp, Zea Mays
cgtcgcagaaagcctaccaagcagaacaactctcggtgattggcaaccagatccgcctcaatagagttgatacccatcgtctttggttggcttttcaacgcccaacgaaacagatgaagctttattccgagcatctactacagtcacaagcggcaaggggcgacaaacaagcttttggcatgaatcttggttagcacgtaaaaatccaatggatctctaccctttggcctggtggaaaaataaaaagccactgaatagttggttagtctaaactggacgggaggactttggagaacggaatatacgcaacaattgacagtaattatttctttgtggaaccaccttgaggatatccaattaatggtcgagaagataagattgtatacgatgaaaatggacaaacacaacagaaatccattttatctccgttggccatgtatc

SEQ ID NO: 51789 - DNA, 1254 bp, Zea Mays
ttggataacacagctgctgtgtttcaaataacgtaacacagatgtcaaggaaaaggcacaaccccacagatggcatgtcaaggatccttggaagaactgagtaactgttacacaaatgtctgtacacgatctgacctatctaccgagtaccaaggctagtagttttataatggtaaaaaagactagtagttttgctccttcaggggcgatcttctaactgggtcatgccttggtttcttcctaatcacaggtgcagaacttctatcgttagttttctctgaggtaagcctatcattgcatggttcctcctcattaattttctgcgagatccttctcaaatttgacatcatactttcacctccataaattacctccccaatggtatcggttagtccagtcagctcattgaccaactgattcctctcttgaagtacaacaacagacatatcagctgtcttagacttcagctctcgtacgtgttcttctaatgtttcatttctttcctccaacaatttcagcttgtttgcaacttccagatgctgctttgccttttctgacatttcagaagcagtgcgagctttgagttgttccataagattcttcaaatttcttgactgatgcttctcttgcaataaactcacctgcagggagtcaagttctctttcgcactctgcaatgagcatatccttgaaaacagtatcatgcccttggatgacgttaagtgaattcagagtttctgcaaaaccataaagttgattcacctctagctcaacttctgccacttttgttgctgcagcctcaagaaggtgctcgatgtcaacctgaacagattcaacagtttgttgaatatcagaaattgcaatttctttctctgctattagtgtataccgatctgctttctcttgattaaacatttccatgagctcctgctccctgcatgcaaatttctgctcaaagaatctaatccgttcttccagctccagaagttttttgtcggagacctcaacaatttcatagtacctgttcttcacttcatgaatagacttctcatactccatcttgataagacttcccaaatcaagtttctggaccatgttttcctcttctagcacaacgatgcgttgctgaagcttatcaaccatcattcctttatcattaatgataccacataactcctgcttttcttttgtatgacactcatcagcctccattttagcaatgagaacaacatccaaatctctcttcagtacacaa

SEQ ID NO: 51790 - DNA, 364 bp, Zea Mays
tgatcagccacttttacacccccgcagttcgtgcgtcgtcgacgatgcacaatctggagcgaaaatcttcaaacaacgtagttggcagcccttttgtcatgatgtctgcgagctgatgacgagccggaacgtgtgcgacacgaatgtccccaacagcaactttctcgcgaacaaaatgaatgtccaactcaacgtgcttggttcttccgtgatgcacaggattctgggacatgtagacggccgagacgttgtcgcagtacacgattgacgccttggacaccgggtgcagcagctcgccaagaagatgacgaagccaacaacattctgccgcgacgttggccacacccctgtactcagcctccgc

SEQ ID NO: 51791 - DNA, 364 bp, Zea Mays
ccacgtaaggtcttcgtcttgagagccttcaacagaagtagagaagacctctgtatcattttgccaaaggtatctttgtcttgaggaccttcggcggaagagaagacccccaacaactcatgccaccaatttaatgcaaaatcagtaaattcactaatgacagccttaacttgggtattagcaggaatatcatggcatgaaaatttttgttctgcctccaattcccaatcaagatatgcagcaggatcatatttgccattaaggtagtgtttggttccagagtatagggtcacaaagccactccattctagtatcgagcggttccaaaaaaagagaatattccttcaatatactgcatctctag

SEQ ID NO: 51792 - DNA, 393 bp, Zea Mays
tgtcagctttagacacagtagatttctcaaaatctagatggctgggttttgttgggatcaaaatactataatcttcctcatcttcatcaatattttcttcttcagcaacggtctgttcagcttcggcaacaggagtaccttggtcagtagttccctctgtcacaaccagacccaattgtttcatgacttcggaaatcggtgctgtctcagtgacctcggtttcttctccctcacgagacacccttgcagtcgagcgcactctggccatttgatggattttttgcggttttaacgaagttaatggttgtttttgcagttttgacgaagctcactcttctgacgaagttaactctaaatgatgaagtgctcgcttgagagcgcagtgaaaaaagc

SEQ ID NO: 51793 - DNA, 513 bp, Zea Mays
aaagcatcacacaaatttccaactcctctggaaactaatcacttctctgataaaaagctcgattgatctacatgatacaccgcacatttggaataaagtcgtcccgtccgtggattgaaagggtgcgaataaaaaccaaaccatataaaaaaacaattcgaacaacaactacagatccgaatccatctagatcactgttcgctgcaaagaacacctcacaagagtttactgcgcgtcctaaagataaacccctcctaacttcagaaattacaggtttttttacatgcagatgcttccctcctcgaaatcagaaagaaacgaaactgaataccaaaatatgtccccgctcatttaccctctagtataagcgcgatcattttcgataatcaaaatcatgcgaaaaaacgagagagagaaagcagtgtttaggggaccaaggatcacagatggagcgggcagacgccactgtccactgacgggagcccaccggaaggaatcaccacccggcatccg

SEQ ID NO: 51794 - DNA, 661 bp, Zea Mays
aaaaaatcttttaacaagaatcttctcatttttaaagacacttctcccaaaatacatatttttaataataaaggattaaataaaaaggattccttaatgaactatgttatttccttatttaactatataatgatatgtactctatagagtattaattcaaagcatctcatcataaaggctttacactagaaattattttcctaaaacaactatttttatgtatggactccatatttaaaagcatttgcttaagtgaataagataataaataaaaccatatttggcactcatgttggagttttattgtttgttcatttaatcttgcaatcctaaatttatacttgaaattgagtttgagttgaaaaagaatagaaaggaaaacaaaatatataaaaaaagagaaagtctttcctgtgtcatgggccaatttcgcctcgtcctggcccaactaccagctctcctcaacctatctccaccttcaccgtgcgacccaacctctctaccactgcgcacgcacgtcctctctggccactctctgtcgcgtggggcccgcattccagccttcttctccgctgggttcgcaacgcaggcgggatctcaacaaacctcaagcgaaatacgcgcggggatctcacgtgtggcctcaaccacttgaccaggc

SEQ ID NO: 51795 - DNA, 277 bp, Zea Mays
tatatcctatgattgaacatggatgtatgctgaagctgtttgttgtgtacattgtataatgtcaatgcagttttgtgctgtcagctaattgctattgaaattcttgtgatgaaatataaactgaatatatgctgcacctgaaattgcaagggaattggtcatttactaagctgtaagattttgcttcaaagtaccaaagctcaaaattcccatctttcactttgttaattttaagcaaaacctcagcctagtaaattttttgattgattctgccatg

SEQ ID NO: 51796 - DNA, 634 bp, Zea Mays
cccccctagtcttttggcgcacttcctcgcccaacccacctcgcctgtgcccgcgccaggcacgccttgcccccattctctcgctgccatgtggaccccgcatgttggcaccatcgtttgtattctcgcactgtctctcactaattcacagggcccacatatcaatgccatcacccacactcacgcccatgtgtcgctaatcgctacctgcctagccccactagttagccctgcctttcccttttcgttgtcgttctaggctcactttttggcaccatcggtttccatcgctcctagtcactggcacgttgaaccccatgtcagctccttcgccccaatcgtcgtccaccccacgctcgcagccgcctccccacatccatgtctccatctcccccacgttgctcggtattcaaaagggagacactgagcctcgcacgttcccccactccccaaacgtacaattactcatccatttcccctacccgcacaccacgcagcgccattgccatgctcacgatccatcgtcatcaccgcactatcgtcatccctctcacctcggtaagctttgtcgggcataggaagccatagacacgtgatcgttccctcttcacctcactgtctcgccttgcctccg

SEQ ID NO: 51797 - DNA, 594 bp, Zea Mays
aaagacctatctgtataaggcgctgcttgcggcactatgtagtcagtacaaggttgtagttgcaacagctacatctggtgttgtgacttccatattgcctgggggaggactgcccattcgcgcttcaagataccacttactattgatgacggtgatgtatgtagcttcacgaaacaaagcgggatatcaaagtttctacaaaaagcatcgctcattatctgggacaaggcatcaatgactaagtgacaagcaattgaggcgctagacaatagcatgcgtgatgtaatgggacgacctaggctgccctttggtgggaagagtgtagtgttcgggggtgatttcagacaagtactccctgttgtacgcaaggggtcaagggctcagatagttgctgcctctctacggagttcttacctctgggaatccatgtgccacctaaagcgtgttcaaaacatgagggcacagagcgactcatggtttgctgaatatttgttgcgcgtcggaggtggaactgaggaagcgaacaacgatggtgatgttcgtcttccaaatgaggtatgtgtgccatatactggtaatgactgtgaccttgac

SEQ ID NO: 51798 - DNA, 519 bp, Zea Mays
gaatctctattttattcatacatttcataaataaactatagcatgactttttcatttcttacattatattttatgagtattttttctttcaaatttaatacttgttgttcatgttaacttaatatttaaaataaagaattacggtgtaacttagtacaacaataaactatatcgaaaaattaaaactgttactggattgctgctaccaaatgatacgtacggcagtatataaatttaaaactgttaccaaatgatacggcagtatataaattttgtgaacggcatacttctaatactgaattctagatccatcactgcgcggtatagtgcgagtgcctttacgacgggacaaaatcaacgcatccgtagctagtacgttgttgaatggatccgtgccaccacctctgctcggcgagccgtgtatacgtaccggtgcaactagcaccaccccgcgtacacgtgtacgtcgtacagtaccccgcgcgttgtcagaagcaaggaagcaaagcacggtagtac

SEQ ID NO: 51799 - DNA, 721 bp, Zea Mays
cataagaggaaatttcaaggatagtctagtaggaatactcgatagcacaactctcaaggttctcagtttcgctctggaaatcagagtggaaacaacaattatcaaatgcaacgctctggacaacaaggacagagaagtaaccagtaccagaaccaacagaggaacagctctcaaaccagtcaaaggtttagtggttatcaacagaatcgtcaaggaagtcgcttttctaggacatattatcacagatggaggaatcaaggtagacccggtaaaataagtgaaatattaaattggaagcaaccaacagatgtatccaagatcagaagtttccttggattggcaggatactacagaagattcatcgaaggcttctctaagatagtgaaacctcttacttcactgctagagaaaggtaaaaagtttaagtgggatgaagcttgccagaaatgttttgaagaattaaaggaaaagctaaccactgcaccagtcttggtaatgcttgatattcacaaaggatttgatgtgtattgtgatgcctcgcacctaggacttggctatgtattaatgcaagaaagaaaagtaatagcttatgcctcaaggcagttgtggaagcatgaaaagaattatcctacgcttgatctggaattagctgccatagtgcacgctttgaagatttggaggcactacatgattggaaataagtgcaaattcttcacggatc

SEQ ID NO: 51800 - DNA, 511 bp, Zea Mays
tgagtccctggtcacggacagttcggcttctaaggccggatggtccgatctttcacaaaacagttcgacctttaagaccggacatctgccacagcataaaatcagtatcgcggatgatccaacccccgagaccggagagtccgccatcacacaaagatcatctaattcctctgtgggagacatgatagaggaattcagagatctcgacaaattaggacaggggtttacatcggtcgatcctttggaggaaatcgacataggagatggtaaaacttcaaggccgacttttgtgaacaagaccctggagaccgatcctagagatgaaatgatcggtctattgaaagaatattcgaattgctttgcttggaattacactgagatgccgggattaagccgtgagatcgtagagcatcgactgctcattaagtccggtttcagacctttcaagcagaaagctagaacatttcgtccagaccttctcccacgaatcaagaacgaaattcaccggctg

SEQ ID NO: 51801 - DNA, 711 bp, Zea Mays
gtcaacatctggttgagcaatgtataactgagatttatagccttaaatcatttggtaaggtcttattgcttactaataaaatcccaatttgtgatgtcttatgtaccaaaaaggctttcatgcattatattatatttattcgggttacttcaggtaaaaactttatgcatgaggagagagcagagaattaacttatctgtgttttattgtatttcaatttaatttcccagattttcaagcactatagagcttgatatagttgttatggccacttggcgatatatataaatatatgatggcacacaacacaatcaaataaaatatagagccaaacaaaattgtttatgaaggttgcgcataatgtgactttaggggcttgaacaacccaccacaatccacgcgagtacaagctctagcgtctggtgtcaacgtgtgtgcggccatcagggctacgacaacacaacaagtcttcgtaataagcgcaacagacacaattatggctcggtaatcggggtacactactaatcatcatttactattacggatggaaattaaattatataccgtgtctttcttggtcaatgactcgggagcaaagcatgttaattttgaaaccccgtacgtacaaaaggaccgtgccctattagttaatcaccatttactatttacgagtacaagcagcgcaagagagcagccaggccctaggagttt

SEQ ID NO: 51802 - DNA, 357 bp, Zea Mays
tttaacagccggatatcatcaaattcttcttcagtcagcagatacacataaaacggcatttcaaacctattctggccactacgagttcaaggtgatggcgtttggattaactggagcaccgactacatttcaacgagctatgaatgttaccctggcccccttgcttcgtcgttgtgtgctagtctttttcgatgacattctcatttatagtgaggattttgagcagcacctaaaccatgtgaggcttgtgttggagttgcttctcatagacagttggcaaatcaagctgtccaaatgctcttttgcccagaatcagttgacttatttgggacacgtgatatctgcatcaggtgttgc

SEQ ID NO: 51803 - DNA, 538 bp, Zea Mays
gaaagtaccctctagggcacatcttcattctggtcacctttaatgctccaagcaactactgaacggagttcctatgcttcgaggtagcttggttcaagtgcgggtataacaccatcatcgggaagctgagactggccaagttcaaggccatcccgcactaaccgtacatgatactcaagatgcccgaacctcatggcatcatcatcatctaggccgacttccaaggatttgtagagtgttttcgagcaactatccagacggccctcaccgtcagaccctcggtagcacctccgacaacaaacaccgacgcatcgctaggggatgacctcacaatcctcatgaatgaagcatctaccgctaccaccgtgcggcccgttgaagaaaccaagagatccaacctcggcttctccgacgaacgcaagacgacgatcatcagctccagcctcactaccaaataggaatacatgctcgtccgttttctgcaggacaaccaggatgtattgacatggcaacatgtttacatgctaggagtccccag

SEQ ID NO: 51804 - DNA, 353 bp, Zea Mays
gaaacgggtaccttgatctaactaagtctagttaggtgtggcggttcacattgaaaactagtggagcacttggggctataagtaggacctcccttgaccctaaggagcacatgaaagcagcatacaagtgtagactcattgtgtaacatttcttttgccccctcacttttgtatttgtctctagatctagtgttgacacagttatatgccaaaagagaggagaagtgctgctcggagatagagctaacaagatcttgagcaagcatggagtgttactctatggagtgccatgaagagttataaacaactgcagctctactgtaaccgtcatcaacaatagtggaagactcagt

SEQ ID NO: 51805 - DNA, 427 bp, Zea Mays
taacaagagaaacaaataccatagatgaaagagcttgtagcccagctgcatgaagaatgcatatcttctccttttcacccatctcttgggccagatgacatagtttaggaatctggttttctaaattgaacatgtaagtactgtcaacctacaatgagaagttaatattccacgagtcaaaacagtctaaaaagagaccattaaaacatggtgcatccattttgcaaattgatgctacaagaatgtttaaatacctgattatttataaagtcaaaaagtgtttgacatgccaatttccgcaagtcatcctgtctattttgctccaataatgtctctacaattgttagcaagctgttggcaaaaagtggcctgcaaagcaatggtttcactcattacagtacaaatttcatttatcgatgcaacactt

SEQ ID NO: 51806 - DNA, 470 bp, Zea Mays
gtgactgtgcggtgggagaggagaggacacggctctctgaaacttggggggctcatatgtcagtggcgctagtagggtattcacagaacccctccgacaagtgagtacgtcgtcgatgtcttgatgggtattgaaatgtgtcaggtatcacagcgtctggacggtgggccatgggggtcacatgctagcgtattgtgttgggatatacggagcaatgaagcgcagcgtttacggcggatcaagtgggcttggtcctcgtgctctcacgcagtacgcgtacgcctaccgcctacgccacagagtacgtactttatggcgtaaagctatacggatgcaatcgattttagtttatttttttctcccatttttgtcctcctgtgtgtgcatgatgggaaaagaatcatccacgcaagaagtgattgtattgtagattataagtccttagaatttatgctaatcctcccgagaag

SEQ ID NO: 51807 - DNA, 510 bp, Zea Mays
gtggttaagatagggccgagcttggtctccttgactgagctagagaacacaactaacactccccattttgaccacctcgtgccccaacacttgctctactagcccagtaagagcacatcgcacccatatccccactcattagcttggatccggggccacatatacatcgacaccatgtgacggtgagccgctactcaccaatgttaaccacctccatgatgtcactatcatcgaggacccctatggtgagttcattgagatctcctacatcatttctaccactccttgttgatcattgaccaccaaagaatgaatcgagtgaaggactgatgagctgtcgccattatagctcctagcgtagtggtgtggggaaggagaaacccctgcgctatctaatagccatcatgtcatcagggctgaggtggagagagacactagaaatagccatcatgtcgggtgtaggagcgtcggtgtcctggagttctccttctccttcacctcctacttgaa

SEQ ID NO: 51808 - DNA, 421 bp, Zea Mays
tgaagcagaagtactggtggtatggattgaagagagatgtggctacacatgtggctatgtgtgaggtgtgtcaaagagttaaggccgaacaccaaagacaagctggactattatacccattaaagatacctgaatggaagtgggaagagattggtatggacttcattactggattgcctcgcacctcgaaaggatatgattctatatgggttattgtggatagactgacccaagtggctcatttcattccggtcaagactacttataagggatcttaattggcagagttatatatggctcggattgtgtctcgacacggtgtaccgaagaagatcgtttcggatagaggatcacagtttacctccaaattttggaaaagttttcatgagaatatggatacgaagttgaattttagttcggc

SEQ ID NO: 51809 - DNA, 536 bp, Zea Mays
atctaccttagtggtgagatcattgacagaaagtgatacctcggaggtggagttgttgctaatgtccttgtcgttgttgcccaacgtgtcctcactaagtgccatggtgcagaggtctcctatagtgtcaatgaagaagaagagtccatagagcttgtcatcaacctgcctcttgagctccttgtgacttgagggaaaagaagtgttgtcgaagttgtggtcgaggtcactaagggaggcaaggaaggcacacaccttgatcttggctttgtggaggtacttctacttgagtgcctcattgtcaaacctccccttgggcttgtgcttgctcgaggtatactcgcgcttgcccttgcaccaaccagagtggtggttgtgcttcccagccaatagcttgctcttcatcttgggacagttgacgatgaagtggtcttggtctccatagttgaagcaaccatccttggccctaccatgttgccgattgataaggttattttggaaccgcgtgaaccaactggcaacaagtgctagatctt

SEQ ID NO: 51810 - DNA, 356 bp, Zea Mays
catttgatgtatattgtgacacatcagtcattaggcttggttgtgttctgatgcaagaaggacgagtaatagcgtatgtttcaaggcagcagcgccagcatgaggaacattacccaacacatgatttggaattggctgcggtagttcatgcccttaaaatttggcgtcattatttactgggaaatgtatgtcatatctatactaatcacaagagtttaaagtacattttcacctagttggagttaaacatgagacagagaaggtggcttgagctgatcaaggactatgacctagaaatttattatcacccaggaaaggctaatgtggtggcggatgctttaagtagtaaagccttt

SEQ ID NO: 51811 - DNA, 334 bp, Zea Mays
tcgtaagcacgtggaaccgtcttaagtcgttgctgactcaaaccgattgcttttgttaatagggcatagtagtaatcccgagttaagtaagagcgagcatgttgcaccgtcttaagtcgttgctgacttaagccgattactccattagcagggcatagtggtcaccccgagttaagtaagcgtgagcatgttgcaccgtcttaagtcgttgctgacttaagtcgattgctccgttagcagggcatagtggtcaccctagttaagtaagcgcaagcatgttgcaccgtcttaagtcgttgctgacttaagtcgattgcttcgttagcagggcaaa

SEQ ID NO: 51812 - DNA, 1564 bp, Zea Mays
tataataaatatgttctgagtttcgcaaacatttagattaacccaaatgggcagagatgaggacgatatcaaaatcgtggtgaacgaagatgattaaattttagtgacctttacattcactgctatgacgtgttaaagtccgcactcatggtcgagcagacgataaacacctggggtgttacaacgacaccctaatggagcaagttctgatcaggtggtctggctttgatgatgcactgtccacatgggagggcgctgaagctcttcgtcaatagtttccatgagctgtcgcttgggggcaagcgactacacatggagggggatgtcagcacccctgcttcgtgtactcaggaggcaggtgactctgccatgcatgctggtgggacaacatctaaaggatagaatgcactggagctgctaaggagaggcaagcataggaggaagtccaactcaagttacatgggcctagaatggggcatgtgaatggcccatgaaagcaaggacaacactggaatacaattaacgcaatacagttaccttcctccttcccttcttcctcaacttcccttctttcttcaagtttgtatggccgccgcgagtctcgatgcagtgacactgcatcaccaaggagcactcatcgtagttggtccttgtcagttgcaagagctccatgacgcggggattggccatgatgctcaagccttctacgatcttgggcaacatgatgtcttcaactttcatcaacctaagctctaataccaaatgttggctttgcctaggaactctcactctcaagaactcgactcacatgacgaacaaaaggaagaagatgaatagtgtttttcgtgacgacatacaccacaaccgcgaactagctctttttcacttcactagacttggctactacaaaatggagtagtacatgggctacaaataggtcagggtgcaccaagtttcatatcaagcctaaccttcatgccatgatctacacacgactcgagtcatttgctcatcctgcatattgtggctcccttcacatatatcaacaccactcaaaccatgtagtcctaaccacctatgacttgcttgatcagccccaacatctctcctacatggaaactagatcatgaacgcgcaacttacaacatagatacgcacacacacctaaacaaaatgacgagctagacaaacatgtcatgacaaggacacatcatggtcaaggttatttccaacaatctcccctaaacttgacatggtgaacttcggcatacaataacattgactcatcattggcatcagctaggaatgccttctactccttcacgccagtcctgcaccatgtgcccttgctcaccacactcaaagcagcgcctgcggtggcgacttttgccatgcctactcatgcttgagactatgctactggtgtcgccatggccaccactccgaccaccgttattgttatgcctcgccatgtagtcatgtgcacgcatcttgttgccacattgacattgctttgcttcccattgtgcctctgtgagcagcagttgctcagtgttccaagcat

SEQ ID NO: 51813 - DNA, 304 bp, Zea Mays
ggcaaagaactcgaatagaggcagtgcttaatgaagaacgactcatcgcttgggtctatagatccccttctggggctcttgtacttgtggtacctgaacaaagatgtggactagaagcaataatcaaatatctgtacctaactgaaactttaagatagtacaaggagaaaacgaaacagaaaatccatatgcacaatgtttaacaaacttgcctcattgagaggttgcatatacatataacctaataaggcatctagaatgagataatgaaaaacatcatgtatagggtgtgtttggattgcgc

SEQ ID NO: 51814 - DNA, 825 bp, Zea Mays
gttcatccttcaaatttcaaattcaattttctatttaactttcattctcttatcttaaatcaaatttaaatgctcacttcaaaacctcagcatgatatgcaacatcatatgtttatttcatacattgactatgttactttaaacatgagcactcatatgcttaaatagataaaggccatatatataacttaatcccttcacttctattatccacaatttggggtattacaaatcctacctcccttaaaagaaatcttgacctcgagattacgatgaactaggaaaaaggtggggaacttctacttgtagttcatcttcttgctcccaggtggcttcatcttctctgtgatggctccattgtacgttgcacattttaatcactttatttctcgtgacccgagtcaaggtatcaatgatcttgacaggatactccgtgtatgttagatcaccatgaacactaagtttctccataggtagttgctcctctacactctgaggcatttcttcaactaggatacatggaagacatcatgtacatccgatagatggtcgagtagttccagttgataggcaacttcccccactcactttaggatcttgaagggtccgataaagcgaggggacaacttccctttaactttaaatctcctcataccatgaatcggtaacaccttcagatacacgtgatcaccttcctcaaactctaactgccttctacggatatctgcatagcttttctgccttgactgcacagttctcaagttttcccttattattcgaacttgttccttcgcctcttatattatttttggcccaaagaactac

SEQ ID NO: 51815 - DNA, 528 bp, Zea Mays
gcgggggagaaacgaccctggccatcgattcagtaatgagcgctcacgattgaatctcaaataccccatcgtgattgaaaatcgtagtcgttgatcttagttctgttggccgagatcagatcgtgggatcctttaatctcgagcgttgatattagatccgacgacagtgatgggatcggtcgtgtaccgatttggccaagaccgtgggccgtccaatccaatttggcgggggaaattcggtctgatatcataaaatctctatcgtcgatctccgacccaacgaccgagacttcgatctaatctgcatcgtagactattgatccaacgatccacaaaagcccatactccttcgcccgtctacttttgcaaatgagaccctgtgctctatattaatcaacccgccgtccacctgtgcggtaagatgattacctagcagtccctgagaattgtaaataagtccctagagctcgatttaattataaaaatgaccgaaaactaaattaatccctatattgctcattttaactc

SEQ ID NO: 51816 - DNA, 430 bp, Zea Mays
ttcgcgaacactttgcgtgtaccacaatccacgccaactcaccatcagccacacgaaattccattgaacaatcccagccataaaaaagagctagacaaaaatcgaagatttttcacctctcctcagtccacctcatcttgtttaagcccaagcaaaacctcgccatagtgcggacggagagcccaggaactgaaagcctaatcgcaatcccactcgcagcaacgacctacgccgcccctaactccaatccagaaccccagagtccagaggcagaccggcaagctggacacctgcggcatggagcgggtggcgctgctccgcacctcaggccgccgcctcctacaccgctgccgcaggggcaggcccgtcgtcgtgcccgctgccgcggcctcatccttggcacgccgggcgtcctcgttctcactcccgg

SEQ ID NO: 51817 - DNA, 337 bp, Zea Mays
tgggtaccgagttatattcagtactagggtagcccgatcttcatggtagtaggttgataaataggatggttgactgtaaaggtaacaaaataacaaggtaaatttgctgaagaacaataggtaactaattttatacctgatcaaggtaggaggtgaccaagcgacggggagagagacaccgatagtgtgtagactttgactcgatctccaaacagccacagaactacaactagagctaaaccacacaatatgaggcagtcgtattggaactcacaaggcacgaactagtggatcctagaggaatctcttcacaagtccagaaagaacaagggtagag

SEQ ID NO: 51818 - DNA, 434 bp, Zea Mays
gttgggcgaacgctggcgtgccgaccagggtcgaacacgtgtgcatgttcattctgcccgagttctagcgcgtggggtcatccatccgagcctgctcttgccttggtcagtgcacaaaacctcttctcctccctataagctaccgatcttgtgttggggtcataggatttggcctactggtttcaaagatttggagctctgaagtctggtctgtctcctagcccgagcccgaggcaaatcttcggttttgtcgtgtctagggctcgcgtcccaatgccatcttctgacacatgacaaaggggttagttagacacgtttttgtcaatgggagcattaggattagagctaaggatcaaggtgaacgcgctcagttttggttcaagggttgaaaattcagaaatctgaattttagatttccccattgaacctccact

SEQ ID NO: 51819 - DNA, 1344 bp, Zea Mays
tttattctgaatctaacgcaatttgaacggattaaatcggagttaaaatgtaaaagttatgaattttccaagcttcttggattatttcaacactaaaaatcattttcgaatctaatctattaataattgataattaatggactgtggtgcctattatttaaaagctcaaggtcaaatccataaagttttggactgatatgcaattattttacagaactgaaggggttcctttgcaattggtctcggccgaagggggtattgtgtgtccacaaccgttagatcataagtcgacgacacagattacatctatgttttaagtgaaccggcagaacgttggccctcggatcacttatccacgcttgaaaacatgccacgcagtgagatcgaccaggctcttggatcgtcaaacgacggcctgattccaatcccccgaatcggtatttagcttctaatcgcaaccgtcaatcacgaatccgagggccacgagctcatcatcttcactaagcagccggccatggtggtgttggcttccccacggcggagcaccaccggcgtgcagtacctggcacctaggtgacccaattaggatgcggttctacgcggaacaaagcggagggtatgaagaacgtattggagtgcatcttaccagtcatggtagcgtcagtagtgctgcccatgtcgcagcgcgtatcgacgacatggccctaaccccggcgagaaatcgttgtcgctcccaagtctctcctgcaccatggatttcccgagaacccacctagacacccggcaaacaccatggatcaaccaatgggcgcagatcgacggggtgatcaagatatggcggcgacggggctctccttcacagagagatctagccctcagcccgagcggtcccagggagacggtgcgcgcacatatagtcctgagtacaaatcctaacaaccctatggagatcacaagagaatcccccaccacagattcttgttacgcggttaaatcataacaactagagcggattatggcggacgaacacacgggattcggttctgtttggggaagatgactgcacgttgggccccacatttcagcaatagctagtttgtggcatggtacatgtgtctgggatgcgggccctgcctggcggtgggcacgagcgcaggtctggctggttgggccgcgtggaaatgggccagttccttagatcaagcccaatttcgggtttgtgattttccttttctttttcttttctatttatctctttttctctagtttgtgttcaaatctatcttttgatttcaatctggttatatgtttcctacatagtttaaatgcacaatgtaaaactta

SEQ ID NO: 51820 - DNA, 787 bp, Zea Mays
gaaaaagaaaaggaaaatactcaacagtattgggctcaaactggcccaagcggcccaaccccgcgcagaagcgcgcccgcgctggccattttgcacagcggtcctcggggttctggataacaggaaacaagttcctttattgttctgatgtgtcgctgacaaattacagaaaggccctccatcttctattcctttacacgacacgacctcgacggcgttcacgcgcggccgagctccgacgagctcgtagaccggccgttggggcaacgtctagggttctcgagcagcagacatgaaatcggggctaccttgatcattttccctaacttaattgcgcttatgatcaactacggagctctggccacggtggtcgtgagtatcgcggctatactgccgtgttcccagcgaccagaggacctctagcttaattaaatgggttgtcgagcatcacagagctatgaaaaggcttaaacgagagagagaagaagatgagctgaccggagtacggctggccgcggtgaggttgagtttcgggtggcggagaatggatttgggggaaatcttaaattcgagctcttggaggcacggttgctaacgattgctggtgactgggtgggtgatgacgttacgcagctaggggagggctcaatttataggcagcttcgtcggtggcgcacaatttggtcgagcaacgcggcggccggaggtgaagaggattactggcgcgcgtgaatcgctgtctcatgtcgtggcaagctctccggcgttgattagacaacagtggggg

SEQ ID NO: 51821 - DNA, 1304 bp, Zea Mays
ttcataagcgtcttaataactaaaagataaccgtctcatataacatgatctgtagtagtgaaagcagacgacatccaatctcttaagcattatgtagatgagcagcgagatatattaaagcaatatacaggggcatggaagaagattttaggaaaatgaaacgtgcatttgaaaaatctaccattcccaatttcccatcacatgatattaatactacgaccaccacacacaactcatcggctacaaatgggcattcacaaacctagtcatcttatggtatgctgataaacttgtacaacgggcaaccacaacctcctccaccaatttgggacaaactagcagtcctacccatggttggactgtccgagcctgagcctggatagttcacgaccatgaccgatggtcctgtcctttatgacagaccacacagaatcacgccagggccactgtcgcaaggcctaactgacatgctcggactatctggctacacacacaaacagtccgagtatccccaagccatccgcatttaacactagacagtctgcatatcacatcgtaccatccctgttccacatcggacaatccagagtgagtacatagaataggatgtggattattacccgcacttaccacaacaaaacttctccctaccacctacagtccctcaaagtcgtattatggctccacctacatacgagagtgagtacgttttggcccctagaaggtcggaaaaattactgcacaatatgggacacctatagctaatataaacaagccacaaaaccatatgccccaatacccatgggcaagaggtcaacacaatgatacaaagggtggaaggcaaaaggctcaggagtgcgagagaaggcaagggcttgagcgttggtaacctccacacaattgtcgtgacaaatgcatttatgcatcgacggttgttggagaacacactgacatgcaaccatttgtttgtctcccacacagtgcaaattttggtattaggtcacaccagcagtccctaagcctacagtgggacaggggcactgttagcacccctatatatgggtaccctaggtgccacgagaaaaattggcctacacaggaaggacatgctttgggtcccgccatcaaggtggtttaagatgatgggaccccactgtagagtcatcattatgtgtggcaagtgtaaggaagcaacattcgccactctagcgttcagaaagtaccttcctagactggttgtcgccaacatgctggcagactcaggttccgccatgtggcctggtcagaccctgtcgttcatgggg

SEQ ID NO: 51822 - DNA, 406 bp, Zea Mays
gtggagcttcggtcgtcaccaattccgtcatcgacgccaccgtgaccgcgcaatttctcatcggcgtggcgagtttcgcctggatccgcgccgcgccgtggtcagagacattcggccttcaatagtcagtatgaaatcttctccaaagctcgccgtcgtaccaatttcgttttaagggcagtagcgctagggtggtgcaccgtagggatgagattgaccaacgccggtggggaaatccgccgctgccttgggcggcgccgccgtcgtgatgagctagaaggggggaaacaccgtgggcccttggatgcgatttgtgcggttccgattagacctgggtaataccccttcgcgggttgtaatcgggggcgttgatttggggatgaacggctcagatccgaagccagtg

SEQ ID NO: 51823 - DNA, 381 bp, Zea Mays
gagaaagccctgaccctcacccgaccagcccacaacatgttttagatgcaccgtctgatccattcaatatgacgtcaacagacttttatgctttgctgtacacaagtttacgcttattttgtcatactgtctgaaaccgcctcatgtactaccgtataaaaccgatcgtgacgactgctttgcacgagaggactagggtttcagcggcggcggttgcacgagacgtgagcgagtgcggggaagcaggcacgacgacggcggatgggcgtgctgtgaatctctgaccactggcttggtcgcggacgcctcctcgcgaagacgcgggcatggcggtatgggaccttcccaccgaccatctccttaggcttcacctccaccgcc

SEQ ID NO: 51824 - DNA, 408 bp, Zea Mays
ctcgttttcgtgggatgcatcctgatcgtcggataattggtggacgacccggtcgctctggggcgctctaccgttgatctttaatcctaccgctacaagtgcataccggttcggggtggtgctcaaaataatctgagccttctatctcagatccagcggccaatcttcacccataccccttcgttgaggactttttacatatgagacctcggttttcattgaaaataacccgccatccctccactataggaagacttaacagttaggcccagaactttatgcagagccccctgggctttgttcaaacagtgtccatagccgagtagccatgggaaatttagaatttatttagaaaaatggtttttaatacaaaaataattctagaaacttgtgaaattcatagttaat

SEQ ID NO: 51825 - DNA, 349 bp, Zea Mays
agaatttagagataattaagactgaagctggaatgtcaggttactgggtctgaattttcagacagacagtggaaccactgagactttgagcataaattcaactatgatccagcaagaatctgcccatggctgctatgacaaacttgtagttgatttgtagctctccaactttgctgcagagcatggagtatgttaccatatagatttgtgataaaatcgagcctaaatgttgactgtcaggcgctctgaataagtgctcgccatggtacagtgaccgaaacggatcagaacgccagcatgactgtcctcactgccgacgactcccttcaccgtgattcgtgctaccaac

SEQ ID NO: 51826 - DNA, 730 bp, Zea Mays
accattcatgccctaagtcagtctacgcctaactccacccctggcgatcctaatccaccccttaattgagttaatccgtcccggagttcttctgcccacgacgacggcgagacccaagaaaaaactaaggtgttcccgacgactaggtgcggtatagtttaattggcggggtcgatgagcatcacaagaatgctatagtgctgaaacatggacaaagagggcgagagcggacctggagatggctgaccacggcggggtgactcacagcggcgcagagagtggatttgggggaaattccaaattaagacgctacggtggacgatcgaaggcgagggttggtgctctggcttcgtaagaacctagcggagctaacgatgcactcaatttatagcctccgagagcggtggctccgaatttggggaaggaagctggcgaccgaagagaggggtgagtcatcggcgagcgctatcgtggcattcacagggcaaggacttacggctgtcactagctatccctcacggcttgcgacgatgtggtgaaacgactaagagtgtggcgtaaccgagaaaaacggcagcatgatggcgatggttcccattcagtgcgcctaatagagcaatttaaaaggcttggttctcaaatttttatgtagcaactcattaatccatctgtggcaaagttgatcttctacaaaccagcttgaattttgttataggaactagaatcaaat

SEQ ID NO: 51827 - DNA, 493 bp, Zea Mays
gcggcggccagtcgtgaatggcagccaccttggccgggtccatggctacccctgcggccgagatgatgtggccgaggtaggcgacagatggtgctccgaaagaacacttcgaacgcttgatgaacagctgatggcgttgtagctcctcgaggacggcccgtagatggcggaggtgatcggcccacgtgctgctgtaaatgaggatgtcatcaaaaaataccaggacgaaccgtcggaggaatggccggagcacgtcattcatcagtgcctggaacgtggcaggggcgttgcaaagcccgaacgccatcacgaggaactcgtataagccatcgtgtgtgcggaacgcggtcttgtgcacgtcttctggccgcatccggacctggtgatagcccgaccgtagatccagtttggtgaagaatttggcgccgtggagctcgtcgagaagctcctccacgaccgggatggggaacgcgtctttgatggtgagggcgtt

SEQ ID NO: 51828 - DNA, 486 bp, Zea Mays
cggaaggagaaatggtgatgcgaacaacggaaaggagcagcagaaggggacgtggcacgtgcagacgtgcttgctagctatccaaatcgatgttcgtcctgctcaaagtgcaacggatatgcttcttctcttctttttacccataacaaaagagagatctgatagggtaggataggataggataggacatgatgggagggagcaagagattccttcgcaagggcagacagaaacagagtcaccgtcaccgcaggaggaaacatacatgcactgttgaggccctaaaccactgggcacagagacaacgctggtggtcaacaagcgatattctgcaccaaatcgttatgttatgtcaagttattccgtcgaaatttgcatttccttttttttggaggtgacaggtgctttctccatatgctgctagtgcacccatggaaatccaaaaggcatctcagctaatgtgaacggatatggatgatgtctctt

SEQ ID NO: 51829 - DNA, 530 bp, Zea Mays
tttgtatatagagatggaaacatgaagagaagtctgaatgtgttttttggtatacagattattaaaggatacaccggaaaaaagcacaaaggcctgaagaacgtaccgaaatagataaacacctcatttttcaaaaggactcttccacccctggtaaattttcgagtacactctcccacctcgactaacgtacgtgtgttggtttgcggtttgcacgttcattgtaaaatagcaagcaagatcacaagaggtcaaaaccagacaagaccgttcttttaggacgtatgcaatgcaatacaatagtagtgacgagcgcgagaagatagattaatgaagaatatagctagggcaaagagattcggtccctagtaccgtcgtcaaaaagtatatatgttgcaggaaagtttcagtctatagtagtctacacctggccaaatgagcccggccggtctagcttgtttcgagcagctcccaacaatactcggtcgacatgatcaaatttctctctataaaaaacagtgtagtttcgt

SEQ ID NO: 51830 - DNA, 328 bp, Zea Mays
gtctggttggtaggtacacacaagcacaataacagtcttgcatcttcaaagtgcatttgcttgtttttattctcctacataaatcgttgaatttggaaaactgaggacccgatactatttttattactatggacatgaggaattttgggtggtcacattaattatatctcattgcaataattgtttaggttatactttattgcactactcgaacaacatatggtattattgtaaattctacaagaatatagcattgagccatgtagttgttgtaatatctctgagcaaatttcaccactatgtatgccgcattatcttcaaatattgt

SEQ ID NO: 51831 - DNA, 322 bp, Zea Mays
gggatcgtgagtatcagacattggtatctgtttatatctcaccagtatctcaatttcatccaaagcatgaaccaccctattattccatacaataagagctgggatgtttatggattgtcccagccttccgatgcgatcaacctagattccattccaacaacgtgtgttgatggttgcattcagacgagaaatcgcatgaaatgcctacataattcaaactctccagtagggacaaattgatgtcgcaaacaaacagtcgcgacccagcgaaatcaaacgcattcacgtaaatcgaatcgcttccgcactatcacgacgcagc

SEQ ID NO: 51832 - DNA, 1138 bp, Zea Mays
tttgatttggagctagaatgaattttctatgaattaaataaatttctagaatgatttcaacactaaaaatcattttctaaacaaattctttggttttaataagtgtctggtctgcactccaaataaacagaagcacagggtctaactcgtaagattccatagactcagtccacagctacggtggacggcgggttgtttaccaacaagcttagggactctttaagaaaatgtgctgcgaaggggtatcggtggagatgagtcgttggattagatctgtacggtccacaacagatcaagggaaggttggactggtattagatctaagccgcaggatcaagatcaacggctaggatcctataataccgggattcattcacatacctcggattataaacttacgaccgggatcttgttgaatgaagaggtacgcagaatctaatccactctttccgccgagagatctacggtccacgccccaactcttcggatcaaatctcaaccattgccatcaagaccaacggtcgagtgcctgtcttctacctaccgacggctaaacacagcggcgtggccccgcccggtggtgcccctcgctggtgagccataccaggcgccccgatgctccaaagtccaacccgtacgaacaacacatgaatatgaatagcgcgaatgcaagagaggcttcattacctcgattaacacgacgttgcccgtacccgccgagcacagaggtggtcggtatttggtgaagaatttcggcttcaacggtggtcaatccttccttccccggccacgagcacctcccaagaaacacaaagaatctcctaaacccacagtggactccaggacgccggttgggaatgaggtcggtgctggcgggcattttctgctcctaatcctctcccctcgatttccgacgtgtatgcactctcctcatgaactggcgagacctgtgatggtgcgtcaccaggtcttcggcggtagggacactactggtgattccaggaagggaccgatgatgcccaccattatagccgcgagggagggtggacgggagggcgacggaatcggatctcgcccggtttctcgcggcggctggtactcgtatttatacggctgcgactaggagggtccagcggag

SEQ ID NO: 51833 - DNA, 500 bp, Zea Mays
tacttcttcagcagcaggagcagaagggccagcatcatcatccaaccacgacacccaccaaagttgtctctttttcttttcttcccctcagcaggagcagtcggacgaccaacttgacaaagatgttttgggcgagcaccctcaggcctttgagtatccatggcttcctcaggttctggaatagttgcaacagtcaccgttttagcaagggcagaatcagaggaatcccccgccaacatatccagcatagcacctatttctacatcacttggattagtaggtatctcaaagtgaacttgtttctcgtcattgggaaggccaccaagtgaagcaaccaggactccaacttcttcgggagagggtcacactctaagacccaaaccactgtcaccagcaggaggattggacacaaaactaaaaaagggcttagaagatggtaaattccaagcagaatatgcaacaggagcaccaatatttgataccttgcccctcaatatcat

SEQ ID NO: 51834 - DNA, 621 bp, Zea Mays
acaggtcttcgaggatttgatttactctttctgtctagccatctgtctgcggatgatatgcggagcttcttattgcatgggtcccaagtgattcttgtagctgctcccaaaagcgtgccagaaacagtgctcctttgtcagatacaatggtctttggaataccatacaaacacactatttgatcaacatagatttctgcatatttctctgtcttgtgggtggtatgcactggtaagaaatgagcggtcttggtcaatctgtccacaatgacccaaatggaatcatggtgtcgggaggtattgggcaatcccacgataaagtccatgcaaatgtcctcccatttccaagatggtatgggaaggggttgcaaagggcctgctaccttcaaatgactagccttgattctctggcaggtgtcacattcggatatgtacttgccaatttctatcttcattctggtccactagtataaggatctgagatcatgatacatcttgttgatgctggggtgcatgcagaattttgaaaggtgagcttcatccaatatcttctttctaagctcagtgtccttgggaacaaccaatcgatctccaaaccatagaattcctttgctatcctgac

SEQ ID NO: 51835 - DNA, 624 bp, Zea Mays
gggtggggcaatgggtcaggcatgcgcaccggccgtaataatcttttgaagtgaatgcatgatcgatgtgttcacgtacgtcgaattcacgtaagcttgggcgcgtgaatggtggcgactgttggctggcgatgatttcatgatgatggatgcatggggagccttcaattctccgtgcgtggcgtgccgggccttgttagcggtactacatcttctgctactgggaccattgtggcgcaacgggttagcaggccgactaagaaatctacaaaggtgtatgagccggattgggtgaatgggctgcagctgtgctcgctttgcgaataagtagaacgagagttgcctggtgaagggcatgtaagaattattcactacaacttcttctccaagttctgctgctcgtccgccgccactcttcttcctccttaccttctgctactcctaatcgtcctctgctactcttaattgatgttctcttctactgctaccttgtatccataccgagttgttaacagtggtatcagattcaacgatccttggccgatcctcgcgttctcgcgctggatccttctggtattcattcccatttcactcgttttcgccgtcagcaagttctcatgaatc

SEQ ID NO: 51836 - DNA, 411 bp, Zea Mays
cgttagtagggtatagtggtcaccctaagttaagtaagcgtgagcatgttgcaccatcttaagtcactgccgacttaagccgattactccgttagtagggtatagtggtcaccctaagttaagtaagcgtgagcatgttgcaccatcttaagtcactgccgacttaagccaattgctccgttagtagggtatagtggtcaccctaagttaagtaagcgtgagcatgttgcaccatcttaagtcactgccgacttaagccgattgctccgttagtagggtatagtggtcaccctaagttaagtaagcgtgagcatgttgcgccgtcttaagtcactgccgacttaagctgattgctccgttagtaaggtatagtggtcaccctaagttaagtaagcgcgagcatgttgcacc

SEQ ID NO: 51837 - DNA, 632 bp, Zea Mays
accgcatcgatcaccttgtgagttgtgaggcatgcatgcggccgttgccatctgttccatggacactggttcttcactggagatccagcatgtatccctctttttagtttttacccggtgggcggtggctctatccatctttgttttgcgagcgaacctcttcaaagaaggcaggcatgtaggtccaaaagttcacctaaaaataaataattgatcggattttatagggaaaaatgaatccaaaaaactaacagcagtataatttattaaaggaaaaccaacgaaaacctctagcaagacacaccggttgactatccaggcgtaccacactaagggcatgtttcgtcaattgcctaagcttctcataatttatctaacattttctatctaaagttagttctttaatttaatcgactaagcttaaataagttgttgcagagttagtcgagatcacctgttggtagcttaaaagatgaaatacacagcgtgtaatggctgcagagcttattgccgtatagaccaataattttttactcttcatgatacatatgtgtaacgaatatggacagagacctattaataactagttaggtgcccgtatgttgctacggttttatatattacatctctaa

SEQ ID NO: 51838 - DNA, 1248 bp, Zea Mays
aaacaatactaaatgataaacaacttatatagttgtgcaaatatagccagtcatatgaagatgcatgtcttaaatgtaataaccaagttcatgagcatgctcccctatatctgtgctttctctttgttagtaactactcccattctttgtgtatcattaacttatccctttttataagcttttttataccaactttctctttgttagtaacgattctatcctcctttgtcataaatcaccacaaagcgtgtaaaggataatgttgggggcctctatagccaaagggccttgaaacattgtactaatagttaaacatgctcccattattactaacatgtagcaaagataaccttcatctgcagcggtgtacaaggaagggacgaagctagggagcttcggcctcgtcggatttaccggtgaacaggaacaaggggagaagaagcttcggctctgaggcgctaacacacaaagcagaaggggatgagaagaatctagaagattggttggcacaatacgagagaggaaaagtgatgaggacatcctccactattacctgttggcaaagacgcaattggcccagttggcccaattgtagtcggacggtgaccgtgtgagcctgagaattatcccaccttgcttaacttgggaggaggaagccactttaaaagggagagccacccttcccccattggactagtcttttagggcgattgggcctttccctgagttgggtgtgcataatgaactgttgggctccgggcaatcctaatttgttgggcctcggccaaccccacctgggctgggtgtatcaaaaagacaacattagccttataagacttgtagctcatatgtatagtatttatggatatttttgtaatttcatatgaagatatatctcaccactataaatagcagcatagtgccatgcatgagggagacttttagttcgagggagaaccaagtcgctcagacttcgaagctatgttgtcttatatttgtacctttctttgtatagctgaagttatatatgtaatcattttcaaataaaaaatgatgaataacaaaatgaaacaaaatggatcattctttcgagttttttattatcttttttacaccttctccattttattaatctcatcctagaagattaatgaatggacgaagggggaatcttttcatttgtgttgccttgtttttttatctcttttaggaataaaaaacaagtaaccaacattagcgcctacctct

SEQ ID NO: 51839 - DNA, 406 bp, Zea Mays
cattagttgttcggacgctagtcataaccttgtcatacatgtccttgatgagcgtaacatattttgttgggactttatgcttatccaattcccatcacatggaaattcctaggtattttattgtaggccttttccaagtcgataaaaaccatgtgcaagtccttcttctactctttataccgctccatgacctgtcatattaagaaaattgcttccatggttgaccttccaggcatgaatccaaattggttcatggtgatatgcgtcattcctcttaggtgatgctcaataactctatatcatagcatcatagtgcgactcatgagcttaaaccctcgatagttggtacaaatttgaatttctcccatgttcttgaagattagtactaatgtactccatctccact

SEQ ID NO: 51840 - DNA, 717 bp, Zea Mays
ctctgcccattggcccgtttctgataaaagtcgctttctggttgcctgtgagatatatctcgccggccattttcggtaaatacatacagcctgcgaagttatttgtccttatcggattcgatccctgattagtgcggaagttgggggggaaaaacgacgaatccgtctgccatgagcaactgctggcgcttaccagcctaccgcattcggtgtaccgaacgaatgattggtgattgggctaggctttatcatacgcacttccttatctgggtgttgttgccatggtcgttgtgtgaatccatagaaacggatttagggcggctgtattaaacgcacggtataattttaacgcatcactgtgtcctgtgctcacaagttctgtttttgtttttgtttgggggcgtgtagaggattgtagtgtggacgaatcttctctctgtcaaacttttggaaattgatacgtattctagaatgagtattggaaattaagaagttcgtgtaggaactatatgtatggatatgtgctatttgttttcgatgaacaacctgaccctagggtgcatgagcaaggttgggatttgttggtataaattgccgattatttaatatggtgcttaatttctttgtagacactagggcatgtacaatcctatttaatatagggtctcttgatgggtctctaaggggctaattgaaaaaaaatacaagaaacgggtt

SEQ ID NO: 51841 - DNA, 395 bp, Zea Mays
ctccggcgaggcctccgccgtgcactgggcgccgtctccgccgtgtgtgcgtcgggttgggggagaaagtcgcgcgccccgcatcggccgttggatggtgagggaacgactaggattaggccgagccataccgagtcagggtggggatgtgagccgtagatccataatctgatgggtgcgagtcgatctcggttatttagaattcggaccgtcagatccggatccgagcgtcgtcgtagcgtaccggttcgttgagtggacaatctaatccgagccacaagatctagatcctatggacgataatagagaataccccttcgcgctggcacttttgttaaagagctcttttgtttatagtaaatagaacccgccgtccgcgcctgggtctgtctgtg

SEQ ID NO: 51842 - DNA, 290 bp, Zea Mays
gcaggtaggagaaaggagatcagagattggagacttggagaagaagaagataggcaacacgacagttgtattgttattctattcatatccccaacaagagtcagccactgaatatatatatgtgtgactcgctaatggaccactacaaaatgagttacacaacccactgtgacccaatcacatacgaatacagcttccttatcctccgaacgtgcgactgcgacattgcctgtcttgttgttgctgaatcctccgcttcttttacgtgatcctcgccacctatccattcc

SEQ ID NO: 51843 - DNA, 346 bp, Zea Mays
cgcaatttgagagaaatccggaatgaatcttcagtaataaccagctaatcccagaaaactccgaatctgacggacagtcgtgggtggcttccagttcatcacctcttgcactttatcaggatcaacaactatacctacctgagagatagtgtgacccaagaatttgatctcctttagccaaaaatcacattttgacaacttggcataaaggtggtgctctcgtagacgttgaagcactacatgcaaatgcccggcatgttattcttcgttctttgagtacaccaagatatcattgatgaaaaccactacgaatttgtccaattcaagcatgaaaacaaaattcatc

SEQ ID NO: 51844 - DNA, 788 bp, Zea Mays
tggatatttgtggctgtgaaaatatgtgttgtggtaataaaacaaaaaaaactcgaagaatttgacctcacataattcattagtatgtccgacggtctagcagtggctgtcggacataagtgtataaagtctgacggtccacggacaaccgtcgaacatactgacaacttaagttcgacgacccacatgtggagttctctggacgcgttacgatcgttacccgatttaatcgatcggctcttagaggccatcgaaaataatttatgttcgacggtggctgtcagaaatactcttatatctgacattttagaaccgatgaacatttgttgtcggacataagctttaaggcttcgaatttttttagttttactgttgtgggaacctttgagagcagtacagttttcatcattaacttggtagtcagaatctgcacgtcagcacgtcatctccagattactcctttcgattagcttatgcttcaaagttcaaacctgagaacaagtagtacatccccattaggtagtagatgattcgtagtaaagacatgcttacaatcattaaggagaagattcatctcatgttgtaatcgatatattcttgctccaatcatcggcccttgtacccgttcatgagtaccttgatcgtgtttagcatgggtcagtagtgtcatgatggatgttctcatgagagggagtagtcgaatggaatgtaattagatccagaaagacgatccaaacctggatgggctgataaacgccatgagtggagcttctcctcatgcaaacgca

SEQ ID NO: 51845 - DNA, 684 bp, Zea Mays
ggaacgtgtgacactatttgtttagacgatctccatgacacgaccccaccagctaaagtgaacacatagccacttgtagacttcatttgatccgagtcagagatccagtttgcatcactaaatccttcaagtactgatggaaatccggtacatttaataccaagattcattgctcccttcaaataccgaagcactctgtacaaggctacctagtgtctatctcctggactggtcgaataacgagccagtctgcatactgcatatgagatatctggtctagttgcactgctcaggtacatgagagatccgatgatctgcgaatatagtagctagttcacaggcttgccttcatatttacagagagtgtttgatggatcatagggcgtggcgactggtttacattccatatgtccaaagtgagtcaggactttttccacataatgggattgtgacaaagtaatcccatcctcaccctttatcagcttgatgttcttcacccaagtccttcatatcaaagttcttggagagtaatactattgtttccatgataacctccaactcggtcccaaatatcaatatgtcattaacgtataagcacaagataacacctttgctctcagagaagcgataatacacacacttgtcggcttcgtttacacaaaacccgacagtagtctgagtgtt

SEQ ID NO: 51846 - DNA, 407 bp, Zea Mays
aaaataaacgtgatgctcatgacatagtatgcactcatcaactttctacatcttatttttcttatgactttctttttttaattatttctcccctttttaaagccttctaacacttagttacataagactaaaggcaagctttaatgcaaaatttctccccctttgtcataaatctccaaaaaggatacaaagaatataaagggtagaaattatgattaagcaagatttgaacacactatcatgaagagggtccttagatggcacaaaggtaatggataagtgacatgaagtgatgtacctttgcattttaccttttcaaggggagttcaaaacttgtgttggatttacaattcatttgcaagctcttgttggtataattttgacataggtccaagatatcaaatgaa

SEQ ID NO: 51847 - DNA, 875 bp, Zea Mays
ctcagttcccacctggagttttcgtttaggaggtgccacgcccgagcatttcctcagatcaagtagaagaatgcaatgttttcagccagccagagtcagactctaacgactagagggagcctatcattaggtatataaagaatgaagaggaatcggatgataaagccgcaacggaacgcatcgcaaggcagtcagcccactacaccctcataggggatgcactgtacagaaggggtgcaacatgagtcctcatgaagtgcattccttcggttactgggaagcaactgctagatgagattcacgccagatagtgcaggatacacgcaacatccagaactctggttgggaaggtcttcaagtctgatttctactagccaacggcaaagagcgatgcagccgagttagtccaaagatgtgaagcttgccaattcttatcaaagcagcagcatttgccagcacagcaactgcagatcatacccgtaacatggccatttgcgtgctggggactggacatgattggacccttcaagaaagctcagggaggctacactcatgtcttggtcgccattgacaaattcactaactggatagaatacaaacccatcacttctctaactccaaccaaggcagtggaattcatacaagatataatatttaggtttgggataccgaatagcatcataaccgacctgggatccaatttcactagctctgaattctttgatttctgcgaacaatgcagcatccagatcaaatatgcgttagtagcacatccaagagccaacggtcaggtggaaagggctaatggaatgatactagaagcactcaggaagaaagccttcgacaagaatgaaaaattcgcagggaagtgggtt

SEQ ID NO: 51848 - DNA, 424 bp, Zea Mays
cgatagtccaaaggttgattgacagattttccagttttcagacttaaaatagtagtatgaacatgagtttcagttttttgagctgtttttggagcccatttgtacctaatccatgaggttttaggttgtagagtatatagaggaattcaagaccacctaatggtgaacaactttatgaaaggatgatggacatgatcgcacataaaaagtgaagtaacagctgctcaaaggttggactgtcaggtggctagtgacttagtctactcagaattaagtctgaaatcagtagtgatgcaaaactgatgctgccgccttgggactgcgctaaactgatgttgccgcaacgcaattaagcccaaccgaggcaagccatgccgtaattactacgcccaaagctgagcctactctagctaggaggaaggaa

SEQ ID NO: 51849 - DNA, 1067 bp, Zea Mays
catttataacttaaattctcgggtttaatactattctggattgggcctcaatttctgtaaagtccaggggtctcagggtaaaattccaaagacacagtgtactgttcccccggaccgcgggttgtttaaacaagaaggcaggggctcatatgcaatttgtatcggccgaaggggtatctgatgactggatccgtcggatccatgatgtacgacgatgattaaaagcaaactggactccatcggcggtcgttagatttaggatctagggtcgataagaaccgagtgtaatggaccatcaatccgttgatcggcgacccgcgctaaacacatcgaatggttaccccaccatctaatcacacgcgtcggtagcagatccaacggtggagataggatctggcccccaacttctaatcctcgcgctcctcctaacatcaacggccctgcgcacgccaaccctttccccggtcggacgcggcgccgccgcccaaatctacggtggagcgccgacgacgcatgccgcactttgctcgttgaggtttgattactaaaattgacaagtgcaacttgaagtgtatatcattgcgagtgttgaggaggtattattaccggcaatgaagtcacgtagccccctgacgacggtggacggtggagtggcaagagagacggagagagtacagagagggcgaggcccaggaggacgtcagtgcatcatcggccaagtcaacagaaggaaaggggtgagtacgtggttggatccttgaggatgtcctcaccggagaacaccagaacagattgacgcactacaacggctgggcgaaggagagaactggccacgacaaggtaacggcggcaacaaggtcacccccctggtatttatccccctgattgctcgagcctaacaaaccgcgagccgaggatcccagcccgcctggattttgctgtttagctacaacggactctgcgattcgagcggaggatttttttagctgcgcgcgattccagcgggataatcgtgaggagggagaagacctagcacacgggcccgcttgtcattggtactacccgag

SEQ ID NO: 51850 - DNA, 725 bp, Zea Mays
tcagaatccagtgatccatagtgatatgcgatcactacgtccatcaactgcataggtaaacgattttgtactgtcaaagatattaaacatcgaaatgttattgcactcataactggtgaataagtttcgttgaaatcaagccgggtctttgcgtaaacccttgtgctactagcattgctttatatctcactacctcaccattttcattttgtttccaaatgaaaagccacctgtatcccacagggaagataccacgtggtgtaggcattacagccgagaaaacttctcttttgtaaagcaggctaactccgcttcaattgctgccttccatttgatccaattcgagcactttgtgcactctgccatggtcttaggatctagatcatttgaaggtcctcagcaattttctcggagaaatatatgtcgacattggtagcttttctatcataggtttcaccagtttcaacatagttgatggcaatttcatctccctttagagactcatcaaaatttcccaaattgatgtgtctagggtttttcgatgtcccagcctcagtaatgtgcacatccgagctaggtcgtagatcatcacaatccacttgatacattgtatcctcttggtgtctgtttgcattcactattgttcattgcttcttagcaacagaatagcgcttattcactacatttctcctctctgggagttgagtggttttattcggtacttc

SEQ ID NO: 51851 - DNA, 544 bp, Zea Mays
ccaaggcgaagtatttggtctgatgtagcctttctccaacaactcaccaatttgcttcttgagttccaccaattctggtccggatactcgataggctctcttggaaatgggggcggtgtcaggtataagctctatggcaaattcaactttcctttcaggtgccatgcctggtaaatccttgggaaacatagttgggaattctaacactgccttgatagcttatggtggctcaatttcctcaatatgggcggtgacttggtgacagcttcctttccttggtccagacaagaccaactccactaacacttcctctcctaataaggacactaacttcacagtcctcttgtcacagctaaggcttgcttgatatttggttagccagttcatccctaggatgacatctatggttacatcccgggtacccattactatcggatcataggggaactctatccccttatttgaactcttgcactagggcaaaatctatctgtttgggtcctcccaccaattgaactaaccctcataggtggatacatgggtg

SEQ ID NO: 51852 - DNA, 555 bp, Zea Mays
gcgaagggttatgaaggtctctgagccatccgatcgcgcgtgggcggaccagatcatagcgcatgtttatgaaccagtatcgaaccgtggtcgcccgatcgcgatccaacggttcaaagccaatcccgcgaaggggacacacgatctaatctgaatcgcctatcgaggaatcgacggctatctacgcttctcccttatttccccatactcccaccagcgccagaccgacggcgtaaggctgaggcacggcggcgccatagatgacggggtctaggcctgcgacgggatactactcctaacccaacctggcgcaaaacagagagaagagtgtggcgggcagaacgatggaggtcataccaaaatttaggcagcaccggacgccgaccacggatgtgagcggcttcacgacgaagcgcgatctccgacgaagaattgcccacgccacaccgccttccacgcctaattgccggtagggaatggatgcatggttgcccccacaaacgtctctggcgctaacttggtctccgtaggtggattcgccgagatgcacatgtg

SEQ ID NO: 51853 - DNA, 478 bp, Zea Mays
ccattattcatcgagaattctcagtagaagaattattattagctgttgatccattgaatactacctgtaccagtttcgccatggcaccagaccagaccacagctgcatgcgaggagcattaaatccctgcatggtccaacaattccatcatgatatacaccaaccccgcctctctcacttgcaatgaacctggcatcttccgtgcatgcattacatgtcatgatgctagagctgcacttgacgttgatttcagtccacgtcgtcgtgtccctctggttgagggcctcattcatcagtattatttcaaaaggaaacgtgtgactgtagctagtgttggtatatatatgcttgaaagcaagccaaacaaaattcatccatatttgcaagtgccagctccagctattcatggcaagcctgcatgtataaatataatatagacactggggtcatgccaagttgccaacatcgtcttgttcag

SEQ ID NO: 51854 - DNA, 453 bp, Zea Mays
ggagttgacgcgacacaaactcccggagacaaccacgtgcggatcccagagtccggtgagaaattgccatgaatctatgccctccttcgtcgaactggtggtcatcgcggcctcaacacaccctggcaaccatctatggccatccatcgaggatcaggcattggtgcaagtgtgttcccccgatgacgggccctattttctctttctgtcgagaccacttgttctcggatccgcttggcgacgatggcgtttcaagttgatgaaggttgggctttataccctagagcatggttgtaacaggaggaaatttggctagatggcgagatccaggctattacaaccacccatgcggtttgttagggggaagatgaatccgatgaagccggtcccacatgccagttacacggaggcgagcgcgtgcatgtgcggtgagtggttgcggggcagggcctg

SEQ ID NO: 51855 - DNA, 508 bp, Zea Mays
ccgcgacgttatctgtctacctgagcacgaatctggacgccgttgacgtgaatcgcggtggggaatcgtcggcggtgagggttactgaaacagatgcagtcaggctactgtaccatgaagaggatcttcagaacgcctgacagagcaagtttagatcaaattttctctaaattttctatggaaacatccccaagtctctgcatcaaagttgtaatgctacataccagctacaaatttgttataggaatcatgcttaaactcgcactggatcggagttgaattggctcttaaacttggatccaagtcattgttagtgtgaaattcagacagtattagcctgacagcctgacttcaggcttgattatctccaatattttcttaacaactatgctcacacttttaagcaaagttgttccccttagtttggtctacaattttgatgtggtgccctagggcaaaaaccctatattttaaaagttgcaaggctccaaagttgagctcatcaatc

SEQ ID NO: 51856 - DNA, 386 bp, Zea Mays
gccagagtaagatccactgctagggtgtcccgtgagggagacgggaccaaagtaacttaaacagcaccgatatcagaagtgatgagacgatcatgtctggttgtgccagaagaagctactgccgaaggtgcctccaacgccgaagctgaacaggttgtggccgaaggcgaaagtgacaacaaaagtgaggaggacagcatcattctgagctcaacgaaacctagtcacattgaatttggaaaatcgaccgtaacagtagaggacttggttgtgatgaaaaagctaggctattttggggaagatggagatggacttattcactttgctggagaagaagtaattctagagctgaaagaagatgaggttgttgtatttaagagcttctt

SEQ ID NO: 51857 - DNA, 301 bp, Zea Mays
atcctcgcatatggaaggtctaactagtgctatgaaaaatcaattgagatttaacaaaatgttagaaacacaaattgatcagttaattaatcgttgttatgtctaagactcatgcaaagggacaatatgaaggggagggttgaccgggtcgagagagtggtgaataaccgtggaagagctggttctcaccatagtttagtcattatttgggttctacctctaggcctcgggctatgttgcttggtatgtgtgctagttatcaaatacttatcatctggttaccatttggtaagccgatttc

SEQ ID NO: 51858 - DNA, 280 bp, Zea Mays
gtcaagtccggttcaaggacaacatctgttacttcaacggtttgatctggtacccggagacatttcttcaattgtgacacatggaacacattgtgtacagcagacaaggtttcggggagctgaagtcgatacgccacaggcccatatctttcaagtatcaggaatgaaccaatgtacctaggtacaagcttccctttaaccccgaaatgcgatacccccttcatcggtgaaaccttcaagtagacatagtccccttcaagaaaatacaagggcattcgtc

SEQ ID NO: 51859 - DNA, 750 bp, Zea Mays
gggcgagtcgacgccgctcgcgacttcatcgtttcccatcccatccattactcctagcgctacaccggttatctgctgcaacgtcatagcagcttccccgaagaatcgctcccgtcgccgacggagatcgtccgggccgacgactgccgggatctccacagcttctctgattgcttcgtcattttatcaacgtttggcacatatacaaatgcatttcctataaatatgacgtttattttgtatttatagtacttcaccatttactgcttactgctttatcattattaatttaacaataaattataatcttcggtttggaagcacgggcttcatcaaattttacatatttgctcagcgaaaaaaatctacttgatcaagatacatttgattacacattccttttcttcatagtgtcctccaatataactttttccccagtagtggtactattacgtatttcttctttgcataactatctataagcattcaaagaatgcttctctagcctattctccaaaagaacaacctcatctcattttaatagaactttactttgatgcagcagatattgatttcgaccctgctatccagttaccatttattcaatgccacatacttacctgtatttaatttcttccaataatttctccacatacttatcttttgccactatgtagtcatgaacaaactacttagatgtaaatatgtggcaaccatcatttgctactatgcactgataatacaatctgc

SEQ ID NO: 51860 - DNA, 301 bp, Zea Mays
cttctgatggatgaggtggtgctctcttggatccatggcaccctcacggccgaacttcaagacattgttcgtgtgccggacgatacggctcattggatggggtgcccttgaggctcagttcctcgacaaccgccagacttggattctatacctcgagaccgccttttgccagcttcctcagggcgatctcactgtggacgagtactaccgtcagatgaagacaatggcggacactctccgcaccctcggggcccccatcaccgatgagagcctcgtgatcaacctcctacgtgaattgagc

SEQ ID NO: 51861 - DNA, 372 bp, Zea Mays
cttctacctgatgtagatgtggatatacccgggattaatatcatatccacatttgacttattggatttgatctattctcggggacgcctgcgaatatgatccatcagccttagtcaaagcatatgttctgattgcagattcacgtggtctgtgataactctcctccgattaattcaccctgatggtgatttgcctcacgaagaggttcatcttgatgatgaaattcctagcaatgcgtgcaatatcattgtgctgggaatacggaacaatgaatctttcatttttgggaaatgacggagatcattattaaatatgggagacaaatgtgtcgacacctatcttgcctctctagattacaaagggatccaaaac

SEQ ID NO: 51862 - DNA, 864 bp, Zea Mays
agagcaccctaaatctctcccccagggggcgagagctaggttcctgcaagaaggaagatgaccctgcgccatcgcggacaatctggtgcgacgcagggaaggcaccgctcctatgcccaggtcgtggactgtgtggcccagagccacggatcgcccacaccactgcagagggcacaaacaggcggtacactgcccctagtggttggcgctgccaagatcagcgccaatagatggcatgtactaatactatttgttcacttatttctaaacgactagctattaatatgtccataaaaatactagggtttaacaacatgcattaaatagggtttagatactagggctacataaaaatacgctcgtaaaatactaggtttcgtacaatttatttatttctaaccactattagtatgtctatgtggaggcgttgaaccaccacaccatggtctgatcaccctgaaacatagggtttaatgccccataaacccttctaacttgtccaaattttaaactttataatagttttttcatcctgacaagctttgggcctctcctaagacacctagatctagtgacactagtgtgcatcacactaaactaattagacatatctaggtcaaactactagttcatactcctctttgtagtacgatcaaagaaaaaacaaagtcctgaactactcttagtgtctctcagttccaatcgacaattatagtccattcttaatcttgttttcatcctttaaaaaccacaatgaataccataagcacacatggtaaccatatattgcccagaccattctccattattgtgacctaactcaagcttgtttgtacaaaacacacattagtcataataatattg

SEQ ID NO: 51863 - DNA, 507 bp, Zea Mays
cattaaccaagggctcatgtgaaaaatggttcgggcgaaggggtatcggcgtatcagggccgtcggatcgacagccaacgcagaggattagatcggtcctggtacatatccacaatcaacagagtccgcccgatctgaaatacacggttcgaatttttaaaaagacgagatccactcgcgtctacccgatcggaaaccaacggtgctcgatcaattggtcgaacagcgaccgaggttatgttcctgactgttgatctctcatccaacggccagaagttccccctcccatggcctcccaagaacggcggctcgccccctacggcggcgccaccgccggtgagatcccccgatcctgagtaccggcgatcacgaccaccatcaacgcgtgctacacgaagagagaagggaggcgaacaatatagatggctgctcaccacgaatcgcgctgcgccaatccctgaccatggcagatggaggccaggcaacagtgcgaagtgttggctgcgg

SEQ ID NO: 51864 - DNA, 281 bp, Zea Mays
attcacgagttatcttaccaaacaaaggcgaccggaaaagaacaatatcgtaacaacttcgactgttacagcttcgtgccccgctctgaggcaaattaccctgtgcctacatttcagaagaagtggtcgggctcttggatgaagcaatgttttacgtgaagaatgacctcaatcagagggaggatgtgaggggcgtcattcaacgtcccatatggtcacgtttcggcattaggaggccatcaatcgcaattgggaatgaagtgcaagcgtgcctaatggcc

SEQ ID NO: 51865 - DNA, 705 bp, Zea Mays
attttgtaatgatctcccccctgtaaatgaagacatgctttcctgttgatctgttgttgcacactctgtttttgcatctgatggctcattagcattttagaggtaatgcccgagtgatgcttgcttttctgcgatccaaacttctcccgagctatcgacctgccattttgcacccaacttaacatgctaacccacacttctgctggcgtcctcttgagttctgaaccctagttctgctgaatccgtttgcatcgtttgagagatcatgatggcgtccaagaaaagaaaacagagtgctgctattccagtcgtcccaccaatcgatcccaatagtcaactccccttcgctggtaaccatgtgtctgttgtttctgaagctgaccttctgcaccttgttgagattggtgttctgtcgtcgaaagagttgtgttcctggtggatctagtgcggagttactgtcccgacagaggatactcacgaggctgttatcttcgtgtcattcctcatccggggactggccctcccagtttctcccttctttcgcggccttcttgacttttattctctgaacctcacccatttaaatcctaattctgttcttcaaattgttgtgtttgttcatctttatgaagcttgcgaagctttccttggaattcttccacactttgggctttagaagtactttaaccactgccggcccgggat

SEQ ID NO: 51866 - DNA, 656 bp, Zea Mays
ctatcctctctggcgcgcccaactcatgtcgtttcttcgcagcactaagctgctcggccatctcgatggatccacaccagcgcctcccatgacgatctccacggctacggactccggtgccgctgtccttgccaacccagaatatgatcgctggtacgatcgtgatcagcagctactcggtggccttctgtcatccatgacggaagatgtgctacgtgatgtcgtcaccgccaccacggcgaaagaagcctgggactctccgcaataaaaatttgtgtccgcttcacgggcacgtatggttcagatccgtactgaactcgctacatgcaagaagcgagatctgacgacggccaacttcttcaacaaggttcgtggtcttgcccatgaactcgcggctgttgacgctcctcttcgcgacgaggagtttcttgcctatctgtttgcaggtcttctagtcgaatatgatccatttgttactaccatgaccaccctaccgtctactccaaccttacatgatgtttttgctcatctactggcgtttgaagcacgtcaacttcgtcatcacactgaacagcagctgaatcttggtgcctcggcgaattttgctgggcgtcgtggctcgttctgtggtcgcggtcgatctgaccgtggccgtg

SEQ ID NO: 51867 - DNA, 452 bp, Zea Mays
gtctaattacaagagcatgaacatgtcaattgaatttctaggtgtgttcttttctagtcattttttctaacctttcgattggtgggtcacatgttttattgattaggaaacttggagtggaccaagaaggacttagaaaatggtgaagagttcaagaggatcaactatgatgatgtctatatcacatgggagtccaagcccaactcaattttgactcaacttcggactcaagtgatctcacttcaaaattccttgaaaataaatgggaatcatcgaccaagttagcatccagaatctgacccgaggttgcatcaaccatcttttggcatattaggtcatgtatcatgttggagtccattaagtagttgctacccttgatacccttattattcagtagctgctaccatattaagttttagcttagattcaatataccaagaaaattatcgtca

SEQ ID NO: 51868 - DNA, 557 bp, Zea Mays
tcttgtcatatcccgtaacaatgcgaaagaattgctgtcaccattgattgttcttgccatatcatcaaccagtaattatgcagaagaattgccatgtcaccattgattgttcttgttgtatcaccgaccgatcggtaacaatatagaagaattgtcatgtcaccattgatttttcttgtcatatcatcgaccagtaacaatgcgaaagaattgccatgtcacccttgattgttcttgtcatatcaccaactagtaacgacgaagaagaattgttatgccactattgattgttcttgtcatatcaccgattgatagcgatgtagaaaaaggtgcaatttctagctcaagactggcatccccaagcttggagatatctagaacatcatttgaaagaggttgtagaagatcgttgctatttagtatagtctcaataatctcgcactgttttgcaatattttttctaacaggagggatgataaagtggtagtgataggattacttgcctaactataggtggatttgtttccttaagtgtaatctctaattgattgtagatt

SEQ ID NO: 51869 - DNA, 629 bp, Zea Mays
cttcggaggcctcccttctatcgtgttgccgcatgtattgtattgggaatttgggatggccaacatggacttgatcatatggaggtggtcctgggatgaaggaagtagatggtgactaactattgagtatctgattactcaaagcattcagagccaaaggttgttgtatatttaggtcttggtgttagataggttgcggaatattgggtgaatagtacgaaggtgtgctaaacacttattttaactgagatggttgggccgcagctgcagcaacaagctccttttgcttttggattgttatctggcaagtccttatggtgtggcccttgtcttctccacaaaatacacagcacaactttcttagctgcgagttaaacctgcctccaaagattcgtcctcctcttctctctattggagctggtggacgaaagttgttttgagaagattgatgtcgggtgcctaactcttgaggttggcttgactgaccctgagaccgagcagttttttcttcactatggaccaggttgtgtatgctccggatgtgtctagggtgtgatcttcctccaaaacccctgctgatctttgtagactttttttgcttcttcccttctttggcgaaaatcattgtc

SEQ ID NO: 51870 - DNA, 284 bp, Zea Mays
gggctcatagggccctgagaggtctggtcgacatgaggcgtggtccctcgggggaggaggtagcccggagtttgggatgttgttttgcgagcattcagagatatatgtcttccttcagtcttttgacaaaattgattctaaattattgataatggtgctatattatgaaaaccgccaatacaaatatgtttttactgactattttctaaagttcgtcgctagaaaaataatacataatttctatcggcggtatacataaggaaacgatcattacaaacaaattt

SEQ ID NO: 51871 - DNA, 648 bp, Zea Mays
ggaagagtcaatcacgtcacagcagaaactgtgcctgatgatgtcgacgtggtgtatggtatgttccttgttaactccatacctgcatcagttttatttgactctcgagcatcgcattcatttataacggagtcattcgtggaaaaacataacatacccaagcaccctcttaagaagatgttacacattagttcactaggaggtgacatgaaggccacacattcatgcctccatgttaatcacaagattcaaggaatagattttccagtcaacctagtggtcctaggatccaatggtattgatgtgattcttggatgtgactggttgaaaagtcgtgatggagtgatacaatgtgccaacggaacaattacgttaacaagtccgcaaggcgaaagaatccaagttagcatagacatgccaacaaatgcaaaaggaaagacagtgataaatcacatggaagaaaaggccctggaaaatatcaaggtagtgtgtgaatacccagacgtatttccggagaaattaccaggtatgccacctgaccttgatatagagttttctattgaattattacccggaactgcacctatctcaaaaagaccttatagaatggatgtcaaagatttagttgaactgaagaaacaaatagag

SEQ ID NO: 51872 - DNA, 306 bp, Zea Mays
gatctttaagcataacttatcttaaacatatcatttaggttacatgtcagtctgttaattatcttaccaaatcaaacatagggcttttagccatccccactagagagaaaggctttcttcttcaccataatgggtgtataatgtactggggctacatgtagatcttctgaatatgagttgtgggcccttcaatccatggcaagatgtcatcgaccatctatagaaaacttgcattcaacatattgaggcacctcagagtgtgtttcgttattccacacagaaattgcactaaattggccaaaattg

SEQ ID NO: 51873 - DNA, 719 bp, Zea Mays
catctgagtcctcggatgacgccggggagaagccggagcgtgcgaacgatcagcctcagaggaggtctcctctaagtactcagagtcgccaaaatcctccgagggaggactcggagcatgcttgcgcttgccgtcggtgcggcgaggccagccactgcccctcctacccctgttcatggttggttggaaagggagggaaggacgaagaagaagaaagcagatgatcaaagaacgagtgaagagaatagccaaggcaagtagctatttatagaggccaggggtgaccgtcacttcctaccacgctcgtcgaacagttgcaagaattcaataagcaattcaagctgtctgaaaatgagtcaggcaataggcaccgcttcgcgtaacacgacaccagttggacctaagtcaactgctcaggcaaatgattacacccttcgatcacatcaagttactactccaggacagtgtggtaaacactctgcgtaccaagacaccccttgggctcacccatttggtgtgccgcctagaattttcaaagattttctgaagaagtcatatccacaaaatatatgcaatgaatgtactacgacaaaatgaggagattctttgatatggaaggaagtccaaatggggctactgaagcgcaagtctaatcaacagaagcattgaagcttagagcagggagatggccagctgagaaccatctgcctcaactagcc

SEQ ID NO: 51874 - DNA, 786 bp, Zea Mays
gggaaggtgcgggtctcgcgaaggacactccatggtgaccaggcaggccccgaggaggtcgtgtttggtggcaattgcttgccgctgtagaagacgcgagggaagccatcggcgccaccaccgttcacctcataggtacggtgctccgcccttgatgtgctaaataccatacgtcacacgtagattaagggggggaagagtattgttgcgccgggccctggaattggggctcatcgtggtcttacactctgtgtcggccgtcgcgcactggaatttggagtttacatcgcattgatccctggatgccacccacctttgtgtccattacctcctaggctaagtatagcacttctcggtgtccgttttagccgaggggagcgttatgtcctatttcgtcggcggtgccccaccgcgggctgcgcgtgcgctgctggagcttagggactgagctgcacgattagcccaagccgtcgatggctggatggacgatcctaatttgatagaagctcccagtttgggggagtggatttgaaccgttgatgcatgggggagcgtatgagatttgatcatcgcgtgcattagactcggccgtaggattaggatcgtggggccgtgatcatgtatcagttcataaatgtgctggttttgatcaggggcgtagaactttaatcgaacagttgatcgacgtatgtaacccagttgctagttccgttttgcaaaggagccctcgaactttgcatgaatcaaaccgtcgttcgcctagacacaggaattagcactgtgagg

SEQ ID NO: 51875 - DNA, 519 bp, Zea Mays
tgtaactatttttcaataaagaaatgaagaagagtcatatacatacatttaagatgagttatttactaaacttttacgtttcgacccctttattcattcattatttatttcactagcctcaccccctttaattaatctctttaagaacagttaattaaagggtgatgaggtagagttaatttactcatgttgcttgtttttggtaccttttaagaattaaaaacaagtgaccaacattggcgcccacctccggtaaactcatgaccttgacgaagagcatgacaagctttagtgtttcgtcatcaagcttgaagaagcttattctccccatcataagaggatcaagctttgagctaggcaacaaaagacataagcaaaaagttcaaaggagagtccaacatgttggggtccaagagccctttatcaagtccaaatggtctcatgtctcgaacaccttcacccaagaagatctttagctcaaggattattcacacaacgatgctatgaaaatatcttgca

SEQ ID NO: 51876 - DNA, 378 bp, Zea Mays
aatgaatcaaaggaagggctactaagccaacaaatcgtgacgctggtggtctgatggtaggcggcttgtaccttgtgatgggcaacttgaccaattagctattgtcgcctgccgatctagagcttgggcgggagtgtctgtcgaccatagtcgcgccatggtgtagatggagggcaaccaccagtcagacaacagcgtgctgcttgtcgatctagagcctgggtatgggcgtttgtcaaccgtagtcgtgccatagagtagatcgagggtaaccaccagtcagacaacaatgtgtccatgactaacagataccacgtatgtcagacatcagatgactaaggttaggacacataataggacaaggtcgttgtcatggtg

SEQ ID NO: 51877 - DNA, 342 bp, Zea Mays
tcagtgctggtgtcggagtccagctccccgtcaacgaggaagtggaggtcgtccccgtcggtgaggtcgtcgtcggattccgatgcaactacaaagtcccatccatctgcatcccagtgcaaaggtgcctgtttttcatatgccgctataggatcccactctggggttggttcacggctagaagaatgggagacaaaagaagtagaggaatcactcggtgatgtcgacatgggtaaagctaggcgccacagttttttctgagttgcgatgaatggaaatgtggccgatgaccatttaaatacatcaaaatcgagaactggatcgacgtttactcgaactttg

SEQ ID NO: 51878 - DNA, 572 bp, Zea Mays
agtacaaacacaatgtgctgagcatttaatcaccaaaacaaaatagaaatgggtggtagtggctgactaggactcgggtggccatcaatggtgagccgtcaaggtgggtgtcccccttcctgctccacaagcggtaatgcttcccaacgctattgttgaggttagtgctatgatcgaagcgtatttcaatgtcagggtggtttctgcatttaggtcccccttggtttgggactcttccatctcagttctgctatgcaacagtagatcctcatcaatgctgaccatatccattttgggaaccggaatctgacatttcatatacatgatgaaggactaaatctgagagcatgtatttatgagagaatttgttggctgatgatcttggcctttccgttggactaccaagaggagtatatttgtgctgccatggaaccttttggtcatcttctcaactagattgttggcactaacaagtctaggatcctagtaaatgtcttgcgtctatcgatggaccaagttcccaaaagtctagtattctcgtagggtttagttctgggtggagttgggcattc

SEQ ID NO: 51879 - DNA, 518 bp, Zea Mays
aaatcccgtgtaaggtctcttctctgcaccatatcctatcttttccatgtgagttccaagcaaagatatggtcggggttgagagatattgtggtgtgaatttggctctgtctgagttgtccagcccgagacaaaaaccgtgtcaagtcgtgtcaaacaacgtagggctgggttcaaatttttccagagtgttctaggggtctttaggcaccattttgttaattgggccctatggttttgaggtttggaaaaatgtgaacatgtttgatctttgaagagggctggttttgaaattgagaaaaatctgaattttcttttatgcccttctctttggtgacctttttggggttttttctgatgcctttttggtgtcacactcttactattttttgtagggtattaagtgtactacaacttttataattagcccaagtcatgataatgtggtttacatagcctttttgctatactcccctctagggctccattttcctaaagggatttgaattagggtttcag

SEQ ID NO: 51880 - DNA, 325 bp, Zea Mays
tcgcaagagaatttagggaggaaaggagaaaaacaaatttcataagaaagaacacaataacatgacaattttgtttattagagttcggtttccaaatgaaacctatgtctccgttgagaagtccctaaggactaggtccctttcaacctttcctctctcaagtggtcaccaagatgaaacttgagttcccttcttccttcttcattcgtgagacctagtctcgcaaggctctccacatgtcaaagactcttgatcactttagaattcaataggagccttgctctaaagcacaatgatcacaacacactctcttattagcttaaac

SEQ ID NO: 51881 - DNA, 643 bp, Zea Mays
atataagtttattataaaaatagattcaacaatatatctgatgataataatcatacactataaatatcgatactttcttatatgtattcaacttggactcctcgcttccccagaaattttggtatgaagggagtacgttctgggcacagggattgtttactaaccgtattactacttactattatatgcaaatcctctgctagccctcgctcttcttaaccgtgacgaaaagatgtcagcctgtgccagatctaccaaatgcataatttcttctcaggcttggagaccgaagtagcgagtcactgcagtcacacaaagtcggccaaaccctggcactgcagtctgagtcactgcagttcgagtccctgcgatcacacaaatgcacggccgtctgattatgagcgactagcgagtcggccaaaccctggcaccggcatggcagcaattcttcgtccttcggttcgactcggtcccaataggtagcttgctgcttatgccgactacattgactcggactttactccagtttgcactaattcaccattgcaggtagatactccatttaccaaaaaaaagatgtagtatagatttacacaaactactctttacactaacagatggagaggatataatgtgttttttt

SEQ ID NO: 51882 - DNA, 527 bp, Zea Mays
gccgagaagaatgaagattttgaagtggctaaagcaaaataggaaataagcgagtggactagcgcaagattgcaaaagaatgtagatgagcttcaggaatcgaaagagagatattacgaaaaatccttggaatatgccaagaagctaaaagacagttttgcaaaggtgggtgcttactcatccgagcagaaatttattagaggcgatcccgaaggaatcatcgaatggatcggtgaagaggccaaagcttttgaagagatccttagtgcgcggtgatttctacgcctttgccgatgccagagaggttgcagcaattttggaaaaatctggctgcgaacatgttaaagttgcaacatagacggaggctatcttcactgtggagaacacgaaggatccttcggctgaggcgactctgatgggcggaaaattttactccaacatttggatgaaaggcgaccgagaactagccgacgaagctataaagaagaatgagaaagaaacttatgaagcccgagaagaagccaaat

SEQ ID NO: 51883 - DNA, 556 bp, Zea Mays
gtttgtaattttatgtttcagtttctaagtggttttaataccaaaagattttattttgttcaagtttataacacaaattagcaggtgattatgaaggcatgggtatatatatatatgtatatccactttatcatgtaggataaaagatgtctttaaagcatagataggtttgggtaagaaagagtagggtaaggaaagactccatttaatatttgtcgatcttgattcatctgatgatctagcttgatctttgaaggcttgagttggggctaaagaccagatttggcttgattcttatccttccttaacgcggttgatcctttcttcctcgagcttttgtgtcttcatccgggtttgtgacaagatgggtagagggttcaatagctatatgctagatggaattagttgtgtaacctattttgtaggtcaagttgttgggtacggtcgagttgatctaagatctcaaacttgtttataggagcagggtctaatgtattccaccaggattgactatcttgttaggtaactcattttagattggatcatagtagattag

SEQ ID NO: 51884 - DNA, 524 bp, Zea Mays
aggaggggaattgatggactagggttaagctttgttgctagggataggagtggcactcattatggtaaggatggggagtgtagtggcttgacaccttcacagaaacctccaaccatttcctagcctatcaaattcactctaactaaatcttccacctcaactgtgcgagatgaagtgtttaaggaacctttgatatctccacctcaaaaactagtgtggtatcccaaacctaaccatcttaaaaacccacttgacaccttgccctacacctctagtgatccccttcctagagcaccacaaccacccaagttgactctttcccaaaaaagactccacctaagagagaggtgaggtaccactgcgagtattgtgagagggatggtcacttggttgttttctgttttagaaggaagagagatgataggtggggtattgaggtgagtattagggacatgcattgcccttctcatggtgtgcatgatcctcctattcaaagatgtgttgctaggcctagaggtgctttg

SEQ ID NO: 51885 - DNA, 332 bp, Zea Mays
cgtaatttggctaaatttcccatggtctttattttattttgagaaacgatgtgtggtgttttactttagtggacataatcaccgtttaagtatgccttgaatagagggattataggaaacctgttatcacaaaaggtcattagctagcccactaacgtcttcatcctctatttgtactctaatacccactcatgcgaatacaatgccctcaatatcatagaaacactattttaagtttcaaagttgatatattcttttgaattctttatattccaactttttagcaactgtatggtggaaaaaggtggctttcaaccttaacctatgtttgg

SEQ ID NO: 51886 - DNA, 423 bp, Zea Mays
tgaaaagcaaactttaggatggaatgcaggcatcaggcgcgaactacgatcctgtgggctgtggccaacaacttgcttcggcttgtagcagatacatggcggacaaagaacagctcgacacatggacagacatgcttaactgaaaccaaacaatagcatgaaggggagagcacgtcacatggactgctgatgctgtcctccgattccatggaacgccatgattaaaaggcaagagaagagacggcgaagagcctgccgaggtgtcaacgggtgctggcctttgttccgctaagattcctctcctgccccctctctgttgaaatcgaaacccatcattagccagccattgcatcaccactgccccccacccccacctttgccggacgatcgtgcgcgtcggaccgggcatcggacggctccgag

SEQ ID NO: 51887 - DNA, 696 bp, Zea Mays
ttttcttgattttataactctctggattgggcctcgaatactagaaaaggcaggggcaagagtgtaaatgtttctaagactcagagagtccctggtgtggacggagggttgttttctgcctagttcaggggctcttaagcaaatgtgctcgggcaaaacggtattctcagatgagggccgttcagatctgatccgagggccacaaatagatcccgcgcatcgctcaaccacccactcccgtgaccgcccgattaaattctaacggtcacgatataaaagaacccggatctaatccgatgcacacaatacgggatcaacggctcggatcaacgcagcgaaggggtaagatgtgatctaatctcagccgcagggaaccgatccaacggacatcgcggcacgcgcgctctccttctttccagaccccgccgagcggcggcgcacccaccgtgatgcggcggcgccatggccggagatgattatcccggcaaactaccgcctaaactccgaataaagtggtgctacgtgtgaaggacgataaggtgaactccatgggtacagaacttaccgaaaatcgagtcgcgcacgggctgttcacagtgggccgcggagttgtggcggcggcgaggtacggcgaggaattcgccgcgaaccgcaagcacttttcccccaatagctccaaggagacccttgccgcac

SEQ ID NO: 51888 - DNA, 640 bp, Zea Mays
ggtccagtaggaatggtcagcaaggttgacgatgctagtatggtcacatcttcgtaaagtagcacatgcacctcttgttgtatctgtttcgctcggctttgagtgataagtctagtaggaatggtcggcaaggttgacgatgctggtatggtcacatcatcctccccccttgaaaaagagtcatcctcgactcttccaatccaaagaaaggagagaggtcggccacattaaaattggaactcacaccataagtatctagcagatcaatttcataagcattgccattgatcttgcgaagcactttgaatggaccatcaactcgtggttgtaatttgcttttgtgttgttcaggaaatctttctttgcgtagatgtacctaaatcatgtctcctagttcgaacaacatctttattcgacccttgttggcatatttttcatatttcttagtcattttctcaatatttgcttgagctttttcatgaaggttcttgattaactcggcgcgcttgctagcatcaaagtttacccgttcctgcacaggcaatgacaaaaggttcttgctacaagccatatacaatttcaaatggacaaaattttgtagtcgagtgtacgactctgttgtatgcaaactcgacatgtg

SEQ ID NO: 51889 - DNA, 960 bp, Zea Mays
gtttttagggcagccgcaatgatatagatagcactctatagcaatatctatgttatctacatatcacattatagcgaatctttacaatgatctatctatatagatatctataattgtttttagtatttacatacactctttaaaccacctcggttttgagtatatgctcactccaggttcatagataacaacacactctctctttatttaatttcttgccatataggatagatgctggcatggactccttatagagagcagacttggtaccattgcggttgcccttaattctatctctactctctaaaaaggaagtaggtcgtgcatcttccctccttgggcccacctatagtgatacgcacaagcatcgctctgcattagttcgctctctcgcctcctctttgttgagtcctcccttcctacttgtagtgacaccagcactgctctacctttcatccgctcgctctcttgccatctctccacatctggctgacggtggcttgccgctccaccccaaatttgaccacacccttaccatcataccgcatttggcctcacctccctgtttccccttctttcctgcccctgtttccacctccttttgccacaccctcacctcctctttgcattcgcccacattcagtttgcggtggctcgtcgctccactcccgatctagctcctcctagtttcctttttcctttggatgcacttttgcctcctcttcacatccgtccaacagtggctcatcgttcacccttgatcgagctatgccactgccaccatgcccatgattcttccctgtcccatccaccatgtcacatccggccttgccacctcatcgtttccccttctcctttctcgtccctgcacccattcaccatgaagcctctctcaccgctccaaacaccctcccctaccccacgactattgtacctgccctaaccataatttaagatggc

SEQ ID NO: 51890 - DNA, 479 bp, Zea Mays
cgaagccgaaactgggcaggccgaagccgaagctgggccttcagtgcccagcgagacgaaaattatcagacctgaaaaggccgatgagcaaactacagatgcaattgtgacagcagggcaaggaatgacagaaagggcaaaatctcctgcctccgaagcataggctgaagctaccgattacatttatcgtcatgcttcggggaagaaattgtccgacgatgaaatcacggaagcaaggcattatgctaaaaaattgaaatattcgaaaggagccttagtatttagcggaagtaatgaagatgattttctgtactgtctcccggataacaaagaaatatccgtttgccgggagatagctaagagcatgggattcccgaagctggaagatggtctttcaattttgtcgaaggatgaccttgctgacaatagcctaaaggtatgggagttaactttgaatttgagaatgaagtactttattt

SEQ ID NO: 51891 - DNA, 692 bp, Zea Mays
acggactcgcagatcccgcgtccaccgaatggactaaatcgtcggtcacctcctctccacgccattggcgcgtctggcggaaactgaaatccaccgttcttatccggtttgttgcgattcgatgcaatctggggacttcgccgtaaacagacgcccgaagtttgctcggtatttcccattgcctcggtcatcttccatctcgcctacggagcttcaccacacgtgcaatctcggctgctgttcttgtcaccgaccagatcagaaatccgatcaaaacaaactcgcgaagttgttgggattcggcatccgcggcgtataaaagcggcttggacttcacctaggccatagctccagtaggatctccaccaatcatctgtgtgcctcggccgtgcttgcagaatggtggacggatcaccagcttgggcgttccgccgtaaatcatcctgctcgcgaggacagccttatcagcctcctcatctccggtaaagaaccacacacgattcgccctaacctcctctgcgtgttgagccatttagtttatgggttggatcacctaggcgtagcttggaatttcggccatggcgcctccatggcgggcgggtcgccgtcgtcaagacctggtgtctagaggagggagacaacagtggaccgttggatccctgaaacacggctccgatcagatctaggcgttg

SEQ ID NO: 51892 - DNA, 457 bp, Zea Mays
ggaagacaaggaaagagaggaggaatcgacccatcaggttattgagacattagtggaagaggtaggggatacagtggagaggactgtaatgagcgcaagacaaatcctggttaaactggcaaactgcgttgatgttggaagaccagctccgctgtctgctggaattgccctgtcacctgaacagcagcagttcctcaaccagcttaccaagcagatttattgcatcctcccagccccggttgatctgatcctgaagaataatagcaccaaaacacttgctgccactccccggtgcagccgtcatattgcagggatgggggctgaatttgatatccacgacttgcgcttaagattcacacaaaaaatcatgaaggccttgaaattgatcaaagatggagaaggcatcagtcaacaagccagaaatgattatgaaaaggtgttttctgaaacactttcc

SEQ ID NO: 51893 - DNA, 603 bp, Zea Mays
gtcagttagagccaccaaccgatactaatactcttctagagccccattagttaaaacaacactgatgcttgcgtcaataccggttcaaacttaattgggacattaatgtagcggtcgagataacgctgacccctagtgagtacatccacctctacacgctagcgagcatcaacactggcacatcgggcatcagcgtgtgtgggctcgtcaacttggctaaaagtcatcgcaattgcaaagtggcaatgcacgttttgcctcccaccatctctgtggccagcgacgatatgccacatctctacatgcactgccatacatcaaagttgcccacctctaattctccgtctccttcacttgtcatcaatgagcatccctgcgagaccaacaagcatggtacatatgcgtaatgtatacatatgtatttgaaagaagaatactaaacttatgagggaaagggaatgagctagacacatatgtgtgtttatgattacctcttgagcatatctccaacaatgagatcatgctcacgccatcacaggacacaaacacccgcgaggcccatgtgacgcactgatgcggcccaccgcccatgctgcaaagcta

SEQ ID NO: 51894 - DNA, 680 bp, Zea Mays
tctcacttgtgatcactaagatgaaagtgttgataatgttggcgtcggtgaggtttgtcagcttgttacattgtcgtgagaagtttcggatgtagtcaagtagggcctcatctgatttttgctagcagatcttgaggtaccacgggttgtctgggcgcacatatgtgccctagaagtttttgatgaagatttcctcgaggtcaacccaattttagatacacataggcctaaggttcttgagccatggtcgtgccgagtccaccaagtacaggagaagattctggatgatgaaatcattgtggtctgcccctcccacttaccacgccagccggtagtctcctagctagaggctagggttcaattctgtcgagtacttcacgatgttggtgggtgccctgtaacgctgcagcaccagcgcccggagaatgtagcggctaaaggctcgaagcctcagtggtgggggctcaaactttggtcgtcatcagggttgaagcggcctccatgatgctggaagtagcgatgattattgtctgaccccctcccatccttcctcgtcgtgcctcgagctcggtatgctccgcgtgctcctgcccggccttggcaccaatggggcagggcttgtgtcgtgccttcctcgagctcggactattgtcccaatgatgtgtcatttcctgttggcg

SEQ ID NO: 51895 - DNA, 362 bp, Zea Mays
agccaacggtgcgaattaaagcaacacgatagtgtttggcctgggtgaatgcgccttgaccgtagatcgctgatcgtgtggactgggttgatcgcaacgtttagccgatcggtttgccagcgcataccggttggaggtgggaagatgtaatcgtggccctttagtacaaatcgagcggccaacgttgagtcataccttttcgaagtccattttaacatcagaaccctcatgaattgtgaattgaacccgccatccttctcagtgtggaataaccacggattgagcccgggatttttatatgacagaccctgaactcccgtaaatttatgagcgcagaccagaggcatgggaattgaataaaa

SEQ ID NO: 51896 - DNA, 775 bp, Zea Mays
cggcacctccaagcactttcgtaaaagatatttcaagatcctcaaatttgtcacttcattgttccacttccagccaactcgtacaactaaaattatatattgttgtcacctactttttaatttcacgacttatttagcctccactcatagcaaatggcaatgaaaaaggtattcatttatgtgttttccataacgcgcatgatactctctagtttgttagtatttcaacactaacatcttggttgaagcctgaggccaaaggatcttcagttaagttggttatatggtataaatagcattcgatcgttcttacatgggttctagtggataagggttcggaggttttctccacctgcttaggcattatttgggtactctagtattcacttaaatccacatatattgtggtaggttggggagtaagttaaactaatttataccagaatctgcttcaaagcatgtggattggggttaatattagaattctcaaacaaagccttaaagagttattcttagtataatgctctggaggttgccttactcccatagatcaagttttttaagactagaacatcaccccacattcgaatagtgtgaccatcttcaatgattgctttggaaattattcttaaggtattcaggttttccatcacttctttccaccagaaggaccctacctttttattacagggaacctttccagacttgtagtggttgttccagattaggctcacccaaggcatatcaagcctgttgaagaatttatgcaaatttt

SEQ ID NO: 51897 - DNA, 445 bp, Zea Mays
tggtgtgtcaaaactttaaccttttttgccttcggcgtggtagtgatagccaatgcagcagcctttcttttctttcccttcttgcgcgagggataacaatagtgtgggtacacaaaaccaattacatcaaagaccctgttcaatctcttcttgcctcgccctccgaaggccactgtcagggcatcatcctcggccctcgtgtaggcaccaagcaactcgtcgctagttgcctcaatgcaatctagccagtcatcatccagctcatcgaattgattttggtacttgaaggtgtactttaggtaaactaaaccatcctagctggacccagaagcagcttcgttcggcatctcccaaccgcttgagagaggccacactctgcatgcaatgtgctccttgactaagtcccgggtgctaatatatgtgcaaactgtgttatacgcagctt

SEQ ID NO: 51898 - DNA, 590 bp, Zea Mays
gctgaatgttgcggtgtaacccagccatgaaacgtgcaatgatttgctcttcgtcttcatacatgaggtctcccactgcgaaggatcgatgccgtatggccttgtcgtgatagcgcctcagagtttgctgataccgtgctgactgaatcaccgtgttcaatcgtttttcttccagtatatcaacatcctccagtctggtagcctcagcttccgctatgttttcaaagatcagcctcggtgccccaaacttgagatcggcgggtagcactgcctccgaaccgtagaccatgaagaaaggagtatttccatatatagctcggctaggttgatttctcaggctccaaacaacatatggcaactctctaatccactttcctgcgaacttctaattcttgtcggaaactttctttctgagcgcttccaatatcatcccgttggctctttctacttgcccgttggctcttgggtgcgccaccgaggcatatttgatctgaatgcttttttgttcacagaaatcgaaaaactctgagcttgtgaaattggatcccaggtcggttatgatgctattcggtattccgaacttgaatatt

SEQ ID NO: 51899 - DNA, 302 bp, Zea Mays
gctccaagtgactgctatcttttgctgatttttctgtttacgcacttgatagttcgcccatatgcctaatgttgtcggcgtttttagaggtaatcgccgagtgatgcctgatactatcggtgatttagaggtaaccgccaagtactgcctgatactgtcggcgttttataggtaaccgctgagtgatgcctgatactgccggcgttttagaggtaaccgctgagtgatgcctgatactgccggcgttttagaggtaatcgctgagtaatgcctgatactgccggcattttagaggtaaccgc

SEQ ID NO: 51900 - DNA, 628 bp, Zea Mays
ggaaaggccaacctcgagcttcggaaatcccatactttcagccatctcctggtagacagacatctttttgttgtccgggagacagtataagaaatcatcttcgtctataccattgaacaccaaggccccttttgggtatttcagttttcgggcatagtgattggcctctgcaatctctccttcagataacctctttcccgaagcatgtcgaataataaaatcaagattctcagatagtgcttcgggaccaggagatttagcttcttcggctatttctttccccgtagctatgccagtacctggagattcttgttcagccccttcctcggttacagcgggcttcgtcttagcagacactgaaggcctagcttcggcttcagcctcggtcgtagcagcttcggcgactttcttcgcgggggcaggagttaattcctttgtggtttctatgacagcgtctagcacgctggccatcctccttctcttgggagttgtggcgggagcctttgtcaccttcggcagttctgcctctgccggtggactcagaatttttggcagcatcactgttttttccaactctggctctttggccacaccatctttggcttcggctgacccgactataggcacc

SEQ ID NO: 51901 - DNA, 455 bp, Zea Mays
cgggttgaatccgagaaaacccagggtttcttttataaaacatacccgcgaaggggtacggggtgatataggccgtcggattagaaatccaaggcccagatcagaacctggcttaagtgaaccggtaagctctggcggccgcccgatccgagatctacggatcggatttaaaatacccgaggtggcttcgaatgcgtccgatccccatccaacggttcggatcatcacacgcgaaggggtatcttcctattctaatcgcagccgttcattcgcggatccacggccacggtaacatctccactcccccgaccgggaggccggcggcgcacgagtgttcccccggcggcgccatggccggcgaagggccgattaacgcacgagcgcacctattttaaaattgacaggcgcagaacagagaggagagggtagcgaacataatggtggattccataccg

SEQ ID NO: 51902 - DNA, 322 bp, Zea Mays
cacgagtgctccaacgagtatttatattgttagaattgtcatgacaacataatattgaaattagggtccaaaactctttgtgtatatattaggcactcggatagagttgagcttgctattaggattctattataaaaaaatagagaagcccaattcaccctctttcttgggcatgacgatcctttcaactttcaaaactgctgagatcggcactagcagaccctacaacgatttgctcaagcttcaaccatgcctctgatctagatctaggagaacaccaataacctaagccgtgaacgagggtgtcatcgtcgcatcccgc

SEQ ID NO: 51903 - DNA, 569 bp, Zea Mays
cgatagctatcctatggccgtttgaatgggcgcacacgtagacattccacgtgttcgatgctgtgtgcaggccgagcgagcggtggttggccacctacgctagtcgcgccatgcccgcgcctatttaaggcatgctagggctcgcgtacttgcctcttagccttgcattgtcttccccgcatacgcccaccttcgccatgacttaggccgcgccaccgtgtccgccatcgccgacctgctcacacgatcgcaccttccgcaactctttgttccatccgagcaccccagcaccctcactacactccgtcacggaacgccgccgtcgtggaagctcagctcacatggtccggacgatttgggcgttctctgtccaattagggaacgccattgacatcgtcatgacccagtgaagtttctaggatgctttgttaaaaccctaccatgcttgaatgactaatcactaaccttcaacgagcctcctccacctgtgcgcgtggctagagctgctccaaccaccttcgcatgatcaaatcacaccgccttgttcgcttggagctcctccaactccc

SEQ ID NO: 51904 - DNA, 522 bp, Zea Mays
gtctacaggtccgctcgcgccctcttggttcgtgtttcagtactctagtgtgcttgtgatacttggcgacctcgccaattaaactatactgcacctagtcgtcgggaacacctcggttttccctcggatcttgttgtcgtcgtgagcagaagaacttcgggccggattcgtgcaatcgagggatagattaggatcaccaggggtggaattaggtatagaccgagttaggacacatgtcgttgcatattccagccggtgcaggttcaccggagcgcgcacgccgccgttcaccgtcggggacttggagttgtgaagagaaaggagtgtgagggtttaagtgtgaatgtcagtgagacacgtgaatagtgtcgtggcttctttgcgggtttttcaaatcgtcagggttctctgcgaaaaaccatcagcgtgggcgcgggtttcccctgttgatgggccggcttgggctcgattcagcccagcactattcattctattcctttttctttttactgccagacttgg

SEQ ID NO: 51905 - DNA, 418 bp, Zea Mays
gttgggttttgttagtaattgggacagaaaattcaaaagatctgtgaagttagtatcagaccatccggcgctagccttcaacttaagaagttctagaactgtacgcagtgtagtaaactctttgtcacaaccctttgattcatcatataaaggttcttttgaggcactttccagtccctccattttagatagccccttctgtgatcccacagaactcaacatttctggttccatatggcgcaacatctctttgcaatcaaattcttgaaaattttgattggcatccacagaatccactttaccttccactttatctaaaattctgacaactctctcgtcattaccaggcacttcacatggatccaactcaccatgttatgtccatatcgtgtaattgtttttaaaccctcttttcaac

SEQ ID NO: 51906 - DNA, 535 bp, Zea Mays
ttatacgatgatatcttagtataataataaaagtaaaattatgttcactgatgtcgattggggatctcatttcttgtcacgagagtaaaacagagtagtagagtacaaaacatataatgcggtcttggctgccaaccaaatgctagatgaactgaaattcgagcttgaaaatcatagcgcaatctaaaataatttccacgaataatgatgtatgtatgcatggcctagcaagcgtccataaaggagataacacgttgccagccattttcatggttatacaggggcgatatgccctgcctgtccataccctcttgtgctgtgataacgcttctgcgaagcatggatgtgcacacccgttcctcttagccacaagtcaacctactcatgaaatcgcaagtatccttgaggacttgagatgctgaaaaagcaaataacaaaggacgaaacagaagaaagaaggtagttgatggagcaactcaccctttgtgtgcactacccacccatggtttatcctgcagatcgtgttatactcttc

SEQ ID NO: 51907 - DNA, 434 bp, Zea Mays
ttgaaatgcggacagcagactgcaggaatccagaaaggcgaaaaggcgcgggtcgttgcaagatggatcggatataaccacacttctcgcacatcgtcagcgcagcgcaggaagaagaaagcggtcgacgaaacttccatggcgcaccaccgcatgcatgccatgccatgccatgcattatccgccggcgctagtcagccgctgtgctctacctgcaggataatggccactcgatcaccacgcaggcacgcacctaaagcaaataaaccacccaccaattatccacaaaaaaacgccccgcaacaaatgtttgttttgtaactgctgccccggccgtgattccatcccattggccccctataaatagcgggcggccacctggccatgacagggcacgacaccgagagacgcaacactccagccctcgactctcg

SEQ ID NO: 51908 - DNA, 809 bp, Zea Mays
ccactctttgtttatctgacttatgaccaccagagaatccctatataccaccagtctcttaatgcccagtgatatggcaatgttcaatccatgaatcaaagcttcgtattctgctgcattattggacgctgagaataacaaccgaagagcatatttgagttgttcacctccaggtgcaatgaagaggatccctgcgcctgccccctgcagcttcaacgagccatcgaaatacattcgccatacttctgtggttttcgggttatctggcacttgttgctcggtccattctgatatgaagtcaactagtgcttgagtcttgattgcagtacgaggtcgaaactcaatgtcatgagctcccagctcgcaggcccacttggctattattccgatggcttctttattgtggagaataccccctattggaaatccagtgaccactatgactttgtgatcgtcgaagtagtgacggagcttgcgtgcagttagaagtactgcatacaatagtttctgaacttgaggatatttcttcttcgagtgacctaggacttcactgatgaaatagacaggatgttgtactgggtatgcgtgtccttcttttgcttgcttgactactaacgcagtgctcaccacgtgagtgtgcaagagatgtataacaacagatcttcagtcggttgactcggcgtgactcgacgcggcggtttcagcactggtggtgttgtcaggaatttcttcagtgcgtctagagcttcctgagcctctgaagtccactggaaattgtctaccttcttgagcaacttgtagaacggtag

SEQ ID NO: 51909 - DNA, 765 bp, Zea Mays
aaaatttggagataaatggacctgaagtctggctgtcagacaacccaggaactgaattctgactaacagtgaagtcagatgaactttgggattagatttgaatatgatccagtgattatttgattgtggatgctatagcaaaatcaaagttggattataggacaacaattcctctacagacagatgaccatgttgtcacacaaaaaattgaagaataaagcacttcaattagctctgtcaggcgctctgaatgaagttccaatggtacagtgacctgaagaagatctcaggtgcatcatccctcgccgccggtgacccgcgcgctcagattcgtgccggtgctgtgattcgcgcccagtagcgtgcggataacttcgcggggtgaaaagatctcgtcgtagatgaagttggagcattgtggccgctctgtcacccagacacttgctccatgatgtggccgcacggccatcgctggtgtgaccgtcgtttaccggaatccgccacactactgaccctattaccttgtcacaaggtgtcatgtgaattggttagtcatcgtcttaagcctctgccccagtaaatgccacgttatgcgactccggtgactcacccctctctccggccacgagccttctccttcaaaattcggagccaccgccctcggaccctataaattgagggtgccactagctttgttaggttgtcatgaagcagaacacccgccctgcctccaattagccaccgtagcgccctaatttctttctt

SEQ ID NO: 51910 - DNA, 326 bp, Zea Mays
aagtgaggaggtttaccaacattattaattgccacccttttcaccatatgttgttaaggcttaaattaacagtgtcctggctttgataccacttaataagatctagatggctaaagggggagtgaatagcctataaaaatgttttatagaactacttgctccagttctaatttactctagactatctcttaaccaaactagtaacttgtaaaagaattgtaaagaactaataaagctactcattagcaagagataaagctaaatgcaaaacacacaaagctagagaggtaaatgtaattactataatattttaaagtgcaaaccac

SEQ ID NO: 51911 - DNA, 581 bp, Zea Mays
atctttggttttgatattccacaccattagctttgtagcaaagcacacccctacattgttttgttgtaaaaaccaccctagcacacacatgcaactaactgagtacattttggctactgtcccaactgtaatctcatacaggtttgcatgtgttcgctcatagggttatgtgagcacacacattatcaacatctagaaaaaggcacacctcccgtcactgacatgacatgcacatggatcctataaaatgaagattgtgcaccatgagtaaaaatatcaaacttgtcctaaaaattatgtctgactcgagactcccgaggcatcctctgggtctcccatgtgcctagggcacttgataggtagggtccactagggcccctcacatccctaacaaatgggtcgatgcgccacgatggatgtgctcgcgccggtgcccttctccatgtacctaactaataccaaatttactaaattgaaaactcatgtccctcgatagatgatctgacaactatgttgtgcacatgccattgtcttgcttgtgttgttgcttgtctacacaagcgcatcacttgtgtacggga

SEQ ID NO: 51912 - DNA, 630 bp, Zea Mays
cttttaagaacttggaatatgtctctatgtctagaccatggcaataatgggatgattagtgtaaaacatgccatatagtacttacaataatttaaagcatgtagattaccataatattgaaatgatgaaaatccaatctaccatatgagaggaactttctccaaagaacggtgacataatttgataatattgttaagtgcttcctttttctatgtgactacacaagacacaagagaaatggtaattgaagatacttgcacttaaggacataagtgttaccatcctttggctttcctccatgttgtaggctttggtttttccacacaggataatcctttaattcctacaacttcaatatcctgctcgagatgatatgagtagatataataactcaaaataactttgggtcaatcttaaagatatagatcattgtaaggttgatagcttgagttaatatgaattgaattgatcctctcaagcacatccatagcttcatatcatctcctttccttgcaaagcttggcatgcatattttggtccccatctcttgatgggtccatcaaggttagtcaacaaagatctatgaacccaaatgtcctttgtgctagcacttggtaaactcattacctt

SEQ ID NO: 51913 - DNA, 694 bp, Zea Mays
gaaagttgtgcaaaaatcttatccattgatacttcccattcattatactcatttgcagtattttcatcaaaagaaaagaaggatggaaatatatgacctatgggagacgaatcgacatcaatggtgtggcactcaaaagcttcaatgatcgcacacaacatctccttcaattctagatgggagacacactcatcatcagtaagctgagtgcccttatctgtttggttccatgatcttgtcattattagtacaaaacataaacaaaggcaacaaagatatgaaccctacaactacactctggagtggtggtagaacacaagttatgaagcgtcttactcttctcttacaaggttcttaccaacactgtaggtggtaaacgttggacggtgtgacaacacttagtgcatgggtgtgattgcaaaggagtacctgttctgctcgagagtaaggtggagcttaggaaggctcactatatatgtatctatggcacacaagggaataacagatagcaatgctgaataagtatccaaagtactcgtcctagctgctggcctagagagtgtattagaatagttgaaggaaggcacaaaaaaggtaataaggatctaggtacaacaagggaacaagttagaaggaaaaaacaatcatagaggtgcacagattaatggtgttcattgaactagtttaagcaagc

SEQ ID NO: 51914 - DNA, 698 bp, Zea Mays
gaaaaagtagcggaccttttaagaaaagcttgtcgtcatctggagtcggtggccatgcagttttttgcttatcatgttggaggttttcaaacatgattgagttgtaataagtcactttttaagtgagtttgagtcggtgaggagtaggggagctattaaatcttttaggcttacagttttgtcttgtttttgtgagctgttggatttgtttcaagttgtgtgaacttggccttaccttgaaagacgcgaaagccggattttgatccattatctaaaaaaaacaaagccagaaaaaagaatggaacagtaaggacgcgctcgggggatgactttcctaagccgagctcaacgccatctctgtcaaaaaggaaataaaccaaaattcaggattacataccttgctcacacccttaccgtgaggctctattgatagaatggcctcccgggttgaactgaaaatacaaagcacttgactgtgaggctctattgatagaaatgccctcttggtttgaaatgaaaatatatagccggaaacaaagccgttcaagaacagaccgaggctgctatctaaagtaaaacaaagcacatgaaatgattcactgtagtccatgaaaacatataactctggctcatgtgttattttgtagataaacacttacacttcagatatgaaaacataacagttacacttcataatt

SEQ ID NO: 51915 - DNA, 775 bp, Zea Mays
atttttcagataaggaagagtgaacagatctgaattctagtgtttggtttaactttggagctatatggtgactgttctggacagttttggactgggatctttatagaaaagttgaagagtacatattggtgtacaagtttacttaacaatgattaactttgtaccatataaaataaatagttaagtacccttaaagttgccttgacagtctgcaatttctgggttcagtttcagaaaactgaaatgtggtttctgtgtgatctgccttactttggagatctataactcgaaacctgtaaggtattgactctggaagtctacaacaaattaaaagaccaatgtttagggaataagtttgatgtggagaggtagctctgtcgttataaagaaattggagaaacggacgggacaaggtggctgctgctgtcgactgaactagatcaggcagtctgaaaatatctcaggaaaaagatctgcatccactagctgttccagatgactttgaataagtgcaaaacaacaagaatttcgttctggtaaaaggggggtcacattggatatttttactgcctaaggggaggaaatgtggcagacttgaaacctatctagaaggtggtgacgcagctacttgtgatttggtgtcaaagccacattaaaccaccatacggtgtccctctattcatggatcctgggtggaagatagcagtgcaaccacgtgccataaccctgtctctgttggaattccagagccctccttaaccggctttcagtgaac

SEQ ID NO: 51916 - DNA, 514 bp, Zea Mays
aagcagcgtagagaaggaaaacatgctcggtgaaatgaaagagtgaaagtgaaaccctactcgagcagcaccttttatacgccacaaaaccaagaataaaaatataatagggataaagttaaaatcaatcgaatccattactcaactaacagtcaaaaaatttcagtccccaaaaccgctcaaccaacgatcgaaccatcccatagactttggggttggctcatcaagatgtgcctcacctggggggcaactgttggggagaagattgagctagatgtcgatcatagacctgtttgactatgactaatcacttgctagtcgtctctaccatgaacgtagggttcgaaggccacacaaaaggtttaaggggactttgccacggttggatccatccttttagaatgggacaatgcctctagctatcacccgtacattgagggttgcatggggtgtgacacagaccttgccaatgcttgcctagagcaaagggttcatgaaaggctgcatggatggc

SEQ ID NO: 51917 - DNA, 614 bp, Zea Mays
cttagcctgagaactccaagatgagacagagattttggctccagacaatttcatttttaattcagggaaattaatcatttcatccaatctctcttgagaagggaattgcatgaggaagccagaatgacacttagtagctttccaagtgcgtccccaaggaaagtgaaaaccgaaatccttctccagatcttcagcggtgatcaaaccctcaacgattttaaccaagccaataaaactgcgtttaggtttgttggaaaggggtttggcgaaatgagaggagtaaaaccctaacccatccgccgccataccaacaatcggcatactaggtttattctgttttggaagaacacaccgagcagtgttgtgggtttctttgcgacagatctcgcaccacaaagacttaaaacattccctagcgtgatgaccatccaaaccacatttctggcaaaaaaaccctacgcaccaaatcattctcggattttagaatgggaggcggaggggttttgagaatacctggctgaccggcatcaccgggagtggagacaggaatgtcctctttgatctcaggttttccggatccggacttcaaacgccagctgaggttccgattcttc

SEQ ID NO: 51918 - DNA, 1325 bp, Zea Mays
acaatgcagcagtagacgtgttgtcaaaattggggtccagtcgagcccaggttccacctgggattttcgttcaagaggtacaacaaccgagcatcaccgcagagcaggctgaggagtgcaatgttttaaaccaagtagaagcatatcccaacgattggagggaaccaattatcaagtacataaaaaacgaggaagaaccatatgacaaggccacggctgagcgcattacaagacagtcagcccactatgccatcatagggagtctgctgtatagaagaggtgcaggaggaatcctcatgaagtgcgttcattcagctactggaaggcactttctggatgaaatcaatgcggggcaatgtggcgtacatgcagcatcaagaacattggtagggaaagctttcaggtccgagttctactggccaacagcgaagaatgatgcagcggagttggtttcgaagtgcgaagcatgccaattcctatcaaagcagcaacacttgcccgcccaacatttgcaaactattcctattacctggccctttgcatgctggggctggacatgattgggccattcaaaaaagctcaagggggatatactcacatactcgtcaccattgacaagttcataaagtggatagagtacaaacccatcgtctctttaacctcaacaaaagcagtggaattcattcaagaaataatgtttaggttcgggatacctaacaacattatcatagacctaggatctaacttcactagctaagagttttttgatttctgtgagcagagaagcatccaaatcaagtatgcgtcagtggcacacccaagagctaatgggcaggtggaaagagccaacgggatgatacttgacgcattcaggaaaaaggtgttcgataagagcgaaaagcttgcagggaagtggatcatagagctaccatatgtagtctggagcctgcgaacccagccaagccgagccttgcatggaaacaccccattcttcatggtatatgggtcggaggcaatattaccagcggatttgatctttggagcaccgatgctaacattcaaaagcatagatgaagctgaagcgactaggctggaggatgttgatatattagaagaggaatgtctgaatgtcgtcattcaatcagctagataccagcaaaccctgaggcgctaccatgataaagtagtgtggcatcaatccttcgcagtaggagacctagtcctccacctagtgctgacaggagaagggcgacacaaattttcacctccatgggaaggaccattcatcattacagaggttacccagccaggatcctaccgactta

SEQ ID NO: 51919 - DNA, 465 bp, Zea Mays
atccaatcatgcatggaccacgacgtcgagtagaattaaattcgtagccggaaaggaggattaggcaggctacagtggtagggagagggaccggggcgaaaggtcgacgaaaagagatggcgtatgtcctggagtgtcgccgtagtgctggccgattggcatgtttcaggttgctgtctgctcgcagcacgccatgatcggctgccatgctcgcgcggaaggacgacagcgatggagttatggggaacgtcgttgatgcagacttcgacctctcgattcgttgcaactggaccatttcttttttaattctttttcttttccaagcaggaccgcagtttattgccatgttttctcaagtgtaagccttatttagacccttttaagcgaaatagatttggggatcaaaattctactctctctgtctcaaattaaaattcgttttagtgaataatatgtttatataat

SEQ ID NO: 51920 - DNA, 615 bp, Zea Mays
cttaaacagagtttcccatggtacagtagcagaaatatctcagatgcaacgcatctcaccgccggtgaccctccgccccgattaacgtcgatcgtcgcgattcgtgcgccgtgacttgcggataaccgtgggcaaggaaagatctcaactcgtggaagggagagaggcttatcgccggactgttcaccatgacacttgccgcgcagtggatagtggtgtcctcatcgcagttcgctggcgattgtaaccgcgccacgtgcttagaagatgtaccacgtcgttgtagatatccgtaggaggtcagttcgtcgccggaggtattaccccggggagcgccatgatagtttacgccggtgactcacctctcctctcggccacccgtctcccctttcaaaattggacaccaccgcttagcgctcctataaattgtcggttgggtctgttgcgccatgttatcacgaagccaaagcagccattcccgccttcaattagccaccatagccagagaatttccttcttcccccaattcgatcgactgcgccaccgtgaaccgccttatcgcggctagctgcttccaggtccgccctcgctctttttgtccgtgttttagcgccc

SEQ ID NO: 51921 - DNA, 439 bp, Zea Mays
attccccccagaccactcgcatcacgggtgatctggaggagaaataggaactcgcgctcatcgccttcctccaggcaaatgccgacgtattcacatgggaaccgtcgcagatgcctgggatccccagggaggtgatcgagcaccatctgaagatccaccctgatgccaaactggtgagtcagaagcctcgaagacagtccattgagcgacaggacttcatccgtaaggaggtccggaaactactggacgctggcttcatcaaagaggtccatcacccagtatggctggccaatccagtcatcatccccaaagctaacaggaagctttggatgtgcatcgactacaccagcctcaataaggcctgtcctaaggacccatatcgactcccacgaatagatcaaatcgtagattctacctccgggtgcgacctcttgtcctt

SEQ ID NO: 51922 - DNA, 409 bp, Zea Mays
aaccacaaccctatgatatcactcgaacggtggtcataaacatctcttgaatattctaggtccgacacgatctttctattgatgctccctctcatctgtataatccctcgtttgcaactagtcattgcccccgtagcgcacaaacgagtaacgattgatcattcctcaagaacattgccctcctctgtccataaattatcggcgctccatccttctgcaagaacatcgccctatgttgtccacaaattatcagtgtcgcaaggagataagctagcatcacatagcaagtatgaatcactttctcatcattccgtctcactctcatccttcgatcagtcacctcctatggtcctccccaaatcttgcttggctctaatcaccccaaaatatcatctccacaagcactctg

SEQ ID NO: 51923 - DNA, 540 bp, Zea Mays
acctccgagtactcattccgaggtactcgatcagctattctagggtggtggagtgtgatggctcagggtacaggaccaggttaatcggctacacggctccagaccatccctatgattatggccctttccctagactaatcattcggtgatctgatcctcattcactgtcaagtgatgttccaaaccaggcacaataataagcactattattttgttttcttgagtacaatagaagtttagatcctcgaaaggggtaaaaagaatcaacatgcgtaaataggaaaagaaaccaatggatgaggattgacttttcctcacaatgggatacatgtgtctctcgagaccgtgtccataaggtcggctctcgccacgccggaccttggatggcgccaaaaaccaggtttatggaggccgaccttaccaaactgggaaatagataaatgtaaccccattacgagggaagagtttgttctcatgctaccttcgggcataaggtttggggccaacctagatcgtctgagctccatcgcgcgcctggct

SEQ ID NO: 51924 - DNA, 1044 bp, Zea Mays
caaattcatagatcttctaaaactagcagcataaccatcagggaatttcaaatccttcttccacttcatcacttctttctgttgcttaggtttcagacaatagtcagcttttggtttgccttcgttttctctaagcacttgggttggacgatcacatatcacagctaagtccatgtgtgtcttgtcattatctttcgttttattcgggaaatccatgcatgtatttatgagggctttgcaaaagttactctcttaatgcatgacgtcaatgttgtgcatcagaatcaatgacttagcataaggaagatcccacaagccacatatgtgagtccagttatgctcctcaccaaaaccttgataccttttcccactatcgtttaggacaagtttcatgtgctcttctgtattttctatcccactacgtcgcttgggcagtcccttcgtgatgatggtgcccttcctaaacacctttctctgccttctgaaggggtgattcaagggtagaaaacatctatggcaatcaaagtaacatatcttgccaccagcactaagacaaaaacaatctgtatctttaccacaaaaaggacatgtcaatctaccatgcacgctccatccagagaaaataccatacgccataaaatcatgaaccgagaaaagatacgcaacccagagattgaatttttgcttcttgaagcagtcataggcttccactccttgccatagcttctttaactcttcaattagtggttgaagcatcacattgaggcataggctaggatgctcaggcccaggtataacaagacataagaacataaactcatatttcatgcaaagagcaggtggaaggttgtacggtatggcaatgacatgccaacatgaatacgacggagtggtcatattgaaaggcgtgaaaccatcagtcgccaagccgatatgaatgtttcttgcatcgctggcgaactctggatcaaagttgtcaagagccttccatgcatcaccatctaacgggtgcaccattaacccatcttgtttgtccgtatgatc

SEQ ID NO: 51925 - DNA, 712 bp, Zea Mays
gcagtttcgaaaatagcacgaaagacgtttaatggtttgtttttgcgtaatctttgtggaggaaagaattttttatggcactgtaaggaaccagaaggtccttctagaggtatttttatgggaattgatttagacgtgtttgatattggggccattgatgaaggggatttttttgttaagttcacactgtgcaataaaagtgattgcttcaagtgggctttgctcgtggtttatggtcccgctcaaatggataaaaaggaacgctttcttgctgaattagtcagtttagggagtcatgaatccttgcctctagtaagaggaggtgatttcaatattctaagaaagcctagtaaaaaataatgataattttgatcattgttgccctttcctttttaatgttgtaattgatggtctttgtctgaaagagttggagatggtgggtcgtcagtatacttgggctaataatattagtccacaaacctttgagaagctcgatagagtgttagtaaccacaaattgggatcacaagtaccctttatcttctatggtgggtcttaattggggtatttccgatcatactccgttacttctaaacacatgggactctactcccactcctattcataaaacatttcaatttgaattagggtggttgctaagagagggcttctttgaattggttaagaatgtatgaatagaagagttgggtggc

SEQ ID NO: 51926 - DNA, 690 bp, Zea Mays
cgggaagcagatctaaaagtacttagtcatgaaagggattgtatcttcataacaaataacattggatttattatcctagcacataggatacaactacgaaaattacgtatagacaactacacctgctactgaatagctacacatgtgctatcctaaaagttgcattaatcacctatttggacagtgcagagtggcttttacacagcaaatgcacatgtttaaccaaaaattagcaatggtatgtgttttccactactacaaccctgaattcgcatggacaaaaacctgttagactcataggacaggaaatccaaccacaaaaataacagtaaacagctacacacaatgcaaacgatggggaggagagcgcatgatcgacaaatggcgagtctcaagggctatgcaaatatggctagcaatggggaggagatggtgagctggatacgatggcgagtttgatggggaggagatggcgagccggatacgatggcgagtttgaaggcgagactgttgcaagctaatatctggaggttttccatttctttaccgagcacagtctgtttagccagtctgttggtgatgctcttatatgggtactcattcatctattctttgccttcgcaataaggatttccattgagctgcgcttctatatttcacaattgttgacatgaatattttgcttatctc

SEQ ID NO: 51927 - DNA, 538 bp, Zea Mays
aggctgggcttcgtttcccactgcacaagtgttggttgaagtactgaagacattcaaaatataccttcatcaaattacccccgaagcttttattaaactgggggttttcatatgggctatgaggagccaagggctagagctggatgctaggtgtttctgtaatattcatgaattatgttaccagacaaaggcaaccgggaaggagcaataccataacaacttcggatgctacagcttcgtgccccgctctaaggcaagttacccgtgccaacatttcggaagaagtggttaggctcttggatgaagcaatggttctatgtaaagaatgatctgaatcagagggggatgtgaggggcattattcaacgtcccatatggtcgcgtttcagcattagaaggccatcaattgcaattgggaatgaggtgcaagtgtgcctaatggctttcaacatcgtatgtacttacatcggtaccaggaatttggtacgagaacacatttctttcaaagtatggcctcttgtgaatgagtgggagatgcc

SEQ ID NO: 51928 - DNA, 1048 bp, Zea Mays
cagcggcacactcatatgacctacgggcccctcgacatatggagcactcatgacctatctaacctaggtctgagagcagggaccaccctcaggacccgcaacgtggcgagacacgccgagacccatgcttcgaaagccagaggtcagtgtggtgtagatatagtaatgatggcaccaaggcccacaccgtcataatgagcgcagacagagacgacaaggcgcatgcggacaaacgacaatgcaatagtaatggcacatagttttaccacagaatagtggttccttctcaaatgagccaccgcccgccgccgcccgtcttggcctataaaaggaggaggtcggccataaggatagtagttggctgaacccaaacgaaccaagacgaatcgaagaagacccaagatagaagatactcgacaggaggcaaccacgcatgcccgaagagacatgaagacctggaggcccagttaaggcttagcgtaggactccagttccgtagtccttagggccactctctcataagatacttaggagcctttcctccctccatcgtccacttgtaacccctactacgagcatcgagcaacagaggtgccggtagtgcgagccgtcgaagactagatgtagggacgttctgtccgaaccagtataaaccttgcgcccaccgaacacatcgtccggagcctagaatacgcacatagaaatttacttgtcgaaacgaaggttcgaaacactaacacctcgctaacctattggcagggtcccaacgcaccatgtggccaagtcacccactaccctttgtggggtcaggtggtaccacgtgtcctttgggtcctagatccctctaagagagctctgaaccccgtagggaggactccttcaagcttctacactatcgaccattttgcgtggcccgggagccctatgctcttgggctcctagaggcccccgagtgctacgggtctagggatggcaacgagaacattttactcgcgtgcacgtgcggtaaaacccctataggatgtggtttgggtgtgagtttatatct

SEQ ID NO: 51929 - DNA, 859 bp, Zea Mays
tacgtcttcagcgaacttgtagtggccggattacgcaacggctaggcctgtcctttgttcgacacctaattccaaccccggcgaccttaatccctcaaccaattgcacagatctgggtcggaaactctctacccacgatggcgatggaaaccggagataactcaacgtgttctaggtgattcaaggcggtctagttcaatcgaatgggtctgtgagaaataggggacatgagggaggctagaacatcacatagaagagcatgagctaacctgtagatgtctggccacggtgaggtgttcatagggtgcggaaaaccgatttggggaagagaggaattagagagctatggtggctaatcggaggcaggagcgggtgctctggcttcgtgattacctaatggagctagtggtatgctcaatttatagtgtccaagggcggtggctcctaattttggaatggcgtgctggcggccggagagaggggaagtcaatagcgtaggtgataccgcggctttcaccgtggcaatgtctcaggcgatgaactagctacctaaagcggcttactgcgacgaggtaaagcttcaaggcatgtggccatcgcacggccggtggcaaacttcggcgaggctatctggaccggtcgtgaggcaagtgggtacgacggccagcacccggtctcatccacggtgaagatcttttcaccctgagtcgttatccgcacgccaacggcacgaatcgcatcgccggcgcaaatccgagcgtgagggtcaccggcggcgaggtgcagcatacctaggaactttgtcagtctactgtaccatcagaacgacattcagagcacctggcagagcatattcgag

SEQ ID NO: 51930 - DNA, 606 bp, Zea Mays
gcgctgtcgaggggatgacttgccactggatggcatgtagtctcgagcagtccgtagatgaaggcttggcgccgagctagacgggtagtgggaggcgaagaacattccgcgccgtataacggggactcgaacggcggactcgggtcgtcgctgccggatccttggtgctcggtcgcggcgaagtggactcgagagagaaaagagagaagggagagaaccggtgatgaagaagacgcccgacatcacttgatcatgccttggacggtaaggattaaagggatagggatgaagaaaccgggaccgtaggatggtgagtggagggggtagatttatctcgcgtactcgccgttcatcactaatcgcacggctttgattagaagcaggaaataccccttcatcccaaccgttatccaccatagaccggcaatctgacgactaaaacgaaatagtggggatcgtgcgctatgagccgtcgatctcagatccgacgatgactcgggaatcaggatttatacccatcgccggtctaatctggacgctcggggttggatcggacggtccaaacatcactgtacctcttcggccaggcactttttcataagagac

SEQ ID NO: 51931 - DNA, 565 bp, Zea Mays
gtctctgtccggtgcggatggcgggcggtcgtgcgggtgatggcggatcaataagcggttggtggatccatcatccatatccatgggctgtgcctggtggctggctggttggccgcgcgcgcggcggggccgaggcccaacactgctcgtggccatggacgtgcgcgcgggccccaatgctatctgccggcgacgtacgacgacgacgaccctccttcgttctatcgctggtgaaaaagcgactccaccacatggacctgacgtgcaccatccatgtgatgtgaatatgtgatgcatgtggcccgtgcatgtacacgtaccctacccataaacgctcgctgctgctctgctcactggcggtccttctgtctcgggaaaatcccgatcgatcgactttatttcagtttcgtctccctctctagttatattcgggccagggtgaaaaaaaacttccttttttttattaagctttccgtctcatatctatatgcacacttgaattccaactcctagagccgtgaacctacgagacctgcccttaactagaaaccgatgacttcctttc

SEQ ID NO: 51932 - DNA, 385 bp, Zea Mays
ttttgccacatctatggtgacagtttcaatcattaaaaaatagtatgcctaagcattagattagggcaatcgattttttctgcacatacgatgatgcttttagtcattttcacattttaaaactaattgttggcgccttgttttttgctccaatgatccctaaatcccgctcttggagaacgagaccttagggatctctatgcgaggcgtcataccgttcgtcgtaggtcaccagaccatccgcggttggtcaccggacggaccccgataagtcaccggaccgttcgcgatgtacgcagagagccgaggaaagaacccaacccctacctcccgatagggaccccatcagggaggatggattttggggttatcttgggatcgacat

SEQ ID NO: 51933 - DNA, 457 bp, Zea Mays
ctcgcatatgcatgcctacaccttcctcggaatccaatgtctcccgtttgaccgaggcccatcggggggcttctgggtggcccatcaacagcctttcggatggcccatgaatgtcttcggaccgtggtgacctaagggatatctatccccaatagccactccgctggagaaatctctccgacagatattgtcatgcacactccctacaatgcaaatgtactctagagactggtaagacaaagaaaaaggactagcaaatattgtctgagacaagtgcacaattaaaggtgtcaatgagaaaattttcaccggatttggtcacctcatccccattcctatgaacctatacgtatctctatccccgtactcatactcattatgggtataaaattcatcccatgctcatccccatacgggtatcgaatccttaatgaatccacatcagcgacaagaaaag

SEQ ID NO: 51934 - DNA, 371 bp, Zea Mays
cgctcgatgttgatgattggctatgcacagtgaagaggaagttggaagccattggatgccctgaaaaccagcgtgttcacttagctctccaccagccctccgtgatggctctatcctggtgggacaccttcagtactacagtaagagatgctacctgggcagaatttgaggctgctttccaagaacatcatgtgcccttgggaatcatccagctcaaggaagaggagtttcgagagttgactcaaggagggagatccgtcagtgaatacatccataaattcacagaacttgctcgttatgcactagatgacgttagcacagaagccaagaagatggcccatttcttgaaagggttaagaccagaactcaag

SEQ ID NO: 51935 - DNA, 360 bp, Zea Mays
aaaaaaataacgtatgtgtgctttcaatatagtatagattattatatataagttaaaaggctgactgtaaccatccttgcatttgcatccaacaatcggcaatattattagccttcctcttagcgagttaccgttgggtagctgcatttgcattgcatcactggtctgatccggatttgcacacaaggcagcgacgctagctagtgcaccggggagcccgaacccggaagcgttgctgtcgtccgtgccttttctacaagttcttgtctttgctcttcctcggtcacgcgttcttcttcttcttcgtcattcctcctgctttctcttttcaccacggctgaatcatcgcctcgatcgacc

SEQ ID NO: 51936 - DNA, 591 bp, Zea Mays
atttaattatgcccaggggtattcagggttttaatcctagccattgatacaagatcgacgacactgatgatatcccccacaccttaccggcaccagcgacggcgggcctagctcggcggtggtgccatggctggaggaaggcgccagacgcttcaagggtagaattaagaacgctactagccctatttcaatgtggagcgcaaggcgaaactgttcgtgagaacttaccggaggattaagcgacagtcgagcaggtccacggtggggaatagcttggcgtaggttttgaactccggcgagcaatctctagctcctaggttgtcgatcacgcccggggaggagtggcacacactccacgtggtcctgtgcggctctaagactcaaccccggacctcgagcaccttcatggatgaacgacgtcggtagcgggttctttctctctcggcgggatgggtttgcgtggcttgcgatttcggaacgacggcaacggctcggtgctttcgtgcgtgggctaacaggaaggacctctgggtcccgaagggctttgccatgatccaacgccgcggtggcgaattcgcgccgagtccgtta

SEQ ID NO: 51937 - DNA, 496 bp, Zea Mays
ctttgtgtagggttatgcgtctatctttagcaaaagagtgaagttctgggtatgcttgacaagtgactcgtcctcccaaagatcctcccaaaataaacatgatttaccatttccaatgataagctacagtgttactacagtgttttgcgcagtcagtttgctcccgcgttggggttggccttacagacggaaaacattgtttggattgactgaacggctgaacagtattccatgttggtttgctagctggttgcctcaagcgtggactgcttcagctggttggctttagcacattctgtttcaatcatgcatcagcaagcacacacggagcatctcacaaaaagccatcgcatttgaaacgccacaccaagtcagatcaaaagttttaaatcagaacgtcacctttttttcagcaagcatcaaaattgcaagaagttcattaaccaaacattaaaatgcacaaaatctaacataaaaagcagcataaaattttcag

SEQ ID NO: 51938 - DNA, 342 bp, Zea Mays
actagacaagcatgttccaacaaattaagtaatgacagctaggtcatgagtccatcacagagaagaacagatcaggcacactcacattatgtaatgacaggaggtactagatacaataatcaaataacaacaagcatgttccaacaaattaagtattgacagcaaggtcatgagttcatcaaagagaagaacagatcaggagttaatggtgtaagcagtaatgacaacaagcatgatccagacatctcacctttgtgcttgacgcgactcattaatggcgtaagcagtagggtcagagcaccgattccgtcaccgccaaggtggcgcacaccgatccctcac

SEQ ID NO: 51939 - DNA, 570 bp, Zea Mays
gtattggagtgtgaatcatttcgttgtcatttatgttgcatttcgtgaaccaaacaacacttagatttattagtgtagaaatcaagtttgcaatccatacaagtagaggcacaacaagaacagagtgaggagggaagtgagagctcttgctgtcttcactttctcacttgtgtctagtatataaaatgtaaacaccaacgttctatgaaaactatcgagacttatccttatatttgtcggtgttgcagtacagtagaactacgactatcacaggttgatagcttgacggtagatgaacacaacactagcacctttgctcaagatcacgctcactagcttttgcacatagcagcacttctctcttgtttggctacaacacccaccaagcactaaatctatcacaaaatacaatagatagtgatagagaatgattctacaattgtttgctgcctttgggattcatttgtgtactggttgaggtcgtgggatgacctatttatagccctaagacctcccatagccattgtagaacagaattggaaactgcagactcgagggcaccagacctcc

SEQ ID NO: 51940 - DNA, 688 bp, Zea Mays
ctctccaggatggtcagggagttactagcatcacgatacagcctatccacattgtcatgagatgcaacgagtgctcgtttttcttcctgcaagcaaaaacatcactaagcattgaagcaaggagagcaaaaagcaggagcagccaaggaagtttacctcatgtgccatcttctcggagtcgagctgtgcattcagagaggaattcagggagcgagcaccgtccagaaaagcagaagtttggattaagtcggcctggctctgagaatacttctcttcaatgtcagagaaccgccgagccaaatctgataaagtagcacaagaagagcgcgtgacctagagcaaactgagtaatgaaagtgaataaggaaactatgggctcactaaccaatgtttgatgcctccaggtcatcgatttgtttttggagcagtagagggttccactgcattagagacgaagctggattgggggtaggaccaccgcagatctcaattaggcagatacactgccaataaaatcctatgatcatggaaagataagcaaaaaagctagtttgccagtaagaacagtaaaaaagcaaaagttgactcacctgaagattggagaggaacaggggaagacccaaagcaggaagagtcggtgcattgctcgatgaggggagatcagcaggaatgatatcaacatcatgac

SEQ ID NO: 51941 - DNA, 564 bp, Zea Mays
ggaagggtcctttgaccggaactgccttcgacccgctgcctttgccaattggtgttccagtgcctatgtgtttgtatggtgatccttgtaaggttgacaagtctgaggatcatgacacatatcgacagaggtattggatgtgtgctaactatgcatttgagccaacgattattcaacgccggatgaattaaatggtgagaataatcttttaatatgttaacaatttgaagactcgaagtggtgcatgttttgtctgcttactaatcattgcatattttgtagactcatccaccgctttgtgattttgagtagtggattgacacagaaatctcatagaaatacaagaagtggttggagaatcttaaaaagtgggatgcagaggacaaagagaggatagagaaaagacgagaggagcttgcggccgagcaacaacgggtagacgagcaggaaatgaggcgtgttgctgaatgtagggagaaggagaagaagcttgagcgtgcacgtcgtgcaaaggacgcaataaaggagaaccctaatgcatttcgcaaggacaaatggccccat

SEQ ID NO: 51942 - DNA, 1878 bp, Zea Mays
atctcaggtaaattttggtaaaagactctagcacctctcatctagtcaaacagatactcaattctaggtaaggtgtatttattttttatggttgcatcattgattgaccgataatcaacacacatcctctgggaaccatccttcttttgcacgaattggacacgggctcccaaggcgaggaactatgacgaataaatcctatatcctgtaactctttaaactgtttcgtaagttcttttaattcttctacgaacattctatatggtcttttggaaataggggttgtgccaggtttaaggtctataatgaactccacatctcaatctggtggtataccgggtaactctttcggaaagacatctgggtagtctctaattacacggatatgatcacccaccaatttgtattttagctgatagatagcaggtttagtggatggggatagggtgaatgcggcctgtccgtctaggttagtgagctcgacggtttctctagcacaatgtataaccacattgccctgtttcaaccatgtcataccaaggatcaaatctatgctactttcctccagtactatgggtatggcccaattttgtttccaaaatcattatgttcagtttgtggcatacaaaatttgcttcaataggtccttaggtgtgataactaccatggtttacacatatttaggaggggtagatcatgcgaactaacataatgagcagagataaatggatgtaaagctcccaagtcaaatagtatagatgctggtatggaattgatgaagaacataccaatgacattgtcggagccatcagttgtagcatcagcgctgatctgattaatctggctgagagtaaagttctgctggccatagtttccggatggagcctgacccttggtagattggtttgaccagttagggttattgccacgagctggagtggtgttggcattcctcttagggtaagcgttgccgtagtgtccaacctcaccacacttgaagcatgaattttctgtagtgatattaaggacagtaggtctcaccggggtgccagctgtgacaacctgacgagggtgtggtgtctgaggcgtggcctatggtgactgctaaacagggtgttggtatgattgttgcactcctcctaaatgagctggggtacccagaggttgagtataacgaggacgactgatgtagcctccctgtccctgagtgatagtctttctcttcatctcgcttagctaaacaggtatgtgttcaagggctatggtcttgtctagcagtttctggaaagatgggaatgagtgagacatcatctcatattggagtggcccgatgagtccctacaagaacaattcttgcttcttttcatcttcatcgacctcctcaggagcatatctagataactggatgaatttgtctctgtactcacttactgacatccctccctgcctgagtgagagaaacttcttcttcttgatcttcattaaaccagcaggaatatggtagtttctgaaattggttgagaattctgcctaagtgatggtgtcaatggcagcatatgctgcgcagtaagcatcccaccaatccacagcgaggccagtgaggcgacccaatgcgtatagtaccttctccctatcagtgtattgggcaatgttaagcaccttctccacgaacttcagctagtcatcatcttgcagcggatctagggagctagaaaaggtgggtggtctatggctcatgaactcgcgatgtttgtctctaggtggtggttggtgtgggtgttgcaggttattgttgagctgggcttgcatgttggccatggtattggacatctattgcagtagctggatttgggcagcaaaaaattcttccaacccagc

SEQ ID NO: 51943 - DNA, 371 bp, Zea Mays
caaggatgttggttattttgaaatagtgtgtgccagtggtctattatgttctagtttttatggtggtcgtatttttggttagctgaattaattttgtcctgaaggtttatttttctctcttgcatcatgattatacactgtggattacctttcttttgcatcatgtataaacactgtggtttcctcgttatgcaactttcaagggaggtgctgtcgaatttttcctttctatcttcatcttttattatgcacaaccatttggggaaagtgttttggtgacatccattatgtttgggtcaatggggtgttacagtattgctcctccgtaaggtaaattaatgaccactccgccttggtattcggatcggtcg

SEQ ID NO: 51944 - DNA, 766 bp, Zea Mays
ccttctgcgtattctccttcttcgggatcaaaacaatgaaggacccattaatacttcttaggcaaacttcaccatgatagaatttttcacaaagatcatagaagtcttgagcaatgatatgccaacacttcttaatgaagttggtattgaaaccatcaggaccaggagatttatccgaaggtaatgattttataatgctgtcaatctccatcttagtgaacggggtgtctcactcgtgaagctcctcattacggattaaaagctctggaaggtcaaaatcaatgcctgagaaatcagacgatcccaatctgcacttgaaagcatcccagaggagaccagatttatgttcgtgctcaaaatgtatgaccccattctcgtcagtcaaagtggcaattgaatttttcctgtgtttaatggtggcatgagcatggaagaaacgagagccaatgtcaccatcagttacccacttaatagtcgcccgctgcttccaataaattttctgaatgttcagtagatcggccactttttgctgcagaatatctctgaaattccattcctcaatagaaagatcccgatgctcttccatattgtctataagttcaattagtagcttgatgttttgcaccgttttatcaatttttggcagcgatctctaccaatccttcagaacctttcgaacacacttaaacttggcagtcaggtttttagccttgtcaggaaggcaagggagcccagcccacgtggtttgaaagaaattcaagaaacc

SEQ ID NO: 51945 - DNA, 751 bp, Zea Mays
gagttatctttcacttgttgttcaaatggatgcagaattaacttagggaacaactcaagtaattttgaatgaaagatccaagcaagagaacttagagggggaggaaagaacaaattgcaacaaaagaaaacaaacaaagagagatacgcgatttgatttactggagttcagttctaaagaacatatgtctcagttgaggtgtccctaaggatggagtctctttcaaccctcacaagcgactccaatgatcaagtttgagcccttgaatctcctgatgtgatagacaaagtttccgtaaggcactccacaactcggagcctcttgctagcctttacaatgattgaatcaccaacacaagagcaagaacacagcaacacaaaccacagcataaacgaggatcacacaagcacacactctctagaaggactatctctagccttatcttctcaattgtgttgcttgtatctcttggaatggcttggaggtgttgcaaatatgtttgagaatgaaagcacaactcttctgatttatcttagccggttaaggtggtatttatacctcaaaagcccctaattagccattaggtgagatttcaaaatctacacttgcctcgggtgcaccagacctgtgttgtacatgttcgttgtgccactagacctcctgtttgcctgcacaatcaatggaaagctgccatgtcaagtgcaccggaccgattcggtgacccactagaccttgcgacttcagatgtcac

SEQ ID NO: 51946 - DNA, 1064 bp, Zea Mays
gaggagcataaccatggtctagtgtcacctaataaaattccttttctccgatccaaccgtacaatcagtcaaagagccaagactaccttattcacatgccacaaagcaagtattggtacctcgcaagcatatagacttttacaagtcagtgatggatttgataatattggatgtatgaagagggacctacagaactactatcggggacttagggaaaaaataaagaatgcggatgctcaattatttgtggcacaaatggagagaaaaaaagaggcaaatgctgccttcttttatgattttgttgtggatgataatgaaaagttactctatatattctgggctgatgctacaagtagaaagaactatagtcattttggtgatttagtgtcattcgatgcaacatatagcacaaaccaatacaatatgatatttgcaccctttaccggcgtgaaccatcatatgcaaagtgttttatttggagctgctttcctagcaaatgagaagattgagtcatatgagtggttgtttcgtacttttctattggcaatgggagaaaaagcaccaaggcttatcataacagatgaagatgctagcatgaaatcagcaattagaactattcttccagatacaattcataggttttgcatgtggcacattatggagaaggttcctgagaaggttggtcctcccataaatcatgacaaggagttttgggctgcattgaacacttgtgtatggggttcagaaactagagaagagtttgagatgcgatggaatgttatcattgctgcttatgatctttatagcaatgaatggttggctaatagatatcaaattcgagagtcatggattccagcattttttatggatatacctcttgcaggagtcctcagaactacttcaaggtctgaaagctcaaattcattcttcaatcgctttatccaccgaaagttatgtttcgttgagttttggcttagatttgatacggccttggaatgccaacgacatgaggagttaaaggccgatcatattagtatacatactacacccatcttacatacccc

SEQ ID NO: 51947 - DNA, 454 bp, Zea Mays
tgactaacatatatgttttacattgttatataagaatgtcatagaatttagtgaatatattggaaattgtctcggtattcaagaatcatttggagatgggaagtgtctcgataatgtttccatgcaatgtttcattcagtatttttgcgatgatgctgcaaatcatcgatcgaccatgaacaccaacagacttgtactggatgtcaatgttggtgtatgtaacttttcattactatccacctcatattaccctactttacctccagatttatatgacacagtaattatgtttatttaggctcttctcaactttgacgagcaggaacaccatagcaaggtcccttagggttatgataaagttgtccttgatgattacctggacaagacactgcctcagttgaacaactgtgttggctgcaaatcgatataaagtgttttcttgtttgaagcttat

SEQ ID NO: 51948 - DNA, 418 bp, Zea Mays
atggttatgaacatgtgtttgctactgctcctgtgatggccaaaactggggatcaattggtggagggactgttggctgagaggaaagctcactttgaaatacttaagcagaagttggcttctgcccagaatcggatgaagttgcaagctgataaaaataggaccgacagggagtttatggtgggtgagttagttctggtgaaattacagccatatgtgcaatctacagtggtcagtagaccttgccctaaattggctctgaaatactttggtccattcaaatttcttcaaaagattggcatggtggcatataagttggagcttccatcttcttctcatattcatccagtattccatgtttcacaaccgaaggcttttactccttccactactcctatgtattcagatttatctcaaat

SEQ ID NO: 51949 - DNA, 387 bp, Zea Mays
ataagaggttgtaagcagactaaatgttgatatggatgaaagagaagaggagagagaggagaagcgggttgtaaacttacagtcggcttggacacaagaaccaagaaatgttgtgagagagcaagtgaaccatatattaattgtgaagagctaaaccactatatggatgggttgaaaggtagactgtaaggatccttatagccagcagccggctacattattaaacttgctctacgcagaaactgaggtggtacagagcgtgtatgtaagtattaaaaacagttatagatttctatatagatacattgttgcaaagattcactatagtacaatattgtagataacatggatgttgataaagagtatatcattgcgtccgcactcatt

SEQ ID NO: 51950 - DNA, 617 bp, Zea Mays
atttttcatctggtgtgaaggcagggggctcaagatatatatttccagtgcgaacatagaatccagggcagagccattacaaaaaaaaaatctttgaaaggcaggtggtagtaatacgtcgaggaggaggatagatcctaagatttgtcttgtgatcagcagaccacgcgtcaagaggagagatctaggtttacttgtgaaattcacacgcgaggagccctcaggtgcttgcagccaatgcacacatgtggtgatgagtgcaactgtacctcctgcaatggaaaacgggagacaactctaaccgtaaaagccaggcaggccgagttgccccacatcctccaactccaaccggtaacgacgtactttctggcatgcttttctccaagtaaaaggctttcagaacgaatgcacaagtacaggagtacacacgcatcgatctgcccactttctggatcagatcctaggactgcaggtgcatgcagtcagtgacgacgtacacaggctacacatgcatgcatgttaccctgtaatcattcaccattcatacgtatggtaggtagctacgtacgccagcatgcagtagacaatcacagaaccaaaccaaccccggcagctca

SEQ ID NO: 51951 - DNA, 655 bp, Zea Mays
tttgatagcttcatcggctatctctcggtcacctttcaaccagacttcggagtaaaactttccactcaacgtagtggtttcggctgaagggttcttaatgtcattagctgagatcgagaattctagctgagttacagcctgtgcatgctcgcagccagctttctcgaggagtgagatgactcctcggtcaccggtgaaggcgcagaagtctcctctatcgctaagaatctcatcaaaagcttcggcttcgtccctaatctaccggataacgccatcaggatcaccatggataaagttttgctccgaagagaatgtgccaaccttagcaaaactattttcaagttattacaacattccatagcaaccttgtagcattcctctttagcctgatgaagctcctcgaaatttttctgaaccctcaatcgttacatatcagatatctcacgttttgtttgttccacattgaaattttcagttacttcatcgagcttcttctccaatccttgcacttcggatctgtgcaatcccacctgaatagataatgcatattataagtcagcaatacacttcacatctttctcttgcttcctttcaaactccttgattctttgttctgcttcggaaaggctagacagcctagcttcgctagatttta

SEQ ID NO: 51952 - DNA, 653 bp, Zea Mays
gttgacagtgttgtgggtagacaggctgctagaatggtaaaagaagatgaagaaaacctgaagaagaggaaattgagacctgagtcaacggcagttgctccgaagaagagaaaagttgcagctccgaagcagaaggcgaccgatatagaagaagaaactcctgcatcaccttctgctaccaatgtggtagaatttctaaaggtaataactgaatccttgcctatcaagctaagtccactggcgccacatctgacgaagctttttgagaagaagaaagagccttcgatagcgaagaaggcagctgggccgaaaaaacgaagaattattactgtgacagaagctatcgaagagacacctcgaccagcttcggcttcaaaagcaccagctgttgagagcgatataactattgaaactgaaccggataaagctgcaactgccgaagctgaactggctgaagatgcaaatctagaaagcacactttctaatattgataagatacttctagacatggccacagaagaagccgctgaagaaaccacagctacagttcctgagaaggagaaggaaatagccgaagctgctttagaagaagaaaattttaactttcaaaacttaattgggcaagaattgacgaaggctgagaaagaagagtt

SEQ ID NO: 51953 - DNA, 342 bp, Zea Mays
aagacctctgggtcgcgctgtctctgcatttattgcggagaagacacgccgcctgactatcctgctgacaggcgatatgccccttcagcatttaatgtgtcctgtccactcagctggcaggcggcgtccaggccatcctgcaggtggcgtgcctgtccgttgccaaatagtacgcccgtgctgcgaggtgcaccgtgcccatccatcatcactcgtacgttgccagggaagcttcccatgcacgccaatgctacacagatcgcggatatcagggtgcaaggaagattgcactggggacgagcattagtcgctccaagtattacatccattatatccctaggc

SEQ ID NO: 51954 - DNA, 654 bp, Zea Mays
aactcacatttgaaatttggagccaaattaggatttagaaaatgaaagagaaaaaaagagagaaagaacactcgtgggccgatttcccccatcctggcccaactccctaccacgtcagccatctccgcaacccaacttcttccttgtgggtgcacttggtcagagctcgtcacgacgggattcaaggtggggactccatcagtaggtttgccttcacctccgctacgagtatcacctcccgtatggaaattcgagtgtgaggttgcgagttctgagaacttcggcaatggcgtctgccatgcgtgtgcctacgcgcctggctggagtctgaatggggaaaagggagagagtctcgataactgttggatccttgatcgacgcccggatttgattgtgcgcccggatcagcccgagggggtctcgtccgttcgatttaatcgaagggtcatggatgcctctcgttgtcattagatcctatccactggactcgcgatcgggcggatcggatggtgtcgttgtggggggggtggatttcgggccctggaccttagatccaaaggtcaaaggtgtgtatcgtttcatatgggctaggacttaatctgggcagctggattgtgatcgggaggccagggatcacccataccccttcacggc

SEQ ID NO: 51955 - DNA, 757 bp, Zea Mays
gcaaaagtcgcctacgggtgcagccggaatagcacaataagtgcgaaaaatcgaagtcttttccaaaagactatccgcgcaaaagtcgcctacgggtgcagccggaatagcacaataagtgcgaaagatcgaagtctttgcgagaagactccacgcaaaagtagcctatgggtgcagccggaatagcacaataagtgcgcgcaaaatacgcctacgggcgcggtcggatcaatgaaggcacgctatctcatcatacaaatcatagttacacgcacaacgagggcatcacacattacaacggctcaaccttcgggatgatacccatctccctgtagttgaacaacattatcttcaattcctcaccctcgaaaagatttcgcagctccccctcacctacactcgccccagccgacgaagacaacaattcccgtttggcagtcccgtccactcgaagacaaccaccctccacctcaccatgacccctatcacttcgtgacaacccgctcacccttcgcttcgccaccgcccttcgacgcctacgtccagcattcgcacaaggatatcctcacccatcacacgcagcgaagtctccactgcagccacatccaatgctgcaaaatagtctgagtcctcatccgaagacccctctatccacacaatcgaactcccaaaatcatcagatccaaaaaactttgacacagaatcatcagaattgtctccagcaaccccggtcgaagccacaaaattagtattgtca

SEQ ID NO: 51956 - DNA, 962 bp, Zea Mays
aagagagaaagagagaaggaagaactggcgtttaaatccgttaattttcgacggctaaggttcgcggccgccgaaaataaccttattttcggcgggcggccaggattcagccgccgaaaataaccctggccgccgaaaatggtatgcagtgttgttgtgtcataccatctaaccagttcagctacatacccttttgcaaaactccttacacataacaatgtctttgcccacaaacagctcgtagactgcataagcattcaaaataaaaagattctagcctacatactggccaggtattagcaacattgggaatttgtacataaaactatagggtttctagatatactcatacacaaaaatataggagtttgatgccaccaacggactcaaggacaacacctgaactgccaatatcctaaactagcacaataataatcgtagaaatacctatcgtctagatgccgatgggaattaggctattagttaattcccgtcagtaatagactaagtcttgtcgggttattttggggtttttagtcatgaaataattaaactttatcggtcttcaacggaagttacttaattctcgtcagtcaccagcaaccgatgggttgttgtgtccaacccataactcatgtcggcctcctcgacgatgggagttaagggaaacaagaccacattggcactgtaaattccaacggctatgttcagcatgatgggagttattctatgtcgttgccatatcaaccctttcactctcggcaaagatgtctttgtcaagcgccattttatgccgagtgttaggctctcggcaaaaacactcttcatctagtgctttactgtgccgagtgtagtagcactcgataaaatatgttttgccgagtgcccgataaatttctctcggcaaagtgccggattccggtagtgttttcctcaatctctcacccaatttcaatacaata

SEQ ID NO: 51957 - DNA, 660 bp, Zea Mays
tcgacggcggcgaggttatccgttcgaccgatgagctggggaggaagtacggcgggcttagccgccacgaagctcaactcaatccgggcgccagatatttacctgcccgagcttatctgctgcccacggtgcacgaatcgtggcgatccgtcaacaatcccggcgaaaaatcacaggcgacgagcagggggtgaatcgggatcttcttcagtttggggcttactgtaccatggcgagggtcattagacaacctgacaaagcatttttaggtccaaatttctctaaactttctcttgtaacttactcaactctctgtagcaatattgtagtgctataaaccagctacaactcgactatagggattaaactcagttgagcactggatcaaggtcgaatccaagtccaaagttagctctgttacactgcaattctgaatttcagagttccatcagcctgacagtccaactttgggcttaattatctcaaatatcttcttaacaactatgcctacacacttaagcaaagttgttctcctttgtttggtctgcaagtttgatgtggtgacctagggcaaattctcattaatttgaaagttacaagggctcaaagttgtgctcacaacactgatttcagacttaggctatatagaggtcaagtggt

SEQ ID NO: 51958 - DNA, 473 bp, Zea Mays
ggcgtagggaactaactcaacaacttctgccgctgattcctagtcctcggcgtaaaggtgcatgacccaaactgtgcaatcttgcttccaatttttctcttctgccagtgcaaacagtaattcttggcgaagaactctacggagggctgaccgctgtacgaagtcactgcccagacatacttcgctagggccaccacaacattaggtgtcaattgatggatctgcacgtcatacctccgcaacacttccaccacaaaacaatgtgcaggcaaccgaaggccggcagtgaaaaatgcctcgaacacaaccatctcaccctccgactcaggaatctcttccacccccagaactcggccaactccattcccaaaataccccaaccggtgcatgtcttgcacacgaaccgaggagatcctcgaaacaccgaattccaccgtgtggcccgggtgtagctccactgccgccaaatcact

SEQ ID NO: 51959 - DNA, 663 bp, Zea Mays
ctgggctttggtttagaattttgaattgatcggaattggctttacaaattgtgtggttacattgcaaaatgtttggagggagtatgatgtgaaacttggggaagagacgggcttgcatgagaaggccacaactttgcatatgcaagctttgataatcgtgcataattaagctaaaacggatctatcagaaggggattgcttgaattgtccatagtgaagcatactaagggctacaatgtgatgatataacttataatgagcaaagttgtgcgtgaaagtattgtattaaagaaaaacatcattttgctactgtatcgtcctttgttccgtttgtaatgcctctcaggctaataccagttgcaactgttccatgaactgcaggtacgagcagcttgaaatggaaggcaagttattgaaggtatggatattttggtttcatttttttgggttatttcataaggcacttgcattgtgaatgttgtgagtagcatgatttttttaaaaaaagatccattaaaaccagtgtagatcatagataaagatggccgtgcattgctttcatataactcaaactattagctctataaaacccgctcgtaatttggttgtaattttcagggggaagacttagattttgcttttgatcgtatttcggctttctca

SEQ ID NO: 51960 - DNA, 320 bp, Zea Mays
atttgaatatggataaaaataaagagacagaacgaacactacattagagggacagagagagtagaatatttagacttagagtactagtcggagttgtgacaatacgtgagacagaaggcatatacagcataatttccttttctaactacttctatcgtgctgtttgacaactctatcctctgtaatttcatatgttgtgccagttaccatacagtgatgcaaactgactaaattagaagaaattaagtgatgcctgagaaagcattgcagtagttggcttcttgatcacatctttatccccaaccaaagagtatacaaag

SEQ ID NO: 51961 - DNA, 1926 bp, Zea Mays
aaaagttgcacgctacaatcctggcgtgatgcacacatttaatgtgagggatccgttacccactgctagcgtgggtaagtatgtgtcccatctgtattcaatgctggcgggccctatgtcagaggctttcctcaagcatcgtctggtggcttatgttaggggtgcgggcttatgttaggggtgtttgccacatgttagcaccgcacccctacctaggcgaggggcagacctgaggataagtggtgcactattttcccaaatctttcctgattgttggcccgacccgcacctaagggggtccaagctcctaccacccttgcctggacacatggcgactccggacctcacctggcctaaggtccggatggtgtctttcatgcccggagccgttcagaagacttggtgttgtaaacagagagcgccttttcctctgaggctttatgttccctccggatccctttgtctagggatccgttgggtcacaaggaggttcgggtcctatgtgtaggatcacagacctatagctgaagttgttaggtcctccctttatggggcttgatggagacagcgacccatcccaggaggcgagcgacctggtcatgactccatatggtgggccttagccccgtgctagaccgcattaaccacgcctggcactgagccacagcgtggttgccgatccgcttcctactcatgatctacggacccctcgagtcgcatagcactcatgacctacgagcccccagactgcgacgcattaataacccacgcgcccctcggtttgcgacgcgcttatggcctatcggactaggcctgagtacgcacacatcccgcgcggcactacacgacgagatgcgtcgagccctaggctacaaaagccaagggtcggcttaacccaaatgatggcacctgggactatcgccgcccccacatcatccaccacgataaatacacgacagccatgcaacccacaagtactcgtggcctcacacaagataaaacgctggttttacccctgccttccgactcctacctagagaagccaccgctggccgacccctctctcgacctataaaagggatagccgccttagggcaaagggatggatggatcaaggggcagaagaacggattgagggacgaccagacaccttcagacggagataagcccacaagaacgaataggaggagcgccgacgaggactaggaggccagcgcccaatcaagtagacttagctaggactccacctctcaacttctaagctccgcttccaccccaataaaagatctaggagcctctcctccctctctcgattgcttgtaactcctactacaagtttgatcatcaatggtaccgataacataagccaccaatgactgaatatagggacgttctgttcaaaccggtataaatcttacgccctctgcgcacacactcccgagcccggaacacgcacaataaatttacttgtcaaagcgagatacgaaacaccaactatcataattatgttggtaggtcaatatatcaatagattctgtactatatagatatctataaatattatcaggtatgtaatatattttatcacgtgcggacatgcagtttcaatagtaattagtaaaaaattaataaaaaatcaattcataaatattgttagtttattatgtaaatttaataaaacttgagatgctttgactcttaaaaaaataaaacgacctataatttagcattatattacgatagatagacacattctgtaactccagttttcattttggccattattcttcaaacgcaaggaacagacatcttggcatcattctgcatatggagtattttttcgactgaactacggacaacatattacagcatacttttggctggggaatctcccatgcagaaacaaatttcatactcaggactact

SEQ ID NO: 51962 - DNA, 491 bp, Zea Mays
atgaagccatttatcgttatcaaattaatcttcaagaagagacatcaagtgcaagatttagcaagttggctaccgcatacaaaaatcatgcacgattcaggtacgctgtctgtttttagtttgatgtgactaatgaataccttgattgattaaattgtggatatgtttctcaacacagtggaactgaagtctgcctttgtctctcaaatgatgctgatgttgatgattttgtattatggttggtttgtttcttcaaaaaggtgatttctcaacatataattattagaatcctaataatgatcttatggtagggtatttgtagaatatattggcaaagacggtagaattaagtgtcaattttgcgcagctaagtatgtcacttttgtgttgttggctccattatgtctgagctgatatttttttcttaacctgtgcagatacaagtgctaagagcagcagtaagtatatctgaactgttatctttcctcaag

SEQ ID NO: 51963 - DNA, 676 bp, Zea Mays
gtgccatcttcaaactggattggtaactgttattataagagaactctgccaatgaaagacacttgtcccaatcctttccatagtgtagcgcacatgccctcataatgtcttcgaaaatctgattcaccctttctgtctgaccatttgtttgaggatggtatgctgagcttcttattacatgagtcccaagtgattcttgcaattgctcccagaaacgtgccacgaatgatgctcctctgtcagatacgatagtccttggtattccatgcaagcgaactatctggtcaatgtagatttatgcatatttctctgccctgtgggtggtatgtaccggcaaaaaatgagttgtcttggtcaacctatccacaatgacccaaatagaatcgtggtgtcgggaggtattgggcaatccttcgatgaaatccatgcaaatatcctcccatttccaagaaggtatgggaaggggctacaaggtgcctgctaccttcaaatgtcgcatttagatatatacttagcaatttccctcttcattctggtccaccagtacaaagatctgaggtcatgatacatcttgttactgccggggtgcatggagaattttgaaaggtgagcttcatccaatattttctttctgagctcggggttcttgggaaccaccaatcggtctccaaaccag

SEQ ID NO: 51964 - DNA, 398 bp, Zea Mays
aaaccttgggttaaattttgggatgttacaaacctaccccacttaaaggaatctcgccctcgagattcagactgggcttgagaaaaggtaagggtattccctcctcaaggagtcctcactctcccaggtagtttcctcttctccttctctgctccactgaactttacagagtctcacttctaagttgcgggtctttcggactgctgagtcaagaatctttactggcttttctcggtactgaagatccttgtcaatctggattgcctcttcttcgatgtggttttctggtacttgcaggcatttgcggagctgggacacgtgaaacacattgtggatatctgacatagattccggcaattcaaggcgatatgctgcgggtcctactctgccaatgatgg

SEQ ID NO: 51965 - DNA, 326 bp, Zea Mays
ctcatagctagaataggatttttcatgaatctacacctgaatcaaacagaccctaaatgagtgtttaagcatgcaaaagcaattgctcctcccaccggctatgactgggcaaatatctgcttcctctacttcaagacgatggaggtatacaatatgtctatccaccatgtagtcacctagctctacttctatggcctgaatgttatggagttggagatgatcgagaagacacttgacacattcctttctagcagtagttccacaacaataagtacatgaaatgttgtgaccttataaatgtgttgcttggtggtgaggcacaaaat

SEQ ID NO: 51966 - DNA, 412 bp, Zea Mays
ctttttaaaccccaaattttaagacagagaattatacaccagtaagaagccactgtaatgttttcagaatttttggaaatttattagtataacttgtagttcaaacccaccttaaaagcatagaggaaataagaagaagaagggaaaataataaacctcgtttcaataagttcaactagaaatcttattaaattctcactaaaacattaaaaggaaatcagtggaacaccaaaatagacttaccacttagtttaaccaagcttagccctaaattactaagtatacccctaagggatcttcaaataacaagattaagccctaccttattaaattgatccttcaccatccaagtctaattgctaaaatttcatatcataccatgcatatatcttactcattgcattcattagat

SEQ ID NO: 51967 - DNA, 491 bp, Zea Mays
gcgatgatcctccatgttttttcttgcgacgactatgttgttgacatatgtgaatacgttgcgccccatctggtcttctagtatagtttttctcaatcttgagaaagtggagccgacgttttgaggccttcaggaatacgtatgaaacaatacgtaccgaagggagtgatgaagtttgtatttgcgttgtccttgtatttcatatagatctgatgatatcccaaaaaatagttgagtagagacatgacttcgcatcctgctgctaagtcgatgattttgtctattcgtggtatgggaaaatcatcattggggcaggccttgttgaggctgctgaagtctatgcacattctctatttgcagtttttcttcttcaccatgtctaagttggcgagctaggtggggtagttgactggctcgataaacttggcctcaagtagcatgtggacttcgacttttgcaactttagtattttcgtctcacatttcgcccag

SEQ ID NO: 51968 - DNA, 632 bp, Zea Mays
acttaccatcacacaattcgagtaccaagaatccaagatttattcaaaaaattcagttaacctgttagagatgtgccctgcattatataacccctggagtgtcgcactctgcgcaaggagcctaccagctattgtgaagttgagtaggtcattttttctagtcccacaatgcagaatctttcaagttatcaaactctacaaaatcaaatgagcacaaaccatcaatgtggtaccaagcataagcacaacatgcaacaagcaaataggaatccaaaaaagaacaaataaaagagaaaatcaaaggatctgggcgtttggcaatacggagcggggtgatcaccaaaagaggtgtttgcttgtactgaacttagtgtgctcctaccttaatgaatgggcagcgctcctgccttaatgaatgtgaagtgctcctgcatgccttataacacaaatagaaggaatgaaaatgaaagcgaagaatcatcaagtggtcctgctcatagtaatgacgaatgaggttaatttgtcaacaatcgcatcaactcataaatgtgaagctttaaaataattattagactatgatttgagtaaagcaaaacatgtgaattatgcatgttctttgcagcagaaaaaag

SEQ ID NO: 51969 - DNA, 490 bp, Zea Mays
tcgtgatccgatggtggtcatggcgtaccgcttcggtgtgggtacgatctaatcctgaccctcggatatgatccaacggtcgttgatcaaacatgtaccccctcggccgccactttgcaaaagagaccctgtcttcccttaaaataaacccgccatccccgcacagtttgaagcaagttacagataggtccctgggaattgcaataatacccctggagtcttatttaagtgcaaaataaatattaacaataacctaaaacttgtttaacccataacttttacgtcttaattccgatttgatccattcaagtcgcgttagcttcataataattgtgcctacgctcccgtaacattatcttggcaaatagcatgtttccaaaaataaatattcatttaacctatctttagtagattgttcctactaatcaaagttagtttgtatataattataatgtaactaaaatattatttccactctagtatgatatag

SEQ ID NO: 51970 - DNA, 618 bp, Zea Mays
ggtctttccactaaggactagacttcattctgggtgaagttatcgagttcctcttgcattgcaactatccagtccagatcacctagtgcttcttctaccttaagtggctcaggagaagaaacaaacaggtaaaattcacaaaaaatgctaaacgagatttagttgttacccctcttttgatgctaccaataatgttatccactggatggtctctttgaatgctttgatgaacccgaggatggagaactgaaggttgatgttgaattggtccttcatccttttgttcatgtggaactccaccacccaccttttcttcattttccaccatacttggcatttcttatggttggatggttttcgcaggagttggatgacttgaggttgatgggtttacatggatggaggattcattgcccaccttccttgtactcccatcaataatctcattggtcatccaaatccttcctcatcatcgtccttctcttgtggtttaacttcaccatttgtgagcttcttgatggccttacaaggtatcacctcatttcctacaacatcactagaagcatgcccttatgatccattatattcatcaaatatcacatctaccgctatttcaac

SEQ ID NO: 51971 - DNA, 618 bp, Zea Mays
taagtcaaaggataacataaaggcaagagtagatttgtcagcgttttgtgagaccaaaccaagagatgaagccgcctagtggtggaaagacatggagaaggcctaaaggccgatttcgtctttagcagggcccagaggaaggatgtactacaatggatcaagatgttaatgtttcctgatgagtatgcagctaacctgagtaggggtgaacttatctactttgcgagtcttagggatgaagagtcatggctttcacatatggattaaactaactcttccggtgatgctttaaggctatgtccctaagcatgtctggctagcgcttccagagttgagttatttcttctgccaactttgtgcaaaagagttatctcggtccttaattacagacttaaaaagaatggcacccgtgttactgtgtaagctggagaagatgtttccatccgacttcttcattctgatgcaacatttgattcttcatcttccgtatgaggcacgaatgggggggcttgcagggacgttggtgctatccaatcgagaaatgtctaaagacgattcaaaagaaatgtagaaataaatgcaaaattaaggcttccattgcagagacatacatactag

SEQ ID NO: 51972 - DNA, 401 bp, Zea Mays
tggagtgtagcgttgtggagagcggtgtcgcctacgatctcgtacgaatgaagtactctatacggcctcttacgtaagactacgtaatgctgcaaccacctcttcaaggtagataggtccttgaagaccctacccttttcaatcatcatgctaggaccggcctcaggagcatctagcagctcatcatcccttccttctgcatttgcctgatgagaaagactaagatcgctgaactcatgaactcttggatcccgaccgtctggaaaaacacgttgcaacatctcaatgtcactctctgtgagttcaccaaccgggcgatcatcatctgaatcggcaaccatagcaaacgcatatggctcctcttcattcctaaactcaggactgttggaggcaataaatcc

SEQ ID NO: 51973 - DNA, 293 bp, Zea Mays
cgtggagaaaacgaggtttccgctggggagcgggttgtaatataccattgatttcacaagatactcttcaggtactacttactgggcaatattataacttatctgcacaccacttttcctttgctgcgtgcaccgttaccaacttcttccttggtacttggcccccctgggatatggcctcgacgcgtcggggctggataccaggattcgtaattggcaactgatgtcgtgaccctcaaggggagctcccaactgggacttgacctgcacacagtcttggcaaggtattttta

SEQ ID NO: 51974 - DNA, 943 bp, Zea Mays
ggcccaatacaacccatgcccaggcaaaaacacgggcgcccatgcccgcgcggtggttttgcaccgaagccctcaggggtttgaataactagggaagaatcttgcgcactatttgactaggtcactgacatttgcaaataagccctcgcacttctatttcttcatagcccgtagtcctcaacggcgaacggcgatgaaccaagctccggcgaacctgtactggccaagataagcaatggtcggtgccctaacttggctgtcacctaattcaacatctaataaccatttcccctcgctcaattgcacaatccgagctctaaatcgccctgtccacggagatagtgcgaactacggaggaacagaagtgttctcggtgatctagcatggtctagcttaattgaatgggtcgaggagcatcagtgatatgtaagagtgctgaaacaagagagcacagggcaagatcggacctaaagtgcactggccacggtgagagcttgttcatggtggcggaaaactgatttgggttaacttagtgattcgggggctctggtgagtaattggaggcacgagtgggtgtgttgagtgcacacaattacatagctgagttgagggtgtgctcaatttatagggcccttgagcggtggcccgtgaatttgtgattgcgcggtggcgatcggagggaaggggatgcactggcgcaagcgataggtggctttcactgtggcgagctcactggcgttcaccggatatgcataacgcgagctactgcgacgtggtaagatgccagggcatgtggcgcaaggtcgcgaggtggctaactccagcgaacctatccacagcggctgtgactcaggtgggtacggcgcccggagtagaatagtggccggagttcatccacagcgcgatatttccttacccctctgcattatccaactgcgccgag

SEQ ID NO: 51975 - DNA, 818 bp, Zea Mays
caaaacatcttcaggagttgttgctgccggtggtgaagttaatatttatttggcgtacttatctgactactgctacctttgcacaaacaaaaggttttcaaaacaaaaaaaaactctgctatactcgaggcttcttagaattcaagattttatacttcttccattagcttttttttgtatgatcaagtgaatttgaatctgctccttacagatttttgtgtgttgcaccttcatagtttttagtcatgtttttatgaaactttgtgagctacttcttgcttccgtgttgtttttatttgacaagctctaattatttagtcaacatgtcacaagttggcttgtattattttgataattgaaagagctctaactacgctgcttgagttcacatgttctgtaatttctcagacaactgaactgaattttggggttcgaagacgcaatgttgcatattgattttcgatattggtgtgtgttgcaggatgttggtaaggttcttcctcatttgaacggtaggatgttgcatgatgttgatgcctgatccaagagctcacacccgtttatttagttcaattcagagcttgcatgctctatgtaagaaaactgctatgtgctgtgtttttaacaaactgctacattctgaatggagtttgcatgctccgtgtactgatacatgccgcttgttgctgatcgaaaatttagttttcaaactatatgttgaggacaaatattttgtaaactgctacttgtactgatgtctgcttgcactgtaatttaacatgtctttgtcgctttgcgcgcgcgtgtatgagctttgc

SEQ ID NO: 51976 - DNA, 592 bp, Zea Mays
gaatgtaacttaagaataatctttaatcatttattcatgatgaaactagaaaattgccagatatttttttggtggcggaaatatttaacatctattttttcttaatatgtgcatctagttcactcgtgaaccaaacaccacttatgtcttatccgtggactatcatctctcattcaacaaaccaaaatcacccttatttccacctcaacgcatgttgtgtaccagatggatcctagatccatatcccattggaaaatgtgtataccatgcactagcatatttatcaagttcaaccaagatagcatgcgagtaaaagattatgaatcgtaaccactagacacgtagtacaactgaagaacatgttgatataatggaagcaattggacctcctcgcgtacaagtagcatcaacatgttcacctgtcctcctcaagttctttcctgcacgagaccgatgtgctagcaccacacacacaactagagaaacaacgacaatgtcctaggggaagagaggcaacgacggttaagctaatctctcaagcatgctagccccttcatacatatagacctctgctaatgggcttttaccctaa

SEQ ID NO: 51977 - DNA, 807 bp, Zea Mays
ttgccgacttaagccgattgctccgttagcagggcatagtggtcaccccgagttaagtaagagtgcaggtcgaccatgaacaatttgagtattcttgaggcctttttattgatgatatatttcctagtttacaaaatacattgtcgtcccaatagctttttgaaatacagctagggataaaactttctgaggtgttctatgttccatgagttcccaatttccgtgctgtccatctgagtgagacgatatgatcccggccgagtgacttctgctactatgaatggtccttcccatagaggtgacaacttgtgccgtccctcccacgtgacgagatctccaactgcgaaggatcgacgtcgcatggtcttattgtgatagcgccttagagtttgttggtaccgtgctgattgaattatcgtgttcagccgttcttcttcgagtacatcaacatcctccagcctggtagccttagcttctgctatgttttcaaagatcaaccttggcgccccaaatttgagatcagtaggtagtactgcctctgaaccatagaccatgaagaaaggagtatttccatgcagagctcgactaggttgagttcttaggctccaaacgacgtagggcaactcccttatccactttcctgcgaacttttcatttttattgaagacttttttcctgagtgcctataatatcatcccgttagctcgttcaacctgcccgttggctcttgggtgtgccaccaaagcatatttgatctgaatgctcttttgttcgcagaaatcgaagaactctgaacttgtgaagttg

SEQ ID NO: 51978 - DNA, 415 bp, Zea Mays
ctcacccctgttccctgaatccacaacctctatttccacattcatatcctacttcttcgtgtgtgtataccagccatttatcaattttcccctcctgcaaatgaaaatcctacaactgatactcctattactactattgaagcttctaccaccaagctcatcctcctcaacctttcatttatccgtaccctactctatacccttttgggtattaatatggtgctcctcctaatggatcatatgatgctcatcctccatatggtgctcctactctatactcttccccgtttggtgctcctcccctatatggtgattgtcctccatttcatcctcctaaaggcacgataggcccccaagcagccacaacgatgcaacctcgatccagcctgcatactctggtgctactaaattttaa

SEQ ID NO: 51979 - DNA, 605 bp, Zea Mays
tggaattttaatttttaaacggtttaaacaacataggtaaatttcaatatatcataattttagacaataacatagtcaaataccaaacaaccaacataagttcacgtaataatattgtgcaaaatgacatgtccacaaccacattaccacaatagcacaagttcagctaatagcgagccgacaaccacaaacaaagtgcaatgagatgtctagtagttcacaatcacaaacatagcacaaaagcaactaaagtggaatgcaatgtccacaaccacaagcacacaagtgttactcaagcactcaataaccatcatccaaatcatctaaagtaacatcatccttgtcttgctcatcagcacaaccaccactgttgtttgttgcttcttcatcatccatgtcaaggtcatcaagcacaaaattttcatcgtcttcattctcttcacccacatcaagcccatcttcatcatcatcaagaattggctaccatgagctctcctaggaaagttgtggcctcgaagttgtgtggatgcaccgacgacatgatcaacatgcattgctctgatagttaagaggacaccaatagaatagtactccactgaaataat

SEQ ID NO: 51980 - DNA, 740 bp, Zea Mays
gcttaatacatggtggcaatgtgtcgtttctgtcatcattgctatatagctatagacccactctagcattgttaccttcgcctttcctttcccttcatccatagcatgagacactcttcaaccattgtcgtttggtgtcttctcaagagttggacgccgctgctgcgacgtcttctttgaagacatgatgtccctttctttttttctttctttgatgcagtgttctttgttattttagttgactcctaaatcctaatgcatgttttgattgttgttaggcttgttgcaatggcgtcggtgatatgagccctaaagatcctcgttgcacacacggactcgatcggccaggtgtgtgcttacgcttcctttgaggtcatggttgacagacctctgttgctcctattcttgcacgttaggaaatgttatgaaccaaaaaagtgttttcataatttgcgcctatggaaacttgtatttatattggcggtagttaacaacaaagcaagctattgcgacaaagagatatcactatgaataaaaaaggatggtagacacaaaagacctggttgtgagattcacaaacatgtctgcataggccaagcaatattttctgaattaaataggttgcaaaagaaaacaaaggcttgcatccaaagctgtgtcattccaacacccaacatcttgagccagaaacagtgccaaagcagctgcatcattctatcatccatgcaagtggctcgcac

SEQ ID NO: 51981 - DNA, 561 bp, Zea Mays
ccgggattcttcaacacgttccacctcgaggtatggatccaaatgctagcagcagcatctctcaactacttccgcgtgatgcgatggtgctgggtacgtagatgtgcttccgctctctgctgcatgccgttgtaggccatcctattgcctctcacgccctaaaaccgggtctccggctaaccacctagcttgcggacaaactctcgccgacggaggttcaccatgccgcatggacagcttcgccttgcctcctaaccttcggtaatgccccttggatcgattcgacaccttctctgcattgcttagcacctagttacgcttggaatcaagccctggcatgataattgggtgctccgcggtcatggcgccgccgtgggtagggccggcgtgctgccgtattccggctgggaggaagaaaactggcagccattggattggaagttgacggttaggatgggttatgggaaggatgtaccgtggaccgttgatcgcggaatggacgtatcggattagattcacatatacccgttcgactcattaaatccagggcgtagatcttgg

SEQ ID NO: 51982 - DNA, 549 bp, Zea Mays
aatcgcttggccttaattctctctgcgtttagaaccttctagcgcgttgaatagggcgtctaggggcgggatggcatgtcgccggtgagggcgccaccacgacctgggcagcgccgccgtggtccggtatttaggtaggggatagaacgtggcccgttgatctatcaagcaacggctcggattagaagccatacacctgttcacgtcgtgaaacgggaatcgttggattccaattggagggtccggatccattgtgggccgtgaccgtcggattatcgccgaacggatggatggtgatcaccacttcattaaacccgaagcgtaggatcgtaaaccaaccgctgtgatcgtataccggttgggtgtctcggcgttctaatctagaccacccactcttgatcggatggcttaaaacatccgataccccttcacagtgccaaacttacttaagagccccttagttatcaagaaaccaacccgccatccctcgcgactgtactctgggtcttgggattgttgcgcagagccccctgggtttctctgaatttg

SEQ ID NO: 51983 - DNA, 1124 bp, Zea Mays
taaaggtcaggtcatggctatggcagtgagaaaaaagagaagggttgatgctgaaaagaagggtctggcgaagacatctagggtggcgggggcctcggacagatttgttgaggaactggcgaatacgtgcgccaagccaggggaggtcatgacctcgcccaacctctaggaagcatcttctgagatgctgaaagtaactggggtgagtggagcagaaaagaccctattctcgtggcttccggcgaggatgattttatgtcttgtctagctcggtattttaaagtttttccttataggcgaaatattagtgttgttgtgacagctgtgatggacaaggaccgctaggagccttcgtggaagaaacagaaagctctgttgtggcttgtggaccctcgacgtgaggtgaaggcgctctgtactggcacgaagggtgctgccactatcatggtgatgcctccgcccgtggtgccggttgttactgctggggggatgccttcgcctggcaaagctagtcaggatggagtggtgaggagtgctgaaatgggtggagctgttgcgatggtccggcagctttttgtcgatgattacttgctcgagggtctgagcgtgttcgatgcccacaccggtctcgtggctgatggtaattattttttgctcgtctaaaggggattttgttctttgtatgttttccattttttatcgattgtggttttcatttgcagggtcggggtctggccaggtggttgcgacctaggcggagtatgcggtggagacaccgtctgatccgtgggtgcagttctgcgctgttgtcgatagaggcaggggtgtcaccgaggtgtctacatttggtggttttgcagcgactgctgtaaggcagctgtgctatgtaagcaactcttttttatcgtttttattttttttgtgacaaagtttgtatgtgtcaggttgcttcttttggtctgggttgctagtggacctcacgacttcacaacaacattctgagaagaaacgactggaggacaatgtgagcgtctccggacgcaaaatacagaagctatgagtgataagtctactgccaagaacaaaagtcacaatcttttggacaaggtcggtgcttctgagaa

SEQ ID NO: 51984 - DNA, 299 bp, Zea Mays
gttgataagccacttccccaactcgctttaggattttgaagggcccaataaagcgaggggacaacttccctttaaccttaaatcttcttataccccatattggtggcaccttcaggtacacgtgattaccttcctcaacctctagttgtcttctttgggtatctaaatagcttttctgccttgactgtgcagttctcaggttctcccttattgtcctaacttgttcctctgcctcttgtataacttccggtccaaagaactgcctttcacctgtttgtcacaatacatcaggattctac

SEQ ID NO: 51985 - DNA, 720 bp, Zea Mays
atcagctcctcaagttcccaagtagcctcgcgctcagactgattagtccacaagaccttaacatacttaattgatctcttcctcataacacgctccgaggactccaagatacgcaccggacgacactccagagtcagatcctgctgcacagcaattggttccatctcgatctgatggtctggatcccacaagaacttcctcaacatagagacatgaaataccgggtgtactcctgccatggaatccggcaattgtaagcgataagccaagctgcccacccgggccaagatagtgaacggtccaatgtatctcgggctaagctttccggagacaccgaaccgaacaactcctttagtaggttataccctgagaaagacttggtcacccactgcaaattccaagtcccgcctcctcacatcagcataactcttctgacggctttgagcggccaaaatattctgacgaatttcccgaaccttctcagaagtctgctgaacccaatcaggaccaaccagagatctctctcccaaagtctcccagcacagaggggagatacaccgcctgccatataaggcctcaaatggtgccatcttgatgctagcctggtagctgttgttataagcgaactcggccaaggcaagatgatcctcctagctacccttccaagacagaacacaagcacgcagcatatcttccaggatttggatagttcactccgac

SEQ ID NO: 51986 - DNA, 519 bp, Zea Mays
cagaaattgggaactcctggaatatagaacacctcaggaagttttatccttagctgtatttcaaaagctatcgggacgacgacgtactctataaaatgggaaatatgtcatcaataaaaaaggcttcaagaatactcagtttgttcatgattgacttgcattcttacttaactcagggtgaccactatgccctgctaacggagcaatcggcttaagtcggcaacgacttaaaacggtgcaacatgctcacgcttacttaactcggggtgaccactatgccctgctaacgaagcaatcggcttaagtcggcaacgacttaaaatggtgcaacatgctcgcgcttacttaactcggggtgaccactatgccctgctaacggagcaatcgacttaagtcggcaacgacttaaaatggtgcaacatgctcgcgcttacataactctgggtgaccactatgccctgctaacggagcaatcggcttaagtcggcaacgatttaaaacagtacaacatgctcgcgc

SEQ ID NO: 51987 - DNA, 876 bp, Zea Mays
attctgtatgacaaaatgtacgagctaccgaagacagcctcatcttcctctcctttgtttgagcaatgatgagaacatgatactgaaatctgtcaaagcttagagattgttttgctgaggaagtgatggatattgggtaccaatgttttaaagtcgtcgccatctaggcatctaggtgacactctaacacctaggcgccttgctcgtctatctcgcttaggcgccacctaagatgcagttcgtagcaagtgcctgctacctccaaggctccaaccatataaagcagcatgaactccgcccggtagcctatataacacaaacgaccagctaatctttcccagtcaacgcaagcaacaatggtgctgctccttgagtgtctcttgctcgccctcgtctctctagcatgctctaccataaacatggcagggacctcacttgcagctcatccagcgtccacctcaaacatctccgaccacttcgcactcgtgtcgttcaaatctcacataatgagtgacccgtcccgagcccttgcgacatggggcaaccagtctgtcccgacgtgccggtggcgtggcgtgtcgtgtggcttaaaaggacaccgccatggccgtgtggtggcattggacctcggcgagctcaaccttgttggcaccatcactcatgcgttgggaaacctcacgtacctgaggctgctcaacctttcgtcgaatcacatccatgggatcctgccaccagagctaggtaatctccatgaccttgaggacctgcaacttagctacaactacatcgaaggggagattccgtcgtcactctccaactgcagccaccttgtcaatattttgatcgatgtcaaccaattgcaaggagggataccag

SEQ ID NO: 51988 - DNA, 484 bp, Zea Mays
ctttggcccttgtgtaggccccaagcaattcgtcactggttgcttcaatactgctcaaccactcatcgtttggctcatcaaactcgcctctatatctgaaggtatattttaaatagaccaggccgccctgactagacccggcagcagcctccttcggcatctcccattcactcacaagcggccatactctgtaggtgatgtgttcttgaaccaagtctcttgtgccaataaaagtacacacagtgttgaagcttctctggcatgcttctatatcattcccaagagcagtggctagcctgctgatgccaaagcgagaccaaatgggacgttgaataattccttttatatcatccctctcaactaaattattcttcacataaaatcattcttccatccaggctcctggccacctttttcaaaatgttggaactggatagcttacatcaggacgaggcacaaagccataacaaccaaagttgttgtg

SEQ ID NO: 51989 - DNA, 658 bp, Zea Mays
gaagtcgtcttcttgctttaggggtaggggtggtggccggtgggcttgctgatttgcttggggaggcggtgggggtgatagtgacaatctttcttggtaatggagttgtgggtgtagcggagcctctgattgtagttttactgttgtggatggtattggtgttcgcttccatagtgaggattatggtattgatggggatggtaagtatggccgatggctctttgattatttgcgggggctaccctggccatgcgctctttggtttcttttgtctccgggcagtccctggtatggtggtttgagtcctcgccatggaaaagatagcagaacttcctgggctgctaagggcctctgcccgccctctacctcttggtgcgccgccgcgacgactttgatgctggggtaacgtcgagggaaaacgttgcccaactattgctgattggctatcttatggacctggggctatgcttgaccgtggtcttgactcttgacagtggtattcatgctattggccctggttccatggcttgcttgactgtgagtctaccttcggtttgcgttgtaatttgtaccttttggtactgtaactcttcggttgagcatattttttcgaagagtgtgtataattcctagggagccgacggagggtctcttgtgc

SEQ ID NO: 51990 - DNA, 660 bp, Zea Mays
gatgatttgtcacctacacatgaagaacagccgagcaggcacgcaaggaagaggaagacgatgcgagaaagacgatggggctgctcatccgacgacgcgaggaagacgacgaggcggccccttagaccacggagttataatgcatagagaggaaaacgcgtgggctgctcctgtgtgagaaggaagagggaaggggttcatggtaggggcgtacgattgtatagaaaggagagggtatgtatagaaaggagagggcgcgagaggtggttgtcaatttcatggcgactcttgtcctggccgagcgagagagacagctgcgcggtgagttgcacgagacagggttagacagagttagatgggtggtagacagggttagataaaattagatgaagacggtcagagccggcccgtgggcccaagatgacgaggtggacgccgaaaggatagacgaggatcgccgacgcgagcagcatgccgttcgtgggaatacgcggttcagtaatctcgcgaaaaggggcacgcgatctggaatagattcgacgagaggaagaaatatatatatatatatatatattatcgagttccaaaaattttatagttttcacaactaccacattttaggtatttaattaatattagaaaaactgaaattcatatttc

SEQ ID NO: 51991 - DNA, 1842 bp, Zea Mays
gaggaagtgttttgctttcattgcggagaggtcgcagagcttagattcttgaatacacacaatagtgggggtagaagaggactgggtacccctaaccacggtgcatttctgaggatcaccaaggccacgaacattccagcacatgatagaatatataggaggaacgaggattagtcattagaaacaaaacaagcactagtacaataccaaagttttgtataaggcatttatgatcctccacacaaggggagagcaatagggagggatcacagctgataacataagcgagggggagactcagccctagcggcagagagaagggtctagcatgatcacacattcggtgaacaagggcctcaccggtggatgtaaacttcggaccaagcttcatttcgccatccatgacaccacgcccaccgcatcgacggacttgcaccctagcctagtagcaagggcaagcttgcgaagcacgtggatgaggacagacacctcagtgtgggagaggacattgttgtcgcagatatccttctagacttttttagaggagtggaggtcatcgagcattgctttgcattctgaggcttttgaggcagtacgagtaaagttgcttgcattctaggtggcaaggcaggtgcttttgtggctagtgagaggggcagagatcttcttcccagcatggggaaggagggaacaggcacgtgaacgctgtgcttgattcttggcagtggagatttggctacttggaggtggggacgatgttgggggtgggggagttagaggggatgaagtattggtcatgaggctattgcagggattgggtggaggtgggctgagcagtgggattttgcatttgtaggatttgtgtgagggagaggaagagggggcatttttgcatggactacatggcctacatggcgagtaggtgcagcatggtgagagggcagcctctctctagaggtggtgcaggagaagcaagaggtcagattgcttggtgtgggagtgttggagggggatagaggtggtgcatgcatgtgaggtaggtgtcgtagaattgattaaggggttggaaagcatggcagtagaggtttgggtccctctagaggagggagggagctcagcacccgctcttgaagaggaaacagggagggcagtgggacccgaggaagcggggagagtaggtggcagggggaatagggggaaaatcggaatgtagtccccctgttgattgaactactactctatgggctagatgtggacggggaaacctgaaccacacccccttcttaggtaaaacatgagcgctttgagagccagacctcactaggaatatctaggtagtggttgacctcaaggaccagcttgattgggtcgaaatagttggaggtgaggcaagccgggttaatctccacgacctcaccaccgatagcaaaagaatgtttgatcgcctctgtcgtccattgctcgggggaaataaatgaccgacacaagaggggaaatcaatgaccaacacaagtctaggacctagaagaatccgctggaggtttcctcgaggtgatcaaacaggatggtggcatcctagaagcggaggggcaagggagcgaattctttcacgctcgaagttggagcctaagtgaagcaaggcatcacccctcaaggaaggtaggagaccaacctggagcatggtggcaacagagatgagcacatctcaaaggatggcgagatggtcctagaagccgctttcaacgtaagcaaatagaagtccgcttttcagggtaaggtccctaggagggaccaaagcttcgacgaagtgagtgtggccatcgtagaccacctactcaggac

SEQ ID NO: 51992 - DNA, 380 bp, Zea Mays
caaaaccgaccctctttcaaagatcaaacatgttcactttaatcccaacctcaaaaccttatggcccaattgacaaaatggcgcccaaagacccctagaacaccctagaaaagtttgaacccaaccctaagccttttgacatgacttggcatggcttttgtatcgttgtggacaactctgacagagccgacttctcacccccatatctctctactccgaccgtatctttgcttggaaatcacatcaaaaaggtaggatttggtgcagggaatagaccatacacgggggttttgccatgatctgcacgctaaggcgatcaaatcggccgttgaaccctggcagaagtaaacccccacgtgttcgacgtgggctgacactcg

SEQ ID NO: 51993 - DNA, 537 bp, Zea Mays
cgcagagagatgagaatgagaagatgagacggttgatgtgtttcatgtgcccttcggctgaaggaccccacctttatataggggtgcaacaacttgacgggttcggtctgctaaatcataggaaccgcccctggagtctcaactcaatgattatcttccttagctcccacactacccaaatggtcggctggggtcctaagccccaaggagtgaagtagccattagaaagcattatatggaccgttgaaagttccgaccatctttttgtcggactatttctcgtattctaatgctctctgatgacgccacatgttcttgccatttgattctagctattatagcacaatggcaagtgctcattggtccaacactctctagtccgacgatcctcgcactatagtcaaatggtattacacccttttgtaagctccccgaatggtactaggcaacattggactggtccgaggaccatcatcagactatagtttagggtccaatgcatccccatctttcacactgactagtgggccctgtagt

SEQ ID NO: 51994 - DNA, 1469 bp, Zea Mays
ttgccttttgagctaggcaacacttacacgaggttcagtccagtggggcctggcctcataaacccagtctactggcgtagctcaagtatactaacccatgaaaaaagttatttgctcctaattttgttctttgcagctgtggcgaagcatcaccaggcgaacttggagtaaagcgcagttgtggccccaccgatgggttcgccacctcacccgaggtgggcctgacggcctctatcggtaccccaagactggggtacccactcctactgggactaggcgggacccctgtggctgtccatagccacatagtgacgggcagttcagcctatctaaggatctaaacccccacgttggactctcgaacctggcaaggaaccaccagatccatgtagagtaaaatcactggaacagtcctggacctctacgtgtgccatccagacctccgaccaggggatgtacggtgctaccacatgtacgagctattacggatgaggaccgggtttccacaagtgctcgtgggacctccaaccaggggagcttcggcgccgccacatctgcatgcgttcccagcccatgctatctactcaggtagagatcagaagccaccaggaatagcccgtcacttgcctctagtgtgggggcgcccgcattgaatgcgagtaggatatgcatctctccacaccagtggcaggcgatgtgcacaatcctcaaagcacgggtcgcgccaatagctcacgcgttaccgaggcaagaccattgacttgttgcgccgtgcatggcttgccatcatcatgacctctactattcccactgcaagacatacaggtggaggggacgggacaacacagtccatgcatgcctctacacatgccaacgtaccagtctacgacgcagcctatgctagagccttcgcccacacgttaacacgacagggcgaaggtgagtctagccagagaatccacacggtgaccaagagaagatatttgtctgcctatcgcaagggaagactttggtccaccagctctattcgtctctccacgctacatattattttattctcgagcccacttgtcagggtctagctcccttgtatgtgctccccttatgctataaaagggagggcacttgcatagcaaggagggcacacacactagaccgggctcgagcccatcaaaggactcggggacgagatatactcacttgaactcacatggagacatctccatccagtccgaggatttctcaagctctcagcaatacacttcacagaagggtagggtattacactacggagacacaaaccactttaaactcttgtgtgttcttgtgttcgtccatctcatcaggaaaaccctaggttgtcacttgtttttaggattaggcaggtgcattccgccacctagctggagtttactcttcgataagtaccattgagaactgctacaataccagatttcctaccactaccg

SEQ ID NO: 51995 - DNA, 569 bp, Zea Mays
ccgggacattgtcggtgatgaatccacggcgacgttctcaccctctctctcgcacggggtctctcggtgatggcaaatggtggtcgtggggcggtggagatttagggttgccgagttgatagcaacgagacgcgaccctggacgactatatagaggtagggatacagaactaaggcggtggaattgctgtgaacaacccccgaccaacacagaggagttcactgctcccattttacagaccagggatgggagacagttctgacggcagggacccacgcgctagtcgctgtgtcacgctgacgaaccgatcccacgggacagcggcagaaggtgcaggcgcacccgtgctggatctaggccacgaggtgtgcgatttaagtgggccaagcggtggagattctgggccacggtgttgagctgggtctgcagggtggttcgacccacacgcaggttatttctttttttctttttttttcttttccttcctattttagttttctactttcaaactcaatttaaatctaggttttgaatttcaagcttcaatttatatttaacaaacaaaataa

SEQ ID NO: 51996 - DNA, 635 bp, Zea Mays
ctcaaggaccgcatgaaactacatacttggaattttctgagactcgacccccgctctttattaaagtagaagaacctctagaagctgatgagtgggtaagagttatggaacagaagtttgggttgattcgctgcacggaaacgcagaagccactgtttgctgcacaacagctaagagggcatgccagtacttggtgggcaaattttgtagcaattcaatcggctggacatcagatcacctcggaggaattcaagttagtgttccgagagcattatgttccagagggagtgctccatatgaaacaagaagagttcatccggttaaagcaagggggagatactgtaatgtagtatctcaataagttcaaccatctgtcctagtatgccatcgaccaagtgaatacagatctaaaaaagaattgttttatgaggggacttaatgacatgcttcagcagaaaatggcaacgtgcttggaccttacctacagtagggctatcagtacaacactggcagtggaagctaaaactgcaggacatggaaaatcaaaggggtttggaggtgaaagttcaaatcaagggcctgagaagagaaccaagttggtgattcgaccttttaatcaaaatcgatctttgcct

SEQ ID NO: 51997 - DNA, 772 bp, Zea Mays
gtagtactactactctttgggtgattggttggacttggacatgaactgatgcttcttccagggcggagcaactgcgtccagaaatctaacatgtcaactgaacagctgggcacatggtggatccacgatttcgttctggaaatatttttttacagacttgcaagaccgttcgacttcaccaaaataggatatgctcaacacctgcaacatcagtggagtcaactctgccgaagttgcgatagttttacgagaaaattaatattagactagcatatagctcgtgctaaggctacggtctcgaagagaggtcagcgacgcgaggggagaggttggtggggtcgacagcaaaagtgagaggggtgtggatgaggaggctggggaagcagagtcatggcctcacgagggagaaagagtgggaaggatgatccaaataatattttcattagatttgagtgactaaaggagacccgtttgagcccaacggtgtactctgctcttctcctctcctgctcctccccttatgctccagaagaccgggtatgataattattgagtttacacatggaaaagttcaaagattatacagtggatggagtttatactggtagtaaaaatacttcggttcggtattagatcgctgcctgtgtaatgaaaatagttgaaagaatcactatgagtttgatcccgcacccccaccaaattgatgcgaatacaacttcaacatgttgagaagtgagtctgatacattaaatgtgacaactgttatattcat

SEQ ID NO: 51998 - DNA, 723 bp, Zea Mays
acagtgcatccctaatgagggtttagtgggctgactgccttgcgatgcgttctgctgtggctttgtcttccggttcctcttcattctttatatatctgatgatgggctccctccagtcattagagtctgactctagctagcttaaaacattgcactcttctgcttgatctgaggaaatgcttgggcgtggcacctcttggacgaaaactccaggtgaaacctgggtccgactggatcccagtttcgaaaacgcgtctgctgccgcgtagcgatatctttccacatgatgaaattccagcccttcaaatctgtcttccagcttttggacggctatgtagtacttgcccatagagtcattcgagcaatcccattctttatttatctgacttatgaccaccagtgaatctccgtataccatcaacctcttaatgcccagtgatatggcaatgttcaatccatggatcaaagcttcatattctgctgcattattggatgctgagaataacaactgaagagcatatttgagttgttcacctctaggtgcaatgaagaggatccctgcgcctgccccctgcaacttcagcgagccatcaaaatacatccgccatacttctgtagtctctaggttatctggtacttgttgctcggtccactctgatatgaagtcaactagtgcttgagtctttattgcagtgcgaggccgaaactcaatgtcgtgagctc

SEQ ID NO: 51999 - DNA, 353 bp, Zea Mays
tggtgacagagactgacaatctagtgatgcctccagtgattgaacaactagtggaatgttatcaggacttgttctagaaaccaaagatgctgccacctaaaaggtctatagaccattccattcctctaatgcctggtgcacttccttttcggttgaggccttatcggtacaccccacaacaaaagactgaaatcgagaaacaagtgaaggaaatgttagagaatggaatcattcaacctagctcaagcccgttcgcctcacctatcctcctattcaagaagaaggacggagaatggcgaatgtgtgtggattatcacctgttgaacacctacaccatcaagaaccgatatcca

SEQ ID NO: 52000 - DNA, 876 bp, Zea Mays
cccacagtagcccattgaggaatgagttcgtttttcataacgagtttagaccgtagagaatatgattgggaggcctcgcatcgaaggcccgaaaaacatcttcccgaagcttgttatgaaaagttacttttgaccactttgattagtggggtcaagtggttagtgagtggaactgttagcttttaaaaattgctcgtataaaaggggcaatgctcgcagtcgtcggcatggcatacgctttgttgctccctttgtttatagcagtttgctctgccttcgaagcttgcttcgagcactttgttacgtttaaactagccttagccggcgcaaaacaaacacttatttctcagagatggccagagagcagcttgcccttgagctaactttggtgcctgtgttgggcattgtcgcgtggatgagctgacaagtggacccaaacactcggggagcaggtgagagctcagatgcacaacgaaacaaactaggggaactgtcgcttttcgttatgtgtgtcccatcccgctataggacaggggtatttatacgcacgtccaggggtaggtggtccaaaatatggccctaccctcggctaccaactatacccagggtgtatccccagaaacggggtaattacaacacaacccgtaaagtaatatgcacatactagacaacacaccctcacgctacgctgacaggtgggcccttgtcgatgtcttctattatgccggaggtgtttgaggtcgacttgtggccttgatatctttgctccctacggttgcgcctggctggatgatggaagtcctttagtcaattagatggcgaaggcctcagcttccgcggacaagttgttgcccgtcggactgaagacctcttcga

SEQ ID NO: 52001 - DNA, 376 bp, Zea Mays
gcaggagatagcaaattcctttagttctgatatgtcctcttcggagagttgttggccgcccaagtgtcgtaggtcgaaatttgcattttccgaagaggtttcttcaattttcttccccttatcagaaactgttgtggttgcatctttctccacaaccaaatccgatataagtctgtcaatttctgatagggtggttgtgagattttcatcttcggctgcggcggtagcttcgacatcagtagatttagtaactttgtctgccgaagctgagagaggggtctgttcaatggcttccagtatattcatcatacgtcgtttcttctggcccccgttttttccctcgacatccgaagagatttccctagtctgtaagagg

SEQ ID NO: 52002 - DNA, 622 bp, Zea Mays
atttcttttcactacacgtccacagtccacaaccatatggacatgtggcgaaggcacatatccgggagctagcgtgtcctcatagcagtgggggcgtgcattaatgtttgtgtccctgcggcggcgctacaacgcgtggctcggagcgcattctctctagtgttggccatggagccagcccggttcgggcacaacctgcaaggtgtcgggccggcacatcatgtctctcgtgtcggattagagcatgtctcgtgcctgggctttggcccacgcatggcatgcgggtcgtttttgggctgtgctggtccgaaaagcacgaccacgacctcatgttaggccagcccatggcccggtgatcacttgcgcaactgccaatcaaagcccggtgctggagaagacgataaccaccaagagcctggagaagacgacaatcagatagcaaggagccaaggacaacaaccgatggagggacagacggggacgatgtactcacataaccactgtcaccgagatctacacgacagatagtgagatggacaagggagaggcggccatggagtggaggttggcggcgacgggcgattcgaggtcactagagtcgacagtggcatcgagggggggc

SEQ ID NO: 52003 - DNA, 504 bp, Zea Mays
tgcgttgcgacggcacacaaatatagtgtccaaacttggcgaagacaatgcccatgtcatttgggtcagcccaagtccatgcgtcctaccagatgcgatgttggagatactgtgtttccgattcactgctataagcaatcagcatatgcaacaatcttaagaacacttaagagctttctatgttgtgacaaaccacctctcattggacgacaaacatataccaaagttacaaggctagagtttttttatgtttgtcatttcatatcttttaactcccgtggcaacccacatgcacatacctagtaaacatataagagtcattgtaatgttgttcagtttatgacctatgcaataaacataaaagagcaaccacaccgttgttcaaaagccaaacaccgtgaaacccgtccatcgaacaatccaaccacttggtccttcgtaacaggataacatgaactcaaatgcaaaatcaaattttaatggagtccagtatagctccctata

SEQ ID NO: 52004 - DNA, 311 bp, Zea Mays
tacgaaacgaaggctactgggaaggaacagtatcacaataattttggttgttacggcttcgtgcctcgctatgacatgagctatccagttccaacgtttcgaaagaggtggccaggagcctagatggaagaatggttttatgtgaagaataacttagttgaaagggaagatataaaagggattatccaacgctctatctggtctcgcttcggcatcagaagtctagccactgctcttgaaaatgaaatagaaacatgccagaggagttttaacactgtatgcaattttattgacacaagagacttggtcca

SEQ ID NO: 52005 - DNA, 1086 bp, Zea Mays
ggaagggcttcaccttggagagaggggggggggctagggttttgggtggtgtggctgcaatggtttgagggaggaggaaatgggagggggggcggcggccaagggtgtgggggaaatggagaagggcggctgcacaaggagagggggttagggaaagggtggctagggttaaggggagattagtgggccggatagaggttcacggcccaattcgcctacgcgacagctcccgaccccgtcgcaagcatctaaccaaagaaattccactatcctactggtgaatgtttttcttccaaaatttccaaatccccaaagcgcatcaaccgaatgggaaaaaaacaaaaacaacaaaaaaagaataacctccaacttctcttctttgcgaaccgggtatcacactctaccccccttaaaaagaattcgacctcgaattctgatgcttctatcggaacgacaaaaggaaagattaatgaatcaacaacacttacccacaccgaaaagttccggatatttttgccgcatcagctcctcaagttcccaagtagcctcacgctcagactgattagaccacacaaccttaacatacttgattgatctcttcctcaaaacacgctccgaggattccaagatacgcaccggacgacactccagagtcatatcctgctgcacagcaattggttccatcttgatctgatggtctggatcccgcaagaacttcctcaacatagagacatgaaataccgggtgtacccctaccatggaatccggtagttgcaagcgataagccaggctgcccactcgggccaagataatgaacggtccaatgtatctcgggctaagctttccggagacaccgaaccgaacaactcctttagtaggtgataccctgagaaggacttggtcccccactgcaaactccaaatcccgcctcctcacatcagcataactcttctgatggctctgagcggccaaaatattctgacggatttctcgaaccttctcagaagtctgctgaacccaatcaggaccaaccagggatctctctcccaaagtctcccagcatagaggggagatacaccgcctgcc

SEQ ID NO: 52006 - DNA, 606 bp, Zea Mays
cccgaaccaagtcatccccggcgacatcctcgggggctgggcatgtgtcaacaccatccttggggtccaagttctctgcgatagccacttctaaggctgatgggccctcagttacttccatgggaccaggacgatccaagtcagtctcccgaccctcgagattgcgctccaaggtcgacgaggcacgggatgacctcaacccagcatcaagcacatcagcacaaacctccatcacaccatcatccactcgctccgataacaaatcctctggaaccatatcctcaagagtctgatcaaagttggccagggacagttcttgcagaccaatgagagcagacaaagcaggagaaggaactccactactttcaccgctagcgatgaactgccgactgtttttccgagtcaaaggaacttcatcttcttcctcctcgtcgtccacattagcaacacaggcagcacccccattgggatcagcaacagatggagcacccacattgggatcagcagcggattgggtacacccattggggttagcatcagtaaactcagtcacaggcacttcttcaacagcaggagccgagataccaacgtcccgatccaaactgg

SEQ ID NO: 52007 - DNA, 337 bp, Zea Mays
aatcacgtagaaccaccgcgagggagagagagagtcgatcatatcgtcgcgatcaaccagagtaatagcgaggggagagggagagccgctgcggcaaactcgggtgattgacctccagtctacgccaggctgctgggggaggcgctaggatcaccaccgaacgaagaagggcccgagattccgaggatagttcgtcggcgtggaagcttcgccgccgcgccaccatctgcgtttgggagccttcttccactgacccgctctctggtaagacctccagatagtctctacttgttacaaggatggtgtagcgcatgtccgggggaggaatcgtgcaccc

SEQ ID NO: 52008 - DNA, 415 bp, Zea Mays
gtaattttcatatttaattcaagtgttccgttacgcacttcttcgcgcgacaattcattttatttcagttcagtctaagtgttatgtcgcgagcttcaccgcgcgacgactcattttattttcagcatagtttgtgcgagctgtcgcgcggcaactcatcccatttttcggtttagttcgtgtgtgccgtcgtgcgttttgccgtgcaacaatccttttaaatttaccttgaattgtttataataattaaacatatagcataactttgttctatgtatagtgtgattgtcaaattaataggattatgtttagatgagtactttaatctataaccgcttaacgtgatcgctcttcgaccgtagcctcgactgttgctttctctttctcgcttagtcgtaggtgcgagccctgcacc

SEQ ID NO: 52009 - DNA, 669 bp, Zea Mays
cgcgagtagtcactcatccaagcctgctcttgccttggtcagtgcacaaaacctcttccccttcctataagctactgattatgtgtgggtgtcaaaggatttggcctactggttccaaagatatggagctctcaagtagggtctgtctcacagcccaagcccgaggcaaatctttggttttgtcgtgtctagggtctggatcctaatgccatcttcagatatgtggtagaggggttaatttagcacttatttgctgatgggagctcacagttttggattagggatcatggtgaacgcgctcgagtttgggtgaggggctgaaattcagaattctattgaaagcctccaattgaatggcctatttgagggttttgaaaaattcttttgggcaaactctctgactgttttttgtagcttatttagtgtattacaactttcataattggctcaagtcaagataatatagttttcttggtctttattgagttttcttatcagtgctccattgccctctaggaaggattattagggttttggcattttctttctcccttacacttcatatggttaaggcatggttcctagggtcaaaaagacttgattacgttcttgcctctaaatttttgtgccttttactcaatttacttcacatgtgataatggtcacaag

SEQ ID NO: 52010 - DNA, 1533 bp, Zea Mays
ggaactttcagtttcagcatttctttttgttgctggtacatttccttcaccaatatcaagcaaccatttactgaattcagcaatttccttttttgtttcaatagatgtgctacttgagaggagcctcatgttttgagtcagacttataacagtaacagaaccccataaataagagttagagacagttgcatcaataatttgggagcgtgtgccaccttctataacaggcaatatttgtcgtgcatcacctccaagaactactacctttccaccaaaaggtgttttttcagcttgttcaaaatgtggagctagaaggtcactgaaagttttgtccaaagcctcaaaagcaaatctatgagtcattaaagcttcatcccaaataatcaatgaagttgatttgattaactcggctagcattgttcctcgtttaatgttgcaggtgatggtttcgtgtagttcacatggaattttaaaacgtgaatgtgcagtgcgtcctcctggaagcaaaagtgaggcaaccccagatgaagccacagttaaaacaattttctctcttgctcttagatgactaactatagcattccatagaaaggtttttcctgtgcctccatatctagaaacaaagtagaaaccagatttgttggaaaagacagtctgaacaattgtatcaaaagcattcctttgctgaatattgagctgggaaatgaggaattcagattcatccaaaaggttatcaatattatttggcatttcttcttcaattagacgatttggtgtccaagtctgtgctccactaaatcattgtggtagattgaaatcctctatattaccaccactcttgttaaataaagttgttaatttatctagcaaatgttccttgagttcattatctggcatttggtaattaggacaattaagtgccttgcgaaagttatactctatatcatcagctagaagcctccagactttttgaaagaattcatactcatcgctgacctggcaataaagaagcaaagtgacaaatagttgccgcagctggttgggacttgcccaagaagctgcttcatcaaaggcacttaaccattctttgtcatcatcaagaagtccacgtgctttgcatgcttctttaaatgaagagtagacaatgttgttataagttcgtagacattcatagctaaaggctcctttgactattaataacaacattctaaggtagtacctatcaccagccaatggatggacataatacaaacgccctatccttttctctcgactttttctaggaagccaagatctacttttgtcatcccacctccattttgttgggaaatcaggataagtgaggttcctagcatcaggattttgcaaatttgtggcaaaccattcagttaacatagttcttcgaaggtatgtttgtgaaagtacatcgaccatgttagctccagcactatatgtgatgtaattctcattgggtaggtgaacaggcattctttcaacagatggataatgtctgtgtatgtcatatctgagagc

SEQ ID NO: 52011 - DNA, 633 bp, Zea Mays
gttaatttggaaccagacttgacttattcagaacatcacattcgatttctagatcaaatggatataattactcgaaagaggactctcaagttttataaggtacagtggaaccaacacaccgaagaagaagctacctgggagactcgagacttcttagagaagaattttcctaagttttcagcttcttgtaacctgtaagatttatgtacttcattgtaaagttagaacaaaccccaccccaccccctgctctgtaagataaattaggaaataaagttgtgacgtgtttccttttccattacttaccctagagccttaaatctcgggacgagattcttttatggggggaaggatgtaacacccctggtgttacaagaactaaaacatgggcatggcatcatatgcattgacatttcattatgtatgtaacacctagaatgcatccactaggctaaaatttcaaaacaagggtgatgtgatgatttgaagtgatccttaaatcgtaggatagggtacttaaccaagggatcgaggtatgtgggtgtgtgtgtgataacaaattgattatgatctcagtgattaatggagatattcaaaggagactaaacttagagagtttgagtggcacgtaaac

SEQ ID NO: 52012 - DNA, 653 bp, Zea Mays
gaagatatcgctcttgtggaagtttatttttaaacctgagacttgttcgaaaacacataggatcatttttagatttcgagctttctctaagtcatggtccataaacaagatcgtatcatccgcatattgtaagatagataactcgtcatcaactaggtgtggaactacccctgcgatcataccaccacgcttagctccgttaactagtatagctaacatgtctgcaactatgttaaacaggagcgacgataaagggtcaccttgtcttagccctttaaaactttgaaagttactatagatgtaatcattcaccttaatgcctacatggcctttctgagttaacacatgaatccaattgtaccacttttcactaaaccctttcattcgtaatgtctgtctcataaaagaccaattgactttgtcatatgctgagagattaaatcctctactattcaattttgactatttaatctttttcaatcccctttggtccactcctaatgaacaagctctaaagaagaatcaatgcactacaagaactaccaaacaactgcctcatatgtcccataatatagaatacaagcacatacatttccaatatcttaaactatgattgtgagtgtaacttccaagatttggaacctgagtgaaaa

SEQ ID NO: 52013 - DNA, 587 bp, Zea Mays
acagtataagaaatcatcttcattgcttccgttaaaaaccaaggttcctttcggatatttcaactttcgcgcatagtgcctggcttccagaatttcttcttcggatagcttcttccccgaagcgtgtcgaatgatgtagtcaatatcttcgatcaaagcttcgggagcagaagtctcgatcttttcaggagcaatttgttctgtcatctcttcctcaggcgcggtaggcttcgccgaggcgggcgctgaaggcccagcttcagcttcagcctgagttttggtagcttcagcttcggcccgagttttcatagcttcgacttctacttgtccagtttcgacttcggcttgcgctttggcatcttcaacaattttctttttaggagcagggctcaaggcctttgtagtctctagcacaacatctagcatgttctccatccttctcctcctgggagtcgcggtagaagccttttgcaccttcgacagctttgcctctattgaagggctcagactttctgatattttcattatttcttcaatctatagcccttcggccttatcatctttagctttggctgactcaactgtag

SEQ ID NO: 52014 - DNA, 532 bp, Zea Mays
tgcacactgaggtcttccattggtaactgctcctcaggtaccctaaggcacttctttagctgggatacatggaatacatcatgtacatcagtcagattgtcaggtagctcgagttgataggccatctctccaacttgcctaaaactcagagtggtccattatagcgaggggatagtttgcccacaactttaaatctcctcattccacgaagtggtgaaaccttgaggtacacatgatttctttcctcaaaatccagtggtcttcttctattatccgcgtagctcttttgccaggttcgagccaccctcaaattctctcgaattatacgaacttgtttgtctgccccttgaataagttcaggccccaagaactgtctttctccagtctgatcccaatatagaggagtcatgtacttcctgtcgtatagagtctcgaacggtaacatcttcagactggcctggtaactattattatatgagaactcagcataaggtagactcttattccaactactaccatgctgaagggcaca

SEQ ID NO: 52015 - DNA, 410 bp, Zea Mays
ttacatgcacttgaagagcattcaaatccccattttataaagcattttgttgcataaagattcattacaatatcgtaacttcaatgttcatcccatcctgcaatcaaccatccaccaagtccatgatgaatcgttaccataaagtaacattttgaaagatcgtttattgcaccccacaatgaaccattcaccacatctgatagtgaaagttttgaaaacacattcatgacatcccacaatgaaccatctgccatgtccttggagaatgttttgaaaacacctctgttgcatccccactatggactattcgatgcatctcgcagaggactatcctcaacatctcatagaggaccatccatcgcatctcacattggacacatcaccaagtcatatggtgaagttttagagtt

SEQ ID NO: 52016 - DNA, 313 bp, Zea Mays
attgagcaaggcttcattcgatctgagcgaggaaaagacaaaggagcccaagaagaggaatacaatacgcctcgcgggcgaaaagacaaaaatacatttcattgttcttatagattctatgtatgtataaggattgtggtattgatgaaatttcatacgaatatgtacaatgtcatggttgtataaataggtgaacaatgcctatacatattacactttttttaactctcgtgattgtgcaatcttcgaagtgctccgccttcgaagctctatcattgtactcaccttcagacactcttcgcatattacgaag

SEQ ID NO: 52017 - DNA, 580 bp, Zea Mays
gggaaatgctatgccaaatatgagtttcctagttttcgacgggtcctacccaaaactatggaaactgtgttgcgaaacatattttgagttctattgtgttccagttgagatgtgggcgcgtgtggctgcaatgcattttgtgggctcggccatctattgggtccaatccatggaagctagaatctgagagatgagctaggaggctttaggtgttgcattgtgtacatggtttgggagggaccaacagagtttactgagtagtcagtttatcacatacaccagttatcctcagttactgaatacattgaacaatttgatcagtcagtgcaccaacttttggcacatgaaacccacttaacgtcagcaatgattactactagattcgtagatgggttaaaagatgagattaaaatggttgttgttattcaaaggcctctcaacttggatactgcatgctctcatgctatcttgcaagaagatgtgctcatgcacagtaggcgccgagatggccgaaggactgaattcagtggagcacctagatctgcacctgcccgaactacactgatgacattacctcttc

SEQ ID NO: 52018 - DNA, 372 bp, Zea Mays
gcgccgacctccttttccatacggctgatcagccaaccttgacttttgagttctcaatttctgatgaaacacaaacgaacacacactcatcacgttctttgcaatccttctccctcactatctctcatttttttgaaggaaaggcatgcttctgtgttggctacatgctactcatgtcaattcgagtagctagctctaggtcctgcaagctactcgcgtcaattcaagtagctagctctaggtcctgcaagctactcacatcaattcgagtagggagacactaccacctacgctgcgctgctacaatactactacatggctctttttaaagtcatttcaatactactgctgtcctaaaataataagttttct

SEQ ID NO: 52019 - DNA, 780 bp, Zea Mays
cccatgttttgttcctcatgagatcatgtaattcttctttcatagcctccttccaccttggattctgttttgcacatctccagtctttcggaacacacagtctgtagggatgcgatgaaggttctatatgcagacgacacatgacagtatgacatgtggttagctatattgtactcaaagccaaagcgagatggaggtttgccagcattgattctatgatccctacgttgtgcaaggggtaaatcaacatgttcaagagaaggtgcaatattacccattttaggtagaggcgaggagcttgatggagagagacttgaggagagatctaggagtggagatgcaggtgattgaggctctggctgcatgctttttcccccctaatttttataccgccttctttgatacactattactcatttctcattagtcttcatatgacctatccttacttctttatcatgattccctcctgtgtagtctcttggacatgggattgtcccaacgactaccacttcattgtcatcatgaacatcattcctttcctcggaaccattagtctctgaaatagtctcatccacaagagatgggattcttccaacaattgtctcttcttgtgtactattctctccttctttagaatcacttccaccctctctacaatcactttcattgactgaagagaactcatcaaagaagtgatcaagatcacacttgtttgagtagtatggttcaaactcacagaaagtcacatccatacttacaaataaccttcttctaata

SEQ ID NO: 52020 - DNA, 630 bp, Zea Mays
ccaggtgccgaaggtcaaaatccctctcgtccgaagaaatattatcaatttcttttccttcatctggcactatggccatgatttcctctgcagccttatttgtctctgcagtcacatctgcaactatatctgacacaagcctatcaatatctgacattgacacttcggcttcaccaacatctttggcttcgacagtatcttcagctttagcttcggcatccacaggaatcactattttgaccaccgaagctaagggcggtgtttgttcaattgcctgcataacatttacaaattgtcgtttcttttgctctttcactttctcctctttagccgaaggttggtctttcctctgtaaaaattttgtcagttctgatcccagaggacttagcagcttaaagggtgggaattcagtcattaccttcagaattttggctacttcgacgacagagggtgtcgaaggagcttcttctcctgtctcaccttcctttggctcagaagagagcactctgtcaagttttcgctttttagaaattgttgcctttggctctggtactgtttttgttttcttcaaaaaaatttcatcttcttttactagccgagcagctttcctatttaggatgctgacaatcc

SEQ ID NO: 52021 - DNA, 282 bp, Zea Mays
agctaggagataagcaggaaaagtgtgaacaacgtgtacgcgggaagtaccctacgatcgtgtatataaggccaagggagatctccatcactttcatctcattagcacctcgcaacttggtagacaccacttgtaaacacttccacatacaaagacaccctaggaagtagggtattacgctcctcaaagcggctcgaacctgctaaaactcgcttgactctctctctcgtgccctagcgcgaaccatcgagttataatccatgacaccgtcctacccaaaag

SEQ ID NO: 52022 - DNA, 544 bp, Zea Mays
acgttcggggcactgaccttcccggcaaccgacgccctcggcgaagccgtcgccctccgagcccttggggcagtcgcaccggaacgcctcctgccctgcgaccggcgtggtgacctgggtgcagttagcgtggctcgagcatcggcacggccccagcatccaccactccagctccatcgtggctagcagcagcgccggcgccggcgcgtccaagtagctcaccgccgacaccagcccggtgcattccgcggcgagcgcttgcatcctggttctgttgaggaaacggtcggggacgctggtcggccgtgtcagcacggggcagcggatggagtccgcagcggcgcggccgcactgggacgagttgtcgaggtaagcgctaggggggacgctgcagttacggatgtggtcggcctgggaggcggagctgcacgagctcacgacgagcccgttctggctgccgggcgcgtacgccttggtgaagagcgcctcgacggaggcgttgagccggcgcgagcagttcgggcgcagggtgaggaagagcgcg

SEQ ID NO: 52023 - DNA, 507 bp, Zea Mays
gaaagtttgctcaatgtggatgagtagatctattaggatgttccatagcagtggtttcctaaaaggttccaagaatcctccctccaaccattgggcttagagatggcatagctctttgaattatgtataatgtttcagcacgacttgaccttataagcatgaaatcgttcttcatggatggacaaacattagcatttttctctaagtatgagcaaaaacaccaagtcgccaacactgcacacacaatgaaggtttcgccaccattggaaagctacaatgctagtttaaccgaagtagtgaggtactttactggtactctggagtatgcctaaacagatcgacatgagtctgcaaaacctatgcagcttcgataagagaagcagcgcaggtgtgcccggcacagtcaatcaccaacagttcgataccgacaattctccaaaactacatgaaatgatgaactatgtgccaaaagtgtccgtcgtgccagccaccgacacggcgacagct

SEQ ID NO: 52024 - DNA, 502 bp, Zea Mays
gcatcattggtcatcgcggtggtgtccatcactggtgcaccatgtccctttgatccttctccagtgttgtcccgaccatgtgtagttgacgaaagagggggctccttagtgtctggcctcgtgggtggccgagctttgtggacgtcattggtggcagctcttccggtcgctgggaacactaggtagattaggacctctgagtaaatgtggcggttaggatttgtcggtgttacaacgtgttggtttccgtgccttagcttcccttttatattgtgttcctgtaactggaggtcgcaatccatggaaacaactcaccctcgatcaatgtacaattgagttggataaactccgacacagtcatcttgaccgagccatagaacaaccctaacaaagatgaccttatgtactaaaccaaacacaacctatacacataggtgttaggccatcaccacataaaaaaatcacacaaagaaggatgtgacagtgactaaactttagtttt

SEQ ID NO: 52025 - DNA, 645 bp, Zea Mays
aaattcccaatcctctgttgttggcttaaatgaagtacaaagtctttctttacttgcaaggcggtcaaatactatttgatactctagtgcagtgctaagcataatataagttgaattccatcttgtcttacaatctagagctatacttttatcatatttaacattcatttgagcagctgtgcgttcaaaacgctcatgtctttttggcgtggcacaccaaaatgcaacactatcacgtaccctttcaatgcctttatccataacagtcattccatctttcacaataagattaatgatgtgtgctgcacaacgcatgtgtaacaatttaccatctagcatgagggagacgaggggcaacttatcttgcatagaactcatcaaactatcattggtcgtgcaattatcaagagtcacagtcgacaccttcttttctattttccaatcttgtagtacctcataaaggacatcacttataacttcaccagtgtgtggggcgggcacatatatgaacctacaataacccaacatatcgatttaagcaacaccatcacaacaagattataagactacagtagagaacatgaaacgaaacaaaatattacctcaaaagaaaagatttcagcttccaattatcattgataaaat

SEQ ID NO: 52026 - DNA, 707 bp, Zea Mays
ggaaaacataaggactcttatgctaatatgtctagacgaaggggtatggacagatctcagccaccaaatcaagggtgaatggttcggattagctctcgagccgcaatcagcagggaacctcagataccggatcaacgatccgaggcccacgaccactaggatcgcccgatgaatgatcaagggtcatggttaaattgtcagctcagtgaaccgatatccaaggagcaccgcaatattctaatcgaatgacttagattttatgaagcccgatcaacactgggtcacacgatcatgatccaagggcgttggttgaatcatgctctaagggagaacaggatcaatccctaccgtccaaaacccgaaccacgatcgcaagtgtttcttctacccaattccccataatcgcggcagtgctagcgcacgcacgaggatgccatgaccgggcaactccgaccatgcccaccagcttacgaagcttggacctcatcactccgaatcgatgccctatccaaatcgaaccatctggacacaatagatttcggcacaagccttctgacccctacccccacggtgggcagcggtgttcgcacaccgacgaaccattcccgagtcgtaaacgtgctatcttctccaacgatcaaagctacacgatgctatagtgaggccgagtcgcaaggggagtgttggtcacttgttctcaaatgttg

SEQ ID NO: 52027 - DNA, 608 bp, Zea Mays
aacggagcaatcagcttaagtcggaaacgccttaagtcggtgcgacatgctcacgcttacatgacttagggtgatcactatgccctactaacggagcaatcagcataagtcggaaatgccttaagtcggtgcgacatgctcacgcttacatgacttagggtgatcactatgccctactaacggagcaatcggcttaagtcgaaaacgccttaagtcggtgcgacatgctcacgcttgcatgacttagggtgatcattattccctactaacaagagtaatcagtttaagtcggaaacaccctaagttggtgcgacttgctcatacgtacacaagttagggtgatcactataccctagtaacaaaatagccaacccaaatcgggagtacttcgaaaaaagaaatatctcacttacagggctaggacagttttttagcaccctgccgacagaacaatcagttcaaacataatagttacacgcatacagaactcacattacacgttttctctaaaagtgctaactcaatgaacaagtgtttttcaggcaaatcattgtgctggagtattcttgcaggaagcatcgtttgcaggagcagcgaaagaagatgga

SEQ ID NO: 52028 - DNA, 404 bp, Zea Mays
caggccaaaccaatattaactacatcgatcgagtcttatatcacccaacacttataatttattatctcaaatacaactatatcccagcatgtacttgggacacttcggttccacttacgcaatcactactacaacgcacttcggcacacatgtttaataactcacctttctaaattaacctatctcaccttccaacaccaattaaatgtcacttaatttacattttcacctaatttaacctacaccaacgatgaatacataaatataattatcctagaccaactcattagccgattgcggaaaccaccaagtatgctttacgctttatcaaatttaccacatctaacacactactttacgacggaatattctaacaacaattaatacatccgcgaccaatcccg

SEQ ID NO: 52029 - DNA, 1013 bp, Zea Mays
aaaagagtagaatacgaaagtatttgtagaatactcgatctcacctcttacttacccaagctctttcctgatctctaggactgtgatggtgtcggtgtgttagcttcgacagaggtggtagagcgatcgaaaggatctcaagtcgaacgtctcggttcaggtttttagtggagctataggaggctgaacaaggtgggctatggtactgtcaaccaagtgtgttgatgtgctaaaaagatatgaaattgttgctagaaagattctcaccaattcaatgtaaactgaaattttcagcaacacactgcaacacaatcccctttcaaaaaaaattcacttctttttttgacttctttctctctcttttttatatcactaacggggtgtagagatcaaatgcaatgacacaatatgattacgatggtggtaactagcaacttgaggaactcaaacgacacaaggtaacagtaccgccaaagggctataggttttttgtgtggctttggactgtaggacaaaaaaatataagatggatgaacactatgaaaactaagtggatgacagtaagacctaccgtgacaacgaaagctttgatactagatgatatgtaccgagttatattcagtacttgggtggcccgatctttatgatagtaggttgataaataggatggtgggatgtaaaagtaatgggataacaaggtaaatttgctgaagaacagtgggtaactgtctttatacctgatcaaggtcggaagtgaccaagcgacggggagagacatcgaaaccgtgtagacttcgactcaaaatccgaacgaccgcataaccacaaccagagctaatccacacaatgcgaggcagctgtactagaactcacaaggcatgaactagtggatcccagaggaatctcttcacaaggccaggagaacaaggaagaacaggggtagagtaaacactcagcaactcggctgcggtaatcacttggattatcaaatcatcaaaggttatcaaaagttg

SEQ ID NO: 52030 - DNA, 306 bp, Zea Mays
tcccagtaatgtgttgccttctatagttactgaggtcccgctcaagcttcagaaatccgatagtctttgataaagtattaacaatttttcttcggcgcggtcaaggatgcaccccaaaatctcttcgcccatgccgccaaagagcacatgtctggacttgtatctgccagcaatggcgaattctttcaattcagaaatatcttcatcggagagttcttggctgcctaggtgccgtaggtccaactctatgtcctctgcaaaagccttctttaactctttcatttttaaagccgaagccttatcaat

SEQ ID NO: 52031 - DNA, 429 bp, Zea Mays
ctagatccgaagagctccaacagcgcaaagtcgagtctcagaggaagcccaaagaccctccacagtccagccgcacttggacaaggccctcgcagacagactccggccgggacgaccgcaatcagcagcaggtgcacaacatcgccaaccagccccccgctggtgaggcccctcactgccaggagtatcccccctagggccgaggaaatggaactcgcgatcgaggacgggggcgtgcgcagcggccacgaagattttactgcctgttccacgacgaagactgtgcgcatcccacaaaggactgcccagagacgaaggccaccagagacagaatggcacgggcacaactagccgacaaccctagaattgtcgcgcacgcataccagcaaccccctcaaccatacaaccacggccccgctccgcctccac

SEQ ID NO: 52032 - DNA, 521 bp, Zea Mays
tctatctaaagtacacattcaagtattggatacaatttgatgagccaaatgatgactgtctagatgccatcgaagcaaccagtgaggaattgtttagtgcttactcgagggctgaagatgatgttacaacaacagccttcgggggtcaaggcaaaaagagactgaatagagtttttgatgtcatcgggtttgtatacccagattactgttatccttcgcgaaagcaaggaaagaaaagaaagactgctgcttcggcgatttctagcatgccgaagccaaaaaaagttaaggttttaacacaccaccccaagcgcgttgaaacggccgaagagccgaggcctattgaggggtcttctgtatctgagctaagttactcagctcctaccaaagctagggtggaaccgaccgaggagacagaattgaagaaagcaatggagtaaccaaaggctttgagtctgttgcaagaaacggatccaccgagagcatcaaagatttatgcagcaactccaaagaggagaatg

SEQ ID NO: 52033 - DNA, 397 bp, Zea Mays
caccaatcaccagatccgaatgggattgggggttagggtatcaccaatcaccagatccgaatgggattagggttagggttaggaacagggagacgtagggagggaggagagggagtcagggagcaccagagacgtcagaggtggcgcgccgtcggccgtcgacggtgggaggaccggaggaggcagcagggcgacggcgaggcacgggcagccgccgggagcacgaaaatcgccaagcacaaccggggggagtgagactcgggagtcaggagacggggcggcgacctgggcgagtccgcgagtgggaggggggatacggacgcgggttaggttttccatttttctgagatggggcgcgggccgttaacgggccgacctactttccgtgccgggccgg

SEQ ID NO: 52034 - DNA, 279 bp, Zea Mays
acacactcattagggagacattatacagaaggggtgcatcaggcgtcttcatgaagtgcattctctcatctaccgggaagcgacttctggatgaggtccatgctgggcaatgtggaatacacgcagcatccaagacactagtcgggaaggtcttcaggtcaggattctactggccaacagcgaagaatgacgcagccgagttagttcagaggtgcgaagcttgccaatacttgtcgaagcaacaacatctaccagcacagcaactgcagaccataccag

SEQ ID NO: 52035 - DNA, 387 bp, Zea Mays
ttactgtgtatatttaaattgctctaaatatttgtgttgcgttgagctccgtactcacgtcgagcgattaaaatgtatagtggatactcggacgcaccgatgaggctttgttattaattggctgagtttggcattggctaagcattagctgcgccctggcaacacgacgcagtatttgtgtcgtacgaacttggctgcgtcatgtgattgctatgtcgcactctcgtttaattaggccgctcccgttgagtcggactaccatcgccgaatcgcgtattttttgtatgccctgtaggcactgtctgtctgccgcgagccacaattgcgcctggtgcgcacgttgcgtggatttatcgtgtatcccaattaccgagcaataattttgcc

SEQ ID NO: 52036 - DNA, 625 bp, Zea Mays
cctttctgggtttcgcaaggcccagaggcaaaccaagataggtgaatggcatttctccaatctggcaattgagggtacgggataggatctccatcttgtcagaaggcacgtttatagggtacatatttgatttattatagttaaccttcaggccagtagaagaagcaaaagagttgaggattgccttgaggaagaaaagttgcttagggcaggcctccaaaatcaaaagagtgtcatctgcatactgaacaatcgggaaatcctggtcaccaatatccggtaaagggagcttaagaagattccatagcctagctttattaatgatgctctgaaggagatcagctgccaagacaaacaacagaggcgaaagagggtcaccctgtctaacacctctcttgcaatgaaagggcttaccaggaacaccattgagtaacaccgaagacgtgccagaaagaaggatgctccgaatccagttgatccatctaggaccgaaacctttgtgagtcagaacctggataatcagttcatgttcaacagtgtcaaaagccttttcgaagtccagcttgagcacaatgatctctttttttgaggagtggcataagtgaatgtattcaaaggcccaagc

SEQ ID NO: 52037 - DNA, 425 bp, Zea Mays
gttgttagcaaaaataataaaggaaaaaccctaaacagtaatgggccgatttcagcctaacgacgacccacaccggccgagcatgcgtgccgactgccaccagcggacgtgcgttcaccttgcacttgaccccctagggttcaccataattggaaccagcgaacgcactgttccagaaagtcagaaaacttcacaaaatttcccttgtcttctatgaaattcacaaactcacgtcccctcaccccaccgttcaccgaaacgcgcctaaagctttgggtatcgtagattacgactgcgacactaacaacctcgattataaagcatgtttccccaagacgacgacggagcctacccgaaggcatacggctgcccaggcccagtggcgtacccgcaaccgtatccaggaccatacggcggcaccacgg

SEQ ID NO: 52038 - DNA, 397 bp, Zea Mays
caaaatgtgccgcgaaggggtatggatggatctcagacgccggattagaaaccaagggcccagatgaacctcctacttaccgaactgctatgcgctcagagccgcccgatctagatccgatggctacaacgcggccccgaacaggtacgctagagtttaatctgagtcaccatgaccagatggatggtcccgatatcaccccccttttccccactctccttgttcaccgtccggcggcgcgacatgggtaacgacggtgccctcaccggtgattgcccacccagcgaaacaacgaagcatgcaggctgatgcatagcgtgatcgacagaggagggaaaggcgaacacggtcatccaggatttaccggcggttacgcagtgtagatcattgcccacgg

SEQ ID NO: 52039 - DNA, 454 bp, Zea Mays
gtccttggtgtatatggctcgcgtggggttgtgataaggctgatcccatctgtactcactctccattgattttgtctatttggggctgaacgtgatgtggagaaatgagtggagatgggtgcaggctatgcacacccaaagtttctacctagatctgctgctgctgttgtgtatctttccctttttcccgattagagatcgggtttgcgtcgaccaccgccagtcgactcgcacgtcctcgacatcggcttcaacaacaccagcttcctcatcttcttcgacggtgcaactggcatggcctgcggtgtaactagaacgcctgcctgtgtcgtgcctcttcgtctgcacgtccatttatgtcggctcgtcgtcgccaccaccgatcgggaggctccaccattgacatcaccatcgtcgtctccaccatgcacaccgtcggcctgatcaatcgatc

SEQ ID NO: 52040 - DNA, 1032 bp, Zea Mays
ggagggggacattatagatcaccatcctggcctccaacgctagggggcaagcacaggtgggcgagcaagtgctgcaaccagtttgtgaatcgtgggtggtccaccacgtagacggggatggaccaagacctcgttgaacggtctaaatgggtctagaggatggtccagcagtacctaggagcagtgacgaccacataccttcaagccacgatgaccataattaggtacgtggaagaccaatacatctaaagcatcaggtcggctagtcatagccgacccaacctttgatcagttactatccaaatatgtgaaaaataaggttggtcccagcaagcggctagcaaaacgatctcattcacctccccatgagagacgggcatgatctattgagctgcctaataatcatacccaattaatacccaatgtacctacatggacacctccacccccatatccacttgtgtcgtatcaatatgcatacataccaccaccctatgtcccaaatcagatgtggcacatgacacaatatccatatgggatatcatagtaccccacttgggggcaccccaaatttctgtatttgacaggttggcaccaccagtgcaggaccgattgcgttcgccttaatctagtcaccagacacaggtccaacaaggatggcagactactcggccacaaatgctgaccaatttagcagggggcatggagagaaaatatccacaagcgctaagagaacaacaaaagactatcatcaacataggcacatcagatgtcgtcatacaaggtaacaatgaaggatcgatgatctttggtaaatcagccaaaacagacgaagggagagacacatgagcaacaagtaaaatagttgacccaaaatactccatggcccgatggtgcccgtcgggactaacaaaatctcaaaagaacgaattgcaacacttaagagcaaaaaagaagggaaaaggatacacatctgcagtacccaccaccacaaaaaaggtggaaaccaaaggccaccgaagcaactcaagc

SEQ ID NO: 52041 - DNA, 930 bp, Zea Mays
ttcaataataccatgagtcttgttgaaaactctataagccttgctatttgatgaatatccaagtagaaaaccctcatcgcatttcttctcaaatttagagagtcggcttccctttctcaaaatgtagcatttgcaaccgaatactctaaaatatgagatatttggctttctaccaatgagcaattcatagggagttttcttcaagagcttgtgacaatatagcctatttgatgagtgacatgcggtgtttatggctttggcccaataagaatctgacacattatattccgctatcatagacctagccatatcaatgagagtcctattctttcttcttttcaacaataccattttgtttcagagtatatttggaagaaaattcatgtttaatacccttgtcatcacaatattcatcaattctagcatttttgaattccgacccattatcacttctaactttcttgatatcaaaatcaaattgattttgagccaatatagcaaatgacttgaatgtttcaaacacattagatttatcccgaagaaaataaacccaagtgaatctagaataatcatccacaatcacaaggcaataggaattaccgccaatactcacaaaagatgttggtccaaataagtccatgtggagtaattccaaaggccgatgagtagacatttgactcttatttggatgagtattcgccacttgcttcccggcttcacaagagctacacaatttgttcttctcaaatttcacatctttcaagccacagactaagtcatgtttggttaaacgattgagttgcttcattccaacatgaccaagtcttctatgccataaccaacctagtgaagcctttgagaataagcaagttgtgagctttgcctcactggatgagaaatcaacaagataaagattttcatatctaaagc

SEQ ID NO: 52042 - DNA, 501 bp, Zea Mays
cgacatttgatcgtacacctggtgtgcggagtacgcaatagtggtgaaaagtatattttagagaggaaaaactccaaaaggagacaatacatgcaatacagaaggtttagggcacacacacgagcacatatagagatcacaatagccacaaaaaaatgaagattttggaagttttccttgggaggatcacattcaaagggggcagtgaagttgtgaggtcaaaggcacatgagagggaggcgcaacaaaagcattgtgcggtcgcctaagtcagagattgtggttagcacaatgaggatacgacggcgtaccaaagtggcaaagaggagatggcgcacgacggctagggcactagagactgagtgcgtgagcgagaggtagaagacaattgggaaagtgagactggcacgtgggactgagcgatggagtgagttaaaactgcacgagttatgggcacactggaccggttcgaaggcacactggaccggtcatagtgacaag

SEQ ID NO: 52043 - DNA, 710 bp, Zea Mays
ttcacatcctggtttttctcatacccaagcttttctatgaagtcaacaaactacaccggagaccatgtatcaacctcaacgtcatcaatccaagatacttttccatcaacataaatcctcagagcaccatgaccaagaaagaacccaccatggtgaatctccaacatgaactcatcatccacgatacctgaaccaaaaatattgtgtcactgttctatcatctccatcaaaaacaaaaccgccctaattcctaacaaatgtggcgaaatcaaaattttaacttgacaaagaggtgaactttacactaccatcacgacctagatgccagaaatcaccaacaattcaaaccaaacgaccaatattagaggtgaattcacgtactttacgatgacgtaggggctgcttttaggcacagtcacggatccattcttgagtcttcgacctcaccaaacgtcctagatcatctaatgttggcggctgattgatttcttgttactccagctctcttagttccttagcattcgacggcgacaagagtcaccatagtcacccatgtcgtcagcccggacgagaaggtgaagcgactcgagagtgatttgggaggagcaaatgggtacaaggagatgtgggttcacatatttccaaaatgaaccggtctgccacatcaccagttggcttgtggtggaacaacaaatcaacagttagaccga

SEQ ID NO: 52044 - DNA, 425 bp, Zea Mays
ctgacccgtttaggcaaacacgaaaagacccattaacaggcaccgaaaaggcccattctccactacattgtacactagccgccatgtgttcacggcttcacgccttcacggaccataggttgaaatcatgttgactggtcgtgcgggaggtaggaggagctaagcgtccgctcttcaagaccgacgagacgcgagcacgatagcggtccccactcaagccagtggcaagtcggtataattctaatctcagtgacctgctattgctttagatgtaactttagtatattttagagtatgggtacattttagagattggtgtttgttgaacatcagtggcattttagagtttaaatatatggttaaaatatagagtagttaataaaacaaagttagaaatatagagtagttaataaagaaagcaatag

SEQ ID NO: 52045 - DNA, 604 bp, Zea Mays
gatcaaagataagctatgcaatatcattgttgataatggtagctgcaacaacattgctaaccaagaattggtggacagattggaattaaaatcaaggcatcatcctagtccatataagatgaagtggcttaatgattgtggagcgttacgtgttagccacatggtaaatgttcctttttctgttgcgaagtacaatgttcatgtggaatgtgatgtggtccctatgcaagcatgtcaattgctgctaggccgaccttggttatatgattgtgatgtccagatttttggaagaatcaacaagttgtctttcttgtacaaaggggagcgaatctctttgcttccttcgacaccgaagaaaatttgaaggatgatctaaagaagaaacagcgagaaagcgagaaccactagaaagtgatccacaaaaatagtaaggaagagtgtccaaagccaaataaaacttcacagccttcaatgtccaagacaccgggaaaagagggattagtcatgatgactaggaagggagatctaaaagaattgagtgaacctaatgccatgttgtttgtgctcctgtataaggacacccttctttctacaaacaacttac

SEQ ID NO: 52046 - DNA, 481 bp, Zea Mays
caggacactttgcgtcaggcacaatcttcatgccccaccacacctacagcgcaccatagtcgcagcatgccatcacccgtgaatgaggccgaatgcctttcggcccctgtaaagccagaaaaaatacaggtcgctgagcttgtttggcctcctaaggctaaatctgctgctcgctctcccctgcattcgacacaaaaagggaaagctaagttcacatttaatgttgctaagtgtgataaaatatttgatgaactttttaagaatggcaacattaaattgtcgcacacaattcctccgctagaggaattgaaaaagtgtgtatattataaatggcatggttcctttcttcataacaccaatgattgtaatatcttccatcaacaaatacaatcggctgtagatgaaggccgattgagatttcaaaaaatgaagattgacagacgatctgtccctgtcgacacattaggaccagtagacaaga

SEQ ID NO: 52047 - DNA, 527 bp, Zea Mays
gtttgctcgaacctcgaatcggtctcgtgttcttgatcaagtacgtgctcgccttagtcgtctgagccaacaccactgtactttgagaaggtttttaaactccctccatagctgtttgcctcagatgttgttcctccctccctcgagaaacgagagcaagtggccgcgggcgatcgccggcctgcacgcgcacggtcacgccccaagagtctacgcgctttgcttgatcgcaacagtacgtgtagtgctgccagtgccactgccaggagatggcagctcagaagcttccgagtgcagccagcagccactgcatgctattgcttcgtggacactgtagacaaatttaattacccgtggctgcatcggcgaatacaaatttaattcaccgctgctgctctcgaggaagtcgatcgagatcccaaatcaattgtttttttttcacatccccggagcaacatccatggctagctcttcctagattgcagagaagccggcctgcgcatcggggcggctgctcggcgagcttt

SEQ ID NO: 52048 - DNA, 466 bp, Zea Mays
aacgaagtgaatcggcgacacaaatacggtggaggagatgaaggcgacagcggtggaggactggccgatgtatggaggggaagcatgactggccgattttggaatcgatgcggtggagaagatgaaggcgatgacatcgaatttgtctagggttccgccgccgcatgtgtgcgggtgagataacctaggaaggttgtgtgcgtgcgggtgagatcgtgggcccgatgcacatattgcggaactaaatcttctcgatggcccatagaccgacacatgcattactgttgcgtaaactaaaacataaaaaccgtaactccaatattatgtggggactagtacagatgcctagattacgggagcataatcttctcgtgggcccagaaagccgaatcgggcaaaaactatatttgcataaactgaaacacacatcatcgtaactcatatgttaatttggtgtaagtaatcg

SEQ ID NO: 52049 - DNA, 494 bp, Zea Mays
ggaggagcaccaaacagggagtggatgtaggagggtataatatggagcaacaaatggaagaggagcaccgtatgatccataaggaggagcatcatatggataccaatatgggcatgaaggaatgtatgtataagagaaaggttgagagggagcgttgatgatagaagctttagtggtaggaggaacgttgatggtaggaactttagtaataggaggagaagcatcgatggtaggattttcattggtaggacaaggagcatccatggatgatcgttgtggatacaaagggggaggatatggatatagaaacaaagtttgtagactcggcgaacgtggatgaacaggaacatcctcctaatgatgatggacgagagaaagacaatcaaggaagacctgcccctacactctacaaagccaatataaatctaacgcaatgttccaatgtcaatctaacacaatatttcgtcgcacacaatttcacgcatagcattctc

SEQ ID NO: 52050 - DNA, 512 bp, Zea Mays
gttagagcagattttagtgttagagttttatatttcaaaatacaactccatttaaaactctcgttgaagatgttctaatattaatagaggctattgtgttttgccctcggacgtcaaaattcaactttgtgatttcatgactcctttttaaaaacgaagaacaagttggacctgtttagttagaggcatttgattgcgtaaaatacaagggcgaaattataattatagaatagccagattcataagcaggggcaaaatcacagctacaaacgtttggtttctcgtaaaatatgttcatttattcattttgacaccgcgagcgcacaaacgagctgcgaaaagagcatgcacgggacacgttcacacgtacgcaggttggttggttggtgagcaggtcgggtccaggtccaggtccaggcccaggcccagcctctggatcgatcaccaactccctccatgcatcatggttcatggaggacctgccaccgccacggcgtcacatgctgctcgtg

SEQ ID NO: 52051 - DNA, 431 bp, Zea Mays
gcactccgcactaatcatcgttggagcacccgcacaaaggtgttgtcccccttgctccgtgcaaggattaagtacaatctattagtatgttcttcaccgctctagcacggtgaactactcacaatcgtgtataagtcataaattgggtcacccacaaactttcccggtgatcaccatactcttgttcaccactgaactatctagttgacattgatcatcaataataataagcaacctctcacttgactctaccaatcttaattgtgcacaatgataagaccactaaccaaatttaaactctcaagtccatcactagacaaagactctttctcacatttcaatttggttgtttaagctattacatttggcaataacactattatgagccggttgatgggatatttatagctcctaatcggccaactagccat

SEQ ID NO: 52052 - DNA, 447 bp, Zea Mays
atctaacctaaactaatttaatctagtcatatccaacctaatctagatcccatctaatctaatatgatctaatctagagtgaattacttaatgttggtacagtggattaggccatactcctaactcagttaagcctaaattggtgacttagatcaatacgactatatacaactacctagcccacataggttgcataatctatatattccaatctaaaagcaaagattctctcttagtttaaaggatttatctagtcctaatgagtatgcttatcccatcctagaataacaaacatgatctaacccaaatttacctagatctcaaatgtccaaactaatctagatccaatgtctaatctaatatgatccaatctaaagtgagttattaacatgttagttaatctggtgatatgggttagacactgcttctacaaacatatcttaacct

SEQ ID NO: 52053 - DNA, 317 bp, Zea Mays
cagcttcttcctcgatctagtgtggtggctgccatctcccaagctcctctttcccacccgcgccaaagctcgtattccgcacgccacttccatcctgcccttgcgaatccatatctctgctcatcaatccccttcaacatcggtgaagatggagccagccaaagaaacccacagaggcacgacgccacgccaacaagattctctagtggcatatgtgccctcggctcgactacgatctaatcctccgagtttgcgaaggggcatggcggagctagtgccactcgaacaatccgttggagccatgctttctcgcagac

SEQ ID NO: 52054 - DNA, 1202 bp, Zea Mays
ttctatcttgactgtgtcgtcttcaaattctctttgataatctgcacttgcttttctgcttcttggagaattcctggaccaaatacttgactttcttcagtctaattccaataaagcgatgttctaaactttcgtgcatacagtgcttcaaatggtgccatttttagacttacttggtaactattgttatacgagaactctgcataaggcaaacttttatcccagcttctaccatgctttagagcgcaagctcttagcatatcttccaacacttggtttgttctttctgtttgcccatccgtttgtggatgataagctgaactaaagtttagcttggtatccatggactcatgtagtcttttccaaaagcgtgaggtaaattgggttcctcgatccgatacgatgttctttggtactccatgtagacaaacaattcttgacatgtataactctgctaactaggctcccgagtaagttgtcttcacaggtataaagtgtgccactttagtcaacctgtctactatgacccatattgaatcatagccatcccgagtacgaggtagtccaactatgaaatccataccgatttctccccatttccattccggtaccttgagaggttgtagtaatcctgctggtctttggtgttcggctttaactcgttgacatacgtcacatagtgcaacatgagtggccacatctcttttcaaaccgtaccaccaatacttttcctttagatcctggtacatctttgtacttccagggtgaatagattaagctgaatcatgagcttctcttaaaataagttggcgtaggtgttcaatttctggtacgcagattctatttttaaaccatattgtgccttgttcatcttctgtgaattctggggctttacccaacccagtcaaaattttaatttccttaattttctcatcagattccagtcctttacgaatctcttgttccaaagtagattcaacttccataactgttgcttccatattattgagcataccaaggttgagttgttccatttcccagcacaattcctgtgacatcaaatgagtagtgatgttgttcacctaacttttacagctcaaagcatcagccactacattttcttttcctgggtgatattgtatttccaaatcatagtctttgattaactcaagccatcttctctgtcttaggttgagttcttt

SEQ ID NO: 52055 - DNA, 499 bp, Zea Mays
tatggcactactaagagtagaacttttggagatgttcaatgttccatgagttcctagtcgaagtaccgcccatctaagatagccgatgtgaacctagccgagtaaccgtgacaatgtagggtcctgcctagggcgacaacagcttatgacatccttctcctgacagtattcagcgaagcaccagatcgccgactggaaatgatttgaagcgaactactctatcgtggtagcgcttaagggtttgctaatatctagccgattgaatcaccatgttcaaccattcttcctccagtgtgtcgatttcttcaagacgagttgctttttcttctgctacatccttgaacattagcctcgacgccccaaatgataaatccataggtaacactgcgtctgagccatacaccatgaagaatggagtgttgccctacaacgctcggctaggttgagttctaatactctagacgacgtatggtagttctctgatccactttcaagcaag

SEQ ID NO: 52056 - DNA, 596 bp, Zea Mays
cacctacaatatgacttgcttatttagttcaaacctatgttttctttgaaaacaaaatacatggaatttacctactatgaaaggtattattagagatagacaaaagatattatcataagtggttgtggtgtatacctttatagcttggtctctgttaattatgaaatatagaggcaagctacaatgtgcgcctctattaattagaagaaagaaaaaggtcattgttgatcccatcctaatcccaagtgcaccactaaattaactcttaagcccatcatgaagatccccattaggacccaatgccaagcctaaatatcccctctccttcaagcatcctcttcttaggtggtgacagatctagattcactccacaacagattaggcatcatatggttgtgtcatcactggatctaggctcctcctcattcttgctaagggagcaatcaatgtcatcgatgacgtccataataataggcttgggagttggtgggcatcatggtgaactccaagtcatagatgttggaccagaattatggacatggctatgataaggttgggtgcaatcaacatgcacataatatcgtcctcgattgagg

SEQ ID NO: 52057 - DNA, 599 bp, Zea Mays
gccaaaggcccaaaaaacatacaagagaaggacgcactcacacagaacaaactagaaacaccaccctagaaaacttcaccccctccctaactgggatcaaaaacagtgtgcatgctcttggctcctgctgagagccaaagctgcagctcaacattgaattcttccaataaggaggagaggcaaggcctagcaccatcaaacacacacctattcctatgcttccaaaggctccaagctcccagccagagagaacatatttaataagagtggttctcccagataggtttaacagatcagctttccaaccttggagtttagaagcaatattatcaatccagggcaccagatccccagtattaagccttttgttgcttagagggagaccaagataggttgtaggaaaacatttagaagcacaacccagggtttggacagtcaactcaactctttcattatcacatcgaatcgggcaggagaagctcttgtgcaaattagtttgtagacctgaagcaacaccaaaacccctcaatatttccttgacaacctcaaggtcttcaagatcaggctcttgtgatgatgcaagacatcctgggctcctg

SEQ ID NO: 52058 - DNA, 464 bp, Zea Mays
ctcatcctccaactttaaagttttgtcattactttctttaaaagatttcttgaacttagtgcggtcttcatgtagctcacaagccaaagtactcagtatttcctctttctcctatgcctggtgctgaagctcgataacctccgatcgcaaattcctaaaggttattcgagtgctctcgtcttcgatatccttcttgcacttcaaagcattgctcaagatgagtacctacatttaaaaaattagtcaatcaagtaatattcatgaaaaatagtacgtgaaaattatgtaccaacctttaaattgttgtatgcaaggcaatctgcaagttgatccttcgcattgtagatagcccacattcaagcttcaggtaacccatcttatccgtcatttcacgacatacttcaatttccctactatctagaagatagtagagatagtcatcctcatcattgccaccatatacg

SEQ ID NO: 52059 - DNA, 643 bp, Zea Mays
aactcaaattctttggcaggcgcttcggaagcaagagacttggacttctcaggggcaccttctttttccaaaattagtggtgcagtctccgaaggtcttgcttcggcaaaaattgagggtgcagcctcagaaacagcttgcgcagtgccagtttcgtcagatttctttaaaatttcgccttccaagctaggaacttcagcagaagcaggagttgatgccttcacaaattccatgacagcgtctagcacgctgtccattctcctcttcctcagagttgttgcagggatccttgacgccttcggcaattccatctcacgtggtggactcagggccttcagctactctaccgccttcttcagttttggctcttcagtcggtcttgtcttagcttcggtaggcacagagcgacttggctcagatatagaagcagacccttcaactagcttcggcacttcaactgtttcaatgcgcttgggccgatgagtcaaaactttaaccttctttgacttcggcgcgctagaagtcaccgaagtagcagtctttcttttctttccttgcttttgtgaaggataacagtaacctggatatacgaatccaatgacatcaaacaccttgttcagccttttcttgcctcgagccccga

SEQ ID NO: 52060 - DNA, 732 bp, Zea Mays
cctaagaatagaaaagcttgagaggacaactagggcgaccatgcatgcatactaactaaaaatgaccataatccgtcaccttgcattagccggctgatttttgttattttaagctatcttagcaaatttaattaatttagcattaaatactagagacacttcaaattaagtttagaactcgttgtaaaaaatgacaatgtttgcttaagtggatctctggttataatcaatgcaattagttgttgtccaaagtaaaaatatatttgaccctatcagaaaacccatgtttaacaaagttgtaccctaaaacctaaggaatagtctggtaaaaagttttagtagttttgggttcatagttttcgagttatagccttttcttcccgcacttaggaacttgtcttctatttttttcttcttttctagccacaccactgcctttttacttttgtcagatgttcgaccctacgtgtgggatagtggttgagtagggacctatccattccaactatctgggatggaaaggtttttccactgtcctatggggaggtactaaggtgggcaggttatgtcctacggccccactataccgcgttggagtttacggagcaccatgtgcctcggtgccacgtgcagcttacgctagcacccacccgcagcaaccgaattgaccgtcccttgacgttgagaccatagggttttgccattatgacactttgcaggccacaaccttgc

SEQ ID NO: 52061 - DNA, 559 bp, Zea Mays
ccgtgtccgcaggtgggtgatggcttgttgcagtagaatacggagtagcctggtatgcctgttgtgcgtagaggcgtataggcggagccgttcagattccctccgccttagtaacgcatgagtaatcagcgggagtcatgatgactgcagtgcatgcagcattgataggaaacggcgagtaatggtgagttattgtccttgctatggtaacgtgtgagtaactgcatggcccacgcagcgtggactcggcacgccgcctgtcaccggaatggacaggcacacgtcttatccgtaatgaatgcaaagacgcgcatagcccagaggcttcatgccaggttctgcccgttggcttacgccgcgtgtagtaggccacgtggcaccatctggtctccgcctgggctgggagcaggactgtatgtgataaggtccggatcccaccagatcaggtatggacacgtgttggcaccggacccccgcctgggtcctgattaaggccgggtatgttctgtcctggaaccctgggaccccactgtgggcggcccggaccccatacaggggg

SEQ ID NO: 52062 - DNA, 577 bp, Zea Mays
tgcgggttgaattttgggtggtactgggggaagggtgtgtggaggtcttcatagcgagggggtattggtattagtaattatgggctatggccctttagttgttttagggcaccaccctggccatgcgacccttggcctccttggttactgggcaatcctttatggaatgcccgatgtcttcgccatggaaatcacaatagagttttctctgatgttggggcctctgcctcgatcgtgacctcttcctgcaccacaacctcgttcatgttgtggagggttgaactgactgtgagggggcctcgattgactgttgcgggtaggcaatgttgtgtatttgcagctattgagtggggtcttgatgcgtgtggttgtagtgttggcctctagcccatggcttactagagtgtggagtgtctttatgtttatgttgagcctctagtttcctgaaatgtagttccttcgaccatgcatacttctcgaacaattgatacaactcgtaaagagttgtcgaggggtctcttatgcaatggttgtagagctgaccgatgcggagcccattgactacctaatggattgc

SEQ ID NO: 52063 - DNA, 271 bp, Zea Mays
caacaacctcttttcctttgtcaggcactgcggccatgttttcttctacagtcgcaactgtctcttctgcaaccatatctgatatgagcttgtcaattcctgacattatgctcacaagtttagtagcttcggcagcggcttcggcttcggcacttgcagcaggcaccattctagacgccgaggctaaaggcgatgttcgctcaatagcttgcattacgttgacaattctccgtttcttttgaccttcagccttctcctttgcggccgaagg

SEQ ID NO: 52064 - DNA, 756 bp, Zea Mays
ggatcaacgaaaagttgattccatgattattaggttatgcatgcatcatgtttaaactacactaaataaattttccctcttatggagatatggcgtgaaccaagaccacccagcgcaaatcaaccggacctcatggtgtaccccgacatcaactggctcatagatatgagtggagcaacagtggaagcaacgacccaataggggatttggaggctagagtggagcgactcaggtctgaactacaccacgggagtagggagtgtgcgcgtgatagctgcctcattgttgaactatcagcataagttaatcgcctgcagcagaaaattgcgaaacgcgatacgaccattgactgggtcgtaaattcgcgttctttcacctaggattttgaagccaaagttgtagcccgggtagtagaactcttagcgcatccctagaaaacctacaagcatattacaacaccctgcatgaaaaggtgcatgtattgtatgaccggctgcatccgaacgtgccaccagaagttgcaacaatgtgagctggaccatctggaacagctaatggaggatctgatggggggttggacctttttggagcccctccttccatgaacctcgcagatgaacggtctcctaaagtgggcagtggagcagctaaggatgaagagaattagagtagtatagtttaaataatgtccttatgtaaaataaataaggaagtcgagttgtattactgagtatgtataattattacagttcagca

SEQ ID NO: 52065 - DNA, 694 bp, Zea Mays
ccggtcaatggcctataaattgcgctcgggtttggtttcttcgccacatcacacacctcagtgcttaagcaattgactcagtttcacctgaaaccgtgggcagtacacaaattttcccctcccgtgttcttagctccgccgtgaagaacccctttcgtggccagcgctcttcgggtcagtatttatcaaattacttcttgttctagtttgcttttgatctccaattgctctcaatgccaaccaattgaaattcggccgaagcccatcactggaacgcacacttgctctgtaaaacgccgccatgactaccccctctgtcgacccactctttgattcctattttgccaaaatccaagtgagtacctaacctctggtgaacccgtgaacctttccccagcctcaatttggttgtccacaccgtggtttggtcggaatgcgttcatccccatgcccattcgcctggtcaccgtagactgatcgattcaatgcccccttgatgaaattgatgaaggggaagtgcggcgaggtctgttcatcgtcgtggaccttagtctgtaaagggatggaaggtggaggtcctctttgtaaaccgtcagtgactcatctcaatagtgtgttgaccttgcttcgggatattcaaaatgacagggatctcaatgcaaagttggcgcgggcgcgcttcagctcattattg

SEQ ID NO: 52066 - DNA, 532 bp, Zea Mays
ggttaatcggaccctagtgaccaagatttcttctgaccacggcggcggcggtcatgatgaaccggcgacggtgtccccaagttctaggtgtggtagagttcaattgaggagcatgggtagaatcagtgactcaccccaaccacggtgctcacgcgattttgctcgggcatccactgaggcagtcggtcgacggagagctaagacacgtggcattgcccgacggcgagaccatcgtttcggtgaactacaagcgatagagttcaaaaggaagactcggtgagcatcacggatacacagggatcacgaaacacgagcaaggcggacaagttaccccttagaaagagctagccgcggtgaagggccaaaacgaccggcatggtcaccagacatagggaggacttcgcgcacagacttggacaaagcaacaagatgaccgaggtggctggggggttaacacggacgtaaagaatagtgaacaagccattggagcaatgggagcacggacatagcaaggttcagtttgtacccaact

SEQ ID NO: 52067 - DNA, 342 bp, Zea Mays
atctaggacctcatttggactgtggctattaattcagaagagcttagggttcaaaatataatttttcagggccctgctgtaactattctaacacttctatggactgctggttctttccccggaaactgagggactcttaagcaaacctgcatccgcgaatggatacaggggatttccaaccgttagatctagtgcatatggtacagattaaattgggtccttaccgaatcggtatgctgggtggccgttggatccacaatccaaggcctagatctaatgaacccgcgatcaacttctaccgcacatcacgcgatctatggctctgctccaacgaaacccatc

SEQ ID NO: 52068 - DNA, 562 bp, Zea Mays
tcaaaacgttacgcggtgccaaagacttcgcttggggcccagaacaagctactgccttcgagtctctgaagcaatatctatccgaccttgcaacattatcaagtctagacctagcactacccctagtactatacatcgcagcttcacccagtgcggtcagcgcagccttagtccaagaaaagaccagagagggaaagactcaccaatgcccagtatattttgtctctgaagtcctcacaagctcaaagtgcaacatgactgtcggtaccctaaatcaagggtacccctctcctacagcatgaagacaccgcacccatgcaacgtctcctagccacacgaaggaccgcgcctgaccccaccggatgggcaggccaaagggtgtcacgtggcaaagaaagacgccacacctcagtaagtccggacccccatagaaggacaccagacccctatatacatacaagtccggagccttcgggtaagaccgaactccagcagggtcccagaacgagaaggaccctggtgtgtgcaggggtccggtgctgacacgtgtgcgggccttgcc

SEQ ID NO: 52069 - DNA, 357 bp, Zea Mays
caaaatcagtctcaaatattatggctgatgtgcttttgttcggttcgtttacatcttgttttggtctaaatcttagaacacagatgtatacaagtttttgcatcagaagaaatatcttctcagatgtttttttacagccgatcctatcctcccaaccgttctctttcctctgatttttacactggtcattctcatccgctcgggctgctgggaagacaaaaaaatctggccgccggtggccgtgctcatcttccacgcgagcctctgctctctgatcttttccagccgcccaggacatgacttatcttctccacagcgcccagccgagcggctctcttccatcagctggaagttttc

SEQ ID NO: 52070 - DNA, 340 bp, Zea Mays
ccgaaggccgaaggtggaaattgatggcaatgtcgaagcatgtcagagggcttttagcactgtttgtgccttcattggcacaagggatttgattcaagagcatatatccttcagggtatggccacttgtggaaagctgggatatgccaaaggagaccaccactgattctagtgatagtggtctggtccagatgaagtatatcttcagatttagggagaagtttgatgaaccaaacaacgactggcggaagtgtatcgaagctaccagtgatgagttacttggggcctactctaaggtcgaagataatgctttgtctgcagccttcgggggctgggagaag

SEQ ID NO: 52071 - DNA, 393 bp, Zea Mays
ctcctccagtcacagcacaggttcgcgttccatccccattccccctcgatggctccgtagccagggtctctgtttctcggcctgtcattcgccgcgaggggatcgtccctactccctaaccctctatccatacctgtgtttctcgcggaatcgatggcgcatccatctcctgcggatctcgcagaatttttggatctttctttgttctacattatacgcagttttgcgtcatcagcatgttcttgcatgtttctacatttctttttccttatcctggctgttctctccggatagacgtttcatccttgtcatctaaaaccttaacctgaaacaggagtataataagttcgagtttagagactattcgacttgacattttggagagagctctcg

SEQ ID NO: 52072 - DNA, 641 bp, Zea Mays
cgggaatttagaagaagtagaaaaaaaatacggtgcacaaaaacgagaagaagagaggtagaggaaaattgggataaagatgcattaggttttgcgtgtcatttttttcacccttgcagctttaattcgactgcaggtatgacttctatagtattttgtttttattgaattgcagctgcatcaggtatggttgcagcaggacagtcagacggctatcagattcagtgcgcaattatctcccaaaaacatgacttcttgtttagctcgccttggaattccgggcgcaattgacagcaaactagcatccgatgcccttcactcacgataaatggggttaggcagctcagcagccacagcccacagctcgtcgatgccatcaagatgaatgaaagcgacgtggccgtggcacagttaacccaggtcctgaccaggatattatgtgaaaaacagaccttgacaacgcgcgtgtccctatccttgtcagcacatgcagttggtctgctccacagatcacactcctggtcacacaggcttgtggcctctagcttttgtcaattttgttacagggtgtacgacatttcttagattttagggcaatctaacattgccaactttagactctatttagcacggctctagct

SEQ ID NO: 52073 - DNA, 564 bp, Zea Mays
aaagtctatcatccttgttaataatcaagacacttttaatgtagggacatgatctaatcaagtgccccttttcaaagcattcactacacttcttattttcatttgtatgaagtgtaacttgattattaccttggatgttaccttttattgaggcatggttgaggcttttggaagaggtgttgattttcttcttttgcttcctcttcttgacaatcctcaagtccttgacattttcttcaagggatgtagtgcatgccacggttgttcccgtctcaagcttcttcaccatgtgatcacggttatcttgagaaggttgagcaatgtacttccctttaagttgtgtcaagctcatctttagcctctcattttcttctttgagcttttgataggtatcatcatttgttcctgcaaattctagctcaaaggaagatttgcttgtcgacggacaacaagcattagcacatggtaatatagtttctatttgaacacatgtgcatgagtgaggttgttggaattttaagttttctatcacaacctcatgagcaatgtttaacatgatatgat

SEQ ID NO: 52074 - DNA, 643 bp, Zea Mays
gccatgcggatccacgacggcaattcggacatcggcgatgaattaccacgaccctggttgaccgccttgcccgaggagtcgttcaacacctacagcaagagacggcgatcacccagctcggtttggcgctccaattcctgacgatggcagagaatcgcgtgcagtccgccagttgccgccgcaagaattccatcccccctcacgcaatttcgtggtgtatgggcgagatggatgagagtccaagggagagcagagcagggcaagggcgtgaggtgacggtacttatacccgaggagctcgaggggaaacaggcgggcagtcccgggtccatgggccgttgcgcggcggtcggagtttgttagccgagcgtgggatgcggagaggagatagctttatccggtgggaaagcttccgcgcgagactggacgccagcatgcggaaggaggtctcgtcgatgatatcccccacgaacgccccgaagaagaggagggcgccacacccgcgagatccgcatggcagctacggtgctgggaggttgaagacgtcatgacaatacgttcctacatgtcggcacgccaggccctgggtttaacgtgcgccagagtgactgaccgtgcgggccccgcctggtagtgagtccgag

SEQ ID NO: 52075 - DNA, 448 bp, Zea Mays
aagcctcgcatttgccacacaacgcgtacaggaaatagcgagcaagcaacgtcgtggtagttgtaggcggcggagcacgggcggttgtcgcttgctgttggatcccatcacatgcggccgccaccggtatcaattcttttgtcgttttaattgtttcttctgcaatactcgaacctattctctcgtctcatgtctgttacgtaactgtcttcgggcctccaaatcggacagagactactgcagtgtagggagatgtttcgcattctctaaaaccttttctcacatgcatgtctcagtgcctcgtcgtatacgtgtacaaacgggccgtccagcccgatctggaactggtgagcacagaaaaaactagccaaaaaacgggctaaatggatctagcattaaacagaccgggatggacgagcacggatgattcatttttttctgtccgaac

SEQ ID NO: 52076 - DNA, 1204 bp, Zea Mays
cgagtggctggaaacgatgatccatgaatgtgcggatctgcctctcaccagaaaggccccgcttgtgttgccaggcaaccacatccaacacaagcttgatcttcggcttgaacttctccgtgccatagggccactcaggcttgttcaccgggatctgaccagtgaacgacggtgcactcccccaaggttccggacatagatccactcaccctcgtaacctcgaacggaggatagaagggggattgagaggtaggagacctgtgtgaaccctggagctagacattgaacgagccaacaaaaggttggtcacctcggccagggttcgcccgcggactgaacaaatgcgcccacagcttccagtgaggctccatgccgaggtatgcctagcatgatgaagcacactatgtggaggaccgtgttcgagtggaggttttgcagctccaacccatagtacaagagtagtccccgcatgaagggatgcaaaggatgcccgaagttgtgctcgtaaaaggaggctagcaccacgacctctccatcacgaggcgccgaaacaccgccttcctcctccagatgccagccagagaccaactcaggaggaagaaacccctttctctctaggtcatcaaggcgctctcgggtggtggagcacaagggaaaggcgtccatggaggcaagaaggaggggcacagaaaggaagttaacgtgagaaacgcttacggatctttgaaggaaggaggcaacaaccgatcggtcgagaaagcacggtaagcgaaactgactccaagcgccttcgtgtcctatttatacgcagaaataagtacgcgaagcgacgcctgaaggggaggccgcacgaacaacgccgagggattcgtcgcatcggtattcccccttgccttgggcactgcaaggagacgacacgttttgcagggctcgcgtcgcttcgggcgacgcgccgaggaacacacgaggagataaggtgagcaggttgtttcgtgtcccatcaagccgcccacgctggatagagccatgatggttctatttctactgcgtcgccacaactaccttgcaccaggtaagaaccaaaattcactccacctccccacgtagaacgaggggtaggccgagcaagctcccagcgagtcgcaagtcatatgaccggcccataggtcatttgctctgtcccacgtccaaggtcatacgtcac

SEQ ID NO: 52077 - DNA, 336 bp, Zea Mays
taagtatctatgcgatgttgagtccaaagatctacgtattgggtgtttgctacttggcttccgagtgttgttgctctagacctcaatggctagaaagcccaaagaagtccccctatggattgagctggcctttccctttttatagaccaaagaaggggacggttactgttgtcttccctaggaaggatcgttgtaccagggcgagacagagtaatttcccctgataaaatctttaccgtgcgtccttgttcgtcagtgaagcgtgccgatgaagggagtctaagcgtcatcattgccttcttcttttgcatcttccgcgtcaaccctcggtctctg

SEQ ID NO: 52078 - DNA, 402 bp, Zea Mays
ccgagtatgttgctgttgctagctgttgttcgcatttactttggatgatggctaccttacgggattttggcttggattttcatcatttgcctctgctttgtgatagcatgagtgccataagtgttgccaagaatcttgtgctacattcgaggaccaagcacattgatgttcgctttcactttcttcgtgatcattatgagaaaggcgacatcgaattgcgctatattgataccactcgctagcttgctgacattttgaccaaaccccttgatcaaaaaacttttgttcatttgccaggggaattgggtgtttgttttcctttttgattagagggctcccttttggtcttttcttcttattttctgctttcaccttcttttgtattacatctacatgtcatat

SEQ ID NO: 52079 - DNA, 316 bp, Zea Mays
cgctaagccttggctctctgaatatcaaaggtaaatccaaaacaatgtgaataaagatgaagtccaacaagaacacacatttgatttgctgcataggcaacaactagatgaaacttttgatccaaaaaggatgttcttgttgattccataaaaggccaataagtgagtaatcatcaaaaacaactttacagatgttccaaccaaaggattgagggaatgattgtaattaacgatctaccaatctcgtttggaagaaatattagtgggagcatatttctctcactctccccgttaggagcatatttttgggctttgc

SEQ ID NO: 52080 - DNA, 707 bp, Zea Mays
taccctcttgtcatctagaacgccagttgtttgatgccactttattcgtctccattcattcaattgctaatttttttcaatgttgttgtttctttgtactattgatcctaaatacctaaaggtatctgtcgaggataagatccccggtcccaggtgtccatcggtcagcgagcgcgcccggggcccgtcgatcagctggaggagacatgtagcgtcgtctaccctggagaaacccgccccagacaagcctcgcggcaccgagcttggggtcgtacatggcggagtctaataggggttcgggcgtaccagagggaaactactcactggatccctcgcctggctcgagaccgcccgtcataagtgatcaggcgcattaactgcgcttggcaccgagccacagcggaggcacccctcccactcatagcctacgagcccctcggactacagagcactcatgacctatgaaccccttggattttggcgcatttatggcccgcactcccctgacctatgacacactcaaggcctaccgagactagacctgaatgcacagacatctagcagggcacaacacgacgagttgtaccaagccccaggctacgaaggccaggagtcggcatagcccgaatgatggcacttgaggcccacgctacccgccccggtggcttcctcgagcccacgagcatgcatggctttaacccatggta

SEQ ID NO: 52081 - DNA, 765 bp, Zea Mays
ttggtcgtgaagattaccttgtccgtagcatatgcgttgtggtatatttgatgtttgtagttcttgcctcctcgtttgtggcgatatgaatttaggttcatatttgtggagtagtcgcgccaagtgaagcttaggtttaagatacaaattatgttagtaatgtgacaactaagtttagcgttttaaatgtttagccgatagtgctatcagtattgttgacgggaattcttgtttatattgtgggtcgatgatttactctatgagtcattatattctgtatttagtaatcgattatgtgtcatagatgaatgttgactgctaccccaagtatttagaagtaaatatcgttgataagtttgatctggttaaatcaaaataacgtaaataatatacgtagtgttatgttgacatctagtgtttgtgtattactcttatggcagctttctagcaaacacttaattttgtaccaggcagttttggttgaaattcgatcatatgtaatgacgctttacttgttagaatagttagtgcgatgtttgcttagctgatgtgctatgcataatggtttggattgatagttctaaaagttaataaaagaacttctattcattgtcttaagttataagtatccgaggttggtgagtccaagtatcatcttctaggaatgtctagtgtaattgagttaagtccgattatctcgatgattatggttatcgcaaaatcataattatctaatgtgtgctcataaaagttgtgatgctttgc

SEQ ID NO: 52082 - DNA, 361 bp, Zea Mays
atattatatctttgtttctagttgagtgtgtaagcaaccatggacacgtaaaataagtgttggcaagcaattcttcacatttcagtagagcatagataaagacgtgaaaaaaggatattgcctccccacgtaccctagatctatgggttctcttccctctctatttacgcgcccgcatacgcgcagtgctcaaagtaggcatctatattgtgaacatctaactctatccctttatattgggagattgtttctatgatcttcttgtttggaaaggtagctacaaaatccgactcatccacctgcttcatgttccattcctaagagttatcagttaggtgtttgagctccttttctactttcg

SEQ ID NO: 52083 - DNA, 364 bp, Zea Mays
tttccaaaatggccgacgcggctcaaattgactcagctgttgtttctaaaaacactgacgttatctgacttcactcggccattactttcaaagcggccgacgcggtctgttatcactcggctgttacttctaaaacaccgacgtcgccagtaatcgttcggctgttacctctaaaacgccgacgtcgccagtaaccgctcggtcgttatttctaaaacaccgacgcggcccgttaccactcggccatcacctctaaaaggccccgacatcgctaataatcactcggccaccactactaaagcgctggcatcgtgaagaagacagtctgaagcacggctcaacgattctaagttgctacccaagc

SEQ ID NO: 52084 - DNA, 522 bp, Zea Mays
gtaaaaatctatagactcagagtacagtgcaaatggatggcgggttggttttaaccaaaccgaggggcttccatgcaaattactcacacacagcgctagggtttctcagggccattggatcttgattggacgtataggattagatctaacagcgacgaaccggtacgctgccgtggccgttggatcggtgatccgcgaccacgatttaaaatagcctaattagaacctacgcgtcagatctcaatcggacggtgctcgccaacgccccgaagcggtatgcgccaagagcaatcgtggccgcaaacgcctgatctaacggctggggtcgctcgtccctgagccccgacgaggtgcggcggcgccaccagttagccacggtgaggcatcgccggagtggtctgggtccgcgattcccggccccaaccttcgatccaacagaggcaaaacgtaactgatgtaagggcggaactaggtacaggcatctcaccgatgatggtgcacggtggtgatcggcccgtggtg

SEQ ID NO: 52085 - DNA, 501 bp, Zea Mays
cccatttccaagatggtatggggagaggatgtaagtacccactacctttaaatgactggctttgattctttggcaagtgtcgcactcagatatgtacttagaagtctctctcttcatcctagtccaccaatataaggatctgaggtcatgatacatcttgttacttccggggtgcatggaaaatttggagagatgagcctcatccaaaattttcttcctgagttctggattcttgggaacaaccagtcggtcttcgaaccataaagtacccttgctgtcttgacgaaagcatttatacttatccactttttgatcgagcatttccttgatgatttgaacacccttgtcactaagttgtgccattattaactgctcctgcaaggtcggctcaacagagatataatccagggtacctggggaaaccacttccatgttcagcttgcgcaactcgtcgcacaaagcggtgaccttagagtctatggttatacagttgcactgggc

SEQ ID NO: 52086 - DNA, 310 bp, Zea Mays
ctccatctctgctccactgaaccttacagagctttacttctgaattgcgggtccttctgactgctgagtcgagtatcttcactggcttttcccggtactggagatctttttgaatctgaattgtctctgcctcgatacgggtttctggtacttttaggcatttgcggagttgagacacatggaacacattgtgaatatctgacatggattctggtagctcaagacggtatgccacgggtcctattcgggaaatgacaaggtaaggaccgacgaaacggggtgctagctttcctctcatctggaacctttt

SEQ ID NO: 52087 - DNA, 789 bp, Zea Mays
gcgagatttttacgtcgtaattttcggaccgcattcgccgtttcgaaacagatctacgatttacgctaaaatccgtaatcatttacgttgttttggttcatgttttacgctaaaatctgtccaagtcagaacccgctcacgatgggacgcgcgagatttttacgccgtaattttcgggacgcattcaccgtttcgaaacaaatctacgatttacgctaaaatttgtaatcatttacgctgttttggtttacgttttacgctaaaatctgttcgagtaagaacccgtgcccgatgggacgcatgctggtacgggacgtggcaatacctggctggggcttcctggtactaatggaagcccagggcttccattacctcgtccctatatatatatatatatatatatatatcaacatcacatattactagctagttaatttgctggattatttgaggtacgtaggtagttaccctgctccaagctgcttgcgcaatttttcctgaaaatacaattcagacaagcaccatgtatatcaatgacacaagctagagcatatgtaggaaagatatataggtcgtacagaaacaaggggactggccataaagttggatccaggcggatggaaccagggtagagatggtagaacaggctatgaagactgcaatcttcacggcccacccactacagtaaacgaagtaacttccgacggccaaagtcgtcggacataagccttaagtcgtcggacttaagctatgtccgacggtttctagccgccggacgtaacgcatcgg

SEQ ID NO: 52088 - DNA, 1111 bp, Zea Mays
gcacaaggataaatatgagtaccatttttgatatgtttcttgaggtggaaaattatcatatcctcttgcatcctacacctgtgtaggattagatgtaatttatgtttcttatagtgaaaagatccagctagatggagagggacatttgcttcacataacagtgacgcagtgtggattgtttattgaaaatatacggcaagattgaggtcactgaaagtgaaccgtcatgtagtgtggaaagagttgatatattgatttattatggtccggggcaatggtctatgcacctcttgctatctttattgtctttagatcaaaatgcattggaagtgcagtagttccaataaattggcccagggcgtgatcggatcttcgaaccgaccctacatgtaagggcatattactcgccttatccctactactaattaagcatgcaatatgggcgccaggcgcgtccatgcccccgcctcccctttcactgccatactagacccaccaagtaactcgtgccccgtctcgcctctcccgcatcatgccacgcctctccgatcccgtctgcggctgccgctacacccacatcggcgacatgtagtggatcttcgcccgccattagcgctcgtgatcagcgttcgtcgttcagtcaccattttggaaacaccgggtggaggggaatatggaatatagggagatccacaccgttttggcaatgccacgcagatcccgtcacaccaacattaaaaggatgctagcacctctcgtcctccgctcatcctcttcgcatcctctgcaatgtccacttcctgtgtgcgtgtcttccatttcatctggtgagtcccgagtacatcctgatcctaattcatttttgctatgtgtctgtgtgaacatcttgtggtttcagttgcaggctgtcgatgccaccgcttaatttttcaaaacattatcttagcctatcaggttctagaatgcaacctatttagtagtaacttattgtgttctcttaatatgttgcagccttctcagtagaatacaacctactgagaagcaacttccattttgctctagtaccaaattctctactgggaaatgaatgttttctttgattgcatttgtg

SEQ ID NO: 52089 - DNA, 571 bp, Zea Mays
gacatcttcccttccacctcgacattccctttgacattagcttgatggcaggatacttcttatcgctacgcccaactcccttcgatttggcctggttggagtcgccctgtctctggcatccacttgtcgaggttgacttaggggtgagttgatggtggtactttgacaaccactcctcctctgataccatgagtcaccccatcttctcagtgatggagtcgatctcaaatcaatctttagcggcctttaggcatcgactaagtcttccatcgttagtgtctttagatcgagtagcatctcaattaagaccatgagctaggagtagttcttccggagcacacataacatcttcttcacaacacaagtgtcattgatggttccccgagtcctttagaccttgatcaatgcattgatacacaacatgaagtcatctatgggctcgttgtccttgaattggatattctcgaactcctgttacaactgttgagcatgggattcctttatgggatcaacccccacatgcatgcttttcaccacctctcacacctccttaaccgtcttcttactctct

SEQ ID NO: 52090 - DNA, 355 bp, Zea Mays
ttcaactacatcaaagatgtgagtcaatcacttataccattctcaaatcatgatcatcaacattattagaccgttgagcattaatactttcgatcaaataaaacatcatcatagaattcaatgatcaacacattcaatatttatgaatactcaatgacaggacataggatgcaactcaaacggtagcaaaccattactacatttaattgccttctccgggaattcaaaatggcagtaggtacgatccagagcaccaccacctgtttgtggacataaaactcagtacaacatatagtacttgctaacaatcaacaccgctcctacgctcgaaccccaaacaccggcgaaaaacaac

SEQ ID NO: 52091 - DNA, 851 bp, Zea Mays
ctgctagaatccgttgtggtccctcctctgactgcaccctctctccttcatgaaggcgcgaaggcgacatgcccaacgcctcgcggagcgaaacctgagaacagggtccgtccagtaccatacatcgccgtctatgactgccttcgcgaccacgcaaagacgcattagcacttcctaatcttcgctttgaaatgccaactcggctccttttgccctttatcacgtgtatcggggccctattcgtgggccctcgttcgcttccacttctactgcggacgcaacatccaatacaccaaaaaatcaaagtcctccttagaggagtcttcgtccatcttcacaaagggactcaaacacccctcgctatccgacgaccatgagtcaaacctagagtcctcgccgctgttcacagatggactctggtgagtcaatgacgtaacacattcgacagccccaatgatttcgttccccttgcccggagtgcaaaaatttacctgcacaggcccagtcatcgaaacctgcgtagggaccaaatttagtatcaacatacaccataaataccactacttagaaagtctactcctattacattttcttattagcagaatgacgcaaagtccccaccgcattaggattgacatggccagctctagcacaggatgattgctcctctacacctgtctcagcaacgccaccgtctagagtggccagggtgccctccaagccagcgaggtcctcaatctctttgtccctcaatgcctacggcaagaaaacaacaaagcattatagatcacaaatgtaaacatagcttcccaccccgaccagagaaaaggccttcacttgctccaacgcac

SEQ ID NO: 52092 - DNA, 662 bp, Zea Mays
ccgcggggttttccaccgggataaattcctcgacggggacggggatgagagaaaaagctacccgtgagcgttcacggtgacggggacggggatgcggagccattccccgacggggaaatccccgttgccaggcataaggtaaaaatgacaagtagaattgattgaatcgattatggggttcaatcgaccgtacccttttatctatataagggagaggtctggacccattataaatcggttcccaagataatctcgcgaagattggtaacaaatcccgtaagaaacgaggaatcgtaactgattctgtgcacgctcagaccatccatgccgccatcgcaaaccgtctggccttagggtggatggttccccaagccattttttatgctcaacgtatgcccctgccttttgttggaggttgacgaacccagagcatatgctctactagcacccttcgggaaacgatggatctcacacgtcatcttgttcttgaagtaacaactaagtttgatgcaagtcaccgacttttcaatccaatagggtgatcattcaatagagctctaatacatagacgatacttgttgtgtcacttttcgggccgttttattcggccgttttgttttagcgggtgaccgagttttctttgttggccgatcgcatagaac

SEQ ID NO: 52093 - DNA, 472 bp, Zea Mays
gggggactgaaccctgagatcttttcgttactgtaccatcaggggcagcttcagttgttttgatagagcgttttgcatcgcaatttgcttcaaatttcatgtagtgacatggccacctctctgtatcaaagttgtagccctacaatccagttacaatcttgctatagcaaccatgctcaaacactcactggattatcttcaaaagagctcccaaagttcaccccatgtcactgttagtaaaagttcagactctgagctgactgacagccagactttgagtccatttaactccaacttttgtacaacacttatgcctgatgtcttaaacaaagttatactcctttagtagctctacaaatttgatgtattaaccctaggcaaattccttatggattaagagatacaaggctcgaaaaatgcctcaagctcattgaatttcagacttaggcttatatggcttaagtggtgcctt

SEQ ID NO: 52094 - DNA, 984 bp, Zea Mays
gaaagatcggtctgtcggggtttcccttacccgaaaaactccattgtccacctcgcccactaaggagtggacacggatcactcgaaagaaggagataaacatcccgtgacagagaaggagaacacgtcaagccacctttctgatatctccgccctcaaaggaggacaggaagaagaacaccgtcgcgccggctcctttctaccctaacatcctcttcatctaggggagattggagtcagcgcccatctccgatgatgaacctaccatgcaaggggaggaacctccccagcgtgatgcccggcgacggagaaatagacgccgaaatgtgcggcgacatcttgaagcgggggaacgggacccggcgcagcctgtgtctcgggatgaagcctcggaagtgggagaaactcccgatgaatgagtacaccgagaaaggcataactcccgccgccgtgattgcctataggctcaagatcgagagcgagagctagccgaacaagacgcaaggctccgacaagagaaccctctcctcgctcgaaacctgtaccctgatttcgctcaagcactgaacacgccgagtgaagttgaaggagtactagtgcagatagttgatggcctcccgcgaaccccagacgcggaaggttaccggcggctgcttactcaggcggccaatcatcttctacccttcgctcatcctacgaacgacctgtgtcacgccattaatagccgacgagacacgcggagcaccatcagcgcttcacgtgactgacggcatgaaaatgagataaggtgtcgggagagtacgaccgagatcacggagtaccagagaagtcatgccacccgagttgagtcggcagcagcttcaaccagtggcccgttctggggacggtcgagatgacctactactgactcccctccccgggaccaacgacacaaacatcagcaggaggccacgtgcggagtttctgcgctcactcctcgtctcca

SEQ ID NO: 52095 - DNA, 310 bp, Zea Mays
gttttgatggatcgagtggctagtgtgaagggcaagtcaaaggctcatgtgtgagggaccgcgtggcggtgaagcaagagcaaggacttagcaccgatggacataaagcaacggtgaagagcaagctatgttgagattgatgaaccaagaaggctatgtgataacatggagtggatcatatcattatagaattatcaagccatgtgttgatctgggatattgatcaagtggcttgatgatgatggtggaggaacttcatgctatggacaaatggtaaaaggtatcatggttggctacacttatggatgcc

SEQ ID NO: 52096 - DNA, 670 bp, Zea Mays
gtgatataaataatatatataattatatttctaaaattggtattttagatttcacaatactatttgaaaataaattcggcaatagtttggattcaaaattcgaattggatttgaaaatagaaaaggaaaaggaatagaaaagaaaagaataaaaccaacctagcctaactaggccctaaccttgtattcggcccagtatgcaaatcatcctgcgcggcccagcttcacccccgcactccagcctactgacagccgggcctcgcccgtcggtccctcagctcgtgcgctttgtttatcaacctggcgccgacacaagggtcccactgtctagtcactgactcacgctcgttccttctcccgttccctgtcgcgtgggtccaagacatcatcccctccacgcgcacctaagctggctcaactccatctggttgtgggcccctcctggcagtggcctgaccgcttcttcccccaaacccgcatgggagcttatccatggcgcggattccgggcgccgttgggactctgacgcccaattgaggcctataagccgtgggccatacccactccttctcccccaccacttcttcgctccgaatttctagccaccatcgtgcagttagccgagacctagcagccgcacaacaaaccaagtgaccggaggtcgtgccgc

SEQ ID NO: 52097 - DNA, 421 bp, Zea Mays
ctcgggcatagggacagcccgaaacctctgagtacgtcctcccgaagtacccaattcagaggatttgccacggtaggggtggtggcgctggtgctaagagttgcccctcttgtgggctagacttccagtgttgcccctcctcgcgtcctggccacgaggctgatcaacacccgaagacttctgtgactccatggtgtactggtgttgcatctccacacccaatgcctgctccattgtagtacggaaatccaccaacggaaaggctcccagggcatgcctaatagaaggtttcaggccctgacagaactggctcaccttctccaactcattgtaagccacatgaggaacaaagcggaccatcttattgaagcccacttcatatctgtgacaaacttcttctcttgcttgtaggattgcaagt

SEQ ID NO: 52098 - DNA, 718 bp, Zea Mays
tttcgttgcaagttagtattcaggaatgtcagaagcttcctgataagtggatggttcagcaactacaatcgcaacgcatggaaagccatagtgagccgaaggttcaatggtactacaatcacgaagatgatatccctgaccaatcggtaactcatcatcaatatgtaactcatcagaaacagcggagagccatcattatcaatacatgcatcaataacaggttctacatccggactagtcgtgggactacaacgaggataacgattgtatgttttagtgataggtggtttaaaagaaaaaggtgaaggtgttaaaggaataggatttgtgatgggaatgagaacaacaggtggggatgtagtagatgatggtgtattggatgatgaagacccatatgaaggagcatggatgggaggaaggttcctgaaagaggtggactccatagaaaaagaagaagaatgtgtaatggagttacaaaagaaagggcgattttcattaaaactcacatcccatgcaatacaaatgcgatgtgctgaaggatcataacatcgataccctttgtgctccagactgtatccaaggaaaacacactcaactgattgagcattcaatttagtccgttcacgaggggctaagcaaaaactctaagctagtcacaacaaggaggagttccaaaatgaacttcatcaggagttttacttgagagttttgataatgg

SEQ ID NO: 52099 - DNA, 298 bp, Zea Mays
ttatatgttcccgttgcaacgcacgggcagtcacctagtagaaactatatgagctggagcgttgtgagtgctctaagcccaccacacttctcagttctcagtatgccccggccccgtcactagaagtcaacggccgttcagttccttccccgctccgtccttcggcatgcttctactcagcccctcgccgcccttctactcagcccctcgccgccgtctaccgccgcagcggtaacggtcccccgccgtgtcctccttactccctacaaccgcctcaaggctacgcccaccccaccgc

SEQ ID NO: 52100 - DNA, 537 bp, Zea Mays
aaagcagtaagtaaaaaactaaggatagataggacaaaccccaagatgtgcaatgatgtatcttgtggtatcaattgctaaatacaacgaaaaggatcaagatgctaaagagagggtgaattgagctaatctaaaatttctcaaaataattaaaacctatcgcttagtccagttcaccccttgtgcctaatagtgatttatattctgtgcacaaagttttgcaccattaatttcaatccgacgctagcatggcaattctagaaatgtaaagacatcaaagtaattgaatgtaaatgtgtaaagtaaagagagggataggaacacatcatttttcctaaggtgtccgagagtcagcattccccactagtcatagttagagaacacatacaaggatattgctcccctcgatccatgtaaggaccaagtgcttcttttgagttgattctttatcactctgaggtggtggatctcccataactgctcacaccatgagttggtcacccataagatccaccaggtgatcactaagctcctaat

SEQ ID NO: 52101 - DNA, 531 bp, Zea Mays
gtccgtccaggtatccagggccagcaggaggggaacgaggaggcgtgtgcggcatggccgcgtgggggcaaccgctggaacagcacagcacagggcatgtcggtttcttctttcgttccgggcggcagggggacctagctagacaatgccacctacactactatgagctacgagcccgtgtgcccgcctggttactgttccggcatgcagctcgcgtgtcctgtgccgaacaatccggagcatttgggcatcattacattgttcagctagtagtacctagtacgtatcaggcagcagaggctaatcacgaatagtaatagtagcttgagccccccgccccaccccgcttactgatcagcagtagtgcccacgtactcacacgctcctggcaggcagctagctggtccgcccgctgctactgacggtagcgcgcagctgcagcacgttggtctcctcgtctgcaaacaaaacatgcagggtggctgtcacacgacgacgtactactgtgagcttcgtatctgtacgtatgtc

SEQ ID NO: 52102 - DNA, 474 bp, Zea Mays
taatggttgtgcttagtgcatattacccctttataaaagagtgtcgttttaatacattgatgctgatgtatggctgcatccaaattcgatgttgtaaaatcgtagtgttgattgcatctatgacttggtttgagcttcattacatgttggttcatgcttgatgtcaggtggtgtagtttccttagacaattagtccgaggtagaagtacttatgttaattaagaccaataatggacccatgttttgaatggtggtgctatatggggtaccttggatgttttgtttggattggtcgaattcgagaacgaattctttttaaggggggtagagtgtaatatcccaaaaaaatgttaccaaaggttgatcttcggtgcgtggatgtgggaaaagggttgtgggccgttggatgctaagttagagtcatttgtggcgtcgtttctttctcccgcaaagaaaccctggtggtggcttttc

SEQ ID NO: 52103 - DNA, 320 bp, Zea Mays
cgaatgaaaggtttctcgcagaaatgatgtacttgggttcaatcgatagtctctggggtcatgttgggattaaagttaatgatgatgttggtcctttttagtactcacaagggcctctgataaggtgatcacctttctccgattctctttaatatattagcggatatgttggcgattctcttttcaagagcaatagaaaataattaactctcaagtgtggttcctcacctggtggagtgggatcttttagttctccaatatgaggatgatactgtggtttttatggatcatagcttagaacatgcttgtaccgtcaaact

SEQ ID NO: 52104 - DNA, 277 bp, Zea Mays
gcatgagatcgcgcgcgggactatttggcgaaaaggcaggtagtagctgtgcgtgcgtggagaattggagatagactgcatgccactacgatcgcctcccgatgcgaatcgatcacctgacacctgtcgcgtcactcatccgttgcgtcgatcgtgtcgtgaagtcaggggttctgatgcgtcgtcgttgtgcatgtgtgtacagcagcaacacgtagatacaagctagcaaccgttttgagctgctgctgctgatgcggcttgcatcgtggcggcg

SEQ ID NO: 52105 - DNA, 600 bp, Zea Mays
caaaatgtaaccacctcacaatgattgtagccttagttgcgcctgccaagatcttcgatgtagccaccgcaacgtcaccggaggcagccacctcagcaacctctttgccaccatcgaccgcgacatagaacctcgccgtgggtcagccgtagacccgtgccccgccttcgcttgggtcacaaccagttggctagacctcgcgtctgcatcaacatccattagtgaaaaagacttgaaacaagcacgcacacataaagacatgaataatgtcacttacccccgaccgcctgccgagtatgggcatcgaactcaacaaccccttcgatctcgtagtcctcaacagatacattgaggactgctcctccactagccacgccgacatccgccgccttcgtcggctgcacaacagccgctacggtcggcatcgtctcagtagcagctgcatccttccccctagactttgacccgttggtcgtggtcttgtggagcgccttcgtctcacggtgaggttctaccagccagagcgaagccttcctcttcttcgaggactcttttcgatccttgtccatcaaagcttccacaaaagcaccaatatttcgc

SEQ ID NO: 52106 - DNA, 1346 bp, Zea Mays
gattactctaatgagttgcatgaagaagtccaccaactttactatcagctgcaccccaatgatgcaccagggcctgtggaagcagagggtggtgtggtgctagctgatggtggtgagcctgacgcagacttagaggatggagtcgttcctatgtatgtgccaggtggtgagtctccagggggtagtgatgcttctgagatagctagtgatacagagggctagtgtgacatgtgtatggtatcatgacctctaatgtagacatagcctaaagctatgtcaattttggtattgtaatgaataaaacatcatgtacctatttttatgtaatatgtctcatggttatggatgtttattcatgagtttgttttactccagatgcctatgtgtactcgtgggtcggatggggctggtacatcgcgtggtggtgcagaagctgataataatcctccaccaccactaattccacctacattggcagatgccattgctgccctagtaaatgccactcctgataatgctagggttttgcatgagattgctcaccatcaaaacaatcagggtgggcctcgtattccctaaaatcagcaatgcaatgcaacatacatggaatttatggaaactcaaccgctagtgtttgctaaaggagaagaacctcttgatgcaattgagtggctacaggtgattaagcagaagtttggtctcattcagtgcactgaggtacaaaagtctatatttgctgcacaacaacttcgcggagctgccagtacttgatggtccaattttgttgccatacaactctccagatcaccaggttacatgggcggaatataaagaggctttccgcgctcatcatgttcctgatggaattttgcaaatgaagcttgaggaatttttgagacttaggcaaggggcagatactgtaatgcactatattgggaagtttaatcacctttctcaatatgctattgagcatgtgaacacggataacaagaaaatagattgttttatgagatgcctcaactgaaaactgcaaaagaagatggccacttgctatgatcttacttttaatcgagcaataagtgtggccatagtcgtggaagaaaaatcacgagtacatcaaaatgtgaagcaggcatggaaaggttctaggcgagcgttttctcagccaacagcgaagcatcagaaggtggtaatcaggactgcgggttcagcaaatgttccttattgttcaaatacttatccattcaagaaccctacttatattcatcccactaactggccaaactagcttccacctgcaaatgcccaagttcctcgcttgcctgctcccgctggtactaaatatc

SEQ ID NO: 52107 - DNA, 448 bp, Zea Mays
aaacttcctaagactcagtgaataggatccgtggactacaggtttattctataataatctagggtcacatctgcaaaatgacgcggcaaaggggtatggagcgagattagccgtccgatcaacactggacgccttggattagatcctggctgcggtgaattgttatgcagttgcaaccgttggatcaaggatcgacggccatggtcttagcgcgcgggactctattggctgggtcgaatcacgtccgcagatcagccacagaacggcccagatctcatccacatgaaccggtatgcgttgttctaatccaaccgtccatacttaatctaacggacccgagttcttcgtctacttccggttggttcaaggtggcgccgccccacggtgtggtgctcggcgaggttgcccggccacagcgatgccccgcttctactacggacacgcacta

SEQ ID NO: 52108 - DNA, 1120 bp, Zea Mays
cttgtggaagaactcactgataacctccaacttttccccatgtgatgtctttatcgatccatcatcaaaaatcagattgccaacaaaattcttgcctttgcggtatttagcatggaggtggaaaaaggcagtgttagcatccccttcagccaaccatgtgatcctagagcgactccgagccatagaacgctgcagtgatgagaggaccacaatgcgaccatcaagctgatccaccaaccaattttataacaccgacaaggatctgaaatcttgagcagactgcaacttatgcataatctcccttgccatccctagctgagaggtaacatgtcccatccttttttgagaccagctctgaagatgtttgacagtggctctgaattttttggagagggtgacaaaaggataaggggaggaggaaacagagttccaagcagcctccactgtcgacagaaaatcaggcgcctttgtccagtgagattcaaaacggaacctcctgcgcccaagagataaatcatgaagcccaaggagcagagggcaatggtcagacccgtcagtgctagcactctgcagaaggcagttaggaaaaagttgttctcaatctggcaagcaaaacattctatcaagcttgacaagagtgggtggatcttgacgattagaccaagtgaatttcctcccatgtaaggccaattctttcacccccagatcattaatgagccttctgaatctgtccataaggtgtctattaaaattgccggagctcttgtcatcatccttgtagatgaggttgaagtcgcccattaaaatccagggcccaggacaagcagatctcacattgcgaagctcttgcataaactgaattttgtcgctgatgccttgaggcccataaacacatgttaaccaccaaggatgttggtcacgtgggctgaactgaattgtcacactatgatgatccaccctagaagcgctggccggaccaatctcattactctaggccacgagaatccccccgctagacccaactgagggaagggccagcttgtgcacaaaattactcccaaggacagtcaagattgtatgcaaggaaatttcagccattttagtttcatggatacaaacc

SEQ ID NO: 52109 - DNA, 673 bp, Zea Mays
ggagagtggtgagggtgagggtcgcccatggcaccgccgtggctgaccggacaccgccgccgctagtcgatgtgaagtgggtggtttagtggtggccgctggctacttgatgaacgaccaagattagatgatagggtactgcttcggcgtgaggaacgtggtcgttggatttgtagccaacggtcaagatgtgatctcagccttattaaatctagagtgtctacgctcgggatcggacggttccggatgcgtactgattcagatgcaataggatgcaatcatgaccgttcggattagatcgggtggcttaagttaaatggtaccccttcgaccgagtttcttttgctaaagggcccatgctattttactaaattaaccctcgctccgcaacagttcagaagtaatcgtcgtttggtccttttcctttatggtttgacccctaggttttccaaaaataggagtcgcagtacattagtgcctggtttatataaattagactctaaaaatgatctataacataaaaataaatccaataatcttataaaatccatatcttctctgttttagctctgatgtaactcgttccagttgcattaggttcgtaccaatactaactacaatctagtaaccttattttgattatgtatcatatgttcaaaatcgaacacttatt

SEQ ID NO: 52110 - DNA, 1052 bp, Zea Mays
ttctgggatgatgggtggattaatggttctacagttgctgagctagcccctaatctcattcagtttatccctaaaagggctagggggcagcgcactgtttcgcaagctctaaataatagaagatggatttcttatatccagggagctctcacagtgcaggtgttagtggagtatctacggatttggggtttggtggacgagattattttgcagccctcactgcctgatcagcacatttggaagctttccaattctgggcagtactcagccaagtctgcttataattccttctctattggatctattaagttcccaccttggaaatggatttggaagtcttgggcccccttatgtgcaagttcttatggttggcaatcaagaacaggtgctgggctacggagagattacttaaacatgggctaccacaccagtgtttgccccctgtgtgatcaagagcaagagaccattcagcatattatgttgaactgtattttctccagggaaacttggacatgaatcctgatatgtgttggtctggtggatttggcacctaaccatgacgcccctggtttctcagcgtggtggagcagggcagtaagaagggtgcctaaggagaaaaggaaagggctcaattctctaattattctggtaatatggtttttatggaaacataggaatgcttgtgtgttcgatggtgtgtttctcagtccacaagagtcaagagaaaaaatgatacaagtgagtggagtgtgtttctcagtccacaagagtcaaaaggtatatacaagagtatggggtgccaacggtatggccgaagcaggccataaggtctatttatagacccttaagaaattcatttgtcagtctcttgttggttgactgcgagagcatcgaacatgtttggtgcaccactggtgcccatatccccacaccggacatgttcggtgtgtctctaatggctatattccaacttaacacccaccacaattcccccaggtttgcctttggatgggttccatagccaaagataattctagtgactaggtctttcc

SEQ ID NO: 52111 - DNA, 523 bp, Zea Mays
gaaaaactaattaacctgctcccacctatgtttttgagttgcgaagtctaaaatacttgctaagttttatactggttaaccaacttgttagatgactttagttaagctcgtggtcacgatgaactgcttgttgtagtctaaatgcgtgtggttatggtcgcgggtaaaaatttagtagtgctcatgtggtgtctaagttaaaaggcgaactagtgggtgaaaagcgtttcgacatacatgtataccgaatttgattattgtggtgaacgcgttgttaattgtgtatggtaattctaggcacgaaatgacttgaacaaaatttataattcgactgattagccctcttttgattaatttagctctaacaattggtaaagtgttagaataattcaagtctctagaatgcggcaattcttgaattgtataggagctgaaatttagtagttgctgttttggactgcacgcagcgatttccctgtactgtatgtttgatgaactaaatggtgttttctgtagatatgtg

SEQ ID NO: 52112 - DNA, 399 bp, Zea Mays
gtcggggttaccgggtcataattctcatcattactatcaaccatttcatagtcaacaccatctgaaggcgcaagttcatcgttaatgtcattgccttcaagtatttctaggtcattctcattttgcatctcatcgtcctcctcatcaacaaccatttcaatatctacttccattccgatagcttcggttaagtatactttaaatcgcccttctacccatcttcttggaagaactctgtcatgtgtctgggtctaagttataatcttcatcgtttagaacatgtaatttatcgtgtggtgatacctacacaacattccaactcttaagatgttcttttgtatggcacgtatatgggagataataaacatgtgtggcctgttggtccacgatatagacatc

SEQ ID NO: 52113 - DNA, 350 bp, Zea Mays
cttaagctgtacaacgaattgttgcatcagtttttttgaaacttgtacatttaaataatactttgtagcaggaaacatactctagtgttaagaacaggacatgtgggagacaaaataaatgatgtcctcaaatgttgcatacgaatatgacatagaagttcctagaaatgtgatatttgtaatagtagtagtaaccatataattatgctgctaagacaagaacagaaactaaaataatgtggcccgcaatgtatggtccgtattgatttgcttgtcgtcttaatcaccctaaacgcatctatcgtcgaacagattaatatagagttatttggtcacgccgtcggtttgtg

SEQ ID NO: 52114 - DNA, 610 bp, Zea Mays
tttaaagtggctatttgttcataatgttcttctgttctaaaagtttagcgcgtcaagatattaaaatatgtacggcctcaactatatacccatgcgaatatatgactaaatagtcacgcatcaataaatagtcatgcatgcattaattaaagattcgtttaaacaactataaaaatgacatgaacaaatgacatttgtcaatataattgtaaacaaagcgaatataaaataatatttaatgtaatcacaagatagtgtttgataataataataaaacagattcaatatataaataatatgaaataatgaagagagaacacaagtgctactctcatacaaccgtcatagcctctagccatgaataaaaaatttatagacgaatacgtacaatagtggtgaatggattggtctcccatcaatcaattgtaacttctacagcatttgcatgtgcgtatgcatgctgccatgttccaccctcacacatgctgccacgttccactctcacacttatagcttttgactggagataattaagcattctcttaatcacataataaaaaaagggagaaagagaaagccacttgccatgcagatggacggccggacgcta

SEQ ID NO: 52115 - DNA, 436 bp, Zea Mays
ggttgatggataaaacatggatcgataatgatgctaggtacaaagcatgtttcacaaattgaatgacacacattgttaaaatgtcatttaacataaaaatattgtaggcacagcaaggcatatttgcaaggagtgaatggtttcttagcttttgcatttagaaatcagcagtaggaagtaagatcttatgccttgtagaaagtgtgtcaactcattttggaaagaggcaagtgaagtacgtgagcacttgatatgtgatgggtttcttaaatggtacatgatatggaacttacatggagaagctagctcttccgtgaatcatgggaactatgacgatgctgaggttatagtggagcctaacgagaatgatgacatatctggtttgcttagagatttagttgttggtttagatgataaaggtgattttgaggacaat

SEQ ID NO: 52116 - DNA, 465 bp, Zea Mays
caaaacaataaaaaagttaagggaagaattttaccttaaagttagaataaaacaagctactggcgatatgctgccgtcggtatctgctgagatcggcttcgagcttcgggaaaccaacactttttgataaagtgctcacaactttcgcccagtccggtcttgaaggcaacctaagctctcttcgtctataccaccgaagagcagcgcccctggctggtacccgcaagatatagcatagtccctcagctcttctttttcagccttagacaactcttgcccaattatgttttgaatgttgaaatttcttttttccgaagcatcttcggcaagctccttctctttccaggcatcttctcccttttttcaggcactgcagctgggtttcctcagcagctgcaagagtttcttcctcagccatattcaaaatcatttcatcaatgacagaaagtgtgttttccaaatttg

SEQ ID NO: 52117 - DNA, 604 bp, Zea Mays
catacttggtcaagtagtctattccaagtatcacatcgatttcacttgagtccaaaattatcagctctactagaaagcttaggcctctaatttcaatcttagtctgagggcatgagtgagtggctctaagttgacctcctggtgatcgaattaattgtttcttcttcaagggatagtttggtatattatgtttttccacaaatgactttgttatgaaggagtgagatgctctagaatcaaataaaactgatgcaggtatggagttaataagaaacataccatacaccacgtcagcatcctcaggaactgatttcgctgtcatgtgattaactcttcctctactctggttttgcagagtcttgttctgtgtagatccacgagcaggtgtgttctggtcagtcctctggttgctattcttctggggtgtctgttggttacgccttgggcagttgttagagtagtggccaagttcgccacacttaaaacaaccatttggttgaactagggtagttgtgttgttgttctcggccggtgtgttcacgacgcttccttgacggttctgttgttgcccactagacctttaaccgatttgagtgcagtttct

SEQ ID NO: 52118 - DNA, 514 bp, Zea Mays
tgctcctttattgggacaagggatttaattcaagagcatatagcattcagagtatggccgcttgtagaaagctgggaaatgccgaaggagaccatcactaattctaacgaaggtgatttggtccggttgaagtatacattcaggtttggggataagtttgatgaatcgaatgacgattggctgaagtgtatcgaggctacaagtgatgaactgcttggagcatattccaagacagaagataatgcactgtctacagccttcggtggttggggaaaaaaagagactgaacagagtttttgatgccattggcttcgtctaccccgattaccgctacccgctgcgggcacaagggaaaaagaggaaaattgttgcttcggccaccccagctgagcctgtgccgaagggcaaaaagataaaagttcttacccaccggccgcgttacattgaaccggtcgtggtgcctgagtttggcgcagggacatcttctgctatggaaacaaaagaaactgcccca

SEQ ID NO: 52119 - DNA, 424 bp, Zea Mays
gacaaaccttttggagaggtggattcatcgtttggtctccatcggtcattttcttcttcttccttgcaagggttagtatcacaaataccaaaggaagtagaagcacaaaaagaactattatgtttggactcatcaaacttgattttaattctagtccaaatatcatgcgtatcgggaatatgttcataacgattcattatgagggcatgataatcttccttgctaagagaattaactaagatgtcaaaagctagatagtttaagcgtatacatctttgatctttctcggaaacatttttcctatcataactaggaggaataatactcttgtctataatttgttctaatcgaggatctagagttctaaaagcatttagtacactagatgaccatgaatcatagttagaacaatcagaaaataata

SEQ ID NO: 52120 - DNA, 947 bp, Zea Mays
cggatagtcttcgtggaagacttcgatttttcgcacttattgtgctagtccggctgcacccttaggcgacttctgcatggatagtcttcgtggaagacttcgatttttcgcacttattgtgctagtccggctgcacccttaggcaacttctgcgcggatagtcttcgtggaagacttcgatttttcgcacttattgtgctagtccggctgcaccctaaggcgacttctacacggattttgtcacgcgcgagggcggctgctgctgggcctcgcggtgactttgtattagtcgaatgtcgaagaccgttgatgcggtcttttttcgacgtggattttgcgggggatttttctcttgtatattacatgactccgcctcattaaaaacctcacccccgggaggaaaagagtgcgggccagaacagaattgtttttgcaaattacaagggcggactggccctgatgagtcaaacaaaaaatttgcgcagattatcaatgttccaggaatgctctaagtcttcgccgtttggcgttgcaagcctgtatgcgctgggggaggccttcgacttgacaatgtaagggccctcccacaagggctccagcttgcctctggactccgttcgagctgtccggatgaggacgaggtccccttcgctgaattcccttgggatgactgcctggtcgcgccatgcttttgtctgggcttggtacttgtccagagcctgcagggcgaagacgcggtctccatcgatgagatccttcgaagttggctcatctacgtctaggacggccgacgcggctgtccgaggcgacccgtgctttatttcttgtggggtcatggcctccgatccgtataataggcggaagggggtaaacccagtcgccctgcactcggttgtattcagtgcccagaccacttcgggtaacaggtcaggccacttgcctttttt

SEQ ID NO: 52121 - DNA, 484 bp, Zea Mays
tagatatgtttatgcctgaaagactatcagttgatcatacagtctttgttgcctttgcatttctttgtcattcccccctatctagtaccatatctaacaccaaaatgctactgatgcagaattgaagaattcatgtttaggaacttaattgcacttaagctacttgtgtttctaagtcacgcaatcagaagatggcttataataaaatctgcaatgatggcggttatggacactcacccttctagatgctgttagtgtgggtgtgtttggttgtaatgacgtgataggataggacaatctcttaaataagattgtttggttcagggttcggacagaactattccagtattgtctcttaaaattagagagacgagagaggacgctagaggatgtccatgtcctgtctgtcactagttgtcccgcaaccaaacacatcctttgtgtttttctttcctatttttcaaccttcctcttttgcaccccc

SEQ ID NO: 52122 - DNA, 769 bp, Zea Mays
ctaggatttcgggaaggatccgggcgtggccatcgccgaggaggagcaagtgtcctcgaattcctggacctttttcgggggccgggggggcaggaggtggtggtggatggcgagttggcggctgagtggcgagtggcgacgcaacaaaaagggaaaaaagtagtagattagttgagagaggagggattgcagtcaggattagagaaggacagcgtgcagcatttagttaggtgtgtgttagcagcgccgcctgaccaaaggcctgttgacgtcagagacaacaaacaattcgtgctgatgatgttcgttgatctgttgagatcgactccccatcccaattttctttttgttggttttgttttgtcggtatttctttttggttttctggtgattatgttgatggatccgcggtgcctagaacacaggaggcgtactaaaacattataaccgggttgacttttgctggggccgtcttcgattctggctggagtgcagtgtacgtgtaccgtgcgcgcgcgtacagcaggacaggagagcctccatggacggacaacggacatgcgatggttagactatgcccggcaccttatctatcacgtaccgatatttaaacttcattttacaaacacttcaatcaacatctacaatgcaaaataacataaaaacgatgtttttgaataaactatagatagactgcttcagacgatcttcggtcctgtttggttcctttagtcactagactaaacttagtcgctaaagtatctcgttt

SEQ ID NO: 52123 - DNA, 656 bp, Zea Mays
agtgacaaaaagaaatatagtttggcaatgtggaacattgtttatcgtccaaaagatcaaagggggttaggtattcatgacattttaattaaaaatgagcactgctcggtaaatggctatttaggcttcttactaagaacatgatttggcaaacgctccttaagaaaaagtatataggctcaaaagcagtatcttaggttcattagaagccaagtgactcacacttttgggctagtctaatgactgctttggatcttttaagatgaaggagggtcagagacaaggttccgggaggatatgtggctaggaaacaccacccttcgggaacaatatctagctctatacaatattgtttgtttcaaatctcatactattacaagggtgatggaaacctcaccgacgtatcattcagacgacatgtagccggaccacgactgtcagcatggaacacacttctggggcggttggactcgatccaattgactgaagggtctgacaaatttaaatgtgaatggaaaatctattgtggattccatgtacagagctcttgttcacacgaaaatgccaataggagataataacaaaatttggaaaatgaagataccattgaaagttaaaattttcgtatggtaccttcgaaaaggtgtaatccttac

SEQ ID NO: 52124 - DNA, 486 bp, Zea Mays
cagacatatggcttggcttcccaggctaaatcctgcaggtcctgttgcatgaatcaaaggatggcagataccagacgatgggtcctatgggtgtgctactaaaacttcaaagcataagctatgtgtaggtccaggtcctagtccagtagtaggtagtctcaaactgtagagactacctcctaggggtcggaccaccagttttatctttggtatactggtatccagcctcgacacgtcgagcctacctacaagggggccaagtaccagagagaagttgatagttctacacatcataagggcaaataacatacagataagttccagtttcaactccattaacggttcttaaagtatgttacacaagaccaaaagttgttacatccgcttcccagtggaaccctagctttgtctctacaggtcgtcagcaggatcacgctggaagcgctcggccaccagctccacgacgtcttgtacgctctcccgggc

SEQ ID NO: 52125 - DNA, 351 bp, Zea Mays
aaaatggttgttgtagaacgatgccccttcatgcacacaattgtccatgataaacttacaaatatcacatattgttccaatggcagtctcatgggttatcttttcattttcccaccagtttagtgacttcttcaactatttataactggtgttgaatttgtcataggctctaagatactcacaaacatagaatctgcataactgacccatgaggttgtttggagcactgcacgatatatatcatacatggtagcatatcactagtggcaacgtattgagagtatacacatcgtatataacacttttgcacgtattaggaagttgtgcttgactttaagtgttttagggaac

SEQ ID NO: 52126 - DNA, 692 bp, Zea Mays
ctggtcagcaaaactatctaccctatactacaatcctctacagtcatgtttactctatatatcaactctatactaactactatatattttatcatttctttctaactctgcaacagttgaactccgcagccgacagtctaactgatcaggctatccgtactctgcaacagttttccagtcggagttacactactctggaagtagcgtttccgatttcctcatagagtttacagtagatcagacagttgaccgctgcagcagtcttcaactgtatattcaactctatatgtatagcgtaccggttgcagttcttcagtgcggaaagcctcagtgtaactcatataaaaataatagagattattagccaacaaagtcaagatgcagccaactgcggaatcacacgttgttggataggagttggtctgctcaaccgtgaatggcattactgggcggatcaccaccacagccccaacgacataatccagaatttgactttagtctgccgtctatgaaaattttcaccaccaaacctctcaggattcattgcatctgaagcaccaaccattgctagaataatagaataaacgctacaataaggtttctggattgtggaatagtgcatagtattctaagtttagattttaaatcgaggcaaatttcatagatattcaaaacagatatgcgcactacgc

SEQ ID NO: 52127 - DNA, 567 bp, Zea Mays
aaaaaaaagctcaatctgcccttatgagcggaattatggccttccaagaaatcctccatgaaacaaaaaggtgaaaataatgttgtttggtttttgaaaacgactttgacaaggcatatggcaaagtcattttgggaagtttttgttcactttcttataatgagaaaatttagtgaaaaatggtgcaactggattagtaaagctgtcaaagggtggtattgtaactggtgaagcttaatggccaaattggtccgtggacccttatcaccattttttttaacttcacagctgattgcttgtctaaaattgttgaacacgcttttagtaacgttttaattactgggctgacatataatctaattcccgaaggcattgctattttgcaatatgccagtgacactatcgcatgtcttaaatttgacatggaaaattgttagaaagctgaaattgttgctgtatatgtgtatgaaatggtacttgagcttagaatcaatttcaagactaaagttatcttgattaatggtgatgaggataaatgcaccttctagggagttgtttaattgtcac

SEQ ID NO: 52128 - DNA, 372 bp, Zea Mays
ctcgcctgacgccactgaagcttctcatcgcatcgctagtcgagaaggacccctggacctcggtaatttctcgacggcgaccgctacacccctgccaatccgctgctcaccgaggaccggtctccagcgcacgccatctccggtgagtacctgtccaccgtgttcgcgcaaccttcccttcgccctgcatcagtttaattggggattagggcgcttaatcgccggacgggccgcaccggcgaggactcgatcgcggagcgagcgccgccgtggctggccgtagtcgctgggagaggggaaaaagaagaacgatcgtgggtcgttcgatccttctcggacggctgcgattaaaagacaggataacgtttcgct

SEQ ID NO: 52129 - DNA, 512 bp, Zea Mays
ggcgtcatcattatgcctcctctattgcgctaacaccattcttcttagcctaagccttggtatcactcgtcatgttgcagattgtgtagatcatcagaggactcaactctaggatcgataggccatgaatggaccataggtctatggcttcttagaccatatgtggggctcaggtatgggttcgcaggctatgagtgaaaggaggatcgactctctatcgcgactcggcgctaatgcgtatttaatgcagccgatcatttaagatggggcagtccacgggttaggcgtagaatccacttgagtgggttcctcttggtttgcctgacccctttcgactctacctggcccgaccctcaggcttagtgccttggggttaatcggggtgaacccttcctccatcctccctctaactcgtggccccctagggcctagggatctggtccccgacagtagcctcgagctagtgataacacgtcataccattgctgacgtgggtcaacggtacctggtcg

SEQ ID NO: 52130 - DNA, 483 bp, Zea Mays
acaaaaaaatcacagtttaaacaaaaggaagttcgggctcgcccgtttatgctacttcagtgtttgttgcttcatttgctcatcagttgcacttgcgtcagatttcccgagttgctaatcacagacgaagccaccagccctgatatgagtcatatgacagacgaagcctctactatgcaaaatcgcaacaaacctacagccgtgtcaagtagagacacggcactcaggtcatagctaatgcctatttgaactcacgaattacagtcaacaacaacggtacccttttggcacatgaaccgctgtctcagaattgtcctcccagcagtttcagagcagcaaatgcaaaacatccctttttcaaatgtttcaatcaatagtttcagtggctgtccattttacgaggcatttagaatatcgaagcccacacagcaaatcccaaacactcactccgtgtttttggacaggctcattagctcagtgtca

SEQ ID NO: 52131 - DNA, 453 bp, Zea Mays
catgaacatgacgtgttaaccaaccagagaacccgtcaaagaagttcctagctaatcctgcagctagcgtcacccttagcgcatggttttatatatttgcctagcattcgttccattcgctgcaccccgtcctgtctatctctgtcatgtgctagctgtgcatgaccggttccgcactactactatactataccacgcttacttttactacttgggaacaagtgaaacaaggaagcagtctaggtgcgggcattagcgcgtgattaaaaaagaagattttgagatgtgtggcatccatgcacatccacatcgaccagctttccttttcattcacagctagcaacgtacattcaatcaaactcaaggatctcatctcatgttacattttcaatgccttactgtaactctgagccacagcccacagccaccacgcctcacacatcttgatccttt

SEQ ID NO: 52132 - DNA, 548 bp, Zea Mays
cacttgatggccaatcacaggaagagaaaaaaatttatcagatccttaaattgtggaacccgcatgttaactagccaagaagacaagctgcaagaggctcaccggcattttcttgagattcttgggagtagaagtgagaggaacagtgttatttgttgggaaaacctgggctacactccttttgatttagctgatatggacaccatgatcagtgatgatgagattaagaacgtggttatgggcatgcattcagagaaagcgcctggaccagatggcttcataggacttttctacaagggctgttttgagatgattagagaagacctctccaaagcgatcaatgatttttatcatcacaaatgcaaaagtctgcatctagtcaatgaggaaaacatcgttcttctaccaaaaagggagaacccggacaagatagacctgtttagaccaatcagcctaatccatagttttatgaagattataaccaaaataatggcatccaggctggcaccacgaatgaacgaaattgtttccactacccaaaacgcttt

SEQ ID NO: 52133 - DNA, 388 bp, Zea Mays
cggcttttcaatccaatagggtgatcattcaatatagctctaatgtataaaggtcgtttcagattagatctttatcggtcatgacaatccgatcaatggatcaaaaggtatggaatgttggtgcccctagcctaaatatgcaaagggactaagtatgtaccatgggttcattgtcgtaccattccacatttgaataggataatatatcaacgatgagtaggttgatggaaaatatcatggcatcactagagatggatgaatatgtgatgcttgttgtgccgcctttcgagccgttttattttagcgggtgatcggggtttctttgttggtcgatcctgtagaacaaccttcttgctagcgtgtttggagagcgattgatcaaaggtac

SEQ ID NO: 52134 - DNA, 420 bp, Zea Mays
ccaatcgggtttgttttctcctcctccttagaatagcacgagattcgctagaattgcgccggtagatggtcggaattgtcaaactccggcgtgggattgccgtcgtctagggagcggatgcccctgctcggcctcgggcgcggggtaggagaagaactccttgccgtgcgatcggattcgtgcggctgggatttggtttgggttgtgattcggccaaatccgatatccgacgttggatcaaacgtggatgggcaggattataggattgtataccccttcgttcgggccgtcgatctcaaatcggacggatccaaggcgatcgcgtgtatttaaaatgtaaaccgtggatctctgatccaacggcttgggtggcgtaccagttcacttaagcttggatctgatctggaccatggatttcta

SEQ ID NO: 52135 - DNA, 512 bp, Zea Mays
taaatttcaaaagtttttaagactttgaccaacatcttatccagggggaaccgaagtccagctttcatgaagcttctgaaaatcaccacttcgtcagcttcgggaagaggaacggtactctcccctctggcccgcacgatagaaatatcacgaaagtatctgcctttcattgctttgatccgcccttacttaacagtcgactttccaaaaacaacatggctcggcctccatggtcggtcttcggcatcttcatttccactttctatgtcaaaactctcactatcgctggagttttcagatagcctagcccgcatctcattagtgattttctccgtgttggttttctccatagcttcgtaaaacccggccagtgcggggtcagtgatcttcttctcttcagccatctagaggtagttgcgcaaatgtcgaagctcaaaagttaatcgaactcgacaaagcaaagaaggttaaaatggcatgcacagtacaagcagctagttagcacgaaaaat

SEQ ID NO: 52136 - DNA, 783 bp, Zea Mays
accagcaggaatacccgccagaacaactcccaaggttctaagttctgctccaaaaatcagagtgggaacaacaactatcaagcacaacgctctggacaacaaggtcagaggagcaaccaatatcagaaccagcagagaaatagcactcagaccagtcaaaggactagtggtcaacaacagaatcatcaaggaagcgccatgaacacaccggccaaaaacaacagcacaactaccccagttcaacctaatggttgtttcaagtgtggtgaacttggccactatgctaataacttcccaaggcgtaatcaacagacaccccagaagaacagcaaccagaggactgatcagagcacacctgctcgtggatatgcatagaacaagactccgtagaaccagagtagggaaagagttaatcacgtgacagcagaatcagttcctgaggatgccgatgtggtgtatggtatgtttcttattaactccatacctgcatcagttttatttgattctggagcacctcactccttcgtaacaaagtcatttgtggaaaaacataatataccaaactatcccttgaagaagaaactattaatttgatcaccaggaggtgaacttagagccacttactcatgccctcagactaagattgaaattagaggcctaagctttctagtagagctgataattttggaatcgagtggaattgatgtgatacttggaatagactacttgaccaagtatgatgtagtaatatcctgtgctaaaaggatggttacattattaacc

SEQ ID NO: 52137 - DNA, 649 bp, Zea Mays
cccagacacaacatttggtgccaatttcaagcacataatacagacacaaagttgttcagtccacttcaacaaactagaaaagaatgtggattatgttttcattccacttcaacaaactagacaatctgtgttcaagaagccataacaacacatctgtcacagttggattaaactaaatgggagctgggccaactgaacagttcaaacatcggattcatattccctagtatcattgacaatcccatttttgaaccagttcaactggaatgtgatgtcactatggtgaagctatagggacgaaacaagcaagaagcaacggtaatggaaaggtgggttcgtcaggggagagctcactcatcactgcgagacgacaaacttgcccggggagccatgggaaccaaagcgagagagtgcgggaggaagcaggagggcaggagagcgcgtcggctgggagatggcgaatcctaagagctagccaaaaatgaccagcgacggggagacgatggcgagccagatgcgatggcgaagttgatgaagagactgttggaagctttttgcacggagtttttcttttttttatagagcacgggctgtttagctagtctgttggagctgctattagatgttatttatagagtttaatatttac

SEQ ID NO: 52138 - DNA, 538 bp, Zea Mays
gcgacccgaggggttcgtaggtcatgagtgggaagcgggccgacgctggcgctgtggctcggtgccagacgtggttaaatatgatcgactatttatggtggggctagtctggggccatacacaggatccactcgagtggtttccttccgacatgccctctccccccgttcaggtttcgccacgcccgaccccgagctcggtgccgtggggttcgaccgagggggggctctttcaggattgacgtatccacctctcccaactaactaacggagccaacaatcagaggctctttcctcagcgcactctctgattggtaggtcctagagactggagatcatttccccgacacgtcccaacacttgaactccaatggcatagaaaactagtcattgggctttgtacatacctagtgcaacgcataggatattttctggtgaacgtcaagcccaaacttgcaaaaaaacaagcatactagaactcttatctggtgtggcatccggtgcgagcatcgaacatgtccgatgagctcctttaaaag

SEQ ID NO: 52139 - DNA, 551 bp, Zea Mays
ggttgcggtttcgttgaaaaattattcaggtttttggatgctattccgttctagagcttccagaatccaaggagatattgttttccctgcatccctgttttggactataagacgtactttgtggttgtcgtttagttaatcgcttttctattcggtattcatttcatcgcgttccagctgtaacgcttaactagattgcactaactgagaaactgatgtagttgtttgctgtttgttttcaaattattcagtttttgagtggtattctgatgtcaaacttccagaattcaaggatatattcttcgcattccttttgtcacattttttctgtttttatgacatgctttgcggttgttgtttagttcattctgtgtgtagcatttaacaccattcattccgttgtgcacagactgtaacacaaaagaaaaagattgtaactgagaaactgccatagcggtttctgctggcacattgacaactgtaaatgcaggatgtttctgttcaaatatctccttttggcaaatttatttccataaatccctacatgatcc

SEQ ID NO: 52140 - DNA, 875 bp, Zea Mays
cgtggcacccctttcgttgcctcaacgatatgcttgtggcctgctcccggtgcctgtctcgtgcagcggtatctcgtatccggagtcccgagccgccggtgggcttggtcctctagctatccgtttcgggcatggtttcttagttcgtgtgatcaagtcgcctcgtaaacgcatcgatcgccgagctgacatgtataatgatcgatgcatcgtatgcgttcgagctaggcaggcatgccctggcctatctatatggtatccatggtccatgcttccgtagttccgtcgtgatgcaaaccaccaccagtgatggagattgccggcctgctggggactagacagtgtcttcgttttgtgcgcttgtgttgttgtacttgaaccactgctttcacctgaagctctgaattgatctgtcagccgtggctattgctgtacgttggaagagttgccagttctgagtttctgactgtagtgcacatatgtttcccattcagcaatgcatatgattttagaaattcatgagatgaaatattctacagctcggcttcagtcgcaagtccaattttcctattcttttatcccaggtatatgcgtcaatgtatccatggcagactgtaactgtaagcaagtctttactgggactatttgagtactgaaacctgccgatagttgaatacttaagtatggctaaatatccagtttgttagtgtcatctttctgcagtgtcataaaatagctgtctttttggtttgaaaaataaataaatgaatgtgctacacatttcacagcactacacagatcgaagatcattttcaggttcatggactttgaaatatttgatgttttacataattcgatttgaagcttatgtgaac

SEQ ID NO: 52141 - DNA, 415 bp, Zea Mays
gggggacaagggatcgccccgacgaagactaatgtattctccaggctcatcattgacaaggatccttgtggaggaggtggatagcagcagactaataagattgcaccaatttcgatcaaatcccaagtgctgcaacatatcaagcaagaatgatcaggaaaccgagttaaaggccttggaaatattcaacttcaataggatgtgaggctctttcttattgtgtaaggatctggcaagctgctgcaccaacaagaagttgtcttggatactccttcctttgataaagacactttgattgatagagaccatgcttggcaggtggggtgctagccgagctgctattactgctagctgatctgtgatataacctggtggttctactttgtgttgtctagttgcactttggtgttctttt

SEQ ID NO: 52142 - DNA, 349 bp, Zea Mays
gccgctgcgatggcccacagcaacagtggaacacgacgagggtacgtgtccaggataataaaaatcaggcacacacatcgatgacgagaaaacaaaaggaagataggacaagctagattagcccaaattgaccaagatgcaagtttttttcgcatcgagaatatctatcctcactattggtctcattttcactacttcgttaggcactatggaatctgtttatggagtaaattattaggttccacgaatggatcttccaagattgtgcaagggatttatctagctgaacatctaactctgagtcttccaatacgacactagtagtagattctaaaggtaactgtggttt

SEQ ID NO: 52143 - DNA, 865 bp, Zea Mays
tttctctaagactcacatccaccctgcggggatggcgggttgattgcatggaaatgtaagggttcttttgcaaaacgcgttggctgaaggggtatcttcgtctgtgggccgttggattacgatcgagcgggttagattagattcaaaccccactgaaccggtatgcagtcctagccaaccgattttgatcaaacggccaggaatccatcacgaaagaggtacgcgatcatcaatctaagtcgtacgcatatgatccgacggtccatccttaaagcgtgaaggcaatggagtgatttaatcgggtccgcccattgagcatccaacggccgaggtcgaaccaacctcccaccgacctgagtccggtgccaccgacgaccagcgcggtggcgccatcaccggtgaaggtcgggacacgattctagcgcgtaaactctcggagtatcggtgttacatgcgaaggagacgatggcgaactcaagagaggggcacttaccgactgtggtgatggagagggggtcagccacgacgattggcggcacccaagctacggcgagcaattcaccgagacttggttacgccccgagttccgatgtccactgtatagtctccacgaagctcggggatgttcctaaacccgaaagcgagaacacaacgaccgtgtaggcttgattatcctacggcggatctatggtggtggcggcgctctcgagggttgatggaggatggctcaggtcaagtcgatgggtcgaggtggccacggggcgcccatatttatacacaggagagagcgtttgttatgatccggccgacagaaatctcggcagcttctgttgcgcgggcatggcgcgtgaatctggtgaggaag

SEQ ID NO: 52144 - DNA, 827 bp, Zea Mays
tgggagatgccgaaggaagctgctgccgggtctagtcaaggcagcttggtgtatctaaaatatacctttagatatagagagcagtttgacgagccaaacgatgaatggttgaattgtattgaagcggccagtgacgagttgcttggtgcctatacaagggccgaagatgatgctaagatcgtagccttcggggaacaaggcaataaaaggctaaacagagtttttgatgttattagtttcgtatacccggattacagttatcccttgtgacgacaaggaaagaaaattaaagttgccacttcggctatctcagatgtgccaaagggtaagaagattaaggttttaacacaccgacctagatacattgaaatggccatagtaccgaagcttgccgaaagggcatcttccaccgctgagcaaggataccctgcctctgcgagctccaaaggagaatcggttgaggtgccaaaaactcctgtcaccaagtcggcagaagcgctgaagcattctgccgaagccaaaggaaaagcggccgaagagccagagcttggagagccgacagggctacaaaaaatcctgggaccgctaccagagaccgaatcgctgaaggtatcaaaagctcctacaataactcccaagaggaggaggatggctagcgtgctggacgatgtcctcgagtcgacaagggcatcaactcctgctcctgcaaaggagactgtcgaagctactacagctcgtgctgaaactgaagctgggctctcagtgcccactgaaacagaacctgctgggactggtcaaagttttgaacaaggaccttcggacgttgg

SEQ ID NO: 52145 - DNA, 420 bp, Zea Mays
cacaattgttttttagcttcgacatttgttgtgatcgtcatcgaaatggctgaggataagaatactgtagaccccatacctgctagcttttacgaagcaatggaaagtaccaacgttgaaaaatcaccaatgaaatgatggctgggttatctagggattccagcgacagtgatagctttgatatggaaagtggtaacgaggatgtcgaagatcgaccgtggaggccaagccatgttgttttcgggaaatcaactgtcaaacaaggccagattgaagcgatgaagggcaaatatttccatgatatatctatagtgagggctaggggagaaagcactgttcctcttcccgaagtagatgaagtagtggtttttaaaagcttcatgaaggctgggcttcgttttccattgcacaagatgctgg

SEQ ID NO: 52146 - DNA, 355 bp, Zea Mays
tttggaactctacatctcgggattcttgagaactttgtcttgggtcagtgcagcaaatctgtagagctatgtatggagaacaagtttgcttaagtaatcaaacactagtgctacacaaaaatgagagatacatgaggttaaagtggcgctgtcagtcggcctgacatgtgttcattcactacatctgatcaggttaaggtttcagtattgtcgtgctaatttgagcatccggatctagttgatctctgaagatttttggtatggttgttgtaccaaaatgaaagaccattagtcctggtacaactttgatgcagacttgttggcgtgtagtcacataaaatttgaagtaatcgcc

SEQ ID NO: 52147 - DNA, 679 bp, Zea Mays
cttggcacaaagtctaaatcaaggtacttgatgattcatattgttgttttggttatatcacgggtattatgtgatcacctcagcacaactttttttcttggcttctcatagaaggtccttttttgttactttttccctatacacggtatgaaactatggaatggattgcctccacgttttgttgaccatagtccaaggaatgatgacatggacaacaaatcagatggttccaatagcttgatcaccagaaatgctcatttctcatcaagaaatgatttaggtggttttcatcaagatgaagttgggattagggtatgattgctcaaaactcttcctttttgttattaattaattactccctatggttcacaatagttgttttagatgtggggaaaataacgaagaaggcagataaaaatgacaatagtagactcaattagtcttccccaaagtgtgcatacatgaaaatataagttaggtaatgatacaattaaggaaggttatgggcttatagctggaaaaactatgttgaaattacgtacaagttgtgaacaagtattttgaagattgtgaaagggcctgaaactagtattttgatttggagtgagttaagattactattcacaaatatagatggtcaaatgtatttcaggattcaagcttctcaccatctcaaagg

SEQ ID NO: 52148 - DNA, 858 bp, Zea Mays
cttcacagaatggcaatttatgcctcacccgagcccatctcggataggagaatagcttcgagcccagcctcaatcaaaggtcacaggattcacagagacatgagcgtttattgtgaatacctaccgcacatgacgccacaaatggacaagaagcgatagtaccatggtcccatccactttcatcaactacgatgacccacacacgggaataacgacaactgctcccccacgtcgtctactatactcaagcaattccagacgggacgtgcgtacgtcagggcatggtctcacccttgggagagaattgcgcctcacctgaatcgacctcagcctcggagaaaactctgcctcgctcgagctcaacttcggccaactgccccagcaacaactccccacgaatctcgcaggaggacacttcaacaattgtgctacctcctccctgtacggctgcatgccccgaggcaggctcgaccaaggccttaggaggaacctccgcctcacccgagctttgtgtcggcctaaataacattgcccaaaggacgtcacctactccttcgtgaaggctgccaacaatcggatggctacatatccacgtcaagtctgctttacgccatacatgacagattattatgcactttttcaccatgcttactgtcggtaccctgaatcagtggtaccctctactacagtataaagacgctgtacacgtacgacgtctcctggccgcacgaagaatggcacccgaccccaccacatgggcaggtctaggggcgccgcatgacaaaggaagatgatgcaccctaggatgcatcattgggtccggacctccacggatgaataccggacccttgtacgcac

SEQ ID NO: 52149 - DNA, 411 bp, Zea Mays
cttttgacctaaagaagattacactcatgacatcgatttgatatgtcaatctgctagttgtgtacgcagttagccccgatggtgattctagccgatatggacaagtcacgcacataacagagaaggacgaaccgatctctttagtcatatccgatgtgatctatttcaaccccttataaccaattgatctaatcaaattgtgcatcaagtagatctatctcatgaacctagatccagacccaaaaactacgtagaacctgcctccgataccactgaaggattatagggaggctacactagcacaaaacaaaattttcgaccccataaaccaggaactattgttgctataggtcatggaattaccactagacgtgcaggtagtgaaagccatcttaatgtagacaaacgcat

SEQ ID NO: 52150 - DNA, 1549 bp, Zea Mays
cgtcatgacttgacgagggaagaccaacaggaacaatctaaagggtatcatcaagggtgatccccgccccaccgacagacagtagtttcctcgcatctaggtcgccgacctctaaggcgactggttcgttcaaagtcggggaagcatgcaccgtcatcaccccctcagactggggcggggatgacccgatgtgaacatccatggaggtatgggagagagagtccacctgaacaccctcgggggctgggttgcagctcgcactacccaccagagccggatcactaccggcaacaccctcgggggctgggtgactaccagcaccaccctcgaaggctgggtcttccgtggtggccgtctctaaggctgagggctcctccgtaacctccataggaatcgggtaactcgaaccagcattctagcattgaagactaccctccaaagtcgacgatgcgcgagacaccgctcgggatacctccagtccaccatctagaacctctggacgaacatccatcacaccatcggcggttagctctgacagcatatcctcggggacgacgtcctcaagtgcttggtcgaagtctgatattgatagtccctgaagactgacaagagttgatagagctggagaaggaatatcacctcctccctcgctacctctatagtgcctgatgttctttcggatcagcgggacttcttcctcttcctcctcttcatcttcatcaaaaacgaaaacagtagttggcgcatgatcacaacccttggcatcaactttaggaagggcctccaccggtgtctcatccggaatcggcgctgaaggacccacgccatgatccaagctcgatagtcaccgaagtcgcctcttcttccttttctcttcaacgggtgcagtcgactagctcactcggcatggacgctttggacggacctcttcgggtttctggatcctctccattccaacaagttcttgcccatccgtgatagccattggctcggcatgtgtcgagtcagatgattccctagccagcaagttgagcgcagcatctatctcctcgtcatcagtgctagccgacatctcgaaatgagtctgtctctcaccctctgggagaccccagagtggggcaattaaagcttcaatgtcctcagggttgggtcacactctaagacccggaccgccatcacgggcaggaggattacacacaaactcaaagaaggacctatgcgatggcaggttctaggcagaataagcaacaggagcaccagcgtttgaaactctacccctcaggatcatatccagtcggctcagtagatcggcagtggggattctcttgtttgtcacccgggtgccatcgttaatgtcgttgtacagataagcagggtatgccctatccttcaaaggctggaaattcttgaagacgaaatcagcaaccacagcttcggcagtcagacctctctccttcagcagacaaatctcagcaagcagaactctagcctctattacctccaagggaagttgtaaagtcaacttgtcggtgtttcgggtccgaccgcg

SEQ ID NO: 52151 - DNA, 516 bp, Zea Mays
tggggcgatagtggttggcgagttggaaccattagggttcacgccgccattagtttaggtgtttccggtcattctaacgctagggagatcaggtcctctaggtatgtggtggctagggtttcagaggattggcttctgtgctggctctagccatagttaatatagtgttatgagtttatgacggggggcgtcaaccaaaaaaatataaggccacaccatgattaggatgtgaatctattaggatagagtcggtacttgtctccttaacgaaactagagaacattcttaatagtatgatcgtcgaccattgcctttgaactctacatttatgcataacaaatcaagagacatggtgcacatgcaatcatgcccctgttaatacctacgactcaacccaatacactattttgttgaaattatcgtcctaaacctgcacatatcaagtttgtgtccataggaataaaatgttcaaacgttaggaccaaatccgaggcagtgggacgataaccacgtcat

SEQ ID NO: 52152 - DNA, 890 bp, Zea Mays
gaaaaatagacctgaagttggtctgtcagtcgagtgtagctctgaaactggactgacagtgaaccaagacaaagtttgggagctattttgagtatgatccagtgagtatttgagtgtggttgctatagcaagattaaagctggattataggacaataactttgttacaggaaggttagtaagttgtcacatagaaaatggagaacaaggctccacaaatcacgctgtcagaacaaatgaagatgatggccatggtacagtgcgcaaaagatcttcaggtacatcacccctcgccaccggtgacccttgcgctgtgatctgcaccgttgctatgattcgtgctctctggcggggagatatttgcggcagagtaaagatcttggcaccggatcggttcggactcggtcacggttaagttcgtcgtacccacttggtctgcggctggccgagatgatcctcaccggcgttagccgcttaaagatcatgcgccacacgtcttggaagcttagcacgtcgcagtgaacctatgtatcaagctcgtccatcgctagaggccttgccacggtgaaagcgacgaatcacttgcgccagtgacctcccctctctccgcctaccagtgtgccttcgcaaaattggacaccaccgccgatggaacctaaaaattactgcccaatgagctctgctaggtaatcatgcatccagcgcacccgcccatgtctcggattgtccaccagagagctctaatttagagtttcccccaaatccattctccgcgccgtcgtgaacgccatgccgtgaaccaccgactcctggtccgttcataccctccctgcccttgttcgagcacccttggatgctatagatgcttatcggcccagcaattgaactaga

SEQ ID NO: 52153 - DNA, 529 bp, Zea Mays
ctaaggtcttccattggtaattgttcctcaggtaccctgagacatttcttcagctgaaatacatggaatacatcatgaacctccgcgagatgatccggtaactccaattggtatgcaacttctcccactcgctttaagattaagaagggtccaataaagcgaggggacaacctgcccttaactttgaatctcctcattccacgaagtggtgacatcttgaggtacacataatcaccttcctcaaactccagtggtcttcttctattgttagcgtagctcctttatctggtctgagctacccttaaattctcccgaattatacggacttgttcttctgcttcttgaataagttcaggtccaaagatctgtcttcctccagtctgatccaatgtagaggaatcctgcatttcctgccatataaagtctcgaacagtgacatctttagactggcctggtaactattattatatgagaacttagcataaggtagactcttgtcccactactaccatgctgaagggcacaagct

SEQ ID NO: 52154 - DNA, 520 bp, Zea Mays
ggcaaggacgttcattgcttgtagtggagaccgagctatggtcctggcgaccggtagagggagctggaggaagggagcggctgggctgggcttgctgcacgcgcgtgagataatatcagggagagggagagggagagggagaacgacgggaggaggagataagaatgacggcgggatttttcttctttcaggtacacagcgacgcgaccaaggatacagtaggggagagcggtgatagaatacagagagaattctagagctagcacgtatacaagaatctaggatattaggatggcttgagataagaacaaggaagcaagagacgtgaggatatttacgtgacctgctgtgtggtggctgaataatgtcgatggaaccgcctgacatcggttgaagtaataagagattttcctccattttctttaatgaagagacttaaaataagtggataataggactagggtttaaaagcaacacaaataagttggcccaaaataatatcacgtacaaaagaaaaaaa

SEQ ID NO: 52155 - DNA, 991 bp, Zea Mays
cgttcgtctcccacgcccgcgctcgccagaacgctacggcaccatcgcagagcggcggcaggttcgccggagacaaacccatcgacgaccagacgcacgatttcctaagtagcctaatcctatacaagaatggagatcaaccaacggccttaggagtaacttaccaaaatttaaggcagtaatgaaatccgtccgtgtgagtggcggcacggtggtggaattagacctccgttgagaaatcccgcgaggagtctgtcacgttctacgtggtactgcgccttgatgtcgtctccgacatccaccagcccaccccagtgaaccacggcaccgcccatcgggtcccgacgaacggcggaagcacgggccggccatggcgggtgtttggccagtccctctgcacgagtcggtgcccactttctgcagggcgacggtggtgattttacttgtgatggattcggctcagggcgctataaataggggtagagggtacccagatcggtgtgcccacccccacaaatttcgccagcttcaacagatttctgttggagaccgtaggtagaggatgagtcttacatggtggccccacgagtcagacagtgtacggacgcccacccaccagccgttgcactagaacgcgcgcgaggctgattgtgtggcgcagaaataggcttcagttgcgcggatggcggcatgcttcttttcggtttcatggaggaagaaacgctggcaggctaaccggccaaatcgtgcgtgcgtgagaaatagatagattgctggccgcatgggtcccatgcgtaagtgtcacaagggaccatgcatgtgtgaagtaatggtgatgtcatctgcggctatatgaataattaaatcgaaggaaagagggtgggttacgtccacattttggcgttactgggcaagcagccatggaatcacgtagatgtgaggcttcattcatttttttgttttctttcttgtttttcttatttctatttta

SEQ ID NO: 52156 - DNA, 1086 bp, Zea Mays
ctaacagttatgtaaaaactgaatgcacatctacttagcatacatgtatgtgcaaatatgcataacactgatttgtatgatgcataaaactagtttaaactgtgaagcatgactgtacaaaatctgttaacagtttttgacaactacaatgaaaatgaaaattactgagctgacatgttcagatggagtctgatcaaagcatggaccactgtcgggcaggtatgtttctgccgcttgttggacgccgccagtagactaacaatcatggtataaatggattagaaatttagtaaactactaataataatatagaaaaaccacgagggggtgtactcataccttgatttgcggagtcgcatcaaatatcggcgcgtcaggttccatatgtggtgttgctttaggagtgacgtttgtgttggtcggcatgttcttgccactgtcaccatgtttaccctgaaaaaattgtaatggttatatgctatttaaagaaaacgatgaatacaaccctagaatgaaaaatacaattaataagaaaaacattaccactgtggttgtaggtgttttgttctgtttcattatatttgtatgaaccagtggatcaatatcagcttcatcggggcaactttctaatagtacacgaatatgttgttgccttaacagtaattcatgtacctgtgtgtctataaactgcgtatcctgctgggaaactggagtagacatatcgggtacagttggggggccggacacgtacatccttctgtacgtcacatgtaaataaaaaacattgtttaaaataatggcatcaaaacgatatcgacaaatgattgcataacttttttatattgacgtaaagacattaaactgactaacctgttgtctggggaagaatatcatctgattttgaagttgttttctgcacatcataaccatcttcattgtcccccgactcagcacggaggacctcatcaattaactcgccaaaaacatcagaaagattgtattgtttctcaacaatctgctgaagagtctgtttaataactgaacacgccttaccaacctccgtatcaaaatgtgacaacttctcta

SEQ ID NO: 52157 - DNA, 330 bp, Zea Mays
cttctcgggcgttgtgagattcttttttgttctttttaatggcttcatcggccatttcacggttgcccttcatccaaacatcagagtagaatttcccacccaacaaagaagcttcggccgaagggtctgtggtgtcgtcagctgagaagatagcttctgcctgggctacgaccttaacatgttcacatctagttttctccaaaatggccgcaactcctcgagcaccagcgaaagcgcagaaatccccatgatcactgagatttcatcaaaagcttcagcttcttcaccgatccattggataactcctccgggatcaccatgaataaactt

SEQ ID NO: 52158 - DNA, 745 bp, Zea Mays
caattgtggatgatgtagagctacctatataacctacacattaactaaaattttccactttatatactcataaacctactatgttgatcgtgctaattcattctcgtcctatgtttcaggtataagttgcttctcaatacggggacgagatgggtgacacagatttcatcctctttggttgcatggctcggcacattgttaaaaggccatgcaatatgctcaaagctaatactctaaccaatttcattccacatttagtcacaaagctccttgaatggcatttatatggaacattagcttcttggagaacacaactagaagtgtttgcttataggtcagtgcagttgtaggagagagatttattagaaatgctcattccaatgtcaactcgtggtcacaacaattatcactcatgctctcacaaggtgcaatcaacaacctgcaaaacacttctaaggaagatgccaccttggttttgcctccaacagccctcacacatcaaggtgttggagccaattatgaggataaggtatgtctcccactcgtgttagaaactcacaagttcataaattttgttcgatgtttgtgtgacctcccactcccgtacgttgcctctcccctcgctcttaagtctcttgcaggtgggcccgtgttgtgagtttcttccccaccgtttcagctttcactctcccctgctcgatgccgtggtcgcgtctacgtgtgtccgccgctgcactgcacgcgt

SEQ ID NO: 52159 - DNA, 442 bp, Zea Mays
tttaccagaagcttggggtatgttctgtaaaaacccgagggcttggattaaactactttatacatagtgtgggtcgcgggttcattcatataaagagcaggggttcttatgcaattgttacctggccgaaagtgtatcggcgaagatcagccgttggatccaaaatcgatggaacagattagatcctctcttaagtgaaccggtacgcgttcgcgaacccttggatctagatctaacggaccacagccgatcaggacaccagccattcgatccgatccaacggtcccgatccaataaacaaaaaggtattctctgtctaatctcgatcgttcgttagtggatcaacggccaaaggaattcttccccaccgcacaccagggtacggcggcgatctgccctcacggcggccgtgtacgcggcgacgagcgatttcgacgacggc

SEQ ID NO: 52160 - DNA, 661 bp, Zea Mays
tactatatcgtccaatgactccctccgaccaaatgcacacacatatgatcattgtgatatgatccttactcagcagaccacctagtagccttgtttatcgagaccttcaattttgtgcaagctttctctctctaaatatggtctatttttcagtcaaaacacatgcaataaataagctatcttacatgtaacttgaataattgttactatctctgccgcaaagagttatacaacataggttctaaacttatctactagtttctaactaaattaggaaggatgaatcacataactaagataatatattgttaatgtaaaagcttaaatgcgatagagagacaaactttcgttaacactgtggcattttatcgagttatcaagaagcgcgggagctttttcgtaattctcgttggagcctcacaccaggtaatgtctatgcgagtgccaagctatcaattgaaacattgtggatctcgttccctctagtatatagtggtggctacaccaaaaacatagttgtcataatctcacaacacttacagccccttttgttacaactattacaattaagaacacaagtgttagggggtagcaagtttttaatcttcacttccaatcactaggaaaaccctagagcaagcactaaccatagagatctgac

SEQ ID NO: 52161 - DNA, 712 bp, Zea Mays
agaaaaagaaaaaggaaaaggcttcaacagtaatgggctggattcagcccaggcggcccagtccagagaggaaaacgcgcgcgtgcgcccgcgcccgcgccctggcgattttgcagaaaggcccacggcttactgattaatccgaagtgagttcgattactattgcactgagtcgctgatggtttgcagaaaaacccttcgcgttctattcttttaccacacctagtccccgacggtgctccgcacgggaggccgagctccggcgagctagaccggccggatgacgcgacggctgaagttcccaagcgacaggaacacaattgaactcctacggatcatttcccccaaatcaattttatggttgggactacgaatcaatcggtccacggtgactgagcggatgggtaagaggatgaacgcattccgagcaaacgacggcgaggacgaccgaattaaggctggggaaaggttcatgggtacactagggtctacggacattctttgatttgggtagaacaagacccgaagaacgggtcgacggtggggggggtcacggcggtgtttgacggtgcataggtgcgttccggtaaggggctttggtcaaactccaaattgttgcatccaggggcaataatagatcacatactaactaaaacaaagagtaatttgatcattactgaccagaggagcgctggctatgaagaagttcttc

SEQ ID NO: 52162 - DNA, 530 bp, Zea Mays
aacgatcagacttatggctgtcaaattttaacaccagcaagataataaagttatctaccccttttctatagcacatatctacagaaaatacaatttagttcatcaaacatacaacacagggaaatcactgcgtgcagtccaaaacaacaactaataatttcagctcctatttactttaagaattggcgcgttctagagacttgaaccattctaacactttgacatttgttagagttaaaataaccaagtgagaaccaacaagtcaacttaccaatttttatccgagttattttgtacgctagaatcaccacacacaattaacaaacacctccaccacaataatcggacccggtacatatacgtgtatcggtgcgcccttcacacaccaatttgaattttaacttagacctcacatgaacactactacttttcatccgcgatcataaccatacacatttagaccacaacgagcaattcaccgtgattacgagcttaaccaagtcatctaacaattcggctaactagagtaa

SEQ ID NO: 52163 - DNA, 582 bp, Zea Mays
caaatcctaccccccttaacaaaaatctcgtcctcgagatttgtaagaaaaagggatacagaaggattggtttgtgattcgtcttttagtctataataggtttaagatccagagtttcatatatttttttatagacaatagtgggttattaggaaggcctgggtatatatgggtatagccactttattatgcaggatgaatgatatctttaaagcatatgtagttttgggtaaggagtggggtaagaaaagactccatccaagattgtggatcttgactcatcttggtgacctcacttgatccttgaagacttgagttggtgctcatcctttcttgatgaagttgatcatcttcttcggtcttgtctcattgatcaagagttggtgtatattattgggctagggaatatggttaagatagatatggatgagatagactacatgatgtaggtcaaaagtttgtttgatgttaggtggggataggcagatcatgcaatccatcaagactctattggttgggttggtctatcattctttatttagtgtagggtaaactaagttaaaacatgtggataaggtctaa

SEQ ID NO: 52164 - DNA, 467 bp, Zea Mays
ataatacaagggatcgacattttcctcatatgcagttaagtggtctactaatgacaagaaacgctcaacataatccccgaccaaacccgactgtctaatgtggaacaactgacggatcagcgcttcatgttgatcccgcccaaagcgatcatgcacctgagtacagaattccatccacgaccagaagggtatgcggcgcccaacggattgcagccatcccttggcgcgcccagaaaaatgcatagtagcaacccgtatccacatgcgaggatcaacgtcatacatatcaaagtaattttcacataaggacttccacaattgcgagttatccccgtcgaacgaaggaaaattgagacgtggcaggttgccactgcccccatgaactccgtcacgacgaccgctcccatctacatcccgtgaagtatcaccaaactgatcatggccatgtgagaatggatcaggacacg

SEQ ID NO: 52165 - DNA, 378 bp, Zea Mays
gcgttccccaagtctccactgactacaatgccacgctctccagctccggctacaacgagctcttcgccacctcgccatccagccacgactccggctccagcgagctctccgtcaccatgtactccagcaccatcggtaccctcctcgggaacatcctctccgacgccagctcgtgtcgaacatgacccagtggagctcgtgaccccgctctcccacgacgaggagcgcgtcgacgcgtgctacgacggcgagccgttgcggtatcgaaaggtggagggccttctcatcgacttgtcagtgccgggtccggcgtctcgcattttggcaggagagttgcatcttgcatgcgacgatggtgagcctcggtctttcgcggag

SEQ ID NO: 52166 - DNA, 809 bp, Zea Mays
ttccgtcacatcctgctccgcagccatgccagcatttggagattcttgctcagccttatcttcagttgcggcaggcttcgtctcagcaggcgctgaaggcctagctttggtttctgtatgagccatagcagcttcgacaaccttttttataggagcaggagtcaatgctcttgtcttcatgacggcgtctaacatgctagccattcttcaagacgtctaacatgctagccattcttctcctcttgggagttgtggcgggagcttttgcaaccttcggcaattttgcttctaccggtgggctcagaatttctggcagcactattgtttttttccaactctagctttttggctgccacatcttcggcttcgactggctcaactataagcaccttcggaactatagccgattcctcagctcttcgagcggcgggaacagcttgttgtgcttcagcagcagaagatgtctcttcaccaaattttggcactatggccatttcaatatatcttggtcggtgggtcaaaaccttgattttcttgcccttcggcccaacagagatggccgaagtgacagttttcctcttttttccctgctttcgcgagggatcgcaataatcaggatatataaaaccaattacatcgaaaaccctgttcaaccttttctggccccgacccccgaaggctgaggacaaagcatcatcttcggctctgctatatgccccaagtaacttgtcgctggtagcctcaatacatttgaaccagtcgtcatttggttcgtcaaaccagtttctgtatctgaaggtatatttcaa

SEQ ID NO: 52167 - DNA, 488 bp, Zea Mays
catatttctccattcaaatagtactgtaccgttcttgaggtggagatggttggatgtatttatacctgtagctgtagtatactgtactccccatatataataaaaagtaggtgtgagtactgttgtgcttgtgagctgcgatgcatggttcgatccaatcaaatgagtctctgtcagcctgcaacactttgcatgagccatagctatcgaacttttttgcagtagtccacgatggcacgggcatcgacatatcgaggtggtactttgttgttgcacctgcagctttagcgttgatgctataggtttactcctacatgaatgctcacacccccttatgtaatgtactccgtatagtaatatctggtcgagcctgctctgcctacatagctagccgccgctgccccgcttcgcaggaagaacaatcgaaatcatataactaaacattaagggcgtgttttggatcatttggacgagagttttagtcggtc

SEQ ID NO: 52168 - DNA, 291 bp, Zea Mays
cagcctagttaacgcgaatgtatagctcttcgggtgtgtgtaacttccttacctaagatatcagcgcttcggtcaacgcataactcgaatacccaatcttcgtcttcttggattaagttcgcctagtctgattgtggcccgttggtccgtcccacaaagcaaaccatcgggaggctcatcaggcggtccatgacatgtttctttgtttatgaggacccggggatatctatcccccacacaatgggtcagaacacagctgcaaaagtgtcacactgtgtcaaaccgacaact

SEQ ID NO: 52169 - DNA, 1320 bp, Zea Mays
gaaatgatgtgccctaagtaggacacattttctttcccaaagaaacacttggagcgcttcaggaacaacttgttgtcgctgaggacttggaagacctgtttcacatgctgcaagtgttctgcccatgtcttactgaagataagtatgtcatcaaaaaataccaggacaaacttccgaatataggatttgaggacgtcattcattaaggactgaaaggtggagggtgcgttcgtcaacccaaagggcatgacgaggaactcgaatttcccgtggtgtgtgcggaaggctgtcttgctgatgtttcccaaactcatgcgaacttgatgatatccgctgcggaggtcaagcttggtgaagaacctcgcaccgcggagtccatccaacagctcgtctactactggaatgggaaaggagtcctttaccgtcttgctgttgcgctcgcggtagtcaatgcagaacctccacgacccatctgctttccgtaccaggaggaccggggaggaatacgcagatgaacactcccggatgatgccttgctgcagcatagcctcgcattgcttcttgatctcatccttcagcagctgcgggtaacgatacggtttcaccgcaattggtgttgtaccctagaggagtgtgatgcgatgatcatggcgccgaggaggtgggaggctgcgcggttcctcaaatatgtcggtgaaggagtcgagtagtgttgcaaggagatccctagtgatggccagcacagagagctgcgactaggggccactgatcccggaccaacggacaacacgctccttgtgccagaacgccatggtgaggtcgccgaagttccacaagatcggccccagggtatgcaaccactgtactccaaggacgatgtcgaagccatccatcgcgagggtgtagtaggagatgtcaaaggtgtcgttgtcgatggagatgaccacctggcgacatacccccgtgctggggacacggtcgccgttcgccactttgacggagaggcaggttcgacgctccaccgtgagccccaacttgtccaccagtccctcctggatgaaggtgtgagtcgatcctgagtccaccaaggcgaccagggagactccgttgatgacgactaggagtttcatcgtgttgccaacgtcgatacctgttagggcgtgcagggagatccccaactcttccggcatggactcctcatcgacgttgtcgcccatctcgttgaggaaaacacccttgcctgtgcatttgtggtctgtcgtgtatttctcggtgcagtgatagcactcgccattggtgcgcttggccgccagctcttcc

SEQ ID NO: 52170 - DNA, 736 bp, Zea Mays
cgtttgttgggtatagtggtcaccctgagttaagtaaacgcgcagaaaacaattcgagtgcctttgagaatgaagtcattttattgatggtgtatctcccaattacagaatacaatgtcgtcccaatagcttttgaaatctagctaggggtaaaacttcctgagatgctctatattccacaagttccctatttccgtgccatccatttgagtaaggtgatatgatccgggccgggtgacttctgttactatgaatggtccttcccatagtggtgacaatttgtgtcgcccttcccccgttagaattcggcggaggacaagatctcccactgcaaaggatcgatgtcgtacggtcttatcatgatagcgcctcagagtctgttggtacctggctgtctgaattactgtattcaatcgttcttcttctagtatatcaacatcctccagtctggtagcttcagcttcagctatgttttcgaagatcaatcttggtgccccaaacttgagatcaacaggtagaactgcctccgaaccttaaaccatgaagaagggagtgtttccatgcaaggctcggctgggttgagttcttaagctccagaccacatacgacaactctctgatccactttcctgcgaacttttcattcttgtcgaagactttctttctgagtgcttctaatatcattccgttggctctttctacttgcccgttggctcttgggtgtgctaccgatgcat

SEQ ID NO: 52171 - DNA, 528 bp, Zea Mays
ggaccgccaaaaataactttaatttcagaaataagctttaattttcgtcgtcaaagctctcgaaagtaaacatcagtttttgattgccatagtgaggccaccaaaattaacgttggctactggaaatggtttgaaatgttgttgtccctgatatgtctaaccctgtagatttaacagcagcgcggcatttgaggttagttgctgtggcattctaactaacaaaaagatgtaggatcgaagcgcaatgtcggtgcatggctgcatggaggtaggttgttgcattgtgatgttctactcggacaaaaagatagtgattgggtaacaaaactacctgtggacatcgattttcgcttgtggtcgaggtaataaaactgtcggtgaaaatcttttccatgtggaaacacaaaatgggttttaaaatagcaaaaaaaattaatttcgatgtcgcgacacttttagcacataattcacgtgctatgggtcaatgggaatcaaacccttgacctcaccctcacacatagcactttc

SEQ ID NO: 52172 - DNA, 428 bp, Zea Mays
gttttctctgctctctataatctgtctttgctcaaccctttcatcccttccattcttccatacccatacagatgtcagaccctggaatgtcaactacaagtgatgtcattaagtgcaaagaatgcggtgtgttggcaagtcaaaacagcactataaatgaaacaactgatgaacaaaccttcaagacacaaaaggatgaacaaccaaaccaacagacaagtgaccttggaacatgttgttgttgtgagtactatggaatttcttgtcaccagatcagtacaaacgaaagtgaaactacaaaacagaagaaccagattttattttctggcatagacagacaaatgtctccccaagaacaactaatagcagattctctcatacctaatgcactgtcagttgatgaattgcaaagtattcccaaaaggaaa

SEQ ID NO: 52173 - DNA, 727 bp, Zea Mays
agaaaatgggtggcaaagcaaattaaattgctaagcaaataccttttccctattttgcttcaccgcttcagtggatagctccctccctctagcattccaaatatctgtgaagaacttcctttccaacataaaggttttggttgaaggtttcttcacatctcccaaagatactgcaaaatcaaattggctagcagccttcacatgcccatgaccagctttttctagtaccaaagccatgcttcgtgtgcctatccacacacaataataatcctctcaagccgatagaattccatcgaaggcttccacctccccatcgatccacttaacagctctggtggtatcgccatcagcatagtcctcctcaccagagctggccccaaccgaagaaaatgtatctttcatcctccagcaacattgagcagctgtggagaagcactcttctcttgagcttcgtagattgtcaacaattttctgaagatgattcttttcgtcactatagatttccttcttcgctttatccacctcaaaattcccacttacatctgccagctcactttttagtcttgcaacttcggcttggtagatttcagcattctgtttcatcttagctccaagctcttagaaatgtttcgcctattgcaaaatatattttcaagcaccaaaattttgtcatttataggtttttagcttctaatacaataattttctcctcaatagtcgagatcgc

SEQ ID NO: 52174 - DNA, 476 bp, Zea Mays
gccttacaatggcgttaggggtcatctgatgaagataaatttcgattttttttcaagacttcccctatcatctcgtttagaggaagtcgcagtcctgctctgaagaagctcttaaaaaccactatttcatcattcttcggtgttggggtggtctcttctctggcaaatcagacaagtttcctttcagcttccccaaagtagcctagcttcatcatcatgggcatatcagcttcagtcacaatagatttctcaaaatctagatggctgggttttgttgggatcaaaatactataatcttcctcatccacttcaatattttcttcttcagcaacggtttgttcagcttcggcaacagcagtaccttcgtcagtgtttccctctgtcaaactagacctaattgtttcatgacttcgtaaatcggtgctgtctcggtgacctcaatctcttctccctcacgagtcacacttgcggtcgaa

SEQ ID NO: 52175 - DNA, 576 bp, Zea Mays
gtttacattgatgatattgtagtcaaatcggctgagtctggttctcatatagccgatttgcgcaaagcctttgctaagatgtgtcggtatggtttaaaaatgaacccgcgtaaatgtgcttttgaagtgtcgggtggtaagttattagaattcatcattcatgggaatggaatagagatagatcccaaccgaattacgtccattcggaatgtgggggctccaacctgtaagcttgagatgcagaagttccttggtgaagtaaattatttgtgaaggtttatttctaacttagacgagaagattgatgctttcactcctattcttcggcttaaaaatgatgttgatttcacttgggggcagaacagtaggaagcatttgatcttattaaaaactatttgtctttagctctagtattgagagcaccacaagcaggagtaccattcaggttatacaatgcagccgaagataaggttatcggagctgttctgacacacgaagccgaaggaaaggagcatgttgtgacctacttaagccgaaggctagtagatgctgaaacaaggttgcaaggagaccgag

SEQ ID NO: 52176 - DNA, 394 bp, Zea Mays
aaaaggaaatagagagaaagaatatatagagagagaaagcctagagtgagaaaaagaagagtaacacatgattttgggtgataattacaaagaaattttatatccaaaatcaaggtgttacacttgataatgtggtgactagatttgtggaaggcagcaagcctttgaccttagtaccagagcctttgcctcaattaatatagtgcctttatgaccgaggaccacgaccagaaaaaagtttgcgcttccgaccatggtgtagatttgttaagggaaagaaggagataggatcaaactcgggctctttaactgacaacatatccaagataggcaattatggctagtgtcttaggtggatcacacgacgtgattgagattgtgtacttgccaggcg

SEQ ID NO: 52177 - DNA, 290 bp, Zea Mays
cccgagccatctcccaccattaaaacaaacgctctagactgagattgcttcatttacctccctctcaatcgcatataacgatccgtgttttggatcgtccctcatccctaacccacctctactaccctacctaaccccaagccccttacaacgcaatcaacgccttcctcgttagttccgcttgaccccacctaagtatgaaaccatcaaaccaatgccaatgacttggcgccgcctacgggcgccgtcgcttaatgatacatctcaagccgctcgaactgcttgctcta

SEQ ID NO: 52178 - DNA, 839 bp, Zea Mays
ggcaattggccttgaaagcaaaaggaaagagttgttggatcacaagagaaagttccaaggtagaccaacaggaatacctgtcagaacaactcctaaggttctcagttctgctctagaaatcagagtgggaacaacaactaccaagcacgacgctctagacagcaaggtcagaggacaaaccaatacaagaactaacagaggaacaacactcagaccgaataaaggtctagtggtcaacaacagaatcatcaaggaagcgtcgtgaacacaccggccaagaacaacaacacaaccaccccagtccaacataatggttgtttcaagtgtggggaacatggccattatgctaacaatttcccaaggcgtaatcaaaagacaccccagaagaacagcaaccagaggactgattagaacacacctgctcatggatctgcagagaacaagacttcgcagaaccagagtaggggaagacttaatcacgtgacagcagaatcagttcctgaggatgctgacgtggtgtatggtatgtttcttattaactccatacctgcatcagttttatttgattctggagcatctcactccttcgtaaaaagtcatttgtggaaaaacataatataccaaactatcccttgaagaagaaactattaattcgatcaccaggaggtgaacttagagccactcactcatgccctcagactaagattgaaattagaggcctaagctttctagtagagctgataattttggaatcaagtggaatcgatgtgatacttggaatagactacttgaccaagtatgatggagtaatatcctgttctaaaaggatggttacatta

SEQ ID NO: 52179 - DNA, 275 bp, Zea Mays
ggagaatattgttcctctccccgaagctgacgaagtggtgatttttagaggcttcatgaaagctagacttcgtttccccctggataagatgttggttgaagtcttaaaaacttttgaaatttatcttaatcaacttaccccgaagcttttatcagagtaggggtttttatatgggccatgaggtgccaagggttagagccagacgctaggtgtttctgcaatattcacgagttaccatatcagacgaaggcgactgggaaagaacaataccacaa

SEQ ID NO: 52180 - DNA, 419 bp, Zea Mays
ggtacacatagacggtgtttgaaccaaaggactccttggtcatctgtcctgaggtccgggagttgttccttgcgggctttctccacaagccttgctgtctctgagtctagacgttgagctttgccgatgaggtcttctagcattggcttgacttcgagactgtcgttgtttccaagacatgcatttagttgtgctgattctttcttccagtcctctagaaagttggtcccttttattccgaatggctttcgactgagggcgtcggctaccacgttggccttcccggggtgatagtgaatttctaggtcgtaatccttgatcagttctaaccatcttcgctgacggaggttgagatctggttgagtaaatatatacctcagactcttgtgattggtgaaaatgtggcatttgtttccgat

SEQ ID NO: 52181 - DNA, 1033 bp, Zea Mays
actgagacattgcagcccataatagaagaggtacatgatctcgatgttatactcattatctaaatttgatttgcaggggcattaatagttgtacattacttacaaaatgtacattctgcataattttgatggtttgtacaatacaccttatttacggttgttcttctgtttgttttttgttcaaattgtaggtgtatgaggttcagctgctaatggtcctgtgattttgcatttctgccatcatcattatcatcatccttggtcaatacaaataccgttccaagggagtcacatatgttcactgtaattaattaaaaaccctatttttaagggcagtaaattaaatcagtgaaataatgaagcaccaatcatcttactttttctcgatacaatgttaacttcacttgaaatatgacttatttacttattaattttatatgttcattcgctatttgggatcgtgcaaacccatcaccaaaaactacgtgttctactgaacacagatatgccttttccattgaagacaatgcaatgttgttcttttcatcttttaatttccattgaaacaatatagtttatccgataaacaaactgtagtcagttttttaccccaatttttttcaagaaaatatacaacatagtatttaaacatgccccttaactgcataaataaatgaatgtacaagtcagcagccatattctatttaacaacgtttttatgtccatacacggtaatccgtatacacaaaaacataatttattgccacacatactatatatgtgttttacatatctacgaacttatatcggttacacagcctcacacaaagagcgggatcaaatctaggctactcaatctcaggtaagaaggattttcttcctcccattcttgaattgtcgtgatcctactttcttatactaaggggatattctacgttaatgtgcattttttactcatggtggttgttaatatttttttctaagaacaaaaaccttaagtgactacatgatgttttcttagtcctaactaata

SEQ ID NO: 52182 - DNA, 986 bp, Zea Mays
aataatctccaataactcaaggacttagctgcgaatttcaggaccctaccgcaatgattttaacattaacctggacggtgggttgataaggtaaataggcaggggctcatatgcaaaattccttaactaaatggatacagatctgctacagccgcccgatcaaacacgcacgacctagattagatcgctccctggccaaccggtatgggttgtccatagccgttgatcccaacacagagggccaggattagacctaggttcctttaaagcggtatgaaacacgggccactggtttggtgatcgacgaccacgatttaaaataaccagacactaacgttgtccatccatctcccgatctccggttcagatcgaaccgacgaagggatgactctagatctaatctccactgttcctggacggatcaacagtcacccatccccttcaccacaccgacgtagagtcttggcagcacccaagcacacggcgtcgccatggccggagttcccctcagtcttgatccccgtgcctaaactccgatccgaaagcagtagtaagcagtggtaacggtagggtatcgctaagggagatgctcaccgagattcgaggagcgccgaaatctactcaccgcggtggaacccgatgtccaacgacgaattccggtcgtcacaacagttgattcctccccaatcggccacgggtgcatcaccaacaatcccacgaagcacccagacacgtcatgaacccctaagctccaggcgcgcacggggccggtgttagcagatgcaccctgaccacgtctctctcttccgcacaagcgttggcttctggctttggcgaccggaaacgagagggaggagaaggagggaccgatagataaatcccaaggaagagggcggcgtgggccgcaacaaccctgccggacacgcgtgattttttgaaccacaacaacattcgcgcggagcagggagaagctctgccaagcgggg

SEQ ID NO: 52183 - DNA, 676 bp, Zea Mays
catttcatatacttatgactatgtgactaatatgtgctcacatcttctgtcatttcagtgtcctcgcctgcccgtgagccatctcctgtcctgtctggattctctccctctcgtgtgagatttccaggtagctatccattcctttgtcgtcctatcggctgttatcttcttgtgcttagtttctctctctcatatgcagtctttaggtcaggatgctgcgcacaaagaatgtgtcggcgccagggggaggagataacgaggaccctcctcgcccttttaggcaggtcaaggggaagactgtctatttggaacagcaggaaggccgcaagaagcggcgtttggatagagcagcccaagcagctctagcagcagcaacaacagctgagcaggctgagagaggtgatcagctacggatttcttcacatcagattgcttaccgagttcgtcgtcttgcctttcggcctcgctcctccgcaccttccactcccgccactcctaccactccaccacctacttcgcccgctccagtcactcctgcgccatccaccacctcagccatacctaccaccttcactactctagcttccactgctcctcctcccgctccactttccgctccacctattccacttgcccacttccgggagcgagatgagaccgaggtgcgacctttggc

SEQ ID NO: 52184 - DNA, 848 bp, Zea Mays
tgcttcgatgtttcagtttcatctctagcttaatttcgagtcacaatggtaggaattgcatgtttttcagttatttccccccttcattttggggaggggagttttactgcaatttctagtttttggaaatcacaagcagcagaagaaaaagtcggttgctttatttgaggactctggaaaatgttgaattgattggtcggtatgcttgtcgtgtaatcctacgctgccattcttaagccagggctacataaaaactcacagtagattttagcacccaccaagcaccaacagatagaaagaaagaaaaaaaagtttcccagcctttgacaaacattagaaaacacagcactgtgcacacaccggcacccatttctcttatggcttgtgatgaacagtatgatcaagatcagagctgtgccattgtcatcgtagtactgtgcagcggcgaaatccaaatgttccaactttacatgggtaccgtagcagatattgctttctgatctgatgcaagtgtagtggagtcctggagtggtgaaactgacatgtgggataatagatttggtatatgtgccatgttgctaggaggcaggctcacttccacacactacatacactgtggtggccggtgggatattctgatggaatgttatggaccacaaatgatttgaatgagtatgatgtgtcggtggtcgagccaataggattttctcctttttgtttctttgtttttttcctggctgaaagcgacaggaaacaaaacaagatgtggatttgaataaatagaactgcaaattcactgtatttagctatttatccgatagtatcagatgttctattgaattgatgaa

SEQ ID NO: 52185 - DNA, 1024 bp, Zea Mays
agagctgctctaacataattttttagagcatagctaccttagggtgaagtagatccatgtcaaacaacaaacgttgccacatagctcttgcataaatggacctcttacttttatgctataaaattaaattgcctaggtccgaataaattctaaccccagagatcgtgttggctccctccttccccgtgttgaaaaggtttgttgtgacagaattaactgaacacggaaactcttgttgttcaggctctatcagtcgatggaatcttggcttggtcggccattcaattcctttctcccaatcgtgcgcacattgccatttgctcaccacatgctgcaacagtgagggaaatctgcccaacagtggaggcggcattatatcggagaacagagacggaccctgctgcctgctcggcacggcgtcacgggctcacggctgcacgacatgcagcagctaatccccccacatggagatcggagaaccagtcaagtcaagccaagccaattagccaaaggcaacccagctgccaacctcgccgtctcgctaggctggcaacggcaatggcgctccaccgttgtggcatcctgcacatcagctcagctggcccaacatctgatgttcatttcatcacatttatgtatgtacgacatgtgtttttccccggagacaaaaaaaaaaccccagagaaacagcaaagctgcaactaaatggtgtggtatccattcgtagtacgatctatccgccttttaaaacaaaacatttgctgctgctgttcaaagttttgaagggaaatcattataccctacaatatcggtactgtgctaacgctacgatcctagaaaggtcgacagtcgacagcggtggtggtgtgcgagagaggagatggcgatgaggtcacggtagtaggaggagatcatggcagggttgtgagcggacagatgatctaaatagtattgttcattgaatttgagtgagtaatggagagactgaattgttaggtttgatggtgtgttagtctaggtatag

SEQ ID NO: 52186 - DNA, 519 bp, Zea Mays
gtttgtaggttgtggcgtgcctcccaacagtggcgacagggataatggatgcactatcgccctctagatttagcatgcacaatcatgctcctctattgtacggaactacttaccatacattattggaccaggtagcggacgcaaacaatgctacatatagcagaaaggagcacatagcgagtcttgttggagaaagtcttatgattacgcactctattgaacacatccttgcaaaaagtctctacaaaagggtttttagcatttgtgttccatttctcataatatatctcatcaccaattaaattggtgggattcttaggtttcgggagaccttgattggctgctctaaatcactatatctattttctcaaggtatgcttcaatacaaattttccaatatagaaaattgtctccctcaagcacaagaggaggtccattcccgtcgaacatctttatctctaggtagtgatgtctaatccaatgagcacaaggctctaatacgattgaaatgatcaagat

SEQ ID NO: 52187 - DNA, 559 bp, Zea Mays
aggagacggttcacgggcaggcgaggtcactgaaatgatagaagaggtgagcacgtattagtcacatagtcataagcatatgaaatgtgaataaatacatacacagagtgttatggcacaaaaatcgagagatatggcaatcgagaggtcaaacgacgcgaaaacggcgtttgaacgagaaatagtgccataggaggtttgaaattgaaaatgaggcatgaaatgatttggaattgagccgatacttcacgaataggtttatatgggtaaatatgagtgaagtgtgtgctaggtttgattttagacaaagaaaatggaatttgggcgctcggctcggaatcgatcgctagaaacgaggatttgtgtaaaattgaagcctgggatatcggattggcgtgaaatttggcgaatatgttactggaggtattgtgaaggtgcctgaaaattttgggattgattggagcattttttgctggtttaggcatttcaccgagcacctggcgtgcgacggttagggtttaggagaaatggccatttgaggtggagaaaccctccctaa

SEQ ID NO: 52188 - DNA, 380 bp, Zea Mays
cactttcgttatcactctcaacttcgggcatggcttgttcagcttcggcattagaggtaccttcagcaatagctccctcttgcacaactagccctgaccgcctcatcatttttgatatgggtgctgtctcagttgcatcagtttcatctccctcgtgggacacccttgtagtggatcttactctggccattttgttattcagcttcttttagacgaagttgatcttaagcgatgaagtgcttgtttgaaagtacaatgctgagagcttcgacttaggttaaaattttcaacagcacaacggagcaatagcaatgaatgttgaggtaacttctcaccaacctgtctgtttatatagccctgcaggagaagaaggcaaaccg

SEQ ID NO: 52189 - DNA, 430 bp, Zea Mays
ctaaactctcttctctcacgagcagcctgcctaagcaacttatcctgactagccaaagcagcgttcagctcttctatctcagcggcgagatcatcggtggaagatagtacctcagaagtagtgtcgtcgtcgatgtctttgtcgtcgtcgatgccgactacgtcctcaccaagtgccatggtgcagaagcctcctacgatgtcagcgacgaagcacagctcgttcagcttgtcctcgacccgcctctcagtctcctcatcgctcgaggaagatacaacatcgtcggagtcatggtcgaggtcgctgggggaggcgaggaaggcacgctccttgatctttgccttctaaaggttcttcttcttgagcgcctccttgtcaaatcctcccttggacttgtacttgccggaggagtacttgcccttgcgccgac

SEQ ID NO: 52190 - DNA, 504 bp, Zea Mays
aatcgacgatcgggataaagaaccacgaagcggtgttcatcttttaatcgcagtcgtatgtccagggatcaatgacttgacttcatctccctccatgacggtaataggtggcggcgcctagccccaaggctgcgcccttgccggccaacccaagctcgagcacccacaatgagcgctgacacaagctatataacgctaggggtgaccatgaattgaatgagagcatcctcatctaggattgggaggtagaagatgctatccacgatgtccgtgcatttcgcggtggtggaaaatctacgacgagaaaccccgggcacccgagccgctaatcctgcgagagaagcccacgtagaccttccctgcaccttggtaaagctccctgatcattcgccaatggctgagcggtggtgcgtgaccaatagcgttgtttggtggctcccttcgactctctctgttccgtcgcacactctcggaactatgccagaactcgcatgaatggccagt

SEQ ID NO: 52191 - DNA, 997 bp, Zea Mays
ttgggggtgatactaaccttatgctgaagttcaatgaagcaattagcaacttagacttgattgaaattcccctccacgggctaacgtacacctggtcgaacagacagcgggaacctcttcttcagaggctggattggtttttcatctctcaagaatggtcgattatctacccggactcccatgctaaaacaatgccgcgagacatctccgatcatgttccttgtttggtttcctttaagtctagaattcctaaacctaagttatttcggtttgagaacttctggcttgaattggatggtttcatgaatcttttccaaactacatggaatgggctccctagcatccccgacaaagctaaaaacctgactgccaagttcaagtatgtccgaaaagttctgaaagattggcagagatcgctgccaaaaattgataaaacggtgaagaacatcaagctgctaattgagcttattgacaacatggaagaacatcgggatctatctattgaggaatggaatttcagagaaattctgcaacaaaaggtggtcgaattgcttaacattcagaaaatctattggaagcagcgtgcggctattaggtgggttactgatggagacatttgctctcgcttctttcacgcccatgctaccattaggcacaggaaaaattcaattgctaccttgactgacgacaatgggatcactttcctcgagcatgaacataaatctggtctcctctgggacgctttcaagtgcagattgggttcgtctgacttttcaggcattggttttgacctcccagaacttttaaccagtaatgagcaacttcacgagttagactcaccgtttactaaattggagattgatagcattataaaactattaccttcggataaatctccgggtcccgatggtttcaatacaaattttatcaagaagtgctggcatgtcattgctccagatttctatgatctttgtgataaattctatcatggtgaggt

SEQ ID NO: 52192 - DNA, 758 bp, Zea Mays
atttgaagtgtatgcacatgatgaggtgatctaagggtagagttaagggagaaaataaaataaggggggttaggaggttagggtttcaaaccttgggttgggatttttgggatgttacaaacctaccccacttaaaggaatctcacccgcgagatttagactggatttgagaaaagataagggtattccctcctcaaggagtcctcactctcctaggtagcttcctcttctccttctctgctccactgaactttacagagcttcacctctgaggtgcgggtccttcggacagccgaatcaagaatctttactggtttctcccggtactgaagatctttctgaatctgcactgcctcttcttcgatgtgactttctggtgcttggaggcatttgcggagctgggatacgtgaaatacattatggatgtcagacatggactctggtagttcaagacggtatgctgcgggccccactctgccaatgatgggatagggaccgacgaatcgcggtgcgagttttcctttcgcttggaacctcctgacaccacgcatcggggagaccttgaggtagacgaagtctccttcttcaaatctgagctctctccgcctattgtccgcataactcttctgccgactctgagcttcaagtaatctcctgcgaatcagggcaactttctcttctgcctctttgacaaaggcaggtccttctagtgctttttcccctacgttggaccacatgagaggtgtctagcattttcg

SEQ ID NO: 52193 - DNA, 286 bp, Zea Mays
ttgaaattcaagagctcaagtgaatgattaagggtgggagcgggtgctatggcttcacaaagaactctagttttactgcgcacacttaatttgagagaagggggcagaggtagtgtgaattcttgcttcggttcaactcactgtgtgcgggatgttcatacctcgccgtggatcacgggctatttatagccacggcggtccggcgatcacttcccagccatggataacttctttagtgcatgcctagcacgtagaggaaaggtacagtgaggtaaatcgaagcatg

SEQ ID NO: 52194 - DNA, 478 bp, Zea Mays
aaaggaatgaaattcaataggttaggtctgggtcatacaaaaattctagatctgcccttggcagagagttcctctacctcacgcctcacttgtgtttgattgttgggtcggtcttctattcggtagggtacacgtacaaggaagcccaagttcatataatggaattgtagtcggcctaacgcgaattgagagtagagactatgtttgttactgctccacattactagtggattgttttttctctattaggcttcataagcattttcgttgaataagctaataaacatgttatagaaaagcatttaatttagtacaatcgtttcttttagtacatctaaaagggaggattggaggaacaccaacctcgaaagtatctaaggtataggtacatagaggcagactaaggcccccgcgtcgtcccccctctgggcgacacgggcggctcccgtttgaccccgcccaactccacccaccgctg

SEQ ID NO: 52195 - DNA, 690 bp, Zea Mays
tgggcttttactttcccccggcaaaacgatgttggtttcatgagtttttggctttagaagcctgtgatgggacatgcgctaggtggcgcttatgaataagccaatgcaaaagccgtgccaaaatgtcacttaacatgatttaaccttagaagtcaaagaagccacactggaacccctctcatgaaaacctaccaaaaagagtcaaactataaatgttgaccacatttaagagaaccattaataccactgacttaaaatcatgtcttttgataaactgttcctcccttataatgggtaacataggataagatatatgaaattgtatatgaatgtaatttacacatagtattgatggttgaggcgccaccaattcattaacacatggtggatgacaagacaaataaaacagaaaccacacagagaggaacttatatgctgcaactacaatacaaagccaccagacaatagaaaagatcacataaaatatgcaagaccatcatcactcactaagattttcataccccacgccaatgtgtgtattgggcatttgagccccgcacaacccctccccactacaactacaagttagtataatttgcaataaaatttttcaaattcaaccaaaatttgactaaatatatatcattgtccgcttgatacaacgcacatgtggcattggattcagaatgg

SEQ ID NO: 52196 - DNA, 898 bp, Zea Mays
ggggcatcagcaactgaaccacctcgccaataatggcgggcatgccatgaagacccgattggatttccgttggctcaaacgtcggggtccattgcgcccacccttatcacgacctggccgcgcttatagggagtagctacgcggacttcgtcttcccttttcatcgctgccacaacacaccagcgcgcacagccgtcagggaggagttttggtcgtcgccgccgtggaaaagccaaccacaacgtcgtctggtgaccggagttaggccagtgaggcgtgtgtagctctgcggaactatccatggcatcaattgcgtgcgagaggcagcgaggcaaagttaatcgctcaacggagttcggaaacgccgtgataatctccctacgcgtgggctatacctctgcgcacaccaaatcctagtgagtacccgaccttctgatccatcatgttccccgcgttgctaaatcggctaagtagcgtagaatcgcgcagttaagcaccgatttggtgaggcgccggcaaactccgcggcggcgccgccatcgcgaggtaggagggagagggtgtgtcgctcagccattagatggccaacgggtggctatgattagaacgtggatgtagcgattcatggggttgatcgggtacgtctgttttggatcgaatgcttgtgcttcgatcgggattcataaaacacttgccactaatctttgatctagcggttgcaagcgcttaccggttgtcacgagttggacccaatccgcgccatccacgcgtgatcgaacggtccaaaccccaccgtaccccttcacgataatgttttacataagagaccccagaaaatgtgttaaacaacccgcagtccacctggtgtgtcgtttgtgtcttaggagcttttgcacta

SEQ ID NO: 52197 - DNA, 580 bp, Zea Mays
aaggaaagtggtctctcagtgctcatgaatgtgtctaccatgagaatccctaggtgttatccaggttagtaggatcaaaaataggagaaggctagtggcagtaataccttatggccccactaaggggtcaccgaactagaccgactgaggggttgtatgggcaacactataagaagagagtcatcctaataatatggccttacctaaggtagcagtgggatagaccaagcaaggttgttgccccaccttggacataacgcatagtcagaattggtgaatccgatgtcaaagccaccactccatcgacttgatgtgtcggtgaagccatgtcgatgcagtaatacaaagcgcactagacgcctacctcgtgtgcgccaaatgtcactatatagagaaaatcaatgagagaagggtgtaggaatgggatagttggatcaggatgtcgacatgcatttaagacacacaatatagagaggtttgggccgcctgggcataataccctacattttttgtaggttaatgtttcaatgcaagtgtgggtatgggtacaaattagatgctcatatgatgtttgatctag

SEQ ID NO: 52198 - DNA, 404 bp, Zea Mays
cgcactactgtttggagatgcaactgttaggctgggcgatgcatgtggtcctcctagcgtcttaagtgtatgcgctgctggcactaacccaccgcatgagtctgcacgccgaccagcagattgtattatggatttacaaaacgatggtgttcatgcgttacaaaatgatggtacacgtcaaattgtatctcacctgatgcaccactgcgccatgttgaagaagaaacaacacctttctcatgttcatttatgatccactttaacatgtacatgcatgcaccgcgttattcccgaaaacgtccctacatcgtgggcgattttaccgcgtcttgttacgaaacagatttacaatttacgctacaaaatgaattcgtttacgcaatacactgtatatttatggtctg

SEQ ID NO: 52199 - DNA, 589 bp, Zea Mays
gaagtggtcaatcaccttattctatgccctgaaaatgtagtagcatttcaaaagcacataggttgagcaactttttgggatagataaaaacatatttaaagccaaacagaaaggaagattggtaactaaatatcttcagcagaaaaacagaaaagcatgaatccaagattgaaaataagactgcaaacaactgagtggctgtttgggtgatgctaattttaaaaggaatctcaatattgtatgctaaaagacaaagaaaaagggaactccagaatacttgtattttggtgcaaattttgaactctagatttcttatattttaagacggagggagtagaatacttatgccctgcacatttttaacacaaccagcgtgtttgctgttatctggttgtcaataaatgtttttgaggtaacacttcctctgctcattatgtgtaatgtagtacagggtccttatgacataaaaaagaacattttaaagatcctttttcattcaattgaatccaaatttaacccatatgatatatagtgcacgtattcattaaggaccatatagggtatgtaacctgtatactatcattgcgag

SEQ ID NO: 52200 - DNA, 378 bp, Zea Mays
aacagccgaacagggcatgcatcgatctggcggcgtgaatctgaagctgatgagaagctttatttgcacgcaacacacaccgttctcgcaggaaggaagcggtaacgagtagtcgttcccggcacgtacaggccgcgttgccaacatctagctagctagctagctagtccagtacacgtacaaactgtctctatcgttttcacatggcgcctaaagctagccgcgcacgcgcgtgggcgtggtagctcgatcagatgaacgctgtaacggtgcgctgtagctttcattcatgctctgcctccccctccctctctcagttgatcctagagcttacgtacaccgcgtgcgtgtccgcgctgctcggctcgatcggttact

SEQ ID NO: 52201 - DNA, 425 bp, Zea Mays
cggagagttagtgaggtggagggttgtcgtcttcgtgtggacggggctagtaaacgggagttgttgtcctcgccgactggggcgagtgtaggagagggggagctgcggaatctttttgagggtgaagagctgaggataatgctgtttaactacagggagatgggtatcatcccaaaggttgaaccaatgtaaggtgtaatgccctcgctacatgtatgtaactataatttgtatgatgaggctgtgtgccttcgctgatccggtcgtgcccgtaggggacttgtgcacttgatctagcgcgtttactgtgttggtccggttgcacccgtagtcggtttttgcacggagggtccggctgcacccttaggtgacttttgcacggatagtcttttgaggaagacttcgattttgcgcacttgttgtgc

SEQ ID NO: 52202 - DNA, 478 bp, Zea Mays
gcacatcatcacactagctccagcacgggccgcagaacttgcgctctaatatataacgtccaaccaaagccgtcgcgtactcggtttcacgtggctgcgcgccccgccgacccgccacatctagtattcttcctggtagatgccgccgggcggccggcagcttctaatttttaaacggcgttataacttaaggctctgttaagcagcataatgctgagctttacctaatgaaagggtttttttccctccaatctgggatcagttctaacgtaactcccgacagttccataccagtgccttttattaagtgcccccacaaaatgcattgttggaggggacaagtactcctccatataagatttagaagtcattttaaggacatatacaagtttgtagaatggaagtcgcagcgaattgcatatatcgatgtcgtctttaacacattttattccacttgcatgccgcggagcaaaacagc

SEQ ID NO: 52203 - DNA, 352 bp, Zea Mays
ctaacatcaaaccagttcttggcctgcttaatttagtttattccacttataactatcttagccatatgtccctagctcggatgaagacactaagaccggaaaagagatagatcaacctcatcaaggaaggatatagaagtcaaagtgaatcttgagatgaatcaagaatacaacacattgggtggagtatttcattacccaaaccttccttaccacaacttaccccaactataaccatctcacatcttgcctaataaatggcttgacataaaagatgcccatgctttcctaaatacccgctaaagagctaaattacaaacaaaccttctgcatcccttagctactaatctcg

SEQ ID NO: 52204 - DNA, 393 bp, Zea Mays
tgtaactacaaatgcattcttatcttacaccttctcccaagtgttaccctttgaagaaaggataatcaaagggagaattttaaaatcctctaacttgtgttgccttactcttggtttcatgtagtaaccaaaagcgagtaaccaacattggcgcacacctctagtgatttcacgaccacaaaaagccacatcatgacgaatagcatggcaagccattgagcttcgtcatccaagatggacaagccctaaagaagggtgcacaatgttcctaaccctaaaccctatcactaggggctcgagcttcaaaccatgcaacaagaagcaaacaaaagaagccaaagaagggtgcaacatgtgggtgtccaaggaccctacatcaagaccaagtggtcc

SEQ ID NO: 52205 - DNA, 444 bp, Zea Mays
gtcggcgcggacccgtccaggaccacccgcattgcgggaaatctaggggaaaaaataggaactcgcgcttgtcaccttcctccgggcaaatgtcgacatgttcgcttgggagccgtcgcagatgcctaggatccccagggaggtgattgagcaccagctgaagatctatccggacaccaagccggtaagccagaagcctcagaaacagtccgtggagcggcaggacttcatctgtgaggaggttcagaagctgttgcacgccggcttcatcgaagaggttcatcaccccgtgtggctggccaacccagtcatcgtgccaaaagcaaacgagaaactctagatgtgcatcgactacaccagcctaaataaggcatgccccaaggacccatatccacttccacatatagatcagatcgtggactctacctcggggtgtgacttttt

SEQ ID NO: 52206 - DNA, 665 bp, Zea Mays
cgttcatcctaccctttgtatggggacataaacttagcacgatgattagaaaggattcactggccataccagacactgagagcaaagatgtctattgaactatagagcttgctcccatggaagaacacaataatagccaactcaatgatgcataagttcaagtattggttgtactaataaatgaaccatttacttgaaactattcggcaatactgattatgtagtttgcaattaaacaataatcgaatagtgataagcaaatattataagcatgttcatcctttgaataaacatgaccgaagcaaattgtagcaagaatcattactagcaacaactgaaatacttcggcttcatgtaagtagcagcatatcgcaactatccatatgcataataattcgattgcactcctccataatatgaagatgcatatggagcaaaatgatgccataaaggataaccaaaaataccttgggacgacgtatacggcatagctgaaaaatatggacgatgcaatgaccaatagctttgttgagctagggcaaacctttcacccaaacgtcttgtacttgctttcttccttttgtttgcctttactccacttcttccgaaagcatcatccttacctggatcttgagaactcccattaggagcccatgtcatgcctc

SEQ ID NO: 52207 - DNA, 378 bp, Zea Mays
tcatagacccataggccatgagtggggctgaggcctaggacctgtaggtcttgagtgggaggtggatcgactctttaccatgtcgtggctcggtgccaggcgtagttaatgcggcgtgcacggtattgatggcgagagtagtccttcggccagacgcagaatccactcgagtggctccttgtccatttgtcttaccccttgccaggtttcgcctcatctgaccccagtcgcgctgtgcaagggtcatctgggggtagattcacttaggcgggccgctccctatcttcccaccgacttgttgccccttgggggccaagtgatccgatcccccaacaaagctcatcgttctctctatcggggataaattctgctttagac

SEQ ID NO: 52208 - DNA, 846 bp, Zea Mays
ctttaatatatgtgcttcgtctctgggaccatactgttgacagtacgagtttcagtttcctccattctgtccctttgttgtaggtcttgccttagaaacttgggttgaccagcagggacttggtcataagggggtggtcctaggacgaaggaggcagctggtgaccatgcactcatcgcagggttccttgaagtgtttgaggtcgaaggcaggcttggccttggttcctgcagctgagattgtacatattgcgtgatgtagggtgaacaatatgatgatgtactgaacacatcttttggctatgaaggttgcatgactgacgaagcaagctctttcttcttattgatggtatgatgccatgttcttgtagtgtggcctttgtcctcgccacaaaacaagaagaatggtttccttggggtgcactaaatctgccaccaaagctttggcctccccttcatcctcttggggcaagtggacggaacgtgctatgtgagggttgctgctgagaccttgcctgttgctgccctgactaaccttgagaccgagccattctttccttaccctgtgcttggttatggatattttggacatgtattggatgaaaccttcctccgaagaccctggcgacttcggtgtatctatggaactcctcccttttttggcagaaatcattgtcaacccttatgtagtcatccattttttgcagcaacttttcaagggagtgaggaggattccttggaaaataatgagcagttggtcctggcttgagccctttgatgatggcttcgatgacgatgtcatcctggactgccgaagcttgagcccgaagcctgaggaaccttcaga

SEQ ID NO: 52209 - DNA, 502 bp, Zea Mays
aagcagccacctggttttgaagattcaagatatccaaattttatttgtaaacttgacaaagctttatatggactcaaacaggcgcctagggcctggtttgcttgactcaatggcattctcaccagattggggtttcggccatccaaaggagatgtctccctcttcatatttcatcaagctggtatctacatgtatatgttgatctatgtggatgacattatcatcattagttcctcatgagcttggaaaagaagttgcagtgaaggatctaggaccgcttaattatttccttggcattgaagttcaccaacaatccacgggtcttgtgcttactcagtgcaagtacacacatgatcttcttttgcgcactaacatggagacgtctaagggcgtttgtacacctatgctaccagcagagaagctatctctcactaatggagacccgctttcctctgaagatgccactaggtatcggagtattgtcggttcattacaatacttg

SEQ ID NO: 52210 - DNA, 421 bp, Zea Mays
ctcaactagtgtttgtcgatccaaactccaaagagcgctagagaaagggaggtactagtacacgaacaacgcgtggatccatttacttttgccgcaatcagaaggtgttatgaaatgaagctggtgatgattctatttactttacgaaatcaaagtgtgagcgtgcatgtgtgtaggcaggtagggcaaaacagaggcattattctgaagaccactcgaacggatggagaggaggctaaagagagcagtggcaagcatcatggtctgtaaaataatagatgcccttagaagaatcgccggcagactattacgcgtttatgtgttggatgagttggtgtacatatataagagcgagagtcctcgataaatataacacggatttaaactaaattctaatctatcttagaaaccaaaatattcc

SEQ ID NO: 52211 - DNA, 508 bp, Zea Mays
caatttcccattttattttagactaatggagtaaaacagtttatttcaatggtcaacgtaccttctaggtcatccaaatttattagtcctcgcaaattctttttcgctacccacttctattgttggcctatggtcagcgcccttgggtacaggtaccctaggcgctacactcaaactaggcctgcacggggagtacatgctacatgccccacctttgagaaggaccaggtcgataagtcccctatgaagagacaatagaacacgtggctaggacccctgccacgcgtcatcgcgagggggcctcttgccactcaagccttcattatgctccctttttgcaatgatcctcgccaacctgttggtggggttcagttgcgccacgtggccttgccgaccctctgcccttggtaggatccagtggtgccacgtgtccttgggtcctactgggacccagacccctagggatcaatggggaatgtaactatttcaaggatctttacttgcatag

SEQ ID NO: 52212 - DNA, 619 bp, Zea Mays
gcgccaactccaaatcgtgagccatcgtccccgaatcctataaattgagcataccctcggctccgctatgtaattatgcacccaacacacccacttgtgcctccaattactcaccaaagagccccaatttgaaactctccccaattcggtccagagcaccccgctgcgtgagctcgctgaggctagcgtactgcaggtccgttcatgccctctgctctcccgtttcagtacccttatgttctcttgatgctcctcgacccgttccattaagctagaccgcgctagatcatcgggaacacctctgttcatttgtagttcacgctgtcactgtggacagtgtgattaagagctcagattgtgcaattgatcgaggggaaacgattattaggtgatgaattaggagtcaacttagagcaccggccgttgcgtattctggccagaacgagctcgccggagctattgctccgccgctccgcatcgtggacctgactttatgaaagaatagaaggggagggaccttaatgcgattgtcagtgagacaaaacaatagtgttgcggactctttatgggttgtttaaaatgtcagggtcttctgtgcaaagtcaacactgcgggcgcg

SEQ ID NO: 52213 - DNA, 539 bp, Zea Mays
ccggcgatggcgccaccgcattgggatggccaccatcgtggctgggtgttggagatgggaggtggtgcgcgctaaccgtagatccatagttgaacggattcgattagatcgcggggtgtcggttcgggtaggaatctgggccatcgatggtgaaatggtcgacgcagattagatctcgctttaataaaatcctgaccgtgggagttggatccgaggggggatcacgtatctgtgcatagggattgggatctaatccggggcattgaaaactgatcggatggctcgcgtgtgctagtatcctttgttctcgtacaaattgcaaaagagtcccccgggatcggttaaattaactcgacgtcctagttaggttaaaggtcatttaaaacagcccctgacatttataaaaagaaccctgcctttgtccaaataagagctgtagtccgagactatttaaattaagtaaaataaatctgagataataaattttagtataaaaataaatatggtaaacttttaaaattcataactttctcattcta

SEQ ID NO: 52214 - DNA, 924 bp, Zea Mays
gcagcccaaaacataaattaataaatttcagctcctatacaattcaagaattgccatgttctagagacttaaattattctaacactttgacaattgttagagttaaaataactaagtgagaactaacatgtagacttactaatttttatacaagttatttcgcgcactaaaagtaccatactcaattaacaatgcattatctataacaatcaatatcgaagcgcttttcaccaatagtttgcattttaatttagacatcacctgatcactactacttttcatccacgaccacaaacatacgcatttagactgcaacatcccaaacgggtgcgagaacactagtttctaatttaaccccatgattattctcttaatcattttaactacttaatcggcatcgaccgacttaaccttcatctcgacggtccgagcaccacaattcaacaacgtctacctagacatctagcatcacatgcagagcctactacttcacgttgcgattcatacagatccacaaggtgacaataataacacacaagcaatcgatctttctctacgaccttcagttaagtcaccaaccgacgacatgatgactacgaaggcatgtcaccatttcatcacactcattcatcgcctatatgcgcactaattcttttcttgcgacccatgcactcacaatcaatccacactacacaaaatacacttatttgcgaatcacaatttaaggaacgcctaacgcgtatagactcgacttataattatagaggaagtgatgactacttacggcatgtcatcacctctctacataagcccaaacaatttctactaacgaccaagagttctaagtattaaacacactgttacttcccatgcgcaaataaatctcaacttaacactagtgacaccaatggatttttactaaac

SEQ ID NO: 52215 - DNA, 504 bp, Zea Mays
gccggttgaaccgtactaccccagtttaattgtaaacttgaataaaatctcggatctactatcaaaaattgcaatggaagcattgaataagattaaaccgatgaatcttgagatctaagatgaacagagatgagtcacaaacacaaaagcacataagacacattatttttaccaaggtttggtcacaccacaaaggtgcaccactccttaatgaggtgcccacaaagggtcaggtctttctcaaccgcgttcttctttgtcggccacataggtcaaggcaatcccttactcaagtgctcacaaagagtgggtgatacaaattgttcttggagtcatccacaacttttggagactcccaaggcaaaatacaattcgttaaggaacaacatgttccaaaaacaatgaattcgcaaaggaaacacccgaccatgatcctagaagtggttgcatcttatgacttatggatctagcatgcatactttggcatgcccagtagcagtaacg

SEQ ID NO: 52216 - DNA, 393 bp, Zea Mays
gtcacccatttcaaaaagaccctatcgaatgctgccagttgaattggcagaactaaagaaacaacttcaataattgttagacaaggggtttatccaccccagcacatcaccatggggttgctcagctctctttgtaaagaaaaaggccaaaagtctaaggttatgtgtggactaccaccctcttaatgcggtaactattaagaataaataccctttaccccgcatagatgttctttttgatcagttagctggagccagagtattttctaagatggaccatcgctctgggtatcatcaaattaagattcaacccagtgacatcccaaaaactgccttctcaactagatatggactatatgaatatctagtcatgtctttcgaacttacaaatgc

SEQ ID NO: 52217 - DNA, 392 bp, Zea Mays
ctttgcgttgaatgtcgccatcggtccatgtgctggcttaaatatcttgtgcctttagatacgtaccacaccattggagcaccggaactgtgtaagcttgaaagatttaccataattctgtccacaatccacatcctgccccgagcgagatactatgagaaattctagatggacccatcctttggaaaccaaccaaactgagctccagattaaatccagttgttcgaactactacaactataatttatataatttatagagataaaataccgtaaaaacaataaaaactgattaaaaccaaacggataagctgaccgtcgtgaccacagttcaaaaagctactccgtacaaatgggcaccgtacctcggcagtgaagctgcggatggcccaa

SEQ ID NO: 52218 - DNA, 937 bp, Zea Mays
atgatatgcaacttgacaaagagagagatatgagagattttcatgggagatgagagagttttatgggatgaaattccgcatgcactgtttcgtaaacaaatgttgacatggcagcattgaaaacagtgcaactatccattgggaatgtccttagcacctcgccatgagccaatgaaccgggagtaaaggttagtagcgcttggcctttgtttggatcctcctcatctgctaatcgtatctatttactattgttaagactattggtccattttccaaatataagtcctaaatctttggtactatcttgtatacagtatatgccttgggcagtgcgcagatgataagtaaatgggcataaatcgcatttatatatgtgtgggcgagctatagacgtcatgtaacctgaaggaacaataaagttttcatcagacagacaactctcgatccatccatcagcggccagcagcatcagtagtacgtgcctggtgaccagctaatgcgatatgtcccatatgcgtgacatatgatgaatgaaagaggccggtagctactggtgcatatgcaaagtatatggcctgccggccaatgagaccatgttgttgcaggcatgcagcaatgcatgtacctactcatgtgtgcacaaacagtggcagacacagacaggtttttagacacggtagcactggccggcactgaatcgattcaattctccaattgtcgtcgcggtaaaaactagctagctccactgggttctgctacctacctaacagcacgtactgcttcttctctggagcacccactaagcatgaatgcattgtctgtttggaactagtagctagctagctgcaaactgaatccatgtaaatgccctgacagtataaattaaaggccagagctgtagtgcttaacttggaggctgcatgcagatgcaagtaga

SEQ ID NO: 52219 - DNA, 676 bp, Zea Mays
aaaacgcacaaggccataagggagttcaatattcctgaaacgatagttgacaaaatgatgcataaatggcttcaatcagtttgaagcagttgccttcgagctatgtgtagtgattatcaacgtgcatttagttgcatatcaaattctatgggtacgcttccaggacgttcattacaggctcgcttaacatgaggtgtgtgtgacatatctcacattctggtagtcacctcgtgtttcatccctgcaccttctaaatcctagagagctgccaatcatcgcccacaactcataccaccaccaagaaaacactccacatgcacatcctggcatctagatctaccaagaaaactttgcccatgcaagtccaatgaacggcccatcaacactaccatgctacaacgcttacaataggtttcacattattacttgaaacatcgataatgaatttctcgatgccttccaagcctatgctataagtaacatattgagtcatagaatagtgtgctacatcgttgtgaaggatacttgcaccatgttacatttatagctagtccaaacgttttatagcacctggcagtgattatgtgcattaagaatctgagtaatggtccttgtcttaggatctgacaatctctgactacaaaagtaaattagagatggtacagctgcacaaagg

SEQ ID NO: 52220 - DNA, 475 bp, Zea Mays
cctcgacgctaataaattcaacatcctcggaactgatgatccctaattctttatgaacactcttcttatcccccttgggcgacgtgggtgtaggaagcctttccaacccgacaccagcgatcctcttgctccgccttggtctagcacctggtagagcagccatagaccacgaagatcatctgcctggtacacccaactcaccacagataggcttggatattctattgatgaagttcgctatgctgagagccagagatagtgtgggggtgacaacatgtgagggctgcaccaaagggggttgttgttgaaccactgtctccttccttgtgcggcaaaaataagtgattagaggatgagcccccttcctcagtgaactagaggcaccagggcgtggagaagcctcctcactagaccgagcacataatctcttaccaagccctgccaccagatcagcctccccatcaacagcttggag

SEQ ID NO: 52221 - DNA, 402 bp, Zea Mays
tggtgctgggggccatcgccgcccccgcatcatccactacgataaatatgtgatggccagtcagccccgatccccacgagtacgcatggagttacccgaggtaaaaacactggttttacccctgccttacggctccttcctatagaagccaccgctagccgacctttcaccccggactataaaagggagaaggttgcctcaggaagggggacagagagaagagattgacttggagatgatcgaacaccttaagacggaggcgagcccacaaggatgaacaggaggaacgccgacgaggaccaggaggccagagctccgccaagccaagacttagttaggactccgccttacagcttctaagctccacttccacccccgataagagatctgggagcatctctg

SEQ ID NO: 52222 - DNA, 782 bp, Zea Mays
ctttaccattgtcggcccgaaatggctggagggcagcatcagtttgttggaggtgttagcttggaacttcgccgaggtaggaaagctgagtatctcgacattcctttgaaagacagcattaacagatggcactttggtaagttggtccagcgtttgccccagtgttcggctaagcatgtttggatagctctttggtaagttgctctagcgtttttgaggccgaacgacatggaggtataatagaaagctccaaacggcgtgatgaatgcagtcttttcctcgtcttcctttgccagagtgatctaatgatatccggagtattaatcttggaaggagagcatagaatagctagcagtcgaatcaactacctgatctatcctagggagtctaaaggggtccttcggatagtgcttattgagatcggtatagtcgacgcacatgcgccaatcaactttattctttttgagtacaagaataggatttgccaaccattcatgatgtagtacttctctaatgaatcatgtcgatgccaggcgagctaaatccgcccgaacggcttctcttttgtcaagcgtgaaacagtgtagcttctgccggatcagcctttcttgagggtacactttgagttatgcttagccagctctctcggtactccgtgcagcccacttatccgcttccctctgccttggcttaatgggctaaatacacatccgcgcggcccacttatccgcttccgtggtaccatgccttggcattcaccgccaggtgggccccacttccca

SEQ ID NO: 52223 - DNA, 397 bp, Zea Mays
ggaagtcttcccgaggccatggccgagcctgctctaggcttgattccatgcaggacacagtcaaagaagtggcctactacgggattcgcggggagcaggtagccaaggccaggctcaggcgaggcgaagtttgttccgaggctgaggccagcttcgggcgagacagtgtttctccaggagggtgagcccacgctctttcatacgcgcgtcccatcaggagttggcagacgatgtggggggacaatagtcgttgtacctaggcatgcatcatcgtagttggtgaaagccgacaggactgcgatcctatcggtcatgttcgcctgcgacgttacgtggggtaggtacgcgcattgaatgctcatgtccccttggggcctttggctaaggcctggctcgg

SEQ ID NO: 52224 - DNA, 324 bp, Zea Mays
ctttcctgaagcactcgcttggggtcaagcggatattgaggcccggggaactgtcatgcctggtaaggatgggaaggcgtctaccagtgatgttggcgggaaggtgtgagagtagtgttgattcaatggagtgtctggatcgtgggccgtgggccggttgaagttgtatcgagtctgatgggttgtaaggcgtactggagtctgtaatgggctagccatggctaaccatatatgctgaaccaatgccagatggcaggaatatcgaataacagaaagcaaaaccacttcgtaacaaacttatctcgagttgcgttgcgattgccg

SEQ ID NO: 52225 - DNA, 308 bp, Zea Mays
aggcccccaacactgctgatctgccaaagggtcaaaaggcaataagactgaagtgggtattcaaggtaaagaaagatccatcagggaaaattgtgaaacataaggctaggctggttgcaaaggggtatgctcaagtccaaggaatagactatgatgaagtttttgctcctgtggcaaggttggagatagtaagaattttactggctctagctacacaaagggagtgggaggtgcatcacatggatgtgaaatctgcattcttaaatggagaactttgtgaagaagtctatgttaaacaaccacttggt

SEQ ID NO: 52226 - DNA, 371 bp, Zea Mays
gtccacatttgcaatcgatgccctaggcctaggccacatttgtctgggcaacacccttctcacaccaccacgcagttgggttgactcgacggtgccagtcgagcatttgtgggttttgtgcctagggtagtgtttggttatggagtatggtggaacaacgtcgccctatttctaatttgttattgtttaaattagttctatatagaataaagtgactcaaaaaaattatggttaaacgatctgactctctaaaatcttcaagatggagctgtgctctgcaacagagctgctccatcccggttggttccggaaccaaacacgtcactctccacgagcacgacttgacgtgtcgctgcctacgtcccttcttc

SEQ ID NO: 52227 - DNA, 850 bp, Zea Mays
caggaacctgatcgtaggaaggtggtcccgagcgaaggaggtagatggtgaccatgtgctcatcactggttgcttgaagcatttgaggccacagacaaatgcagccttggctcctgtgacggaggttgaacatactgcgggacatacgatgaacagtatgaagatgtactgaacacctccttcaaccgggaaggttgagctgctgacgaagcaagtcctttctacttgttgattgtatggtggcaggttcttgttatgtggcccttgtcctcaccataaaacaagtagaatggcttccttggaggcgcattaaacctgaaaccaaagctttggcctccccttcccccaattggagaaagcagacaaaatgtgctgtgggaaggctactgctaagagcttgtttgttgctggcctgactggccctgagattgagctatcttttcttcaccttgcaccgggttgtgaattcttcttacatgccttgggttgaatcttcctccgaagcccctggtggctttggtgtatctatgcaactcctcccttctttggcagaaatcgttgtcgaccttggtgtattcatccatcttctataataatttctccaaagagtgtggaggcttccttgcgaagtactaggttgctggtcctagcttgagccccttgaccatggcttcgatgacgatgtcatcttggactgctggtgcttgagctcgaagatgaaggaaccttcggacgaacgactgaatgtattcgtctggatcttaggtacactggaacagggcttgtgtagtgactggctttgactagaagccttggaaactggtgaggagcatttcttttagcttttgcc

SEQ ID NO: 52228 - DNA, 789 bp, Zea Mays
tgcggatgttgttcttggacgtaacgcttgagtagcgagtttgaatcgtcgagtcgcgtttcagattgccttcttcgtgatgtcggtgctttagtggtagcggccaagtcctttggagccacgttgccgctttaggaataacagccgagtgattaccggcgacgtccacatttttagaagtaacagccgagtgataacgggccacgttggtgttttagaaataacgaccgagcggatactagcgatgttggcgttttagaagtaacagtcgagtcctttggagccacgtcgccgctttaggaataacagccgagtgactactggcgatgtcggcattttagaagtaacagccgagtgacaacgaacaacgtcggccactttggaaacagtggccgagtgaagtctggtaacgtcagcgtttttagaaatagcagctgagttatattgggccgcgtcggccgttttggaaataacggccgagtgatgacatggcacaccagcgttttagaataatagctgggtgatgactgggcactttttagaaatggcgtctggcccggaaaaccccatatgtactgcactgtcgcatgcctttgcattctgagccctagttttgcttttctgcatccagatcttctctgctctcttgcgatattgcttccgctccgctcgccagcaagattgagatggcgcccaagcggaagactcagagttcatctgttgcaatgattcctcccatcgatcccaacagccagttgcctttcgcaggtaaccacatgtctgttgttt

SEQ ID NO: 52229 - DNA, 839 bp, Zea Mays
atttgcagagagtacagggttaaaacgtaaagattctacagactcagggttataccgtgatggactgcgggttgattagtccaaaaagcaagggttcttatgtaaaacggatggccgaaggggtaccagaggatctgagtcatccgatctccaattgatggtgcagattagattcgtgcagggttatgtatcggcgtgcgctcactgcccatggatcaaggatcgatggcccgaaaccgtccacgccacagggcaagcaagggcacccagatctatgatctacggtctagattttataacagcttgattcgctccgcacccacggatagaagatctacggccctgattcaatatcgcgaaaaggtatgctaagatcagatcctgaccgcccacacagggatcaacggtgggtatcggatctagtcaagcaattactccgacctaatctgagccctacgctctgcatctaacggttggtgcatcatcttcctcctcaccctggctcacagaagtggcgctagcaccgcgccgcagtgaacgccggtaaacaggcacatgccaagccaaagcaacacacgtgctccgatgtagacacgacccatgggtagataaggagcgatggagggtagtttaccttgaacgtccacggcgacgacctgggtcgcggtccgtgcaaacccaaggcggattgccgaccctggcggacgattcaaaccacgacacgcttgcgtatgccggaatccaaccatgtattggtcccttccagcgtcgacgaacccccggacacgacgccactgcctccccccaaccggtccgagacttcctctctctctctctct

SEQ ID NO: 52230 - DNA, 407 bp, Zea Mays
ggtgttgatttttgtcaattgttgaaaccttagagagaaatctatacgtctagagaactgtacttgtgggtgttgattcttgtatggtgttgtgaatctgttttctatctgaactgttgcattgcttactactagcttgatttgaaaatgggttgtaattaccgctgttttctttggaatttactcctaatagataaaatttatcaagtaccttatctatatcggatagattcttcggcaacgattggtatatattttgatttcaaacagtaaagtcaagcaatagtaagatgggtactgtttgtacgaggaatctggaattgactgtcattttaaccggctgtttgttcatggtatcaatcttttcgctgtgtgatctggataccctttacctattccgctttttc

SEQ ID NO: 52231 - DNA, 405 bp, Zea Mays
ccctacttcactgtgtgttgtattgttcgtgagcttgagttgtgtctaggatagcttgagtctgaatgagtccgtcccttctaacgcagtgtgccctcccttttatagtctaagggggcacgtacaagggtgctgagccccgacatgtgggcccagtgatataacggatgtaatacttggagcgactaatgctcgtccccagtgcaatcttccttgcgccctgatatccgcgatctgcgtagcattggcgtgcaggggaagcttccctgacaacgtacgagtgatgatggatggacacagtgcaccttgcagcgcgggcgtactgtttggcaatggaatggacaggcacgccgcctgcaagatggcctggacgtcgcctaccagctgagtggacaagactcatta

SEQ ID NO: 52232 - DNA, 497 bp, Zea Mays
ctggccacggcgagctcacacacggcggggttcttgactgatttgggggatatcccaaattggggagctgtgggggacgattggaggtgagggctggttcactgggtgcacaactacttagcggagctcactagggcggcaatttataggttccatcagcggtggcggctaatttttgagaagacgcgcagcggccggggagagggactgagtcattggcgcaggtgatcgtggctgttaccgtggcaagaccttaggcgatagatgggctgtgtattgtgatcaattgcgacgtggtaaaatggctgacagcatggcataaccgcgaggaaccgcggcacgatggcgatggtcgcgcggcaatgttgccgggcaaaggggcatggcaacagggcggaacagtggcctaagttcatcctcaacgcgatatttcttaccccgggtagttatctgcactccgccgggcacgaatcgcggtgccagcacgaatcagagca

SEQ ID NO: 52233 - DNA, 481 bp, Zea Mays
gcaatatccaaattgatctctaaataatagcctatatgttgcattgtttttttaaccaaacacaattagaccatgcatgagctgctccgaacgtgatctcgtatttatcgtatttatctgttgggtggataagatcaggaacgagctagatgtaatcctgcggttagaatcattgtctcctatctctactgcctataaaaacgaggccgccaactaacaaggaacacgcatgcccacgtatatcagcatgtagcagccgccctagccgcgcaaaggaagcgagaagcatgcagccctctgccattgtgccgttcaactaggagcagatcacgcaggggtaggagtgagcacaccacacgatcaatacacatcccatctagatggcgttcgctaaattaacggaaaagcgaggttgcgatccaattgaagaagtacatgtaatctcgagtcttattcaagttatatcattaatcacttttct

SEQ ID NO: 52234 - DNA, 630 bp, Zea Mays
atttttttaatagaaggaaaaataaataaataaaaagaaaaagaagaaggcctcaccctatgctacgtgggccgcttcttccctcgcggcccatctccctggacttcgcgcagcccaactggtggaatctctgcgtgcctgttaaaccctcgtgagtcgctgacatgtgggccggcatgtcaggctacgatttcggtcacctccgtgtgggccgcgctgtctggtgctttccccttcccccgctcgctcggctttgacccaatctcaacagctcacgcctaaaatcgccgataatctcgccgataatctcgccggattgttgtgtcaactcggcatcttccaccgtgcctggcgtgtataaatggacccccctcggcggcaatcaccatccccactatccgagcacccaacatcaactcgtggcggaaaaccaaagaaataggtgccgggccgccgccggcgtgtaggcgatttgacaccccctgggcctcgacgtgttgctcgggcgcttctctcggtcgtgggtgagctagtcgtgacttcacacggaaggatgggatccatgggtagcctggattgctccgtgggaaacaacatcaccgcctagccatagggctgcgtggcctgctt

SEQ ID NO: 52235 - DNA, 559 bp, Zea Mays
ggcggatcgaatttggcgacgagaaagctcttgattacgtacggctaatcagaggtgaaagcagctagccacataactggtgtggcggcaatatcatcgggcaagcacgagatttcgggaggaagcagaaaggtcaaatggtgtgagagaatccggggcatggattttaggtcggccatctgcgtatccacctccatcgcttcaccaagaacatttttcttctcgcaaaggttttttgatgaggaagctttacaaaaggttaccaagaacattacgtcaagatgatacaaagtcttgatacaaacttttggtctctatcatacacataaccaatctaatataaaagactaaaaaagaaacacaacaccgtcccaaatctaagcacaagttgatccaaagactacaacaccactcatgcgcccgagaaaaaaaatagtcgtgaccgatcacatcaaaagttacgaccccgccgcaaccaacgaccgcacctccttttgcgggaggataacctaacttaaaagcatatgtgtcaccaaataaataaattgcaaggtgacga

SEQ ID NO: 52236 - DNA, 436 bp, Zea Mays
gacacgaaacagttaaaataaaaaaaaagttccattgccgggatttgaacccgggtcgcctgggtgaaagccaggtatcctaaccgggctggacgacaatggaatcaattgggacttttacaaagtctaatctctaatcttgtagactagcgcctcagctcatgtttaatttccaaagcacattttgcgagtttcagctcccaaatcatcaaaacttccggtgaatcttagaagactagactagcctcctttctcaggttctgaatctttgaagacagttgttctactgaaccaatatcctaaaccgaaaatcggtgacgatattctcatcggcttgtacacgtgtgctgtggtattattgctggcagattttgtaccaccgtacttcgttttccctaacaacacctgctctattattggactccacgtggctgat

SEQ ID NO: 52237 - DNA, 500 bp, Zea Mays
ctagcaagtaagatgttctattttctgaagtgcttttaatcttatctggtcgttctgctattagggtacaatggtcaccctaaacaacgcaaatgcaagtataccgcgctggcttaaggcgttttctgacataagtcgatctccttgctggtagggcatagtggtcgcccttagtgaagtaagtcggagtatattgcaccgacatagatcgttaccaacttaagctggtggcttcgttagcagggtatagtgatcaccctaagtcaagtaagcgtgagcatgtcgcaccgacttaaatcgttgctgacttaagctgattgcccgttagctgggtatagtggtcactataagtcaagtaagcgttagcatgtcgcaccgacttaagtcatcaccgacttaagctgattgctccgttagcagggtatagtggtcaccctaagtcaagtaagcgtgagcatgttgcaccgacttaaatcgtcgccgacttaagccgattgctc

SEQ ID NO: 52238 - DNA, 511 bp, Zea Mays
gtcctcccatttccaagatggtatgggaaggggctgcaaagggcctactgccctcaaatgactggctttgatcctctggcaggtctcgcactcggatatgtacttggcaatctccctcttcattcttgtccaccagtataaggatctgagatcatgatacatcttgttgctaccggggtgcatggaaaattttgaaaggtgagcttcagccaatatcttctttctgagctcagggtccttaggaacgaccaatcgatctccaaaccatagaattcccttgctgtcctgacggaagcatttgtatttttctgctttctgcttgatcatttccttgatacctttgaggcgcagacaccttcacacccgcggtcgccttggtgttgttcctgacatgcccaagaagctccctggtccgcgaattggactacggcaatgacggtctagagaattccaatggaacccacccacggtggtggatgaaccctcggatttttcgatgacggtgttcgtg

SEQ ID NO: 52239 - DNA, 433 bp, Zea Mays
ttgtgttagtagttagacagtaaccaagatcatcgtggctccgtctgtgcttctcgctctatcttggtcctggtgtctttaggcgatgacacattactaggactgtactaatgtttccttgctcaaagcattcgtatctgagtactggtatagtagtatctgttcatatatctacgtagtcaggacactgtatgcaatactgaaaagcctgtgcacctcaaccaatgcccatttctatggcaatccacacctgcatacgttctctggattcaattcacagctataaaagttgcctgcaatttcacagagtttatgcaacagttcatattgatggtggattgtagcatccgctgttcccagctcttcctcccccaccaaactttggccaaattcataaccaaccaatttatgtcagcagaaaacaatttaaaac

SEQ ID NO: 52240 - DNA, 794 bp, Zea Mays
gtgaccgataggaagtgcttcttgagtgcgcatgaatgcggaaaaagtgcgcataaaagactagtgttggtcattggggacagtataaacctataaagctgccaggagtgatgaccgccaggtccggagtggctgaggtgttacagatgaatactacaacaatatgatgtcaatgctgcttcaattacattctaagataattgtcataagcttgaaggagtggcaaccacaacacaatagcagtatctcttaagtagcatgaagatgagctaggtttatggtatctagtggtctcttaacattgttcagtagaggtgacgatagagagggaaaccctgtatcactaggacgctaggaaatgtgaaacaaaaacaatcaaaatttgacctctctttggaataatcacaaattatatttgcatttttttgtttacacgctattattgatgtacaaaatcattctttcctcagatattccatgtatagagacgactaaaatagaaagttcagagtattaatagagaaatccactaggatgtatggagataattccggacggcttagcgtataaacttagatttggtgtggagacagacagcaagtatttaaaagcagagtgcgaaagtccatggtcccaatatggaaggctacgtgcacagcacagtcccgaaagctatcttaaagtgtttgccaaaaaataataacaaggtggctactattgtccggtgatcttgcaagtcaagtgttggatttgccaatggtaacaataaataatgacatcttgttagaattcct

SEQ ID NO: 52241 - DNA, 459 bp, Zea Mays
gcccaatccagggcttcctcgctacagcgagcgtgccgtcatcgtcggagtgaagctgcgagggacacagggtcgcatcgcttgatcccatcgatgttcggacagttcgccttggtgcgctgaagggcagggcctcggcggaattccttcagtccagtgttcatcaccgagtcgctgcaccatggttgaaggtctcctcggcatgaaccctggtgagattctggaccctttggttcacttgctggtccgctctgcatagcacaaaccgtaggggaaagtggagctctggtgctcgattggacgggagcaccggtgatggtctctgccgttgggggcggccgccgctggagcgggatctgctgcgctcagctatcggtggtggaagacaacctatgaaccgtagatcgcgttatcagtggccaggattagaagatagggccaactcgactagagcctatc

SEQ ID NO: 52242 - DNA, 365 bp, Zea Mays
gagattggaattaggattgacttagcaccatatccgatgcagggaaacagattacagatagagatggcaatggccgtgtacccattgggtaccactcaaccatacccaaacacactaatataaattgtatctaagaagaaactcatactcatgcatgagtccaaagttttgcccatactcgtatgggacccatacggtaccccaaatacatttataacacacacattaaacaagaggactatgatttcacgaattagcatatcatagatgtcatacaacaagctaaataaatgatcgacgtaaagtgtgtgaggcattttgatcaggatatttagcagtatccgggaatatgtcctactcagagg

SEQ ID NO: 52243 - DNA, 386 bp, Zea Mays
cgaagagtgtgtgacttagctaatgttttgttgcaaagttcggggatgcctgacatctggtggggcgaggcagtactcacggtgtgctatgtcctgaacagggtgccgcctcgcaaccgtgaggccacgccctatgaaggatttaaaggaaggaagccagatctttcgcatcttcggacttggggctgccttgcaaaggtgaatgtcccgtttccgaaaaagagaaagctaggccctaagattgtagattgtgtcttcctgggttatgcacataacagtgcagcttatagatttctagtggtccattctgagacgagcgaagtcgctttaaatgtcataatggaatctcgggatgtgacattctttgaaagcatattccctatgcg

SEQ ID NO: 52244 - DNA, 278 bp, Zea Mays
accgactcaactcggcagtattctatgcttgaggagagatattcccaaggtcagatcgacctggctcgggtttctgcttctttagacgacgcgaattccttgaattcctctcttaatgctcagcttgactctgaaagggtggttaacgaggtaagcttacttaattggatctgttgtgcttttactgatttctggatatttgagggttgattcttgtctgcaggaggagaaacgagcacttgcagcttcccgcgacaatctggataggttatatcgtg

SEQ ID NO: 52245 - DNA, 694 bp, Zea Mays
ggagtagcaacatctagctagggttgctcgcaatagttggacgaccgggatgcacgcaggcttggcatgttggtcggacttggccagcgcggccggcatgatcctgcgcctaatgacaaatggtgttatgcaaaaaatatgatactcaaaatatataaatgtgaacgaaaccgtattttagtatgtgacagtgccagaaaagtgctgcatttcttaagccagagtggagagaatttgaaacacttaagcttaagtcagctaaggcttgcaagatacagatattgttattgtttcatcacataataggtactacatcatatctctttcttgtacaaaaactgtctgtcgatgtcaagaaatctaacttcataatggaagaatactggcagagtaacatggctgtcaaccttaacacacttcaaattcacaacgaccataatggacaaaaaaataatatataagtcctcagtagcagtattgtccatttggttactaaatctagattaccgtaactacatcaccagtagcttcaagaattcgcatgataaggggaacaacagctgggtcaccgcagacatgaagttcatctaaacaaagtcccaaaagtgcacatgtgaacgaataaccccttgatttacagccaaccatctattccatggaataatacaaaattacaatgatggcgtattccaaa

SEQ ID NO: 52246 - DNA, 439 bp, Zea Mays
ctatgcctgaccatgttgtgaagtgcacgagcaacatgaagtcgagtagcaacaccataacaacaatagataattggacctccaccactaccaatgcaatctaggtagctccatgacataatcttgaaggttggaggaaccaaagtctacaaaacacatgaggccaatgtcatgtatgttgcagatgcattacgacacaagaaaaaatttactctcgtgttcaagcattacaaggtcatgcaagaggttgcaacaataatgtgttgtggatgacaaacatcaactcatgcaacgtctacaataacataacccatctctaatagaggacccaacatcgtgggactaattcatgataacaaagataggggagacagagtccatcgtcaagtcgaccatcattaatgtgatctatgtgacatcctccatagtcacattcttt

SEQ ID NO: 52247 - DNA, 388 bp, Zea Mays
tttggagcccttttgtggctgttttgtaaggttttatactatggtgcttgtagaggaattaaataccatatattggtgaacaacttccttaaagggtgatggacatgatcccatacaagaattggagtaagaactgcttaaattgggactgtgttgtggttgaaactgaattatattcagttattgaaaactgaatttcagtgaaagttgctgagtttggagcccatttgcagctgattcatgcagttataggctaagaaagctatacaaaggtggacgatcatgtgttggtgtatacgtttggttaagaatcatacccctaaagctacttggaactaggagaaaaggttgcctaaatatggactgtcaggttacttggactgagttt

SEQ ID NO: 52248 - DNA, 338 bp, Zea Mays
aaaagttacaggaaaatctgacacttgagcaactacgatccgggttcaggataagtccaaatcgaacaatgaagtgaagtttgtcgttttatgactccagccgttgtctttcttgtttgatgctgtccacaattatgtgggttcgctgattgctgtcattactattgcccaagtgcgctccgctgaataggaccacgccgagttagcccgtctggaatgttagttttatttctattaatattgatcggctacaatatttccgggcctcaaccccaccgaaacgaacggcccgttagggcccgttcggttgttatggaatggagtaccggaactgttct

SEQ ID NO: 52249 - DNA, 451 bp, Zea Mays
caatgctctcctttaaagcttcgggagcaggagttgttatttcttcagtcaaaatttgctttgtagccttttcttctgatgccacttcttcaacttcgacaaactctttttcagcagactttgaaggcccagtatctacttcagcctcaattgttacagcttcaacttctatctgcttagcatcagttccagtttgtgctttgacggcttcagcaaccttcttcaagggagcggggcatttggaatccgttgtgtccaaaatatctaatacatttactatcctctttcttctaggggttgtggcagaacttttttctgccttcggcactggtacttctaccaaagggcttaaaatctctaacatttttgttccttcaatttttggctcttcgaccttatctttatcggtctttgactcaactagcttggctaaaggtaccttcggcattat

SEQ ID NO: 52250 - DNA, 478 bp, Zea Mays
gtctacatctgggccctccgaagctaggggatgagtcctaatgccgaagctttctgtcgggtgcatgagctacattaccagacaaaggccagggcagatggccttcatgagaattttggttgctataattttacgtatcgaaaggatacaaaggcaccagttcttaactaccagagtgaatggttttacatgaaagtagacgagaaaaagagggagaagctaatgactatggttatgagtccactgactttgagcttcggaatgacaaggcccttgtgccatatgcagcttggctccccatgccaagtagccgaagtggagtttagagtggtagcggccaaagtcagcactagggatctggtgcaagaattcttggcaaacagagtattcccgacctctagtggctgggggatgcccaagaagaaggatgggagcaaaaagcacgaacttgttcggctcccctaccgtttcaagattg

SEQ ID NO: 52251 - DNA, 857 bp, Zea Mays
atttattttagccctgcctcctaataattctttatgaatgaaaaggcattacacaaaattttatccctttcttttatattccaaaaattgggtattacaaatcctaccccccttaaaataatatcgtcctcgagatttaagaagatctagggaaaagatggggaaagtctacgcgaagctcttcttctctttcccaagtagcttcatcttcaccatggtgactccattgtaccttgcacatcttaatcaccttatttcttgtaactcgagtcaaagtgtccaaaatcttgatagggtactccgcataagtcaggtcatcttgaacactaaggtcctccattggtagctgctcctcaggtacccggaggcacttctttagctgggacacatggaatacatcatgtacatctgacatatgatcgggtaactccagttgatatgcaacttctcccactcgctttaagatcaagaaaggtccaatgaagcgaggggacaactttcctttaactttaaatttcctcataccccggagtggtgacaccttcaaatagacatgatcaccctccttaaactccaatagtcttctcctattatcagcatagctcttttgcctggattgtgcaattctcaaattttctcttatcattcgaacttgttcttctgcctcttgaataagttcaggcccaaagaactgtctttctccagtttgatcccaatacagtggagtcctgcactttctaccatataaagcctcgaatggtgacatcttcaaactggcctgatagctgttattataagaaaactcagcatagggtaaactcttctcccaaatgccaccatgcttgagagcacaagct

SEQ ID NO: 52252 - DNA, 358 bp, Zea Mays
agagagccagggagggccgccgtcggagatctccgcccacagtggcgaatcatcctcggcgcttcgaccgtgggtttcgccgcgaatctttggagcatccatgaagtcgccagactcggagtgttgattcgcgcaagtaatttctcgccgtcgtacaacctccgccatggatccgctcattgccgtggccagcctgctaagacggtgaccaacgccggtatgtgatctctaagagttcgttaaataatgctataggactaggtcgattcggttgggggtcgggcacgctgggtcgccggatctctactcgccggtgaactacgccgccgtgggttctgctcctgaccgtggctcaagc

SEQ ID NO: 52253 - DNA, 601 bp, Zea Mays
agctagcccaggccttagcgcgccttaggacccctccccgtggccggaatggctcaccggagttactccggcccgcccgagaccttctcaccgccgttctcccttctctacccgtggattcatggcctcttccccgccattgagttcgtcatggtgccctctccctctctgcccaactccggtgaccccagatccaccctagctcgcaccagcctaaactccggtgacctcaccgccgcggagaggagcagcgccgcccgcaaccgttcactgtaacaccccaggtgttacctaggtgttggctttttattggcacatatacccattatcacatgtggttaaaacttggaggagagggagtgcttaagaccttggaagcatgagtgagttaagaaataccaaggacccaagtattacccaagcttttaggcaataatcacctagggcaaagaaggattgaaccttggacccccccttcttaaagcctttagttgagagaaagatcaagcaaatgcacatttcataatttaaacccttaaccaaagtttaagagtaccaaaatgtttacaaaagacagtaaaggaactttgcaaaaagaccc

SEQ ID NO: 52254 - DNA, 385 bp, Zea Mays
gatgaagcgactttcgagaccagcacaccacaaagaaaccactggtttttgtctgatgctgaaagcaacttgttgggctccctcgcacataaagaaaccactggtcgttgttgggctatcgtagcggtatattgtttagaacacaaggtgaacgaatgggaaaggactgagcaggaaggaaagtaaatgggcgcaactgctttacgacatcaagcccatagcggcccataaacggtacgatacacctacgtgcactgttacagcccaataagagaagtaaccacgggaccaaaccaactctcggcattacaaaacgcctaataacaacattcacaaaggcaacacggacacgatcacgcctgaagctgggcattcctcgggcaaa

SEQ ID NO: 52255 - DNA, 483 bp, Zea Mays
cccgccgccgctaaccgccgtcaagagcacaagaatacgatcctggtgctaccgtacaggaaaggctactacaaagctacgccaaagtctgaaaaaaatatttgcttccttattttaatgctcctcaaaccgtaacgttgagtagaaagcggtaactgtcccacttttatcgcgattgtacatcacttctttcctaatctcaaaccaatctagatttacacacactggtcacgtatatacaattgcatatatgggttgatgtctcaatattgcatggtttatgatgttaagttacatgtctttatgcagtcgtaaacgctgaacaaactgacaaattcgtttcacgtgattcgcgcgtcagaagattctttttgcatggtttatgcacattaatccatatatatatgcattcatataatagctgacacatatcgtcctggctcgtggctgtcgcttgcatggtatacacaaattccatatctc

SEQ ID NO: 52256 - DNA, 383 bp, Zea Mays
ctttgtctcaaatggctgttgagccagctttgcaagaccagattatcatggcccagctcagtgacaagggagtgcagattatcaagaagaatctccatcagaaggttgagaagtataattgtttccgccaggatgagaaagatgtgttatggttcaaaggcagattggtaattcctaaagaccaggagctcaagaggaaaattttggatgaggctcatctctccaaattctctatgcatccgggaagcaccaagatgtaccatgatctgaagcctttgtactggtaaaccagaatgaagagggaaatagcccagtatgtatcagagtgtgacacctgtcagaggattaaggcaagccacttgaagtccgctggagccttgcaa

SEQ ID NO: 52257 - DNA, 422 bp, Zea Mays
taaataagttcgaagtcacaaaaataaaacacaaagtcaaaagcaattaagcaatacttatccgcctttcaagttccgcagctttctcagccgccttcgtcgcttcttttgcatcatgagaatctttttcactcttttttattatctcgtgcgccatctctcggccgccattctcccagatgtcagtaaagaatttcccgccaactaagcttgcttcggccgaggggtcttttatatcttcaatagataaggtagctttggtttgggccaaagctttcatgtgatcacagcctagtttctccaaaatagccacgattcccctggcacctgagaaggcacagacatccccgcgaccactcaaaacttcttcaaaggcttcaacttcgttgctgatccaatcagttgggccttcaggatcaccc

SEQ ID NO: 52258 - DNA, 933 bp, Zea Mays
ggcaaatctctccctgtcaaacaccgcatattacagtgttgccattctattggcgtttccatgagtgcgacacacatagtggtgtccgcttcaaccacctccatctgatcacctacccattgtactaaaaattgatgcaaagtagatggtacacaaccattagcatgtatccaatctcgccctagcaaaacattatacctccctttcacatccaccacaaaaaaggttgttgggatagttttgctgcccactgtgagttcaacagacataatcccttttgcttgtgatggatcccatgaaaacccactcagattcatcacatccaccacaaaaaaggttgttgggatagttttgctgcccactgtgagttcaacagacataatcccttttgcttgtgatggatcccatgaaaacccactcagattcatatttgtcttaattacctcactctccttgtatcctaatttagaaaacacggacaacggcattacatttatacctgcacccccatcaatcagcatgccccccattggcttcccatcaatgtgaccgcgaacatatagtggttttaggtgagatccctgctcatttgttttttcaaacacagcacgctcaacccccaacgctagttctgcaatatctccctctgttgccctgaactcagtaggcaatacaaacatcatggtaacatccactgggacttcaggacttctttccccatcagaaccgctgccgctactgtattcacctttcttttctcttgccaattgtttttccctccacgtcttcttaggaataaccatctgtctgtcctgattaaaccacctataacgctcctcctctttcatcttttctgtgatttccatagtcctcaaccgctggacacgccacttctgcgtacaacttaacccaggtggacaccatggtgttggt

SEQ ID NO: 52259 - DNA, 377 bp, Zea Mays
atcaagtggtattcaaagactcaggtattaccgtcaggcttaccctagtttagtttagttttttcatcctataactccagataattgccatacaaaaaaatatattccgttgtcctagaacccttgtttagccttgcaatttcgtttcacattgctttgttgagtttgtgtccgtgtcgagtcttgttgctggtttaggtcgtatcgtaatcgtagttcaaccgctccatcgctgttatttgtttccgccgctatcccatccaccttacccagattacatgtcgagacaccacattactcgatttgccctcgctagccgccctgtgtgaattctcgccacgctagctctagattaggttgcaagccgcattgcattg

SEQ ID NO: 52260 - DNA, 672 bp, Zea Mays
aggttatcccatggtgtatgcttaattttgcttacaaaaacaagcatagataattctttaagattatggaataaatctaattcataacatggagagcgatgaatgtagaagaatcatatccaatataagcaagaagcacaacaacataagtcattggattgattttttttctttttatgttatattgcgcactttcaaagagaaacttattctctactagtgagactacatgggttacttagataaaagcatgtagattgatatggtatagaaatgataaatgtacaatctaccatatgagaggaatttcttcgaagaatggtgacgtaattaaagatgtttgaagtgcttcatttttctatgtgactacacaagatacataagaaatgatattttaagatacttgcacttgaaagcataaatgttaccatcctttgtctttcctccatgttgtaggtcttgacttttcggcacaggataattcttcatttcctacaacatcaatatcttccctcgagatgatatgagtttaagatatagtaatttgacaaataaccttgggtcaatcatggatatagatctttgaagattgatagcttgagttaacaagaattgacttgactctctcaagcaccccaaagcttcatatcatctctttctcctgcaaagctt

SEQ ID NO: 52261 - DNA, 595 bp, Zea Mays
cggggcattaatagaactcttggagatgctctcaacagctgtactcttgatccatattgttacctgttgtaaggtgagagtgtgagatgtcctttaggatgacatgacaatgacgcacgcccgtccgttggctgacagagtaccacgggaaatccaatccttaaccgccccggcgtccaactccgtccaatccatatcctttgatccggacctaaagcacggcatggacctgcaaaaggcaatcctatgacaaccgggacaacatttatcaaagcgctgcaatttgcatgcatgggtcgatcaactttcgaggattctataataatatactcctatctcctacacgctgctcctatggaaagtgggagggagtagagtagctaggagtacgacctcttcgctgatgtggcctcggtgatcgagtttaggttggacgagagaaaaatctttgttgcacctagacagcaatgtcagcgtgggttcagctcggatttgcgcgaaaaaaacgtgaaggatgcaccatgtacgtgagcatcatcggtactggcagctattatatctcatctcctatacgatatcttttattttaaatttt

SEQ ID NO: 52262 - DNA, 331 bp, Zea Mays
gtggaattgatatacccccaatcgacacagccggaggatatatagacaaccacaacaacaagaagaagagatgaatcccccaatcctccccagccggagttgacccagctgttgcaacccagatgtggataatgcaatagatggcagatactatggcggacatgcatgcacagatgcggcaggaacgccaagaggtgcgcccggagagagaggagatatgccaggagagcagggtgcaacagcagcaagcaccactgccaccaccaccacttccacctcaagacaagcaccgggaatttatgagccacaagccacctaccttcgccagctc

SEQ ID NO: 52263 - DNA, 646 bp, Zea Mays
gagaaaaccaaatctcgagagctcagggtgtttcttataaagttcaagacctggttgtagtgttcctggcactaccatggatcgcgtgttggttcgccgaaaagagaggggttgtttaacaaaaaaagtcatggccgaaagggtatcagcccatgagcaccattggatgcaagatcaacgacgcagattacagaaacttctatatgaactggtatgcgatgttagcctttggatccgagatcgatgctcggtatccgaccgcgccagtgccgctccccagccctcggatggacgacacatagtccggattttaataactctacgtttgacctggcccgaccaaattacatcggacaacaacagttaagcctgcgctgaatgacaacctgattaaatctaccccgctcgttgaagatcttgcgttcctcggcctcatccaagttccctccatcggagccgttgattaccagatcgacgccccgagccctatcccttccaacaccacaccggccatcgcgcacaccgccagaacacgacggcaccattaccgcgcaatccgtccccatgataccatactctatacttcgatttggtgggccaaaacgtacataagagggagacgaactttgtgggcgcttacctttgg

SEQ ID NO: 52264 - DNA, 385 bp, Zea Mays
ctaccttggatgtcccgaaacctgtcagtactcgcccgaagcgtcctagccgaaccagtcagcccgagccttctgctgatgagcagaagaagaagagaagacgcctccggcgagtatccagctttgacaaggatgccagtgccttagctcctgctgccgaagaaatgactgcaactggccttgctgacattgatcccaatgggtgcgctccgcctgctgctgaccccaacgaggatgctgtttgtgctgttactgtggaggatgaggaggaagaaaatgaaactccattaactcggaaaaacagtcggcaattcgtcgctagcggtggaagtagtggggttccttctcctgccttgtctgcccttattggtctgcaagaactgtc

SEQ ID NO: 52265 - DNA, 418 bp, Zea Mays
ccaccgttggatccaaggccagtggtgaagattagatctagttcaatgtggcggggaccgtcgatctcgctatgggtggctaagattagaggcttgtaccggttcggctcggctcgatctcgaccgtagatcggtgtgtaagcgggcacagttggtttggggctgttttaaatcatggtcgtcgatctcgtgatccgcggctcggatgtattggtgggttgggatctaatccgatccctgaattcaggatcggacggctgtgattagctcgtaccccttcgccccggcatttattcaaaagagtccttatgttattagaatatagatcccgccgtccactctggtgaatcgctgtgtctaggacgcttttgcgctttagcccctttccttttatataatcatgcgagcaatccaggaa

SEQ ID NO: 52266 - DNA, 502 bp, Zea Mays
gaggtatagcagaaagctccaaatggggtgatgaatgcagctttttcctcgtcttcttttgccaggctgatctgatggtacccggagtagcaatccaagaaggacaatacagaacacccggcagtcgagtctaccacctggtctattctaggaagtccaaagggatcctttagacagtgcttgttgagatccgtatagtcgacacccatgcgccaatccactttattctttttgagtacaagaacaagatttgctaaccactcaggatgcaatacttttctaatgaaccctgctgcgactaagcgagttagcttggcacgaatagcttctctcttgtcgggcgtgaaacgacgcaacttttgtcgtatcagtctcgcctgggaatagaccctcagtttgtgctcggccagctctcttgggacccccggcatatccgcacgttgccatgcgaatacgtctcggttatcttgcagaaactggacaagcgcactttcctatttgt

SEQ ID NO: 52267 - DNA, 461 bp, Zea Mays
tctagagcttcgtcgtgggaggaaagtagagtacctcgacattcctctcaaggacagcattaaggggtggcgccttgagtggttcattgtggagaatcactacaagtccctcccccctcagtcagggaggcagccagatgtccgcacaccgagttggatagaatctccgacccctttggagataacagaggctaaagtgctgcttgtcgaggtctgcttgctgaaggatagagatctgactgctgaagctgtagttgctgacttcattttcaagaacattcagcccttaaaggataggacctaccttgcttatttgtacagcggtgtcaacgactctacccgggtcacgaacagaaaaattctcactgaagatctgatgagtcgactggacatgatcctgaggggtagagtttcaaatgctggtgctcctgtggcctattctgcatggaacctgccaccac

SEQ ID NO: 52268 - DNA, 438 bp, Zea Mays
gtgggaccacttcgtctgcacgaccgggccagtgacggcgagatggttgatgatgcggtagtggtcccgcttctgccgcttggtgtcgaagtcagtgctggaccccccggttatcatgtgaatgactccgcgataaggttgatcagcgaagtcttcctgctttggggcctgggggatgttttgttgttgctggtgtggtggttgaggcggaggatgtacgatttgtacttcctgatggtgttggtaagcgtggtgcggtggatgcggggcgggagcatgtatatatggtggggggttttgctggtaattatgcgcgacaattctggggttgtcggctggctgcgccctcgccattctgtctctggtggccttgacttcggggcagtctctggtttggtgggcgcagtcttcgccatggaaaaggcagtagaatcggcg

SEQ ID NO: 52269 - DNA, 471 bp, Zea Mays
ggcgaccggtctggccagcgaccggattcaccccgcgttggatattcttaccacgctcgacgttatccacacttcccgtggcacgaatctcccaggcgagcgcgaattgtgacggtggatcaccggtggcgaagggtgatgaattttgggatcttttttagctactgtacaatggaatcctcattcagagcgcttgacagaccaattcgcagggcctagatctcaaatttttacatgacaacttgttaatctgcctgtaacaaaaatgttgcctaatgatccagctacattcttgctatagtaatcatagccaaacattaactggatcatggtcgaattctagctcaaagattgcccaatctcactgttagtctgaattcagacctagggcagtctgacagcccgactttggatcaaattttctcaaaatttctcatggcaccaaggcataatcattatagcaaagttgtt

SEQ ID NO: 52270 - DNA, 1031 bp, Zea Mays
gtcttttagtaaagacttcgtatcgtgcacttgttgtgcttgtccggctgcacccttaggcagcttttgcacggatgtcttttagtaaagacttcgtatcgtgcactttttgtgcttgtccagctgcacccttaggcggcttttgcacggatttgtcgcacgcgagggtagtctatgctacctgtcgtggtgacttcgtatatgtcgaatgtcgaagaccgtcgtagtggtctttttcgacacttatggtaatgatgtatggagttttttcgggggctttttgttggtatattacattgcgccacctcattaaaaacctcacccccctagaggaaaagaatgcgggtctgaataacattgtttgaagaattacaaagactcttgggccttggatcttaaatgaaaaattttcggagattatcgatgttccatgagtgttctaagtctttgtcggatgatgttgctagcctataagcactgggggatgcctttgtcttgactatgtacgacccttcccacttcgactctagctttccctgggactctgtccgggtggtccttacaagtatgaggtccccttcgctgaattctcttgggacgactgtgttgtcacgccatgctttggtctggacctgatacttgttgagggcctgcagggcgagggcacggtctccatcgatgagatctttggaagttggttcatcgactttgggaacggctaacttgtttgttcggggggcccgtgttttaattcttgcggcatcattgcttcagatccatacatcaagcggaagggtgtgaacccggttgctcggcactctgacgtattcagggcccatacaacttcaattaattggtcggtccatttgccctttttgtcgtcaaggagccttttcttgatggcgctaaaactcttgccattggcgcgttcgacgacaccattggattatgggtggtatacagaggcgaagacagacttggtgccgatggaactgcagaattctctgaagtcttggctgtcgaactgtttg

SEQ ID NO: 52271 - DNA, 513 bp, Zea Mays
gagaatcgtctcacgggggagcgctggtggattttatagggcagaggatggcgatcaggcgccagaatagcgagtggaaggggtgtcagcctccattgatggtggtcacggacagtggggaggagaactggcgcgcgattggagggagttgaaggcgaggaggctgctgcgtggcggatggtagtggagggctgaggtgaggtggggcgccagagtggggagtagtgacgagaaatttccaccatcaatggccaaaagtaacgtccgcgctaatgggatgtaaagagggaagagagggcgacacgattagtgtggactagtcgaggcatggaggtgacttggtgatcttagcgtgggtaggagctcgggcggcgtggcgtccaaccgacgtccgacggcgaagcggtctgcgcatgacgtacagccatttgtcccgtgtgcttttctatggctccattcggagaagaaaggcctgaatgtggggcctacgtggcatagaaatgacaagataat

SEQ ID NO: 52272 - DNA, 389 bp, Zea Mays
aagcttaatacctcccagaatatagtatgcagtgaccatttcactgccccttacagccttactgcctaaccaaaccatcagtcaaagaaaaaaggaacatcttcaaaataccttaaggacgatcaagtgatatacaaaggagcgagaatatgaactttatttgtgaacctcaagtaaattgacatattatcccaacaacctagtgatctaatttgctcactaaggttttataggaaattaaattctggaatgtgacatagaaaattctgtgataattgcaccagactatgctcttttgccctcctgcaaacgccttccacccaccaaactagcaagcacttctcaagagcacatctggatatgatttggacatgagctgtatatcaggg

SEQ ID NO: 52273 - DNA, 596 bp, Zea Mays
ccacttagagatggctagaacgtgcatacatacccgcaaacgttataagatatacacaactgtaccatttaccaactatatcgtattcaacgacgtagactccagtatatgccactatgtaataagataggagtaattgaaactttgttgggcatgacccagtgacccactatccagtatacatgtaactttctcctccattgtgctataaaggggaggagtagagcaacgtagaaggtggcacatctagattcaattcgaacgcaactcatggggagaaaacgaaagatgaaccaaagatcagatagtctagagctctcactagaatcaaagtagagggagagctagtatgtcctttagttcagttaacatttgagtgtgtaatcttcttgacatccgctttcatcaatccacctgccataaagagaatatagggaattacgcttccacggatcgaacctctataaaactcatagtgtgcatgtagtcataatagcattctaatccaacaagcctcctgcctacgcccctcgttttcttcctaactcttctaaattctcaagtactaaaggactctagtgtcattacaccatgac

SEQ ID NO: 52274 - DNA, 341 bp, Zea Mays
atggatcacaggcagtgaaagggtacgcttaggtctaaatccagccgtcgagcaatagatggacggtccaggctctttcttcctcactggatcacgccagcgacgaagcccggcaaaccacggtggcgccatggccaccacgcccggatctcgtgacctgcactacaaaccttgacccctacggtgctacgtgtagcgagggttggggcgagtccacagggcaaggtcttaccggtgattaggctccaaggattcctgcccacgacgcacagcggtgcttggcggtattcacgacgctggtgagcaattgaggcgacgccagtggctaatcccacatggcg

SEQ ID NO: 52275 - DNA, 1007 bp, Zea Mays
cgaacacctggacggcagattccaagcacgcgacgcgggcacccgcatcctcttcgatctgacggagacgggaatccgtgttgacatcggattccgtcagatgagcttcgatgtcggcgcggagagtcacgatgcgtcgatcggaatcgatcgcctgggattccaaggcgccgacccgagattcccacttggtgtcgaaggactggaaccgcttatccagttcggtaagcagcgcccgggtctgatgctccaacgcaagcgtgagtgcagcatctggggtagtagtcgaaggagagtgagccatggatagaagccgaggaacgacggaatttgataccaattgttaggggatactggaggaaggggagagacagaggaaggagaggaacacgagagagagaaggtgaggaatttagtttaggtttttcttcttcgatacccttctcactgtccaggctggttcaaatacaactcacccaattcagaatacgtaatactgcctcatacgtgtacggtatacacacgtacacgtatggtacgccacacatctagacccactctggccctcggacgcggctgttgacgtgccgtttgcgtttgcctcgcacgcctgtgtcttgagtctgaatgtgatcttcttctccctctggcaaggctgaggtagtatctgtagtggtaacatgccactccaatatattaaaaagggaagaacttacaggaaattacagggaaccgaatcgacttacaagactattgaaaaatactgaacaaacctactgagcagacctattagccagactagcactgaaacaaccaactaactctttgaccactaacgcgacctgctccgctgatctatgctggctatggaagattttattatttctttctaaccaaacgctccaccagaagtaaatcataaggccatcaaaagatcttctcaaatgcttgctgcacatactttttaatttcctccaccaatcatacaaggactcattgccatagac

SEQ ID NO: 52276 - DNA, 642 bp, Zea Mays
ctaacattagagctttggcttctaggctagagtctatagcatgtgatagttggctccatagcatagggtaagggtcagaaatagaatccaagggacaaactaaactgagtcatgagtcagctcaaccatggtgggtctctttctccaaaaaatggattcaatcctcctcttatgtctagtcacctcgggggacacaactgtcatgccactcatcggcaccactgacattaagatgtacaacctttaggtctaacattcttaggggctctccatgaagtgtataggcaaaaaaatggcctgcctataggatcattctagtggcagacctagggggctctatcagtgcctaaggaagaccatacccacggccgtcgttaagacacacataaggattctacctaggaagactagcttcagagaccactggtgggaccactccacatgggcctcaagtcccgagagcctcccttgacctcgatcaagaggaaatgatattatattggggtgaacttatatgatagcctagctattgattagcctaaggcattccatgtctgatacacattataaggcctagagcccttagtacctagggcctctagggtataaaattctaagttcctaagacatctcgtgccacac

SEQ ID NO: 52277 - DNA, 736 bp, Zea Mays
gcaagcgccatgactgaaccgccagtgatcttccttctctccggccgctagctttcatttccaaaattcggagccgccacttaacacccctataaattgatggcccggtctgcttcgccatgttgtcacaaagccagagcacccactccctccttcgattagccaccatagccagagaatttcattcttccccaaaccggttgtctgcgccaccgtgagacatcgcgccgtggccagccacctccaggtccgccctcgctttccctgtccgtgtttcagcacccacacgtgcttgtatggctcgtcggctcaacccattgagctagaccgcgctcaatcaaccggaacaccttgatttgtatatggtgtttgtcaccgtcgtgggtgggagaatccagggcaggattggttcgattaaggcatggtttaggttcgcctcaggtcagggatgctagtccgacacttagttgggtcagtcgacgccgttcatggtcagttttagcaaaggggtggtcgacgacgagcgcgccgtggccaaggatcgggttggagaagaaacagaagtcgaaggacctctgtgcaatcgtcagtgagatagtgaatagtggccaggggttcttcatcggttatttgattaaccaagggcctttttgcaaagtcgacatcacggtcataggtgcgcccttgttctgtgtagacctggggcggctaggctggtttcagcccaacactattg

SEQ ID NO: 52278 - DNA, 705 bp, Zea Mays
gttttctggttctttgagttcaattgtttgcgagcttcggctttctatcgtgaccatcaccgaaatggctgaagacaagaaaagcgctgatcccatactcgctggcttctacgaagccatggaaaagaccaatttagagaagatcaccaacgaaatattagctaggctatctggtgattcaagcgatagtgaaagcttcaatattgagagtgagaatgaaaatggcgaagatcgaccgtggagaccaagccatgttgtttttgggaaatccacaatcagacaaggtcatattgaagcgatgaaaggaaaatcctatcatgatgtatctatagtgagagctggaggagaagacatcgtttccctgccagaaggtgatgaagtggtagtcttcaggagcttcatgaaagttgggcttcgctttccgctccacaagatgctggtcgaggttttgaagacgtttgagatataccttcatcagattacccccgaagctcttattagagtgggagtttttatctgggccatgaggagccaaggactggagccagatgcaagatgcttttttaatattcatgagctatcctatcagacgaaggcaaccaaaaaggagcagtatcataacaattttggttgttatatctttgtgtcacgatctaaggcgaattgccctgtgcccacgtttcagaagaagtggctaggttcttg

SEQ ID NO: 52279 - DNA, 821 bp, Zea Mays
atgaatcgtcggttcagatttaaatatacgagatcaccacggatccgtccagtcgcatcgacggcctagattccatttcacgaagagttacgctaacacctaatcatatccgtccgcttcaagatcaaaggctccctgaccaaccctggataacacctccctttccccaacagctcgaggtggcgccgcctagggccatggcggaggttcgccggagagtggcgatccagcctccaaataatccctcctgaatccgaaaaggtgtagaagatagcagagacagtggggaacatgatggagacgatcttacaggcaatagagttctggggagccggcccacgacgacctgcggcttcacggtgttgaagggacttcgatgagcaattggtgtatctccggtggatctcctcgcttggaaatgccacaacaactggcggataatactggcaatcctccctaatcgcccatcgaggacccgatgtcacgaatcaaccggtggcgcgatttgctctctttctctctctgcttcgcggcggtggaaccttcctccgccctctctctttgggttcgccattgtttctttggagctggtcgagggcacttgggttgaacgcggctccacattatactctgagcggcgcaagaattccggggcgggaccaacgaccaccccgagcgcgaagatgttggcgggctgttacagaggacgacgatgctgacaacatgaccccggttgtccgcgaccagggttctcctgcgcacgtgggggtaaggaggctggcgattgggcacacggtgtcagtggctgacccagggggaat

SEQ ID NO: 52280 - DNA, 498 bp, Zea Mays
cagggctagtcgtcattctacaacccatagactcgaaccatcttcatgtggctaggtcaggctcgagtgcctctcgtcctttggcaccaactctcctgactgagtcccctacgacccaccatcatcgccttcctacaacatgcctccatacggcatgccctcgatgacccaggctccgccccagctctcgccttcgaggagccccaccatgactccctgttccccgctcgctggaggctaggacccagcctccctcacaaccacatatagcaccatggtgttggctcaactctcccttgactaggtcatcaactctagtgcctcctacaacaccacccccacaacaggcatgctatctcgctatcacccacctcattcctcccacctcacctcaatcatcgttggaaatggttccactctatcggtcacctcagtagctgcctcggttctccctggaccattctatctcaatgacgttctcatagcccctcatatcac

SEQ ID NO: 52281 - DNA, 653 bp, Zea Mays
gaaggctggagtactggaagccggttttgacgagagcttcccgacgacgacacacgatggtctgggcgaggctctgatggcgctgatctgtgctctcgatcccatggcatggtgtatcccacagttgtgcgctaggcaaggagcgcaacacctcattatttataccccgggatcagagaaggccggattacgcctggctgtgagtttgttaccgccgttatcgaaaaactcggtgaaatcctaacgaactgctagcgatatgttcgttcgtaacaacccggagaggcccgatgaggaggtcccacatggcagcgactattccaagagcgcgtatttcgttctgtgcgtgtacaagcctaaagccaagccggcacatcagcatcatgcattaatgtggctagaaatcataaaatagaaaaaagtaaaaaaaaaagacgtggctcaactgtattccagagctagccgaaggtagatcagaattggccgatcgtcacgcactaggccgagaggaattgaggtaagtttttttcttttcctattttctatttccggttttccaaatttatttcaaattctcatttgttttcaaagtttaacacaaagtcaaatgcacaactcaaaactacagaatgttcatgcaaatcacatatttg

SEQ ID NO: 52282 - DNA, 941 bp, Zea Mays
ctttacgcaggaaaccctggcggtttgaaatttctataaagaatccttcccactattcctctgtctcgctgacacgtgcaaaaagacccccgcgctttcatctctttacaacccgtggtccacgacgccacacggcggagaaccaagctccagcgagctcataccagtcggatcactcgatgaccgttgctctacttcggctgaaacctaattcaagccctaacaagagtttcccctcaattaatttcactaacggagctctaactcgctatgtccatggagacagcgggcgcaacggacagcacgacgtgttcccggcgatctaaggggtcctagcctaattggcggggtcggggagcatcagggacacacaagaacactgaaacgaaagagcagagggcatgagcggacctgagacgagctggccacggcgaggcctctttcacggtggcggaaaatagaattgggggaaatggcaaattggagagttgtggtggctaatcggaagcaggagcgggtgcttaggcttggtgataacttaatgcagcagaccgtgccgtcaatttataggggcgctaagcggtggccagtgaatttggtttggcgtggtggccgccggagagtgagaagagtactgtcgtgagagcttggtggcatctaccgtggcggctcaccgacgatctcttgataggtcagtacgagtcacggcggcgtggttaaagtgctaaggcacgtggcacaagaccgcgaggtgtctaactccggcgagggttgattcaaggcgatcggtggtagagcggacacggcggccgaacgaacagtgccttaagctcatctagggggaaagatcttttcaccgtgaaacgttatccgggcaccggtgagcacgaatcacctcatcagcgcgaatccacgctcgggtcaccagcggccgattcact

SEQ ID NO: 52283 - DNA, 480 bp, Zea Mays
tcacaatttgaatcaatcactagattaacactgacgtttttatcaagcaagaggtcaaagagtctctgaaatcttcagcaaaaaggtttatccccacaccaaatgtcataccagaaacttgtatttttgccattgcccacaatttttttacaatgattataaaaagtatcctttacttctagaatcccttttcagaaataagaatcatcttgcctctttttaactaatttaaggggtttccccttaatatacttgtacttcacaattttctgccaaaagccatcttcattctccagcttccaaattcatttggctaacaagcttaaattcatatctctgagattcaaaatccctagaccccttgatcttttgagaggcaaacagtctcccaatccacaaggtgatattttcttgtgcttttgccgccttgctaaagtatcctttttctaaaaatattgattttcttgatcaccttttagg

SEQ ID NO: 52284 - DNA, 597 bp, Zea Mays
aaatatattagaaagctcgaataaggttttgtgagggggaatagttggagagtctaataatagtgtcgcgtatgctacggatatagataggggtggacctctagcaaaacccataccaagagagtggtctttaggccaggctgtatcgccaaattatcacaccataggttgtgctcgtcgatcggtgtccttcggccgtctatagttgcagaaacggtgggtggtgggtggatgcttgtcgtagcggagaattggaagttgatgtccctccctcactcacacggttggaagtgacggggagaaaagaaaaaggaaatgctaaacaagtattacttcagttctcaaatatttgtcgctggtttgttcatttttaaactaaaacatgatacttaaaaaagaacgagcaaaagctgagagtttaagtaggacacacataccggtgattattgggggagcgagagccatcgctttcacacaggtatgaggtaggcttgccgcagcgtgcactgtgtataatggagttgatcaagcaggcagataggtacgtgcactctgcactgtgtataacggagtatactgatgcattcgcgattctca

SEQ ID NO: 52285 - DNA, 414 bp, Zea Mays
gacaaaactaaattcaagttggaagacatgtggcatgcactttgtcatcaaccaaagtggtgcatgtggcacattgtcttcgattccggcgatgggagcaaacgatcccacctcaacatggaggacaattatagctacacatcgcctgatagtgtcgaaccaccacaccctattggtcgtgatagggctagagggcaacacaagggcaaagggctagcaacgagtagtagtgagacccctggcaagaagaagacaatagcaaagcaactctagtggtcagcgagaagttaaattatacaaaattgtacgagcattacaccaagttgatgaatcagaacatcgacgacatgaatgatgacatgagaaggctttacatgttgcatgttaaaaatttggctaaaccattaaaaagag

SEQ ID NO: 52286 - DNA, 679 bp, Zea Mays
caggggtaaaactataaattccagggacttgaaagtaatgtatttccaaagcagacggacggcgggtttatttcaataaatctcaggggctctttagtaagatatccatggtgaaggggtatggtcgcggctgaaccgttggatcagaaatcgtgggcacagattagatcatgaagcggtatgcaccacggaccgtcggatcagacatcagcggccacgattttattagactggatcaacctacacccgcccgatcacaaatctacgttccacgtgaatcccgactgaagcgttgcgcgcgatctaatcgcatccgcacgatccagatcgaacggcgcccgatcagcacaggacacaatctaatcacatccactagccacagatcggacggctgacgcgctgtcatcctcctcccgctccccacacacggcggtggcgctgacccgaggcccagacctcgccggagcggccaaaccccgttctagcgcctcgttactcgagcgattaggtgctacgcgaagccaaaggaagggtgaacttgattgtggtttcggtaccttgaattgagatggcaatgtcccccaatcacgcaccgcagcggcaccacggcgttacatgacgaccgacgagcaatcaagcgtgattccgccaccatcgcgcgcgcaaacccccaggggag

SEQ ID NO: 52287 - DNA, 770 bp, Zea Mays
gtacgtcaggactcaagagcacgatgtcgagcgcaaataattaataaacaatcggcacccatgcagatggctgcaagtccgcaacatagaagtggctggccggttgtgtgacgatgcatcatgatacatgtgcaactgtggtgagacatgtagactgtagagtgctcgatcgtaactgctgctgtgggggcattatattggccggatcctaggtccattccgatttcacagtccggcctgacgtagcgtataggttaggttaggtttctctctactggagtactggtagtgcgtgttctggctcgacccgtttgagcccttggtggaccaccatggtccaagaccaagttgtcagggcaatccatgtgacgagcaaacgatcaatcccctcgaaaatcgcgtcgcagcgtggcagggatgggatgggatgggatggttacaaatctcggtctgctcggcgtagaccgtacgtagagacgaacgaacaaaaccaacgagcgagtgtaatatgcgaacgactgcaatgcaactgcgccatacccggccagctctacagcactccccatttaggacagctcctccgcggctccgccgcaccaaactttcctactgcgcggtagtatttgtttcgaggaagaacgttccataaaaaacaataaatacccgtacgtattgcgacgtacggggccattcacagttctgtagggtatatgtacatcacttaggagtaacgcttcaaatttgaaacgatcgagccatttacaattctc

SEQ ID NO: 52288 - DNA, 332 bp, Zea Mays
cgaagaaagcagctgggccgaaaaaacgaagaattattactatgacagaagctatagaagagacaccacgaccagcctcggcttcgaaggcgccagctgttgagaatactgcagctaccaaagctgcacctactgaagctgcaactgccgaagctgaaccgaccgaagatgcaaatctagaaagcacgctttctaacattgataagatacttctggacatggccgcagaagaagctgctacagccgccgaagaaaccacagctacagtgcctgagaaggagaaagaaatagtcgaaactgctttagaagaagaaaattttaactttcaaaaa

SEQ ID NO: 52289 - DNA, 693 bp, Zea Mays
acttcatcaatgtcgtagatcgtgtcgcagatctcgttttcctcctttctctcatttacatgcatgcatgcatgcggtgccagcccgccgacgccgacgtcgatcgatacacgcatgcatggaacatgtactacaggttcgcttccccccctgccggaatgctcgatggacggcatcacggcaatggcgttcgagcactgttccagctttctctgaagatacatacgctcgccaacaggatagggaaagtgagagcgagagcgggcaagagacgcagaaagctacagaagcaagcaaccacagacagggcaaggtactgagctgagctgatgcagtaagctagcgcaatggctacacgtacgcacggtgaagggccgtggcagtgagtgcaggtgtactaacacagtaacgctatcgtcccgtgatggcgttgcctgcggatcaaacgcgtggccggaaatgtgtgcttactatactgcattaattagtgcggtatcggccggctgggaggatcctgagcgcagtttgctcccccgtttcattcgtctatgttcctgcacgatatctgggtctttgcaccggagtatttactgatcgtaccaccgcatatctatgaagatctatctaacagtagtagaatgtggagttactcccagcttgcttaaattagtctacaacatagtacgtattagc

SEQ ID NO: 52290 - DNA, 923 bp, Zea Mays
gacgagtgacactgttgtccatatctatggccaccgctcgaactagctagtttcggacaggtcaacgtgatggacgtacggggatagattagatgcatagccactgagcaacactagaaagcatgcttttgactagtgaagttgggggcatttcctatagtgcaatcgattaccgtagatagcactatccgcactagtgttcggtaaaactcacgctacgagccctgtacgcaaaatcgcaaatacacctgcagcgctgcacgctgtgtatgcttctgcaagaacaggagtccgccaaatacagcgtaactcgtttcctccgctaactatcccgtcatcacacagtactatgaataattatgtgttatatacagaagaaaatacataatattcagatttaggttgaatatagtatgtggtagttgatatagagggaatacatataaggatatgaacacggaggattgcagtatagagtaaaaaatcttgctgactagactataaataacagtgtagagtaagaatatggagtaacctgcactgccggtagcctcacactcaagtacaagcacaacattagtgaaagtagcagaggcatcacaggattcccatgaaaagagacgaggtgccgacggcaaaaaaaaaaggtggggggcgagctattcatctaaccatcttgattagagtcctctccagcccaaatttagatgcctattttctctttaataaaataaaacccgtctacttatttcaaagttaagaatttactaagagagctgtgttatatagttttgtgttaaagaagtgcctttgatacaaaagaagcataccaagagtatagtggcacagatagccaaatccacgcccacgttagtacacgcgtatagagcaaggcacgaagtcgtactctcatagtgatccta

SEQ ID NO: 52291 - DNA, 946 bp, Zea Mays
ctttgagctgatcagccttgtggacacaggtaatttataattgtgaatttccaaaaaaggatggctgcatgaattctatgcaaaaagaagaaataaaaaaagttcccttggttcattctgtttgtgtctgtgtgctgcaacggtagggtgtcagttccttcctgtgactcacgcaattcattttgtatgctaattgcatgtctaaagtgctttcttctgccatagaaagtgttgtttagtaaatgatccttgaatttggtattttttatgtttagtttcgaaggagcctgttaaataccctggccaaatggaccacaaaagcttatttgcaatgtgcatgtccgcttcttgcacatttgcttatatacaagaccggagtactatgattttcgtcgctactttgattgtgctttgagtaaaaaaggttacaaaaataatgtgtttggtagggaacatagcgataaatagtaacaaaagaattaaatgcacattgctgatcgctttatatgttatgattataaatttacattcaattaaactattagagagtacatggaaaaaaagcaagcaacaatagaaaaatggtattaataggagaacaattactaagtggtggcggtagggtcagctggtgcggttctgccatcaggtgtactcaattctttcataagaggtagcttgttctacatcaccacaacatcacaggaatgtaaattagaagacataaaaaggactataggccttagttcaatgggtaatcaacatacaaataaatcttatctacagagatagacatgtgaattggtctcttgagaaggtgagttcttttgctagatggaaaatctagcatcattctgcccttttttacacataagaggtttatgagcaaatcatcaccatgtacgaaattatcttttctttcgttattttctggtcagtagggagg

SEQ ID NO: 52292 - DNA, 712 bp, Zea Mays
atttataggttgcttggtctttcgtcattctttagccaacgagttagtactatatacgagtgttgcgctgtgcgactttctgttttattgggcttgggtggtttctcaaaacattaacgtctcattgttagatgacaagcggggaagagtaatagacctacacgtatcgcacagtacacactctacacaaaattgaagctttaaagtagtagagattaaaaatggtaactaggtcgttggtccgaaaaatgaaatcgagagtaacaagatgacggtaaatgatacagtcgataacaattagaaatcgataattaaaatcgggaaaacccatgcatgtaaccgctccaaatgttcaactcaaggtaataaatacaaccatgatctcacactaatatgatatctctactatataaagtataaatttttacaagtttcatagtcgtcgtgcttcctagatttaaatgggtttccatagtcatcggcctaccacttcatctcctgatcatgtttttaggatacaatatacagtcgtctattatgctatacgacgtcggtcggtataggattttcccaccatgttttcagccctacccgtctcatcttcgtgtgtgccttgccatcggccgacgcgctcaattctagccactaaaaattgtagaacatatactttcaaaattaggaggagcgatcctaaaagccgaccattataaac

SEQ ID NO: 52293 - DNA, 329 bp, Zea Mays
cttagattcacagaacttggattgatctatagcacatgtctttttatgtattgatcatgtcatttttggtgttcaagttgtaaaaaacatcatccccggacctgacaagtccttgtgcaaatgatgcatatgtttagggggaggatatgctacaatttggctctttgagactaacatgtttgcttaagtggttttggtttagtctcaaaggtgaatggaaagggaaatagtggacttgaacaatgaaaaaggcttccactacataactgtatcatgttcaagttgcccttggtgtccattgccttcttgctcttaattcacagtttttg

SEQ ID NO: 52294 - DNA, 444 bp, Zea Mays
ctaaaactcaggggcctttgtgttaatctaggcccgtgaaggggtaagatcgcatctgagccgcacgatctaaagtctatggcctagattagatcgcctaaaactgaaccggtatgcagccgtagccctcggatcttaatccgatggtctcggtttaatgaacccgcgatcagattcctaccgtacattgcgagatctacggttgcgatccgacccggtcaaatcgtctctgatctccaatctcatcccttcgatacccatccaatggccgaccgaggcctaggcacaaaacaggccgacggcgacgagcttttacgatggcgcccaccccctccggcaacccatggtgaggcccaccggtatcccaacctcgcaatggaacaatcctactccgagaggagacaaaagcggagatgagggaatggttcttaccgacggtcgtgc

SEQ ID NO: 52295 - DNA, 928 bp, Zea Mays
catcccgagggaatttagcgaaggggacctcgtactcgtccgaacagctcggaccgagtccaggggcaagctggagcccaagtgggagggcccctttatagtcaagacgaaggcttcccccagcgcttacaggctcacaacgccaaacggcgaagacctggagcactcctggaacatcgacaacctccgcaatttttttgtttgactcttcagggctgattcgcccttgtaattcgcaaaaacaatcttattctggtccgcactcttttcctcccggggggtgaggtttttaacgaggcggagccatgtaatatatgtctgaaaaatcccccgcaaaaacatgcatcgaaaaaagaccgcgacgacggtcttcgacattcgaccaatacgaggtcaccgcgaggctcagcgctagccaccctcgcgtgcgacaaatccgtgcagaagtcgcccaagggtgcagccggactagcacaacaagtgcgaaaaacctaagtctaccgcgaagactatccgtgcagaagtcgcccaagggtgcagccggactagcacaacaagtgcgaaaaacctaagtctaccgcgaagactatctgtgcagaagtcgcccaagggtgcagccggactagcacaacaagtgcgtaaaaccgaagtctaccgcgaagactatccgtgcagaagtcgcccaagggtgcagctggactagcacaacaagtgcgaaaaaccaaagtctaccgcgaagactatccgtgcagaagtcgcccaagggtgcagccggactagcacaagtgcgaaaaaacctaagtctaccgcgaatattatccgtgcataagtcgcccaagggtgcagccggaccagcacagcataacaaaacacaccagaccaagtacataacgccttcacaagcatagccaagtgtgcgggggcacac

SEQ ID NO: 52296 - DNA, 353 bp, Zea Mays
atcgggaggtagtgttggaccaatacaccttactggtcgtgatagggcaaggcaaaggaaagaggcaaacaatgagtagcagtcagtcccatgaaatagataaaacaattgaacaagctctagaaggccagctagaagataactcaatcaaaattgttcacacaattcacctagttgctagattagttcaccaccaacaacatggaagatgacataaaaagatcccacaaattggtcaaaaaatgaccaaacaattaaataggtgaagaagatacgaaagagataaaagaggaggatgacaatgagtattactgtagcatttttatgaactatataatttttatttttaaaac

SEQ ID NO: 52297 - DNA, 563 bp, Zea Mays
gcaagatcatccttcgataagaccgaaaggccttcttcaagtttagggaatcccatactcttagctatctcccagcaaacggatatttctttgttatccgagagacagtacaggaaatcttcttcgttactactattgaacactaaggccccctttggatatttcaatctttgggcgtagtgtctggcttctagtatttcttcttgggatagtttcttccccaaagcatgttgaatgatgtagtcaacgttttcgttcggagcttcgggagcaggagcttcgatcttttcaggtgcaatctgctctgccgttttttccttaggcgcgacaagctccgtctcaatgggcacttaaggccgagctttggcttcggcctgaactttcatagcttcgacaattttcttaggggtagggctcagggccttcgtagtctctataacagcgtctaatacgctggccatccacctcctcttgggagttgtggcaggaattttttgcatctctggcaaatctgcctctatcggtgggctcaggatttctggcgcttttttcaccttttccac

SEQ ID NO: 52298 - DNA, 1061 bp, Zea Mays
ccaaattaaaatacttcttttagcttgagttaacctaataaacatatgtatttaattattttcaaaacgtgtcacatgataaaaaacaatgttactaatgcgtgggcaattttattatgaagttaacgcaatttgaaccggtcaaattggagttaaaatgaaatacttatgaatttttcaagtttataggtattatttatcctctaaaatcattttatgtatttccactgttttcttgaatccccctagaccgcgggcagaaaacacagggagtttgggggttattttataaatattagggtttgaccgcaattagtgtacaacagtcgaggactgcgggttcatttaataaaaccacggggcctcctttgcaaaacggccgcggccgaagggataacttagaatctgcgccgcacgattaagattctacaaccaggattagatctcgaaaaggtacatagccccaaccctccgatgaaatatcaacggcccaagattcagctaggcacggaagaacttcatccgcccgattctggatcgagggaccggattaagcaccaaacgtttacctatagatctaatcatgtgcgttcatcacaagatcaatggccatcacaccggctccttcctcaggccattttctatatatgaaacgcggacgcaaagctcgcatcccgtttgtccacgtcggctcttcatgtttttgccgcacgatgcccctccaacggccagcaacacacgtcagtaagtgcagcggtcttcttcacggtttatctgctccaagcgtctggcggtttctagacggggcatgaagtggcgcttcaagaaggaaaaactcccttgtcgctgctagaaagcggacgccaccgtcacagccgacgaaagctactccaggtacggtccctcttcaccgactccctccccatgcgctgtcaggagcagacaggaggcacccatcggagatctccacggccatggagacgctggccaactttgcacatgttgcaacttttaccggatcagaaatgatctcccagaaaaaaatgtaccttgcttttttt

SEQ ID NO: 52299 - DNA, 395 bp, Zea Mays
gaaagattatggcaagaaaagacatcatccgaaaggtttaagtcttgattcatctcgagattcgctttgactgttatatccttccttgtcgatgttggtcttttctttctctggtcttggtctcattgatttgaggttagtgtatatcatcggagttggggcatatgattaaggtatatatgggtgagatagacctcatgatgttggtcaaaaacttgtttgatgttaggtggggatagacagattatgcaatccatcataactctattggttgggttagatctcatgaatgtgactgagttggtttaaggcactagtttagttttaagtgcatgaggggtatggccttatcttttgtaccagcattaagcaacttactctagattagatcataa

SEQ ID NO: 52300 - DNA, 422 bp, Zea Mays
gggcgattggcgttcactccgacggacctccgccgtgatccggggcgccaccgcgggcaccattgtgtccagtggtatcgatggggggaggcggggtatcgtacgatcgttgatcaacgggtgggattagaaagagcgtaccctttcgcctgagtgatcaccgaccgtcgatgtcgtatcgggtggctatggatggatctcggtcacttaacaatccataccattggattgagatctgtgggttctcgcgaagttaccagtacagtaaggcgaatgatctaatccagaccgtccaaacccgatctaacggctcatacgtggagatgccccttcggcctgtgcaaattaataaaagaacccctgacctttacctatatcagcccgcagtctaggttaggtttaagatcatcacataagggccc

SEQ ID NO: 52301 - DNA, 629 bp, Zea Mays
ctgccgctccagatactctggatccaagaagagaagcaagaacaaaaccaagaaccctaaatgccctagatacaacataagcaaaagggattgaagaagaatattggtgagaacaacatcaactactagtgagaaaagggcggcggaggctgacggacgtgcgttcgtggggaaatctcccacgccatcggggccgggttcatttcccgggtcggggcgataggtttttgttgggatggatggtgctcaaaaccatgcgtgggctaaccgaacacaacttttgttccaggctaggattaaatccaagcaaggttgttccacgtggatccgcccacgaccccggcagggaatgggctaaacgaacaagccctaaagctggtcgtaggcggcatcaatggccctatacagactaatgtgctaagcattgagcacctccatgtggctcttgaccatggaaaaatcgccctccatcgaggcaagctgtccgagagctctgttcgacaaaacaatggtctggagctccatcaaaaacagacatagaggatgagtcggggtgataaatagggggttaccatcaactgaagcccttagcaggtcctccacgttgccccgacgcacaacttcggcct

SEQ ID NO: 52302 - DNA, 629 bp, Zea Mays
tcctagaagatcaagtccaaactccaaacaaacctccaaggatctaaaaggttccaaactaaattggggttttctcgattttcctcaaaatcatgtcaaatcgtgctcatgacttcgatagggtgtgcatccatttagctaggcgtcctttcaaaattggggctatgagcacatgtttgatgacatgagccttacacatgatttgagcttctgtgttgatcaactaatgttaaatcttggtgcatgtgaagtatagacacaaacacaaccgctccatctcggaatacattgttttggtgtcaaggaggctcctgttaaggtagaacaacaccatctctttgcctttaaacttgtggatcagcaccaagccgatagaggttggcttggccgatggatagatcaagaacgacatatcaggttgtagtggcagtactattgattagggatgacaattttacccgcgagttcggatacccatagattatccaacccgtcggattcaggttcaggcacaaaatttaaaccgtgggtgtcacacgcacccgatccatgataaatcgagccaggtacgaattttatctcttacccacgggttgcccgtggatatatgaaattactaaatatgtttt

SEQ ID NO: 52303 - DNA, 1152 bp, Zea Mays
agccaagattttcacggcttctcgcacctctcgaacaaagctatccaggtggaaagagcccgagaagaagaaagaggtcacctcaagagcaagtttcaaattctccgatcttagcagcacgaaaggcaccaaaagacatgatcctttgggttccctcccaaagggccaaatttcagcaagctagcaggatctgctccatcacgtttcaactatccatgttagagttccttctgcactcagtctgtagcaagcagtcaacctccagccaatgcttgttggcactttggtgaccccagtcacttcaagaacaattgctcgcagctgaaaacaaactgcacctaccttctccaactcaatgaatggccccaagagtgtcgcagcacccacctccaaggcaccttcctccaacagccaattaagcaagaagtagttccacaatcgagcccgggtgaaccacatcaacgcccaggaagctcagcaggcacctggagtgtactcggtgagttcctagtcaaatttacccctgtcgcagtactttttgattctagagcatctcatactttcatcgccactagttttgtggaaaggcatggcattcccactgcaccgttagaagtccccttggttaccgcagaccttctgtgccacctcaagtgctctcaagtcataattcttttaagtggggtagtattcctagcagacctagctgtactaccgtcccacggaattaatgtaatcctaggaatggattggctgtcctagcacaatggcatcataggctgtgcagataagacagttcttctcatcgatcacaggggaaagtcagcctcatgtaacacccaaccattcgcccaagagccgacaatattcagtctagcagtagaaagcatatctatggtggagtaattcatggatgtctttccaaaagagttgccaagaatgcctctagaaagagaagtagaattctacatcgatctccttccaggaacatcaccggatgcaaagagactgtaccgcatggcacctctagaattgacagagttaaaaattcagattttagagcttcagcagaaagggttcattcgtcctagctcgacaccttggggagccccagtcttgtttgtcacaaaaaaggatagaagcatgagaatg

SEQ ID NO: 52304 - DNA, 1301 bp, Zea Mays
gctgacgaagccaattcatacccagaatcacatctatgtcctgacctggaagaactagcatataggtaggaaacatgtgaccaactagctttatgggtatctgatataccatctccttagtatgtaaacgccctccagaagattgtatgctatatccattttctaccacctccaaagacaactggtgttttaacacaaatgtccgatttataaaagtatgggaagcaccagaatcaaacaaactactagccaagtgattggcaaccggaaaagcacccaatataactggttcaccctaaggaatagctttgatcttagtataatgaacttgtcccattttaagaacaccctctttcttctttgttttcggctggctactgcgagaaagagtcacaagcaactgtcgctcactcactcggctagggaagcgacaatctagaatagagtgtcccgactttccacaattcgcacacgaattgacattatccggaatattttgcaaaatgaatgtctgggacatctggctcatgtggaacaaaaggaataatagcatgtctttcacatgactgttgtgagctaggtaactggggtagaaaaggacgaggatgataaacaggttgataaacaatcctccggcactgcttgacactgctagaggattcctccacaagttgctttcttttagattcctgatgacgacgaatcttgttatcacccaaaatagcctgactgaccacctcattataatcttcagccaaactagttgccatcaaatactggagcttctcgttaaggccacacaagaaatagaactttttcttctgattagtattcacaaaatccaagacatactgggatagacgagtaaacctctcaaaatatcccatcacaccctcttcttcgccttgctttagatctaggaattcgttgaactttatttccataagggctttcggaatatgatgtgcccgaaattcctcatagaactccgcccaagaaacttgatgaccttctggctgcagtgcaaggtattcggtccaccaagctccagcgggaccctgaagttgttgggtagcacactgaactttttggatatcattagaacggatgagtcccaatttccgtttaatcgttcgaagccaatcttctgcttccaatggatcttctaccttggagaacactggtggttgcgtaccgaggaactccttgtagaggacagcaacatcagaatcataacgaccatgctgaactgatgttgtaggctgggctatttgctgaagaacaacattcacacttgcaag

SEQ ID NO: 52305 - DNA, 464 bp, Zea Mays
gtttcagcaatgccgcatttaataatgtgcccattttcatgatctgagtgttcaactgttcatccatctatcacctatttcttgcttttttgttctttctgtaagctatcatggcatagtagtttatgcagctgtagatcactagcttggcagcgacagagttccttgtgagacctcagagaacctgttcccgagtatctccatcatattgttgttcctgccattagtttaggtgtcccttggtccattctgcatcattttattatatgatcataagtagaagaaacatagggaaaagtgtaggaactaaataaatgtctcttagattcttggtgccaaagctgaggacatgttgatattggggactgctttccactgacattgttctgattattgaatgatttaattttgatctcagttttacttggcatctaaaatgtttgtgcaacaagttgtcgagaaaa

SEQ ID NO: 52306 - DNA, 515 bp, Zea Mays
aaataagtgaaatactaaattggaaacaacccacagatgtgtccaagatcaggagttttcttggattagcatgatacaacagaagatttatcgaaggcttctccaaaatagtgaaaccccttacttcactgttggagaaaagtaaagagtttaagtgggatgaagcatgtcagaaatgttttgaggaattaaagtaaaggctaaccactacaccagtgttaattatgtctgatattcataaagggtttgatgtgtattgcgatacatcacatctaggacttggatatgtgttaatgcaagaaggaaaagtgattgcctatgcttcaaggcagttacagaagcatgaaaagaattatcctacgcatgatttggaattagctgtcgtagtgcacgctttgaagatttggaggcactacatgattggaaataagtgtaaaatcttcacatatcacaaaagcttgaaatatatcttcacgcagaaaggactcaacctaagacagaaaagatggcttgag

SEQ ID NO: 52307 - DNA, 985 bp, Zea Mays
ctaaaagtagactccgaagaagtagttgaggcaggaacagacataatgtctctagccataattgaaagaattggataggttagttttatgctcatgccaccaatttaagatatcaaaatcatcctcataggcagccacattgtcactgtcaaggtaaacagttagctcataaagacctacaccaggtccactactacctgaagaacctgatgcagttgaggatctagaagcacctgttcctccaaaaattttgccccatgcctattttctcttacctgtcatacctgattgatgtgtggttctagatagcctagcagcaccaaacttagtttcatacttggcatatagcttatacaactcagtcttaacatcagcaaaataagtactgtaattataattgttcattagagccaacagcatcactaaccgacccgacaggtgccccctcagggtcgatggcagtatgactgctaccgacaccaaaaagggcagcagcagcatctcccatgtcgtcgacgtcatcgggaagctgccctaactcaacgagctcgtcgttgatggttctagggtacccgccgttgtcgtcatcgtcatccatgtcccccttctcggcaccgtacctcaacggccctggcgacactagcacgaccacgacgtagtcggccagcgacctaccaaagcccacaagcaagcagcgaagaggagattagggttagggttagggattgctgactggggagggagagccagagagggacatacctgccaagccggagcccagagccagagacgagggtcaagtgcatgacgatgcgtgacgagccgaccaccgacaatgacgtgattagggttagggatttctggattggggagggaccgagggagagccgaagaggggcaagccgcacggaaggagagtaggagacccgctgatgttgccggtgtctggcggttgcgacgacgaggcggtgacgacgcgggggcg

SEQ ID NO: 52308 - DNA, 997 bp, Zea Mays
ggaagttgtggcggaggcacggtaaaagctaaagtcatcatggcgtcattcggcgtgggcggcttgatgggacgtgaaacggcccactcaccgtatcataagtgggtggcgtgatggtttggttaaccaccatattcgtcattgacacctttccctcgcgtgctcccggtgcttcgtctcaagcggcgtgagccccataggacgtataatttctcttgcgacgcctaaggtgggagggatatcgatgcgacggtctctctggtgttgtccgtggggccccacattctaggtgccacttcgcttccctgttcctgcgtacaaataggaaacagaggcactcagagtcgattctgcttaccgggccttctcgcctgagcatctgtcgcctctttcccttggaaagcctcttgcgttcctatgccaacctcccttccgtgttcttcttccccttcctcttggatgcttctcccttgagcttcattacccgggagtgcctcaaggaccttgagaagaaggggttcctccctctcgattcggtctctggttggcgcctagaggagggaggtgatgctccagcgccacgcgacggtgacattgtggtactagcctccttctatgagcgtggcttcgggcttccccttgaccccttcgtgcgggggttgctcttctactacgggttggagctacagaaccttcattcaaatacaatcctccacatagcatgcttcatcatgctatgtgaggcgtaccttgacatggagccctactagaagctatgggcgcacctatttagcccacgggtaaaccttggtcggggcgaccagccttcgtcggttcgttcaatgtctagcttcggggttcacgcaaatcatcctacctctcgatccctctttcatcctccattcgtggttacaaaggtgagtggttctatgtccggaacctcaaagggagcgtgcctccgttcatcggccggattcaagtgaacaagcctgagtgg

SEQ ID NO: 52309 - DNA, 565 bp, Zea Mays
ctaccacatgtggattgaacggattctttcggcgatggttcaaggatatgtccctgagcttgtatggctagcgcttacagagttgagctatttcttccgccagctttgtgcaaaagagttatctcggaccatgattgtagacttggaaagtttgacacacatgttactgtgtaagcttgagaagatatttccactcggcttcttcaatccaatgcagcatttgattcttcatctaccgtatgaggcacgaatggggggcatgcagggacgttggtgctatccaatcgagagatgtctaaagactattcaaaagaaatgtagaaataaatgtaaaatcaaagcttccattgcagaggtatactttgtagaggaggtgtcaaacttcacaataacttactatggtgacaaacaatcgagcgtgcataatccaccccctcgttacaatgatggcgacaatgaatcgaaccttagcatatttctaggccaactcggaagcacaagtggttcgaccactaagaccctgagacatgaagagtggcgtcatatcatgctatatgtattgaac

SEQ ID NO: 52310 - DNA, 384 bp, Zea Mays
caagaattagagagatgaattgggaggaattgggatcagccctgaacactcgatttggtagagaccagcacaacatgctcattagacatttttatcatgtgcaccaagtgggctcagtagctgattatatagaaaactttgatcaacttatgcatcagttattagctcatgaaaacaacttgactttgactatgatcactgctagatttatagatgggttaaaggatgagattaaaaatgatgtgattattcaacgcccacccgaattggatactgcttgttctcttgcactattgcaggaagacgtgctgttgcacgccgggcgccgggacaccagaagatcagagttcagttacccttctcgactgtcctctaggccaagcc

SEQ ID NO: 52311 - DNA, 835 bp, Zea Mays
accatgaatacgacttcacaatatatccacgtctctcatgttgacttggtattcacgctaaccaccgagattcgtgcacgtctgttacgtggggtgtcttatgtgacatcacactgaccattgtaacaacatctacgcgatgatatttatggtaaccatctagtttcacgcacatatgttacgcgagggtcgtatgcaacatcttgttgatcattgtaaaaacatttacgctatatatgatactatttacgctcaaatttgaggatttttacgctcaaatctgggtttgcgcccaccagtgtcctgtatgtcatatttttcgcatgcacaacgaaaagaaaatctcgtaatttatgatatctgtaatttccataaaaaaaattctaattaaaaccctaatttcctcagggacgtgaccacatgtgtgagatggttggttgtgcacgtgtgggaggggagggggcaccggggtaactattggaagccctgagctcctaatatatatcccctcaatatatatgtgttattagtgtaaataaaatggtcagagtatgtgccacttatttatgggacgagctgaaaatgggctgaaactatattaatctaggagaggcatgacaaatttctagttccctttaccctcgtgaagcttaattaatcttggacgttgacatatttagcagactaactccccgttattggacctccaacatgttcccggcttctcctcccaaccagagagtctttcccggcctacaaaaatgcaacccccacgataataacccgggctgacccctcctagctcccttgcacggcctcagctcctaccccaccc

SEQ ID NO: 52312 - DNA, 353 bp, Zea Mays
gccccaagcaaaaggcatacgtttctttgtgagttcatgcaaaggggcagcaatggagctgaaatcacgcacgaaccggcggtaaaatcctgcaagtccaagaaaacttgaaatctgtgtgatcgtcgttggtgtaggccagccctgaatggcttcaaccttgctgctatccacctcaatgtcctatggagtaaccacataaccaagaaacgagacacgttgcatgcaaaaggtgcatttgtccatgttaccaaacaagcgagcagcacacaaagcatcaaaaaaagcatgcaaatgttctaaatgctctttcatagacttgttgtaaataaggatatcatcaaaatagacaa

SEQ ID NO: 52313 - DNA, 459 bp, Zea Mays
ctggtattctcattatgaaaggatttagaatactcacaaccacaccattgattgtttcgtagaagtaggtggtgttgttcttgatgttctcctctttcatttgagagtcctccctttgcagtggcttctttttccttttaaacttattgaaaatactcaagaaagatgttagtaacacaagggagtatgaaggatgatttcttttagataggaaataagcataattcatcatccataagtcacacagacatgaagtaaaatcctcaacattagtgcacttatacttgaaaagaggaacatgcactatttaacaatttgatcactcataggaatttacttcttcatattgaactttattatcatgacttagaagtgcatcaatatgagaatggatatagcaaaggcatgaattagattctaatggacaaacacatttatgaatatgatattgaatgcaca

SEQ ID NO: 52314 - DNA, 384 bp, Zea Mays
acgtcgttgatcatgactcgatggttcgtgtagaggcacgctggaatcattcacagagttatacaggttcatgccgcttagaattgcgtaataccctacttcctgttgtggtttggtattgatctctggagtacgaggattacaagctgagggttgtggatgaagatgggctagagtggttcgtgatgaggtaagatcatagggggtcccccttagccttatatacacgaccagagagagttatcccattacaagttgtgattactatgtacttgcttatctccttctttgtcgcaggttgtatccctatatatttggagtcttcatcgcctagccgcccgagttatcaccgaatgcatagccctttgggtatttgtaactgca

SEQ ID NO: 52315 - DNA, 682 bp, Zea Mays
ccaccgcacaacccagacggggcccagactcctctagggagccatgaggctcacctcaagcagctccaacagttgcacgataagctcggggaagaacaacaacgcctgcagcagctacaacaagctttggagggtgaggctgcgggcaaggccctcgatggaggcgcacaggcgaaggcacgtgacgtcctttgtcacattgaggaagacaccgacgccgttgagccccccgtcctcaaccgggcaagccatagcctagcggcggcttcgctcttgctctacaccatgccggagccctccaccaccgagggacgttgcatccacagcgaacttcggggggcttctggaatgcgtcgcggtcccacaggctgagagttctgcctcttagctctgggaacccgcttcgagccttcagccaaggtcctctcgcttcgagagggaagcctcagtgcatcccacgcatactaggcaaagggcacccacggtgcacgactgtctcctagacaaccgccaaccccaggcaatccatgaccatctcggtggacgcacccgacagcgtgaaacattcggctaccgccctcggcggggcggacgatacgacagcatgaaggaccgaagtcctttccccgagccactaggccctcaagtcttcaacaaggccatctgaacgtcgccgttcccg

SEQ ID NO: 52316 - DNA, 584 bp, Zea Mays
caacatagagcttgggtcgggcatggaggaactagatatggaagtcgggcaagccgaaggctaactactcgactggatcccttgcccgaccggagactgacacatcataagtgactggtcgcattaactacatctggcgttgagctacggtagagtcgtcggtccgcctcacactcatgaccaatgagccgctcgagctacgacatgctcatagcctataaacccctcggattgcggagcatttatgaccccctcctgacctacgacacactcatgatctattgggactagtgttgatatagttgtcaaattggctgaatttgattctcatatagctaatttgcgcaaagcctttgataaggtgcatatgtatgtttcaaaaataaacccacgcaagtgcgcttttggggtgtcggctggcaagttcttaggattcattattcatgagcatggcatagagatagatcccggtcaaattaagtccattcggaatgtggagactccgacatgcaaacttgaaatgcaaaagtttcttaacaaagtgatttttttgcaaaggttcatttctaacttagccagaaaag

SEQ ID NO: 52317 - DNA, 319 bp, Zea Mays
ctctcggctgcttccttggtaacgcgcgagtcatcatgagtacagaacatgtggcagtacgccacctgccaactgattggacaggcacgccgtctgcaggatggcccagtcgctgcctactagaggagtagcgagagggcgtattaaatgctaagtcgtcacatcgcctgccaacggagtagacagggcgcattaaatgccgagatggcacatcgcctgtcaggcggcaggcctcctccgcattaaataccgagatagcgtatcatgcgatgcgctgcgcggcctgtggcgcatacttcttatgtcaggcttcgcccgc

SEQ ID NO: 52318 - DNA, 338 bp, Zea Mays
aggcgaacaagaacttgggtatcaatcacccaaggggtgacctcaaggacgtcttcaccgaagattccaactccagggatgacaacgaccgccgcaagaagctgcacgtcatgtacggcgggagctgggagctcacctcccgcaggaacgtcaagtccctgcgccgcgaggtcctatcggcgactccgggggtctcgaaggctgctccacatcaacggtggaggagcacaaccatctccttcggggctatcgactgccccgacaacatggcaggggccggtgtgctaccactcatcaccgcctctgtcatcaccaatatgcggctgcatcatgtgttg

SEQ ID NO: 52319 - DNA, 500 bp, Zea Mays
tagtaaatttgataaaacatttacttttgataattcatctgatgtggacttgaatgatctaatatctaaattgaagattttacagttgactttaacagatagacaaatgtcggccatggagatttttgagtttgttagagaagtggacagctatcctaatgttgtcattgcttatcgaatcttgtttactatgcctgtgactgtcgcatcagcggagagaagtttttcaaagttgaagctactgaagaactatttgaggtcagtaatgtcccaagaaagattaaatggtttggcaaccttgtatatcgagaagcaactgctggatgatattgatactgactctatcatcaccgactttgcatctaggagtgttagaaggaacatttttaagtgaacttcatattgtgatgtattatagttacaattaatatataatcttcttatatttgttgttaatggggcctcagtttttatctcgcaccaggccaccaaattcttag

SEQ ID NO: 52320 - DNA, 529 bp, Zea Mays
taattattgtactactatgtccgaactagacatttgaaatattgtcttaagtgtatgttctgacgttcaccaacacctctctagtcactatgcaatactcatcggacccatccactttggtccgacaagacaactgttcgaacaggctgatgaccctatagttgaaatattagctgaaacaatgcccacgtatagtccaatacatgtcaaacgaccaaactgacgcacccctcaaactctcatgtctgacacaatataccataggacccaacgtattgattcgatgagatagtatttgtcggtaccctgaatcaggggtaccccctattacagtatgaagatgcggtgcccgtacgacgttccctagccaaacggtgaacagcatccgacctcaccacgtgggcggctcaaggggcaccatgtggcgagaaaagatggtacatcccaggatgtatcagttggaccggacctccgcgaaggagcaccggacccctgtacgcacaacctggacccccgattacggcccggg

SEQ ID NO: 52321 - DNA, 403 bp, Zea Mays
tcttccaaatatttgttatcaattccaggaattcaccaattgttgccctctatcttcggttttgtttcatatcagcagtggtggagggtgatccaaaagcaaggaggggcaattgcaaaagctgctactgtattagctaccaaacttctcaaatcatgactataggtgcatcctataaagcatccatgaggattgtatgctattagagttaatgctgttccaaaggagggggtggtggcagtttcccctccatgagcctctgcccatgtggatcagttttgtagatccctcgtctaaattgcttctatctgctagaagttaactaattaaatggcatacatcttttgccagcttctgttgataatttgttaaacattaaagtctcgtgttctgaacatattct

SEQ ID NO: 52322 - DNA, 729 bp, Zea Mays
gcggttcctagggggttctttaataaaaagccaacaccgaagggatatcctcgagtgccatccgttggatgctaatctactggttgggattagatcttggctcactgaaccagtaaggagtcgtggtcgttggttcccagattgaattaaacaagtttctggaattatttttacactagaaaccagtttctatattaatttactggatttatttaatccttggctacgggtcctgtttttggaaaatctagggtttaatcacataaaaacaggacctaagtgtagtgatcttttacacaaagggggacgacggtcgatgggttgattcagcggttcctagggggttctttaataaaaagccaacaccgaagggatatcctcgagtgccatctgttggatgctaatctactggttgggattagatcttggctcaccgaaccagtaaggagtcgtggtcgttggttcccagatcatcggcccactagtcatctactggggccacaatttattgcgccaaacgatacctttactatgattgtgaccatacgcgatcggttcaacggtctctatccaccctgtgaaacggtttgtcatcttctaatcttggcccttcatcacggagccaacgacacgcgcaccgcaggctcccttccctcacaccgatcgacatcgcacgacggcacgcaatagccaacagcagtgccaaagctggtgagcagtgctccccgg

SEQ ID NO: 52323 - DNA, 1001 bp, Zea Mays
aacagagagggcggtccacgtcggggtggtggaccacggaatattctagcgtcgaagggttgtttcagtgagataaaggcagtaacgttaaattaaatggatcgaggagtacccctagcatcggaggaagctcgaacgaatagaatttaaggaatgcttgctcaatttgacctggccatggaggggtctttcacggcgaagccgagaacagcgaggggggagccaacgactttattaggtttcttcacgaaattgagcgggttgcgtaagcactcaggtgtgtaaggtagtaaagaagtagcgctcgggctcaatttataggcaggttgccagaatcggacggaattcaaaagatctccatgtgcgctagtgagcttgcgcgcgggtaaggccacgacgagcgcccaggtgaaatgcttcggtcgaacgacgccacctcatggttacatgcgccacgtcgcggaagatttttaccaaataacgcaagtttgagcattgaacacggcagcggtggcgttcttatccccggtgaggtacactgaacccagatcgctatcttgcctgctagcccaaattcggatgagcactgcgccctaattcatgtagttacttgcaaatcggttcgcatcaaagtggtgcattaatcaatgttttttcactttggtataacgaccataccgaaaatccccatggattaagcacacgacgatgcccaagttggctcaataacactgaaccctagcttcagtatgaccaaatgcagtaattgcatttctttccccatcagaccgactgacagcgccacttcaaggcaccattacttctgttttcacatagcaacaacccaaccttactttagcaaagttatgctcctatataccaccttcaacttcatcatagtgaccttggacttaaacccactgaatcgtctttaatttatttccaaagtcagactagcaccactattaagctaggttcagaattttcttatgactgacagc

SEQ ID NO: 52324 - DNA, 694 bp, Zea Mays
gggaaccgagatgtcgaggacaagggttcgtatcatcgtcctcgtaggcattgtgttctcgatcatccgcctaggagatagagaccgcagtgttgcaacaataggcagagtatcagacggaagtgttgaggtagcaagcggagtactagaggcagcaggcaatgcaccataggtagcaagctgagcagcagaggcaggagaatgaggactatgcgaaccacttagcccaacaacaagctctcctcttggtaagttgaagtaatatgttatctataacaattacaaacatgttatgtattgcacttcatcaatagttatttgcatttaatttgtagcaactagcacaacaagcgggcgcccagatgccatcctttgttatgcctccttcggaacttgaatcgctccattcaccaccgccttcaccttagccacagtttcctttgcctaatccagctttggtgttcattgatatgtacataaatgtgtatgtgtttcaaaatgaagaacttagtggttaatatccaaatgtatgttacataccttctagattcctcctgcttcagttgcagcacctggagaggcatctgcctaagacagtaccgagacttcgtgggtcaaccaacttttcaccacccaaagttcagctagtggaagtggccacaactataaccaaccaggtgacaactagtagtcc

SEQ ID NO: 52325 - DNA, 686 bp, Zea Mays
ataggttgcggcgtaggctggctcgtcgacttatgtaggggagtaggtgggtggtgtcatcctgtcccatctgtctatcattgcatctggtgctgtatcgggaataacaagagtcgttatgggagttacccacgtgcggcgcactggttcaatggtcttcgcctcagtaacgtgcgggttattggcacaccccaggccttgtggactacacacgctacttgcaattaatatggggcatacgctacctaccactggtgtggacaggtgcacatcctgcctttatttaatgcgggtggccctcacgtccgaggccatcgtcaagaagtgtctggcagcttccgtgataagcctcaagccacaaggcagcactgcacctccgccttgacggagagtagtggttgggaatgcacgtagacatggcagctctagacctcccctgactaggggttcgaaatgcgattgttgaggtccaagtcccatttgtgatggctcagacttgtggtggcactagaaatcccctggtcggaggttcaaatagcacacataggggttcaggaccatcccacagggatacagcccaaaatgtagatgccgagcaatctcactgtcgaagtgcgtgatggcactggtggcccagaggctagtggtcccgccaagcccaaactctaagttggagtagactgctc

SEQ ID NO: 52326 - DNA, 414 bp, Zea Mays
ccggagtctatcgaagttgctactctgatagctgaaatttccaatctaaaaaaggatggcttaatgactcaatttgtggttattgacttcatttttcgcaacattaaacccttaaaggaccaagttcacccaatgtatttctatgttagggcctgagatcccacgcgtgaaactaaccgagtgatgacagagaaggatgtcttgacttgtgctggtatgacgttgaggggtgatgtctacaacgagggggctccacgggtgcactttgcatggcatccctctcagtagtaagtgtttccttatctgactaaaccgtcatcaaatactcattgatatgtgttgaaattaatgttgtcgttctgagttgtacttacataataatattaccaagttcctatctaactcaccccaaca

SEQ ID NO: 52327 - DNA, 881 bp, Zea Mays
gtacatttaaataaacctaaatttcagtgagtttgctcaactttggagctttcttgtgactaatctgtgatgttattgtctacaatctctatagcaaagtgttagagggtagtgtggtgagcagtctctgttaagctggatctccctgaatttgcttagaattgggagaaaatgttgttcttagttgagctgtccggcaagttgtgcactgaacattgttcagttagctggtacaaaatcagtgttttcgtctcgttttggagcacaataactcttaatccgtgagccttaggccttggattgctgcagaaaatttgtagatctatattttgggaataagtttagttaacttaggttggtcttttattgcttggaatagtgaggtttgaaggggtagaaatgagagttcagacggtttgttttgagttcagttcaaatggttgcagcttggttcagttttggggagcagaaaaatccccacgtctctgctatgctccacttgtagcagtttggattgaggccatggataaaagtaggattcgatgcttccagtgcctaagtaatttatgcttggtgtttatccattgccggtgcccatcctgtctacctgtctctggtttgtgtgtgacttaggttcactgctctaccgtggattcgatcgggcatggtgcttgtgccgtgaagccgcgtgtgcaggtttaagcagctgctggcaccatcgaggtccttccctgctgtgatcaggacaacttcagccaacacctatttctgtaactcgtggccatggttctctaggtgtgtagcgctcctccacgcgctcaggcgcgtcctccacgttcggcgtcttactgcccctcgtgcgcgctcggccttacctcccc

SEQ ID NO: 52328 - DNA, 3405 bp, Zea Mays
cacgctttgtacttcctctatatagccattggcgttttctttgccgcatggataggtaagacgagtttatacatgtttggttgtcgcatgatatgttaacaagagtggaagtaaatctaccaaatctctcacatctacagaggtttcgtgctggattttgaccggggaaagacagacggcagtgattagatcaaagtatgttcaagtcctcttaaaccaggacatgagtttctttgatacatacggcaacaacggtgatattgtcagtcaagtactgagtgatgtcttgctcattcagtcagctctgagtgagaaagttagttcttgtgccaaaccttccatgctcatttgtgtctgtcacatatatatggttactgagtgatttgtcgtttttaggttggaaactacattcacaacatggctacatttttcggtggtcttgtcattggtctggtcaactgttggcaaatagctttattgacattagcaactgggcccttcatcgttgctgcaggaggaatatcaaatatatttctccataggcttgcagaaaatattcaggatgcttatggtgacgcagcaagcattgctgaacaggtgtgtggcatactgattttgcaatttgagtaccttttctttcttttgacttcctcaaaacaaacaatatttacacaatcaagcttgaaactctgaatggtaatttcacaggaaaaatgttttcaatgctgggtcattaaacaaggataaactattaagatggattgaaaatatttctcaaaactgtcattatttttcaatgaagagcatgtttggactgaagatatttctttctgctatctacattttctccatgatactagttatggttgtgacacaatattggcaagttaaaatttatttttaaaaagcaagctttattcagttaacatgatgttgcacaatcaggttcgaagattggacaaaatgaagattttatctaatgtctattattaaatcatccaccaaactgcacctatatgtatggtcgcataataagactcaaggatctgttgaacttgcttgtaggggtgcatcattaggctaggtttctcacaagattgcctcttgaattttgaaagcgccacaagacaagggtaacagaaacaaataagcacacgcccgcccgcacacgcacacacacacacagagatgtatataggataatgtctgcatggagcacctaggccttgaaaactgcagagtgcagacttgttttaagtcaggcaacgacttggtgcattattttagctaggaaaatccactgtttctgttctactggtttactggaagctcaaaaataaactaagcatcaatgcttattttgcaggcaatcttgtacattaggaccttgtattccttcacaaatgagacccttgcaaaatattcttatgctacttcacttcaagcaacactgcgctatggaatccttataagtttggtgcaaggtcttggtcttggatttacatatggccttgccatatgttcttgtgccttacaactttgggttgggaggttcctgatctctcatggaagagctaatggtggtgaagttgtagtagcactgtttgctattatcttgagtggactgtaagaatgtagattttaagagtttgtttttagtttaatttaaaaatgtaccctaatattcatcaaagcttttaactcattgtagtggacttaatcaagcagcaacaaacttctattcctttgagcaaggacgtatagctgcatacagactatatgaaatgataagccgttcaacatctactgtgaaccaggatggtagtaccttgtcttcagttcaaggcaacatcgagttccgcaatgtctacttcagctacttgtcccgccctgaaatccccatcttaagtggattctacctcactgtacctgctagaaaaactgttgctcttgttggcagaaatggttcaggaaaaagcagcataattcctctaatggaacgcttctatgacccaaccttaggtattatcgttggcatctattagtacctaatattttatttttttacatcaattatggcttatgtttacctgtgggactatacttatatgttacaggtgaagtgcttttggatggggagaacataaagaatttgaagctagagtggttaagaagccaaataggacttgtgactcaagaaccagctttgttgagcttgagcatcatggaaaatattgcatatggtagatgtgccacaactgaccaaattgaagaggcagctaaaacagctcacgtgcatgctttcatcagttcactagaaaaaggatatgaaacacaggttctacagctgctatatcacagttgtctattgaattgcgctttttagcaactgtaacatggttatttgattaaaattaatatgacaggttggtcgggctggcctttctctgacagaagaacaaaagataaaactttccattgctcgtgctgtgctctcaaatccatcaattcttctactggatgaggtcactggtgctcttgattttgaggcagagaaagcagtccaggaagcactagacattctaatgcttgggaggtctaccatcatcatagctcggcgcctcagtcttatcaggaatgctgattatatagcagtaatggaggaaggtcaacttgttgagatggggacacatgaagaattgttaaaccttgatggtctttatgcagaacttcttaggtgtgaagaagccgcaaaactcccaaagaggtttgtcaacccatcctcttgacagcaacttgctgagtccttagctctgttttttggttctcagtcagaacacgaccaacttttttcattctctctatcaatagctaatgcctttgtttagtgtaattttcaatgccaatgcaggcatgtactaaaataaaatctgcttaactgccaccatcattttttaattaccttatttgctctaccttagtggtttaaatacttcaatcatgctttttgttagcagtaccttcctattctacccatgtgtgctaggcaaggatagtaatcaggattgttattgatagaatccaggctagttatggtaggagatataccctgattggtgtaggggatcaatctgtatcagcccacactaggaagatctgattctgatcgatagaggagatcactctggcgctgtttccataagcacatgatctcctcctccccctgtataatctgtaaccggttggcactctatttattcaatatacaatagcctaaacagcatatctctctcacatggtatcacgagttcgggacattcccgttccttccaccttccgctaaactctgcagtcgctgcacctgcgcgctgtatctctacagctgctgcacctgcgcactgctcc

SEQ ID NO: 52329 - DNA, 362 bp, Zea Mays
gcattccagtggcgggaccgggcaggaggtcttgttgatggaggctgtctcccccatgagacagccctgctcaaggcggagcatggaggccaagagtctggcaatgtgccttacacgagttttcggcagatgcagaccgaggagtattctgtatgtttcattgaaccaatagaaaaagggaaattatctttcatgaatcatgagcatagtgcttgcaactacgcacttgagtagttcctatcctcattagtggcttagtccttaccagcttaccaagtggccatggttagaaatatcatcccttaacctataccaagacattagaaacatctcgtcaatattaagaaccaatctgctaaaat

SEQ ID NO: 52330 - DNA, 670 bp, Zea Mays
gaactaaatctctagtaccaatgtaggtacatatggtgttgaaagccattaggcatgcttgcacttcattcccaattgcgatcgatggccacctaatgccaaaacgtgaccatatgggacgttgaatgatgcccctcacatcctccctctaattcagatcattcttcacgtaaaaccattgcttcatccaagagcctggcgacttcttccgaaatgtaggcataggataatttgccttagaacggggcacgaagctgtaacagccaaagttgttatgatattgttctttttcagttgccttcgtctggtaagataactcgtgaatattgcagaagcacctaacatccggctctagtccctgactcctcatagcctatataaaaacccccactttaataagagctacgggggtaagttgatgaagatatatctcgaatgtcttcagaacctcaaccaacatcttgtggagcggaaagcgaagcccagctttcatgaagctcttaaagaccaccacctcattagcttcgagaaggggaacgatgcttccccccccccgaccctcactatagagacatcatgaaaatatttgcccttcatcgcttcgacttgcccttgtttgacagttgacttcccaaaaacaacatggctcgacctccacagtcgatcttcg

SEQ ID NO: 52331 - DNA, 432 bp, Zea Mays
taaaggagcataactttgtttaagtcacaagacatgagtgctgtacaaaaattggagttaaatggactcaaagtattgttgtcattcacccatacagtctgatactggtctaacaatgagttctgatgaactttggactcgattcaagctcgagggagtaagtaaatgtgcaaggtctctatagtcgaattgtagctggtttatagagctacaactttgatacagatggattaagtagttactacatgaaaatcaaagatccaggctcctgaaatcgctctgtcaggcgccctgataagaagtctgatggtacagtgtctgcagaaagatcttcagattcatccccctcgccgccggtgaccttgcgcccggatttgcatcggtcgtcgtgattcgtgctaggcatgcagtggatatcaatggggacataaa

SEQ ID NO: 52332 - DNA, 704 bp, Zea Mays
actggcaaagatgcaatgactagacagtaaataacatctacacttggtgcatgcataaaataggcataagcataactttttgataaaagtgtaccttgtttcagcatccaccagcctccgacttaggtaggtcaccacatgctcccttcctcctgtcacttgcatcagaacagccccaataaccttatcttcagctgcaatgtataatctgaatggtactcctgcttatggtgctttcaacacgggagccgaagacaaatattttctgatgagattaaacgcttcctgctgttctgcccctaggtgaattcggcatcatttttaagccgaaggataggggtgaaggcatcaatcttcccggctaggttagaaataaacctccgcaaataatttatcatgccgaggaacttctgcacttcgaccttacaggtctgaggtcccacattccgaatggatttaattcggtcagggtctatctctataccatgttcatgaatgataaatcctaagaacttaccagctgacactccaaaagcacatttatgtgggttcattttcagaccataccgacacattttatcaaaggatttgcgcaaatcagctatatgagaactaaactcagccgatttgactacaatatcatcaatgtagacttccacagtgtttcccaatagctcgtgaaaaatcaaattcatagccctctg

SEQ ID NO: 52333 - DNA, 651 bp, Zea Mays
tgatatgaccacccaaattctagaaggaaacaaatgtggttcatggggtacttatgctagttgctaggaacctcaactacaccaacctctagtactcatctaactctacaatcatctattgttggcaatttccaacatccacctcccttgacttcccgtcaacaatcattgtcatggtgagaaaagaaaattcaatagttggtggacatctaaagcaaggcctctagaatccaaaggttaaacactctaatttggagactcaataccccctaaagttcatgcgctccttatgctagttgcttataacacctgaccacactgatagtttgggactcatctatcactaaatttcactatcgcttgtatttgtcatcaactattgcctttgaccatcattgtaaatggaccaccaacaattattttcaaggtgaggaccatttcaaaatatgatattggaccatggtacacagaacttaaatttttaacatacagatcaaccaatatcacaagtcacaaacacaaattagtacgaaacatatagtagtgtatatctaacattccattttgggaaagccaccaatgtagtattagatgtccttgcaagtcaccttattccccaagtccgaccactaagatcaatcataatacctc

SEQ ID NO: 52334 - DNA, 604 bp, Zea Mays
cggaaagggctgacgcgatggccgccggtgaatcactccggccgagctcgggagatggcgccacgtatgagtcaccctttccccggcgttatccatcctataccgtgcatgaatctagacggcaatcaacgacggcgagctgagctggcgttctgatccatccgaacacagtaccatggcacatcttcgtcagtcgcctgaaccgacccccttccatcgactagctctcatgattcttgtgaataaccgggcaaaattccttaataaggtttgttcttgattcaacagtcttcaatccttacacaggacatttgggtcaaaaccaaggggattcgaagatatggcgcatcaaacttgacctcacctcactggaaccttgttttaaccttaggttcagtttcagttttctggaactgttctgacatagcaacttggaataggtttttctctaatttttttgtcacaactcaaaaggatatctgcatcaaagttgttcctctttaataactctacaactttgttatagcaaccctaggtagattctcactggatcttagtcgaaatggctctcaaacttggatccaagtcagtgtctatctgaaat

SEQ ID NO: 52335 - DNA, 966 bp, Zea Mays
gcaacacaagcactagtttccctttttgtaaacattttgacaaggaatgaaaagtggattaccaaagcatggaaactttataatgtgaactagactattccatgatatatgcttagttttaacttatgaaacaagcatatttaattctttaagataacgggaacaaatctaattcaatcatggagagcggtaaatatagaagaatcatatccaatataagcaagaagacaatcataaattattggattgattttccttttaagttatattgcgcacttccaaagagaaacttattctctactagtgagactatatgggttacttagataaaagcattagtctcactattctagttatagagagaattttccttttataagtgtcctaaggatttgaattccttacatgacaccttattctttttggaacttgaaatatctctccatatctagaatcatggcaataataagataattagtggaaaagcatgccatgggtatttccaacggtttaaagtatgtagattgtcaaaatatagaaatgatgaatactcaatctaccatataagaggaatttcttcaaagaatggtgagataatttaagaatatttgaagtgctttcttcttctatgtgactacacaagacacataagaaatgataatttaagatacttgcacttaaaaacatagatgttaccatcctttggctttcctccacgttgtaggctttgttgtttcctcacaggataattctttatttcctacaacatcaatactttccccgagatgatatgagtttaagacatagtaattcaaaaaataaccttgggtcaatcatggatatagatcattgaagattaatggcttgagttaacaagaattgaattgactctttcaagcaccccaaagcttcatatcatctccttttcctgcaaagcttgtcaagcatattttggtacccatcgct

SEQ ID NO: 52336 - DNA, 379 bp, Zea Mays
cgtgacaccaacttccttaacaaccccacctggtcaatatctccatgaatgtttgcatccactttagcttttggatttgatcaagttcctaaaggtattcattgcaactttggtgtatcactttcagtttactaatggttatgcctagcattgtttggtaagttgccggcggtggccgccgccggtgaagtttaagcaggcgatgcagggtagaaggcgaagtccctcaaggtgagatcgacagagcagtggttcatagatactgcttttgcgagattgggggctagaaagcagtggttcatagctaactttgttctaatctgcttcctgttctagagattccactaccacaaagcaagatgattatgtacctgacaca

SEQ ID NO: 52337 - DNA, 491 bp, Zea Mays
gaaaccagaattctcatctccggattcttcacggtaaaattcttctggatcgcgatgatgtagccttcgacctcttgtcatgggaagtcgttcattaaacatcctttccatggccttcacaagtgaatcggccatgtgatgcaattcagcccgagagacagagggctctccatctccatggtttccaccgtgaacactcgaattggatcctaccatgttagatggaagcaagaaaaagtagaatatgaaagtatttgtagaacactcgatctcacctcttacttacccaatctatttcctgatctctaggactgtgatggtgccggtgtgacagcttcgacagaggtggtagagcggtcgaaaggatcacaagtcaaacatcccggttcaggtttttttagtggagctataggaggctgatcaaggtgggctatggtactgtcaaccaagtgtgttgatgtgctaaaaagatatgaaattgttgctagaaa

SEQ ID NO: 52338 - DNA, 703 bp, Zea Mays
aaaatgtcggggtgaaggggtatgggacgagatcggtcgtctgattagaaaacaagtgccaggatctgatttcttttaaaacgaatcggtatgcaatgccatccacacgatctgtgatctacggctctagcttaaaatatatgaaacccactcctggtcgttcgatccaacactgagggccacgattagctcctagcccaagggaaccggtaccctgcgcccaccgtaggatcttccctgaccgcccagattttatgaagtttaacataacctaagcaacaagatcatgatccaacgatcacgatcttactggcaaagcgccacgtcgcattcaatcaccgtcgtccgatcgtggacgaacggccagggaactccctcccaaccccatccacagcggaggtctcatcggcggagcaccgcccgacgtctgagtgcccgactacataaccacgaggatgctacaccatgtttggaacactgcaagttgcaaggtagagcgctcgccagagatggaggcatagggacacatgtccacgtgggttgtcgttctacggtggaggcctgcttcgacgagcaattgtcggtggtaaagcgttcaccgttgagcgaatttgggcgcggacggacgaggaggaacaggggtagactcgagaggaaactcacgatgattggagcagcgaagatggttatccacgttgcccga

SEQ ID NO: 52339 - DNA, 786 bp, Zea Mays
cctagccccctgagcttttggtttgcagactgctttccaagcaacttgaggtggtttttttgcatttatgtctgctcctctccaaaggcagtgccgtctgaatttatcaatctgcttgatcactgtttttgggagtttcaaggtgcacatgaaataggttgggagagaggagaataccgcattaaccatttgtagtctgctagcctgaaataaaaagacagaagttgacgcaagtcttctttcgatcttctgaatgagggggagaaatgctcccaagttgggttttttaaggcccaagggaatcccgagatacgtgaaaggcatagctccaaccttgcagtgaaacgtatttgctaagattgccaatttctggtccgagacattgatgtgataaatattagatttgtgatagttcacatggaggcctgtagaatctgcaaatgaattaagcatcgctttgaggaagaatagttgtctagggcaagcctccaagatcaaaatagtgtcatctgcatattgagtaaccggaaagtctgccccacatgcattcgggattgggagcctgaggatgccacagtctttagccttgttaacgattgactgaaggagatatgctgccaggacaaagagaagaggggacatgggatccccctgtctgacgtcaagcctgcagtgaaaacgtcttccagggacaccatttaaaagcacttgggatgtaccagatcctaaaatcagtgatatccagtggatccatttggccccaaaccccttatgcctcaatatgtc

SEQ ID NO: 52340 - DNA, 401 bp, Zea Mays
gtttcgaaaatttttgggtaaagatggagggattcaaggaggctgttcaggctgcctggctgaaaccacttcgttcctcctttacacccatgaagcgccttcatatcaaattagcgcgtgcaacaaaggccatcaaactatggcgtaagaccaaagtgggagacacgagattacaacttgcaatttccaaagaattaatcctccgattcaaaactgctcaagaggagcgtgtgctcacccaagaggaactggatctcctgaaggcactcaaagccagagcactgggacttgctgtaattgaaaaatcgaggatccatcaacgagctcgcctcactcgcattaggttgggcgacgcgaacactaagttctttcacctatttgctagctccagagcgcgtaag

SEQ ID NO: 52341 - DNA, 662 bp, Zea Mays
ctaaatgcaacacaatggtagcaaataaccacaatcctactaaacataccttgcatgtccaaaacaaccaaatactaacttgttgcatagtttatgctagtatgtactatatattgtatgaggcaccatgcatgctaggactagcacaataaactagtcacaacttagcctacttctatgcaatcccctcttagttaaggataaacatggtattttaaaaaaatgaaaagaaaaataagcaaggagcatgcaaccacaagatacacaacacccaccacaagtctaaatttagcattacatccatggttcctagccacaacaattctctaccacctccaaacacaacggccatcccccatccttcaccactcccgcccatcccttcgctccaccacctctgagactcctccttcacaggccggcgtcgtcggtggtcggagagatggggcaacaacgcacgttggtgtatagcttcgtggcgcgaggcaccatcgtcctagcggaccatgctgaggtctccggcaactttgcctccgttgctgcacaatgcctacagaaactccccgccaacaacaatcgcttcaactacaattgtgatgggcacacattcaactaccacatttatgatggattcagtaatgcaccttgttcttgcttcgctc

SEQ ID NO: 52342 - DNA, 601 bp, Zea Mays
cgggaaagacaaacaacttcctcaagattatgcctaatccgtgaacgatccgagcgcgagcccatcaccttcttggatcatcccatttcaactgtagtgtttgcctggcccacaatgtgatgaccttacatggtgactggtttgtggccgacgcaagggttttcaccttctagtgaatcttggggatatctgtcccccatagaacccgcagtggttccctttcctcgactcctctgcccgatccgtgctcaacctctcccctgcgcagattagagctcgccaccaccatgattcctagtcgtacggccaaccaaagccccctcgcgccgtgccaagctgcccctcgcgtcgtctctgtgtaagtgacctttccccacccctcttcagcaccaattctgccttacaagggggaatttcggctcaccggagtcgcccctcatcggaccaccgtgtcttcacggcgtccggccactgcagtccctccctgagcccgaacttaggcatagagcacccctaccctctccccaaaccctatgtcgatcgtagcgcgctagattagctcccaccacgatgggtattgctcgcctgagcgacctttggt

SEQ ID NO: 52343 - DNA, 277 bp, Zea Mays
ccgcaacaaaagtcgtttccacacgactgtgcacgcgttgtcacctttctggatcaagcacatacgcgcgttgtcagtccattctgctccgcaccacggaatttctattccatgaaggcttgagtgcctgaaaacagcaagggatgtttcgggggaacaagtctactacagaaatgatcgttcatcctttcatccacgaaccaacactgacatagtgacagactaataacatccaccacactcaaataaatactaaacaaatacatttgcgcatgcg

SEQ ID NO: 52344 - DNA, 931 bp, Zea Mays
ttttagagtttatttatataaataataggtcgactggacctcgggcactattggtagcaaggacaaggttgaatttgataaaagtgtggagcaaactgtgatggtcttctctcttgtgtggatggcgggttcatattaataaaacctagggactttttactaacatgaccctggctgctacaacgtgggtcgcccaggatcggaggatctgggaccaagggctcatattaggtcacgaagcggtacgcgatagtggccataggatttcaaatcaagcccctagatttaattactgcgagatccaactacgaccctccgatcggctatgcacagcccaaattagatccttcttaaatcgaagcagtatgctatgtggaccactgcatcggaaatctgcggcctagattttattaggcccaatctacttacacccgtctgatctgaatcgaacgacatatgttacacctacccaaaccagtatccggatctgattttgaccgcccaatgaataatcaacggaggacgctactccccctctctcccagcccgcgcagatggcgcgcggcggtgccgcccagctccgcggaagtgaagcacaccggagaagcataacttgctccctggtgcgttattctcctcaccgataggtgctacgtgatgagggtggaaccacgaattatcgagacggtcactcaccggtcgtgaccgtgcaaacagacggatccgcgacgggggattgactccggcgagccattcaccgtggatgaagcctcccctgcacaccggcgaggtacatgaaggatccccacaccttgagaaaccccaagggccatacatctatggggcattacccgtaattgcacaatctcgcagggcagccataaatagatacccagggcatgagtcggcggggttagacccgagatccccg

SEQ ID NO: 52345 - DNA, 1068 bp, Zea Mays
cgatgtcgggtactgctgaagcgcttgtccgcggggacccatgtttcatctcctgcggggtcatggcctccgatccgtatagctagcgaaagggagtgaatccggtcgcccaacactcggtcgtgtttagtgcccagactgcttcaggtagcaggtcggcccatttacccttcttgtcgtcgaggagcattttcttgattgccgtgaatatcttgtcattggcgcgctccacgacgccattggattgtgggtggtatactgaggcgaaggcaagcttggtgccaatggagaagcagaagtccctgaagtcttggctgtcgaattgtttgccattgtcaactgtgagctcggacgggactctgaatcggcagacaatgttttgccagaagaatttctgggcggtcttcgatgttatcgtggatactgctcttgcctcgatccacttggtgaaatactcgacggcgatgaaggtgaacttgaggttcccttgggccgtgggtagcggcccgacaatgtctaggccccaacgctgaagaggtcatgtgtgggcgattagctttgtgaactgcgaagggtttcccgagcgtggagaaaatttctggcaggcttcgcaggacctcgtcacccgattcacggcgcaaatcatagcgggccagtagaagccttgtcggatcaccttggcggctagggctctaggccctgcgtgagagccgcatgttccgctgtggacttcgcgcaggatctagacgccttcggtcttggtgacgcatttaagcatgggttgactgaccccatttttgtaaagctatccgtcaatgagtgcgaaatcccgacttcggtgtttgaggcgcttggcctcgttgatatcgctcggatggtagtatccctgcagaaacagggttattggtgcccgtcagtcttcggtaatgatgaggttgactatgtggtggccctcggtgtcgttagtgatttggaggccctctgggctgcggacggctggcgtgccgatgacatggtagaacacgtcggagggcagggcctcgcctctggtgactgccttggccaatg

SEQ ID NO: 52346 - DNA, 838 bp, Zea Mays
ctaacacataagtttttatagaggtttggcatgtggttagcataataccctacatcctctttggtggatttatttgtttccaatgggacaagttatatctatctagggagaatttggaccgagcttgctccacatgtacctaaacatgattattgccctatgctatgtgtgtttcatattggagttggtgtgttggacctagagtgaatgctctgaagtgaatcctagatcagcctcttaaattttgttcaccacctcccttttatagctcaagagagcgttagagcttattgtatgttctacttacaggacctaccatcattaagccaactgctcccatctcatcgcaaccttgtctctgtctacaattatagaccatatgccacatagtcatgtggagcacatcgggcatgcgtcgatattattcattcctattaagtgacctcccaagatacttcttagagtgagcatgggtgccttaatggtgttggcacaacatattaggagattagtacaattccttatacttttaatgcatgaaagtacattcatactacctagtcatgtctatagcgattttaccatggtaacaagtatgattgactgaccgagtatggcattaaacataatgccacgcctatatagtggttatgggtacacttttccctaagtgcgtgttagggtgaaggcaaaaccgtaaggtcatccgtcacatttaaagtgggaccttggagacttatttttatccccacctaaagtcattccttcttgaggtaattgccatattggtcataggggtaggtatgataacttgtgtctatggatatcgaggctccgc

SEQ ID NO: 52347 - DNA, 489 bp, Zea Mays
tcaacaacacggacagcacacccattggggtcagcgtcagacgggtcacacccattgggatcagcttcagtaaattcagacactggcacttcctcagcaacaggagcagaaggaccggcatcctgatccaagctaggcacccgacgaagacgtatcttcttctttttctccccctcaataggaaaagaggcttgatcggctcggtgagaacgtttcggacgaacattgatagacttctgagcgtccaaagctttgtcggcctcagggatgggcgccaccaccaatgtttcagcaggagcggcatcagaggaatcctcggccaacatatcaagcttggcacttatctctgcatcacttggattcaaaggcacctcaaaatgaacctgcctctcatcatcaggaatttctccgaacgaggcaaccaaagcactaacttcttcaggagagggtcgcactctaagacccaaaccgctatcaccagcaggagaa

SEQ ID NO: 52348 - DNA, 516 bp, Zea Mays
acagacataataatgacaaggaacatagttcaaacttaaaagtccacaaacatgatcgatcatccacaaacataagtctcaaactcttaagataattaattattacaacacaatgttttaggataaaatgaacacatgggcgatattttgatgggctaataaattaagcgggtaacgggtaatacccgcgggcgaaattttatatccgtcaattacccgcgggtgagaagtgttgcccgtatccttatccgtgggcgagatttcttacccgtatccatgcccatcggatacgaaacccgcggatatccgtagtgcccgcgggcagaattgccatccctagctatagaggggatgacacacttggtagagagaagactaggctgaagtagttcaggccgaggtgacttcatagggaaaacctctaaggcatctccatccatacccaaaaatccttaagtgttcatgagtatcctcctacttctagcgccaaactctaaactgaagttccttacccgg

SEQ ID NO: 52349 - DNA, 480 bp, Zea Mays
tcaatcaattaccaaaaccaaacaaggtctcacaaggtggcaaaacattttcgagggcggccatgcttgttggttgcctctgttggatatgtccaaacaatctcaatccatgttttataaacttttctccaattggtcctacccctatccgatcacatatatcatcattatggacttgatcccttcttttatggccataaatccaacacaacatacaccttttctcaacatttatgtgttcaacaagatgtcattttgtatgccaacattttgcatcacacaacatataatacattttttatctcaactaccatgactatcaatcttgtctatgtcgcacgtgcatttcatcgagcacctttggtgcgtggcttcattgtaccactcaagtcattgcatcaccgtcgagcacgaatccattgagcacctccacttcactgcctccatccgttgcaaatcactgcctccagcgcccactcg

SEQ ID NO: 52350 - DNA, 709 bp, Zea Mays
tggagctcgggcgaagacatcgtctccccgggaaccgcgtaggtctccaataaatctgcagcaaaacgttcggaagccctcaacccctaagctgttgtacctaatttcctcttcttggcggctgcagccggtgctgctccccgcgaagggccttcgtcaaccgtcatcaccaccttttttccccagcggtcagcagcattggcatcgtcgtcccccggatagacgacatacggcagacgattcaactcaaaacgcggttcaaccgaacattcaaattgcggatatcccaacttcgcagggtctcagtcctcggcacatatcttcccacaatctttgcggcctcggcctccactttgcgcacaaatgcgaccgggttctgaccccgcaaatccacagcaaaggcaggacttcgcaccaaccggtcgccaagggtcggcatccagtgggggcacacttcgcccagtacacagccgtgtgccaaggtccacactccatgaccgacaaattcctcaaccaaatcgtgcccactactcaagtgggcagcgtaccgaagggccccttcgtcctcgtcatcctccgccacctcgaatcgagggaacgccacataacagtgggagcatagaatggccggagggaggccaggcgggtcttcgacatcaccaggagacacatagaaccaaaaatcccaccagttgccccacttgttcct

SEQ ID NO: 52351 - DNA, 390 bp, Zea Mays
tcgacaaacgagacctttttagcgagtggagagcgagagaggagttgcaaagtgtggaaataacaagtatgctgcctctgcccgacttttactgcttgtcgcggacggtccgcggcctgatgaagtcagactgtctgcattgctaaccggactgtccatttcctgatactgcggacggtccacggtccatgggcggacggtccgcggcctgatactcaggtttccaatgtctctccattttctgattttgaatttcaaatccgaattggtgctcatatatggacatttcgaccaatccaagggttagtatgcatgcatatacacattatgtaattgagtgatgcaattttttcatataaaactacttagatcaattgaagatgaaaaatg

SEQ ID NO: 52352 - DNA, 572 bp, Zea Mays
cacaaagctggtgtctggtgacctttgccactccatgccacctccacctagctcctctctcctgtagggtttatgaccctacgttggtccaagggttgtgtcggtggaactctaagggaccgccgaaacctacaaaattgtaaattgtgcactggtaataatatcaatccaacaaaaaatagaactccccgtcaaaataaaattacttgaagttcgttgcctgtgtcgttgtaacaacctcgtcatcagcctctccatcggcctctccatcgtagtcctccccatagtcatcatcacgcatcgatgaaccttggcgtgccagctcgtcctcctgcctaggtgcattgtggtctgccgcctcgcgcgcttgctcaaatgcattgtggtcctgctgtagcataggtccacttgagcctatcgcctcatgctctggctcaagtgcattgtggcctgccacctcgcgctcttgctcaggtgcactatggcctgccacctcgcactcttgcccaggtgcactatggcttgccacttcgcgcccctgctcctccatgcaaccaaggagctgctctagc

SEQ ID NO: 52353 - DNA, 719 bp, Zea Mays
agaaaggagagaattaacttatctatgttgtatattattttatttaatttcccagattattcaagcactataaagcttgatatagttgttatggccacttggcaatataaataaatatatgatgccacacaacacaatcatataaaatatagagttaaacaacattgtttatgaaggttgcgctatgttgtgacttcaggggctcgaataatccaccacattccacgtgagtacaagctccagcgtatctggcgtcaacgtgtgtatggccagcaaggctacgacagcgaataagcctccataacaagcgcaacaggcgtaattgtggctcgatagtcggggtacagaataagtccacgcaatgtgcgcaacaagagcaattgtggctcgctgatcatggcaaacgaaccgtgcctgcagggcatgcaaaaaatacgcgactcggtgatggcggtccgactcaacgggagtggtccgactaagttagagtacaacatagcaatcacatgacgcaaccaagttcgtgcgacacaaataatgcgtcgtgatttcagggtgcagccaatatttagccaatgctataacttagccgattaataatatagtttgatcagcatgaccgggtaccctctatacaatttaatcatttggcatgagtctaaagacttaatgcaacataaatatatagagtgatttgagtatgtacatacatacaatat

SEQ ID NO: 52354 - DNA, 458 bp, Zea Mays
cagtaatctcagtttttttaaaaaaagcagccaactggtcatttcgtcaaatactgtcgatgtattgattattgatgttgtcaagttcagaatgtagtaaaattagcatattcactttccatgaagagagagataagtgtacttaacaatgaaatcttttactactaggcatcatgatgtggacaaggtatctcttgagttattgacttcatatggacaaggtatgcagagtctacaccaactggcaacagagagaaatcatcagttcatgtacaggttatgtgagaacagttgcatcgtcaggcatatcagtctttcacttgtgcctctccagccccatgcctatcttctgttaagaaggatgcagtcctgtcatcatttccccttctcatcccacaacttttttaaattttcaataccaccacttctcacatgattctatctcctagcaaaacagc

SEQ ID NO: 52355 - DNA, 425 bp, Zea Mays
gcgagacaaccaaggcagtaacttcttcagcagagggccgcactctaaggcccaaaccgccatcagtaacaggaggattcgacacaaaaagagtgaaggctttgggaggaggcaagttccaggctgagaatgccactggggcaccaacatttgacaccttgcctctaaggatcatctcaagtcggttcaccaagtctgcagagggaattcttctgttggtaacccgagttgagtcggctaggcctcgatacagataagccgggtgcgccctgtctttcaacggctgaatattcttaaagacaaaatcagcaacaacagctttagcagtcagacccctctccttcagcaatccaacttcagccagcaaagcacctgcctcagctacctcccgatctgtgggggactcggtccagcttggggtgcga

SEQ ID NO: 52356 - DNA, 832 bp, Zea Mays
acacttgagtaggttcaatgtatccgtcaaactgctctcaccgccagcattttgcacatgacacatttattcagactggcggcaagatgtgacgtggttaaagtcgggcttcctccactcataacctacgggtcctaggcctaagccctactcttgacctatgaaccctaggcttaagtcccccgatgtcctacaagcctagggctgagatccactcataaccaatgggttcaaagcctgagtccatcgacagtctatgagcccacacgacgacaaggggagactggtagccaagctacaaaggcagaaggtcggcatagggagaagcaaacaagaacgagtaatggttatgcctagacttccgtcgctagcacggaacacacgcaccctcgacaatctcagaaacatgtcaggagacccacacgagaaaggatatcgacacacaacaaggttttagcaggggtgaaccgttccttttgacccaaacgttatgctcccttctaggagaagctatctgtaatcacctcccccttgatctataaatggggaggttttgccccaagaaggggaggccctcgagtgagaagaacacgagaggacatataatagctagtaaagtcaggatagcctaaagacaaacaacacatagagacttgggatccttccctctctcacccacttgtacccctactaagagcaatcaggtgccagtcgtgcatgcaagcaaccaaagacagaaaatagggacattctacccaaactagtataacccttgtgcccacttagcacaccatttaggacaaaaatacacatacacaaatttactcgtcgg

SEQ ID NO: 52357 - DNA, 1191 bp, Zea Mays
gcgacacatgctgtcgggggtgataattagaggtacccagattatccctacgaaagacgcattcaggagaagtaaggacataacctccgaggggaatcagctgagatatagctcctaatctgaggcctctccccgagagactcccacctcaggcagaactccgccttgcccgaattcaccatcgctctgtctgtctcgcccgagctgatcctaggcagataagacaaaaggcgaacgaaaacaggtggggaatactcgcatttaatgtgcatattagaagatattagatattgtgcttatcggataagctaggattgttatcctcttggagctgcgtctccatctctatatctccccctgattttctccaaccgtgtaacagccatgcatggctcatctatataaagaatacatcggcaccatgttcaggtgtcgagtcttgagccatattaacatggtaccggagccaatggttcaatagatgtccatcatctcaactttttcttccgcctccacccctgccaccatgtctcactcgaccaacaacatgccttcccctcctaccatactgctgcatcatgcgatcaccatctgtctcaccaaatccaattatctactctggcgagcccaactcctttcatatctccgcagcataaagttgatggggtttcttgatggcaccctgccagcaccaccgacggttgttgcgtcgtcttctacagccggtgccgagatggtccagaatccggccttcatcaagtggtatgatgccgaccagcagctcctcagtgggcttctatcttccatgacggaagacattctccgtgatgtgatcacgaccacctcatctagggaagtttgggaatctctgcagcgccagttctcctcctccacgaaggcccgaacactacaactttgggttcagctcgccactgcgaagaagcatgatctttcggcagctgactattttcggaagataaaaggcatcgccactgaacttgctgttgccaatgaaatcctgtgtgatgatgaggtgattgcatatttactcgccggtcttcccgctgaatatgatccatttgttacgtcgctaaccaccagaaccgagcctgcttcccttgatgatgtcttcgcacacctcctagcgttcgaagctcgacaactgcagcatatcaccgacatgcagctgaa

SEQ ID NO: 52358 - DNA, 601 bp, Zea Mays
aggaactgttgctttccctgcctgtgtaatcttcgtgcgccataatattcgtagtgcgtacagtattgatatcttgccgcagcgccctcggtaacgcgcgagtcatgatggatgcggcgcgtgccatggcacaggtgtactgttggccaacgggaatagtcggaaacgccgcctgcaagatggcttgggcgccgcctgccaattaagtggacagggcacatcgtctgtcagcggggtagtcaggcggcgcgtcttctccacaataaatgcaagggcagcgtggcccagtggtcttacgttagacccatcccgcaagcttacgtcacgcacagtaggtcgcttggctgcaccagatcttcgcctggccacgttgtgtggacaggttcgcaccaagctgggtctggacacttgtggcccctgaaccccttcctgagtagggtccgggtattctttgccccagaatcccgggatccggcggtgagtagtccggaccctactcagaagggtccaggacccatctcggaggtccgttcgccacgtacgggggtccggcgctttccttgcagtaggtccagacccactgcgtgtatcccggagcacg

SEQ ID NO: 52359 - DNA, 695 bp, Zea Mays
cgggatacgcaacgactgatgccctaactcggtcgatacctatttccacccctagcgactctaatccgaccattacttgcacaattccggcctggagtctttctgcccacaacggcggcgaaacccaaggggaaatcgaggtgttcccagcgatctagcatggtctagttcaattggttgggccgataagcatccttagcatgcaagggtgtggaaacaagggtaaggaggatgtgaacggacatgaagacggtggtccacgacgcggtggttaagggcggcgcggagaaccgaattggggggaaacgcaaatttgcgagctatggtggcaaaacggaggcgagggttggtgcactgggcgcgtaacaacctaatagagctcactagtgcatcaatttatagtgatcatcagcggtggcacccagttttgagaagatgcgatgcggccgaggagagggactaagtcaccgtagcgttttaccgtggcattcactggacataggcgtacggctatcactggttaacctccacggctcaaagcgatgtggtaaaccgcctaaggcgtggcgcaaccaagggaaaccgcggcagccacagcgacgatcgtgcgaccacatcgccgggcaagtgggtacggcgacagggcagtacagtgccccaaactcatccatggtgaagatcttttcatgaccgat

SEQ ID NO: 52360 - DNA, 515 bp, Zea Mays
tgaacatgttccgaccaaacgacggcgaggagaccaaattggggctggggaaaggtccacgggttcaccagggtctacggacatactttgatttgggcagaacaagaactgaagagcgggtcgacggtgagggagtcacggcggcgttttacaaagcaagggtgcgttccggtgatgggcttcggccaaattccatttgctcaatacagagagcaataggagactatacacgagctagaacagagagtaattgagaaattaccaacccgaagagcgctgtccgcggtgaagttcttcacggcagaattaggaacatggagaaaggaaattcgtgctacgtgagtgctctggtggaattgagttgattgctcagccactaaggtgcggaatgcagtgaataagcaggatccgagcgccatttataggccgacgaccggatttagatgaaattcacggattgtggatgtgctggcaagcctaccgcgcggcggattccggtgagggcacggtggccg

SEQ ID NO: 52361 - DNA, 546 bp, Zea Mays
gagagctgtggggatgaggagctgacgcttgtggctagctggttcacgtggtttcacaacaatcgccagaaccggtggcatagcggggtccaagaatggatgctacaactatagcaatcccgaccacttcatcgctagttgccccaagaagggcaagctataggctggctagcgcgaccaccactcttgtcgcgcaagggcaagcgtgagtacacctctggcacacaagtccaaggagacgtttgacaaggaggcgctcaagaagaagtacctgaagaaggccaaggtgaaggagcatgccttccttgcctccctcagtgacctcaaccatgactccagtgactcatcttcatccttgagcgacgagacaagctaaacggactctgcttcctcgccgacaccgtaggattcctctgcactgcacatggcacttggtgaggacacgttggccacggcaacaaggacattgatgacgactccacctctaaggtatctctttccgcgacaatctcaccgctgaggtagaggagtagatgtctactattg

SEQ ID NO: 52362 - DNA, 717 bp, Zea Mays
aaatcaaacaacacagttttttgaaatctgctctgacggtggacagaacacagcaagcagtttgtaaaacagtgtgtgtagtccaaaacagcaatcaatacatttcagctcatatataattcaagaatcgccgcgttcgagagacttgaattactctagcgctttactatttgttcgagttaagacaatcaatttagaaccaacaattcgacttgcaaattttattcaagtcattaatgcactaaaattactacaaccaattaacaacacattgtccacgataatcacccaacaatttgcgttttaaattagacatcacatgagcactactacttttcatccgcgaccataaccatacgcaatttggctacaacatcccaaacgggtgcaggaacactagtttctagttttaaccccatgattgttccattaatcattttaactacttattcggcatcgaccgacttaaccttcatctcgacggtccgagcaccacaattcacgaaagtctacctagacatctagcatcacatagagagtctactaattaacttgcaaccacttgaagtactggaaacacctacatataacaattacttaacgcaattgaattcctctatttaacaagagttggctaacacaacatgaaaaaaatagtaattcatacacaagttcatattcttctcaatcataacaccatgagaccaacaaaactag

SEQ ID NO: 52363 - DNA, 582 bp, Zea Mays
ctctcttatctacactcctaaatgtaaatattgtcttatatgtactcctaaaaatgcttttgtcaatagacttatgtttcattcactcctcatacagatgtgatacacctgacatctttggatgttacaaatgaatcaagtcaaataagttctgatgcggatatggtagagcagaacaaacaagatgctttggacacacttattaaaatatcacaacataaaaaaccaaagaaattgaatgtagctcgagttgtctctgaaggtaattttttgttcttgccttattgcatcttattggttttcgcatatatcatttgcttattaagtataatataatatttttcattgtacagattataagtgcaccccagaagatgtttagcttattgaatacattaaaacattatcggggaaacaagttgtggtgaacatcgacagcgcatggttaaatagaaatgatatggaatgtctttttcatggtgacatcccattgtctgacgaagtaagtacatctgtatgtccatattatatacagtaataaagtatatatatttataattatcatattatacagtatggtat

SEQ ID NO: 52364 - DNA, 863 bp, Zea Mays
ctcgaggtaataatccgcagactcaggacatagtgccagaggattgcaggttagttctcaaaatctaggagggctctttaacaaaatagccaaggcgaaagggtattggtcacagtgggccgttggatccgcggccgacggcacatattaaatctaggtacattatgaatggacacgcaacgccagcgctcggattcaagatctacggtccaaattctaaataaccgagatcgattcgcacccatcagattatggatctacggctcacatcccctccctgactcggtacggcttggcctaatcctagccgcccattcctagatccacggccgcgacgctgtcatccctcacccgagcacacgcacggcggagctcgcccaactcggcggcgccatggacagagcctcccaccagagtgcagacgcgctctaatcctaacgcgattatgcgcaaaacggagaggggaaagtggcgggtaggaaagtggcagccataccacagatgaagctcccaggtgactcaaccacggcgcacggcggaattattcgaagacgggactcaggtgaggaatttgtcgcgctccgatcactgattccgcacgtggaggccccggttatactcgtcgcacccagacgagttgccaagaccccatggcgacaccgaaacgatggtggtcaagcgatccaacgacggcgacacttatacccgacggcggagtccaagtccaggaagccgagtccgcggtggagcacgtgcttcggagcagcgacagggagcgcccgccatggatctcggcgcccggtaatggtgtctttgtgcccacggcaagctactctagtccctatggatgagggagggcgcgg

SEQ ID NO: 52365 - DNA, 408 bp, Zea Mays
atgaaaccaggagccccagcaacttctctgtggagacaccaaagacgcacttgtccgggttcagctttgtgcgggttgcctacagcctgtcgaaaaccagggtcaagtcttccactagggtcgaccctctcttggtcttgactacgatgtcatcgacgtatacttccaccttgtccctgatcaggtccccaaaagaattactcatcgcccgcacaaatgttggcaaggcgtttttcagaccgtagggcatcacgacataacagtaaagcccatccactgttacaaaagcggtatgcttcctatcttccctagacatctggatttgatggaaaccagagtaagcatctaagaaagacaaaaggtcgcacccggaggtggaatccacgatttgatctattcgcggaagtg

SEQ ID NO: 52366 - DNA, 415 bp, Zea Mays
gaattaataaaaaatatatgaggtaccgaattatacataacattatatatcacttgtttttgtcttcaactattctcgatttaaatcctagctccgctcgcgtgtcgtgcaaatgtatgcaaataactcgtttccaaataggtgtaggcgcgtgcagctggagtgcatccagtggagaatttgatccactagaaatggtcacgccctatcgagcgctatactgaccgcttatacagaccattggtgttagatagcattagtgctcttgtaacatgtgtcaggccatgcctagcaaaacaagatcacatgttcaagtaaaaattcgtaaaataaagtatgaagaatacacaacacaaatggaaaacaaaatgacatatagatgtatattggagttgtgagtatcacaccagtcctg

SEQ ID NO: 52367 - DNA, 276 bp, Zea Mays
ccgtttatgctacttcgtatcagtatttatttcaagtgtgtaaaacaaaagtggtaccataatgcctagttatgctatctgttatgaacttctatgccttacatgtccagattgtcagattgttaatcgtttccgtccaatgtttggcgtatttctattatcatattatccttaatattcaagttttatgcaacatatatacttccttattttatatacattaggttccttttacaaatttaccatgctaattatgctaactgtgtccagtgtcta

SEQ ID NO: 52368 - DNA, 435 bp, Zea Mays
cacctattcaccccctttagatgactatcaattggtgtcagagcctgacacttcttgttgagcctaatcgctcgaagtaatgtcgagagaggatcctaaaggaaaggggaaggtggcgaacaatcatgaggaggataaaacaaaggatgagaagcccaccgactcgagcataaagaagaagggtggcaaaaagaagtgaatcaagaagatcgtctactacaaggcagactcctctacatcgccatctccttcaagtgtcgaggaaaacacctccaagcatcaagaaaaaccggttaaatctaagtttaaccacactccattttattactctcacattcctcgtaattccaatgcccaatgaccaaagatagcaaagcatagacataatgttataagtggtagacctatcattaggtccataatggatcattgttt

SEQ ID NO: 52369 - DNA, 344 bp, Zea Mays
gtcacgaggacgtgagaccggtcttccccgcggtacgtcaaggcaaggagccccaagaacgggacccgggtatggaacatgtaagtggttgtggatttgtgttatttcttgatctctagatctcagtttgttacaagtacttaaagctatctaatgaccggcctaatcctccccctgttggaaccagaccactgacacatggcgtgtctgtcaggtcgtccgcacacacggcgcgcccacccataccgtcggaccgcgacacacgcgcccacacacatatcagcgggctttagatctcttgggtcaacactccccgcaaaaagctagcatgtttggggttgcac

SEQ ID NO: 52370 - DNA, 316 bp, Zea Mays
ccgcgatcctcatccgtcgccggccagccgcattccggccttgtgccacgtatctccaccgcatcgccgtaagccttagtgactctccgttgatcgccggaatgaccgccacggtaggagccacgaatccattgcgccagtactcttcttcctcctccggccgccagcacaacctgctcaaattgaccgctgccgctgtcgctccctataaattgagccccccaccagttctgtaaagtcctaagctaaccagccacctcgaattagccccgatcgttcgctgaggtccgcgaattcggagttcccccaaatcgat

SEQ ID NO: 52371 - DNA, 868 bp, Zea Mays
cctcggttcggacttgggacccggtgtataaaagctcgagccctacgacctccgtcgaccataggctaaatgcccgaccaacatcgcgctgcagagtgttggtggtgaaaccatggactgccgtcgcaattgaaccacgcgctcggcgcctcccagccctcggggttcgaccataggggttcacggggcaccatggaggggggggggtcgttgcctcacctagatggattcgcgatccatgctgccgcaatttctcgccagtggtgaagctgcaccgccgtccgcctagtgtcatggccgggaggaaccactccgaggatttcggtgaggaccatctgcactgctaatccatgtcctcaatttcgtgttgcgtcgtttaatttgagtatgggggtgtggagcgccggtttgagctccctccggcgaggtcgccaccatggccagcaaggtgccgtcgcggcgttgggaggaggaggaattaggtccttggccgtaggattgagatggacgactgggattagaagtagcatttaccccttcgcgtattgaatccaagcctttggcgtctgatcgtgtggatggggtttgagatcgtctggaaccgtggataccgcatccaagggttgtgggttattcctgttcactttgggggatctaatcccgtcggttgatgggcgatcggacgactctgggtccccggtacctcttcgccgttgccgagttgctaaagagcccctggaacctttataaatcaacctgcggcccttccacctttaagattcataacaagcgggtcctataatctttcacttcagaccctgttttctttactaattatacccacaatccattttaattcataataaat

SEQ ID NO: 52372 - DNA, 1642 bp, Zea Mays
cgtatttggtgatgtttgcgggtgcacacacttttttgggaaagtgtgccttttgggtcgcatgctcaaaggcgcgtagtcgcgacccacttgaattaggtctttgctcgcgtgcgactggtctacttcatcctactcctgtcgtttgttattgaggatgtggcgggcgtcgcagatgttgctgagttggttctttatgggaacccatgacttcgtggactgtgagggtagcgtctccctgctccatgttgatgtgaagcaggtgtagaaactatccatgccggcgggtgcctgtcggttaatctcggcatgctgcatggatgccctctccactgagttgtggaggttatggtacattgtccacgcctccggttcgactggatcaagcatggaccagaccatcatggctattgtggccatgttctattcgaggttaaggaagtattgggcaccatcgctcccttgggcgagctgtccgtagacctttcgtgattgaggcctttcgacctcaaagtatcgtcgctcaatgtcgttgtagactctatcgagtctatagacaagagcatcgagctcctctagttgttgttggaggatttcatgactggcaagaatctacgccttgtgttggcactggtattcctccttttggttggggggttcttcgtccccccaccattttgtctcgtggcggcattgccacaaaacaggttctcctgactacttcagcagcattagtgttgggctcttcagttgagttgtgactcgagtcatcctcgagaaggtcaaggatggaggttggctggtggataatgacggtcatgaacgtcgagggtgaggcccctctgccttttgcctattggcggcggtgagcctgtttaggcgctacttgaaagcgacaatggtgtagaatgtgaggcctcccgtgcttgtggtgatagacgcgttaaagtcggcgaggcggagttcgccaatggcggtggtgaggaagtcgagggagccaaaggtaatgcggcttccaagcgcgaaggtctcactaccggtgaaacacagatgattgagccatcggagtgaaagtgtcgcttggccctacctggtgtgcctacaatcgtggtttcagaaaccgaggacacattagaatttgtgttcgatgggggaggctagcgtggactcactccgaatggtgaaccaagtgacctaagggggcaggcttatatcagtttaggctcgcgccctacggccattgtagtgcttattgtagcattgctctaaggaacatgttacaaagggtgcaagtgtgacaatgacatgaaggggagaactctggcataatgctcctaactctcctgcctatgcctgttcggtcatccccttctatatttcaagggggaggctcttacaaggggacttgttaactgaaggagggtgcaatctgtcgtctatgggagtccttctgacgtagtattcctgatgtcatcccctgatatgtgcataggaatacgtccagtacggcggatcgcttcatcctactcactatgcaggtcactgtagagactctaatgctgaggttctccgttgtaacatcccaattttgatcccaaggttagaaaccctaaactcctaaccctccctttaattatctcct

SEQ ID NO: 52373 - DNA, 532 bp, Zea Mays
aaactgaattcaaagagctgctatacgcctgaaccgaaaactttcagtacaactttatctcaatttcaaataagagcaggataattccttttaatagaaactcatctacaaactatcttctaacactttgctatagggactcttaacttaaactccttagatcaggcacaagaagacctcaaagtctgatagaaaacactgaaactgatttcaatgggctgaatcccaaaccgaattccaagtctgtgaggaacattttggagcaatttttctcccaactttgtacaacaccaaggtacactcacttaatgttccaagtctgtgaggaacattaagggctccaaaattaatcaatcacactgaaaaaccaacttcagttagtgaatttgatacattatcaaaatagtctgacagtgcacattgggataccttttactaacaattctatgcagcacaaggctcactctcatcagcatatttgttccccttaccatggtctaccaacaaagtatagacatataagtctacaaac

SEQ ID NO: 52374 - DNA, 801 bp, Zea Mays
gccaattttaggtcttacacattctgagcccgagcttcggcaagagagccctcgtttgagctgagcaagacgtccttttccttcaacgaattttcaagttcttcaatccttttctccaagccactaacaacgaattcgtttttccgtcttcatcattttgctgcatcttcaaagccttgctcagaagtaagctctgagttaaacgacgaattagagttagaccttcattgatcaaatgctaacactagcccggcgaaggagaaacaatagaggaatcataccttgaaatttgagtagaataagctgcctataacatgttgtcttctgtaacagctaatgaattttttagcttcggaaatccgatactcttcgacagcgtgctcacaatttttgccctagtgcgatcacggatacatcctaaaatctcttcatccacgccaccgaagagaatagaacaagactggtagccgctagatatagaaaattccttcaatttagatatacctctttggaaagctgttggccgctcaggtgccgaagatcgaagcttttgtcttccgaagaggcttattcagttcttttttccttcgacgctgaagtctccgcaataattgccccctcagtatttttcccaagtgcaacattagcaataagtctatcgatttctgataaggttgtcccgaggtgaccaccgctatttttagcttgttggggatcttcgtcggccacagtggatacaattttttctcgaaccaccggagctggggtatcaaggatagctctcatcacattcatcatccg

SEQ ID NO: 52375 - DNA, 387 bp, Zea Mays
ctgcttaggacgaaatcggccttaggccttctccacgtctttccgccacttggcggcttcatctctaggtttggtctatcacataacgctgccagatccactcttgcctttacgttatcctttgacttatcaggaatgtccaattgttgcccacagtgcctcgacaacattattttcagtgtgcatcacatcaatgttgtgtggaaggagcaggtcgtcataataggggagccgagtcaagccagacttatgtgtccacatatgctgctcaccatatcccacaaaaccaccttctgtattggccacgagcccatctatctgttgatgaattttggcactagtcatcgttgcaggtgggtggtctgtcactacaacacctttcgtaaa

SEQ ID NO: 52376 - DNA, 327 bp, Zea Mays
accgtcagctccatgcgcttgctggtttctctttcacaaccatcgttctctgtatggcggttgcttactgaaccagcgcgggtatgaagatctccctccgcacttctcccgcagttgacgactccacggggacacttccctctcctgcctcctgcaagcaccttcacctcgctctcatggcctcagagcctatgcatcagtgcgtcgaattccagttccagtagatgtttgctgagcggatctttgttccttctccagtcactgatcccgtttgatcccgtttgtgtgtgccccgtttcaggttgtggtgctgagagtgtccattca

SEQ ID NO: 52377 - DNA, 509 bp, Zea Mays
ctgagagaccacaaagtctgcctaacaacattgctgaccgaagcagcataggtggatagcggtgtcagggactcatgagctgatagagtcctgaaccccctatcccctgcatccatcaccctgacgtgaatgcgagtgatgtagtagcaagtccagagaggctcacacactcaccttgtctcgtataagggtcggacgtaggttcccaacgcatgtagcacgtcttgcagaaggttggggaagtgcctttctcaaacattgatgtgtaatgttcggtgacatgcccaaaccccatgaagtagtcctgctgcacatcgttggcctctttgttgacgttctcctcgtcatcttcttcgtcgtcgtcatgctcatcatcgtccccagagtcgtctgtgtcatcacctccgggtgcaggagcttgaactgctggtgccggcggtgctgaggttgatgatctagctacgaaggccagtgactctaccaatagggtgggtgttggtagaagttcc

SEQ ID NO: 52378 - DNA, 344 bp, Zea Mays
tggaagtggaacccaccataatcttagggctgccattcttcttatctgatggaataatatcagttagctttactaagatttggtcttgttatttcaggcacgagctgcgtgctttcaggttgtacctgtgagcagataaaatggaaaatccatggaactagttgaatgaactcgaagaatttgaaatgccactggatctgcctttccactgggtctgcctttatcgatggaactagttatggttcttgttacaatctgtgcagggatcggtttaaatcttgtttgaaacgatgagactgaacgatgccattttttgttggcgacatgagtaatttcgttttttt

SEQ ID NO: 52379 - DNA, 374 bp, Zea Mays
aataatcttaggtgctaaaaaagtattctatgtgaggtgcttctaacaatcatagtgtatgcatatgatgagatgtcatatgaggtggagtcttgggagatattaagggggggttaggagattagggttccaaaccttgggttaaattttgggatgttacaaacctaccccacttaaaggaatctcgcccccgagatttagactgggcttgagaaaaggtaagggtattccctcctcaaggagtcctcactctcccaggtagcttcctcttctccttctctgctccactgaactttacagagtctcacttctgagttgcgggtctttcggactgccgagtcaagaatctttactggcttttctcggtactgaag

SEQ ID NO: 52380 - DNA, 1103 bp, Zea Mays
agcctaattccctttcagggtgccatttggaagtttgccctaaatgataatatctaaacaagcagaagagtagaagcagcaggaagcagggtagcaaccatggcaccagttgtgccattgtgctcatggagtagattcttgtgtttgtggaaactgtcctcacgctgcatggccaggcaagagagtcgtaagcaattgaaggcttcacattaataatcagcaaggatctagatggtctaatcattttcctcatggattcatttactgtttctctccaagggagagatggggaggagcacataactgaatgagtcaaaactcaattacagatatagacatttaacaggtgaagagaagaatcacattctattggattagtatacaaagtggaatcatttctatccttcatggcacccaaacaacctgactgtggaattagtttccaattcttctcaattcctaggaaccagtcgggccctttagttgtaaaatcatttaaacaatcctcagaggctcaaaacatcagtccaaggtctaccaagtctctgtagatttcatagacccaaacctcctagattagaggttatggcatccaaaagttgactgcaaaatctggttactatttctgtttgcatgaaccaattttcggttattcaccccgttggcttctttctgaccgaggtagtttaggcgcccatatctcctaaatcttcataacaccagcccagagtttcttaataaactcgctcatgaatacaggacttccttagatatcattatgtcgcccatttcactggatacagacatagatacaggcatacatggatagactgtctttaatttttcagattaggtgcactgtacaagatgtttgcacaggcggtatttcagggatgcaccaatctgaatacccctgccagcacttcatcccaatcttcatccgatcccaggttggccatggcaaggagagtaaatatcaaggatagatatttcagccttttctgaatcttcaacagatagctgctccccctttcttcggtcagccctttctccataatttgattaagaacagggcaatcaccagtgacagagcttgtcattag

SEQ ID NO: 52381 - DNA, 543 bp, Zea Mays
gatccctccatataatcattatctgttaaacttttgttgctaggatccaaacatacccaactaataggctaactaaaatcaatgaccttcgtttatatatttgtacttaactatgaatcctttttcatatttgtctacttagaatgatgagatcgaggagtaagacgatatagagctctttatcttcagttcatgttttgttctgctcggtggatgaatccatgtcttgccatgctattgttacagaaatcgagaaaatgattcttttttgggggtttggatttagatttgtactgtttttcatcttatttcaagcctgattagaactctttatctggttggttggagatatggggtgattggggtagtgtattgtagcatgtctccatattcacaattcttcatcaattctcggtgatggactcttacctatctgctccagctccttacttgcgctaaaactgaacatggaccctgaatttgggaattgaggcagcaccagctaatacaaattgttgcttaattatggagatgatcactgat

SEQ ID NO: 52382 - DNA, 420 bp, Zea Mays
cacctgctgccgaagcaacacaagctaatgttgaagaagctggttccaaagatgagtacagctgtggggtgccaagtaaacctagtcatctggattttggaaagtcttccatctccaaagctgatccccctaaaatggtgaagctgggctatttcagtgaggccaagaaggaattaattcgttttggtggagaagaaactatcccaaagccaggaaaagatgaggtagtagtcttcaaaagtttcctgaaagctggtttaagattccctctaaacaagatgattgctattgtattgaagaagtttggggtttatcttcatcagctgacccctaatgctattgttcggttaagtgtttacatttgggcccttcgtagccagggggtggaaccgttcggtgagggtttctgccgagttcatg

SEQ ID NO: 52383 - DNA, 680 bp, Zea Mays
caacgacaacaacaccagcgacgtcgcattagcccccgcgactagctccaccaacgcagcactggagcaaaagatcgacaccatgacgatggcccttgccgatctcaccaccgacatcactcacatgatcagcaggccgccaacaccaccaccgcccccagcatctatcgtccctacttctttcccatatggcctgccaagttacggcgaaatccctcccttgtccaataccgccatgccacccataccatcaccaccaatcatcaccacagccgctccactcccatccacctcaaccaaccttccaacaccaacctcagccttgctgccacccacacctacaatacccatacccatccactaaatacccttcccacactccccatccccaatcctagacttttccaaaccccacctaccgcttacccaccatagcaaaaccatcctaatcaacaccaccacaaccttccctttcccacgtttgacaacaaaaaggatcctattggatggccatctcggtgtgagagcttcttctacaaccaagggatgtcagagggggataaagtctggatggccatgtactatctcacgagcgttgcacatctgtggtccgtcatgctatggcgcgacgagcccacactacactggccgcgcttcaagacattgtgccaacaacgttt

SEQ ID NO: 52384 - DNA, 1005 bp, Zea Mays
gttatactactccattggattgtgggtggtagactgatgcgaacacaaccttcgtgccgatggagttgcaaaattccctgaaatcttgattgccgaattgtttaccattatcgactgtcaacttggagggaatcgacagacaatattctgctagaagaacttttggttgtcttcaacattattgttgacacagctctagctttgatccaattagtgaaatattcgactacgatgaagatgaattttaaattgccttgcactgttggtagtggtccaatgatgtcgagtccccaacgctgtagtggccaggtgtgtgtagtgagctttgcaaactgcgaagggcgctcgttcgaggtgagattttttggcatgcttcgcacgaatgggccactctgttggctagccagtagaaacctttgcgtatgaccttagctgcgagagctctaggtcctgaatgcgatccacatgttcctctatggacttctcggagaagttctatgccttcgacttcagttatgcattttaacatgggttaacttatccccttcttgtatagctgtccgtcaatcacaacgaagtctctacttctatgttttaaccttttagcttcgcgttggtcagaaggatgatagtggctttgaagttataaggtgatgggtgtccaccagttttcgatcattattagatttactattcggaacccatcgaggtcttgtgttatctgcagggcttcggggtttcttacggctggtgtgccgatcgtgtggaataaacacaatggatggcaagggtttgcccttccctgctgctttagctaacatgtcaacttcttcattcttgttatgctctttgtgttgcaaggtgaatcctttgaattgcttctctacacttcgtacaatagagagatattgcatgaggactggttctttggcggagtagtccttttcaatttggtcggcgactaccttagaattagtcttgactatgcacgttgtcactccgagg

SEQ ID NO: 52385 - DNA, 460 bp, Zea Mays
caaaaatataccttcatcactcctgaagccttagttaaggttaggatcttcatttgggcagtgaggagccaaggcttaaaaccagatgttgactacttttgcaatatccacgagctcttgtatcaaaccaaggctactggaaaagagcagtatcataataactttggttgttataccttcgtgtaccgatcagatgccaagagccctatcccaacatttcgacaaaaatggtcgggttcatggatgaagtaatggttttatgtgaaaaatgacttggataagaggggtgatatcagagatgtgattcaatggcctattcgatcccgcttcggaataaagaggccaactattgtgaacacagaaaaatcccaagcttgcctggtagcctttaacgttgtgtgcaactacatttgcactagagatttggatcaggagcacatacctttcaatgtatggcccc

SEQ ID NO: 52386 - DNA, 446 bp, Zea Mays
cgagactggtgcttgttattgttggtgtgtttaacttgtccgctttaatttattttcagatcatcagtaggctttggtagtttgttggggggtctatctatcagtaggaccttggtgttgtacgtttagcactattatatttctctttgatgggagaggctgcctgattgttgtgagcttaaacactgctttgtgtgtgtttgtcattcagtggctaacatacatgcaggcgagagctctagctattgcagtcatcgatgtcaaatgaatgtgtgtgagcagtgctatgatcacgaacgaagcacgcatttttatagtcagcattaaggggaacttgattatatttgttattccaatcaacaatctatcctagcagccagccacaagcgtatcagctagcaatgccagtgtatgatcgagaaaagagttaaaagctcagacttgcg

SEQ ID NO: 52387 - DNA, 399 bp, Zea Mays
ctgcccgcagtgccttccactcccagaaccttccatcgacgccactccctgaattcctccatgccgctcctcgaaatcctccatgcccccgcgcctgaaattcctccttcccctcccagaaccttccatagacgctacgtcgtgatcccctccaccggccattcaaccatctgcttccaactcctcggcgtccaggttgtccacaagcacaagcagggggcccttccatacatggctcgccccgcagaggcaggggggccttccaacgatggagcacctcgccccgcacaggcagggggcccttccatccatgagagcacgcaagcagctctcccccttcctccgcgcaaggcagtccactcggattatccgcaaatcgtgcctgccccacggcgccct

SEQ ID NO: 52388 - DNA, 445 bp, Zea Mays
gtttgtccatccgtttgcggatgataagctgagctaaagtttagcttgttatccatggactcatgtagccttttccaaaagcgcaaggtaaattgggttccttgatctggtacgatcttctttggtactccgcacagacaaacaattcttgacatgtataactctgctaactgagctcctaagtaagttgtcttcacaggtataaagtgtgccactttagtcaacatgtctactatgacccatattgaatcatagccatcccgagtacggggtagtccaactatgaaatccataccgatttcttcccatttctatttaggtaccttgagaggttgtagtaatcctactggtctttggtgttcggctttagctcgttgacatacgtcacatagtgcaacatgagtagccacatctcttttcaaaccgtaccacgccaatacttttc

SEQ ID NO: 52389 - DNA, 495 bp, Zea Mays
tctcctcttaagccattaaactctaagcatgggattaaaggggaaagagtgggcaaatggccaaatcacaaaagggaacctttaccaaagatgaagtgtattagtaaatcaacaaaatgtattaagaaaggtattacaaaaaggcccaacaaaaaccccaaaacaattcaccaagtggggagcacactagagccatgcaaaattctctaagtccccaaaacccaccctagcccaaagatcaaatgtcttcacccttgtgctggcgccaaaaccacttgaaccaaatagaaaaaagtggccaaattacccaaggcacatccctgaaaaattcgaaatcaaaccaaggtcgtttgacatggtttgacatcagttttgtcgctggtgaacagtgcagacagacaagacttggcacccacatatctcacaagctagggcagatcttccattggaacttacacaaactagctagccctaggtgccaggaagagatcttgc

SEQ ID NO: 52390 - DNA, 440 bp, Zea Mays
cttgtcatggcccggaccttactcggagggatctggaccccatccgagggacccggcatgcttacttgggagttccgggccgtaatcgggggttcgggttgtgtgtacaggggtccggtgtttccttgcggaggtctggctcaactgacgcatcctgggatgtatcatcctttctcgccacgcagtgccccttgagccgcccacgtggtggggtcgggtgttgttcaccgtgcggctagagaacgtcgtacgggcaccgtgtcttcatactgtagtaaggggtacccctgattcagggtactgacagtggccccagggcctacctcaggggaggatacgagcctgtaggtggggccaaagtttgactggcgattggctcgctgaccctgcgcgcccatagatgcaattactgccggtccgcccatggtcacgccgactgc

SEQ ID NO: 52391 - DNA, 532 bp, Zea Mays
ttcgtcaatcgatccacaatgacccaaattgaatcatgatgtcgagaggtgttgggcagacccacaatgaaattcatgctaatgtcatcccatttccacgaaggtatcgataggggttgcaaggcaccagctgattttaagtggcttgcctttatcctctgacaggtgtcacattccgacacatactgagctatctctctttttattctggtccaccaatataggggcttcatatcaaggtacatcttcgtgcttcctgggtgcatggtgaatttggagagatgagcctcatccgagattctcttctttaggtctctgtttttaggaaccaccaatctgtcttcaaaccacagtatccccttgctgtcttggtgaaagcacttatacttctccactttctgattaaggttctctttgatgatttgcactcccttgtcactgagttgggccataataatttgatatgacaaggttggctcaatggagatgtgagacaaggtaccagaaggaatcacttcaattctcatcttgt

SEQ ID NO: 52392 - DNA, 1093 bp, Zea Mays
gttcctcaactcaggctgtcagaacgactcaagaagatggccatggtacagtgcacaataagatcttcagattcatcccacctcgccgccggtgacccacgcgccgtgatccgcgccggtgctacgattcgtgctctttgattaggggatagtcgcggaggggtaaaagatttgaaaaggggatggatcaagccgcccagtcgccgtacccacttggtctgcgaccggccgatatgatcctcacggcgttggccgcttactgtccgtgcgccacgtgcctagtagctttaacacgtcgcagtgaaccatagcagtaggtccgtccatcgccggaggctttgccacggtgaaagccacaataacatgctccggtgactcaccccctctcttcggtcgccagccttccctttcaaaattcggaggcaccgctctcggacactataaattgagtgtgtcgttagctccgttaggttgtcacgaagccagagcacccgccctcgcctccgatcgtccaccatagcgctttaattcgggttttcccccaaattggttctccgcgtcgccgtggatagctcttccgtggctagcgtcacctaaggtagttccagcccaattactgtttgttctagcttccttcgggtgtagtgatgctccccgtacttagaaattgaacgctaccgtacctagtcaccgggaacagctcgatcttccctcggtacttgccgtcatcgtgagcagaggggattctgggtcggactagctcaattaggggatgaactaggttcgcctgggatcaaggatgctagcgcaacacttgatttagtcagtcatcgctgtttggggcgagttcccgcgaacagatggccgacggcgagcgtgccgttgccagggttcggtttggagaagaaacagaagtgcgaggggtgttgtgtaaatgtcacagagacagtgaaatagtgataagggttctttaccggttattccaatcctcgagggtctctgcgcaaattgtccaacgcgagcgcgcgctatcgcgtttcccctttcgtgggccggttcgggctggtttaagcccgttactattcattccttc

SEQ ID NO: 52393 - DNA, 409 bp, Zea Mays
cgccacgtgccttggcacgttaacctcaccgccgtgactcacgttagcttgtccggtggtcgccggggagcttgccacagtaattgccaccaatcgcgcgcgctagtaactttcttcttctctggtcgtcgcgcgtctctctcaaattcatcggccactactgtgggagcctataaattgccgaccccacctgctccgctaagtagttgtgcaaccagtgaagcaacccgtgcctcgaatcatccactagaactccccaatttgggatttcccccaaatcactcaagaacaccgagcggtgttggctcaccgtggtcagcgtactccaggtccgttcgtgctccctgcccttttgtttcagcacccatacctgccctggatactcctcgaccaactcgattgagctaag

SEQ ID NO: 52394 - DNA, 697 bp, Zea Mays
tgtttgattttgcccttgagcaggcggactcagttgctcaagtcttgattgcccccatctaatcaccggagcacagtggctttgcttgtatctgcagccagttcgtctggaaaggtttttttatctgtttttttaaggttgcttttgaatagtgatcgtatattcgcgctttgcttgcacgtggtattcttttctgttcttagccgcaactattcatcggtgtcgaacagagatcctttttcagcgtgaacttggctgtttttgagcgaagtatgtcgtgcatattttgagtggcgcaagtccgttggcttccacgcatagctggcatatgtgtgcaagcgactagtcagaggaaaaaaagtgagtgttagtgccttagtggtgcttaacgacctgtatctgttctaacggaagtttggcaagtgacaacttatgctatgctagtacaagctattaccggccatgtgcatggaaagtgtcggttagatatgccaaaatatgaacatgacacttaaaatgataaccagggagccatttgcactagaggtcgctaaagtttggctgcacttcatcctatttgtctctcacgcctatgtgctgatatgctgtgctaagctggcatgataggactctttggcttcttcaaagcattgatgccaattgcaataagcgtttctggctccaagttgactattca

SEQ ID NO: 52395 - DNA, 444 bp, Zea Mays
gttctgccgggttcacgaacttcattatcagacaaaggcaagagctgacggtcttcacaagaattttggatgctacaattttgcataccggaaggatacgaaggcccccgtgataggctaccataccaagtggcccactggttggacgagtgaatggttttacgtcaaggcagacaagaagaagagggaaaagcttatgagcatggcgatgagtccactgcgactgaacttcggcatgactcgacctctatgcaacatgcagctggggtctccttgccaactagctgaagtggaatttagggtcgtggctgagcatatcagcacgagagatttggtacaagaatacctggcaaacaggacattcccaacttttgtcaactggggaatgccgaagaagaaagaagaggggaagaaatacgagcttgttcgtctattgtatcgttt

SEQ ID NO: 52396 - DNA, 371 bp, Zea Mays
gttcatttcctgacgaggttgataaaatataatcaagattacaccaaataatatagcagaagagacacggaagcaaaggagcgaagggagcaccgaagtgcaagaaactgcaacatggagatgatgaaacaaacaaagaatgtcacaagttgatcaaactacctccaaaaatcatgatattttgtgtagggttttaaaacataacgataaacacttctaccaaaaaacagcttaatcggagaaggttggaaaaccaatctacgttggtttataaaaccggtctaggttgatttttatattgtagtccatagagaaaaatgtttaaagtcgatcaaacgaatatgaaaagtcttcttgtcggtgtttcgaac

SEQ ID NO: 52397 - DNA, 275 bp, Zea Mays
caacactgcctctttcggccggcatgcttctgcacgccccctggaatcccatggccggcgagtcttgggaccaggcgtccctcaccagcaacttcaacatgacgccgccgaactccgtcgagtggtatgccgactctagtgctggttcgcacatgaccgcacactctggtatactctcatcccctcgaccaccctccctgtctggtccttcctcgattatcgtcggtaatggttccttgttacccattacctccattggctcatactcatttact

SEQ ID NO: 52398 - DNA, 590 bp, Zea Mays
gataacttgtgtcgtctctcccccgttaaaattcagtggaggacgagatctcctactgaaaaggatcattgtcgcacggccttgtcgtgatagcatctcagggtctgctggtaccgtgtcgattgaattactgcgtttagccgttcttcttcgagtacatcaacatcttccaacctagttgcttcggcctctgctatgctttcaaagatcaacctcggcgccccaaacttgagatcagcaggtagtactgcctctgacccgtaggccatgaagaaaggagtgtttccatgcagagctcggctaggttgggttcttaggctccaaacgacgtagggcaattcccttatccactttcctgtgaacttctcatttttgtcgaagacctttttcctgagtgcctccaatatcatcccgttagctcgttcaacctgcccattggctctcgggtgtgctaccgaagcatacttgatctgaatgcttttttgctcgcagaaatcgaagaactctgaacttgtgaagttggatcccaagtcggttatgatactgttcggtattccaaacctgaatattatgtcttgtatgaattccac

SEQ ID NO: 52399 - DNA, 343 bp, Zea Mays
gggatcaacctcaggaaggacctctactggcacttcatcacgagccggggcagaaggacctgcatcctggtccaagcatgacagtcgccgaagtcgcctcttcttcttcttcttttcctcaacaggtgcagtcgggtggctaacttggcggggacgctttgagtgagcaccctcaggcttccgagtctccactgctttgccaaactcttgtccagccgtgatagccatcggctcagcatgggtcgagtcagaagattccccagccaacatactaagcacaacatctatctctgcatcgtctgggctagctggcatctcaaaatgagtttgcttctcattattg

SEQ ID NO: 52400 - DNA, 628 bp, Zea Mays
ttatctatgttccacgaatgctctaggtcttcgccggatggtgaggtgagcctgtaagcatttggtgatgttttggtcctgaccatgttgggcccctctaatttgggttcaagattgccacgagactctgttctaatggttcttgtgagtactaagtctccttctttgaactctcttgggatgacggtgttgtcacgccatgccttagtctgtgcttgatatttgttcagtgcttccagagtgaggacacggtctcatcgataaggtctttggaggttagctcatcgacgttaggggtggctgttgggcttgttcgtggggatccatgctttagctcttgcggtgtcattgcttcggatccatacatcaagtggaagggtgtgaactcggttgctctggattctgttgtgctaaatgcccatatgactcggttgcgctgaagatcttgcgcttggctcgctcgactacactgttggactgtgggtggtagacagaggcgaacactgccttcgtgccgatggagttgcagaattcccggaagtcttgggtgtcgaactgcttgccgttatcgactgttaatttggatgggactccgaaccgacatacgatattctgccaaaaaaaaaat

SEQ ID NO: 52401 - DNA, 385 bp, Zea Mays
gagcaattgcctccatagtatcctcagccctgtatccaaaagactctgaatccaacgaacgccatcctggctgcaggggatgaggctctagggtcatcctcaccctacagcggggcactcggtgcttctcgaacagctgcaccgcgtactggggaggcgtcgtgtaaccagctccctaaaggacctcccacaagatacgggggaaaccctctcgtgcaagcccgtcagtgtgggactgtgcattcccttcatccgaggatccgtgagaagtcatctgtgtacggttaagcgtaagtaaaaaaagaagaagaattataaaataaaaagggatcaaactcagcctctctataattacgacaatggcactaggtgcacttaatctttt

SEQ ID NO: 52402 - DNA, 355 bp, Zea Mays
gctcaatctgttgagtgtgtttttcttggatacaggcctgaacataaaggctatcggtgttatgattcatcttctcgtcgcatgcgtatttctcgagatgtgagctttaatgaaaaccgacccttcttttacaactcttccactcattcttcttttcattccacagagtctacctccttcatgagccttcctcccatttctgaaacttcatcagtatcaccacctactgtttctaccccagatgttcttattcccatcacaccaccttccacttccacaacatctcagccttactcttccaaaccacctgttactcagacttacattcgtcgtcctcgttctactcccacggcca

SEQ ID NO: 52403 - DNA, 871 bp, Zea Mays
tgggtatagtacttgaagcagtgcaacagcaagcttcaatgaaactgaggcggcaatcagacagtgaatgtatcgtccctcctgcatgcctctcacgttcctgcccattgatgaagaaggccggtggttgccacacctcctcggctcttcacccctcagcgccaccagcccgcaaccataaaggcctttgactgccatcactaatgcaaacttgaaactgttgttggggacggggcggtagatttgggcgcccgatatgaaatgaatgccgcacctacttgatctgtgatcggagcatgcgcgtccgtacatagtacgtagtattccctgacccatgtcttatatcccgaaaaaaacacatggcattaagcactgacttgagtaagaaagagcttgatgagtgctacaagtgctggctggggaccgactctcaggctcagcgggcaaggtagaggatgcatggagcatggttaatcatacatgcagatgcaagccgcaaagctactacagagcacaacccaatacaacatgcagttagcagagtgcagaaggaacacctccccatgctgatctctaccacctgatatgtatgtgctttccattggcaatgtgtgcaactaaataaacatgcccatgcaggccgcacaagcctctcgatggatgggttcaacatgttgagatgatcccgaagtcctctcgaagaggtggacgaacgctgccctcaatcagatattgaactgttgcctaaaaaaatgtgactgttgttggtgatgttacagatgtgatgtaggagtgcgccttttgatgatgagcggctgcgacatttccgagaagacgcacgtccactataaaaggggcggggcggctaggg

SEQ ID NO: 52404 - DNA, 337 bp, Zea Mays
cccgatgctgccacgtggactatcgcccgtgacgtaagccagcgggcggagcctgacgtaaggcctctgggccgcgctgcctctgcatttattgcggagaagacgcgccgcctgtctatcccgctgacagacgatgtgcccccttagcatttaatgtgtcctgtccactccgctggcaggcggcgtgcctgtccagtccattgtcaaacagtacgcccgtgctgtgaggtgcactgtgtccatcatcacttatacgttgccagggaagcttcccctgcacgccaatactacgcaggctgcggatatccgggcgcaaggagattgcactggcgaccag

SEQ ID NO: 52405 - DNA, 430 bp, Zea Mays
gtggacgacatgctctatcggaggatctgcaggaggatcattgggcacagtgaagcagctactgcgctacatcaaggggacgattgaccatagcatggtcttccccaagatcggcgaaattgacccgcaattcaaagtctttaacgacatggacatggtggacgatgttgatgggcggaatagaacctcccttgtgctcgccttccttggcctgtaatgtttgagtaatctggaccgtgccatgatgggtcgctttcgtcgtctcataaacgaccttgaacttaaagagctggagttgcttggtagaagatacacttggtccaatgaaagggcttcacctactctggttaggctggacaggttgttctacaccactgattgggagatctacttccctaactgtattctccagagttcggccaccatgatc

SEQ ID NO: 52406 - DNA, 619 bp, Zea Mays
gtccagtgctcgtgtggtggatccagctctagctctgaataccaaatgtaaacacacgcgatcacacaaggtagtttctctcacgatgaggtaattcgctcgttatctcaaaccgacgatcagggatcgcggccgccgccagttcgccgtattcgtacagcctactgttcaccgaatcggacaagggtttatatatgaatctattacaaatgggttcaattatcccattgtgggccgtagtatttggcgttgggctttggaagacgtttgctgcgtctgggccgcctttctgctatggcgccagaccgggcatcctccttttgtgcttcctctactcccgccaggttgctgacatagcagcatcaaaaatagaagatgggttgttgattttgcctccctagctacaggagttgtggatctggttctgtccagggttgcgcctcctgtccaatccatgtagcaacaacaaagaagataaacggacaaggcgaggaggtctccaatgcctgacatccctccggtggttgaacattgtgaagtgccccaagcttctgtcctcctactcatctccatccttcatgtcttatttccccttcttgagctccctggaaaccctcgg

SEQ ID NO: 52407 - DNA, 405 bp, Zea Mays
ggaaaccatcagcaaacctgacgaaggtgaactagttaggttaaaatataccttcagatatggagataagtttgtcgagccagatgatgactggctgaaatgtattgaggccacaagcgatgaactgcttggaccatactcgaaggcagaagatactgcactgtctgggccttcggaggccggaagaagaaaagactcaatcgagtatttgatgccattgggctcgtctatcctaactaccgttacccaacacggggtcaaaaaaggaaagatacggcttctgtgaaggaagttgcttcagtcgctcctagtgagccagcgccgaagaggaaaaagatgaaggttcttacgcaccggccacgctatattgaaccggccacagtgcctgagtttgtcggtgagacc

SEQ ID NO: 52408 - DNA, 659 bp, Zea Mays
cgtgcctctaggttgcgtgcccattgacacctctgcttcgtcatctgtatcctgttggtggtgtcatcaaccttatgctaggtggttccatgttctcgcccttcctccttagaggattcctccccttcaagggcgtaggatgacagtttttgtggtgcttggatgtgttgttcgtgttgtgctcgtcatcaattataagggggtggttgttctttggcaagcttcaattggcgtgctctctcactcttagtccccactcagttgggcggtccttcatcccttcaagggtccctccccttgttgtgcgcaatggagggagacaattgtgcggctttgctacgacgggtggtgtggtgtacattggtttgcgttagcggacaagtgtgttgtttgatggtcatgttctcaagaattcagttgttgttctgcttgtgtcaagtccaggtgtgtgtgcctcctctgtatctcaatgtcgtggtcgtggtcgtgttgtcttttgtcggttggtgtatattgtgttcatgttcactctataatcttatgagcctattgggctatccattaatgaaaatggaacaggtttaggtggggatcccccggcgaactttcaaaaaatatacataaattttagaattaatcaggattccactctaatgaag

SEQ ID NO: 52409 - DNA, 501 bp, Zea Mays
ccccatgccagctggttgaagtagaattcagggtggtagctagtcatattagcactagggacttagtgcaggaatatctgacaaacaaaactttcccaacctctagcggatggggaatgccaaagaagaaggaatgagggaaaaaatatgaacttgttcgacttccctaccatttcaaatttcagaagaaatttaaagaaccatgttctgaatggttagaaatgacagagaccatgtgcaatgagatcctcgaaaattatatgaagaaagaagaccagttaatgactgttgccttcggtacctcaccaaaacgaaggttgcatcgggtgatggatgctctgaattttgaatacccagattacgatagaattgacgaaggggccagggggcgaaaagaaagagggttgtgagtattctggccagggaagccatccggtccgtcaaagaagaccaagaaactttgaagaagatgaaaacagtgccggagccgaaggtatcgac

SEQ ID NO: 52410 - DNA, 386 bp, Zea Mays
tgatgtccttacgcaacaagggtcattaatcgcgctatagaatggaagtgtatgggtcaaatgtgtcattatgtgaggttttggtggagaatggatattaaaagtacttttatggtcttggaatcaatgaacaacgatatggggtcgatatggacgcatccgctagtcaatatggcaatggatagtcagttggcacatgatccacttaatccttctctaatgaaagttggtgaaactatgtggtgttcaagaggcattttcaataacgactttgacatgggttcataacaagtgggaggaacagaaggaagaatgattggtgatgataataataatgatttagatgactccgaagagtaggacattgattatggagaaggtacctc

SEQ ID NO: 52411 - DNA, 354 bp, Zea Mays
ttcaaattgaaactatattaccatgtgctaatgcttgttgctcgtcaacaagtaattcctcctgtgagctagaattttcaggaacaaaagatgacacatgtcaaaagctcaaggaagaaaatgagaggctaagaacgagcttgatacaactaaaagggaagtgcactacccaaccttctcaagataaccgtgattacatggtgaaaaagcttgagacgggaacaaccgtggcatgcacaaaatcccttgaagaaaaagtcaaggacttgaggattgtcaagaggaaggaacaaaagaagaaaatcaatacctccgccaaaagcctcaacaatgcctccatgcaaggtaacatcc

SEQ ID NO: 52412 - DNA, 473 bp, Zea Mays
gtgcaacgcactatgcgagcagatagagtgaaagtttgtgtgtgatcgatgaacaacaattgaagctcattgtgagtagcaggtatccggaagaacgtcgtctacgacgcagaatgttggtggagaaaaataatcaacctattgggagcacataggtggagccgtgaagttagtaattgtgcggtgtcatgtcccgcaaccgcgctctgccttcttgccttgtcccacaccgtcttgatggatacgtgaaccagtaccatgctgacacgcgcgtgagcagcaatgggagcaccgtgtcacccatctatccggcgggctgtccgtgataatgagcaccagaaagcctaaatactgcttgcgcacatattctttctttccgttttttggggcagtggagccaaagtgaaagtgaagtcagtactccatgtctctattgtctgcatcaccacccagttcatccacacaaggtcgat

SEQ ID NO: 52413 - DNA, 483 bp, Zea Mays
acatgtctttactttatgtgattagtgtctagtttgcatatgttgggaaaaaatcgtgagagtagacactcttagttctatactacaaacctaggagtgtttcccttccctttgaggagatgactgacacaagatataaatcatgtggtttatattattttttgaaggaaagttgtttatatggattacaagtgttgtatatgtatgaaatattgttgcttctgcttttggttactgtcgttaaggggatgacgtaaaatgaatgctagccactctttctttcttctctgacgcacccactttccacttcataggcaagaggaaacacatgaaaaattaggacaacatcaacataaagtccataatggcccaaaaacaacaaaaaaatagaattggtctattctatcctaatgtgcttttgccatagcccatagctagctcgacaacagactttgccaactagcaactcacatgcatgatact

SEQ ID NO: 52414 - DNA, 677 bp, Zea Mays
atttaaataggctctggattaggcgtcaaaatctgagaaccgcaggggcctagctacaaaaatccctgtgactcagagcacagcgcaccaggacggcgggttgatttccagagaggtgagggtctctttagcaaattgtccacggcgaaggggtatgggcgagtctcggccgttggattagatccgaacggtcggtgtttaatgaaatctagatcggatccccaccaccggatccaagatccacggttcccagacacgatcgcccccgatctcacccatgccgtgcgattgaaatctaacggtccgaatcctatctgatcgaaccggtatgcggcatctaatccgagccgcacacgcaggatccaacggtcctcggtcgtcttcccaaatcgccgctatcgacggcggcgccgcccaccattcacggcgaacttcgccggggaaatcccaatcaagcgttccagtgccctaaaactcaattaaagactgctacacgatgcctagggggtggcgaatacattgagacgaaccttactggtaggggcgaagcacagaagtccgaccacggcgcgagacggacggtcgcggaaagcaaaatccggtgagaaattccgaggcggccggtgccttccgtgcacgagaagacacacacttgcaatccccgcacgacgaccaac

SEQ ID NO: 52415 - DNA, 837 bp, Zea Mays
aaagcaacaagattattttcgttaagtgaccaacaaaaagccacattaagctaatcaaattgtaggggtattctcaagtcccctcgcccgttttaaaaaagagaatgaaattgttcgccgttttttctgtcaaaaatgtggcgcggaggggcaccatgccagagattgctccaagtctttgtggtgtgatatttgccgtaaagaaacacatatgactactagatgtgttcttcccaaacaaaacaaaccatgtatgcctattgttggtatgacggtggatggtttagggttttattcctctcattttgctaaacccctgtctaaaaaacctaaaaggagtttcatagggctggtgaaggtggtagagggtttgatttctgctgaagatcttgaaaaggattttggttttcatttcccttggggtagaacttggaaagctaccaagtgtcactctagtttcttgatgtagttcccctctcaagaaagacttgatgagatgattaattttcctgagttgaaaatgaaaatgtctggggcaaaaattattgtgtcttcttggagctcgcaggctaaacctaaatccaagttgcacactatgtggattgttagagaaaatgttccagaagaacttcagaattaccaagctatttgtgagttgggctccacaattggcgctattgaagaagttgacattttatccttagacactaaggatattgtgaggttcatagtgcatgttaaaagtgttgcaatgatccccccaattattgaggttggtgttaaacccttcttatatgacatttaccttaaaattgataatatcactgatgagggatg

SEQ ID NO: 52416 - DNA, 388 bp, Zea Mays
aagacatctatcttacacccccttctggattgatccaaacaatccagcagggcgtctgaggaaagcaccctccagctctcgtggacctgctgctgccagaccctcgcgtccatctcctggtcgcggatctcccacaccacgtggtcatggtcgtggtcgaggtcgtagtcgtgggatgggtgctcatctggcccatggcattgcagcattcttctccatgtgccgaaatatatcttcagatgtacatgagctggctcggcggcagcgggagactaacgacaatcttcgtcgtcaagcttcctctatgggtatgccatttgctccccgtttgcctgatgtgcctctccatccgcctcctccaaaaatcaatgagtggcaccagcaggca

SEQ ID NO: 52417 - DNA, 307 bp, Zea Mays
atttaattttgcatcacttctatcgtcaagttccaattaatttgtttaggataaaaatcgtaagagtggtcgagcttccgaattcatattctctttagacaagtaacctaaccggcacaaggctcgacatcgcagatagcagtttaacaccgagctgcacaaaaatatcttgggcagttcaggtaaacagaaatagatgcgatatcgaaaatcaggatgggtgaaaatgtttaggacatagagaccattattctcacccatattctgtgcttaagtccatactcactgttaaactggtgataaacac

SEQ ID NO: 52418 - DNA, 659 bp, Zea Mays
atacatgaagctataacatccaaagttgttatgatattgctctttcccaaccgcctttgtctggtaggacaattcatgaatattgcagaagcagttggcatctggctccatcccttggatcctcatagcccaaatgaaaactccaactttcatcaaagcctcgggagtaagttgatgaaggtatatttcaaatgtcttcagtacttcgaccagcatcttatgcaagggaaagcgaagcctagccttcattaaacttttgaataccaccacttcgtctgctttaggaagaggaacagtactctctcctccagccctcactatggatatatcaaggaaatatttgcccttcatcgctttaatcttcccttgcttaatagtggattttctgaaaacaacatgatttggcctccattgacgatcttcagcatctttgttctcactctcaacatcaaaactctcgctatcgcttgagtccccagacaacccatctaacatctcatcagtgattttctcaacattggtcctctccatggcttcgtagaaaccagcaagcacggggtccacacttttcttatcttcgaccatttcagcgatggttacaacagaaagccgaagctcaaaaaacaattgcggttacagaggtagaaagctaaaacgac

SEQ ID NO: 52419 - DNA, 678 bp, Zea Mays
ttggaggtgcattaccaccctggtaaggccaatgttgtggcagatgctttgagcagaaaggcccagtgcaattgtatgagcatggatgcaagaatcaccaccctgtgtgatgagctgtgcagattaaacctggaagttgtttcttcgggtgacctaagctatatctcggtggagcccacgttgcaagaacagatagtcagggcacaggttgaggataagggtgttcaggttatcaaggatatgatcaagcaaaaggcagaaaagtacaagtgtttcagataggacagcaagggaattctatggtttggagatcgattggttgttcccaaggaccctgagctcagaaagaagatactagatgaagctcacctctccaaattctctatgcacccgggcagcaacaagatgtaccatgatctcagatctctatattggtggactagaatgaaaagggaaattgccaagtacatatccgagtgtgacacctgccagaggatcaaagctagtcatttgaaggcagtaggccctctgcaaccccttcccatcccatcttggaaatgggaggacatttgcatggacttcatagtgggattacccaatacctccagacaccatgattctatttgggttatcgtggacagattgaccaagactgctcatttcttgccagtgcacacc

SEQ ID NO: 52420 - DNA, 456 bp, Zea Mays
gcttggcgcaaaggcagagatgaggcctaagaaggcgataagagcgacatgtagggtttgatttgtgactccctgaggccactgagccagagtcaaggtaggtgtcgcatgtgcaaacaagatgcgattaggacacgatgttcgagagagaaactgtgctcctggagcagcgagagcagctagagtgccacagcgtggcatgagaccacgacgaaggcaagtgctccagtgctcgacgttggagataaggaaggacagagggcaccgacagtcaagcaggccacacgcgtgtgcaggggagcgtcagagtaggtagcgatggccaattgggaagaatggcgaaaggagaagcctcgagccatgaaagagcaaggaggcaatctagttctgggttagggcgaggtatggtctgaatcatactaggccataccgggtgcttcacctctactctggcgc

SEQ ID NO: 52421 - DNA, 302 bp, Zea Mays
ttttgtttcagctttgggttgcgccttagaagcttcggcaatttttctggcaggagcaggattcaaggtttttgttgtttctaatacaacatctagcacatttgtcatcctccttctcttaggagttgtggcagaactcttttgtgtctttagcgctgttgcttctgttggagggcttaaaatccctggcatctttgttacttcctcagtttttgacctttcagccttatctttgtcaaccttcatttcaattagctcaaccgaaggtgccttcggcattatggctggctcttcagtcctct

SEQ ID NO: 52422 - DNA, 468 bp, Zea Mays
ataacatcggggctgcctaaggcaaggtatttggtccgatgtagcctttctctaacaactcatcaatctgcttcttgagttccaccaattctggtccggacactcgataggctctcttggaaatagcggtggtgccaggtataagctcaatggcaaactcaactttcctttcaggtggaatgcctggtaactcctcaagaaacacatctgggaattctgatactacattgatagcttctgatggctcgatttcctcaatatgggtggtgatctgatggcagcttcctttgcttgatccagacaagaccgactccactaacacttcctctcctgataaggacactaacttcaccgtcctcttatcacaactaagacttgcttgatatttggttagccaattcatccctaggatgacatatatagttgcatcttggttaatcattactattagatcagcgaggaactcta

SEQ ID NO: 52423 - DNA, 664 bp, Zea Mays
aaaagatgatacatatcaaaagctcagagaagagaatgagagactaaagatgagcttgacacaacttaaagggaagtgcattgctcaaccttctcaagataactgtgatcacatggtgaagaagcttgagacggagacaactgtggcatgcactaaatcccttgaagaaaatgtcaaggacttgaggattgccaagaggagggaacaaaagaagaaaatcaatacctcttctaaaaacctcaaccatgcctccatacaaggtaacatccaaggtaatgatcaagccacacttcacactaagagaagtaaaaagtgtagtgaatgctttaaaaagggacactcgattaggtcatgtccctatccctatattaaaaatggcttgattattaacaaggatgataaactttgttttaaatgctcaaagaagggacacttaattaagtcttgtccccatttaaaacaaaatggcatagtgttagaaaagaaaatattcactaaccatgtagcaagcaagaaacaaggaaagaagaaatcttcaagacttgaagatcgcctttgctacatatgccgaaagaagggacatcaatgcaaggattatcccattggtaactatcccacttctagcttgtcaattatttcacatgtaactgggcaatccagaatt

SEQ ID NO: 52424 - DNA, 1056 bp, Zea Mays
gatgatgagcatgttaaggacgttcatctcgatcctttagctggcccagtagatgccttttgccttctggttcttgatccggaaaaggttaggcagcctttttttcactttcctgttgttgctctcatgtattgtactaccacatatgatgtttatattagagaaaagtgttgtgttcactgtttttattcagaggacaaacctaaaattttggtttagctaccacgaaaaatgaaaacaaacataatcctgcgaaaatgtttagattcagaatttattttgggaattattttaagttccttggttggtgatatgattctgtaatcaggtgtgctgtccgcaagcataaaactgtaacactggggagatagtgtgagaaaatgatgagtttggtgctaaatagcaatggagataggttatggttctttttattgtactcaatccgcccacagttttcaatatacatggcagataatactcagatttaatagcatccccatctcaatttcatatttattttgttccctgctaaatgggcactgccattaagtgccaaaattatcagaaaatcctgtcaaattgcagtaggttactgttgttttttgtgttcagaaaaggtggaaaacgcagttccacttggaaatagttatttcgcggtattcagctaggaataagtacttggttatcaccaactaccagtggtctattagctttatgaattccagaatttgtgcttttattactacttccattgttactgcatccaaaatgcacaaacaattggaaatcaagagtctacctgctgttatctgatacacatgagtttttgtatggttaatcatctaattgccattttattattgtgcttaggttgattatttgaatctgaaaagcaatcaaaggttgatctttacaagaagacaaaaggatgatggatccaatgattggatggcagtaaaagttagtccttaagctgctgcaaaaactttatttgtgagcttctcttggtaactagactatcatgattcttctgtgttttcatatcatttgaaatgt

SEQ ID NO: 52425 - DNA, 349 bp, Zea Mays
ttttataataatccttaatggatgattaggagagtataggtatctagcttcttattattatgttattggagatggataggttagggcaagaatagcctggggtaagaaagtttagggttagaaagaactccttgttgggtggtaatgcctttgaagatcgaatttgacttctctccttccttgttcatgttgatcttttcttcttcggtcttggtttcattgattcgaggtcagtgtgtatcatcagagttgggagaatatggctaagatagatctgttatgtaggtcaagttgttgggtatggccgagttgatctaggtcaccaatttaggcttaagtgaattttgga

SEQ ID NO: 52426 - DNA, 489 bp, Zea Mays
ccggagcgagcaaatattggtccccaaagaaatgggactcaacacgaccaagcaaaaaaggctagtcctaaagaagaggcaaaagtagggatgaacaccactagccagcagataaagccaaatcagagcacaaacccaacacaaaagctgaaatccaagatagttcctccagaaagaagcaaatggctcaacacaactagcaaaagctccaaaatccagtctctctccccttgagaatctctccccactaaaaggactcaacatgctcaaagagtctcccaaagcaaaaatctctcccttgtaaggagtctaggctgaaaagctgaaaaactcaaattctctccccatttgatgataggaacagcggaagctcgaaagacaaaaaatctctcccccttgtttggaggctgaaaaatctcaaagtctatccccctttttaacaagtggactcatcacaaataagggtagaaacttatactcccccaagac

SEQ ID NO: 52427 - DNA, 577 bp, Zea Mays
gaagagttatgcggacaacaggcggagagaactcagatttgaggaaggagacttcgtctacctcaaggtctccccgatgcgcggagtcaaaaggtttcaagtgaaagggaagctagctccgcggtttttcggcccctaccctatcattggcagagtaggacccgcagcataccgccttgaattgctagaattcatgtcagatatccacaatgtgtttcacgtgtcccagctccgcaaatgcctgtaagtaccagaaaatcacatcgaagaagaggcaatccagattcagaaggatcttcagtaccgagaaaagccagtaaagattcttgactcggcagtccgaaagacccgcaactcagaagtgagactctgtaaagttcagtggagcagagaaggagaagaggaagctacctaggagagtgaggactccttgaggagggaatacccttaccttttctcaagccagtctgaatctcgagggcgagattcctttaagtggggtaggtttgtaacatcccaaaatttaaccccaaggttagaaaccctaatcccctaaccccccttgattttttcctcg

SEQ ID NO: 52428 - DNA, 384 bp, Zea Mays
ttttttttgtaaatatgcatcaggagcatgttacattggtacatgcgagagtggactcaaggatgggcatggtatgttttataaaccaagaagtaaaatgccttgtaaccttgaagtgtctaagtgtgtaacagaccacgatgtttcaagtaccctcagcaaaacaatttgtcacaagattcatctagcttactcttggcaactggtgtagaggccaagctagtggaggttgataaagtattggtctatggaagagaatatgtacagggaatacttatctcggagaagccaaaacacaatatagttgttgcctgtgaccgaatggccgaaacacctcatgtcaaaatgaccaaaacattatatgatagaatggcaaaaacactc

SEQ ID NO: 52429 - DNA, 746 bp, Zea Mays
gttacacgttgtccatagggttggcaaaaaaactgatacccattacccgaatctaaactcttggaaccgtatccaatctacccgaacctgaattatccaaacagtggtttagatcctatgcctgaaaacccaaagttatattggataaatcagataacttgttcggatacctgatttacctgaataacttgatttttttgtttgttatttgtgatatataatatatattcatgtgtactgatgactttatgagaactcttcaatgtcctaagttgtggtgtctaatatattatgtttacatatgtggacttgcacaccacaatatgcttgcttcatttactcctagtatttcttgtcattgtccgacgagacacctgaatttgatgatttcgataggtacacatgtaacatgtacatgcaacgacgactaagagtccgttctaactacttcagtgtcaacacgtacattttgcaagcatgagtatctactatctcctgtagttcttgcacatatggtgtaacctcaccctacaacaaacacagaacatggcaggcacaaaacaagattacaaatttcgcacgaggaaaagaaaactatgttgcgtggtagaacttgtcaatgataagagaaaatgcatgcttatggtaaatcagaatgtactctgatcgggtaaatcggggttacttgaacctgaattaccctgaccgtttattctgggtacattatttcatttgatagcagtttt

SEQ ID NO: 52430 - DNA, 807 bp, Zea Mays
gcgaagactaagttaaataaataaataaatgtggatcatgttttaggaaatatatcgatagatgtttatgtgaaaagtgtattgactttatgcatgtgattggtgattgtgatagtcgatgcaaatgagggtatgattagtcctgttggagtcactatgcggtggatgtcttgtgcgtattatggggacacatatgtgcgtgtgtgccgtggtgtattatggtagtggtggcgtaagatatttgtttaaggtgtgcgggtatatgtcgtattatggttatactcgcgacgaagaaagatgtatgtattgtgtaacacgacgtttaagttgctattgtataatcgtgtgaaggatgctcatgatggtcatgtgactaaagggtggagtagtggcgaagcgagaagtaagtttagtatttttaaacggttagctgatagcacctatcggtgtcgtcataatttctgttgtatggcggatcgatgctttgctttgtcaaccactgcattacatgcccatcggataaattaatgtctaattgatcgattagaggtcttatatgagcgttatcgcagcctaataattattggaggcgagtagcgttcataagtcggttcttgttaaaattgaagaacgatccgataagatatgcacataagtactttaggtccttcagtggcaaatgtagtcttatggagttttacgccatgtgtaaatgcctctatgttagaccccaacaatgtgctattttaggtgactggtgtgttaactaatttaggctaagaaatggttaagaaaaactaattaatc

SEQ ID NO: 52431 - DNA, 559 bp, Zea Mays
gagaactcagatttgaggaaggagacttcgtatacctcaaagtctccccgatgcgtggtgtcaaaaggttccaaatgaaaggaaagttagcaccgcgattcgtcggcccctaccccatcattggcagagtgggacccgcagcataccgccttaaattaccagaatccatgtcagatatccacaacgtgtttcatgtgtcccagctccgcaagtgcctgcgagtaccagagaaccacatcgaggcagagacaatccagattcagaaagatctccagtaccgggaaaaagccaataaagattcttgactcagcagtccgaaagacccacaactcagaagtgagactctgtaaagttcagtggagcagagaaggagaagaggaagctacctgggaaagtgaggactctctgaggaaggaatacccttaccttttcacgaaccccgtctgaatctcgagggcgagattcctttaagtggggtaggtttgtaacatcccaaaaaagtcaacccgaggtttggaaccctaatctaacccccctatttatctctccctaatctccc

SEQ ID NO: 52432 - DNA, 573 bp, Zea Mays
tttctatgaattatacaagttctaacatttatttttccactataaatcaatttctgttatgaattatcaaattcttcttatccctggactgcgtgcatgaattctggaaagggcaggggtctctgcgcaagctctctaggatactgtgaatcgtcccagtggaccgcgggttcatttctgtaaagttcagggcttcttttgcaaagttgtcggccgaagtggtatgggctggcctcggtcattcgatcaatggtgggcggtatggattagatccgtagacatcaaacctgtaattctacatgaacccttggattaccaatcaagggccaaaatctgcccatgacaacctccaatctgtcccgttggatttttgatcaatgacatttatctaatcgtgcaaaaagggtactcggtcgtctaatcctgaccgtctgttacgcgatcgacgacacaggttctttcgtctacctcccgatgaaccacagcgacgctggctgcgcacggtgacgaccgcgccggtgagcgccccagccgatcacaatcccccgaatcatggtgcgcaaaacgttgtct

SEQ ID NO: 52433 - DNA, 359 bp, Zea Mays
tttcaaatctccctcataccttaggtataagtaggatttgagatgagtttcataagacttatcttgatttgaagtaccgtccgagagatatataaatcccaataaaactcagaatgtaggaatagcccccctatgtgtgtgcatgatatttctagttgaagatacaacacagttttgatggagatcttcctacagtcatggttatcgaggcatacaagaagtaatatgtaaagtaagcgcaacaaattttaatcactcctcgatcaaccattcacagaacaatttgaactaaattaaatataagattcaacacacatagttcaacccacagaatattacaaatagttgtccataggcat

SEQ ID NO: 52434 - DNA, 741 bp, Zea Mays
aatcagagcgcttttgtgagagggagatcaattcatgataattttatgctggtgcagcagcctatttagtctctacacaagaggaaggttgcgaggctattcttaaaattggatatctccagggcgtttgattcagtgtcatgggccttcattattgaaattcttattcatcttggctttggtccaatttggcgtaatcttatttcctcactaatgttcacgtcttctacgcaagtacttaatggttcgcctggagatcgtatcgctcatcggagaggtcttcggcagggtgatcctctatctcctatgctgtttgtgatggttatggatgtgcttaacagtctgttcagagcagctgaaagcagggggctgttacaaagtttagaggaagctggggttcgtaataggctttcgatctacgctgatgatgtagtgtttttttgttaaacctatggttgaacacctgaattgtgttagattgattttggattgctttggtgaagcaacggggttggtaacaaatttgcgcaaaagttttgctataccaattaggtgtgatgggctgtatttgcaatgcagctcgggatcctttccgtgcagctatctggggctgcctatctctgataagaagctaaaaaaaagggagtttatggtatgggttgataagattgctgaccggctccccaactggaaggctcgtttgctcagtctggctggcaggacagcgttagtgagacacgt

SEQ ID NO: 52435 - DNA, 919 bp, Zea Mays
actgagacgtactgctgatatataaataaaataaacatgcgcaaggtgagctttttgctcatgttctttaatcgaaagcaaatctgaagagcagtgacagcgggttaaagacctaaagtcacggtcgtcagagctttaggagtggccagtacgattagactatgaaatcctgcctgattgcattgggggtttgggcccggcgcgagttcttttcagccgagccgacagttgtatctttacgcgatctgcagggatcagatttaatcgaaagcttgcttgcttcccagctttccagtcctcgcatgaacagcttgacagcttgtgttgccaatcagcgcaggagaaagggctgacctgacctgacctgatctaacctaacacggctactactgtgttcagggcaggacggcgagagtgcttaggaacagtttgcccgaaagatcctctcttgaactgagtagtagtagtttggcttaagctcccgcgttccagatgaagtgatcaagatgttgatgtcccttgtgcctttagaactggatcaagtgaccaaccctagcagttttcatgttctttctgcctttaaaccatgcccatgctttgtttacttttactgtcttctgagaaagctgtttactttaaccactcacccgttgctttaacacagcgcgtacgtatgggaactagcacgtactgtcatcaaaggctcacctgctccccccagaaacactgtcaatatctactcgatcctagctgattgacggtttgctttcacatttttctgctgtgctccttctcaggaaccggtaccattgctaaagactaaagatggacagtctaaataaacacatcacagcacttccgttacagagagaacgaaaagaaccgcttaaaacagcaccagtaagagcatctccaagag

SEQ ID NO: 52436 - DNA, 703 bp, Zea Mays
atttgacacacgcagcatcaagcgatcagagagctataaatgtgttagccatgcatagaaatccatgggccctcttgatcatggcacatgagagtcttgttaggttagtatggcctaggatgatttagctcaaagcaactagggttggggccaacttggtctgagtgagtgggttagttctcgcgtggatcaatttaaggttggagggcgacctgcacaagataactatttctatgtttgcttgaggcgaccgagatcatggtcgaactagtaaggatgactaggtcaatgccgctcgaggcgacctgggttggtattagacttggtcggggtgaccgtggttggggccactcgaggcaactaaggtcggggcaactaggtcggggttgctatgatcaggtcgacttcttagggatgacaaggtcggagccaacttggtcaggactgatttgattggggtgaccaggtaagggacgacttggttggaatgaccatatcatggctgactagactatctttggtctggatcaagttttgtgctagttatttgtgagcttttgggctgtcttgaggtacctttggtatgggcacacgtcatcactactcacttatgttagtagtttgctaatatggtagttacttatgttagtagtttgctagagttgtagttgtagttgtaactacttttgtcacttgttttttt

SEQ ID NO: 52437 - DNA, 430 bp, Zea Mays
gaacagtatccacctgacacagcaaatcagattacctcagcaagaaacgatgaaccgagaaattctcccatacctgccgaggcgtagagtcacgaccagggtgtagcagcaagatgtgacttgccacttcagcagggtgtaccagcaatatgtgatggtgtagcggcaagatgtgacttgccgcttcagggtgcacccatgtatgaccagagcgctacaatacatgaacatgacgctacaggaagatgtgaccagggcgctacagcaagatttgggagatcaccctgtcaaagcacacctaaaacgtgcacaggtgcacctctagttcctcttgacttctctgtagacgcaacctctgcaggatcttccgcaccggctggatcacgtgcagcagatcaaggagaagattagggtcaatctcaccagcaag

SEQ ID NO: 52438 - DNA, 300 bp, Zea Mays
gacctagttctatggcaggaacaaccccttcacttagctttagcacatcggtcgtctcaatacacctcggtcggcgtgtcaaaactttaaccttcttcgacctcgacacactagaaggtgttgaggtagcagctttccttttcttcccttgctttcgcgtgggatagcagtaatcggggtagacaaacctgataacatcaaaaacctattcagcctcttttttcctcgagcgccgaaggcgactgtcatagcttcatcttcagcccttgagtaggctccaagtagctcatcacttgttgc

SEQ ID NO: 52439 - DNA, 485 bp, Zea Mays
gtcttttccaaaataatcttttggtttcatatctagtgcacgttaaagaaagtctatgaaattctgctcgccttcctgcttatagttagcacggatggagcctcaccgcctcttgagcgatcatacatcgagctgcttaaaggtacttgtgtaccacctagactattttctctacatgttcctaaagtaatccttgcagcgtttacacatatttgcctgtagagacttacaaagatcgctcatactatggtggcccatcggacgagtgcccacattgtggcgccgttttctggtttcaagaacaggtcaaacgtgtgtctgctgttgcgcagcgcaggcttgtgtacaacctttgttgcagaggaggcaagattgttttggagccttacaaatgtccaccggcgcccttatgtgacctgctgcgattcgatggtgatagtcgtgccagaaggttccttaggcaaattcgctcatacaattccctt

SEQ ID NO: 52440 - DNA, 963 bp, Zea Mays
actactttcaccgctagcgatgaactgccgacagtttttccgagtcaaaagaacttcatcttcttcctcctcgtcgtccacattagcaacacaggcagcacccccattgggatcagcaacagatggagcacccacattgggatcagcaacagattgggtacacccattagggtcagcgtcagtaaattcagtcacaggcacttcttcagcagcaggaaccgaggtaccagcgtcccgatccaaactggatactcgccggaggcgtctctttttctttttctgctcatcagcagaaggatcaggttgactggctcggcaagggcgcctcgggcgagtactggcaggcttctgagtatccaaagttgtatcagcctttgggaggggcaccactaccaatgcgccagcaggagcagcatcagaagagtcctcagccagcaaatcaagcatagcgcttatctctgcatcactagggttcaggggcacctcaaaaatggacctgccgttcatcatcaggaatctccccgagcgaggcaaccaaggcactaacttcttaagcagagggccacactctaaggcccaaactaccatcagtgacaggaggattcaacacaaaaagagtgaaggctttgggaggaggcaagttccaggctgagaatgctactggggcaccaacatttgacactttgcctctaaggatcatctcaagtcggttcaccaagtccatagagggaattcttctgttagtaacccgagttgagtcggctaggcctcgatacagataagccgggtatgccctgtctttcaatggctgaatattcttgaagacaaaatcagcaaccacagcttcagcagtcagacccctctccttcagcaatccaacttcagccagcaaagcacctgcctcggctacctcctgatctgtgggggactcggtccagcttggggtgcgaacatccggctgtc

SEQ ID NO: 52441 - DNA, 411 bp, Zea Mays
ggagaaacctaaggacttggaggtcggagtcaaggcttagcgtaggactccaggtccgtagtctttaggaccactcccacataagagacctagaagccttcccaccctctctcgcctgcttgtaacccgcttgtaacccctactacgagcatcgagcaacagaggtgtcggtagtgcgagccaccgaagactggatgtagtggcgttatgcccaaaccactataaacattgcgccaaccgaacacaccatccggagccctaaacgcgcacatagaaatttacttctcggagcggaggttcgaaacatcaacagttggcacgctaggtagggggcttgcgcattctcgacgaacattcaatgctccaaatggccagtcgcgatgccgtttggatccctgcgcgacgattcgc

SEQ ID NO: 52442 - DNA, 728 bp, Zea Mays
tgccactaaatcatgcatcatgccgaactctattttgtgtgcattttgtgacaatatgaaaataatgtaaaaagaaaatatgttaatacccaaattagaatttaaatcctaaaatagattctagaaataagaaaagtaaagaaatgagcaaatactacataaaataaaataaaaataagaatgaatacctttcacactgatattttcaaattgtacctttaactgaaaacaagttcaccaccaatttgaattttaaattgagaataaaaaaatgagaagaaaaggaaatggagaataaaagaaaagaaaaagacccacgaattgggctgaaatcaacaaattcggcccaactccgcccgcacacaccctgcagctctcgctgacgcacgggcccggtcgtcagccttcctccaagcgccgattcgttcgttgactggtgggccgccactgtcagccatcttcttcctgaaaacaccgtaccagaacccgcttgccaagcgcgcggaatccgcgtgggattcgccctcatcgctgctgcatctggtgtcagcaggcgtactacctcgagtcactgtcgggtgagccccactcgtcaggttcacctttccccaatgccgccgtcgcaacggaatgccgacccatcgccctggattctagcaccccacctgcgtcgtgctttccgtggccgttgcagccattgaccgaaatccccacctcggcctcgtccc

SEQ ID NO: 52443 - DNA, 866 bp, Zea Mays
gatcgggtagttctagttgatatgcaacttctcccactcgctttaagatcaagaaaggtccaatgaagcgaggggacaactttcctttaaccttaaatcttctcataccccggattggtgacaccttcaaatagacatgatcaccttccttaaactctagcagtcttctccgggtatcagcatagcttttctgccttgaccgtgcagttctcaaattatcccttatttgatggacttgatcctcttcctcttgtataatttctggtccaaagaactgcctttcaccagtttgatcccaatacagtggagtcctgcactttctgccatatagagcctcaaacggggatatcttcaaactggcttggtagctattattgtaagagaactccgcatatggtaaactcttatcccaactaccaccatgtttaagggcacaagctcttaacatatcttctagtacttggttggttctctcggtctgcccatcagtttgaggatggtaagccgaactaaaatccaatcatgtatccaagcactcgtgcaacttcttccaataccgagaagtaaaatgtgatccccggtctgacacaatcttcttaggcacaccatgtaagcatacaatctgtgccatgtacaactctgctagcttggctcctaaatacgtggtcttcactggaataaagtgggctactttagttagcctgtccacaatgacccatatagagtcatacccagcagatgtgcgaggtagtccaacaatgaaatccatgcaaatctcttcctatttccactcaggtatcttaagcgggtgtagtaaaccagcaggtctttgatgttccgctttcaccctctcgcaaacatcacat

SEQ ID NO: 52444 - DNA, 410 bp, Zea Mays
ccagaattgagagatttaggcaagatcaacatccgatacttgtgaatgggttattggagataaccagataacgaggcagatcaataggggatcccgagattcggatgataaagccaacatgattcacgagaaaaaggattaccagatccaggcaaaaggagataaaggcaaataggatcagctaggatgattaacagaaatgctatgaagttttaagagcaaggatttatggaaagaaacatggtcttgatagggtttgcgcaactagacaccaaacgacttttttttgacacaacaagtgcacaaggagacttgggtcggtctagcggtcaagctgtggggttctctaagctgtgcaggtgtaactttatgggtaaaacacacaagggctagaaacaccaaaacaagca

SEQ ID NO: 52445 - DNA, 1232 bp, Zea Mays
gattgaatgacaatgaccctttctcttcctgaaaggaacatactattttaagaagacatttgaaaatagataaaatatgcaatctgattttggagaaaatatgcattatatatcaggattaacataagagagggcccgccacaaatattttcatgctttctgagcagttttgtcaggaaaaaaggttatacatgtatattgggacatttagaatttgatgagaatgaagttgatcagaccttgtataacgatcatttgtttacattatgaaaggaatcatacttgtttaccaccattgacaagtccaagtgcaaaagacgctgcaactagagctctagaggggttaggtgggtcagggaactagattcaataatctgggaatgaactgaaacatagacaagaagaatggacaacacaaggtaccccacattgatcaaaacttgaggattgaagcaagatgccgcgaactcacaaccaaaaatgtacttgtcaatgtccagcaatgagaccactcaatttaatactattattaagtatctaggatccgccaaacaaacatggcagggctcacacctagatgtgcacatggaagcctgaggtgatggtcattatccctgagtgatcagtttcattatccctgagtgatcagtttcattgagtaaacatagagctatcagtttccagcctctcatgactgaataagaaaggcgttacatttttttctgttttccagtccatgaataaatctgcctgagttttgaactaagaaatgttatccccgttcatttgtaggtggtaccagtattttaaactaagaaaaatgttatctctattccacccacatgaacacgggacaaactgatgccattcctaacccatgcctgtgaaggatctagataactttgcctagtatccaggtggctacaaatggcactgacgacatttcaaatgaacgcaacattgtagatttccacagcaagctacagaatgagcatagattgctacctaggacaagacaacaatctaaataagaacggcactcccaaaatcctagtagcagcattcactcttgacacggttgagcatttcaaggcagcacagaaacatccatggaagcacaacatggactgggtccccgactcccccatggagactgaacagatcggagccacggcaagacgaacaacaatggcgaaagtctctaaggggcagcatggtttcgtgaagagatg

SEQ ID NO: 52446 - DNA, 505 bp, Zea Mays
acatgggtagctgaggcgaacagggagcagggtgccgcagccacggtgctgaggaagaagcgtcgggaggctgagcgtgatagagggagagggcacgcaggcacaacacccatggcgaggaggaatacggtcgagtacagaggggcgcgctgggaagtagaggctggcaaaggacaccacgacatggggaatatgcgaccagtgcagagaaatggaggagacgtgtgaaaaatatcctagagcaagagcggttggagtcttggagaccttcaagggagccaacatgtggatttccaggggtcatgcacatgctagaaagcaggaggtggcatggatcaggaatacgagaccattccaggaaatgtacgctcaagagatgaagatggctaatgctccacgggaaagaaataaagaacgaggagatgaggacggctgaaaaatctgagaagatatttttctttttttttctaacacaagaatacacttacgagaaaatatctggttc

SEQ ID NO: 52447 - DNA, 674 bp, Zea Mays
tgagtttagtataaatccatcggtgtcactagtgttaagttgaggtttatttgcgcgtggaaagtaataatgtgtttaatacttagaacacttagtcgatggtagaaattgttttggcttaaatagtgaggtggtgacatgtcaaggtagtcatcactttctctataattataagtcgagccaatacaccttatgcgtttattgaatttcacatcacgcatagtgtacggtggtgctcattacttcgaatagatgttttcgagtggacaagtaggtttggaatgcaagatgtgtgatgaagttagtttgttttaggatatttgttgaaatgctccattcatgtgatagacatgtgtggttaattcaaatcgagtcgaggtgtgtgacgatgatattcatgaattaagtagatgtcctgaaattgtgtagtgaaacttaggttaagttgcaagcgatgtgagaatgttttggtaaagatgtatgtgaattgtgaacgagtcattcaatgtattaggcatgtcgtgtcgtggtggtataaaaaaatgggttagaaatcgatcggctaaatgccaaattcggttagagttgtttgtttcttaggagtgtgtggtgaagtgatggcatgactacgtagtcgtcacgtcatctattgtgtgactatacttaagtgtgtc

SEQ ID NO: 52448 - DNA, 802 bp, Zea Mays
ttcctaacaactcatggaagatcagattcatagccctctaataagtagcaccagcatttttaagaccgaatgtcatgacaacccattcaaataaaccaatgaagcctggacatataaaggccgttttagatgcatcctcttcggccatgaaaatctggttatatccagcattaccatcaagaaagctaataattttatttcctgatgcgttattgattaatgtgtcggctatgggcataggatattcatatttaggagttgctctatttaaattgcgaaaacaatgcataccctaagcttacctgactccttcttctctaccggcacaatattggagacccactctgcgtatctgcaaggtctaataaaattagcttctagcagctggtggatttcgtccttgatttgtgggagaagatctagacgaaaggttctagctttctgcttgaaaggtctgaaaccggacttaataggcagccgatgttcgacaatctctcggcttagtccaggcatctcagtgtaattccaagcaaaacaatctgaatattccttcaatagaccgatcatctcatttctaggatcggtctctagggtcttatttacaaaagtcggccttggagtgttaccatctcctatgtcaatctcctccaaaggatcggccgatgtaaatccctgtcctagtttatcaagatctctgaattcctctatcatgtcccccacagaggaatcagatggtctttgtgtgatggcggactttccggtcacggggaccggatcatccgtaatactgtcttatcgctgc

SEQ ID NO: 52449 - DNA, 1842 bp, Zea Mays
ctttataagttcccttcctgaattatgtctggaaaattaatctgcaggagcattgaaggcaatgagttctatgggccaatccctcctgaaattgggtatttaattagaatggaaaagctgtgagtgtattttcttaagattcacacacaaagaatacatgagtattgatcgatgcagtttctgatgactaacattttcatcctgtaactcagaatattatcaaccaatgagttcactggaccccttccagctgctctttcgctattcagtaatttaactgatttgtaagactactccatctatattcttttcccacttcgcttcatttttgaagagtcttttggtaatttttaactattgatactggtaacaggaggatttctagcaccaatttttccggaaggatacctgatttttggggaaacttgaaaaggcttgacaaattgtgagacggtgaatttatgacaaaacacatctcatgaccacagaaatcacatgcttataccttctttatgtaatgtaaaatgtgtaactcttcttggtgcaggcaaatagaaggatctttcttagaagggccaattccctcgagcctatctgaattgaaaaacctttctgatctgtatgtcagcaaaaatgtttgaaactattgttctcatgatttgacatatataatgatattcactcaccggacataagcccttacagctccaccataaaaaagatatgattaatttccactaattcctagtgtttccgtgtgaaacaggaggattagtgacctgagaggtagtggttcatctttccctgatttaagtggaatgacatacatgaacaaattgtaagttcgtaatttactgaatttcaagcttgccatatgctggctctcatatctcatatgatacaaaattactcaaatgtagggtactaaggaactgttccatcagtggaagcatacccccatacattggcacatggacatctcttaagcatctgtaataaatcacaatttatctaagtgctaaaatgtttttataattaacatattttgttataacattgtttattcagggatctcagctttaataaactgagtggagaaataccaccttcttttgctagcatgggagctgtagattacatgtaagtagtgacatttccataaaaatgaaataaacatgacatttcattgtgctcctttcttaaatgtgcatctaccaaaattgcctgcagatatctatctggaaattcactcaccgggaacatacctggatggttattaagaagaaacaagatcgcgtgagtattaagccacttccacactctgaggcttcaacgctgaatcaagaacccatatctcttataaatagataggtcaatgagccgatacctacagacatccacgaataataccacatagctttatttaccaggacgttttaaagctatcataaaagttaaggaagtatagcttcaactttctaagatgttggtgtgttaatagaatgtcaattgctggattaatgatcttcagaaaactgataaaatatttctatttagaaatgcatccatgacacatgtcatgattgaaatagcattgaaccagttgagttttcttcctatgtccactcttgtttacctggtgactgcaaagagagaaaaaaatgttcaatacctgtatgtacatgtaactaagtattacgaagctaaacaagtcaagctttcaatagaatccaataacagaaaataatcacatgcagggacatatcttttaataacttcacgatggggagttcaggtccgagccaatgccttcaagggagtgtgtaagaaagctttaccatg

SEQ ID NO: 52450 - DNA, 684 bp, Zea Mays
cgatcagggtttagccgggattgtttagccacaggcacgcacatactcccaagcgaattgattggccacgctacgtggatgcctagtctcaattgacagccggaaagtgacacgtttatcttttacggatactctacctcgctcgcagatctttttgcttcccttctttttttttttacctgcgtcttggaccccattcagcggaggcactgggcagtggatccaccaagtcacactcaccggtgctagtacaagaaaatttcgccagccatttcacccgggggggctccaggtactgtacgtactcaagtcacctcatccttccccactgcagctcagctctacaactcgacctctctggtttttcttttgggatgaacaggtgacgtcacggacgcactaaagccaaagcgcacgataacgggttacagtaatatggcgcccggtaatttccatttggattctcgttcaccagatccagagatgggcatgtggtcaggtccgccaacgtccaagtcaccgagtggcaggaactgggagtgaaaggagaaaaagacaagacgtgacgtgatgtattgtccgtggcagactcccatgctgctccagccagcacaccatttttttctctagtccatggttttcgcgaatccatgatcgtcctatccccgtcgccttccgcagcag

SEQ ID NO: 52451 - DNA, 526 bp, Zea Mays
aaaggacgtagctccgtgtaaaaagaagtgaaaaagacacatctcccgtctgcggcgagcaaggcatgcgtatttgtttttttgaaactactctgtatatatatatttttttgggagagacttgtggtcgataaattgcaggatgactgaatgtctcctatgcagttagcaaaagctgaaaggactttatagccatttcagttaggcttgttaatgggttgggacgttgggttaaaatagatttaggactagtttggaaactcaaatccccttgagaattggaggagacgaagaaaattctatctccatcaaactcgaagggaatttgaattttcaaactagcctttaatgggttgtgttatcgggcggtacactttggaaggagaaaatgtgttgatttatgggtggcgtgggtttgattgggtttaatagaaaattgagttggatggggtcgaaatgtggctgtttcttatttgtttgaatgcgctgaaccatgtgttgatgttggatttttaatatactatag

SEQ ID NO: 52452 - DNA, 581 bp, Zea Mays
ggtcgtcttcaacacttcattaatctcctctaccttccacctccagccaccacttctagaattcactatgccctttcctcacccccttcatcatcacctccatattcgccatagtagcttgcatcatctccatgtgtcgatgagtctcacagctgccttcttctatcttggtaattagttgcgccatcggattttcaatccatggtggcgccatggccccaaccttcgcctggaacttggtgaggtgctcgtgagacagatctagcctagcttcgataccaaatgttagcacatgtgagtatcaactcaaccacattcgtcgccaacgatctctatcgccgctaactgtattctgttttctcgctccgattcattccccctttcccctccccacgataacacatatatcttccttacaaggaatagtggacccaactcatagctgccactctcggtcgcactagcctattactccttctgggccccttttgaacaatcattgttgccacgttgtctatcgcattcgtcgttcttcctgtggttgcgactagtccctcttgtacaacctctaggttgctgac

SEQ ID NO: 52453 - DNA, 628 bp, Zea Mays
gacaaattcaagattgcaaaagaatgtggatgagcttcgtgaatccaaggagagatgttatgaaaaatccttggattgcgccaagaaactgaaagacagttttgcaaaggtgggtgcatactcattggagcaaaaatttattctaggcaatcccgaaggagtcattcaatggattgatgaagaagctgaagcttttgaagaaatacttagcgactgcggggatttttgtgccttcgccggtgcccgaggggttgcagcagttttggacgaaactggctgtgaacacgttaaagctacagctcaagaagaagtcatcttctccacagatgatacaaaggaaccttcggctgaagctactctgatgggcgagaaattttattccgatatttggatgaagggcggccgtgagatagccgacgaagcaataaagaaaagtgaaaaagaatcccatgatgctcaagtagaggcaaagaaagctgaagaagctcctgatcgtgcattgattataggtacctttatttaacgcccttttgctttattattcgtttctagcttcgaactctaatcatcatataccttggtacagccagcctttcgccaccactagagccattcaatcctgaggctg

SEQ ID NO: 52454 - DNA, 696 bp, Zea Mays
cagacccactttggcactcaaacaacttcaaatcctgaccatagctgcacttgggacttgcacagagttgatagaacataacatggtgaagagaccttacacaaggactttggccgagataaccatgtttgggccgactaatgaacgtttgaacacaggcagaagcaacgcccacatgttcgcacggtgaccctggtagctcagtgaagcttcacaacccattccatggacttgtactccgctaccacggcgtgccaccgctcgtcggagtatgcacctccaggggagaatgtggccagcccactttagaccatcgtcggccaattcctcctacccatagcaccaccgtgacctagtgaagctccccagctactcaattgaagctctaccatcgccaatgagccaaatcgctcaccgttgttgagctctgtcgcatgtgcacatgatctgagcgacttcgactacctctggtcatgacccgaccatcgacgtgacccttgcgacatccccgaccacgttgaccactctccaagaaccctaccaccgtcagtaagccgcatcgccctaaacatgccgccagtcaatgttctaagaagaggaggaccgcgggttagaaaggagaaaagaacatgggttatgcacaaagtaataacctcaaatgaataatactgcaagggtatatttgaaagggaaaat

SEQ ID NO: 52455 - DNA, 910 bp, Zea Mays
aagaagcgcactcgccggtgacagagatgtcagaagaaggtcctgggtggaggtcaggatgttcatggctcctctagtcgcgcttcgcctctaccatcatcttccttcccctcttgtgagaatcttcgggctcaaggatggttgatcgggctgaagatgaccttcgtcatgcgctgatcgtaaccgttcttggccaggacagttttgacttcgtcgcgaaggtccgggatgcactcgcctcaaggcttggccttgaagctgatgtgctccaactccagcgtgctgcgtccaactctttcctggtcttcttcccctctgaggatcatgtcgttcgtgcctacaatggaggaaaatctcttttcattcctccttttcggttgcaccttaaaaggtggcgtcgttaggagttggccgctggcggtggagtcctgccggtgctcctcgacgttgagcttagtgggcttcctgcgcatctttggggaattcatacggtggagcatcttctctgtgcgcactgcttaattcaagttctacacccagattcggtggatgggctggacatgtctatattgaagctgagggcatggagtttctctctggtgtgtctgtcttctgtcttggatctccatgttgaagagtcgtcggttattacagaggatggatcatgtctccctcacactttggtttaccgtgtatcaatgaaggttggaggttcagatgacttgcgggttcatatccaacccccgccttcttcaccggatgatgatgacgaagatcgcgatctgaagcaccacaagcagcgaccgcgtttgtaggactgttagccttcctctgttcgaaccttggtgcttgatcgactgggacctcattttgcttcgtcttcggtggtgggaggaccagtagatgtcgt

SEQ ID NO: 52456 - DNA, 1019 bp, Zea Mays
actatttatttaaaggtcaggattatgcatgtaaataacatgacctaatcgtgatgattcttaagggagggtggatggtgggttgaattgtatacgtacaacgaccagagcaaacaaatcggtcataaagattcactcgactagttggaagaggctcgaaacatagcgttgttgcattccatcaggtatcagaagtcactgcggctctaccatgcacgacaaatccgatcacgaggcttccaagttggtgacatggtgcttcggctatgacaagacaatcgagggcttcacaagctcagccctccatgggaaggaccattcatcatcactgaggtgttgaagccaggaacttacaagttgtccaacagccaaggcgaaatctacctttaccgcccacgacgatgatcagggcacgaatacggggcactgttccccactccgaccaccgtttcaaccacccagagcgtggctagatgtaacgtctaatcccggcctcaacctcagaagaaatcttcgccttgctcgagtccggcctcggccaagcgccctagcaagggagcatgcacattaaataccagctactctcccacaaacctcgtagaagaccatgccaagcactgtttcaaccactccgactcaatgcacttggaaaatgtctcatccgcaccctgtataggctagggctcggacgtctgcccatgctcctgaacccagccttagctctctacctagttaaaggaacatgctatagggattgggcgtccttctcctgactaaaggacgacacaaggacgagggtcatcccgccgaccatgttgcagggctcagacacatttcctctgaccataacaacaacataacaacccttgtactcctgggcctcctccttgcaactataaaaggaggagcctagggccttctaggggggaattcaccgcccacgactcacctcactcctgatattggcactcgcctcaatcatactcaaagacttgggattcactctgtcttttctcgac

SEQ ID NO: 52457 - DNA, 457 bp, Zea Mays
ctcgtcctcgagttggaactgcgggtatgtctagcggaaggagtccagatcttcctaggtggccgcagagcttggcagggactcccactggttgaggatttgtcgaataccgtgagccaatctgatcttcagggctttcgctggttgtgggtgaactgcaccatgatgaattggtggtagtggcgatggggctgttggccgacatggaacacatcatgtagtcgtgcaccctctgaaagttcgaggtggtaggctacttcgtttactacaactgccaccttatatggcccatattagcggggtcggagattgccgcgtgctgttgtctgcagggatgctggggataggtggcggaccctgagccacgcccaatcgcttggagaaaaggataactccctgtgactacggttgtaagtgcgtttggcgactgtctgagcttgctctgataccacttctg

SEQ ID NO: 52458 - DNA, 1877 bp, Zea Mays
gtgagatttcaagaatcaaattgtacactttctcaaggcttcagctccaatatgtcttgtaaattcagtgtattaacgatacataaaggattggattttgtgttttgaatccttcgtggcagctttgtttttggaacaacgctgggcagtacctctactccttaaggactacaccaacgaggtaattattgctattagtcgtctgcacatcatgtcttgcttattttttttatttttttacagctttctttttcccctggttttgttttattacatgtgctttatgatccgtatttatacctatgtacatagacaaataggccattttatagccaatctaagtaaatataactgcacatgtgtatgcacacgcacagaaaaataaatatgtacagagagggagggattagcctatatctgatctatcaggtgtaggcttgtagcaacactagcttgcacatatatgtatatatgctacaaatgtataactcataaactctaaaaaaatgcaggttcacaactcagactacaaagtcattccagttctctctgttctaacaaattatggaacacataattatgcacaagaattgcttacgcaagatgatgcatttagccttccaagtacacaagattctccagcaatatcgtttggtatatattctccacgtgcaccaatcaaaaaactggagtaagcacgtcctatctaatattaactgcaactatttattggcatctgtgttatacaacctgatcatatttatcttttagcgacgcgacaaactcgcatattcccacatgctacgcgatactgaggtgactttgatacaacaacaaatttagcttcttcgtattttacggaatacataactgtgtgatattgctgctaagacagagattggaacctattctccctttatacatgttaaaaaaaagcttccatcatctgactgtttatatcagcttgatcacaggatcatgaactctgcacgtcaacatgacaaggacagactgccctcgccaccctaagtatgtccttatgcaacaagcagccctaaaaaggagtatacaaattaaaaagataatggacaatgtttttcattcatttttttatgcatacacatacaaacacaaatttgaactccaacttaaaattcatactgatattgtaaaacatgtgcaggatcaggactagccaacttcgcatactctaatctgattctatataatctggtgaccatggcagttatattatatcgtaagttgcaccgaggtatattgttctatacatcttaacaccaatatagtatacataatattcatgatagctgctcttcaacatcactcaaattcacatagaacacaaacaaacaaaaatgcaaaaactactttattctcccttgtaaatatcatacaacaacaccatttacagtattgattaaacattataaacacaattgatgtttccttgtcttcacaggcttgcaaaggtcgtccacgttgctagaacgagtttgcttttgtgtatagaggaccaaactgataaaggccatccaatttcgtatatgtttctaccacccatatcagtaagctctatcttatgtttaatggagactatgtgtcttatcgtgtaagtttgctctacaactaaactgtaacggtgatagtcatcatggtagactcatcttaggtttgtactgtgatgtatactataatatttatctgcttcacaaccaatattgtcactttaaacaggtatttaccatgctaatatccaacacattaatgttctatgaacaattcaatgtactatttaccacgcgcgcctatgggcgcgcccaatacactagtgtattacagatggaaacagattctct

SEQ ID NO: 52459 - DNA, 559 bp, Zea Mays
cgaacaatgccctcgaagaaggcgttggcgaccgaggctgccgtatacgggtggctgagggcgatgaaatgcatatacttggagaagcggtcgacgatggtaagaataatggatttttcatggaccttagggaggcccttgatgaagtttatggagatgtcgacccacacctaagacgacatgtcgagcggctgaaggaaactggtcgactgcaaggtcgacgtcttgttgcattgggcatgtgacgcacgtacgaacatagttttggatgagtgcctggtcgtaggggatttagacattcgtgtgcagtcgttagaggggcaactccatagaatccctggtggtgttgtcacagagcgagagcgtgtccgcctccgagttgaggcaactagggcggtacttgatccgggaatcgaagccaaacttgtcgatccacaggcgctggggaacaatcgacaatcgttggtccaaaaggaacttgaggatatagtggttgatgccaacgatgaagcagcgaccctagaggtacgactgccaatgctgcacaacttgaacctgg

SEQ ID NO: 52460 - DNA, 289 bp, Zea Mays
agctaggagccagaagaggaaggctactagcccaacacctcaggaggaggagctagatcaggagatcagggatttggaggctatccaccagcagatacaaagaaaaagggaaaagatgcttcggctcaccgaccttcagagaaagatcgatgaagctgctgaagaaatgtgtcaccttacccaggatgaccaagaccgaaggccccaacatagggagcttcatcaagaaagcccaattaatgatgatgaatggtatgatgactttcatcatggcaattttgcttttgat

SEQ ID NO: 52461 - DNA, 300 bp, Zea Mays
tgctgagtgtcagtggagtggcaggtgctctatctgcaactaggatcacaaggatgtggtgtgtaggaggaatccaaatgggaaacttaaatgggagccagtgacttcttcctcttcgcagggcactatcaacatgatggcaaccactgagcaacaattttctataccgccccctcagtagcagttttatatgcccgggactcctcagtacttgcctatgccaggttttcctcagtacttggccgcgcctactcctgcaccgaccgctcctttaccacctcagtttggagctcctcgtct

SEQ ID NO: 52462 - DNA, 544 bp, Zea Mays
agagcagagcaaacacgagacacggggatttatcttgtggttcgaccaagcctgaaatgtttgcttacatccatgttgaagttagccaatccttggcttggagtatctcactccatcctctagttgctcagatctgtcaaggtgacagacagaggattccactatgtcgatgagtcggttacaatagagccgtggctgttctcgacaacactccactctgacagagtaacaccttcttgctcaagatcttgctcgttgtatcttctcgtagcacttctctctatattggcttataattgcgtcactacaaaatctagagagaaatacacaagagagggagatagaattgatccacaatgagtctctactttcttgatgtagagttgtccttctttgggtcatggaggggctattatagccacaagcctcccatagccgttggaaaacaaaaggggaaactattctgcattgggggcaccggatcggatccacatgtcctcgacctgggatctgatggaccgctttcctttactgactggtaccg

SEQ ID NO: 52463 - DNA, 457 bp, Zea Mays
aaacgtagtcctaaaatggcaatcggctgataacggtcgtccccgcaggtgtgccgcgccgacctatttgtagctagaggagcacctgcacgcgtgcccgtacggccagttggccacacatctgtctgacagatcgtgatgggcaggggaccaagcaagcagcattaagaaatttaaacaaggcatcgatgcattaccagctagtgtgcgcgcgccatttaattaacatatcggcagggaatgctatggcgtaatatatatgcgtttgtacatatatatcaaccaaaggccaagcacttagctcagtagatcgggagagaaccttatcttaccagctgctaaccacgggttagttaaattaaagtaacacccggcccaacccgtctattcttctttacatcctatcctaccatgtggaccgctgcactatgtatattggattcataacagtttcgtt

SEQ ID NO: 52464 - DNA, 446 bp, Zea Mays
gggcatcagcgtcggagccggtagccgtcaccggatccggtgtcgctgtggatctagggttccgcaggtgggtcggtggcggtggagaagaccgcaacatgcgctttcctggaggacaccttcggccggatcttgaatgtcagcgaagatgaagaaggcttagacgatgtagcttgtctatggacgtatcactctcgaagctcgacggatttgttggtcggcgtcatcggcgtaaagctaaagcaattgtagctgcgtcgaagaagcctcgcttcagtgaaaggtacgacatcttctgaaacccttcatttccccattcttgatctatactttcatagtgttgtaaaggttgattccggtgacgtgggtggtaggtgatagctgggtctttgtttcagaatcactaaatgtatgatttggttgtatgaacgagttgatttgccatt

SEQ ID NO: 52465 - DNA, 1166 bp, Zea Mays
taagtctgaattgcagtgtaattggctcaactttggggccttgtaacttccaaaccataagggttttgccctagatcaccacatcaagtttgtagagctatcataggagaacaagtttacataagcaactaaccactggtgctgaatgaaaactaaggataaatgagtctgaagttggactgtcagactgcttggagtctgaaattcagactaacagtggaatgacatgaagttagggctcgaattcaatcatgatccagtgggaatttgactaggaatgctataacaaagatgaagatggtttgtagggctacaactttgctgcagagcattggttgtgttaccatggaaaattgggaggaaattggactcaaagttgatatgttaggagctctgaatcgcagttccgatggtacagtgtcccgatcaggtcgccagctctgtccctcgccgccgacgtgccgcacgcggattcgtgctttcaccgccgtgattcatgctcggatcggttggatagcgcttggggttgagtaaatatcatcgccgtggatatactccggccactaaactactccgaccactgtaccgagctagtcatagatgcttcggatgtgttcgccggagatagccgcttcacggccttgcgccacgtgcgtgggcacatttaccgcatcgccgtgactcgcttaagtcatccgatcatcgccggggagcccgccacggtattctccacgaatccactacgccagtgacctcccattcctccgatcgccacgcatctcaatccaatttcaccggccaccgctcttgcctgctataaattgagcctgtcgtgagctctacagggtaatcacgcatctaagccgccaagtcttgtcttcaattgtccactaacgcccgtgaattgctccaccgcgaaagagacctcaccgtggtcagtttgctctaggttagttcaagctccttggacgattgttctagcctccttaagaccccctaatgctgttcgacccctttgattgaactagaccactctggattaccgtgaacgcccgtgttcatccttggtccacgctgtctccgtggacaggatgatttagattcgtagtcgtgaaattgagtggggggaaatgatcggcgagtcttgaatttggtttctgccaaag

SEQ ID NO: 52466 - DNA, 928 bp, Zea Mays
gtaaactgcatagatataattgtggaaaataaagagtttagacgaatcctcaatttttttacaatgtctcaaaagttgacactccctactaatcctcacaagagaatcattgggtgtcacttccccttggttcgctcatggagcaattgctctttacgagctatgttttcgtcgctcccacatggtgaaccactcacgaccgtgtacatgtcctcagctaagttatccacaacctattcgagtgatcattacacttcgatcaccaccaaaccatctaggtgatgtcgatcactaagagtaataagcgcaaactcttacttgactctcttaagaccaatgagaacaataagtgcatactaatcgcatcactattgtttaataatgaggtcgctaatcttatggaattggactctccctcactaagcaatggctccttatctcacaatatatgggttactttggctattaaatggggcaagagcacttgtgttggtcagttggtggattatttatagcatccaatttaccaactagttggtaaattaagctgatttcgtgatcgctgcactatttgatggccatcattagaccataccatagggtctgtcgagacacaatgctaactgttgtactactgtgtcagaactagtcgtttgaaactcaatcttaggcgtatggtttgtctgatgcccactagaacctctttggtcacttcttagcactcgtcagaccctgtttgatgcccactagaacctctttggtcacttctcagcactcatcggacccatctactttggtttaatgagaaaattgttcacagggttcaacaccccttagccaaaaccctagctaaaacagtgttgtcgttcgatactgtgcaccccttggatcctcaggtctgatcacatagtccattggacccaacaca

SEQ ID NO: 52467 - DNA, 955 bp, Zea Mays
gtcaacacgaacgaaaacgaaaatgctaacggaaactcataatttaatacaaatagaaatgttattgatgtttgactagtgattgattgacagaacaataacataaaacaaatagatatagagaggcaacattctattgttgtttggttgctaaatgtgtacatttagctacatccgatgttgtttaagactttagatcacttgtcatttgaaaagagccgatggttacaatggtcaattgtgctataatttgtcacctaaatacacgaggattgagtttatatactaatgcatattaggcccgtaccatatttgtcaaatacggaataaatacgagttcaatccggaaaaaacgggatcccgcaaaaaccgacggaataagccctcttccgtttccatatttttccgtaaatacggaaatgatcgggtcaaatgtagaaaacggtacgggtcgagacggggttttttcggtccgttttcaaccctagcagcagcagaggtagattctcgaaacaggaatttagttacaagtttgataacctccttctcccaggtttccactacttacaagcacacttgccacaaggacacaactcacgccaaactactgcacccgatattcactgcctctgcctccttatccaacaaggagtgctatatggttctgttctctaaatttagcggacatcgaacatttttttccatccaacaacacactgcaaagcatcggctaaacatagcgtgcgtcgccggacattctaaacgtggaggttcttcaagcgcccattgctccttctctcccgtgccgaggtggaagcttctcctcgtactctcttcccatcgcgaagcactcgacgccggccacgtactctcttcccatcacgaagcactcgatgtcggccgccagtgagctcgacggttgcactcgaatccaccatgaagcctagagttgctg

SEQ ID NO: 52468 - DNA, 340 bp, Zea Mays
gatacatgttcaccttcatcgtttccaacggcatcctcttcgccctggaacgtttaattattacaattagcaataattaagttctgaataaaatgtacaataattgtatataaaacaacacctacatggttgccctctctagtacttgcaccaccagcatcatcacatcctatatctggctccaaacgcccaagcatctccaatagtttatccattgtgtccaaggccttatcactccctgcctttgacatactagcatggtttaccaccttcattgcctttttaagcatcattttctgcctatatgattttgtttctccatcctttccactcatttccc

SEQ ID NO: 52469 - DNA, 452 bp, Zea Mays
ttcctcttctctctcccaggtagcttcatcctctccatgatgactccattgcactttgcacatttttatcactttgttccttgtaactcgagtcaaggtgtcaatgatcttgatgggatgctcagtgtaggttagatcttcttacacactaagtttttccattgtcaactgtttctctggaacacggagacacttcttaagctgagatacgtgaaacacatcatgtacatctgatagatgatctggtaactcaagatggtaggccatatacccaactcgctttaggattttgaagggtccaataaagcgaggggatagctttcctttaactttaaatctcctcataccccggatcggtgacacctttaagtatacttgatcaccctcctcatactcaagttgtcttctttgggtatccgcatagcttttctgccttggttgttctgttctca

SEQ ID NO: 52470 - DNA, 706 bp, Zea Mays
ccagacctgaaagctttccctactagagtctgtgacgctgcatgcacgccacattgcccaacatggatctcgtccaacagctgctttccagtagctgagtgaatacacttcatgaggactcctcctgcacctcttctatacagtagaccccctataatggtatagtgggccgactgtctcgggatgcgttccgtcctgtcatatggttcttcctagtttcttatgtatctgatgattggctccctcctgtcattgcgatctacttctacctgactcggaacgtgtcattccttcatttgatctgtggtgacacttggttgctttatctcctggacaaaaacccctggtggaacctgggcccgactggaccctagtttagatagtgcagccgacgctgcgttgccatctctttccacgtggtggaattccaatcctttgaatttgtcctctagcttccgtaccactgcacaatatctgttcattgagtcggttgagcaatcccagtctttgttcacttggcttatgaccacccatgagtcgccgtacaccattagtcttttgacgtcgagcgagacggcgatgcttagtccatggaccagtgcctcgtactctgcagcgttgttggatgttggaaacaggagctgaagtgcatacttgagttgttcacctccaggggcgatgaagagaatccctacccctgctccct

SEQ ID NO: 52471 - DNA, 1205 bp, Zea Mays
gagcgtcgacgtgattcaatcgcgccctgctgtgaaactgggtcttgcttagctggctgttggaggagggtgctagaacattcttagggccattcaccgagttggagtaggtaggtatgaatgtcttcaattgaggacaattattcttgtagtgactagggtctctacagtgccaacaagcattggctggaggttggttgcttgcaacagatggggtgtggagggaactttgacccggttggctaaaacatgatggagcggaccctgctggcttgtcgaagctcggtcctttgggaggaaacccaaaagatcggactatctggtgcctatcctgctgctgagctcagagaacttgaaacttcctcttgaggtgacccttttcttcttctcgagctctttccacctggatggccttgtttgagaggtgagagaaactaaggaaatcttgggtggcgaggatggttttgagttccggtctcagccccttcaagaaacgggccatcttcttggcttatgtgttgacatcatcaggcgcatagcgaaccagttttgtgaatttgtgaacgtattcactgacagatctccctccttgggttaactcccgaaattcttcttccttgagctggacgatccctaggggcacatgatgctcttagaaagcggcttcgaattctgtccaggtagcatctctgatggcagcgctgaaagtatcccaccaggatagggccatccgagagagttgttgagcagcaagatgaacacgctggttttcaggtcattcgatggcctctaacttcctttttactgtgtgcagccagtcatcagtgtcgagagggttgctagatccagcaaatgtgggaggcttgagccttaggaactctcccattctatcctgaggccttcctgcattcgggcgctggttctcgaggcttctagtgaggacctcaatgagtcgggtttggttagccagaacttgggctaggtctaatggcagctccgaaggtgcggggaggtgggtctcactcccttctccaccgacttctccatcagcacctacgggagaccttgctctaatccctgaggcggtaggcgtggttttatccgaagccatctgctagaggggagaaaggattactactatgcttatgccatatttttcttcaacatgttattttattcagcactccaattcattacaagcatat

SEQ ID NO: 52472 - DNA, 406 bp, Zea Mays
cttcctatcttccctagacatctgaatttgatggaaaccagaataagaatctaagaaagacaaaaggtcgcacccggaggtagaatccacgatatgatctattcgcgggagtggatacgggtccttgggacaagccttattaaggctggtgtagttggtgcacatccgaagcttcccattcgccttggggacgatgactgggttggccagccacactaggtgatgaacctcttcgatgaagtcggcatctagcagcttccggacctcctttcggatgaagtcctgccgctcgacggactgtctgcgaggcttctgactcaccggcctggcgtcagggttgatcttcagatggtgctcgatcacctccctggggatcccaggcatctgcgatggctcccatgcgaac

SEQ ID NO: 52473 - DNA, 303 bp, Zea Mays
ccagctttgaagaaactcttaaaaactactacttcgtcttttcctggctttggagtagtttcatctccaccaaagcgaaccaactctttcttttcttcattaaaataacccaatttcaacatcttaggtaggtcaccttcggagatcgtggattttccaaaatccagatggctgggtttgctcggcaccgcgctgctataatcatctttagaatcggtctcctcaacatcagcttgctctgcttcagcggcagggacgtccaccaatgttaccagcccagaccgcttcattgcttcggaaatc

SEQ ID NO: 52474 - DNA, 432 bp, Zea Mays
gttggaacaaatttatggttgtaatagctttccatctatcgaggatattataatcgatagagatgacaattcaggctatcagatgatataataaaaaggcaaaataaattagcaagtattataaggaaaaggaactatttatttatattcctaacaaaccatcatgcatccaagctcaagtaatctccttctcactgaaaagctagtcccaggaggagatctgcgccgcgacacaggagggggtcgcgcggacgggcgggggaggagggtggggatcctcggcaggcagaactgtgcaccaactcttgtggacgcctatggtagagacttaaggaatagtagagataacaaaaatcaatttactaaaaaaatagcatgtagcaaggacatatacagaaaataccttgcaacgaacagcaatgtttatggcat

SEQ ID NO: 52475 - DNA, 554 bp, Zea Mays
agtgacttagaatgagagataaaaacctgagaacttagagagggagaggaaagaacaaatcgtaacaaaatcaaatacacaagaagacacatcgatttgatttactagagtttggttccgaagaacctatttctcagttgaggtgttctgaaggatagggtctctttcaactctctcaagtgattccatagatcaagcttgagccctctagatcttgagatgagagacgttcatctccgcaagacactctagagactggagcctctagctagctttataatgatgaacatgtctcaaagcacaagagcacaacaccaagcagatcacacaagcacactagccttatctctcattagcaaggctatctctaagcacttttactcaagtggcacatggatcacttggaatcaactggaggtgttgcactagtgtatgagaatgtttgcataactcatgtaccttcaattgccggttatgggggtatttatagctgaaacccttaattagccattgagcaaaatcaacaaaaaatgctctttcctcggacaccactg

SEQ ID NO: 52476 - DNA, 586 bp, Zea Mays
gagaggtgttgggcagacccataatgaaatccatgctgatgtcgtcccatttccacgaaggtatagacaggggttgcaaagctccagctgatttcaagtggcttgcctttatcctctgacaggtgtcacattctgatacatattgggctatctccctcttcattctggtccaccaatacaagggcttcagatcatggtacattttggtgctccccggatgcatagagaatttagagagatgggcctcatccaagattctcttcttgagatctttatttttaggaaccaccaatctgctttcaaaccacaatataccctttccatcttggcagaaacattcatacttctcggtcttttgatggagattctccttaataatttgttctcccttgtcactgagctgggccataatgatctggtcttgcaaagctggctcaacggaaatgtgagacaaagcaccagaaggaatcacttcgatcttcatattgctcaactcatcacacaaggagttaatgcgagaatccatcataacacagttgcattgcaatttccgactcaaggcatctgctaccacattggcttttcc

SEQ ID NO: 52477 - DNA, 703 bp, Zea Mays
cgatgtcgccgcccctacctggcgtgccaactgtcggtgtttgggaccagcaacacactacggggatatcacatagtgcttttgtggttggcaagatcgatggtagctcgatggttcgtgttaaacatgacggaacataagagtttatgcaggatcggttgccggaatgtgtaacaacctacgtcctgtgtgctgtggagatgaatttctttgagcttgaggttacataatgcctgaagaaaatgaatacgctctagcagactactgggggtcgaatcggatgaaggggtgcctaatctgcctaatgggatcaagattacacattgagttcatctctatcgctaatcatgtattctcgggacttttcgactcgcgtgtagtgtatagctctacatcagccttatctgaaccagccgccttgacgccttgatcctcaagttctccaccgtctcttggtctgagttagacgaccagctcatacagttggacgctcggcccatcagaaccatttaacggcacctggatctaatccgagtgatgcggacccaagggatatctatcccccacagcggcggctatgcggtccaataggagaagtgaggtgcggcacatgagtcattcagaccgattgtgtccatccattacgtgggggcgagtaaatgcacgatctacacgctttacgtgtgacgcacaacgacagtgg

SEQ ID NO: 52478 - DNA, 418 bp, Zea Mays
tgaaaggtgtaagttaccggattttgtaattcaggattcaaaaccgaagatcagaattgtttgatttagatagctggaaggtgtccaacattatggttgaaaaatatactttatcctttcaattttatccatgtcaaccaacttgaacaacggtgtctcttgtaataaggcttgtttattgattatggcaaccatagctaaactcatacataagctcaaagaccttatcactggttcaaattaaacctaatgactcacggttttggaaaggtcttttgaagatcaagaaacaatttctgaaatgtggtacctttaaagttaaagatggttgtgagactagattcttggaggacacttggataggttcgaaatcctcgggctagattcttggaggacacttggatgggctctaaatccc

SEQ ID NO: 52479 - DNA, 514 bp, Zea Mays
taagtgcaatgtcatattgtttgatacttaatcatgttcatgtccatcttgaatttttttgataaactgatgagagcgactacagatccattccatgtaatatgtagccatttagaaaggtagaattatctagccctagatttatgtgtagttacaacaatttttgtgttaattctctccattagatataatactcccaggcatagcctgtgcctatattagttcatattgacgatctagactcttaaataatctatgaacaaaacaagaacatggcaaggtccatgccaaatatatttccagaacctcttgcacaacagatcccatgtcaagaagtattttgtatggaccttcattacaatacacataccatactttctacaagagataggcttatattagtgggtcaatagatttttttttcacacgctcagcaattgactctatttttatgacgttgcaagcactgtttcaaaggcgtcgcttagacgtccaggcgcccaacactcctagg

SEQ ID NO: 52480 - DNA, 339 bp, Zea Mays
ctctcttgcgttggtcagcgaggtttctatacgatgcagcccagggtgagtcgccagccgagggcgcagtgctggtgatttataatccccatgcgaagtccgcgcgagaggaggccgagatctccggcgaggttagcgcgattctccagcgcgcgtgggtttgttgggatacggcgggggttcgttcagaggacagagatgctactgacgcgatgaccccacaagtcagtggttgaaggaggacaaggctgtacacggtgagcagctgcccaacgggtcccacacgtcagtggcacgaaagaaaagaaaagaaaaggggaggggataaagtgggctggc

SEQ ID NO: 52481 - DNA, 308 bp, Zea Mays
agagctgtgagattgctcaaacgaggaagcagaggacaggggctgacctgtggagggctgaccacagtgaacttagtttcacggtgttcttcgactgatttgggggaaatcccaaattcgagctcactggtggacgattgctagcgattctcggtggctgggtgggtgatgatgttgcgaagctagcgggggcttcaatttatagggctcaacggcggtgaccgggaatttgggcgctgacgcgcggcggtcggaagtgaagaagaacacgggtgcagtgaatacgtgttcaacgtcgtggcagtaac

SEQ ID NO: 52482 - DNA, 606 bp, Zea Mays
gatgatatattgatttccttagtcaacaagttgaaggaaagccaggctgaattggaaattttttccaaagagagctcaataatttcaaaactagaagaaaagaaagctgatttgaagcgtattgctgatttagaatctgcactatcggcccatgtagaattacataagtccgaagtactaagattagaaaaaaacttgatgaagtgagcgaaaattttgaatgtgataaagcaaagcgtgagatagctgaagtcgaacatgatagagttcgaaggaatttagaagagcttcgggaatccaaggaacaatgcttttctgttgccgctctttgctgtggaaaactgaagaaaatgttttctaacatcggagctttctcgaacgatgaaaagtttgtacgtggtgatgccgaaggggctgtcaagtggattgaaggtgaagtcgaagctttcgacgaagtccttacgggtcgaggagacttttgtgcctgcgtatgggcccgagaggcaatatcattggctgactgcgatcactcaaaggttgtaattcaaccagactttgcattttcagctgatgatgtaaaggagccctctgccgaagccattgccc

SEQ ID NO: 52483 - DNA, 508 bp, Zea Mays
cgctgactggacaacggggaatgggatgacagatgagtggggttgctctggtcggttgatcggcatggacggtgcagattaaaacaagcataccgctttgagccaacccggtacggaccatggatctgttgatgtgtggctcgggttggttcccttcgtgcttacaatccggttcgtcagatcttaatccaatggctgttagcgtaacggttcagtattggatccggccatcgattctgattgggcgaatggaaatcaatccgggactttaaaacctagaccgttggttctcgatccgagggtaggcaatgcgtactgcttcaatttatgcaagatctaatctcggtcggggaaaccagatctaacggccagggttcctagataccccttcggtcgggtatttttattaaagagacccccgagtttaatctattcaacccgcagtctggccttagtcaaaactaattacatacaggtcctgaactttgtaagaaacaccctaagcttt

SEQ ID NO: 52484 - DNA, 584 bp, Zea Mays
tcgttctgtttgacgatggcgagggcactggttctatagaggataggggtgcagccatgactggttttatatccacgcgcagggaccgataaggatactggtataggagtcggttgcgaaaacccggcggcctcggtgctgagtttgcaacaaactagagctagatacgtgaggaagatttggtctgaccgcaagggccacgtgcagcgacataccggaagagaatgtgtaggagctgttgacgccgtgctggtgtaaacctaatgcaagcatgcatggtggccgaaaaaaataatggccgtgtaggccgtggttgagtgtcttggccaaaacctcgtttccctcctttttcttttgccatttcttttctatttttttttcttcattcaactttaattcaaatttggatttctttttgcatttccatcccatgtttaaatgcacaatcataagaaccagcatgagatgtcattatatttgtatatacatatatttattattctattttgcaagtatttctagctatgtaattttcacatatgcgatacacaaataattttgaatgtgtgatcaaagctaaaaag

SEQ ID NO: 52485 - DNA, 433 bp, Zea Mays
ttcccatgtgaatacgtcggcatttgcctggaggaaggcgatgagcgtgatttcctatttctcctccagattgcccgcgatgcgagtggtctgggaggaatccacgccgacctggatggtcttgacgggaccgccgtctgctctagatggttgcaccttaggcaccttggtaggcgccttggtataggaagtcgaggggtccctccccccgtcatctgggcgagcggtttctgccaccagggcatgcatcttctcgatagctgcaagcgcagcggcgcggtcgccccgcatggtgaggaccccagcaggggacgacatcttgaggaccaagtacccataatgggcaatgggtatagggccggcctgccaatgatggcattgaaagggaggttaacctccgcaacgtcgaactggacattctcagtgcggaagt

SEQ ID NO: 52486 - DNA, 364 bp, Zea Mays
tccaactctatgtaatttttctttgatgggctaagtacttcggagacgaagtacactggcacttgcttctttgcttcaccatcctgcttttcttgtaccaacgctgcactaaccgcaacgtgggaagcagccacatacagcagcaatggagctcctgaggaaggtggggttagagttgttaattctatcaagtactgcttcagttcttcgaaggccttttgctgagttgattcccattggaagacatcgactgactttagtagttcaaagattggcaagttcctctctgctgatcttgaaataaatctattcaatgatgttagccttcctatcaacctctgggcaccttttcatgacgttggtg

SEQ ID NO: 52487 - DNA, 652 bp, Zea Mays
tagcccaatgtttcctcaagcccaacctcaacatcgaaacaactaacgctgtaatttgcaaacgaagccttgtttccaagcgataaaagatgtggcctcacgtccggactagtttttttttttgctcgcgtggttgaaactttcaaaggtgtcgtcctcacaaattaaagccggaattttcttcatggaggcttttgtaaattacattgggtttagccccgtcgcagatctgcaacagcaaaattccaagccgttgatgctgacctcgtagcctagctagcctaggagtcgtcggagacgcgaacaaagccacacatcatatcagcatggtgttaggtaggtcctgtggctcctaattgtaggagtatttttctttctatgttttctttggcaaaccagtagtaataatgggatctgtttgatcatcccgtgaaattattgggttctacttctaatcaagctgtttccatcgaaacacttgggttttaatcagagtcctgtcctgtgggcggttccatcagacctcacctcacctgggtgaagcactcggaataaagataatatgcattcattatttgagatcctgacagcgagtgccaacgagattcgtggaccatatatatacagcgtacaggaatactggaatgccaaa

SEQ ID NO: 52488 - DNA, 483 bp, Zea Mays
gatttccgaagtgatgaaacggtcggggctggtagtgtcggaggatgtttctgacgaaggtgcacctgccgctgaagctaagcagattgaatctgaagatgattatagtgtcgtgccatctaaacccagccacctggagtttgggaggtccactgttaccgaagatgatatgcctaagttgatgaagttaggctatttcagtgaagccaaaaaggaactaattcgctttggcggagaggaaattactccaaagccaaaaaagatgaggtggtagtctttaaaagcttctttaaagcaggattaagatttcttttgaatgagatgattgcggatgttttgaagaagtttgggatttatcttcatcagctaactcctaacgccatcgttaggcttagcgtctacatctgggctctctaaagccaggggcagaaccgcttgccaaaggcttctgctgggcacatgagcttcattgtcagacaaaag

SEQ ID NO: 52489 - DNA, 590 bp, Zea Mays
cttagtttcatttggctcttattttagaactcttagtttcctctctaggttttcaccagtttagctgggagatccgcatcaattttgttctatctacggtgtgttgtaatatgcaatgattaattcgaggaagtgtagccgattgggcccataggttttggttggcttcgatctcaatttgttcccttgcttaatttttgaagtcttgtgttctgggtgctgtttggatttgttcccttgcttaagtttttcccttgcttggatttgggcccataggttttgttcccttgcttaagtttttcccttgtttggatttgggcccataggttttgttcccttgcttaagtttttcccttctcttctcttgaggatttgtggagaaccttcgagttcttgtgttctgggtgctgtttggatttgttggtgcgtgagatttactcctaggatcacttattatgttatgttggtgtagtttgtggttgtgatcttagctgatctcgttttgagtttgttctagaaaaaaccccaacaaaaccccaattctgtttgtattatttgatctgtggagaccttggaaacatattttccga

SEQ ID NO: 52490 - DNA, 376 bp, Zea Mays
atctacgtgtgcttgatagtgacacaaggggtatgacagaagatgaagttgtaccagacatgaccttgaaccttaccataatccaactttgcaggacccgccagataccataaccagcaccaagcaagctacagggactcatataccgaacagacaagatggaacgccatactaggtgtacggtagtgcacgaccctacggacgacatcaggagactacgccatccagagacagcaagccgagctccccctgtagaatataagtccccactgtaaagtccacccttgagctataaaaggggccggacagctttcactttatgtattatgtaatttctattgtagttttattttctatataaaccaggcaactattc

SEQ ID NO: 52491 - DNA, 634 bp, Zea Mays
attccacgaaccattgtttctgatcgtgacactaaatttttgagttacttttggaaaactttgtggggaaaacttggaacacggcttctgttctctacaacatgtcatccacaaacatatggacagactgaagttgtaaaccgaacattaccaatgctgctgcgagctatcctcaagaaaaatttaaaactttgggaagaaagtctaccacatgtcgagtttgcatacaacagagctgtacacttgactactaaattttgtccatttgaaattgtatatggcttcaaacccactgatcccatagatcttttgtcattgcctgtgcaggaacaggtcaactttgatgctagcgaacgagccgagttaatcaagaacctccatgaaaaagctcgagcaaatattgagaaaatgaccaagaaatatgaaaagcgtgccaacaagggtcgaagatagatgttgttcaaaccaggagacttggtttgggtacatctaatcaaagaaagatttcctgaacaacgcaaaagcaaattacaaccacgagctgatggtcaattcaaagtgcttcgtaagatcaatgataatgcttatgaaattgatccgccagacacttatggtgtcagttccagttttaatg

SEQ ID NO: 52492 - DNA, 805 bp, Zea Mays
cgcgggcgccgtggcttcagcccttataggtcggcaccataacagctccgccttcgtggccaactcgggagagctaggaaagcgcctgcgcgagagccgtgtaagggtgaggaagccgccgccacgattcgccaccgataggggaagtagggtgccatttgtgccagcgggagggtggtcgtgatccagcggtgttgtgtgagggtttaatcggtgggcgaactgctagtgctccgggaatttctcaccggcgcgctcttcaccgcgcaacagccatcgcctgtggaccaccatcgattcgtcatccctgccggtgagagctctccccttgcattcgccgtgcctggaattgcgtgaatcgcgttgtaaattagatattagggccctcctggatgggatggccgaactccggccatctctctatcgtcagggccggcggcgccgccggtcatgtgtgctggtgcgacagggaaggaagacctgatgcgcgccgttggatgtgtgtcggacggataggattagattacatcataccccttcgctcggttgaatcgtagccgtcgatccatgatcgggtgacctagagcggatttagtcgcttaaaatctactccgttgatgggggatccagcggttgggatcgcgcaccggttcacttgtgtcgcggtttaatccggtccgtttaaatctaatcaagcggccacgatcctcccgtaccccttcgcgggtcaattttgccaaagagcccctgcgtttatcagaaaacaacctgccatccgctcatactgtgctctgtgtcttagaaa

SEQ ID NO: 52493 - DNA, 610 bp, Zea Mays
gtaattcatcgtgactacgagcttaaccaaagccatctaacaagttgattaaccaaagcaacaacataggctcgctaactaacatacacgtcggctagcctattattgtcgaaatccgagacacaacatgtatataacaatcacttaacgcaatcgactcctgcttaacacgagttggctaatgacgtgactatttcccaattaccaacatacaccacctttcgccatttttggataacctgcgcgacacacagctattgtaatacatctcaagttcattcaaccccatcagtagagcactagcacatttcagaaaatttcttgagactacgacgataaggcatcgatcttatcatgcacatcaaagcatcacaagcgtgtttacggaaccaatcagttaacttgatcgacacactacccatgttctttgcctttcaaaatttatcgcacaataggtatcatctccatttgccaatgacaccaacaatacctactgatctattattcaccacacgaacacagttacacgccgcacactagtttctaacatgattcctacataactcgtacttcaagtactcactaacaataaatcacgtacggcaactac

SEQ ID NO: 52494 - DNA, 356 bp, Zea Mays
ctgaaccggtttctcccaatctatttttcggttcagtagccggctaagtaggtgggtggactagagccaaacccggctgagcttggtaaggaggaggggcaaactgatccacatcatcaacaagaaaatcttcctcaacttcttcatcatcggcagacataaatgggacaccataggcctgttggtgccattcatttatatcagaaggtggtgcatgaagggacacattaggggagcaaggaataaattggtgacccatggagactgactggcggcgcaaattgtcatcagtctcccgctagcgcctagccagctcatgcacatcagtagagatatcccgacacatggagaaaaag

SEQ ID NO: 52495 - DNA, 559 bp, Zea Mays
gtgagacctcttcggctattgaagccaaaggacctgctcttatgcagaggattgaagagccggctgcaatgccgaagactgacaaaattgaagaaccgagaaccgcagggacgaaaacattagaagttctaagcccttcggcaggagtggaggtgccgaagacacaaaagggtctagcagcgaccccaagagaaaaaggatggctactgtactagatgtgctggagacaataaaagcttcaagctctactccagggaaaattgccaaggcttcgaaagcgcaaattgaaaccgagacaaagctgaccgaagccgaagctacaaagagccaggccgacgccgaagctgggccttcagagcctgccaagaagaaatccttggaaaccggagaaaaggcagcggaaaaagaagctgtagaacaaattctgcctgaaaaagctgccactcctactcccaaagcgccttccgaagttcttgattatattatacgacacgcttcgggaaaaagattatctgaagaagagatttttgaagctaaacactatgcccgagaactgaag

SEQ ID NO: 52496 - DNA, 442 bp, Zea Mays
atccgccgcattcctcctcaggtacgcggttcattccattccgtttcgtatccgctcgtcctcctcctccggctgcctcgtttcgaaaagggccctaaccgttgccggcgccagggttttgcccgcgcctctgcaagtccctcggcaaggttgcactcctcccgcatcgcaagtcatcgtcaaggttgcactcctcccgtatccgaacttctcgtcttcgcaggtacattcgtaactaccatttgtaccgtgtcttctcccccatgtgctgttacggatccgttcctcccccatgtagtgattagggtttaggtagcatcgacggccgtggttaatagttcccccctaatcaatactatttcataactggttactaacgattattgtgtgacatttgctgtttagatttcggcgactcaccggttattccctgctgcatcac

SEQ ID NO: 52497 - DNA, 908 bp, Zea Mays
tgtaagatgccctcctgatctgcaatgcaggagagggatccaaagcagaagatctctccagcattgaaggtgaccgggatgttgaagacgatagccattgagtcatcttagatcaatgttgcaccccctacctggcgtgccagctgtcggtgtttgtgacccaaccgtgcaccatggggttacccacatgatgcttttgggtaggacggtgtcattgactgcgactcgatggtatgtgaaggggcacatcggacttgcacgagggtttatacaggttcgggccgctttgaatacgtaacaccctacttcctattaaggttgtgtactggaatttctttggagtacgaagattacaagtgagctatgatgatgcttaggtgttgtcgatgagggtgtgtgtaaagtgagatgggatgagatgattttgtaggggtcccctttgtcctatatacacgaccagagagttattactttacaagttgtgatcactctctattctatcgatctacttatttatcacagtttatagtcctacatatccgaggtccaatcaccttctgagccgagtcatccacaaatatatagctcttcaggtgcgcacaactgcatcacccgagattttagtgcttcggtcagcgcataactcggacacttggtctttgtcttcttggatcaagtttgccctgttaagaaccccttgctaccgagtgtagtccaagggctccttaactgaataatagtagaacacaaggagacaagagtgtagagagggactgattctttattactgtatggtgctgctatcccaggttacatgatatggggatctcctctctatttatagacaaaaactagggtttcaggcatatgggccacatgggccttcctggcccaataaaggtttctta

SEQ ID NO: 52498 - DNA, 360 bp, Zea Mays
cttaccccaccacgtgggcgactccgaggccaccaggtgaccagagaaggtaacatataccgtgatatcatcagtggatccggaccccgtgagagagtgctggaccccagcatacctaatcgggacctcagcgttcccctaaatgggacccaggcccctctaagtgaggtccggactgtccacgacaagatcttgggacgaggaataccctggcctaagtcaaaggcgtacaggggtccggcacagacacttgtctgggtcttgccaggcacgcctacgctccccgctcaggcggggacccggtgctgccacgtggcctgcggcccgtgacgtaagccggggggcagagcctgacgtaag

SEQ ID NO: 52499 - DNA, 335 bp, Zea Mays
gccaagtgaagactggtaacgtcagcgtttttagaaataacagctgagttatattgggccacgtcggccgttttggaaataacggccgagtgattacatggcatgtcaacgttttagaaataacagctgagtgatgactgggcactttttagaaatggcatctggcccgggaaaaccccatttgtactgcgctgtcgcatgcctctgcattctgagccctagtcttgcttttctgcattcagatcttctctgctttcttgcgatatcgcttccacccagcttgccagcaagattgagatggcgcccaagcggaagaatcagagttcatctgctgt

SEQ ID NO: 52500 - DNA, 787 bp, Zea Mays
atcagtcaggtccaacgggaaactttagcgctcaacagtcgacttcaacggctagctgacattgtaggacacgtggccgggttcggtggtgcaccagactagtctgttgagtatgcgcaagggcaaggccaaggaagatcctattgattgaggttaccgttggaggtctggtggtgcaccgactggtccggtgcccccgagtaaagtgtagattttgtagatttaaagcaacagctaattgaggggatttgatgctataaataccccctcaactagtctactcgagttacctaccacctctagagcttaacaacattctcatacacttgtgtaacacatccacaccattccgaaagatccaagcactccatctaagccaacatagtgattttagagagcgtgcttgaccgatctgatttgttggcgttgttggtgtgttttttctcttgattgtttatgatactctgttgtaatagatagtaagaggctccaaactttgtggactgctttgcggagactctgtctctttctagtgaatctaagggctaaagtttgatcggtggatcacttgagagggtcgagagagacctggtcctttgagacatctcaacaaggatgtaagttcttcaaaactggaccttagtaaacaaattgtgagtctcttgtgttctttactttcagttccaattttttgtccctccctctctaagttgtcttgattggactttgctttatatcactagagccgctctcaaagtaaattctacattcgtaagagcaacaagtc

SEQ ID NO: 52501 - DNA, 377 bp, Zea Mays
cttttccgacggaggatacccacgaggcagttatttttgtgccttttctcatccggggactggccttgccagtttctcccttttttcgtggtcttcttgatttttactctctgaaccttacacatttgaatcccaattatgtgctttaagctattgtgtttgtccacctttgtgaacctttacttggaattcttccacacattgggctttggaagtacctttaccattgccagcccaggatggctggagggcagcatcatcttgttggaggcgatagtttggaacttcgctgaggcaggaagactgaataacttgacattcctttgaaagatagcattaagggatggcgctttgagtggttcactatggagaatcat

SEQ ID NO: 52502 - DNA, 300 bp, Zea Mays
ggcgacagaggatttggtacagtatccacgtccacggaccacggtgcatggtggtacacaaacacaatgcagaacggtgccatgcccatgcatgattgttgttggcgagggaggcatatataattaatcacgttcccgaccccggccctaactggccggtgctcaattgccaatacacgcttcaagatgtggcaacgtcgtctttgaaccttgtttatggacagctagcggagtgagagcgccattgctttctgcttgacagtgccttccacacgtacgccttgatgatgctcatctgac

SEQ ID NO: 52503 - DNA, 537 bp, Zea Mays
gatcagcgaagtcttcctgttttggtgcttgggggtgattttggtggtggatgtttggttgatgcggaggcgggagtgggggtggaacgacttgtacctcctggtggtgttggtatgcgtggttgggtagatgctgggtggggccgtggttgtatggttgtgggaggtggtgttgatatgtgtgcgcgacaactcttgggttgtcagcgggttgtgcccgagacatcctatccctggtggctttcgtttccgggcaatccctcgttgggtgcgcgcagtctttgccgtgaaacagacaataatatctgcgcggctgctgcgcccgtcctcgaccccgacaacgcgtgccattgccgcggccctgggggaggataatcttgacagcgatgggcctctccagtgggatgctggttggcgatagtatgcacctgttgctgactgtggctgtcccgaccggagtctgactgcgaaggtcttgtccatgttccgctagactgcggagggtccttgggctttctttgagactcgaccttacgc

SEQ ID NO: 52504 - DNA, 406 bp, Zea Mays
aaaaatctttctattttcttcccatacaaacaaggtctaacatgtgttcttagttccaagtagtagacttgtcacatattgttctttgattaagacctatttgaagaaagcttaatctatcatattcttcaccccattacatgtcttcttgctaattcttgagctcaagcagtagacttggcaaagattaactttggctcccaaagtcaagctatgggcagacttctcgtcgttaaattcctcgcgcctcactatcccagctcctaataaggttgtctccagtggtttacacattttctgtgtgattggttgctcaacctactgcgcctaggcccacctcatcccgttgatcgtgcttcagcatacgtttggttggctgcagagcagggccacagcctatacccgc

SEQ ID NO: 52505 - DNA, 271 bp, Zea Mays
caagtactctgttgttgtttcacctggacgaatccattggacaaaatttgaaactggaaatagtaattatgtttcgcccgacagccttgacagaacgaaatcgctatggagagttctaacccatctcactttgtgttcttagatttgtgcatgttgacagtatttctcaggtaaaaccctttcgattaatagttgcgaagaagcagtgacagttcctgtaaactacaagtcccatatactatcttattctgtaaaactgttggctaatttc

SEQ ID NO: 52506 - DNA, 543 bp, Zea Mays
atatattggagtgaaccaacactagaagtgttatcgacagaacaaagtaactgagagtgttgcagtttgccacggcttagggtgttaaggatgtgcggagggagaggataacccatagtctatatttatagttggggtgcacttgacttagtggggtagagctcatggttatggcaaaggaatcatctgaactagggttcgggcaaagaattataggcgagcacatggaacaattatatttcggagttttgaagaatatgaaccatgcttagaggatgacatggttggatataggataatttgaaatgaatttagaaatcagagtttcgatggaggagttttgaattttatatccatatgaattagaaaataaaagggatattcttgtcaaggaaatggtccccggtccttgtggcccatcggtgagtgagtgcgctagagaaagcctctatatctgggccccatcggtcagctggaggaggaaggaaacgtctgccctagaagcacccaccctcgaatgagccccgcgacaccgatccccgg

SEQ ID NO: 52507 - DNA, 397 bp, Zea Mays
ctgatctccacgaggccgcgctcctccaacgacagcaagagcaaggcggcgctggagcaccccatccgggggctcaaaaggcggaagggcgcaatgcatgaggggagaacgaaggcatggccactgcccaggggatcgatcccccttttataggcagacctcctcacttgcaccccttagcatcacgggcgaaatccccactgacatactctagggttctccccctacgacatgggggctacgacccacacgtcatacgagctgatccgaagcacgaagaaggcgaaccgccgcacgcgaggcatgtaaccgtcccgcggttacaagcgctctcccatcttcgcagaaaccggtggtcgaaagggtgaactgccacgcgacggacattcaactgcac

SEQ ID NO: 52508 - DNA, 327 bp, Zea Mays
aagttgagtcaatcacactgaaattcagacttaaccaaaagggtcaagtgtggctcttttgcacttaagtccaaatctcaagttttggattgcaaatccaccttcttgtgaaccatatgacttaggataccctatttacctggtttttgcactttagcccaaaagtgaactaatttttacacttaaccccctagggtttaggtttagggttttcgagggttccaattagggtttttggtatctcagggatgtaaatataacttagacccatccttagtaatattttatgactatttctcttaagctttagggttttctccatttggg

SEQ ID NO: 52509 - DNA, 426 bp, Zea Mays
cctaatagggttattatacacagtctggatttacgtttatatgcttaatgatgtttatttacacattttttatacattgggttatttagttttggaaatggatgacaatagaagaagggcgatttatgatggattcaatagcgtgactctaggtcactcaaaggaatgtgttagggttgcaaaacaattcgtggatctcgcattttccggtggacctcgtgtggtgaagtgtccgtgtaccaagtgtcagaattttaagtatgtgagaaagatcgaagaactggagcatcacctttgcaagaatgggtttatgcctaactatcttgtgtggcgctcacatgtagaagtagagcagaatatcatagagtcagaaagaattgatgaggaggaggaggatcagatggatgacttggtggctgatattag

SEQ ID NO: 52510 - DNA, 1009 bp, Zea Mays
ataaaacaatgttgcaacttgaatagagtaaaatggagctaagatgcaaacgttatgggctaataagttttagggaatttttaatatttattttgcacttaaaatggatcccaggggctttattgcaaatatcagggaccatgtttatattttcttgaactaggtatggactgcgggtcggtttagaataaggttagggactttttagaaaatgtgcctggtttaaagggtatcgtggaaactaaatcgtccgatcttaatcaagggctgagattagacctatcttttaactgaactggtacgcgttcgtggccgctggatcgtccatcccaaaaccccatgatacagatttaaatactcatggcgtatcacgggacttaatcacagccgtcagttccgatatccgcggtcaagcgcccatctccctcactacacgagcccgatgcggtaatgcatagaggacgtagcggcgacctcaccggtgcaaggggctcccacgccctagcgcccatatgcaggtgtatctagacgtgaaatgaaacactaattaacatggtcaatcatgtggtgggggacttacttagattcgaggtgtccaaagctttgtcctcgacgtaaggcggcgcagtcgtgatgtttggtcaccagcgagcaatcccgatcatgctagccactatccttattggaggaggtctctccttcgctctgcgtacccttggtgatgcttctccggcactcctttaattttgttttaaaggacgacttgcttcggttcaaaggtccgatctggtcggcaatgatgccttattgcagaacagactggtcgctgctctccactctttgccagtaggtggtcattctggcgagccagttacatattgcagactgaaacagttgtttgcttggcgccacatgaaagccttcgtccacaattttgtcgaccagtgtcagacctgcttacaagccaaactagatcgtgcagcttatcccggcaaacttcaacccctac

SEQ ID NO: 52511 - DNA, 724 bp, Zea Mays
ccgcgatctagcactcggcaaagaatattttaagtcaaaggatccaacgtctgtacatgatagaggaatctgcgaaacagatgacatggcataaaaatggaaaacgatacaatcctgacaagaaggtgcacgcatccgatggtgaagcatggaaacactttgatgccattcaccgtgagaaagccgaagaggctcgtaatgtacgtgttgcgttggccacagatgggttcaatccctatggaatgagcgttgccccgtacacatgttggcttgtgtttgttatcccaatcaatctcccccctggtgtgtgctttcaaaggcagaatatatttgtctcgttgataattcgtggacacccggggaataaaatgggcgtgtacatggagcctttgatcgatgaattggtacatgcctgggaggaaggggtatggatgtatgaccgagctacggagacaaacttcagaatgcatgtttggtaccagtactccatgtatgacttaccggcgtatgggctattctgcgcctggtgtgttcacggtaagttcccatgcacagtttgcaaggaagctctcaggttcatttggttgaaaaagggtggcaaatatttgtccttcgataaacatcgacaatttctccctcctgaccatccattccgcctagacatcaagaactttacgaaaggtgtcatagtgacagaccgcccacctgcaatgatgactagtgc

SEQ ID NO: 52512 - DNA, 345 bp, Zea Mays
gttttacgctaaattccacccgagccagaacccgcgcacgatcgggtgcacacgatttttacaccgtaattttgggctccgtttgctgttacaaaacagatataggatttacgctaaatttcgtactcatttacgctgttttagctcacgttttacgctggaatccgtccgagccagaacccgcgcacgatcggctgcatgcgatttttacgccgtaattttaggccctgtttgctgttacaaaacagatataagatttacgctaaatttcgtactcatttacgctgttttagctcacgttttacgctgcaatccgcccgagccagaaacagaaccagatcgagc

SEQ ID NO: 52513 - DNA, 641 bp, Zea Mays
cggtgatcaagctagactggcacaagccctatggacaacgggtcgggccaggttgggctcaggccaggctaaactatctcagaccacgggccacctagtaggtccgatccatttggacatgtataacggtacaccggtgatgcgctcgcgcaggcatgcagcgtcgcaagcaaaacgatggcacatgcaggtgaggctactaggtgtcaacgcaacagagctatcaggtcatcgattgaggtacatgatgttttgatttggtaagtttacgattagtttggttctatttaaaattgtagttgtttgattgaggaggagagaggcgatggtgaagtcacccactatgatgccgcccaccaccatgcctatgaggcctaaagtcatgaggacgtaaggaggaccccaccaccaccatcctcgcaagccgctcaggacttttagttgcttactcttgtggtggcaaggcggagaggggaggaggaaggagcagcgatgggtagggtttggtgtcgcttgagccatctcatgggagacgatgatgggattggaattgtggtttctcacttggaatacaaattgtgtttatgcatgttacatggtagacgtgttgggatcgggcacaacgactagttcaaatagag

SEQ ID NO: 52514 - DNA, 287 bp, Zea Mays
aaaattttggctttcaccaatcataataggtaagtcttcagagatgatgtaattgataatttcttcacgtgctacctgtgggttgtaaacccatgtacttacagtgccattggtagcgaagttcaattgggtttgcacacctccaccaacagtttgccctaccatcttcaaacatgctttgaagtgacgattcaaatgtccagttccaccagcagaatctgcactcaactcagttttacaataatgacatatagcaataaaactctttataccattctcaataattt

SEQ ID NO: 52515 - DNA, 938 bp, Zea Mays
cattttagtaacaaaataaattgctaaacaagcatccaattatggtgaatggataaaaaactacaatgggaatcactgacaggggacatacatctcttgcagccacaggctcgttgatggtgacttggggcctttgtctgctaacagctccttggcttgttgaaacaggggccctcatctgacaataagcaaatgtaatcagtgatgataaatgattacataaatttgaaattgaacaatatgatcaactgagcatacctttgactgtggcatccgatcaacaccttttctagctggaaggaacaatggaatatgctcatcagttatcaacagcagacaaagatcgctagagttaaaattttggatgttaactagcatgttgtgtcagcatttgaggcttgttacctgcaacacgaggtgcatttgctgtggcctttggggggtttgaggcagcaacgggccgacctgaaagtttatcaggtttgccaagagatctctggatcgaagcacggacattatcaaatagttcagtctcaaggctttccatcgcccaggtttcactttccagagttgaggttgttgactcccctgatctcctcgtttcctcaatgattccaggcagcctggaaccttgggccttacgataggtgctgtttacaatggctaattcctcagtgtcgagaacccctgcatagaccaggaaagattaagagttgcgatcaatctgcataattaaggtttaccagagtgtataacgagaggcaataattccagaaaacagatagagtttcacatgggtggggaccaggaaaaaacaaaagcgaagatgaaccttcactggtaaaaaattcgctgtcccaagccaagctcttgcggaggtttacccccttcttggccttgcgctgctccggggactccgtccgctcgggatcttcccg

SEQ ID NO: 52516 - DNA, 320 bp, Zea Mays
tattatgtatattactaacgatcattttgatgatactggatttctctttacttagttcactaaagctagattgcttgtttttcctgttgatagaacagttcccatgtgcaattatggatagtttgaagttatataacaaactgagggtgctcgagataatatatatagtactaacgatcaatttgatgattctgaacttctcttcactgaagcagattgcttgttttccctgttgacataatagttcccatgtgcaattaacaagattctacgccatgttcatttgttcataccatttttatcaattttatttcttttac

SEQ ID NO: 52517 - DNA, 304 bp, Zea Mays
ttaattgttgtaacgtctagcaaaaggctctgagttgtagagtggttggcgaagactttgtctctcaagatccgagggctcaagcttgatcgttgtaatcgcttaagagggttaaaagagatgtactcgtgtcttttgtgtgtttgatttcgcttgtgatttgtacctccctttcccctctaagttcccttgcatcgatttgattcaaatctttaatgttgctcctagaattaatttcgcaatcatttgagcgcgctttgcaagaactaatctctccctactctgattctattctttctcgctc

SEQ ID NO: 52518 - DNA, 600 bp, Zea Mays
ggagatttcaagtaccaaaaagaatgccaggaaataataatgattgcagtaagcatttaggctcaggatcacgtactaaaactgaacctttgggttagaatgatttgcaagaagttacaaattgattgccatgtgcatttactatgaggtgtcactcaaattaatcttatgtggaagtgccagaaagagtggttacatggaaaaccacttaactccttattgcaacaatgttgtaaataagaggcggagtagtatggtcacaaattaggattaagatgcttgcaagtagctgaaggctagaccttctgagatagtaaatgcagagcaactattcgttggtaaccaacctagtgtttgtggacacctagaggatatgatttatcttgtgaattttgaaggcatttacatcctagcttagtgcacactaatgaggctagggtatcagaagcccttgattcttgttttaggattttacgaggaatcataagggtgcataagaaaaatgattttatgtcaactggagaattgtgttatttgaaagttacaagtgtcaacacatacatctcaacaattgtatatgcgctcccagtgatccaaaag

SEQ ID NO: 52519 - DNA, 476 bp, Zea Mays
gtctcaccgggtgaagcaacagtcatatagagctatggctacgggccggagttgaatgagcaacacattattctaatgattaattttccatgtcgttgccattttttaaaagttggtagcgtagagtactggagtatcgtattctcttgctcctttatatctgcagcaagctgggtgaatgctctttactgaactagtcgtcctctcacattgacatatgttccttccctctttccgaacataatgttttctagatcttcgtcggcatcaacaaaagtttccatctcttctacctctttgtcagtccatcctctttgccccctccttgttcgaacaaataggtttagaaagtttccatctcttctacctctgtcagtccatcctccttatcccctctcctctcacattgacctatgttcattctctctaccaaataaacgtgatttccactcactactacataacatagttttagt

SEQ ID NO: 52520 - DNA, 662 bp, Zea Mays
gcatttaagaaagttgatcaaggcatataaataacaattgaattcactaaagaacatcaattgaaggaattaaatctattcttacacaacatgccttcacaagataagtcacataaatgcagatacagacatgatatacgcacaagatgatctttacagaatatcaaatgaattaaaacagatcatcaatcaagaatcaaagtcctcaactctagtgtctatgaataccacttgtaggaatgagagaaccaattggaaggattggcaccagttttaaagcaatatcagtaccaattaaaaggtaaaaacataatcatatgcataagaggaatttatcctaaatactagagtttcttcatcatatataaacaacatgtgtcataatgaaaaaccaatttaggaactcaatcaatgtaattactcatatagaaactaaatgaagtgcacagttccatacctttgcctttttacctgaatacaatgcagtccaatctctaggcaattcttattttgcttgtgcatgtcactcctcctttgacttctacttgacatagctcacatagcgcattagaagcacaagcaagaggttttcttgttctagcaatcctaggttactaaagaaatctcataaatatggtctaacctttaactatcatgcttgc

SEQ ID NO: 52521 - DNA, 810 bp, Zea Mays
cggacaccgagcatgggagcacacgttcccgccaaaccatggtcgattagagcaaacggacgccaccatgagcttcgcaagcatgcagaggcatggaaacaatactttaattggataggaactcaccagagtggcccagccacgggcgggccgttcttcgcgatgtggcggaccaatttgggggaaaacagcgtcgcggcggctctgggtgaaattgggggtggagattgaggctatacggccgtaagaggctgtggtttcattgtgcgcaatcaatttgggcgaagatggagaggacagtgcgaatttaacttcgactgagcttcactggtggagatgaaagcacctcgccgtggctccttgctcaatttataggcacggcggtccggtaattgattcgcggccacgaggtgggctgttagcgcatgtcgaccacgtaagaacgaggcacagtaagagagatcgacgtatggtgacagcgcgacgaactgcgatgagtcacggcggccgccggtgagtaactccggccgagctcaggagatggtgccacgtacaagttacccttttcccggcgttatccatccttcaccgtgcatgaatccgggcggcgatcaacggcggcgagctgagctggcgttctgatccacccaaaacactgtaccatggcacatcttcttcagtcgcctgaaccggccacgatccaacccaattttctctggattcttgttagcaacagagcgatctctcttaataaaatttgttcactaaacatcagtctacaaacttactataggattcttgggtcaaaac

SEQ ID NO: 52522 - DNA, 496 bp, Zea Mays
attgatttcgtccatggttattgattgatgtagctcgagtttagttttccttgatcatggattcacatcaaatgcgacttgagaatgatataagtgcagtgtgcagttgaatgatatttttgctacgctggttcctgtataatatgtgcataatttcaatcaagtcatcctgttgttgattcacttcgtcatattaccttagatctttgacagtctacaccaaattttgtgtactggttcactttcaaaaggcctaatgttgtcattcttcattgtcaaaaccagtgcacaaaccagttcactttcaaaaggtctaatgttgtcattcttcactgtcttttataacaacgatggcagcatgttggtcgctgcgccaacaggcagtgggaagataatttgtgcagagtttgctatgctaaggaaccactagaggactgtgtctagagagaacaacatgcgggttgtttatatagctcccaatgaagctctacaaaag

SEQ ID NO: 52523 - DNA, 906 bp, Zea Mays
agactcagatcgatgaactcatgcactcttggatcccggtgctctggaataacacgcttcaacatctcaatatcactatgtgtaagttcaccaaccgaacggttatcatctgaatcaacggacatagcaaaggcataaggctcctcttcattcctaaactcaggactattggatgcaataattccatctccacaatggatatgtgttctgatcgtaggatcaaccagaacatcaggaatgtctcctgcaacaaggaccaaaaaaagaataaaatggcggcaatgaaaagaacaaagtaggtatgctcaaaaatgatgatcggctacaaagagacctacaaagggacttactgcaagggtccctgccaaagggataccctcggtagaatctaggtggaggtaatgagttccacaatcatttgtaggctcacttaatgggatcatactggggggcagattgagcatcaggcacggttggcacgacctcaacaccacgatcatagttttcgtcttcagggcgagtggcaactaacaaacatcgtaccactacatccatgacttgcttttgtgtcttcatagctgatttaacataattatcccactctcactgacactcaattgggaagataagtctttgcacgttgggtagaggacctatgtttagcaccccatcaacgacgatgtcgtcagcatcatgacaacaaatcttctccttagccttagcaaccacctcactaaaggagggtctatcgtcgaatatcacagccacacgttgcatgtcaacgaactcagcatttccataacgatcttgttccacgatgcatccatggtatatgcccaaaaaattgtccatctatttgaaatacgaattcaacgttgaataaccaattgtgatggttagtgcata

SEQ ID NO: 52524 - DNA, 801 bp, Zea Mays
attgggaataaccgaacaagcccttatgggcgtggagatcccatgcatgcatatgcatgaactaccaactgtggcctcctctcctctcttctcctctcctatgtagctggtgtgggggaaaatgtgaacggatgttcagttttcctcccttgattttcggcaacgccgccactcgagtcctcgtcactcagtttgttttggtttgctgtctaacttaacatattttgtctaactttttcttagcataagagcaactccagtagattgtgaaaaaagtcggcccgaaaaaccagttttgagggatactataattttttcataggctaaaagtatgtacgcgcacagcagctccctaataaactaatagcccaatatttaaaatatgccacgtcaaggctatggcccaaatgagttgatgctacgccaccaggaaaaaggcgtcaaattagctgatctacgccatggcccaaattagtgctactttgtccacgtgatcggagaaacgaccaccaccgctagaaaaactagggcagattcattatttgttgtgtgcgccgccgacagaaaaaagtagggcaattagaaaaagaataattgatgagtggacaaagcagacttgttaagcaggtgttggattcatcatcctcagatgacgaagaagaattctttttcaatgccgcgcatttgatcattgatgaagatcagtttgatgaagaatcgagacgccgcggttctgttcatggccgtcaaacggttcgacgtaatagagaggaaggacacgtgaggctatatcaagattat

SEQ ID NO: 52525 - DNA, 626 bp, Zea Mays
cgcgaggtgaagtaaacgaccaagtctttgatgagcaatctcgtgaggcgaggaggactaccaagtccctacagagcaaactagcgagacgatgcagacgaccaagtccttgccgatcaaccccgcgaggcagagtggacgaccaacttattgacgagcaatcccacgagctggggcaagcgatcaggtcccgtatcgatctaactggcataaaagaaggggtggcccaatgctacgtgcccgcgtcaacgtgacaagacgcatcatcaccaaaccacgtctgggtctccggtaccatgtcgaagggtccccatcgaatgtcaaatggtacatcgtcacatactgtcctaggcaaacccccactgaagtatgggactagtcaaccccgatcgtaggaacctcagcgtcagagtctctatagtgactcgcataccggaaaaggatgtgagatatcaccatactagtgtatgtctacgcagactagtatgtgacgtgggtccgtgacgaaggacgacgagtgctacacacggatgcaccatagggcgctgacaagcgggacctgccacacactaccatgaagatgtcagcaaaggacttgctacagggacccatatgacgaacgagca

SEQ ID NO: 52526 - DNA, 423 bp, Zea Mays
tcggtagaatcctgcaagcccaagaaaactctgaatctgcgtaactatctttggcgtgggataggattggatggcctcaatcttgctgctgtccacctcaataccctgtagagtaacaacgtagctaagaaatgacacacatgttgtgcagaagttgcatttttccaaattaccaaataagcaggcagcgtgcaaagtatcacaaatagcacgcaaatgttgcaaatgctcttccacagacttgttctaaatgagaatatcgtcgaaataaacaaccacaaacagtcctatgaaaggcctcaaaacttcattcattaagcgcataaatgtgctggggcattagtcaatccgaatggcataactaaccattcgtataagccaaattttgttttaaatattgttttccattcatccccaagtttc

SEQ ID NO: 52527 - DNA, 709 bp, Zea Mays
ttcaaattgactcagccggtggtagaattcgagccgatagcatttgcttgaatgtaagtgtggatgtaagggggatagcgtttcccgctaatctcatagtaatgggtactcagggaatagatgtcatcctagggataaactggctagataagtatcagacagttatcagttgtgataagaggacaatcaagttggtgtccccactaggagaggaagtggtgaccgagttagtcctgcctgagccaaagaaaggaagttgttatcaaatggctgttgatagcagcgaagcagacccactagagatcatcaaggttgtgtctgaattcccagatgtgtttccaaaggacttacctggtatgccacccgagcgaaaagttgagtttgtcatagagcttcttcctggaaccacccccatttttaagagagcttacagagtatctggaccagagttggttgatcttaagaagcagattgatgagctgtcagagaaaggctacatccggccaagcacctcgccttgtgccgcccctgtcttattcgtggagaagaaagatggcaccagaaggatgtatattgattatcgagctctgaatgaggtcacaatcaagaacaagtaccccttgcctagaatagaagacctgttcgaccagttgagaggagccagcgtgttttcaaagatagatctgaggttaggttatcatcagctcag

SEQ ID NO: 52528 - DNA, 1115 bp, Zea Mays
ttagatttcaacagccacctgtatataaatcatttgtcactcatgcaatgtttattgcaaaaacaaattattcgtatcacatacaacatactaatcactgcctgactcactgctatcgaaatcaattgcgtgttttttttgatgttgttgtctcattccaatcaggagcgttacttccacccttgttcctagatccaggaggtcgtcctctcttacgtccagcaaggctagccaaccgtaatctattttcctccattgacaaacatgtcctactgttgtgaccatcagcaattccacacttctggcatttcctggtcattttctttgtaccttttgctcccaatttaataactttttgttcactccccattattgttctttctttgggttttgagttatttggtcttgccaagcttatcccatcgactgcaaaatctagtttctgcaattcaaaagtaaatatttctcagcatataatattatgcagtccaacattcagtataataccattattacctttctggcatgatcattttgttcattgtcaccactctcattcatatttgtgtgatcctgcaaattaacctgtacctgccaacacattttaagctcaatcataagccaataacacaaacctataaatcatttatatgtataaccgcaaatcaatatagttgttaaagatattacgtcttctaatggacgtatcggtataggtatttgaacattgtccacacctcgttcaagtatattagatacgtcttgaatttcctgaaaaattggttcaaagctcagtatacatcatttacaaataaacattcacaacaatatgatcaaaaccttgttattcctttcatccaattcaccatctctttcgatgtctctattgtcttcatcatcgtcctgaaattttattgtttcatacctcatcaatgtattatgatgaataatatgttacaaaatacatattaaaacattacatacttgtataccatctcctccactagttccacatgtctcctcaacttctatatctgtctccaaacgcgaaagtacctcgagaagctcatccattactgctagggctctatcatttcctgccttggataaactag

SEQ ID NO: 52529 - DNA, 1025 bp, Zea Mays
agacatacaacatagaggccaagagttctgcttttatctttccaaatcacaagcctggcgtgacggttcagtatgcaaagtggtggaagccttactcatcagcatgcggtagtgccgttgctaatgctgcaaagatcaaagaaggccacgatcttgttagtccagtgaaaaggaaaatggaaggggttcttgctggaaattctggcaaaaaggtgcgtctgcgtgtggccactgctaccctgggctgcccgcccaatataccagcaggaattaacgtctacccgtcccagtcctcaggcagccatgctgcaacaagacgagctgcggcagcaccagggcttgttctccgcgcgtgtccaccccacctaaggtttaaagctgtgtcccccacagggatgcctcagccactacgagatgcagcctacgatccgcttgatcacgtttctctttctgaaaggctcgatggcattactaagatgcctaagcagcacaacacagaatgtttggtgaaggatagtgagcaggagagaattgtcaaacgtgtgaagattgttacaccaaagcctccaagtgctggcccagagaaggcagttctacacaaagttgttgagcaagctttgcctgacgcagttgcaagctcagctataattcatgactcgtctagtgtatttggtactgaaaggccacatgcaaggtgtctccaacaaagtaaagatgaagatcttaatagtgccaatggggaaaatattagcagaagaacagagcattgtgatgtcgtgcttcttaatgttgtccagggtgcagtgagtactgtaaagagtgaagccattggagctgggactgaagttgatatgcttccaacacatgaagacttattggtggtcagtgacggtgacaggtgtgataaatcaagtagcatgggacatgaggtgcatctggaatctcatatgtcgggagcaaaaatgtcctttataagagagcgaaacgaaggtaccgagctggttgatgcaagaaacgacgaggaa

SEQ ID NO: 52530 - DNA, 550 bp, Zea Mays
tagcaattgaaaatgatgtcgaagcatgtcaaaaggccttcagcactgtctgtgctttcattggcacaagagacataaaccaagagcacatagcctacagagtgtggccacttgtggatagctgggatatgcagaaggagactgctgctgagtccagcgaaggtggattagttcgatttaaatataccttcagattcagagaaaagttcgacaaaccgaatgatgactggctgaaaagtattgatgctactagcgacgaattacttggggcatatactaaagccgaagatgatgccttatcctcagccttcaggggtcgaagcaagaaaagattaaacaagatttttgatgcgattggttttatatatcctgacaattgctatcccctgcgaaagcagggaaaaaagaggaaagatgctgctttggccatttctgctgtgtcaaagggcaagcaaatcaaagttttgacccatagacccagatatattgaaacggccatagtgccgaaatttggtgaggagacatcttccgctgctgaggcagaaccggc

SEQ ID NO: 52531 - DNA, 474 bp, Zea Mays
cttctttatctttgcggccatttcctcagccttttttgcggattttcctcgagatcggccaaatcaacagtgtctgatgtgaggctccgtccaatccctttcaaaaaatgagctgtgccaacagtggatttactcttctttttcttctcgaacggggacactaattttggtatagaaactttagatttctttgatggtcgtggagatggttgtggagaaagtgaatccctgaagggcgatgtatgtggcggagacggtgggttaccatgaggatgaggagaaggagggtcagaaagaggatgaggagcagcatgtgaagtttaaggaggtgatgatggatgtacaataggaacaacaatttgagatggcggagacggttgggcctgcgacgaattcgaccaatcaaccaattcgacatcccttcgaggccaaaggataaattcttgatagcttgtccaagtgtctcgatacctt

SEQ ID NO: 52532 - DNA, 509 bp, Zea Mays
ctttgatttaggcacagtgctattgattgtgcgagcttcggaatcctcccgaagatcacgttgttgctgagcgtggcgttgcccttctggctgttgactgtggcccaaaggtgctagcggtggtggtggtggcagctgtgccaaggaagcttgagaatggcttgccgaagcaatagaggtcgtaggctattggttgcctacatactccgggacataaggagaatagcatgaagcagtgtggcggacttgcttcggttgactctgccgcgcttcagcttcagcaatttccttctgcttttgaatggtaacatggcatgtccttgttgtgtggcccttgtcctcgccacaaaaaaggcaatataactttcgaggctgattgccaaaccttccaccactaaaacttcttcctcctctacctctcggagctggtggtctgaaggaagtctgttgcatgctcgaagtctgagaactttgatggctatgttgagcattgttggccctgtcatcgt

SEQ ID NO: 52533 - DNA, 512 bp, Zea Mays
accggacatgcatgacacgactcactgcgacgtggttaaagtgtcgaggcacgtggcacaagaccgcgaggtttctaactccggtgagggttgattaaaagcgattggggcagagcggacacggcggtcggacggaacagtgtcttaagctcatccgtggtggagatcttttcaccgtgagacattatccgcgcaccggtgagcatgaatcacctcgccggcgtgaattgaggcgcagggatcgccggctgcaaggtgcactgcacctgcgatctcattcagtctactgtaccattggaatctctgtttgaagcgcctgatagagcatgtttggggtcaatttgctccatattttatctggtgacccaaccatcaccctgtatcaaagttgaagcttaattaaccaactttaattttgttacattgtgcacccacaaaaagtcacaggatcttactcaaaatcgagccctaagttcatccaatctcactgtcactgaaagttcagacttaag

SEQ ID NO: 52534 - DNA, 415 bp, Zea Mays
gtttgcctagttcagacagagaggtgtataaaagttgcacgctttcagctggttagcccgccagttgcattgcctacctgtgtgccaagttgattttgatggacacgtacgtacgtacacgtgggagatatgtacgtcggcggtcatgacaagcagtcaggtaggttaaaatctagacgagcgagctgagatagaggccaccaaagtgagatatacgcgacagtgagatagagaccgcgacggctgcgacccgactgcatccaatccggagcaatggatcgcgtctaggtcgaccgcgcacgcacctcgacctcgacctcgacctcgacctcgacggataagcctagagctagcgatgatccagagatgccactgtctctgtctgccgccggggagacgaagtcggcgattggat

SEQ ID NO: 52535 - DNA, 577 bp, Zea Mays
cacacttgagaaattccatgagggcaatgatcatgtgaagaccagactctttgagacgtattggcgagagtacgagaactttattcagttgactagagagaccattgacactatattttttcggttctagttgattgttaacaagttgcgcaaacagacacaactaccatatcacgatcatgagagagtgctcaaactacttcatgctctggattagagggtttcggaggtgaaagtaacgacgatcatcgagtcacccaactatgagactctcatagtggacaagttattcatcaagcttaagtccactgagattgaccactagacctaggccaatattgagaatcctagtgcacccaccatggccctagtttctagaggtagttcctttttcaacacttcacctgctttgtttgctttgtcttctttgttttctatcacagaggagcaggtggagagccttgggagtgaaaatctagcgcttgtggcctgccgattcacgtagtttcataacaaccgctagaatcgatggcaaggcaggtccaacgatggatgctacaactatggcaacctcgac

SEQ ID NO: 52536 - DNA, 417 bp, Zea Mays
cgcgggatcattaaaatgtctttcctcgcaaacatcgtgctgctcgtgtttaccatcgtcgtgtttgcaaccacctctctcactcggtcgcaacataattgacgacgaattcgacaaccatctcccgcgctcgctctttttatataaatccaccccgccgtcgcacaacctcctatcttcccccagatccaaatcgtgcagggcagcggttactaggtacgcagacatccctcttgtttcccatcaccaatccgcctccaatttcgcgagacccaaatcacacgagcatgctccttcggttcctagcgacacaggtaagccttctcctcttctcccttttcctcccggcggtgtgcaacagccatttttccccaacaaatcccctcccacggatgcctgccttgaagcccatcaccg

SEQ ID NO: 52537 - DNA, 598 bp, Zea Mays
ggcagtgtgtgatgtttgttagagggtaaaagtggaacatcagagaccagctggattgcttcaccctttaaaaatacctgagtggaagtggaaagaaattgacttcattggcggtccaccccgcacttctgctgggtatgactctatttgggtgatcatggatagactaactaaagtagctcatttaatttcagtgagaactaattacacaagagccaagctagctgagttatatatctcccgcatagtctgtctacacggagtacctaagaaggttgtgtctgaccggggatcatagttcacttcctggttttggcagaagttacatgagtacatggacacgaagttgaactttagctcagcctatcatccctaaactgatggccagaccgagagaacaaattaggtgctagaagatatgttaagagcttgtgcccttaagcatcgtggcagttgggataagagcttaccctacactgagttctcttataataacagttatcaagctagcctgaagatgtcctcgtttgaagctttatatggaaggaagtgtagaaaccctttgtattaggatcagaccggtgagagacagttcttt

SEQ ID NO: 52538 - DNA, 576 bp, Zea Mays
ggttctaaatcctaaaaacataaggtttcttttgtaaaacgtacccgtgaaggggtacagtgcattatgggctgctggatcaaaactctacggtaccgattagattctcgctaccctgaaccggtactccatcgtggctcttagatccgaaatcaacggtgcggccaattctcaaccgaaaccctgtaagcaccgcccgatcccgggccatgactgatcgcagcgaaggggtatgcagccgatagttcccagtcctccgattacatttctacggaccagatcgcccctgcaagtgattagtcttcggaacaatgtggaccatcccctcatgaatcaatgccccacagtgtttcttcccaagtgtgacgcgcgggtgtccgagccgctagccgaaggtgagctcgccgccgtgacggtgaacaacccgagccctcacccagcttacgcctaactaaaccccccacgcttcctatcacacattcagagagggaaactgatcatacctcctatcgagacgaaggcgaagctggcgcgcagatccctagcccgcaccgcgatggaaactctagggtttcc

SEQ ID NO: 52539 - DNA, 304 bp, Zea Mays
ctctaattgcctccgaggcactgctgccatttttgtgaaggctggtttcacccatttaaaatccgttaataaacataccttcaatatttctccaccccaattgaacgaaatgcctgccaaagccagaagtgtgggtaacatattcgttacccaaatctggatgaagggtggaagagaagttgctggtgacgaagcgagggcgctactcaacgaagtatactaaaattttgtccattcatcttctccccctcctctttttttactgccaggtatcaatgtggtatcacatttaggctgatgatgg

SEQ ID NO: 52540 - DNA, 509 bp, Zea Mays
gttggctcttggatgtgctacagatgcgtacttgatctgaatgctcttttgctcgcagaaatcaaagaattctgaactggtgaaattggatcccaagtcagtgatgatactgtttggtatcccgaatctgaatattatgctttgtatgaattctacggctttagcagaggttaaagaagcaatgggctggaactctatccatttagtaaatttgtcaatcgccaccaatacatgagtatatcccccttgagctttcttgaaaggtccaatcatatccagtccccagcacgcgaaaggccaggttactggtatggtctgtagttgctgtgcgggcatgtgctgttgctttgacaggtattggcaagcttcacacctctgaactaactcggctgcatcgttctttgctgttggccaatagaatcctgacctgaagaccttcccgactagtgtcctagaggctgcatgtactccacactgccctgcatggacttcctccagaagttgcttcc

SEQ ID NO: 52541 - DNA, 790 bp, Zea Mays
gacaaaaaattgggaacaaaaacaagcattactccaaaccttccatgtttataccattatccagtgtagacaagaactggatataaaacaggcatctaaactatcttgaaacaacttaactcttttatgtagctatccagaaattctttcgaaatgacaggcctcaaagttgctgttttgttattttttgaaacacaactcggaacggatcaacactggtgggaatatagtttccttctcttttattcttctctaatacaatcgtacattctgactgaccaactaactggctgggcccttagcattgactgcatgctttgcaccaacctccaaatacaaccatggagctgataattgcttttttcgctgtctgctctttgagttctggaagagaaaatagcacagttactgtgtttttttttgttaacttgttatctattgcactcgtgcaggggtttgcactgtcatgtttgcatgccagctaagatacaagttgttacttgttaggggtagctcaatgccaagaattgctgatcatgagtttactactactgtggtggatgaatcaccactatgcaagttattttcactaatgtatctgattggatggctgccttttcggtcataatggcatgtgatgggcacatgaaggcctcaattttggtatggtatggtaactctgattccggccatgggatactggagctagatggcaaaattctaagaacaatcaattgttcctagtctgatggcaaatgttatgctgatcattatgacatttgtctgtact

SEQ ID NO: 52542 - DNA, 1067 bp, Zea Mays
atgagatttgggcctaaatgcaaaaaggccatttctgtgatcatatagctaaatctgaaattcagtgcatttggaccaactttagagccctgtatcttccaaattatgaggattttgccctaggtcagcacatcaagtttgtagagctatgtaaggaggaaaactttgctatagggattaagccttggtgccatgaaagattttgagaaaatttgatccaatgtcaggatgtcaggtcaccttaagtctaaactttcagtaacagggaaattggatgaacttagagctcgattttgagtaagatcctgtgactttttgtggatgcacactgtaacaaagttaaagctggtctattaggctacaactttgctgcagagcattgatctagtcaccctacaaaatcgggaggaaatttgccctaaacatgacctgtcagactgactaaagaagatcctgatggtacagtgaccagaaaaatctgttggtttagtgaaccggccgccggtgaccccgcgcgtggattcacgccggtgagttgattcgtgctcaccggtgcccagataacatctcgcggtgaaaagatcttccccgcggatgagcttaaggcactgtttcgtccggccgccgtgtccgctctaccccgatcaccttgaatcaaccctcgctggagttagacacctcgcggtcttgtgccacgtgccttagcactttaaccacgctaccgtgactcgtattgacctatccagagatcgccggtgaggttgccacggttgcggccaccaatcgtgtgcgccagtgcccctcttcctctccggccgccaccacgccaaaccaaattcactggccactgcttagcacccctataaattgacgacacggtctgctacgctaagttatcaccaagccagagcacccgctcttgcctccgattagcccccacagctctccaatttctctttctccccaattctgttttccaccaccgtggtagagccctcaccgtggtcagcgtattccaggtctgttcgtgctccctgctctcttgtttcagcatccttaggttctcc

SEQ ID NO: 52543 - DNA, 941 bp, Zea Mays
cgcctggtcccgaggtcaaactgcgccaaaaccgtgtcaaatgaatttggtttgagttcaaacttttccaggatgtgttcaaggaaatttggcacaactttgatatttggatctcctggctttgagtttcgaaaaacagagaacgcagatgatctttgggaagaggtctgaaattcagaaattcagaaatctgaatttctccaagggttcatagtttaagggctgatttggggatttatttgagttattttggctaagctttctcaacatttcttgttgcttaataaacatacttaaatttttttaattggctcaagtcaaaattttaacttttcatacccttttccttattttcttaaattttgctcatggggctcacttagggtttttattagggttgcacattcttatctttttaaaagactcaattgttttgatcatgatacttttaagtatatacttggtggattctttattacttaagttaatttgatgctcatgcttactttgattcacatgaaataatggttcttgggttggcatttgagagaaaccctaggtgacactcgggtgtcacaaaaggggcgagggcttggctcgagcacctgtcgctcgacaccatacatgattgggccaacctccgaaaagcattccttaggaactttcagggcacctacaaacgccgtggaagctcctgtcaccccaagaggcgtgcactaaggagcaaacagagcctctcggactaaatcggaggttctcacagaaaaggaacgaactcccagacgcatcaacgctgatgtggtgagcgccttcacctacgacaccaccaatgaggccctagtccacgagctcgaacaggagcgagcaaaaacggtcgacgacctcttcgacattgctaccaagtttgctgtcggggaagacacggtgggtgcgattttctg

SEQ ID NO: 52544 - DNA, 395 bp, Zea Mays
cagggagcgaggaacacatttagccagggagggaacggccacaacgagcgcgcaggcgacaactatggcgagaaaatcggtccggtggttgaagattgagtcgcggactccacctgccgagcgcgccacgaggtggggaacgagctacccaagcggagaagataagtctgttgcatgctccggctccggtggaatagagatcttcccccgccagcgcgctccattctgttacgacagcacgagggagatggctcttacgggttgggcccaccggcagcgactcaatgcatttctagccagggagcgttcggatgggggtgatgggccgcgcggctttgggtgggccaagccacggtccggatttggcacaatgcaatgtaaccaattcttttctg

SEQ ID NO: 52545 - DNA, 384 bp, Zea Mays
ggaaaagtttgaaccaatagaatatgtttgaatgtatgggtggaaataagggggatagtgttccctgctaacttgatagtgatgggtactcatggaatagatgttatcctagggataaattggctagataaatatcaagtggttatcagctgtgataagagaatggtgaagttggtgtcctcactaggagaataagtggtgactgagctaatcccacccgagtcaagaaaaagaggttgccaccagatgattattgatagcaaggaggccgatccactcgaggccatcaaggttgtgtcagaatttccatatgtgttccctaaagatttaccaggtatgccacctaagcgaaaagttgagtttggcatagagcttatccatggc

SEQ ID NO: 52546 - DNA, 896 bp, Zea Mays
aaaatccaggtttaagacggattaggggttgaggttttgcaggagccaggagcggacggaaacagaagacttcatcccacgtcattcggctgccctttttttggctgtcgctgcaggcttggtgcttctttgatgagttggtttactgttccatagctgctgcagccgctggatgtaaggcagccgaaaccgaaatcctgtatttggtcaggattttacgtggatttgacccggaatcctgtattacgtggatttacccggaatcctgtatttggtcagaataatttcagattttacctggatttgaccggttacatgtccatgaaaaattcagagtttatgtacgtgcattgctgctcacgacaaaagacgttaattcacactgaacaaaatatatcagataatagttccattacgtgcgcctgattcatccatgggccatggctcgcctgtttctcgatggcaaggaaagcaaagtagtagtgatagattcatggacacagtacaaccatcaaccatatagcacaactcctttgctaccaagaaaaacttgtgattaaaaatggtgaagctgacatagctctgtctttgctggcgctagtccaacgaaataaatacaatctaacagatgtcagcttgtcatatgaaaagtcttggtcctggtacaatctgacaaaacgtgtaaatgactcagtgtatttctgacagaatctagatggattctcgcttctcccgttgagaatcagattttaagcggaactaataaacatgcccatagatcaatggctcgttgttatgaatattctttgaattcataacatactgttgagacaattcctaatggtataattatttgatcttcccaaggttagtatgttattgttgagacaatttcc

SEQ ID NO: 52547 - DNA, 344 bp, Zea Mays
aattattctaacactttgacaattgttagagttaaaataaccaagtgagaactaacaagtagacttactaatttttatccgtgtcatttcaagcactaaaagtaccatactcaattaacaacgcgttctctatgacaatcaatatcgaagcgcttttcacccaatagtttgcattttaacttagacatcacatgagcactactaatttttacccgcgattataaccatgcgcaattgggctacaacaagcaaatcgccgtgaccacgagtttaaacaaaatcatctaacaagtctgctaaccagagcaacagtctaggccgctatacaaaatattcgtcggcca

SEQ ID NO: 52548 - DNA, 693 bp, Zea Mays
ttcatccccaccagcgaagctcagtcgaagtccaaattcgcgaaattccctccaccgttcccaaaattgatagtgcgtggtgaaactatagtcctttacggacgtgtagccttaatcccgcctcccaattcagcccgagaccgctgcggcttcgtttttacccttttctgttacccgcaagccaggatcctccgcgccccgtggtcagctcgtcctaggtctgctcctgcttgttttaatcatgttccagtatctatatgcgcgagtgatgctcatcggccctgccctttttgcttagtcacaatcaatcacccggaacacatgaactcgtgtcggtatttttccgccaccgtggtcagtctaaaccagggccgtaactacgtaattgaaactcattcttagattgtctcatgcctgtaacactcacctagtaattaaattgggcagccaccaccgatcttggccggtccgcgcaacaggatcatcgttggtgagcgtgccgtcgatttggacctcttcggagaagaaatagaattagaggggtatgattgcataaagccagtgactcgggaaatagtctcgagagcgttttttgaattatttgaagtagcgagggcctttccgcaagactaccagagcagcacgggcacgcgcgcgtttccgcgtggtcatgggccgcttgaaccagattcg

SEQ ID NO: 52549 - DNA, 687 bp, Zea Mays
gtcaggcagagatcattaagaatgtttgaattggctggtgtcctaactcatatgtttcatttgaacaaatcaacggatgaactgctaagacatgtacgccgtcgtcctgttgtcagtatgggtttcctgaatgcaacagagtgccatacttgccaccacattaccttcgacatctatcagttccgattaaataaatagttggttcataataacttagtgctgaatttgccaacacagttgcctactgcgataaataacattatgtagaaacaaaacaaaaataacattttgcagaaacataaatggaagttgatgcagtttacttcttagattcctctaatcaaagaattccttcgtacagagtgttgctcgcactttgtttgcttttgatgtggtgttctaccaaactatcgttgtttgttggttgagtgattggcgcactatgtactttattgccgctaaggtatcctttggtttgcatatttgtaacgtagtggatagttgataacgttaactcatatgctatttgcgctccactgtttttgtcaaccattatgctgaaaacctgcgaggattattctttttgccacaccctgtttttttaccattatgttgggaggttgccaagattattcttttttatcgttcgaatgcttgattgcaactgtagggcgcgcgaagcgcgcc

SEQ ID NO: 52550 - DNA, 651 bp, Zea Mays
gtcgagccgtgttgaggatgcgcacgcggtcggtatcgagagatccccaaggagggcaccatatataggggcgagagccacggctagctactaacttcctggcgagaatcgcggcggagtccacggcggcgctttgatcggcgcccagttgagattgggcggagtccgtgtggaggggacgagctgcccgattcccggtcccacgcgccagccaaggtgagcccgcgcgtgcgtgtgaggctgaggagttggggcgcggtaatgactgacaagaggccccacgtggcagtggaaccaccgcgattcagcgcgcgagaggagtaggtgggctgaggaagttttggcccaagtgtgcgctggtggtttttttctattttcttttatgaattttctgatttgttttgaatttgaaatatcaaatcaaattcaaattctcattttaaacttaaattttctaaaagccagaattaatacccatgtgaatataatcctttactgtttattaattatgttctttgttatttacttaggaaggaatggatgacttagttggaaattttcactcccctttccaattccttattccaaattcaaatttatacttctattttagttttcagatttttcaaatgtatcaattgaaacccaaag

SEQ ID NO: 52551 - DNA, 481 bp, Zea Mays
gttggctggagagaccatagatactattctccaggttctagttaattgtgaacaagatgcatgccaacaaggcacagcttccctataacgatcatgagagagcactgaaattactacatgctctagatcggagggtttgagaggtgaaggtcttggcgatcatcgagtcacccaactatgagactcccaccgtggacgagctcttcagcaagctcaagtccatagagattgacaactagactcgagccaaaattgagaaccctagtgcacccaccatggccctagtctctggaggtggttctgtttctaacccctcacctgttgtgtttgctctatcttctttgttgtctatcacatgggaacaagtggagagccttggggatgaggagctggcactcgtggccagccagttcacgcggttccacaacaaccatatgagccgatggcatggcaggtccaaggacgaatgctatagctgtgg

SEQ ID NO: 52552 - DNA, 597 bp, Zea Mays
tcacaccggtgaccgtttgccacctacagtgctggtaacaaccttgtaagagcggggtaagacgcttcataatttgtactccaccaccaccaccctgagagatagttgtagggttcacattgtttgttgcctttttgtctctgttttgtgctaacaatgacaggacaaaagaatcaaatggacaaggacaaggagcctaagcttaacgacgatgagtgtgtctctcagctggaattgaaggagatgatacgcgcgatgactgaagcttttaaaaaataccaggactctgcggcgacatcctatgagcagcttgatcgacaagttgctgaacttgttacacgcatggacgtactggaggctcgtccccccccccccccaccaactccagtaccagctcactctcctgtggacgatgacgacgatgatgacgatgtttatgcaccgctgcgacaacgcctcgcacgtaattcacaaggtatgggaggtaatggtagacgtcatcatcataatcctaaaccagactatgatccatttgctaagattaagttctctattcctccgttcatgggttcttatgatgctaaagcttacttagac

SEQ ID NO: 52553 - DNA, 553 bp, Zea Mays
caaggttgtcttcaaggaaaacatcgtaccctgaagtagatctgcgagtgttcgggcatccggcccaatcaacatctgtgtagacgagcagagcagagatcatgcatgggcgaagtaggagaccatgactaagtgtcccacgtaggtagcgcaggatacacttgagtaccaataggtgaacatcccgaggatcatgcatattaagacacacttgctgaacaacataggagatgtcattccgggtgaaagtcaagtactgcagagcaccaaccaggctgcaatactgagtgaggtcgctgacagtggtaccggtcatggcaaagaccttagcatgagtgttgacaggagtactgcacggcttgcaatcggacatatcagcacgctcaagaatatagagagcatactgctgctgtgaaaggaaggggccctctgaatgttgttgaatagccacacctaagaaatgatggagagtaccgagatccttcatggagaatggcttctaaagagcagtgataatgcgacgcagaaggtcttggctggaagcagtgagaac

SEQ ID NO: 52554 - DNA, 1195 bp, Zea Mays
tttttgaataacccgaaagagtccaaaacactatttgagatagtcgctgacacttacaaataaacccttgaacttctatgtcttcacagagtccggtccacgatggtggacggtgacacaccgatcaccagcgagcctgtactggccgatttacacaatgactagtgccctcatgcggtgtacaccaaattggacccctcctagtcatttcccctcaatcaattttactaacggtgcttggaatcaatcggcccacggagacagcgcgaataatcagacaaccaagtgcgttcccggtgatctaaggcagcttagttcaattgagttggtcggggagtatcgggggtacataagaacactcaaacgagggggcagagggtatgagcggatctgaggcgagctggccacggtgaggtcaaatcgttcagtgttcttgagtgctttgggggaaatcccaaattgaagctctctggtggaggatctgggggtacgggtgggtgcgctgagtgcttgactatatggcggagccgagggcgcgctcaatttataggattcggggtcggtggttctcaatttggtcacggcgggctagcggccggagatagggaagaacacgggtggctgcgaccgtggcgttcaccggtgcaacagctcaaggattgtactcgaaagggtgccacgattactaccgctcagtaataagctacggcatggcgcaccgaggtcaccggagcttccacgacgacgccggtagtccggccacgtcgtaacggctacaggcacggtgataaactccaatccgtgatcctatccatccccccgtgagatctttaccttctcgtggaaatcttctgcgtgcaaagcacgaatcccagcgaccagcacaaatctagacgcgcggatcgccggcgacgagctgaccgagctggcaatctgatcgggatactgtaccatcgcctagtttcttcagaacgactgacagagcacattcagggcggatttttcaccaaatttttatgtgacgactccatcctccctctgcaccaaagttgtagacctataaaccatcttcacctttgctatagcatctctagtcaaattcccactggatcatgctcgaatcagagctcaaagtttgctcaatcacactgtcagtctgaattcagacttaagacagtctgacaacccaactttg

SEQ ID NO: 52555 - DNA, 598 bp, Zea Mays
aaacagtgttagtacttgcccttagatattttgtgctagtgctgtttattttattattgtattccttttttcagataccagtacagaagaagaaaaaaaagtgctggtgagtgatgatgtagagaggaatgcttaaagaatagtaacaaggggagtgggtcccacacttgggaaaagggggttctcacacagccatatgtacacaaggtatcttctccggtggaggggggaaataggagtgagaggaacctttttatggctgatgctgtgattttaaccctaagcattattgcatgggaaattcctgatatgtccctggcatttggttgttctaacatcagcaccaggttacccctactgctgtgattttacacaatagcccctgataaagtgtcacgtacactcgtatataggactagtatatcacatatctgtacgcaagcaaattacctcctgagtgccttttgtatgtccgaagtgatgtgtcccgtggggcccaccaggaggacattagagccatttcccgtattgagtgccctttgtgctgggctcaaacctccagctaaaacacaaatcatggtctctaaataaattcggc

SEQ ID NO: 52556 - DNA, 1235 bp, Zea Mays
ggcggcttcgaccgtggtcgctggaaatgaatcggatgagtctgcgtttaagttttctgattttgatgactctgggagttcggttgagtggacggaagagtcttcggatgaggacttggattactttgcggccttggatgtggctgcggcggaagcttctccgcatgttacggatgctgaagttttgcctggtccgagtgctgggcgtaggcggcgaagggcggtggcgaagcgtagagtgagtgaagtggatggcggtcggcttcgtgtgggcagggctggcaagcgggaattgttgtcctcgttggttggggtgagtgtaggtgagggcgagttgtgaagtctttttgagggtgaggagcttaggataatgctatttaactatagggagatggggatcattccgaaggttgaaccaatgtaaggtgtgatgccctcgctgtacatatgtaactatagtttgtatggtgaggctgtgcgccttcgcgcatccggctatgtccataggggcatcgcgcacttggtctagcacgtttattatgtcggtccggctgcgcctgtagtcggtctttgcgcggacagtttcttggtgtagacttttgcacggatagtcttttgaggaagacttcggttttgcgcatttgttgtgctagttcggctgcacccttaggcgacttttgcgcggtttgtcttttgagggagacttcgattttgcgcacttgttgtcttgttgtgctagtccggctgcacccttaggcgacttttgcacggatagtcttttgaggaagacttcgatttggcgcacttgttgtgctagtccggctgcacccttaggcgacttttgcgcggattgtcgcacgcgagggtagctagcgctgcccctagcggtgactttgtattggtcgaatgtcgaaggccgtcgatgcggtcttttttcgacgtagatttttgcgggggatttttcgcttgtatattacatgcctccgcctcgttaaaaacctcaccccccgggaggaaaagagtgcgggccagaataaaagtgttttgcgaattacaagggcgagctggccctgaggagtcaaacaaaaaatttgcggagattatcaatgttccaggaatgctccaagtcctcgccggatggcattgcgagcctgtacgcgctgggggatgccttcatcttgacgatgaaagggccctcccacttgggctccagcttgccccgggactctgtccga

SEQ ID NO: 52557 - DNA, 286 bp, Zea Mays
tatatagcccggaaagaggtggagttgagaagtcacaccgctttagctcactgtccagtggaccgttgcaaaatagttttttctgctttcaataacgtgctcaaggaaggtgttttcagaccttcagcatggggtcttcgtttgttttgtggtttgagcccgttatgaaaaacatggtgaagccatcgtagctatgatgactaatggagcacaagactagcagatgaagcaaaccagagctatgtgaagtcctcaagacttatttagtaagacatttggaggaaag

SEQ ID NO: 52558 - DNA, 913 bp, Zea Mays
agccgatctccggcgagctcgtactggccggaatacgcaacggctagtcctttcctttgttcgacatcaaattctacccctggtgactctaatcccccaaccaatttcactaatccggaccggagcactcctgctcacgacgacggcaaaaaccgagaagaaacaatggtgttcagggaaatccgttacgatctagttcaatcaatcaagcctacaagcaataggagactctagagatgctagaacatttaacagaggggcatgaatcaacctcaggcaggctgaccacggtgagagactttcacggcaggattccgactgatttggggaaaatggtcgattgggcggctctagtggacgatagaaggcaagagctggtgctttggatgcgcaatgacttagcggagctcactagggcagtaatttatagggtctatcggtggtggcgtccaattttgtgatgctgcgctggcggccggagagagagaagagtcaccggcggtgatctatcgtggcgattgcggggtaataagctacagcggtcactgggtaacgaccatgactcacatcgacgtggtaagatatccaaaggcgtggcgcgactgaggaaaacggcgatagccacgacaatgactgtgcggccacatcaccggcaagtggatgggtgacagagcggctatagggctctgagttcatccaaggtgaagatttttccattgtccatcataatctacgtcacagagggcacgaatcgcggcaccggcgcgaatccgagcgcgcgaatcaccggtagtgagggggatgaatctgaagatctttttgcgtactgtaccatggtcatcaccttcagtcgtcctgacagcccaaattgaggagcagttttctccaacttttatgtgatagcccctaaccc

SEQ ID NO: 52559 - DNA, 531 bp, Zea Mays
tcagagctcgataatcggtgcacatccttctagtaccatccttcttctccacgaataggacaggggcggcccaaggcgaggtgcttggccggatgtagcctttctctgatagctcattgatcttcttcttgagttcaactaactctggtccagatactctgtaagctctcttaaagatgggggcagttccaggaagaagctctatggcaaactcaacttttcgctcaggtggcatgcctggtaagtcctttgggaacacatctgagaactcggacacaaccttgataatctcaagtggatctgcttcactgctatcaacagccatctgataacaacttcctttctttggctcaggcgggactaactcggtcaccacttcctctcctagtggagacatcaacttgatcgtcctcttatcacaactgataactgcctgatacttatctagccagttcatccctaggatgacatctattccctgagtactcattactatgaaattagcgggaaacgctatcccccttatttcca

SEQ ID NO: 52560 - DNA, 478 bp, Zea Mays
gtgcaacatgctgcccactgggttcgtcgttcgagtacaggggtaggaggcgaaaggcttcacgcctcaagctgacatgtgtacctgtgttgtggacaaaagacacgattgtgatgcatggcatatcatgtacagtataatcgtgttatttgttctacagccgtataagaagaatcactatcttcgcctcttttcgggctgctcttttgcgatctcttgctggaattggatgcatctacatactacattactacatatggttataggtgtccgaaaggaaaagttggttgctgctcaatctttgacggatgctgctgcaatgaggtgatactctctcgagcccgggggcacatgtgaaatgctctctttctcaattctgcgtatgctttgagcctttgataaccaggggtcgacactggctgcaccactctgcaatgtgcaatgataggacgagacgagatgagacgatccctcaaat

SEQ ID NO: 52561 - DNA, 367 bp, Zea Mays
ctacaaagtgtgctggaacattgtgaaaagtgatattatggcagtggtatctgctgtctggagcagaagatttagcaatttctggaaacttaacactgcctacatcaccatggtgcctaaaaaagatggggctgagcaagtaaaggacttcaggccaattagccttgtccacagcattgcaaaactgattacaaaaatcctcgcaaaccgactagcaccaagactgaatgaattggtttccccaaatcaaagtgcatttattaaggggcgattcatccaagacaacttcatgttagtacaacagacatctagactgtttcatcaacaaagattatcccggctactcctcaaacttgacatcaccaag

SEQ ID NO: 52562 - DNA, 526 bp, Zea Mays
gtctaggttgccccttgcccaataggatcgcatgacaaaggaacatcgtctgggacctctgaatggatgatggaactgtcaacctcagggggctccgataaaaggttctcagggatgatctcttctaatgcatggtcaaaatcagacatcgacaacccctggaggccgacaagtctcgataaggactgcatcgagatgtcactgctcctgctgctacggttgttcttgtaaatcaagggaatttcttattcctcatcctcctcatcctcatcaagcacacaaccgcctaccctagcatcgtcacaacctctgacatcgtcctcgagggtggtgctcaccgggccatcaacggggagtgatgttgaagggccagcatcttgttctaagcatgataaccacaagagtcgtttctttctctttttcccctcatcaggcgccgatggatggttcatccggcatgatcgcttgcgacgagcaccttcaagtttctgaatttgtttgtcttcaccaaggttctgcccaatcg

SEQ ID NO: 52563 - DNA, 687 bp, Zea Mays
tgacatcttgaggtacacatgatcaccttcctcaaactccagtggtcttcttctattatcagcgtagctctcttgcttggtctaagctaccctcgagttctccgtgattatacaggcttgttcttctgcctcttgaataagttcaggtccaaagaactgtcttcctccagtctgtcctaatatagaggagtcctacacttcttgccatatagagcctcgaatggtgacattttcagcctagcctagtaactattattatatgagaactcagcataaggtatactcttgtcccaactactaccgtgctgaaggccacaagctctcaacatgtcctccaatacttgattagtcctttcagtctgaggatggtaggccgaactaaatttcaactttgtatccatattctcaagaaaactttttccaaaatctgaagatagactgtgatcctccatccgaaacgatcttcttcggtacaccatgtagagacccagttcaagccatatatactctgccaattgagatcccttataagtagtcttaaccggaatgaaatgagccacttgggtcagtctatccacaataacccatatagaaccatatcctttcgaggtgcgaggcaatccagtaatgaagtccataccaatcccttcccacttccactcaagtatctttagtgggtgcaatagt

SEQ ID NO: 52564 - DNA, 566 bp, Zea Mays
gatcccaagtcactagggttgattgaggcaagtgccaatatcgtggtggatgtgagaatcgtgaactgttcgcctgcatccttgaagtcgtggactcccctatttttaacttcaaggggggctgccatgagcatcgggattggccgcgtacggtgaggaggcgaagtcgagcccctttagatggtatggcctcgggtatggggcttgcacttgctgttgacttatgccgggtggagacatctgattcctgctaagagtcgaggctagggtcgagggcttagttacatacccgagcctacctgacagggaggttgcccatgccgtagtggttgatgcagtgctgggtatgaagaaaagcccttgggtaatacatcagctctgcagtttacgatgacgtcgggcgccctttcgttgctaatatcgaggccaaagacgggctcgggcgaggcggaagtccgcccgaggctgtgactgagcccgctccaggattcgtagacatacacgacacagttgaaggagtgacctcctacgccaagaaggagatggtgaccggcgagaagcccgcc

SEQ ID NO: 52565 - DNA, 366 bp, Zea Mays
gcggtgacttcgaatcggtcgaatgccgaagaccgtcgaagcggtctttttcgacatggtgatacttggatatttttgcgggggcttttcactggtatattatatgactctgcctcgttaaaaacctcaccccctgggggaaaagagcacgggcctgagcagcattgtgtgtagaattacataggcgcgtaggccctgagacttaaacaaaaaatttctggaggctatcgatgttccaggaatgctctaagtctttgccggatgatgttgccagcctgtacgtgctaggggatgccttcgacttgacaatgaatggaccttcccatttcggctccagcttgcctcgtgattctgttcgggtggtct

SEQ ID NO: 52566 - DNA, 1200 bp, Zea Mays
cctcggcgccccgaacatgaggtcggcgggtaacactgcctccaaaccataaaccatgaagaacggggtatttccatgtagagctcgactaggttgagttctcatgctccaaaccacatatgacagctctctgatccactttcctgcaagcttttcatttttgtcgaacactttcttcctcagtgcttacagtatcattccattggctctttccacctgaccattagctcttggatgcgctactgatgcatacttgatctggatactccgttgttcgcagaaatcgaagaattcagagctaatgaagttggatcccaggtcggttatgatgttgtttggtatcccaaacctgaatattatgtcttgtatgaattccactaccttggctgaggttaaagaagaaataggcttgtactcaatccatttggggaacttgtcaatggcaaccagcacgtgagtatagcctccctgagctttcttgaaaggtctgatcatgtccaacccccagcatgcaaatggccatgttatagggatggtctgcagctgctgtgccggtaaatgttgttggtttgacaagaattggcaagcttcacacctctggactaactcgagggcatcactcttcgttgttggccaatagaagccagacctaaaaactttcccaaccagaggtctggatgctgcgtgtactccgcactgtccggcgtggatttcatccaatagctgcttcccagtagtcgaggaaatgcacttcatgaggactccagtcgcaccccttctgtatagtgtgccccttatgagggtgtagtgtgccgattgtcttgtgatgcattctgtcgcagccttatcatctggttcttcttcattctttatgtacctgatgataggctctctccagtcattggggtccaactctggctgattcaaggtgttgcattcttctgcctcatttgagagaatactcgggcgtgacacttcttggacgaagatctcgggtgggacctgggcccgactggattccagcttcgacaacgcgtctgctgctgcattgcggtctctttccatgtggtggaattctaacccttcaaatttgtcttctaattttcagacagctgcatagtacttgcccatagaattagtcgagcaatcccaatctttatttatctggcttatgaccactagtgaatctccgtataccat

SEQ ID NO: 52567 - DNA, 791 bp, Zea Mays
gtagaattttggccttttccctcgactttcttgtgttgtggattgaagtgattttgagctctcaacttggttctgtaaagaacgtctttttgttgccgtaaagcttaataaacttgttctgtgtctgagtgtttttggaataatcaatttggtgcttttagaaacacctttatgatttcgaaaatgaacttttccttttttgtttgggttgcatactgagatatttgtttcgatatgtcacgaggtatatagatgaaagtagtactctggttgggtcctcactgcaactgcaattttggtacaagttgtggtgtcgatgtcatgtgctgttcccagttcaccatttggagcccaaatactcctcctcatgtttgactcgcaactaattctggtcttggctgccggctaggaggccgtctagacttcctactttctaagcatgtgttggaatactagaaatattttagggtcagacactcccaagacaagagattatataaagtattggtttggtgtgttgcatgctgcattagtcttttaacccatgagaggactctgtccaagcctgtagttggacgtgtgctgatggtggacctggatgttgacgtgttcctgacatctgtggcctggactgttcctggtggagatgtttcaattgtagattcggatttttatttggtccttaagtccttgtcatgactcatgataagtgtgacaaggcccatggttggtctcagaaccgaggacgtgtgcggttgtgcaaccactctggaatcacaatatgccccact

SEQ ID NO: 52568 - DNA, 432 bp, Zea Mays
ggggttccaaaggctgctccacatcagcggtggaggagcaccactatctccttcggggcatccgactgccccgaaaacatggcaggggccggtatattaccgctcatcaccgcccttgtcattgccaacatgcgactgcaccatgttctgattgacggtggggctaggctcaacgtcatcagccatgctgcattcaagcagctgcagatcccagagtctcgactgggaccctctcgtccattctccggagtgggcccacaaccggtgtatccccttgggagcattgcactcctggtcacattcgggatcgaggacaacttccgcacaaaaaacgtccagttcgacgttgcggaagttaaccacccattcaatgccatcattggcaggccggccctgtaccggttcatggccattgcccattacgggtatttg

SEQ ID NO: 52569 - DNA, 368 bp, Zea Mays
atcacctgggcccaagcatttaagcaggacatcgttgactgttcggcggtagagttcatcactcattaaaacatacttgaaagttgtacgccgaacgttcctatccgtcctaacactgggatttcgtagataattaattatgggtgtcctctaatcgcttgcatcagcttcattaccagccaaatcaatcaggagagctttgttggcaatcccggacggtccgaagctctcactcggatggtccgcggcctgagaattggccctgtatcggttatcagattttcggtgttgtgaaatttccctcgctttatctgataacttgatgcatcttgtgccaaattgttagctctgtgattctcaactctaga

SEQ ID NO: 52570 - DNA, 698 bp, Zea Mays
tgcatataaaatgatggttggggatcctcctagggaaatatcacaccaaaagacatttgatatcagagaatacaaccaccacccaaaacaggacgtagggtattatctcatatcgagagcccaaatttgcataaatctgcatgtctccatgcctttaccttcaagtttcgaccatgtgacctaccccatataattactatagaaaaacttcaacaagaagataacaaagaaataagttttcaaggtggtgttagagtaactctaaggggagttggacctaaactagggcaaaccctagtaagagtattcatagaggcatcaagatgggaatcatactaagaaaagaacagggtgtcaaaccatgcgatgacactgttcatgcttagaaggagtgttgaaccatctattggagtattgaggttggtagaaaggttctaaaaggaaaataggggcgttggactggttggatgaagcgtgtcagactatacattacataagtgtgccccaatggttgctaacggctagctctaagatagtagttgttgttagccattggaccctgacaaaagggtcgaaaggatactcgtcgatgatcagtagtgtatagaaggtcctagccgaggtataatggctatactcccctccaatcgaccaaaacaagtatgttggagtgctataagaatgtagaagtcttgaga

SEQ ID NO: 52571 - DNA, 356 bp, Zea Mays
atctaacaaataattgaaacagtctacaatggaaactatattgcgagcacaacctattgaggaatcattaatgcctagtgttgagactatttccaaggtcttcgtctctcagaacagctccaacgacacattttttaataatgtaggtatcctcacaagctccacgaaaataaagacattgaaagagagagcgcttcaggaacttacagctgaaaagcaaagctcaactgctctccaccaagaagtagatgaactcaacaagaagttggcaaaaactcaaagggggtttgaggagtttaagaagcaacaggaagagaacaatctgcttctcaagcatatcttgcactctaacaacg

SEQ ID NO: 52572 - DNA, 478 bp, Zea Mays
ctatgattcaatatgggttatagtggacaggttgactaaagtggcacactttatacctatgaatacaacttactcaggagcccagttagcagagtaatacatgtcaagaattgtttgtctacatggagtaccaaagaagatcgtatcagatcgaggaacccaatttacctcgcgcttttggaaaagactacatgaatccatggataccaagctaaactttagttcagcttatcatccgcaaacagatgggcaaactgaaagaacaaaccaagtgttggaagatatgttaagagcttgcgctctaaagcttggtagaagctaggataaaagtttgccttatgcagaattctcatacaacaatagttacgaggcaagtctaaaaatggcaccgtttgaagcactttatggacgaaagtgtagaacaccgctttattggaatcagaccagagaaagtcaagtatttggtccagaaattctc

SEQ ID NO: 52573 - DNA, 414 bp, Zea Mays
gtgcaaaagtcgcctaagggtgcagccggatacacactacacgtgcgtcgaacgaagtctttacgacaacacatccacgcaaaaggccaagtaccaccctaatggcgcaaggtacgtaacgatcgctgttgtctgacatagtcgaacaaaaccacctacggatacaatcaagcacgtgtcttcggtacccacacattgctgcagcaagcgaagtcccatctcctttcacaacaaacaatatcatagtttacatacacacagcaaagggccaccggccacattgcacaaataaatacctaccgcatcttattaccctccctctttatcgcgagccagggaagggcagcgtttccactcactaccgcaatacaagagcgagggcagcataaacactacattggctcggccttcggg

SEQ ID NO: 52574 - DNA, 429 bp, Zea Mays
caaagaatgccgatggctgtctaaatgatgactaccatgatagacgaccaccgccattatcatcagcccgtaataagggcaatgttgttcaggctaagagcactaagaagagtaagatcaccaaccgagaggcttagagggccctagaggtggcctaggtagcagaagctacagagagaggtggcaacaacttgagcaatatgagatagagtatcagtttactgtatatcgatccatgtgtactcgaggacctcatttacaaccaccaaaaacaacaggtccagattacccattctttattcacttagacataaggatcgccagtgcttcttgagtacacgagcttcagtttgtaccactcgagcagtggtttctagcaaagagggattgtagagcttcatatggtttctacaccttgttgcatgaggg

SEQ ID NO: 52575 - DNA, 389 bp, Zea Mays
ctagatcccatctaacctaatatgatctaatctaaaagtgagttacttaatggaccagttaatacttgtgaaatagactagaccctatccacatgttttagcttagttcacccaacgctaaataaagaatgatagaccaacccaaccaatagagtcatgatgaattgcataatctatctgtgcctaccaaacatcaaacaagattttgacctacatcatgtagtccatctcacccataactacttcgaccatatgccccaactccgatgatatacactaaccttgaatcaaggagaccaagactagagaagaaaagatcaacctcgtcaaggaaggagagaagtcaaactcaatcttctaatgctttaccactcaacacagaattcttt

SEQ ID NO: 52576 - DNA, 1031 bp, Zea Mays
ggcagaataattgtagactatgctagtcttctggccctttgcatgctgaggactggatatggtcaggccatttaagaagtcttaaggtgggtacatgcatgtattggtggccatcgacaagttcacaaagtggatattgcatcgttaacgacaaccatagcaatagagttcatccaggagattgtattcaggtttggaataccagtggcatcatcacaagcgtagggtccatctttacatgggaaagttctttgattcctgtgagcaaaagtgcatcctccccaagtatgctttagtagcccacttgagggctaatggacaagtggaacgagctaacgatatgatcctagaggcactgaggaaaaaggtcttcgacaagaatgataagctcgttgggaaatggatcaaggagctcccataagttgtctgcagtttccggactcaaccaagccgaacactccatggcaacacgccattctttatggtgtatgggtaggaagcagtgctacctgtagatttggcattcagggcactaaagttgatgttaacggacatagcagaagcgaaagcaactcgactcgaagagaatgacacactggaagacgaacgactaaacactatgatcccatcagcctgatatcggtagactttgcgccactatgatgatagggcgattcgctgcagagcatttttggtcagagacacggtgcttcacagggtgctgttaggagaagtgcgacacaaactgactcccctttgggaagggccacatctcatcatagaagtcactcatcctggatctttcatgctatctcagatagacggaactccattcgggaacttgtggaacaccaagcacttctgtaagttctacccctagagctagaagagtcatgatctcaaaatgatgacctagaacttctactttaaacaaacatggtgtttagttgcatgcgttgaattattttttcctctttcttgttttcgctggcgactgctatcactgagcaatcggtacgagtcattgtctg

SEQ ID NO: 52577 - DNA, 304 bp, Zea Mays
ggtatgcaacctgcccacatcgttcaagaatagggaacggaccaatgtatcggggcgctaactttcatttaaccccgaaccgactaactcctttcaccggtgatacttttaagaacacatgatctctgacttaaaaaattaatggtcgacgtcctttatctgcataattcttctgtcatgattgagattctctcaagttatgttttatgcgttggaccttttcttccatttctttgaccaaatcaggtctaaaaaaacattgttcccctggttctaaccaatttaagggtgttttacatcgtcg

SEQ ID NO: 52578 - DNA, 574 bp, Zea Mays
gtcagattgtaatcgatgctagaggcgaaaaagatacgacgaagtttctgcttgatactagtcagtgtcttgataagattgtaatcgatcggtgcttgatttaattgaaatttagtgcttaagttatcgtagattttagtcagtgacttgatgttatggtaattctgcttgatactagtgacgggcttgtattggttggtgcttgctgcaagatactatccataatcctatcgctccgacattgcaaattatgatttaaaccactgtcgattttcttgtttagtcgaaactgagagttgagacagatactctctcgtctccctcgtctgctcacaagcggccgagatccaactataggcggctgagatcccgcgctttagactcacttctctatccgccgtgcggtctccgccacccttgcacctcctctgcgtcgccgcctctgcatctcacctcgccacaccactgccactgctatagtccacctaaccgccgtcatccttctccagcgttggtgccctgagcttcattgcccagttcattccagcagcctcatggagctccctcttttttt

SEQ ID NO: 52579 - DNA, 878 bp, Zea Mays
gataaaattaggtagaaccatgattgatctcagaaataaaagtagcatagttgagggatgattgtaaggtactctaggatgaaaggctcaaagggtttctgatctagcgatgtcttgcaaacaaggagctaatgaagaggcagctagcgagggcaaaccgattaggtagtggatcgatttttattttaggattgtggaatgggatgacagcataaaatacagtgcaaaagcaatgaaatatttcctaacacgtgacgctatgactagcaacaaacttaaaccacacgaacacaatctcaacaaaaccaattgtaaacgaaattgtaggttctataagccataggtatggggttttttatgaggctttttgtggactctaggatgaaaacaaaactaatattaaggcaaacctgacataaaaatgctcttattaccacttgatgggaatgggggtgcccgaacatcagtcacgaatggataactcttgattggttagcacgagacacatgatctagcttataatcgacagatcaaaaccctgcaatcgtagcaccacacgtcctttggttatcaaccggcgcaactcggtttacctcgccacaaaggctaatccctataagtgaaatcgagaacacaagcaagaattaagaagatgcaacttaatatgtgaataaagatgaagatcatgagttggggtctcacaaaccgatgaacgatgaaactataagagtacagattaatctaagaaaaccccatataatctaatagatactactgaatatatataaatacacacacacacaagaaagatgaccaaggcgacgtccaagggatggctgagcaaacttagggtgtacaaggcctttgggtcccaaaac

SEQ ID NO: 52580 - DNA, 696 bp, Zea Mays
gagcccgaagctcgaaacccgaaaaacccgagcccgaacccgtatagcccaatacccgatacccgaaatatttatgcgggcagtaaaccttaaaacccgatattatttcgggcttaatcgggtagcaacacccggtacccgaaatacccaaatacccgaactgtacaaacatcaccacatagacgacatacatcggcccagcccaactaaaattagaaagtagcaaaccctagtcttcactctccagtctatccagtatccacgcaagccgccaggaaggagtcgctggctggctcacagctcactgccgcggtgtcacccgtggccgtctggagcatccggcttccgacttctgagttccggccatcagcgattcagcaaagcaggcgtgcaactgtgctgatgtggtgcgtacactactacactagctcttgctcttccctgattccgtccaataatccaatgtaccagcacgctgtggtgccgtactctgtagcccgtagcacctggccggatccgtccaatactccagcactgccatccaactatccaatactccagcacctggccgtggtgccgtactgccagcacgccgtgctcttccgtgattccatccaatactccactttttagagtttgttatttcctcaactaatcaaggtaagttgcacggtgaaatatttgctctaaataaat

SEQ ID NO: 52581 - DNA, 698 bp, Zea Mays
gcattttctataacaatcaatatcgaagcgcttttcaccaacagtttgcattttaatttagacatcacctgagcactactacttttcatccgcgaccataaacatacgcatttagactacaacatcccaaacgggtgcgagaacactagtttctagtttaactccatgattatttccttaatcattttaactacttaattggcatcgaccgacttaaccttcatctcgacggtccgagcaccacaattcacgaaagtatacctagacatctagcatcacatagagagcctactacttcacattgcaattcatacagagccgcaaggtgacaataataacacacggtaatcgacccttctctacgaccttcagttaggtcaccaatagacgacatgatgactacgaaggcatgtcaccatttcatcacacccattcatcgcatatatgcgcactaattcatttcttgcgacacatgcactcaaaatcaatccacactacacaaaatacacttatttgcgaagcaaaatttaaggaacgcctaacgcgtatagactcgacttataattatagaggaagtgatgactacttacggcatgtcatcacctctctacataagccaaaacaatttctactatcgactaagagttctaagtattaaacacacggttactttccatgcgcaaataaatctcaactta

SEQ ID NO: 52582 - DNA, 398 bp, Zea Mays
gttggttatgccgtttggattgactaatgctccaagcacctttatgcgtttgatgaacgaagttctaaggcccttcataggattgtttgtcgttgtctattttgatgatattcttatttacagcaagactatggaagagcatttcgaacatttgagtgctgtttttgatgcgttgcgtgctgcctgcttatttggtaacgtggacaaatgcatcttttgcacacaacgtgtctcgtttcttggttatgttgttactccatagggcatagaggtggatagtagcaagattgttgccattcgggactggcctacaccgacgacggtcacacagattcagagttttcttggacttgcatgcttctaccgcaggttcgtccgtgattttagctccattgcag

SEQ ID NO: 52583 - DNA, 764 bp, Zea Mays
cttttccctcatcaacgcgcctgaccaccgtcgtccacacttccgagagaaagagagggtcgagcgccgccgtgggtgaacttcaccgtgcttgcgactggagtcgggcagttgcgcactggggcttctcgggacttgttgggtggtgattgtagccgcgccgcatggaattgctcgtatgtgccccgggaattgctcactgttgcgatcgctccgctgcggatccgccttgcgtcgcgagtagagtgttcgccgcctctaatcccggaaagaaacccatccaaactattcgccttctcctcctcgtcacgtagcaccaatcaattctagattgggatgcttgggcgttgaatcatgcgcgcgtcggcgagcctccaccgtgacaccatacatcgccgccgtgttcggggttgtgtgggtagctgatgctctgccgttgatctgtagttggatggcacatattaagttgggatatcggttcggccagggtgaatccggtgcgtccgagcgtgatcgtaggaacccggggaaattgcgggtgtgtttcatcgcgggtcgtccatcgtcgatctgagggtcatagattgcataccggttcgcgaattcttagatctaatctagcgcatcggccgttgatccaacgtctgtaatcggacgataccccttcggccgtgcacatttgtataagagaccctagaaaacctaggaatcaacccgccgtccctcgcgactgtactctaagtcttgggattgttacgtagagg

SEQ ID NO: 52584 - DNA, 685 bp, Zea Mays
gtggttcttagatgctttgcggtgggctctgtggcaaaagacccatagtcatagcacagcccgcaccacctttcctctttcgttcccctaaagtcactaggggtggagcttttaccctcgagctacttacccttgcccgatggactagagactgttctactaggccgagaccccattgagatacacctaggatctggatcccatggttggggtcgcctccggtctatcggaccaccaaaccgatgtcatcgagggttggtagggacgccatgattatcgtcctcaggttctagtcgttgtagagtgttgtgatgtcctgggggaggattagctctttcggaatgaaggtctccccagtcaatctgtgcaccatgaacttcagagcttcctgagttagataagcgtcaggcctacaaaggatcctacatcaatcatttgggccagtgaaccagtagaccatacgtgacctctggtataggggaacaatctggcgcttcaagaagtcactaattgtatgcatcgatgtataaccacccactgccagagtctcgatcctgtctagcatggggtcgagctctaatggtaggggtgtttggttctctagtgcttgcgatcgagggtgggcccactagatggcagcttaaggcgctcgttggcctcaatgctagcaaacacctagtcattg

SEQ ID NO: 52585 - DNA, 344 bp, Zea Mays
gcgagattatgagttcatctggcataagattgatgtcaccaccaacagaaaacggatggcaaagtagatgtgtccatggccattactggccgtaaggtcaaggccaactaaagaagaacacataaataaccatacaaacgagcataggcgatagtgtgaaggtaggacacctctctgcgtaccagatgcgacgctttcactgtacaaatatcatctttgcacagatttcggatgacctcaagaatccccgctacaagagcagccacacagacgacaaacactgcaactgcaagttgcgctggttaactcgcgtagctggaaaaccgatgttcacagtcgcaggc

SEQ ID NO: 52586 - DNA, 925 bp, Zea Mays
gacattgcttgaattttctatctgcatagatgaaagcaaattaatgaggtttcatctcctcaagaatacaataaccattcactaacctttggctcttttctaagatcaaccacatggtcgtaccaattcttagttccattaaaaccaaaaggctatcttcataacaatctagagaattttcatctttacaaacacaaataaaacatactttggcacaatcaatcatttttcttaacataatactttaataaacaccaacaaaagttccttacatgatgttagaggaaaaacctcccaacaccttgtgtagtcccaatagcagaaacctacataagctacatgaaagttaaaatattaacaaaactaaagcttcacccctcaatcaactataaattatgtggcatgatcatgcacatctttggattgtttatcttgagctggtgtagctcatccacttctctttcttgaccttcaagagccatcaactccacctcatgatgctgtaagaacaagaatattaacaaaactacactaggacaaaatagaaagatcattttgtatcaatgctttggccttggagaagacaagctcccgacccccattccacctgtgatgaaaatattgtccccatcctatagatctttgcaagaactttgtagagggactcaatgggagggaacttataataatcctccaataacttcacatatagcaggtcgttagcttccttcatcaaataaaacaatccatgaatcgaatacatgcaacttagaccacacgtagttttaagcatagaaagtacttttggtcctagctccaagtttatcataacagtcatggctaagctctcataagtgatttgttgagcataggaaatactcatattaatttctcatccatttttctctagataccttctttcttt

SEQ ID NO: 52587 - DNA, 378 bp, Zea Mays
atcgcaataaacctcaaagggtttggtgttgtcaggctgagctagcacgggtgctgttgtcagatgctgcctcaaggtatgaaaggcatcttcacatttctgactccaatcatactttactcctttcttcaacaattcagtcattggctttgcgatcctggagaaatccagaataaatcgccgataataccctaccaatcccagaaaactctgaatctggcgtaccgtggtaggaggcttccaattcattacttcttgcactttctcgggatcaactgacaccccctcctgagaaatggtgtgacccaaaaacttgatttctttcaaccagaaatcacatttggacaacttagcatatagacgatgatcgcgcagtct

SEQ ID NO: 52588 - DNA, 833 bp, Zea Mays
tccgctgccacgtatagatcagatcgtggactctacctcggggtgcgaccttttgtccttcttggacgcctactttggtttccatcagatccggatgtctaaggaggataggaggcataccgcttttgtgacagtggatggactatactgttatgttgtaatgccctacggtctgagaaacgccttgccaacatttgttcgggcgatgagtaagaccttcggggacctgatccgggacaaggtggagatctacgtcgatgacaccatggtcaagactagggaggggtcgacaatagtggaagacctgaccttggttttcggcaagttgcgggcaacccgcaccaagctaaacccggagaaatgcatcttcggtgtctccacagggaagttgatggggttcctagttttgtaccggggcactgaagctaacccggagaaaatcaaggctattgaggtaatgaggcctcccgcccgtattaaggacatccagaagcttacggggtcactggcagcccttagccgcttcatttcgaggttggctaagagggcacttcccatcttcaagctcctgcggaaatcaggcccatttgcctggaccgaagaggcggaacaagccttccaagaattgaagcagcacctagcttcgctgccgatcctggttgctccagagccaggggaactgttgtacttgtacattgcggcagctgcagaagcaataagcatggtgttagtcgccgaaagggcggtacaagaaggacagaaacctggaagcttaggaccagctacagagacccggactgtccagaagccggtctactacgtcagcgaggtcc

SEQ ID NO: 52589 - DNA, 650 bp, Zea Mays
cttcaactcttttatcggaacctcacttatcttatccttgattgttttcttcacttcgtcaatttgtgagtcttgccttaactctgtgcatggattatgcttttcatcattatcacctttatccttatcacctctatatcttaccttgatgtttatattatatcggcctttaaaatatcatcttttccatctcaatctgagcattataatttacctacttttcccttggtcgtatcctcttatttgtcgccttcgagtttttaactctatcctttgttgtgtttttgtttgttatttcctttacccttctcatcactctctcctaccttgtgattacattatgtctgttatctaaaatctccaatctcctatctcaattcaagagcggtgttttacttacctcacccttggctatatcctcttctttaccgtgtgtaagcttgggcgcaactccattctttgttgtactcataccactggctctccaatgccttcatcttttctctcatacccttgtctattatcgcattttacccttgcgatattgaggtcttctacctaaatgctccctttgaacttaccctttaaagctttctcttttctgacccagtttgagagtggtgtgttacctatctctcccttgattactc

SEQ ID NO: 52590 - DNA, 442 bp, Zea Mays
ctgatgattgatgcacgcctgcttggtggaggcgggaatggtgatcgatgattcgttgggtgggtggggggactggctgacagctgactgtgtattgtggtttggatggcaggtttagcgtcagtaatagctaggattagggttcaggtgatgctaagattttggggcgccaattgcagaaccactggattgattcatcttttaggggtttcctcgtactcggagtacgagggcaccgttttagttgaatgttgctctggtgtctaagcgccaggtagtcaattttgcagttttagttggggactgtacgctggcatcagtttttaccttctgatggagtagcctaaagttagtgtttccctgtgatggagtagtctctttttatgctctgattcgtggtcctccgaactctctggaattttttgtgcgaatatcacagatg

SEQ ID NO: 52591 - DNA, 482 bp, Zea Mays
taggtcatagacatattttgtgctttaagataaacattcttgctgatttagccttgcaaaataatatattttcttttgtagttcataggagcaaagagatccaagaaaatcaagacaagtgggtatctaaaatcaagacatgtctggtaatgagaagctaaccagatttggaatcccacaatgttctaaacacaaatgaataccagacgatgctttgctgctacaacaaattttgaaaaatcgcaaatttacaacaaagtggttagaatcatatatggaagtctaaacaattacagatccttggcaacaaagttagatcaggtccctgttctctaaaccaaggaggtaacacacagatgcagaatcagacatgggactggatccatgagctttggtgttacctgagcgggagcagatgagagcagttgcgagtatctgcgaaccaccaccacgtatcaatgaagcagtcaagacgccatctc

SEQ ID NO: 52592 - DNA, 1433 bp, Zea Mays
taattgatcttgctaatcaggccatgtagctcaaccttgtaagtgggatggaccatcgtcattatagcgtccttgctcttatcttcgatttcaatcccccgctcgtgcaccatgaagctaaggaattggatcatggttagcctgaatgcacacttctaggggttcaacttcaaaccatggagcttgttcctctggagcacttggcgtagactatgtgagttgcttgaagagccaattttagcattaagtcattgatgcagacttccaccaactagcctatgaggtcatggaagatgtaattcattgctagttggtacattgctcctacattcttgaggccaaaggtcattaccacccattcaaacaatttgatggatctagagcatctgaaagcagttttgtacacatactattcggccacgaatatctgattgtaccaagtgttgccattgagggaactcatcatcttgtggctggttaccacatcaataaacatacttgtgattgtgttaggtactcgtccttcagagtggatttgatgaggtccttgaagtctatgcagacaccacttgatcgttcttttcctaactagcacaatgctcgaaatccatgtagcgtacctgcatggtctgataaactgactctggtcatcttctcagtctcttctttgatctcttcaaggatgatggctggaaaccatgctttatcggtagctcattattggcagttcttatgccaattatattttactctacaggcgcatggataccactaatctttcaccaggagtattccaggtatcgtagtttccatagggaagtgacaggctagaggtaaaattgactaaatcaaagttaatatgagttgtaaacttggtaagcatacacactagtatttagacgagggcaagtgcaattcaaaggtaaaaagatggatatatgaggaagaaatggatagggaccctagagtcagtaactaggtaaagttgtctgggagaataacgagcgagatagagatccaaacaatacttatactactctgcaaaggattattcacgtttacctattgataaacaaacacaagctagggttttgctttgagtgaaattctaaggtacctcggtggcctaggggtagaaaggtagccaccatgcaagccaactatcacctatttgcctaccgattaacgaggccaggatacacatgccacactctcgttgtcaccaagatgggctaccaaccatagttgtatggataggatgacacattataacagtgtgcaagcgaagcttggacactgaagcttctccttgattagaggatcaaagctactcagtctagcaactaagactaggtgtggattattccatcgacaaatctaacaggatttgaataacaacaaactaacacaaccctaagccttgaattatattg

SEQ ID NO: 52593 - DNA, 641 bp, Zea Mays
aggcccctcagcaagcttcggcactttggccgtttcaatgtacctgggccggtgcgtcaaaactttaaccttttttttcctttcggcgcggtagaaatagctgaagcaacaacctttcttttctttccctgctttcgcgagggataacaatagtctgggtacatgaaaccaataacatcaaagactctgttcaatctctcgttgcctcgccctccgaaggccactgtcagggcatcatcctcggccctcgtgtaggaaccaagcaactcgtcgctaattgcctcaatgcaatctagctagtcatcattcggctcatcgaattgatttcggtacctgaaggtatacttcaggtaaactaaaccatcctggctgaacccagaagcagcttcggtcagcatctcccagccgcttgagagaggccacactctgtacgcaatgtgctcctggaccaaatccctggtgctaatatatgtgcacactgtgttgtacgcagcttggcatgcttctacgtcattcccaagagcaagagatggccttctgatgccgaagcgagaccatatagggcgttgaatgatacccttaatatcttctcttttgaccaggtcatttttcacataaaccactcttgcatccaggaccct

SEQ ID NO: 52594 - DNA, 390 bp, Zea Mays
gattcggccacgacggattggtgtatgagcccttggatcagaacgtgacggctcacgattccccgtctacttccgatccggcagcggcggcaagcgggattctatggcggcgtttcactggagaaatccccatttaaaggccatgagtcctacccgagagctattgcgtgcaagagtatgttaatgcagtaatgaattcgttggagggcgactcactgctaatcgcggcactgctcggtctggccacggcgagttgcgaacgacggtggtgttgaccggccgacgaggaattcctcaatatacggtgggtctccttccaattactccctcgcccagcttctatgtggtcaatcccacccccaagtagccccgttggagcctgaaccccac

SEQ ID NO: 52595 - DNA, 365 bp, Zea Mays
tagggatcacctccttctcatttgttgctttgaaagcaacgacttgaggcttggtggaggttgtgctcctattggcaacatcctctatgtacttggcatccttaatcatcatttgatggctaacgaacttaccaagaacctccttgggcatcatcttggtatacctaggattctcacagatcaaagaaacaagagtagcatctaaagctataaatgaacttagcatgagtcgaacgacttcatgatccatccatctctttctcccatagttccgcacttggttcacaagggacttcaacctattgtgcatttcttgtggcccttctcccctcttcatggcaaacctcccaagttcaccttttatg

SEQ ID NO: 52596 - DNA, 436 bp, Zea Mays
tgtggcaccgccgacgaggagactatagtcaagcggcgtggcgtgggtgtcgttccgcgtagggaggcgctatccgctctacattgcgtcccatcgttccatggtagttaaggtacccgtgccaccgactctctgactcaaacgatcaatcaatctgcttacgccagagaggtctcgattggtagatgcaggtggagtgctcgcggtactgatgcgaatggagcttggaagtcagataggtgtgtatgggggtgagtgatcagctgcttacttgctcgtttctaaattgatggagcatgaaattgagttgtccgtgtttatggcggtgacggcggctatgaggatgcataacatgtatttgtggaattgcggcaaccttcactgagtcttgtaaagctacttctgcgtcgtgatctaaagaaggttctcaaagcat

SEQ ID NO: 52597 - DNA, 477 bp, Zea Mays
tccaattcattacaagcataacaaccaccacagattacactacgcatgagcgttatccactaaagtgtccccaaactctctaaggagatcatcaaggctagccagggacacttcttcgatgtcgaaaaagttctctatccctagagagggtagtgttggcggggcttcttccttcgggtgagtctggcatccttggctcttgaaacacttttggatcttcttgacgggggtgagcttcttcagcctcctagcatagtccatcttcagggtccggtatgcctcacgagtgttggcttcttcgccttctgccatctcgagactgtcttgaagagccgccttttcttccttcaattccttgatttgttgctctaggctttccacccgggagtttaggtgggtgcagtgggagaaaagttcgtcaaagtggttgtcaagggtgtggagatatccgaccatgtagactatggttgggtcatc

SEQ ID NO: 52598 - DNA, 363 bp, Zea Mays
gaaatttgtgccaagtcatgtcataacatctaaatgccagcaaaaatatgtcttaaggaataaccttctgttaaatggtagttgtagttcaaaccaccccttctgccctagcattttataattttgtccagagagaactattcactttttaagcctcaacttttaggacagagaattatacaccagtaataagccactgtaatttttacagatttttttgtaaatttattaagacaacttgtagttgaaacccaccctaaaaacataaaggaaataaagggaaagaaaggaaagataaacctcgccccaataagtccaacttgaaatcttgacaattctcactaagactttaaaaagaattca

SEQ ID NO: 52599 - DNA, 894 bp, Zea Mays
gcacctaagttctcgtagtagggggatacaagcaagtcgagagagggagtgagtccgaagtctctgagtatgatcgggacaagtgccattttcaggagtggggtgaggtgtgaacgttgaagtgttgtctttgacctgcctatagaaggccccgggctcctccttttattgtcgcaaggaggaggcccaggtgtacaggtattgctatgcaattgttgtgttcggaggaggtgtgtccgagccctgtagcagtatggccggcaggatggccctcggctttcttgtcttctttggtcaggagaaggacactcaatccctgtagcctgttcctttgactaggtagagagccaaggccgagttcaagagcatgggcatgtgtctgagcctgacctgtataggggtgtggatgagacgtttccaagtgtgtcgagtcggagtggttgaaacagtgctcagcatggcagaaatttgtgtggtaatctgttccggacatcatcctgaacggtggaatagccttcctgtcttcaacggggttcgcggaagagtaggtggcatttaatgcgcatgcttccctgttgaggcagttgaccaaggtcaagcttgggcatggcgaaaatttcttccaaggtcgaggccgagattagacgttgcatgtagtcacactctcagtggttgaaacagtggtcgaagtgggggaatagtaccctgtattcacgctctgaccattgtttttgtggtaaaagtagattagatcgttgtcatgtcgtcctttgttgactttggcacctttagtggggtaggttgtcgtacgtactacattatatgtgcacgttccgggaacagagtggttggctgaggtgggtacaccctggagcgttgctcgagacaccctcg

SEQ ID NO: 52600 - DNA, 512 bp, Zea Mays
gtcaaaccttcgacgaaacgtgaccctcggcaaagagtttgccgagtgtgtttgaggttttgccgagtacctgaagcactcgacaaagcagctgtgttcgatagtggctcctcaaaaaacctctaatataaagtcatataaactacaggtagaacatattgacttctgatgacatgattaatcatttgatcaaaagcacaagtagtccttaaacttgtaagaatatgtcactatttagaattatgagcttcaaaatatatttcacagtagttcatatcagccgtgtgatcgttccttgcatggtcgtgtaagaaccagcgtgacatataggggtgtttggaagattatatattataattccaaataaataccccatacttttctacaagctatttggaagagctctgctcttattagatcctcgtcccccagcactactcttgtcttgagtctccaaagtagtgattccattagattctttgggcaaaaccatggggtgcactactggtaac

SEQ ID NO: 52601 - DNA, 300 bp, Zea Mays
atcttagcaatacacacagcttgctccaaagtttgaggcagatgtgactacactacagctgcgatatcaaatttcaaatgcctcgtgaactgattgatgaagaacagctgatcaaaaccgggattatgcatttccaacagcagagactagaactcagaagcaaagttatccatggttccggtttgacgtaactccaaggcttcctcataatcatacgtaccaaacttggtttccactacctgcataaattgttcccaatccatgaatccccttgcagacgaaccacttccacccattgag

SEQ ID NO: 52602 - DNA, 433 bp, Zea Mays
gtccggacattcgataggctctcttggaattaggggcggtgctaggtataagctctatggcaaattcaactttcctttcaggtggcatgcctggtaaatcctcgagaaacacatccgggaattctgattctactttgatagcttctcatggctcgatttcctcaatatgggcggtgatctggtgacagcttcttttccttgctctagacaagactaactccactaacacttcctctcctgataaggacactaacttcacagtcctcttgtcacagttaaggcttgcttgatatttggttagccaattcatccctaggatgacatatatggttacatctcgggtacccattactatcaaatcagagggggaactctatcccacttatttgaactctttcactggggaaaaatctatcagtttgggtcctcccac

SEQ ID NO: 52603 - DNA, 319 bp, Zea Mays
acggaactttgacacaattaaagcttgagtcagttcttctatagagaattattgatgcccaaagaaccgacaagggcatgaaacatattcatgagaaaatagaagccggcaaagcaaattgcttcagaaaagatgaccaaggaataatatggttcaatgatcgcatagtagtgcctaaagatgctgaggtccgccaacaaattttggatgaagctcatcttagtcgatattccattcatcccggaagtactaagatgtatcaagacttaaagcaacactattggtggacaaaaatgaagattgaaattgcacgctatgt

SEQ ID NO: 52604 - DNA, 485 bp, Zea Mays
atttggcgccttgggccattttcccctcgtgctggcccatcttccgcagaactggcctgccagtcggcccacttccccatttctcccgcgccggcccatctttcccttaaaacggtacactgggctaatttgggtcaccttagcgctgacatgtgggcccctttggccagccgctgattacctcgcgccagccacttgcacgcggaccatcttcgtcagctctatctccctgctcgaatcgaacgcaccccatgtccgcggtatagactagggcgggatctcctcccagctcccaaacatggcggactccaaccaaatcaatcgatctccacgcccgcgatctctactccgcgcatgtcgcgtcgtgttccgctcggaccaccgatttggggatatataacgcgacctcatggcaccccttcaactaccatctcctctgtgttcaaggccctgggggaattggagctcagtgccttggttgtact

SEQ ID NO: 52605 - DNA, 671 bp, Zea Mays
tgcgtctgtgcgaacgcgtggagcacacaggtctccgccgttgaatcgatccgcgacatgagagaggagttcccgccgcctcttctttctgtgtcacgctacccggccggtctcgtaaatccgccggttcactctgctgacacgttctggtaaatccgccggagacccgtacaaacctacgcgtgcagctagcgcgcgccctttccgtgttcctaccagcgacagcgagcggcagccacacaacgtaaacctagcacaattgcacagacctaaccttgtatctgacactaccgaacacgtatgtatccgggacagggtcgtctgcggatggatagggaagagtgctaactgctacagtagcgtaagagctgaccggcccaacgtgcatccaagcgtacgtgcgcacatctttaatccagaatgcacgcaaaggggctccagaaaccccctgtattgtacgagtcgtcgtctgacaaccggggtgattatggtaatactattttgtttgcaaattcatgtggcggcgtggcgctagctgcaccggcaacgcattgacactcttccggtcttccctgagcgcattgacactcctccggtcatggtttatccaaaacactgttttttcactattctgtgttgtagactgtactgtttgtagagtagagtttaaa

SEQ ID NO: 52606 - DNA, 673 bp, Zea Mays
cctcgcgcgcgcccgcagcgtcagatttgcacagaagaccctggcaatttggaaaacccttaaagagtctgcaacactatttctctgtgtcactgacaatcgcaaatagaccctccccttttctatttcttcacaagtcgagacccccgaccatggacggtggagcagggactccggcgagcccatatcggccggaaaatgcaacagctaagcttctccgttgcacaacacctaattctacccctaacgaccatttcccctcactcaattgcaaggttctggctcacaatcactctgtccacggtgatggcgcaaaccaaggacaatccgagatgttcccggtgatctagcatgatctagttcaattgaccggactgctaagcatctacagcacacagggatgttgaaacgagagcgaggaagacatgaacgaacctgtagagagctagccacggtgagctcactcacggtggagttttgattgaattgggggaactttgaaattggagtgctctggtggacgatttgaggcacgagctggtgcgttgggtgcttgactacctagcggagctgatggcacgctcaatttatagggcccgagggcggtggctcgtgaatttggaatggcgtgttggcgggcggagagaggggagagcactggcacggtgatttg

SEQ ID NO: 52607 - DNA, 709 bp, Zea Mays
accaaaaccaagtttgggagctattttgagcatgatccagtgagtatttgagtgtgattgctatagcaagattaaagctggattataggcctagaactatgttacagagggattgacgagttgccacatagaaatcggagattaatgccctgcaaatggctttatcagacagactgaatagagttttgattgtacagtaactgaagaagatcgtgggtgcagtgcaccttgccgccggcgacccccgcgcctggattcgtgccggcgatgccacgtgccttgaagctttaccacgtcgcagtaagccgctttaggtagctggttctttgcaggtaatcttgccacggtgaaagccacacatctcttgtgccagtgacctcccctctttccggccgccagcgcgccattctaaaattgggagccacctcccttggacactataaatcggtggcccagcttgctccgctaagtaattgtgcacccagtgaaaccagccctcacctccaatcatcccccacagctccccaatttgagatttcccccaattctgttctctgcgccgccatgagcgagctcgccgtggccagccttctgcaagtccgttcacatcctcctcgctctcgttactgcaccctggtgtgctcaggatgctcatcgacctagccaattgaactaaaccaccttagatcgtcgggaacgcctcggttca

SEQ ID NO: 52608 - DNA, 609 bp, Zea Mays
gaagaaatagagacagcagcagcagcgttgggcacgacatggacagaacatgcatccatgttgatgctgatgcaagggaagctcatcgcaggagcagttcgcaaacgcgcgcaaatgctgtccagaacgagtccatcacaaggcttcggatgaacggcaactgagatggaggcttatccggatggatgatggtgtttatctgattgctacagacccgggccgttgagagatatccgttgtacatgcgtaaaggaagtccttatcggatccatgcctcaggcctataaaaaaatacgcaagacgcaaggggagaggacgcatcagagtagacctacaccaccatagctaggcagccgtcttagccacgccaagctagaagcaagagcaagcgtcgctgctaccaacccgagctacaccaccgtcccgctcagataggagatcggggacgaccaccgtagcatgccacttgagcccagcgttcggaatttctcaacggcgaggaaggccgcaagaattgctgcacgactcggctagcgtcgtctatgcctccatcgctggtaagactgccaccaggacattcccggttttatctactacgtgtatcagtca

SEQ ID NO: 52609 - DNA, 507 bp, Zea Mays
gaagctgctacacgctggcttcatcaaagaggttcatcatctagtgtggctggccaacccagtcatcgtgccaaaggcaaacgggaagcttcggatgtgcatcgactacaccagccttaataaggcttgtcccaaggacccatatccacttccacgcatagatcaaatcgtggattctacctccgggtgcgacctcttgtccttcttagatgcttactctggtttccatcagatccagatgtctagggaagataggaagcatgccgcttttgtaatagtggatgggctttattgttatgttgtaatgccctacggtctgaagaacgccttgccaacatttgtacggacgatgagtaagacctttggggacctgattagggacaggatagagatatacgtcgatgacatcgtggtcaagactaagagagggtcgactctagtggaagacttgatcctggtctttgacaaactgcgggcaacgcgcacgaagcggaaccccgagaagtg

SEQ ID NO: 52610 - DNA, 380 bp, Zea Mays
aataaacacaaatataaaatagtcatgatcaaaaccacattcatcattacataaactatggagaaaatggaaatgttatgtaggatatttgaatgttggaagaagaagaagcatgcaggaatatcagcttgatcaagagaatgggcacatgaaaggaaaatgccatttgtgatttacagcttgcccatttaccctcgctttgaagttatatcctaaaatgttgtcactgattgagtatcactcaattgcaagctcctccataaaaggaagccaggataaaagaataagccaagcaagaatccaatcctaatctacctgtctcaatttctcaatctgacttgtttgtataggctctagggaggcagggtcagcaaggaaag

SEQ ID NO: 52611 - DNA, 271 bp, Zea Mays
atgaggtctgacccaaccaatagagtcttgatggattgcataatctattaacccccacctgaccaaccagattttgacctacatcatgtagtctatctcacccataaactattctaaccacattgccccaactccgataatatacactaacctcgaatcaatgagctcaagaccagagaagaaaagatcaacctcgtcgaaaaaggagagaagtcaaactcaaccttcggatgcattaccacctagcaccgagttcttcctcaccataaac

SEQ ID NO: 52612 - DNA, 553 bp, Zea Mays
acccattagctcttaggtgtgccactgatgcatacttgatcgagatgctcctctgctcgcagaagtcaaagaactctgagctagtgaagttagatcctaggtctgtaataatattgttaggtattccaaacctgaacattatttcttaaatgaattccactgcctttgctgaggtcaaagaagcgatgagtttgtattctatccacttcatgaatttatcaatggcaaccagtatgtgaatatatcccccttgagctttcttgaagggcccaatcatgtctagcccccagcatgcaaacaaccaggttacaggaatagtctgcaactactgcgcgggtagattctgctgctttgataagaactagcatgcctcacacttctggactaactctgctgcatcgttcttcgctgttggccagtagaacctagacctgaaatctttccctactagagtccgtgacgctgcatccacgccactttgcccaacatggatcttgtccaataacttctttccagtagccgagtgaatacacttcatgatggtatagtagac

SEQ ID NO: 52613 - DNA, 962 bp, Zea Mays
ccattgcagaggcatacattctataggaggtctcaaacttcacaacaacttattatggtgacaaactgccgagcgtgcataatccaccccctcattacaatgatggcgacaatgaatcgaaccttagcatatttcgaggccaactcggaagcgcaagtggctcgaccaccaagaccctggcacatgaagagtggtggcatatcatgctatacgtattgaccaaccttgaagaggtgacgccatacatggaacaatttcttcatgaattctggcgtcgatcaagggaccccactccacaggaatatgacactcttcttagaaagggtgcgagaaatgggttgcccgatttcatttcctggttcaaacgtaaggtacgtgcttagtttgtaaaagagatacatctttgaactcaatttagcatcttttaacttgcgaatacttgcagggccaaagagatccgtctatgagtgccgagttcagacaagtagccaacgactttgcttatagggtcaagaaatattctgggtatgacatcaatggataccgtttttgcacaacaaactacgacaaaagtcgacccaatcgaaaaacaacgtgttctggagtctttacgcccggccttgacaatgtcgattattttggatgaatcgaagaaatatatgagctcaatttttatggttccaaacctcttactccagtgatatttaaatgtcattggtttgaccctcaagtgacgagacggacacattctaatcttgggatagtcaaaattcgataagattccaccttagcaggagacgatgtctatattgtggcctaacaggccacacaagtgtattatctcccatatgcgtgccaaacaaaagaacatcttaagggttgggatgttgtgtataaggtatcgccgcacgagaggttacctattcctaacgatgaagattacaacttagacccggacacat

SEQ ID NO: 52614 - DNA, 538 bp, Zea Mays
tgggggttcggctggagcctagggcgctcgaggcggttgtcgcatgctatagacgatgtagtggtcgcgggcggggactggaggtggcctggaggaacaggggggccgactggactgggtgctagcatcgacgacgaagcccctaacccagagtcgctgggagcaacaacccttgtgtcgtcgagagatcctgacgggggcacgataccgcacccgcccggagtagtagcatccgaagtgctgggtgggggtatgaaaccacacacaccagaggagaagatgccaggtaggggcacagggccacgctcgctaggcaaggagccactagctgcatgaccagtaatacaaggcgcagtatccaagtcgcgaccaagaagaaaatcgaaggagctagcgggagtaggagggtcatgggtgaacggaaaactgagctcatcaaatacaacataacgagaaataataattcggcgcgtggagagatccaggcagcgataccccttgtgagcagaagggtaccctaagaagacacaggcgacag

SEQ ID NO: 52615 - DNA, 391 bp, Zea Mays
gcaacgttcgaccatccctcgagaaaagacttcgagactagctcactaagttgaactggtccctcgggggctagtgttggagcggaggccgaacacgacctcgatctatctgaccctgctatcatcaaacatgtttttggtacaggtgcatcaagcgaagggtacaccggattgggcacatagcagtttcaattcctcacccttcattagggggtgatggcagaggcccacaccagacgaggaggggtgctcgctgcaacctcaggtgctaggccttctcctagacagcgaggtccatgtcccagcgaagtcaaggacatgactttgtggattcaaaggtgtgacacccaggcgaaggccacgttagattacatgggcacacacgctccgc

SEQ ID NO: 52616 - DNA, 411 bp, Zea Mays
atcttctgaagatgacctagattattttgtggtgctagatttgtctgtcgcggagtctccaccaagggttgcccccactgcggtggtgtcttcacctaaggttgtcccgaatgagctgcggggtaaaagaagaatcagggtgtcgaaacgaagtgtaggaatgcttggtgagtcttcgtaaggcactggggtccctcgaagatgccgccgaatgggaatggagacgtcccttctccgggatggaatgcggttggagggagatttgcggtctctttttgacggcgaggagttgaaactaatgttcaatttccgtgaagcctgccttattctgaaagaagagccaatgtaaaatgtgtgttgccattgtcgtgctttggtgaattcaagcgtaaacgctgccctcacccccct

SEQ ID NO: 52617 - DNA, 365 bp, Zea Mays
ttcaaattcatcaaagctcacatatccattcaaaaatcacaatcacattacaagtcaagtcattcgttcaccaaactataaacattcagttcaattcacatcgtccatcatacataaccaaaataaggcacaagttcaataaataagcatgcaatgttactttgtgccgctacttgattattagagttgtggctattggctcctccaggaggaaggtaggtgaagagtgactcgacaaaactgattccaacgggtttagtcccactcacatccagcatatcctatgtagaaagaatgcaaatattcacaagttaagtatgtaaatgtccaaaacatacgaatagctcgagagtcacaaaacgtat

SEQ ID NO: 52618 - DNA, 342 bp, Zea Mays
ctctaattctgagagcttctaactcagaaccaagcctagtgcctgcaagaattgaaaacaaaactgtcaatagggctatgcagaaataaaagtttttattctcagattagactcttacaatagcactggtcgatgacagattgttcgtccttgcattagccattgcaccatggctaagatcagtgttttcaccagtctcttccatcgtgtaatccttattatacacagtatcctcgaatttcttgacctgaaaaaaggtttatgtagtatcacatgaaaatatttgtaaaccagatccgaaactcagaggtgcatgcacaattacaaggtgcataaaaagtg

SEQ ID NO: 52619 - DNA, 282 bp, Zea Mays
cggattgggtgccagcgccgaccagccttatggccaccagaggagcaagaaatggacaagttctgagaaaccacccacctttcccgtgacgagtgactcttgggccgactttggtgaggacactccgatagaatggtcagttgagaggatccaagggtttaaggcagcataaccctcccgatagaatgtcatttttgggaagcaagggagcgacaactgaagttggttgggggtaagagcagagggaacctctacttataacgctcgactagctcccgaaag

SEQ ID NO: 52620 - DNA, 752 bp, Zea Mays
ggaatattaaaggctaattctgacggactgaatctctcccgtaaggtgtatgagagtggtcaatagcttttggtgttcttgataccgaaggaggtcgaaatattattcttttaaagctcaaaggtgtcttatagatgttgctccttcattccaaaagctatagaaaatatactctctaccgacgcacttcaccacccggtcgggaacagagatgggtcctccaggatcctgactcggcacttccaaaccaagcaggcatcagatttgtctggtccaccatcggaccgccacgtttctgcctcccgttaaagtagtcgttaccacacggtccagtgcaccaccggaccactcttgtagacaatctggtgacatttatcctcggactatagagttcgcacggaggaggcccggtgcaccatcggacctatactgtacaactttatatgatatctaaaaaggaaaaagattggttggcaacacataaagatgtgttctcttggacaaaccaacaaaagcaaataggggcatttcgggtaatcgagtcaaaaccatactagaaccgcgaatatgtaaatgttggagtcaagagcactgttgacgcagcgattgatgcatatccgccctctagaaagtcctgaaaattctaccacgccgtcacgatcaccatttaccaccacgaagacctgcgcctgcagttgcaggaacataaacgccaaacatgactagtacagctgacagcactaatctagaga

SEQ ID NO: 52621 - DNA, 463 bp, Zea Mays
ttttgataatacgagcttgttgagcgagcggtgatcgggtagataataattgttcaaaacaaattggatgcaacctcttgggtaaaacacacagaaagaggtttgtcgataagtcggcattgaaaaatctatggcacatgagacagatgtggatgtcgaacaacttcacggtccactcatggttagccagggaatccaagttttaggaaggtgatagaagtctgataaaacatcaatgaagggatccatagatgttgacttcacgatgacccaacctcatctggcgctagtgcgactccgcctaaccacacatgatggataatcacatgggagacgatcgaggcatgactagactgagaataaggtagctgccagaagattcaacttgattcttgcaagtacttccttaggatgggttgaactaaagtgagttcagacaactcgataaaacgatctgtaaact

SEQ ID NO: 52622 - DNA, 664 bp, Zea Mays
gatccccaaacggtccagatcagcgatcaacgacaaggccacctttggaaccccggacctgctaagggcatcagccaccacattagccttccccgagtgataatgaatggacaaatcataatctttaatcaattccagccaccgacgctgcctcaaattcagctccttctgagtaaaaatatacttgaggcttttatgatcggtgtaaatgtcacaagcctcgccataaaggtaatgcctccatgactttagagcaaaaaccatcgcggccaattcaagatcatgagttggataattcccctcatgcttcctcaactgccttgagccataagcaatcactctgccttcctgcatcaacacatagccaagacaatacgcgaagcatccgtataaactgtgaaacgcttaccgctctcaggcaaagctaggataggggcgtccaccaacttgctcttcaatgtctgataactgacctcacaatcgccggaccagacaaagggaactcccttctccaagaacctagtcaaaggcttagcaatgctggaaaatatttggcatgaagcgccgataataccaagcgagccccaagaaacttcggatttcagagacactagagggtctcttccactccaccacagccgcaacattcttgggatcaaccgca

SEQ ID NO: 52623 - DNA, 759 bp, Zea Mays
gtcggtttgctgactaaaatatggtcaccagtggtagtggtcgaacttgtgatcagatttgagttaaatccagtaggaattcgactaggattgctataacaaagataaagaggatctataggactacaacattgctacagagcctcggatgagttgtcaagtaaaaattagagaaaatctggccccaaatcgctctgtcagtccaactgaatcaggttcgccatggtacagtgcctagacagatcagatcaaccgctcccctcaccgccgatgacttcgcgtcgggatcgtcgccgccgttaagattcgcactcactggtaaccggatagcactcggggtcgcgtaaatatcctcgccgtggatagactccggccattaaacaactccggccaccgtaccatgttcactgcagcggaatccgataacttcgccggtgaccgccgcctctcggccttgtgccgcgtggctctacctttccaccgcatcgtcgtgactctctatggtcgtctaatcgtcgccggtgaggtcaccacgacggtagacacgaatccactgcgccaaggttcttctctatctccggccgccagcgctgctcgaccgaattgatcaccgccgctcttgctccctacaaattgagcccacggttagctgcgctacatcatcacgaaaccaaagccccaatcccaccctcaatcgttcgctagagctcgtgaatttcgaatttcccccaattcggtttccgccaccgcgaagagtac

SEQ ID NO: 52624 - DNA, 544 bp, Zea Mays
aaagcatgatgctggaatttaattgctacctactggctagatagatgtttgatttgactgaggattatccgtggctggatcgttggacctatgggctatggatggctgttgttggagtatatacgtgtgaacacggcaacggcacattctgcagattagaagcaatctgcccctatcagtgacggatttaattttggtcctgtcgattgcgagtcctgggaacctaggaaccgtatatatgctattcgcgttggataattattagatagtttttttgattaatttcaggacataaaccatgacgaaaggcacgtactagcatacatgatgtaactcattaacatgctagacgtagacgaaacgatcaagatcatgttgcaaacagtaggtatgaactaatgaccttgtccattaatcctaaccattacatacgtaaacgatagatgcagattaccgacgttacatagggctgtatgggggcgacggctgcattctccccactacaccgtagcccggattttgtgcagtacaacatgtgcagtac

SEQ ID NO: 52625 - DNA, 382 bp, Zea Mays
agcacaattcgcccctggccgttcatcttgagattagcggcgccaacaccttcttctaccctgagctcgcgcgacgatcaagccttggtcaggcccgacgagcggcaatcggcggagcactaagctaccgtttggagcgcgacccgaatctacgcagcataggaatgacggcgaattccaaggccataaccttaccgccgcaagatgtgcaggccgagtcgtccacggatgaccagcgcgacggaggagtccgaccacgaggaagtacgacgcggtggtgaagcactccctccggcgagcaattggcggatttcctcggcccaaatcgcaacccgccgaagacccgagccgcttacccagcttctggtagacccacgcggac

SEQ ID NO: 52626 - DNA, 446 bp, Zea Mays
ttgtcacgacgcacgtcacacagccgtgtcgctggttgccaaatcatgactaagcacatacgatagaggtgagcggtggtggtcctcggcactttgggttttgcttggcttgtcctatcctcatgttggatgtgtcctctacaatcgaccattagagactggattagacttaatctaactaatcatatctttgatcgtgttcttagttgggagggccaacgttaacatcggttagatcctccggtcacacgacgctatataaataattaatagatcacaggaaaaccaacgctagtacctcgcctgccaaaccctaatccacattaggatcccatctcctaggcgacgctagtgaccggaagagctagactctaataacggtactggatccgcactcctcttatacatgacggcagtggcttcgggaattggaggcgatactggtg

SEQ ID NO: 52627 - DNA, 650 bp, Zea Mays
caacagctgccctaggtacgagttcatcaacctaccatacaatggctaggctcatgagggcacatttacagccgatgggatgggtacggatgccccaacactagccttgtgcgatgggaaactagggatagaagatttctcatatgcgtgtgtaagtttgttgaacaactcctccattaatagatctatgtactatttaaattgatcttttaatgatttatataatacctaagggattctcatatgcgcgtgtaagtttgttgaacaactcctccattaatagatctatgtactatttaaattgatatttttatgatttatataatacctaagggattgggtatcatcagagttactaatagtgggggctgttgtagtgatgtcatcaggaagcgagctttacttccctctcctagatgaccctctagtggcgatctatcatgaagtacgagaagtaccacctcttcgcctgaatctgagcttatcgttgccggtctcctcgtctagcctctccatgtagtcttcaaattacgtacgctcgtcgactgacgaatcatctatagtcagcctttatgtcgttgcgtggggaaacatcgttgacatttttgtagatccaaggcttccgtccccagtggagtcgctaaaaagaa

SEQ ID NO: 52628 - DNA, 459 bp, Zea Mays
gggagatcttctgcgacaggttcgggagctagctcctggacttcttctgggcaactccttgctcgaggatgatcacgtaatctttgtcagcgaggttgcaatctaatgaatgcaatgcataagatacatgtatactatagtatgcaaaaataataaatatgatgtgaggttgagtatcataaagtcacctagtaaggttagggttttcttcttattaactaagtccttagtagtgtgcacttagtggtgtagatttaaggttgacccaaggaatcaagggtggttttgagacttagctaacctcctaagattttagtgaaggcttagctaggtttttgttttaagtcacctaatgaacattggttggcccttaattcttcttttctattctacatatgcttttaagggtgatttgaactacaactattatttaaaaattccacaatttttgtacaaatt

SEQ ID NO: 52629 - DNA, 346 bp, Zea Mays
cccctagggccggttcaaccggttttgaccaataaggtctggggaaaacccccggttgaactttccttggaccccagttgaacctgtctagaccacagttaaacttaccctagaccccggttgaacctgcctggaccccggttgaactcgtcctggaccccggttgaacctgcctggaccccggttgaacctgcctggaccccggttgaacttgccctagaccccggttgaacctgcctgaaccctagttgaagtgaagtcaactgcagctgaagacacagttgaagtgaagttcaactgcagttgaaaaagctcaactgcttttcaacaggaacactcttagttt

SEQ ID NO: 52630 - DNA, 426 bp, Zea Mays
gttgagcgaggaatgggcttaggaaaaccacggcctcggatgtgccatgccgttgtcctgcctatgagtggtagactgttagtggaccggcccaacctttgtcttttaattcagtggagtgaatctggaattataagcagcagttagtttcatattaccattttacttgattcatcaaggttatagatacccatatagtatttttattgaagaataaatatttaggatctggttaatgaagatgcctccacatatacatgctcctagcaggaaacaaaaatcatgacatatatcgtcacatcagtcaccaaaatctcaacacgcttcctttgatggctagtgccacttcgtttttccctatcaacaattttgtctctctcatccaatcgcccgatgtcccacgcctcgtttttagagtaaactaat

SEQ ID NO: 52631 - DNA, 535 bp, Zea Mays
ggaatttagagatatcttgatccaaagatgggctgtcaggcggtttttaactgaatagggttcgcgatggtacagtgttcggatcagattgctagctcagttagctcgtcaccgacgatccacgcgtctggatgtgcgctgatcaccgtgattcgtgcttggaacgcagaggatatccacgggaaggtaaaagatctcacgggggaatggatttgatcgcggattgaagtttatcactgtgcctctagccgtcgcgacgtggccggaccgccagcatcgccgtggaagctccggtgaccccgattgcgccacgccgtagcttcttactgtgcggtagtaatcgtggcacccttaggagtattatccttgcgtcgttgcaccggtgaacgccacggtcacagccacctgtgttcttccctatctccggccgccagcacgctgtgatcaaattgagagccaccgcccccggagcctataaattaagtgcatcatcggcttcgttatgtattcaggcatctagtgcacccacccgtac

SEQ ID NO: 52632 - DNA, 917 bp, Zea Mays
gcaatggagtggtaggacaatgtggtttggaaacatgttgcaatgctcattgtttcagattaacaacaatactactattgttaactttggtatgccgtcatttattctcattgtttcagattaacaacaatactactattgttaactttggtatgccgtcatttatgctcattgtttcagattaacaacaatactacaattgttagacaattgcagtaatcgtattaattaaaataaaaatgttatttggaaaaacctaggggtaaagacacacaagcattggtaactaaaagtaggttatctcaccttggagctccttgacgactcctcctggtggccgctgcgcttgcacagctccctgacgaccaacaaagagaagtagaccatgggtcagtacacgtttaggaaagatcatttggaaggttaggtgccatccaagtcagtttctttggacggactgatactctaggacagagcaagtgtggatcaatggtttggaaacatgctgcaatgatcagggtgagatttacaatgcaagtgtagatcaatggtaatgtcacaagcagtactccaacatgtaagctaaacaataaataagcataaatcgtattttacccatttgtagcagtgttaatcatttagctcggaaataacaaccgggggcacattctaattcacaatttgcatcataccttcatggattaaattaaaaacaatggttgtatgtatgggtattaactcgatctaggggtagggattgggatggcggcgtcataccttgcaccaagttagcagaaacagaggctgtagagaaagctgcgcttgcaggtgttggtgttgcccttatcgtgcctaggttgtggcgttcagaaacaccacacacacattgttggtggtgaaggtctgcacaccggcga

SEQ ID NO: 52633 - DNA, 307 bp, Zea Mays
tgtctagaaaacacatgttttttctacaataaaagaatgatgtcaagtagaaatttatagaagaagtacaaagcggtgtggtgaataggatgttaatggaaatgtacttccacaaagtcattgacatctgaaaatgtagtagacctgccaacctgcgccaaaactcaatggaggtaagcaatgagttagagagttatgtgaatacagtatcaatgtctttgaaaagcctatgtgaaagcgactaaaacaagtgaactgatgtccattgtacaaacagtagaaaacataaaacccatcacagtcaata

SEQ ID NO: 52634 - DNA, 322 bp, Zea Mays
ttatcacaagcgggcagactacaaatggtaaatgtagtattcacctctcttcccacattttacctctgcaagctcaagattcctagtacagtcataaagcaaattggcacatatagaagacactgcatatggagaggagttgatcccaatgctactcgcccagcccaggcatcatggcatttagcttgtaggccgaaacaaaaaggaggtctgggaatattacatcttaagaaacacaatgaagccctgcaaatgaaaatgctacataaatttcttaacaaacaagatataccatgggtccaactaatttggagaaatagat

SEQ ID NO: 52635 - DNA, 376 bp, Zea Mays
cgaaggtctgaggtgggcttaccagtttatcgaggaggggtaatggccggcggcggtcctagcggtagccccaaatacgacgagcaattccggtctacagatgggcaaataaagaggccagggtcatgatacacgaccccatgatgaggacgaacgtgtgggagggtagctcacctgcggcagaagtctaggctatactgaccacggtggtcggcggaatcgggtgactctcccttcacaaggtggcaaaattctccacacccaactgagccgagctttggtgcccaaagcagcaacacaggcatgactcgacgatccgaaatcctgattcgcgtgggagctccttggcgcaggcgacgcagtccgagttccccca

SEQ ID NO: 52636 - DNA, 494 bp, Zea Mays
gtttgttttgatgagagtctcctctagcctgagaagcgtctcgccttgttccttgttccttctcaacagcttaatcaagagcgctttgtcttctttgttgagatgggtgtagaaacggcgaatctcctcttcttccacatcatcggtctcattttccctgtcattactattagtggaagcaaaacaggaaaatgtaccttgtgatgatgtagactcctcatcctcatattctccctcatcattgcttttgtctccactatcattgttagcaataaagcatttattactagtggaagacaaacctgttgatgaggtggattcatcgtttgatgcccatcgttcttgttcttctctcttgtacaagttagtatcaccagcaacagagggagcagtgggagtgcatatggacttaaaaaatttcaacttaagtttagtccatagatcatgagcatcaacaattaagtcactatcactactcaagatggcaaaatagg

SEQ ID NO: 52637 - DNA, 1540 bp, Zea Mays
gaagacaaaccccaagccaggcctcagtcgaaggccataggggataggagcattcaacgcatgtacctaccccacgcagcgtcgcaggagaacatgagcgataggaccgtggtcccgtcaactttcaccaactacgatgacgcataactgagtaaaacgactactattcccccacgccgcctaccaactcctgatgaaacacgcatacgacaaagcgcgggcttgacctcaggaggaaactacgcctcgcccgaagccagcctcaacctcggaacaaactccgcctcacccaagcctgaccttggctacctgctccccgtgaatcccgcaggaggccactccttcaattgtgtcatgcatgtctaagaatcctagagcgggctcggtcacggcctcgagcagacttctacctcgcccgagcacaacttcggcctcgataatatcaacgaagggcgcccgatatcaccggaaacagcgaagctgacgtattacccaggggctttttgccatattcagcactgcaccaaccactatggcatgggcaacttcctcatcaggtagctcaggtacgtaaccgatcccttagtcctggtctcggctctctacgtagttaaagatgcaaatacacgaactagacgtctccaccgggcacaaatcaataacgggtacaaaggccataccggctacagggctcggctatgcctcaacaccatacgcggccaaccccgtcactcttagcaaccctccttgaggctataaataggggagtccacggctttagggaggcgggcgaacacttcacggttttcacctcgactgtgatattggcacttgcctcaatcaaaccctgggacatgggatcctcccctctcccgacctgcttgtacttcctactgcaagtacttagatgcaagtaatataagtctcaccctcccactgctaaaagtagggctttctctcgctcgaactaggataaacgacttgtatcagcttgcatcacccatctgggccatggcacgcagcatcatttcactggtgtgaaatccttggatcaagacactaatagataaaagctaaatcatttcaagttggacatctagttggaagacagtcttgccattaagaagtatggactagaagtttagcaaatgatcaccaaactgggaagggccttatagagtgacacatttaatctttggtattgcatacgtgttgtagactttgcagggtgatgagttacctaaggcattgaattcgttttctaaagcaatatcatcccagtgtttggcaagatgcttagaaaaccaatgttttcacatcgagttgataacaacgtgtacgaggtttttttgtttcgcttagcttccccgaaaggcagagtcatgtgttgagcatcatatgtggcacctagtggaacctaggaaggtcagacggtctgaccatgtgccctggatggtccataccccggatagtccacgagatagcccgagtggcccatgattagatcaaatcagacgagacatctcccttttccgtgcgt

SEQ ID NO: 52638 - DNA, 554 bp, Zea Mays
cactgatggaggcagcacaaggtagtaagggctcatttttctcgttttgtcttcctcctccattttcctatactctccacctctttctccaatagagtggggctcatttttatctctcctcctccaccttctctatcctccacctctatatccaatgaagtttcatgtatgtagggtaacctctagacccctttagatccaccactgagtgtaactcagccaccaacaggcgagtgcaaatctactagtgcgggcaagcacgatctttatcggaaatacatcgagagtaagacatattatacttgtaatgatagtttttttaactactagcatacaacttgtggtaaccctatgatcctgaggagaggaaggggtcgacggtggtagtggcacgaccgctcgagcgagggaaagggggcgacacggacgcgggaggaaggggaggggtgctaggggcggtggtgtcaaaggagagagagaaggatgatccaaataatattgtccattgaatttgagtaatgaatagtaagttactcaacaattgaaccatttgt

SEQ ID NO: 52639 - DNA, 342 bp, Zea Mays
gccctccggtggctgatccgaccagctatcggtgtctcgtcggggccctatagtacctcgtcttcacacgccccgacatcgcctacttcgtccaacaggtgtgcatccttatgcatgccccgcaggagccacatctcaccattatgaagaggatcatgcggtacctctggagcaccatcgacgtcagcctccaccttcgacggttcgcgaccaccgagctcgtcgtctacaccgacgccgattgggccggttgtcctgacacgcgccgatctacctctggttttgtcgtgttccttgacgatagtctcgtctcttggtcctcaaagcggcagccggtcgtct

SEQ ID NO: 52640 - DNA, 421 bp, Zea Mays
tagtaataccaatctaatctagatcccatctaacctaatctgatctaatctaaagtaagttacttaatagaccagttaatacttgtgaaatagactagaccctatccacatgttttagcttagttcacccaacactaaataaagaatgatagaccaacccaaccaatagagtaatgatggattgcataatctatctgtgcctaccaaacatcaaacaagattttgacctacatcatgtagtccatctcacccataactacttcgaccatatgccccaactccgatgatatacactaacctcgaatcaaggagaccaagacttgagaagaaaagatcaacctcgtcaaggaaggagagaagtcaaacttaatcttctaatgctttaccactcaacacagaattctttcccactataaacttt

SEQ ID NO: 52641 - DNA, 355 bp, Zea Mays
gcccatgaacgattgtagatgaggatgcgtcaaagaagaccagcatgaacttgcggatgtacgacttcaacacctcattcatgagagcctggaaggtagaaggtgtgttcatcaacccgaacagcatcaccaggaactcatagtgccctcgatgagtgcggaaggttgtcttggcgatgtcgtcggggtgcatttgcacttggtaatggagttgtcgaggctagttggttacgccatctcttgttggaacttcgatgcccccttcacaggagtattcttgtctattgtgacaacatcagcgccgtctatttatccaccaatccagttcaacatatcgtacgaagcatgttgaaat

SEQ ID NO: 52642 - DNA, 617 bp, Zea Mays
gaataacaacacaagtggtcaaatgaaccttttatatttcccaatttattgtacattctatcactctcactaattgggtattacaaatcccaccccccttaaaaataatctcaacctcgagattaagatgaactagggaagaggtggggaaattctatttgtagctcttcttctctctcccaagtagcctcatcttctccatgatgactccattgcactttgcacatttttatcactttgcttcttgtaacacgagtcaaagtgtctaggatcttgataggatgctcagtgtacgtcagatctccttgtacactaagttcctccattggcaactgttcttccgggacacgaagacacttcttgagttgagatacgtggaacacatcatgtacatcagacagatgatcctgtagctcaagctggtaggccatctcccgaactcgcttaaggattttgaagggtccaataaaacgaggggataacttgcctttaacttttaaacctcctcattccacgaattggtgacacctttaagtatacgtgatcaccctcttcgaattccagtggtcttcttcgattatcagcatagctcttctactgagtctgggctatcctca

SEQ ID NO: 52643 - DNA, 599 bp, Zea Mays
attggcccttaggttagggggttggttcctttcagacgaatgcacccacaagggtagaccccatatgagagggaccaacgaataggaggaggaggacctagaggttggagccacccgccaagccaagacttagctaagactccactttctaaccacctctacgacgaataagagactcgggaacctctcctccctctctggtccacttgtaacccttactatgagctttgatcatcaatggtgccggcagcgcaaacaccgatgactgaaagtaggtacgttctgctcgaaccaatataaatcttacgcgcaccgagcacactttctggagcccgaaacacgcacaataaatttacttgtcagagcaaggtttgaaacaccgacactacaaaaatgagatatctccctacggacatactcatcttctagctctagacttctctataaccaagaacaccgtgcaatacaacactacaaacatacatgatgtaaggtattacacgcttgagcaacccgaatctgtaaaaaaatcttctatgttccatcgtgccctgcatgaaccatcgagccacaatcgactttgccatcctcacaaaaac

SEQ ID NO: 52644 - DNA, 552 bp, Zea Mays
cccctattacatgaaggagctagactactggtaatcttggtcatgacgtcgggtccaggatggccgagacgacgatgccaagtggtggaggaggtggtggagaccaggacagtgtcagagacctaccggcgccagcacaaggtgaagagggcgcaggaggaaaggaaccaagggatggcgttcaaatggtgggccgtcgcattcgtaggcctaatctccgtgtcaagggatagagtaatgggccttaggccatagctatacaggaatataaagcaagcgtgtaatggaaagatagacaggaaatataccagaacagggtcagtctgctcctctgcctatccgtgttctttccttcctgcctgtcttctgcttcttcctcgccaaggcgataacaagtggtatcagacttggtgtccgatctggcggctccgctccactacacaaggcgcgcgaagatggcaggtgcacccgatccaagcgtggcgtcggccctggaagcgcagtccaaatccatggaggcgcaatcaaggacgctggcgactcaatcccaac

SEQ ID NO: 52645 - DNA, 469 bp, Zea Mays
gctaggtccaacaatgacattaacatactcaaccagtcaccattattcactgacgtccttcgaggtcaagcacccgtagtgaactttatggttaatggacacaaatacaataagggatattatcttgccgacagcatcgacccttcctggtcagtgttcatcaagggtattcctcttccacaaagtgagaaacatcagttattcacaaatgctcaagcagcatggcacaaagatgtcgaatgcgcttttggagtgttgaaatatcggtccaacattatagcagttcctggacattcttactcccaacatacttttggatggatcatgtgtgcatgtgtcattttgcacaatatgatcatcgatgatgagtgtgatgccaatttggacgagacatatgagacagttgattctacagccagtccgacgatctactacaatgcacccacgagcctagcagccaggatgacag

SEQ ID NO: 52646 - DNA, 816 bp, Zea Mays
cttttgatcctccgataagtcacaggaaagccagaatgacccccaacagcactatcatgtagcgctgacataaccatctggtgtaattccttgtttgctcccagccaaatcctacccttgaaacggatgactccttgagttaaggtataatgttcccgttttgcaccagtggtcaaactctctattaatttctgggcagttgaatcctgcatatatccctaagtaacttgtcgtagccagctaggtgttatagaagacacagacaacccattcagttgcatggttactgaatcttgattcatgtctggccgtcgagacagagcatcagctaccttgttgtcactaccctgtcgatactgaattttaaactgcaacccaagcagcttagtcaacgctttctgttgccaggtggtggacaatctctgatcatcgagatgggttaagctctgatgatcggtcttgatgatgaattcaccatgctgtaaatagggacgccattgttctatcgcaaagagaatagctaaacactctttttcataggtagataaacccagattctttggacctagtgctcgactgataaatgccactggatgtccgtcctgctgtaagacagcaccaactcctcccccacttgcatctgtttcaatggtaaaaggcttggcaaaattaggtatagctaatactggagtctgtgttaaggctgttttcagagctcgaaatgattggtctgcaaattcagtccaagcaaatatattgtctttttttagcaggctggtgagaggtttgctaataattccaaaatgtgccacgaac

SEQ ID NO: 52647 - DNA, 433 bp, Zea Mays
ggtctggtccgactgaagtataccttcagatttagggagaaatttggtgaaccaaatgatggctggttgaagtgcatcgaagctaccagtgatgagctgcttggagcatactccaaagctgaagataacaccctgtccgcagcctttggtggctggggcaagaagagattaaacaaggtatttgatgctattggcttcgtataccctgactaccgctacctgctgcgaggacaagagaaaaagagaaagatcgctgcttcggtcacctcagctgagcctgtgccgaagggcaaaaaggtaaaggttctgacccaccagccgcgttacattgaaccggtcgtggtgcctgaattcggcacagggtcctcctcagcagccgaagcaacagaaagtgcttcgattgcacagagcactgaagagacgaacgcaatgc

SEQ ID NO: 52648 - DNA, 558 bp, Zea Mays
cacgttttgagttgactcatttggaagcccctttcgatgtggaagagctacttgatgcaattaggaatttacatccaaacaagacaccgagcccggatggtctcatgggtgccttctacagatcatgctagcctatcatctaaacaaatttaatggtggccatgaattctatatggtcaatgattcctaaatttcgacctctcgaataggaccaacattgtgctactactaaagcatgatggcactgagaatttatcaagctccaagaccattagcctcatccacagtgtcgcgaagctactttctatgaggcttgcgcccaccatgagggatatcatctccaaatgctagtctgcattcatcaaaggctgaaacattcatcataacttccttttcatctgcaacatggtcaggagataccactgcaacagaactcccatgcttctagtcaagcttgacatctcaaaagcctttgattatgttcggtgggactacctcctcgctctcctggctcatcttagcttccctaccaaatggcgagatttggtggtatctttg

SEQ ID NO: 52649 - DNA, 336 bp, Zea Mays
caaaaaatatctatgcacaagcacaagtagcttcaccagatcgatgtataaccacaattagcaaggtgctagaatcaattttatgccaaaatagaaggtgccacaatcacgtttaggttagttggagactcaccaaatggtatgatgtgaggcgcagggtctcaagaacaggatgttgggagtgctgctgctgctcaagctcgtggctaccgtggggcgaggtgcataaggctggcaggacggcagtttggaacgcatggcgagcaaggatggtgggcgcgataaggttggtgcatgcgtcgaacgtgggctagtgagggtggagggtgcgacaag

SEQ ID NO: 52650 - DNA, 440 bp, Zea Mays
gggcaagaggggcgtaggggtcggtactcaaggtgccttaagaaacaggacaagaggccctaggggttgatactcgaggtgtcatctgccatggggccagggaaagaggtgccccatgatactcgaggtgccctagggatcgggacagaaggtgcattagatgccattgtctgaggtgcccaaagattagggcaggaggtgccctagggccaatgcacgaggtgtcccgaggtgtcggggcatgaggtgcctgtgaggccgatgtgtgaggtgccctatggtgcgaaaggggcctagggttgtattgttgagagaaatatcctcatcctcctcctcttcttgcatttgaatttcccccgactcaagcttatcctcgttcctaagaaatggtcgcaaatcaaaaatgttaaatgtcggtatgtccccaaaattcgtagaca

SEQ ID NO: 52651 - DNA, 577 bp, Zea Mays
ttgcaggatgcaagcctatgtatgcaagagattgggtgaaaatgttcattacctccctctgttgcgtattaacgagagagtcataaagggctatgatataccagatgaccacgaatagctactgaacttcaatccagaagagagagtgaaagcatgaaaaatgctgaaaaatgatttgagaaataacgcggcaatgtacgtgtacggagtcatgaagaaggctggggaaagtggttgtgtcatggccgcccaccagttctggtaaggaaattggatattgctagagtgaaagttgattcttggacaacaactaagatttgaaatttgtactgtgcaacgagggaatcatggaccactatattgcatttctgttctatcctcgggatgattgggtcattgtactcgactctctagatacaccaaaagaagggtataaagaattagataacgtacataaattgtaagtgacggtacttgttgttcatttgctctatacataagtattcaaattatcgttgacgataatcgttgtttgttacgtacaacgcttaccgcaagtacgtggatgatcttgaat

SEQ ID NO: 52652 - DNA, 720 bp, Zea Mays
ggcctagtgaacctattaatgatgtcactgaagtatgttgagcactgggtcatacactcataggcagtgtatgcctctgcaatagatccttcaggtcttgctttattgcggatgaaacacttaaaggtgcccaatcttctctcaatgggatacatccatccatactgcaccggtcctctaaggagtgcctcatcaggtaagtgtaatgctaggtgaaccataacatcgaagaatgcaggaggataaattttctctagcttgcaaaggataagcacaatatcttccttcatctgttgtagtgcatcaacctttagagtttttgagcaaagttgtctaaaaaacctacccaattcagtaattacttcatatacatcttttctcaccaaaccacgaaggccagctggtaaaatacgttgcagtagtatatgacaggcatgtgtttttagcccatgcattgatcctcctccctccatattaacacatcttgatatattggaggcatagccatctggaaacctaacattgctcacaaattgcaagaacttcttctttgcttctggtgttagaacgtaacaagatttgggctttgacgatgcattaccactgtcatctagcaaatgaagctcttttcttatacctccacggatacgcctccgcacagggagtcctgcttagctccgtagatccgtccaggccgcgacgaaggctgcctcaccggcc

SEQ ID NO: 52653 - DNA, 394 bp, Zea Mays
gttcaggagtaaaaatcctagaaaagttaaggcatggctagctccatatctctgcccctgatccggatagactataacccgaaacaagcagggcctaactataaggccaacatgctcgcgccctgctcaccctctatagcccaagtacaaacacccgtgtgttgtcttcttgcacaaactgcttcaccatagagacagagcagtacaatatctatattgtgtccatctctcttcttcgaaccttggctcacctcattggtctacgctcgaccgctccgcgtccgtccaagctcatcaaaataggataccagaatcgatagcatggggaagtgttataccgaaggaggacatgatggcacataggccctaacgccgacagaggcagaaacaaagc

SEQ ID NO: 52654 - DNA, 535 bp, Zea Mays
tccacatactatatcttctgatcaatacagattttgaccttgcaatcgtggtttcactacctcttggtaagtatcacgaaccagcctccgattgtaccatcctttgcttgtatttcgtcagacacttgtaagagcttggtaagatacattagtgtgttcctgtgttccacctgagaggagcgtgtagtgaaattattagggataaccgtcaccgttagtttcctatttttgtgtttcgatggcaggcgacgaagaagaagcaaggatccctacagacttcgatgaatgtgttagctgccaaggtcttgaggcaaacaacaagctcctgaaggagcaaatggagaagacggtccacaagtcagtgcaagataccttcattgacatgaaccttggcaagacttacgagaggctggatcgacgattgtcccagatcgtcgatagacttgctgtgttggagacgcaacaacaagcaccaccaccaccacctcctcgtccacgtcttcccgatgatgtagtgtttgatgaataaggtaat

SEQ ID NO: 52655 - DNA, 552 bp, Zea Mays
tgggaatcatggctacccttagcagagttttcgcaaaaacagctaccaggaaagtataaagatggctccatttaaagccttgtatggcagaaggtgtaggactccattgaattgggtcgaacctagataaaggaggtactatagcattgaatttgttgcagaagcagaagaaaaggtccaaattattcagcaacacatgaaagccgcacaatctcgttagaaaagttatgccaaccagaggagaagaccgcttgttttttaggtgggtgaccatgtatacctgaaggtatgtccgatgaaagatgtacaaagatttggagccaagaagaagctcgcacctagatacgtggggccctataagatcttagaatggagaggagaaatggcttacaaattgcaattgcctgaagcgatgagtgctatctttctggtttttcatgtatccaacctaaagaaatgtctgcgtatccctaaggaagagatcgaaccacaagggctcaagattggatcagacttagtataccaagaacagctagttcaagtggtggacag

SEQ ID NO: 52656 - DNA, 577 bp, Zea Mays
gttgaaaatactagtgatgaactacttggagcatactccaagtctaaagataatgaattatctgcggccttcgggagccgaaaaaagaaaagactaaatagggtttttgatgctattggatttgtgtaccctgactatcggtaaccgccgcaggggcagaaaagaaagggtgcaacttctgggaaggatgttgcttcagccgcttcaagcgagcccgcaccgaagaggaaaaaggtgaaggttcttactcaccgaccgcgctacattgaaccggccaaagtggcttaatttggcggtgagacctcttcggctactgaagccaaaggacctgctcttacgcagaggattgaagagccggctgcaatgccgaaggctgacaaaattgaagaaccgagaaccgaaggtacgaaaacatcagaagttctaagcccttcggcaggagtggaggctccaaagacacaaaaagatctagcagcaacccccaagagaaaaaggatggctagtgtattagatgtgctggagacgataaaaacttcaagctctactccaggaaaaattgccaaggcttcgaaaatac

SEQ ID NO: 52657 - DNA, 394 bp, Zea Mays
gaagatatcgacggagattagaggaaagccaaaaatagccgatgaggtacaagtctaatcaatagaagcattgaagcacgaagtgatatgaagactagccaagagccatctaccgaacgtccaatctgttgcagatcaaataaatttcaaacctaacaggacatgggcagattgcatgctcgatctcaaaggcaaaactgtatgctgacctctaaagcataaagttgatgatataacgctggtttctaaggcattcgacgaagatgaaaggatgattcctaaaaacagcatgagatgaagacctttgagtagattattttcagtaatccactcaaagcttgggggctacacggtgcacccaatggatcatcaacccccaaaagacagaatgttg

SEQ ID NO: 52658 - DNA, 1108 bp, Zea Mays
atgagagtctgctactgctaggctggttgtacgatagtactactagtgatgagagggacgctagctagctgctctgctctgctctgtgttgctctactctgctctgtgtccccgatcaaacgagagagggttgacccatgcctacgctgcagcgcccggctgtttgcatgggctataaaatgcaccaccatctcaatcgatagggacggtcgggtcacaatcgccactactctacccactagtacagactagagcagtcgatggcctcctcctccgtttcactcctcgtcaccatcatgttgttgttgctgctgccgtcttcacctgcttgctcctcgctgagttgcaggcttgacttcaccagtgtggcgctgcactcctgccaggagacgacaccacaaaaccctacttccacatgctgcgacgccctcctctactccatcgacatcgggccaattcatgaactagaaaaaggtctttgctgcctatgtgtatacatggtttcaaggaacactacttttgatctgcctacgtcttacgtctcatgctggaggtaaagactaaagtaatgtgctgcagtggaatgccatcatctctcgccgtatagactgcaatggtaagtcatggacattccttaattaatcatgtgggggtaaagactcaagcatgcgggaatgcagcagcagcgtagccggcagggaatgctgctgctgggctggtagtggtacgataatgatgagagtctgctgctgctgggctggttgctagtgatgagagggacgctagctagctgctctgctctgctctgcgttgctcttctctgttctgtgtccccgatcaaacgagagagggatggcccacgcagacgcagttgcgtcctactgtttgcatgggctataaaatggaccaccacctcaatcgatatggacgaccgggtcacaatcgccactactctacccactagtacatactagagcagctgatggcctcctcctccgtttcgctgctcgtcaccatcatgttgttgctgcttctgccgacgtcacttgcttgctcctcgctgagttgcaggcttgacttcaccagcgtggcgctgctctcctgcgag

SEQ ID NO: 52659 - DNA, 612 bp, Zea Mays
ggcgaacatgaccatgggcacaacatcggcacaagggcattagagggcgcggaccgtggtagagtggcccaatggtggcgcggacttgctccggcgagcaatcgtgcgaaggatagggaaacaaacggggaaataagggcatggggaggttgctcacctcgagaggaaagtctagagtgcttgagcaacgacgggacacagggagacctcaggtcgatgacagtggggcttcggctgcaaggggagaacatcgatgagcacggaccgggcgaaaccgaggtgctgggggcaaaccagagggtgtcccgcgttgctggagaatatgcggagctcaccgaggcaacagacgcaacagatgctcgacgacagccacggaacggaggcggatcacgtcggagctccacgggcgcgtgtgcagagcgagagagagagcgagggagtttggctgggggcgtaactgggcgaggggagtgagtgagtgggtgcggactctagaaaagggctcgggcacaggggacgtggctgggaaacgcgcggtcatgggcgcgtccacgacggagagcgcgagcggggcgttagggaagggagcagtggctgacaggcggggtccac

SEQ ID NO: 52660 - DNA, 315 bp, Zea Mays
catgtagcttaactacattgtccaatatcacctgtgccaccatttgagcagagaatgggtgtctcagaggtaaaaatgggcatattttgaaaatctatccaccaccaccagtatagtatcatagccttccgaatttggcaatttttcaatgaaatcaatggtaatatccttataggcccctgttggaacatgcaaaggttgtaacaaaccagtaggcagttgtttttcacttttagcctgctggcacactgaacactgtttgacaaaactctccacatcagtcttcagcccttgccaccataacatccgtttaac

SEQ ID NO: 52661 - DNA, 814 bp, Zea Mays
aattaactatgttcatttgcatagggaaaagggcacttgcgtgttggtcggaggcatgggaggtgttgactagcgcggggatggggtgaacacaaccgacatttgaagatggaccgagggcgccacggtcaatgagagacgaggcacagtcgcgggcggttgtggatggccgaggtggcgtgtcgacgagggaggacgaccgtgggccgggtgtggccacgatgagtcaagtgcggctaggggagcgtcggacgtgcaacaacgaggaaaaagaggtcacgactgttagctcatgtgtgggagtcgtgcgcaaaggagagaaagggacttgaaggctcctcatatgggagaataactcccgttggttatggtgttgagccgacatggattaattaactcacatcggctgtcagtctggccagtgaggattaattaactattgttagctctcatatagccaacttggattaactaattcctgtcggcacgtggacacgccgatggaagttaaaatggacaacaagaattttcccaattcttgttttttctgtctttattttcaacatgtcttgatattacacaagagcaactctccaattcataagtcttcaaacagatacatttatccagtatctacaaatcttgcttcaactcatacgctctgttggtcacttgtttttgatacctttggatggtcataaacaaggcaacgccattagatcatattccatcttcatcctttagctcttagccttcaggagaaaggttgagtaaatgatgaagttgaagttgagtgaagaaaatgtaaagaata

SEQ ID NO: 52662 - DNA, 463 bp, Zea Mays
ataaagttgtgaaaaccactttagtcagcactgacttaggctgactcatgatccatagtgttttgaacatgttggagttagcacatatgaaaatatgggaagatatgagataaacagagggcattagaccctaactattgatggtgtcagactgatacaaagtccaacgaactatagtgcactgagagagagatggtcaaacctatagatatggtctgatattgggtgtcagactagtcaacgacctagatttctctctgatcactctctggaatacatcgaactcgttacctttgatccaacaattaagcaaaacatggcatcaaacaagataggtgcattgttcacctaagggatcccactgttagataactattgtgactgggaacatgggtgtcggaccatggactttggtccgatggtagtcgctagactagtccaacgagagttggctatcttggtt

SEQ ID NO: 52663 - DNA, 539 bp, Zea Mays
aaaggctacacattaaatatggactacatgttctatgaccagtaaccacactcacctggagctcccttttcaaaatatcttttgcttcaacgtcttctttatctgaatcatcttcaggctagaatggaaaacttcagtaatataacaatacctcttaaagacatcatgataagcaaggaaactaaaatcatgtaactataattacctgggttccttctatgactgatgatttaacaaaatcaatcgtatcttcaaatacatacctaaaatttgtaaatgtaacacaacaggaaatcaagtgtcagacaaaggcacagtcagcattattcatcaatgtcatgcaatagaaataattcagttcaaacaaaattcatgcacaaactctttgcattacataggaaatatagcttactgctgaatgctgaattaggttaaaaagtctgttctcaagaaaatttggacccacaaatattcctaggtaagcagcaaatagcatcaactaagtagcagtagtccctgaaccaggataacttttataa

SEQ ID NO: 52664 - DNA, 389 bp, Zea Mays
ttgtctactgatagtggaaagtggattggtactatgcatgaagagatggagtctcttgagaagtaaggcacttgggaactagttcgactacctcctggtaaaaaggcagttaagtgcaaatggatcttcaaaagaaaagaaggtatgactccaaaagagcctccgcgctataaatcaaggctagttgcaaaaggttttagtcagattcaaggaattgattacactgatgtctattctcatgttgtcaagcatagttcaattcgtacctttcttagccttgttgccatgcatgactatgagcttgagcagttagatctgaaaactgctttcttacatggtgatttagaggaggacatttatatggaccagcctgaagggttcgttgttcc

SEQ ID NO: 52665 - DNA, 567 bp, Zea Mays
ctcagtcggagccatatctgaagaaataaccccttctatcgaagatatccctggagccctcgagcatattgagaatgaagttgaggccctcaacgaagttataactagacacggatatttctgtgctctggtggcttctcgtggcacagctgcaacattcatgaaggcgggatgcaatcacgtgagggccgcaaataggccaaactttggctagtcatcgtctgatctggttgatattccggccgactcggagtataggtaatatattcatcacacaaatctgggtgaaaggcggtcgcgagctggctggagacgaaattcggaatctgcttagcaaggtgtagaaaatctttctaccattaggcctttattttatattttcccttaccatgttccttattacccttattgttgtccctttctaggatgatgatgccgaaggtcgatgagccgaagctggttttgaagcattgagggccttaggaattccttttgctgatatctgtagaaacacttggaaactctttgtacaagaaaatgtattatttgacaagagagttgttattg

SEQ ID NO: 52666 - DNA, 721 bp, Zea Mays
ctcttttgtataaattggacagacataaaagtagttagacttcacgcaactccaaaaattggtttgtttacatgcacataaatggttttcatagatagtcaaatagtatttttcagaagcaagcatcctgtccacctctactcaaatgttgttgttaatcattaacaacaaaggttgtgctaatatcttcctccaaagatcatttaagaaaacaaaaatagggtcgatgagtcactatcaagcccactatgtagcccaccactaagcttgtctgggcccaccatttcatccaccatcaatctcgatgcctcatccatcgtcaagcctgctatcctctgcctctgctaccccctccattgatgcatactaactccagatctaggctgacttcactagaatcacctactgtcatgacgatctataaaagaaaagatgtggtaagggagatggagaaggaaggaagaaaagaaactcaccttgatatattaaagaaaagatgtcgtaagggacggtccgcctataaatcgaggatggtccgtaataggtactaaaattcaaccaggaacttaacacctttgggtagaaatgttggtgtgcaacggacggtcagagacctgggaccggacagtctgcggcctacgatcggacggtctgtgacctagagctggatggtccgagactagcacattctggatttaagtttgtgcataccatgagattg

SEQ ID NO: 52667 - DNA, 1252 bp, Zea Mays
aagggaaacacacgagaatagtttgatggcgcgcaggagaagacgcaaggggagattgggggcgcatcacgaccgtgaagatatgcgtagctcgtcacgaaggattagcgtcgctaaaatttggggcagatttacggtatatgttggacctcagtttttatgtttcccttcctaaaaaacatattagcggtcatattaacagccttttggagatgctaacctaatcacctcaatcacatgcatgcatatcatgagtaactacccgccttgatcgaacggacgcagatagctatggcacacgccatacttgttctagcccatggccttggctcacgctggccaaagcattcatcttctccgcttcgctgccggtcgcagtttgcgcgtgaggctaagcagccatatcagcagcttctgtgtgagttcctcgttgtctcgcttctccgtaggccgccgctcgcccgctccaccgtctgcaggaccgccactcacgtttgtgcccgctgcttgactctgcgttgcgtgcctatgcctccaggactgcaggggggagaaagatgttattgacagctaaaaagtacagggcacgacaacacaattatctactagcttatctttgccttccccggtttggcagtttctctgacccctcatctactattgcgtgagtccctcatctactactgcgtgagtaacaagagtaagtagcatatcctttcagaaagcattaaactgaattatgtgagtgaaaaaggttttgagagactctgcctgttcgattcaatgaagttgtgtgaataccagtgccgagaaaacattaaaaacatttatttgatgggtttcacgcattcaatccaactaaatcgtgtgattgaatacgtttatttgagaagctttgtccttattttatatttgtttgctgtaaaatactttaagttattgctttatattaaattgtttgttgtcaactaaaacgtatatatacacacacatatatagatttgtacatgtagttctatataaaatctgccataccttaatttttgtgcgtcctccgtcactgctcaccggaacatattttcttctatctcggtcgtgccagtggatcggtatatttagattattttattcgcaatatatgtagcattatttcatcttgatggattcttcagacgagacaaatgaaatacccgttgattatagctaattggacaagcattcaaaagttgataatgaatcacccctcgatgca

SEQ ID NO: 52668 - DNA, 791 bp, Zea Mays
ttttctcattaaaaatcattttctaattatgtttactggattttctaactctctggacagggtgcataaatatcagaaactacaggggctatctcgcaaaagatcataagactcaggattcccaccgcactggacggcaggttgaataagtaaaaccccagggtctcttttgaaaaatgtgctaaccaaaggggtacgtcaaactgtgtatcgtgagatcgtgaatcaagagctcagattagaagttcacccatctgaaccggtatgccatactgaccgcacgatccaagatcgacggtcatgatttgattaaaccccgcgtccaatccaggccactagaatccggatctacgaccgagataaaaacgcagagggtatgagcccgatctaatcccacccattgaatcccagatccatggttcacggcgatcaccatgcctcccccttcatctagtatcccgtgccccggtggcgagcgtacaccgccatggcgccattgtcgcactgctttgcctcgactcccaggcacaagacctcgattcaactacggtttatgtagaggagaagaaatcgatcctgggagaggaagcctcaccggaaatcatcgcatggagcccccagaccacggcggatggtgaccctgcagcgacggcggggaaagtccaacagtgccccagattccctccatagatctgatgccaccacgagactgcacatgctctggtaaagcttccgagctacctcctgggactagaacatcggtctaggcccgggtcgtcgacggcggtgag

SEQ ID NO: 52669 - DNA, 459 bp, Zea Mays
tttttaatggcatcatcagccatctcactaccgtccttcatccagacattagaataaaacctcccgcctagcaaagaagcttcggccgaggggtcctccgtgtcatcagttgagaaaatatattctggctgggctacggccttaacatgttcacaaccggccttttctaaaattaagcgacccctcgttcatcggcgaatgcgcagaaatccccgcgatcgtcgagtatttcatcgaaagcttcggcttcttcgccaatccactggataactccttcgggatcaccgcgaataaatttttgttccgaagagtatgctcccacctttgcaaagctatctttcagtttcttcgcgcattctatggatgtttcatagcatctctccttggaatcccgaagctcttcaacattctttcgcaccttggatctctccatttcacttatttcttgcttagcctttg

SEQ ID NO: 52670 - DNA, 315 bp, Zea Mays
aaaaattatcttactagatgtctaccttatgatttgttcatgagatcatgttaatgtgtgctacgccccttcgagcatatctcatgtcagctttatctacttcgcaatcaatgctttcactttagatatggtcatgctgcaatatccaatgcaatatcttttgtgtggggaatttagaatctaaccccctttttatgcagtacaactccatagacaggcaacaagcaattagcgattgcagacacgacattaggtcttcttataacccctgcttcaaaatacctttatgtatattttgttgttttataatttgta

SEQ ID NO: 52671 - DNA, 392 bp, Zea Mays
atcaaatctttgtttttgcacaacagacgcgcttgcacctgctctgtggccttctctagcacccccaccatctcacttcccccaaacctcgtgcaagtaatgcggcattagctcaaccttgcgcatgtccccacctaaacaaagccaatctttgcttttgcacacctgttctcgtgcaatcgtcctctcggctattccgcacatcccaaactgttcttgtgtgtacattatactccaataagatcttgtttgggtgtaatcggatccacatcaatccacgtgttaagcaaaaacagcacgtgtgaattccgacagtgtccaaacaagtcctaactaactcattcccttgccctgtccgtagcgtagtacatgtaggcccgctttctaggccc

SEQ ID NO: 52672 - DNA, 616 bp, Zea Mays
ttatctactttgtcaacaatccataaaacttagtatggacaatttcatggattaactatggatggatttgttgatgcactgaggccagagaatttactagtatgcacttcaatagaacccattggccgaccctataaatagaactcactggtcatctccaaagatactcacactcaagttgagtttagcctctgcctgctattatgttgccaccgtagcctcatccatcacgagcgccgacgtgcatcactgatcgtgggaataggtctcaacccttcacctttggatgtggagcaaccctattaatagagcccattggccatctctaaagatactcaaactcgagttgagtttatcctcttcctgctattgcgctgctgccacatcctcatacataccgagcatcgatgtgcatcactgataaggagaataggtcttcacaaccctgcgccttcgagatcttgcaccgagagaaggtgaataagatttttggaatcgttttgtgtgactactcactttcacttacagttcgtcgacatcgccttcacagaagtcatcccagtatgtttgaccagtacgatctttccgttctaatctcatatctattcttatttaa

SEQ ID NO: 52673 - DNA, 393 bp, Zea Mays
aacatatcggctgtgtgtgtagcgttcctgcagctggaaatcatccaggctctgttctgtgggggctgtgccactgggcactggccatgccaggaaggagggatcgctgcagtgtgcagttctgctctcccattctgcagacagaaggtgccaagcagaggcagaggctagctatacgtttggcaccagaactgatcagaccacctccgaaattcagcatggtactggagtactggactatacgctacgtccttgctagcttatggtgtagtggtattatgttcctgcgacttgcagacccaagggtggctacagcctacagtgcaacgctttgcagtctctagctaggctctacaactacaaaacgagggcaccggagtggttggcctggct

SEQ ID NO: 52674 - DNA, 808 bp, Zea Mays
gtcgtgtagtgagccctagttgggcatgatggtcagtcagttcaagagggaaactagcggaccagagttaggctttgtagctaaggaagagagtgtcacttgttttgataaggttggtgagtgtagtggcctgaaaccttgaaagaaaccttcagccaccctcaaacttatcaagcttactccaccaaaatctactaaccctattgtgagatatggagtgcatgtggagcctttgagaattccacctcagaaacaagtgtggtgtccaaaacctaaacatctcaggaaccaacttaacacccttcaagctaccactattgttcctcctctaaaagctccttaggcacccaaaaatcccttccacaaactgactctacctaagagagatgtgagatttcaatgtgattattgtgagagggagggtcatttgggtggttcttgctttaggatgaagagagatgagcgatggggttctaagttgagcagcgggaacattaaccgcccctctcatggtgttcatggtcctcttatttagagacgtcctgtgaggccaagaggtgcttttgcctcttgttgctagtcctcaggcagtgtgaccatagggtggtcatgcctggcgaggtgctagtcatgtgccatatggccaaggaccccatggacgaggctttggttcttacttccctggcagaccatgatttccatcttgtggtgatcgttatcccccataagactgaggatgtttgatatttttcctaacaacttttcggctgttcgtgaagctctagatggttctctagccttgaccccg

SEQ ID NO: 52675 - DNA, 525 bp, Zea Mays
acgccatgtgttgttagacccccaaaaacgtgctattttagatgacttgggtgttaactaatttaagttgagcaatggttaagagacactgattaatcggctccaacccatgtttttgagttacgatgtctaaaatggttcgctaagtcttatactgtgattagccaactcatattaagtaggagtcgatttcgttaaatgttgtagtatatgttgtgtctcggattgcggcaataataggcaagttggcgtgtatgttatttagcagttatgtcgttgctctagttaaccgaattgttagatgaattggttaagctcgtaatcacggtgacttgcttgttgtagtctaaatatgtatgattatgatcgtggatgaaaagtagtagtgctcaggtgatgtctaaattaaaatgcaaattattggtgaaaatcgcttcgatattgattgttatagataatgcattgttaattgagtatggtacttttagtgcgcaaaataacttgtataaaaaattagtaggtcta

SEQ ID NO: 52676 - DNA, 552 bp, Zea Mays
ttcacctaatccataaccaatgcttataagtctccaagacttttctattctctatggtccaacctgcattcttatttctccaagaattgttagtccacaaatggttgtcattaattaccaaaagataactaaggggcctagatgattcacaccagtttgtagcacacttgggagaattggccaatagggaggctttccgcattcgcttattcttattatccctaactggcaccgcttttgcatggtaagccaccctgccactcttagggtatgtcgttgcctttgccatcatcggcgaccctcgagccttcaatgaaaacacaaaacttcgctctagggaggttgttgctgagacgaccccagatggaaaggagaataaaaaatcaccatcatgtatgaaaatactaggggcaatcacagacaagcgaccgagcaaagttgcctgttttgcgtatcacagacaatccagttgggcagtgcagatggtccggagcacagtcagacagttcgggcagctcgagcagatggtctagcaacgcctagggacatcat

SEQ ID NO: 52677 - DNA, 686 bp, Zea Mays
gtcggatgtggtcgataaaggtaaaggtaaaaatatatcgttggtagtcctcgcatgtcaataacatcacatggagtaattactcagaaagccgaagaaaagaactaacaagaccggaggcgtcggtgggcaagcatgatcgcccaacagattaaagctccctgtcatgtgcatcacgaacgatccggcgcttgcgcatggacggtccgaaacccacacggatagtctggctcatctagccggacggtcctatagcgccacaagcctttgcgtccacgcgccttcaagcatcaacaactagaaataggtatgccgagcaaaatttatctaaaacttatgttcgactggttaaagtcgtgccttttttaaaggccatcccttgtggtcggccaatgaagtaacttcggtctcccgcaaaggtaatacgcccgaataaaatggtccaaagggtgacacaacaagtgtcgtctgttcatataataatgacatggtacttttcactagcctatttattgttgatatatttttcggttcaagcatggggtagtgcgacaatgaacccatattaaatgtaccatccctttgcttattcgggataggtgcaccataattttgtacttattgatccattgatcaagtagttatggccgagaaagatgcaatcctaaacaacctttatgcattag

SEQ ID NO: 52678 - DNA, 417 bp, Zea Mays
caagcaggagttgttgtcctcgccagccggggcgagtgtaggtgagggggagttgcgaagtctttttgagggtgaggagcttaggataatgctatttaactatagggagatgggaatcattctgaaggttgagccgatgtgaggtgtgatgccctcgctgtaagtgtgttattatgatttgtatgatgaggctgtgtgcacttgcgtatccggctatgtctataggggcgttgcgcgcttggcctggcgcgtttattatgttggcttgcgttttggcgcgcttgttgaattaatccggctgcacccttaggcgacttttgctcggatagtcttttgaagaagacttcgattttgcgcacttattgtgctagtccggctgcacccttaggcgacttttgctcggatagtctttcgaag

SEQ ID NO: 52679 - DNA, 679 bp, Zea Mays
caggtagccaggcgcgggcatctgttctgcgcatcgcggatggtccgacgcatagacatggatggtctaggacatcatcggacagtctagatcattcaagtggatggtctggcaacgcctaggagctgcgacgaccacgtaccttcaaacctcgacgaccaaaaataggtacatggaaaactaacacattcaaggcagctggtcgattggtcaaatctggctcgacctttgatcaactattatctaaatatgtgaaaaagaagattggcccaagtgacaggccaccaaagcgacctcgctcacctacttaggagtgacatcaggtaagaccgattggaccatctcaccaatcagaatggtcggtaggtcataatgtccaattaagacctaacatgcctgcgtggacacctgcacccccatactcacctgtgccatatcaatatgtgtacataccacctccctatgtcccaaatcaaatgtagggcatgccaccatatccatttgggatgccacagtaccccgcttggggggcaccctaaacatctgtatttgacaggttggcacctccagcacaggacctatcgagtgcccctcaatctggtcaccaggcataggtccaacaagattgccggactattcggccgcaaagaccgaccaatccgggaagggggcatataac

SEQ ID NO: 52680 - DNA, 673 bp, Zea Mays
gctggatgaatgtcctgtaaatggcaggccatatgagttgcggaatcatgtggtacaatacaaactagttcttggtcggatgtgaaagttgcttagttgggactctaccatggattcatatggaaatagagctttggaagatactaaaccctaaatggagatggaagcgcatgactgaaagagaagacttgagaattagaggtaaaagtgtgtgaacgaagggaaggaccccctatatttataggatgaattcatgattttctttggatttttttaaaattaaaactgttgaaattgaatggacgaattacaagctgtcacgtagaaaccaggtgatcgataccgaccgtgccggtcagcaacaaccttaaatcgaatgtgtcgttcgatactgaccgacggtaccgactgcatcctctccaacatggacgatgacgcctagatcaaatggtgggtagcccagccaaccgaccgactgtgcaacctcacgttgcactcgaccaggtcaatgtcaaccagttgagccaccacaccattagtctttaccgcttgtcattaacaccagttttatgggtctacgaccctggctgccttgccccatccgccctatcaagtgatgtaggcgaaggggaaccctattgcgatcttgctaggcctatttgtttgaccaaat

SEQ ID NO: 52681 - DNA, 771 bp, Zea Mays
gccacacctagcgggaaggagtctcgggtcgcggtggattgctcaccgaacttcggtagttcggtgtgcacgttcgtgccaccccacgtcgtggccgggcgtcaccattgtccgaacaactctaggtaagacccgaatagtcttgccaatcgtgttgcccaccttttgcgctcatattcgtggggttccgtgcacttgagggccaggagctcccctcgccagtgatgcatcgccttgcgcgctagcggctcgccgctcgacacctagacagtaagagaggctgtcggccacaggcagatcaggcggtaatggctaggattagaatgcaaaataccccttcaccacattatatttgaaccgtagatgttggattggtagggcaggaatggagcgaggcgtggtcgtgtgtggaccgttgatatgggatctaagggtgacggtagcataccggttcataaccattataggactaatctgagccattggtttctgatcaagccgtcccgaacacaagatactccttcggccgtagacaattgcaaaagagaccctgtactttatttgttggagagaaggccatctacgcccctcgctcggtttatttataacataaacaaaacatgtcatgatagtcgcagagcggagtccacctcaaccccacaaaggcttggaggcaaagggatcggtcggtccaggcagaggccacgacaagatccgaggacctggcgccctgtggcgaagaccacagttaatacccacacgtgtcaacga

SEQ ID NO: 52682 - DNA, 663 bp, Zea Mays
catagaaaataatggacccattttatttgacatagaaaacgaacatggctgcagggtgaccgcgttacccccaaatgcatttcccttaccctctcacatattgcgtgaaatctcagttgcaaacatattgcagtggctcgctttattaaaagttgtttatgcctaggaagctactttagttatgttatatgttgtgtttgtttcttcggactaaattttagcccgtgtcaaatcattgaatatttgaatgacaattacgaatatgcatttcccttgcccttcacatctcacatcattggctgatggtttcacgattttgttattgacggcgtgatgctatttgtttgcagccaccacgtggccgctcctcatcctggtgctcctcaactgcatcaagagggcatcttggggaagaagcatggtgccaccaagagcgttgtcgttcggatgtttcgcgttgttgaccagtgtgtagaggatctcaagctatcaggttggctctgattcggaggacgttttgtattgatcagtttgttgttgtatttgtgctatgattactgaaaaacatgacaagcatatgtctgaaactttcatgtcgattatgcctaatattctttatgaagccttttgtacttgcatactccctcatgttttatgtatctg

SEQ ID NO: 52683 - DNA, 495 bp, Zea Mays
gcgtgaagggttctgatctgagccgttcgtcccaatccaacgatgtacgcagttccgcccaaccctggcccttgccggcgacgagggcgccccgcacggtggcgcgccatggccggaattcccccgctggcctacaatgcatgatttctcgccgcgctagttgctaaccgatgctgaggccacgacaaattctagaagggagtacttactcgcggtggagttgacgacggagcagacaacagagcgaagcggctccgtcgcggtacgcacgaacgacggggattttccggtgacctgagtccctccgagccaatggatcacgatgtccaccctccacacatccaactcctccttcccccaggtccagatttcgggttaatcggcggtggaagcgaacccccaatcgccgccgcgcctctcgcttctctctcttcttcttctcggtcagaggcaacggcaagtgtacgatctcacggagactctggtggattcaag

SEQ ID NO: 52684 - DNA, 501 bp, Zea Mays
aaaacggacagtcaaccgcgttcccaacgatctaagatatcttagctcaatcgagttgatcggagagtatcgggagcacacaataatgctaaaacgggagggcagagggtatgagcggacctgagacacgctggccacggcgaggtcacaaggcacggtgttcttggttgatttggggaaaatcccgaattggagctctctggtggaggatctgaggtacgggtgggtgcgctagatgcctgaatacatagcgaagccgatggcgcactcaatttataggctccgggggcggtggcatccaatttcacgaagaggtgctggcggccggaggggaagaaggttactggcgcgcaagcttagtggctttcaccatggcaagctccccggcgatgaacagacggctaatgcgagtcacggtgatgcgatggatgtgccaaggcacgtggcgcaaggccgtgaagcgactgtttggtacggtggccggagtaaaataatggccgg

SEQ ID NO: 52685 - DNA, 417 bp, Zea Mays
catcaatgatccgaataggatatttatcctttatagtgcggtcattgagggcacagaagtcgatgcagaagcgccatgagctgtcatgcttcttgataaggaggactgaagccgagaatgccaacgtgctatggcagatgatgtgctaagatagcatgtccaacacctactgttctagctcgtccttctatagttgcgggtaccggtatgggtgtatggccaccggtggaatgtcgggcaggaggtggatgcagtgctcgcatagccacaccggggcagtcccgacggtgtggcaaagacgtcggcgaagccatcgaggaggtgctccaagagggtctagtcgctgtcagagatggcgtgtaaagcatccctggtcgtgggatgtgctgatgcccctaggccgtgcaacgagatttg

SEQ ID NO: 52686 - DNA, 893 bp, Zea Mays
ggaacacaaggtctctttagtaaactatccgcagcgaaggggtatgggcgaacttcggcctcccgatcaaacacctatcgtctagattagatccatggtatattacgaaccggtatctcacacctatcgtcttttaaagtatagcaatcactatcgcccgccggatcaatgatctccagtccagatcaagcgggccaaatcgttttctaaggccttatctccatcgtccactgtcgatccaacgatcgcgatctaaccgggtaaagtgccatgttgcattcaatcaccattgatcgctcttggatgaacggccacgagactctccccgtcatccagacgccctagggcggcgccgcctgcgccaacgacggagagttcgccggagcgcggcaactaggcgctgcagagacctatcctctaccccgactggtgttacgcgcagggaaggacacgacgatccttgtgggtagcgtcttactagagttaggcacgacgagaacgacagtacacgtccaaggcagaaccgcgacggtcttctgtcaccagcgaacaatccgataggccttggtcggtctccgcgtctcgaagcttcgccaatcggttccccaagacttggttaacacctcggctactccggggttgtggtccgtcagcgcaatcgggctatggcggatctcacacctcctttctcccctctggaattgcttcgtggtagggtttgaggcaatagcgccgagcacggtttggttatatgggcaggcaggtctcgcggtcgcagctggtgaggacgtgaggtggttgctagtgcatgcgtgaattagcggaggtggggttgcgtgtcgacgctcgtccgagaagaagagaaacatggccgatcgggtgactagcgtgtg

SEQ ID NO: 52687 - DNA, 418 bp, Zea Mays
cactatatttggagcatatttctggcgaaatttgggttttgttaacagtagtaggcaaaggtttcactggttgcagtcttgtgtatgtgtaggatcgaccactttgtttgatttggatttcaatagagaatatgaagagtggctatccgaaattccaaatatatgggcttcgcgaagtgatttatgttttaatgttttaggttgttaaagacaaattgagtcaagtcacttatcgaaatattaggaggatccacattaataggaactgcatataagattgaacaattcttcacagtaattgtattggctaggaaaattaatggtaatatccacaaaaggcttatgagtgactgttgaaggatctcaagttccttttataccaagagtaaaagaagacaaaacctacaatcagtaaagt

SEQ ID NO: 52688 - DNA, 293 bp, Zea Mays
cttggctggtagtccagtttcagagcgcgtgccgtgtcttggttgatgaagttgtgagtagatcctgtgtccaatagggctgtaagagctttccccatgatatgtacttctagctgcaaggtactctcagaatggatacccgtgagggcatgtaaggagatcactggtgttgggtcccctggaactgaatcagcctctatagattcatcttcctcatagtccgtgacctgaagatagaacaatttagggcagcgatgtccacggacatactgttcatcacaattaaaacaaag

SEQ ID NO: 52689 - DNA, 1119 bp, Zea Mays
ctccacttctcctctttgcaaaccgggtatcacaacagggaaagttgccgaagcttccagggtgcaaaccgaagctgatactaaacagatagaagttgaagatgcaggaattgaggcttgaaccgatactgggccttcagagtccgctgagaaaaagcctgccgaaattgaagaaaatgcaagagaagaaaaggccacagagcaaatttcggctgaaaaggttgtgactcctgctcccgaagctttaaaagagagtattgattacatcattcgccatgctatcggagcaacattgtactctgtaattggagaatctgtcatcaataaagttttcattttcaaaggcattgaaactcttgactatcagctgacttcgattcgattggacttgaagtcaacacgcatactcgacttagggtgaccactataccctactaacggagcaatcgacttaagtcggcgatgacttaagatggtgcaacatgctcacgcttactcgacttagggtgaccactataccctactaacggagcaatcggcttaagtcggcaacgacttaagatggtgcaacatgatcacgcttactcgacttagggtgaccactataccctactaacagagcaatcggcttaaatcagtaacgacttaagatggtgcaacatgctcacgcttactcgacttagagtgaccactataccctactaacggagcattcggcttaaatcggcgacgacttaacacggtgcaacatgctcacgcttactcaacttagggtgaccactatactgtactgacggagcaatcgccttaagtcggcgacgacttaagacggtgcaacatgctcacgcttacttggcttagggggaccctataccctactaacgggcaatcgactcaagtaggcgatgacttaggtcagcgtgacacgatcacatctgcctatctttagagtgaccactatgcctttccagccaggcgatcggcttaagtcagaaaaaagttttcaaaccagcacgccacatttacttcacaattgttcagggtgactattataccctgacaacaaaacaattagaactccaggaaaaaagaacgttatacttgtcatcgccaaggaca

SEQ ID NO: 52690 - DNA, 834 bp, Zea Mays
cttttggaacatggagaacattgttaagatgcaagggtttaatagggttatcaataacatcatgaccaatattgtaaatgttcatacctgcctcgctggcggtgaagatctgatcaatcccattgtatgtttcgcgagtagtcaatttgtcttgatcatcagtgaggtgatctgtggcagcagtgtcggtgtaccaatttatgtccattcgatagctgtgagtagctactgttgcactcttggagttaggagtaatcttcctcgaatcaatctgtacccgtagtccagggccgaatgacctatcttatcacaatcctggtagggaacttgaggtctgtcaggtcgccgtcctgttgttcccatcctctagagttgttttggaagcctctgcaacggccaccatgcccctgatcaagtccttgaccaggagtccaggagcatcacatccatgttgtgcagtattgctgatagctgggactgttcatgcagcatattcatcttgctttcgaaagagaagctgcaagtgcgcctccccaagcgaaacagatttaactcgtgcacaaagggtggacaccactaggttgaacttagtcccgccaagatgtatgagactagttcttcatcaattggcttcttggtagatgccatctcatctacaagtgacttcatctttgcaatatactcagaagttgacatcagaaattgacatgttaccttttcgacttgttgcaagtgcaatccttgtgttgaatgttcttgctcgagaacatgccacataggtatgctcaaggatactccacacctgactcattgtgcatttttagctagacatgt

SEQ ID NO: 52691 - DNA, 712 bp, Zea Mays
gagaaaacagagctccaagttgatctgtcagatgagctcttcactgagtcaggcgcactgttcaccggttttcagaaaaatcgcgccgaggataaggatccagacctcgccgacgataaggatgccacggcggtcgggatgggctggtggccgcggtgaatatcctcggcgtcgtggcagtaagtcactaaggtgacaggctccggttaaacggcgaccaccgtgctgtcaccggaatccgccgtggggtatgctcgccagcgcgatccagggatccgcggtcctcatccggttatgaccggtagcctataaattgagtgcgggagctgcttagcttcttcaccatattccgcacctcagcgactaagcgcttgactcaagctcgccggaaaacccacgtagtccccaaatccctctcccttctgttcttagctccaccgagaagaaacctccgtggccagcgctcctcgggtcagtatttatcaaattgttccctgttctagttagtctttgatctattcttgctctcaaatgcggccaattgaagttcggccgaagcccatcaccggaacgcacccgtgctctgtaaaacgccgccatgacaccctctccatcgccccacctttctattcgtgcctagtccaaaacttagcgtgtgcgtcatctctgatgaacccaggaactttccccagcttcaatttggccagccaag

SEQ ID NO: 52692 - DNA, 583 bp, Zea Mays
ctgatctcaatcttgttgaacacatgttcttaagtctccattctctcgctcttccctgccttcattttccttctccccttctagttcccagcagtgaacctcatcttgagcatcgccatcggccgtggaggcctctatgttgcgctgcacggtctttgcttccctgcttttaccccatagcagactgtaaaggcctccacacaacaggattccgccaacaatgctgcagttttgggaggggaaaattgggaggcttatattcgtttgattaatttccttattatccgacatacaataaagtagatatatatagctacctacctgccgagatgaaccatctctcccagaaagaaggaggaacagaatactgttagggcaaagctgagtggcgtccaagcggcgaggaagacagggcccctcatctccatgcaccatgcttggagatagtagttcactccagccaccacaaacccctagcccattgaaattcaaaatctatgtcagcaattttattaattaatctctgactagtgcaacgagttcttctaaactagatcatcaggacgatcttgcccaccagttt

SEQ ID NO: 52693 - DNA, 557 bp, Zea Mays
ggatccaacggtcctgaatcaataacgcgaaccggtatctctgttatgatctccgccgttaattccccgatcaacggtcaccatgcctcgtcaccagcccgacagccgaccacggaggcgctagaccctccgcgacggcgaccctgctgtcgtgcgacaatcttccaacaccgtgtcccaaagccaaatcccacaggtgctaaacaatgtacgacgcagggtgattactatggagaacttcttaccggcgatgaacgctgtgtcggagttgatccactgtgtccatggcttcgcggtggcggaggaactccgtcgaagaattccggccggtatcggccgagtccttgcccgatgatgcaacgttcatatccctcgatcggtggcgaagctccacgtccatccctccatcatgggacatcgacgcaggcgagatgcttgtgtggcggccatggcggcaatcctcccgacccctctcactgctatggtgctttgatgtggttgacggggacctactggcgaggcgaggagatcacagggggcaggttttataccccgag

SEQ ID NO: 52694 - DNA, 567 bp, Zea Mays
taaacatagaggactcttaacagaccaggctcttgaggaccttacaatgtacctgagacggcaaagggaaggaggtgacgatgctggcgcagtagtcgcctcctctagtgacgatgctggcgcagtagtcgagacgatgcctgagagctcagagccctaccagcacgcttcctccagagacgacgacatcaaggcaatgccggagagctcggatccgtaccaggggcctacacacgcatgccaagagatggtacatcgacccatttttatcccttgctcatcctacgtgtgggattaaaaaacatttacatgtgacaagaacactggtatgtaggaaaagagaagatgagcaatcaaacctcagaactctcacaaactaggtgaaagaaatcacaaggtaaaaaccttcaacaagtttatatcacagatatgaataatttgtagatctctgatatcataattctaaatatacattttaagccatgccaagtagctggacaaccgattcttgtagcatctgtaaaaatgaaaacatatggagtatataaagcaaaatctatgtaatca

SEQ ID NO: 52695 - DNA, 555 bp, Zea Mays
caatgagtggaaaataatgtgctaggaccccaaaatgctgctgccaatgtatgggaggttggcgcttaagaagccaataatgtcaatgctgaatgttggggacaatggctaaatcttaatgagccgtatgaataaattcccccttcactggggaaaattttatgcagcctgttcttgcccaagcagcaaataatgtaccctacaatccccttcttagaaaacaacgacaatcttcaaatttttaatgaagaaggaagttttggtcacttctcagaataagtcatgcagcaaccattagatatggatatcaatgttgccctaaatatcctggagggtgttcccttggaaggtgtgttccttcaggaaggcctcagtcccaatgccttgctaaattaatatgatgaagaacccttggaggaaggtgttgatgcttctcagcccacccccctaattgatgaagccgggccatctgctgtgttggccctcccttcatcttcatctaggatgttggagcaaggcaggtattacttacaacattctcttccccaggactcc

SEQ ID NO: 52696 - DNA, 476 bp, Zea Mays
ctaagtccaaagctcactgcataaaacccctatctgtaatgtgcgtaagatttcccaaataaatcaccacaataacatacaatggccacaactggatgattgtggttggggatattatctgtatgcttttagaacatctcggtattagggggagataaatgttcatctagtgtaatgcctcaatattttattaaacgcacaaaagctaaactgaacctgtcgttcggtgtgtactcctgtgtatatggagtctgccagaaatcgttgaggagtaatcatattggtttaaatgcttctacctgatgtagatgtggatatacccgggattaatgtcgtatccacatttgacttattggtatttgatctattctcagggacgcctgcgaatatgatccatcagccttagtgaaagcatatgttctgattgcagattcacgtggtctgtgataactctccttcgattaattcactctgat

SEQ ID NO: 52697 - DNA, 1236 bp, Zea Mays
gcattctcgggcaaggcgaaagtcttaccgaggccatggtcgagcctgctctcggtcttgcagtcgtgcagggaacatttgatggagtggacttctgcaggattcgcggggggtagttggccgaggcggagctcgggcgaggcgaagtttgctccgaggccgaggatgacttcgagcgaggtggagtttcctcctgagggcgagaccatgctctgacgtacgcacgacccgtctggagttgtttgaactcagcaaacgacgtgggggagcagtagtcgttattctcgggcatgcgtcatcgtagtcggtgaaagtggacgagatcgcggtcatgtcgctcctgtttgactgcggcgtcacgtggggtaggtatttgcattgaatgcccatgtctccgcggttccggtgacctttggctgatggcgggctcgaggttgtcctcgtgccagagacgagctcatgcgaggtagaaaatagttgttccgtggacaggggactttgggcggggcgaggatttccccaggtgttgccctcgttcgagggcaagctcaggtgagaccgagttctaagcgatcgtcgattggggtctcgggtgaatcgtgactcatactttcgtgagctcgaggaatgtgttttgcggtagtttaggggttaagtgtaattaggagtgtgacctaccctagttacgataccggacaaaatctaacgtgtagtagctccttactagagagaggatagtacgacgcacaaaaggcgcatgcagagaggcttcaaaggctatggttacacctcggcactacgacaaccttggctttggcttgtactggcagctggtgccaagtgccaacagctcttcaggggtggaaactggaaagtatctatacgtcgttctgggtggaccttggcctgctttcattcgtctgctgtttcgaacttgtacaggcattggtcgtagccgtagaacttgtggttcatctcatcaggttgcagaaatcaaagggggaatctatgcctcgttttaatttagcccggacgcaaaaagcacacgacaggccttcagcttgagaaaaccctacgggcatggcttgcttcagctttctcaaaagtcgatctcaaagcattggagctcgcgcgagaaaggttaaggtcaaggctcactcaacaagaacaaaatctcgtcagaattgttttttctctatcatccaaatgcctgtagctctgcactaccttcctccg

SEQ ID NO: 52698 - DNA, 533 bp, Zea Mays
tgaccctctgctgaagaagttagtgccttggttgcctcgctcggggagattcctgatgatgaacggtaggtccattttgaggtgcccctgaatcctagtgatgcagagataagtgctatgcttgatttgctggctgaggactcttctgatgttgctcctgctgggacattggtggtggcgcccctcccagaggctggtatgaccttggatattcagaagcctgccagtactcgcccgaggcgcccttgccgagccaatcaacctgatccttctgctgatgagcagaaaaagaaaaagagacgcctccgacgagtatccagtttggatcgggacgttggtacttcggttcctgctgctgaagaagtgtctgtgactgaatttattgacactgaccccaatgggtgtgcccaatctgctgctgatcccaatatgggtgctccatctgttgctgatcccaatgggggtgctgcctgtgttgctaatgaagacgacggggaggaagaggatgaagttcctttgactcggaaaaacag

SEQ ID NO: 52699 - DNA, 516 bp, Zea Mays
ttttgattaacaaaggttctgcctatatcttctctttacaatgcttttttttcaggcatacttaagacggtcggcaacggtaaagtcgttgtttatgcacatcccaatagtttgtcggccgagggaaaagcgtgctagagttttcagtactacaatcggattcgagtttggccaaggtaagtgtgtgattcttttagacatatgccgctaagtatactgcacgtaatctcacacttgtgttatttcggctacaaagcaatctgcccggtggcttagcaaatgtgattgccaaggtcgacctttatttttgggcatctatttggcatatatttgcatgtgcatcttgacccaaaaatagctacataaaataacctgtgcggatgcaaatcctgaggaaattttaaaaaaaaaagaattagaatccgcggttgacctgataagatcgatcatccgcatgcaggaccatgcctgcatctgcattatttattatgctccaccgttgccataacgtcagat

SEQ ID NO: 52700 - DNA, 444 bp, Zea Mays
cgggtccttaaccaaccagtaaatgtgccatgtggccgactctagatggtgtgcgaggagacacaagcgattatcctggctcgggctactcaaggccctacttccagtagagaggatgaggcttatattactcgcaccgtggtgcctgtagtaggggtttacaagcacaacgggaaaggggaagtccccaagtccatagagatgattgaggcaagtgccaatatctaagacagaatgggagaacgagcgttcgtctacgagtgtcgtgtgcatgttgatgtcgtcgatgttgatcccctgtccatggagggatgaaagcctatttatacaccaaagggagcgtccttagggaagctgggtcttgtattcaaagaagagctgcatggcgtctaacatgacaacatactatgcagtagattcatgcctgctgacttcccgtacaga

SEQ ID NO: 52701 - DNA, 1054 bp, Zea Mays
gcgacggttcccatgcgaaaacgtcgacatttgcccggaggaaggtgacgagggcgagttcctatttctcctctagattgcccgcgatgcaggtggtccggtaggagtccacgccgacctggatggccttgatgggtccgccgtctgctccagatggcagcacctttggcaccttggaaggcgccttggtactggaagtccaggggtccctccctccgtcgtccgggcgagcagtctctgccgccagggcgtgcagtttctcgacaaccgcaagtgcagcagcgtggtcgccccgcacggtgagaaccccagctggggacgacatcttgaggaccaaatacccgtaatgggcaatggccatgaaccagtataaggttggcctgccaatgatggcattgaaggggaggttaacctccgcgacgtcgaactggacgttctctgtgtggaagttttcctcggtcctgaatgtaaccgggagtgcgatgctcccaagaggatacaccggttgtgggcccactccggagaacggacgagaaggtcccagtcgggaccctggatctgcagctacttgaatgtagcatggctgataacgttgagcccagccccaccgtcaatcagaacatggtgcagccgcatgttggcgatgacagggacggtgatgagcggtagtattccggcctctgccatgttgtcgaggcagttggatgccccgaaggagatagtggtgcccctccaccgctgatgtggagcagccttcgggaccccccgggactgccgaaaggacctctcggcgcagggactttacattcttacgggaggtgagctcccagctcccgctgtacatgacgtacaacttcttccggtggtcgttgtcgtcaccggagtcggagtctccagtgaaaacgtccttcaggacccccctcaggtgactgatacccgaggtcccgttctcctgcggccgcgtcaccctcgtcgaccttctccttgccatgtcggcgatgaggtggcaaaccatccttggaggcctgctcgcgtcgctcactgacgcgcttca

SEQ ID NO: 52702 - DNA, 1159 bp, Zea Mays
ctaaaacataattttctgggctcgactgaatttgttttggcttaggatggatggcgagttggttttttataaacagagggtcttattcgcaaggtggcgcgaccgaaggggtatgcaagcgcgccagccgttggatctcaacctgacggttgcgattagatcggtccatataatgaaccggtatgcgattgcggccacaggattctaaatctacggtcagcatttaatgggacgcgattcaataaggaccatccgatccgcccaacggctcggatcaaatcaccgaaagggtacactctgctcttaatcggagccattacttccccgatcaacggctcaaaatccaccgtggaaccatctactcttagccctccgataatgatcctatggcacagaagccatcttctacttccagggcgaggacacagcggcgaccattgttcccgcgacggaccctcgccgtcgctcaaccagtgttccccgtacacgcgccacagattccccaatctgaatcccataatcgctggcacactacgaatctgttgaaggattcataccgagggtgataatgacggcaaggctggccacttagatggcggactggcgacggagaacccgctccgatgagcaattcccggcaccacagcgactttcctctcgattaatcccttctacagctctgctagggtctggactaccatcgaatagctttgttggcgatcgattgatgttgtcagcgcagttccgcagtggcggcccttcctagcccgcgcacccacactccggttcgtccccccggcggctggggtggtttgggatgatttacgatgcatcggctcggcgcgccacaacttttatgggggaaggggagacccgagttggtcgggatggcaacggtggtgcgagaatgccgtcgcggcaattttggccaggttgttgaggtgcccgcgtactggaccccaccggtcatggtcacgagcgcgcagatggcggaatcccgggctcccggtcggtcgcctaggttgttacaggtccggggaaaacgcagccgcgagcaccgagcatggcggcatcggaatcggacttcggttgaaggggaagaagacggcgccgcacaggagagtctgacgagcgggcccgtcgatcagcgcagagcgga

SEQ ID NO: 52703 - DNA, 787 bp, Zea Mays
tgactatttcaattgagttttaaagttttcccttattaagccttgtttactctattaagcccaatctagggttaagtatcctactctagggttttacccataaaatgtcatagcaatacaacttgtttgaaaattttgcctagtgaatgcactctaggtgtaacaaacatatgatatgccaatgcttatgatgttatgctcaggttttagtggcagtaacaccaggggtgttatagtatgagttcaaatttttccagagcgtgttcaaggaaatttggcaccactttgatatttggactttttggtttcgagttttggaaaatagggaacacatttgatcttgaaaaagggttctgaaattcaaaattctgaatttccccatgggaccttggttcaagggctgctttggggattttggaaaaaccaaatggccaaactttcttactatgttttgttggtcatttagtgtattaaaactttgttatttggttcttaccaaaatcttgtatttttcctaagtcttttcccaaattcccttttatgtgctaatggttcacttagggttaattagggtttgagagttcttcttaccttgaggttcatgacatgattaaggagagtttcttaggatgaaaaaagacttactttaaacctttattattaatttttgatgttcatgcctctgtttggttcacatgtgataatggtttaagttagcttaaggaagaaaccctaggtgacactggggtgtcacaaccttccccccttaaaggaatctcgtcctgag

SEQ ID NO: 52704 - DNA, 520 bp, Zea Mays
gctagatcgacgattgtccgagatcgtcgacagacttgtgttggagacgcaacaacaagcaccgccaccaccacctactcgtcctcgtcttcccaataatgcaatgtttgatgaagaaggtaattatgatgaagcggccaccagagatttgtgcctacgtcaccgtcttcatcaaaacacagaaggtatgccacaccgccagcaaggtaataacaatcatgctcctgacgacccttgtgctaagattaaattttctataccaactttttcggatcattatgatgctgagggatgtcttgattgggagatgacgatagaacagaaatttgttgcccaccttgtactggaacgacatcaagttagacaagccactagtgaatttaaagattttgctattgtctggtggactggtctagttggggatggtagagcacctacgacttgggaagatcttaaggtagctatgcgtgatagatttgttcccccatcttatcatagagaattgcgtaagaaattgatg

SEQ ID NO: 52705 - DNA, 344 bp, Zea Mays
gccgatacttcacgagtaggtttatatgagtaaatatgagtgaagtgtgcgtttggtttgaatttaggcgaagaaagtggatttgtggcactcggctcggaatcgatcgctagaaatgggaatttgtggaaaactagagtctgggatatcggattagcgtaaaatttggtgaatatgttacttgaggtgatatgaaggtgctagaaaaatctgggatcgatttgagcaattttagcaagtttgggcatttcaccgaacatgtggtgtgcgagatttgagagaagcggtgaaatggctattttagtggttgaaaccctccctatggagctcaatacctgcaggtg

SEQ ID NO: 52706 - DNA, 682 bp, Zea Mays
cagaggacgagtcttttaagcaatcattatatgagatgatccagattatgatagcaactgttgcgttcatgattttttctgagagcatcagcaagaaggatagcacgcaagaaggactactacggaggatcagcatcagcttcttcggagcccacgtggtggcaacagctcgttcgtcgcatgcatggaggagctctgcagaggctatttgttgcgcccgcacggcgcacgcacaggaatcgtaggccgcactgttttgtcggcctccgagttttccagctgtggtgatgtagacgagctcacgagtctgctgctagtggggtccggtgccgttggtcgccctcatactgtgtggaccgtggtcgtctgtgttggctacagaacataaaaagatgggagagatttgtgtcacagatcaatgagatgcacgtctgccggtcaatgagatgccggtggcaacttgaatgctacgtctgacggatcataactgcacatagaacgtactatagaagcaccagaagacgttgccactgcaactgcaaccttaccctgccagcattggacttttcgtgacgagtatggtgtccgatccgaccgtgtcttggtttcctgtctgtggaatgtgtcttcatcatttcacagagctcgtttccgttagcggagtagttttcgtatccccgcc

SEQ ID NO: 52707 - DNA, 711 bp, Zea Mays
aaaaagttgcgcaacttctacttttaaagaacaagacaagaaaacataccacaatacatattgtcatggaaatagcatagattgcaaaggtgaaggtggatcaaagaaagtaactgtttttttggaaatctatttcattaggtttccttctgacatacaatgtagttcttcatcctttggaaaattggtcagccggtaagaacgacactaattatcacattgaagctaggttttgtcaggacaaaatcaaaagcaaacctggctgcatcaatggcatcaacaactggtatactaatatcaactttctttggagcaggggcatcatttactccatcaccaagtaacaatatggtaaggaaaaatagcatgtgtcagtaacaaataataactaaaatattatggactcccactgctgagtactatggtcaaatgaacaacatggctaagctagcaatgatcatgtcatgagaaatatgacatccatacatagaccatggaggcaccaaatcaaatgaaaaatgatgacaaatgaccacatatgtacctgcggccttcctcggtagcatgctataacggtttgacaagatagtcgtgctttgccatgcttatagtcaaggcgtgtcgatccaggttaactacttgaaaatagcaataaagttgtcgacatttttatctagcatctctgtagctgtagatatcaatctaaaaata

SEQ ID NO: 52708 - DNA, 530 bp, Zea Mays
caccaccatcctctccacctttgccggctttagcatcgctaggcggaccatgagatcgctctgcacctgctttcttggagaaatagtactactgtctatcatcaaaccgtaataccaaggaacacaaaatatctccctaaaaactatagagactgcacaaaaaacgaaacttgaattagctacattagcataaacatcacccgcaaacagaccagaactccctataacgttttctttatcaataaattcctcatgtaagggcttcgctccctcctgtaagagaaaggtgtaggtagaggcgagcaggagaactgggaaggagagagagggtgcggccgtcgtcggtcggtctgacatgggggaggcaagatcgaatcgaggtttttctgtgtatagtgggtgttgtacgagggagaaggaaatagcagaggttgttgtttactatatcaggaggagatcgagtagcatagaggatttcatgaaacccccactaggccaatcccatggatcgcgaacacaatggagcaaga

SEQ ID NO: 52709 - DNA, 944 bp, Zea Mays
gcgcttggaggtgttccacggcggtgagatgatgtctcgatgcccgaacatggtagcgctcaatcggttgggccgatgagcaacgttaacagtcaaggatgctaaaacatggcatagaaggggatgaacggacctgtagatggctagccacggcgaggtatcttacggcggcgcggctcaccgaattgggggaaaactgaaattctcgggctatgatggctaatcaggggcgagaagtggtgctctggcttcgtaacaagctagcggagcaggcggggcgtcaatttatagtgaccagaagcggtggctctgaattttggatgagagcgggactcatttccccggcgagataattactgagatccactgtggagcgcatgtgttcaccgggtgacggtcacgacctaggggatgccacgaccacgacaatacggtgaatcaggcgactacatgtctttcactgcgatcacgacgaacaccggcggcgatatttcactgaccgcgtggcaagtgggcacggcggtgatccagcttaggcctatgttcacctcacccaagatcttttcacccgccacggttatccactcccgactagcacgaatcttaccggcgacgtggatcacgacgcaaagatcactagcgacgggtgcactgcacctggaatcttgttcagttactataccatcgtgacctagtttagttcatctgacagggcacattgaagggcttccttctcaaatttttatgtgacaacccactaatccgtctgtatcaaagttgttgcccaataaaccggcttcaactttgttttagggttcttgatgagatactcactgattcatacacaattcgatctcaaagttcatcagaacacactgtcagtcgagtttcagtatctgatgtgaccgacagcccaactttaggtccatttttctccaatttcc

SEQ ID NO: 52710 - DNA, 457 bp, Zea Mays
catgaaacgccttgtggaggcttttgagtcgcgttccatgaacactaacaagtccatagcatcttttgagaccgacctagtacgtgtagaggttgctgctcagttgcaacaagtaattgaagatggatcagaggaaggcagcgacttacgtttctttgccactcacttgttgatggagaaacggtatagagatgtatttgcaatcctgaagaccaaagaaggaaggaacgcttggctgcgccgtgctttcgagatgaatgttaagtctagttagatggtgctcgtctgacaacgatgctgctatgtccgaactatgttggtgctgttgttagagtttttaactgtcgtcagtttgagtcttttttcatcgtgcagtcgtgttacaaactatacatgtcgtatgcatctgttccgcatcgcacaattttccaatttttcgagttgaacatgtattttc

SEQ ID NO: 52711 - DNA, 664 bp, Zea Mays
tggtatcggaggtcactcggccaggatcataccggcttactcaaatggatggcacggaagtagggaattcatggaatatagagcatctcaggaagttttacccttagcaagacttcaagagctatcggagcaacgtagtactctgtaattggaaaatacgtcatcaataaaaaatttcattctcaaaggcattcaaactgttggttatcaattgacttcgatttaattagacttgaaatcaacacactcactcgactaggggtgaccactataccctactaacggagcaatcggcttaagtcagtgatgacttaagatgatgcaacatgctcacgcttacttgacttagggtgaccactataccctactaacggagcaatcgacttaagttggcgatgacttaagacggtgcaacatgctcgtgcttgctcgacttagggtgaccactataccctactaacggagcaatcggcttaagtcggcaatgacttaagacggtgcaacatgctcgcgcttactcgacttagggtgaccactataccctactaacagagcaatcagcttaagtcagcgatgacttaagacggtgcaacatgctcgcgcttactcgacttagggtgaccactataccctactaacagagcaatcggcttaagtcggcaat

SEQ ID NO: 52712 - DNA, 708 bp, Zea Mays
gtgcattggttagaccaaaagacatcatagtgaactcatacaactcatacttggtaatgaatgccgtctttggaatgtctgaaggtcggatcctgaggtgatgataacctgacctcagatctatcttggagaacacgctggctcctctcaactggtcgaacagatcttctattctgggcaaggggtacttattcttgatggtgacctcattcagagctcaataatcgatacacatccttctggtgccatctttcttctccacgaacaagacaggggcggcccaaggcgaggtgcttggccggatgtaacctttctctgacagctcatcaatttgctttttgagttcaaccaactctggtctggatactctataagctctcttaaagatgggggcggtgccaggaagaagctctatggcaaattcgactttccgctctggtggcatacctggtaagtcctttggaaacatatctggaaactcggacataaccttgatactctcaattgggtctgcttcactgctatcaacagccatctgataacaacttcctttctttggctcaggcgggactaactcggtcaccacttcctctcctagtggggacaccaacttgattgtcctcttatcacaactgataactgtctgatacttatctagccaattcatccctaggatgacatctattccctgagtacccattactatga

SEQ ID NO: 52713 - DNA, 692 bp, Zea Mays
atataacacctcaaatggagatcgatccagcgaggaatgagaattggtgttgtaccagaattcagctataggaagccactgactccatttgcttgggcatgcatgaacgaaacatcggaggtatgtctcaatgcattgattcacccgttccgtctgaccatccgattgtggatgatacgatgaactcatgcaaagttgtgtgccagacagtgcaaacagttgctgccagaaggcgctgatgaagacacgatcacggtctgacacaatgttgtctggcataccatgtagccaataaacctaatccaaaaagagcttggcaactttgggggctgaaaaggggtgagacaaagccagaagtgtccatacttggaaaaacgatccaccaccacctatatacagtctaccgcaccagacttcggaagtccctcaatgaagtccatggaaatggaatgccaagcatggggaggcactagtagatgtgccaacagtcctagataacgagatctatctggtttggcctgttggcatgtgctgcacgactgaacaaaaacacgcactgcttgtttcattcctttccaatagaacagttctttaattctgctataggttactggaaaaccggagtggccgccaataggtgaatcatgaagggccgaaatgatttggcgttgtatatcctcagaactcaccag

SEQ ID NO: 52714 - DNA, 319 bp, Zea Mays
tctacggtgcacgaccatacgcttgacctgtttgacatagcctgataaagagaggaggttctgcagccagagccaatgcaaatcatggtagttttaacagatactagcgcctttgtgaccgggggccacaaccgcaaggtcaagagaggcgctcctgatgcgggcgggcgggcgcggtgatgaacagtctccccagttttgcgctctttctgttatgagcgtggaggacgttccaacaaatcagtagatcatcacactgactccaatttccctggtgtcacttattttgtcctcaagaggaggtgcgtggttatcgcgc

SEQ ID NO: 52715 - DNA, 339 bp, Zea Mays
ctcaataagacctcaatcctagtatccaattttgttttccctccccattcttagtaacatgtcacttgttgtcatgcgccctttcgatctcttgttaacatgtgccatttgtgtccacctgggtcctcatcagtcggtactccttgccaactcgcttccttcagatggcatgagatgagacgacgctatctccccaatgaccccacctcgacctccttgggcctcgcccttgtaggttcgtcatcgtagcagtgcgatgtgtcccctgccccctatctcgtaggcttcctggtacgaggacacgtggcccttcggcatgctgtgccctacctggctagc

SEQ ID NO: 52716 - DNA, 432 bp, Zea Mays
caagaaagcatgccattgcattgcatggttcggcgcgccatggacgtatctcctacacatcagcattggtttctgcgcatcgcatgcatgacatctctcccctccccccgtgccgcatgcagcatatcgttccgtgacataaaaagtacaagcaggatatatatactgctgcactgcaggccacgcacttggctagctagctagcttcggtggacgcgcaaagaatgtttagtgccgcgtaattcagggttagggtttttgtctcggtgcgtgtaaaccaacaaccttttgttcttgtgttgtgcccgtgggagagagagagagagaaaggagagggccggggggcaggcaggagccaggcaggcaggcaactgcatgcacgtgaaatggccattgtcttgtactccgactagctagctactactagatgcg

SEQ ID NO: 52717 - DNA, 836 bp, Zea Mays
cagtaggaagatcaaggcttgtcaccactggctcctcatactgaaccggtggtgatccgacatgaacatccatagaagcagccaaagaggagctgagcttgggacccttgggggctggctcaccctcagaagcacccttgggggctaggtcaccctgagtagcaccctcgggggttgaatcaccctcagcagcgccttcgggggctgagttatcctcaatcgtaccctcaggagctggataacccttgcatgtaacatcaggaaccgaggtgtccccatggattaggccgccctcaaaggtcgaagaagcatgggaaactgtctgggttatttcttgcccgacaagatttctagctgagggaatgtcatccgagacctctacatggatgccaacactcccagtttcaggaagttccaataaaagaccttctgggataatctcctccagcgcatgatcaatgtcagacatcgtcatgctctcaagattaactagccccgacagagcctaaattgggacatcgttgctggttttgctacgacgattcttgcgaaccaaagggggaacctcttcttcatcctcttcctcttcgtcagacacacgtccaccgactctagtgccaccacagctctcaaaatcatcctcgagattggcactcgtcggtcatcactaaggtatggggcagcagagtcagcccccagctccaagccgaatgaacgctaaaggtttatttttcttttcttcccctcggcagacatggctggataacccgttcaacatgatcgtttgtgacaggaacctccaggagtgcaagctccttcatcctcaccaaaggcac

SEQ ID NO: 52718 - DNA, 628 bp, Zea Mays
gttggatctcaggtcagttatgatgctattcggtatcccaaacctgaatattatgtattgtatgaactccactgccttggctgaggttaaagaggctataggcttgtattctatccatttggtgaacttgtcaatggcaaccagcacgtgagtatagcctccctgagctttcttgaagggtccaatcatgtccagcccccagcaggcaaatggccatgtatagggatggtctgcagctgctgtgctggtaaatattgttgctttgacaagaattagcaagcttcacacctctggactaactcggcgacatcactcttcgctgttagccaatagaaaccagacctgaaaactttcccaactaaagttctagatgctgcgtgtactccgcactgtccggcgtggatcttatccaatagctgcttcctagtagtcgaggaaatgcatttcatgaggactccagttgcaccccttcagtacagtgtgccccctatgagggtgtagtgggccgactgtcttgtgatgcattctgccacagccttatcattcggttcttcttcattttttatgtacctgatgataggctctctccagtcattgggatccaactctggctgactcaaggtgttgc

SEQ ID NO: 52719 - DNA, 293 bp, Zea Mays
tggaagtttacatcgatgatattgtagtcaaatcggctgagtttagttctcatatagttgatttgcgcaaagcctttgataaaatgcgctggtacagtctaaagatgaacccacgcaaatgtgctttcggagtgtcagctggtaagttcttaggatttatcattcatgaacatggtatagagattgaccctgaccgaattaaatccattcggaatgtgggacctccgacctataagcttgaaatgcagaagttcctcggcaaggtaaattatttatgaaggtttatttctaac

SEQ ID NO: 52720 - DNA, 608 bp, Zea Mays
gataaacgacgccaacctttggtctttcaagttaatgatcatgtatacctgaaagtatcaccaaggaagggtgttaaccgattcggggtaaaaggaaaattggcaacctggtatattggtccatttcttattcttgaacgatatggaccagtggtgtacagacttcaactgcctgaatcattatctgcggtacataacgtgttccatgtatcccaattaaagaagtaccttcaaattcctgatcgaaccatcgatgtgctggatgttgctttggaaccaaatttgacttattcgtaacatcccattcgagttttggatcagaaagacaggatcacacgaaaaagaaccctcaagttctataaggtacaatggaaccagcatactgaagatgaagctacctgggagactcaagatttcttggagaaaatttttcctaggtttttagcttcatgtaacctgtaaaatttgtgtatccaattgtaaagtcggattcctgatcgaaccatcgatgtgatggatgttgctttggaaccagatttgacttattcagaacatcccattcgagtttttgatcagaaggacaggatcactcgaacaaggaccctcaa

SEQ ID NO: 52721 - DNA, 1529 bp, Zea Mays
gaggcattatctgaccatatccttgcagtttgctgcatctcggtgtgaaatttgactatatgccccgtttggttctagttttttacagactatggcgataataagttgtgtatctcaccctaaacgtctagattctcgattctcgggtagttgtcgtccgaagcgcgtacaacgaaggcgggttggcaatggtcagaaaaagcggtcatagcctctcgtcctcgggaagtcgagcaagttttctccctatatgtgacccatttgtcctcgcgtgttagggtttcgctctcatcctcttaccctgctcacgatgccactcctcggctcgtcgacgtcgcgccccactaggttctcgttgtttctccctctaggcttgcatctgtcactcataccttattggtgcaggtgtttgaatgcatttttgttggtgtggccaattcgtgcttggatccaggttattgtaaatggcgttagaccgtagcataggatgcgccaaaatatttcttatcaccgaagattgtaaccacatattgtacgattatggggaggcatactagcgcaaaacaaaattttcgcccttataaaaccaagaattcctattgttagaggtcatggactcatggtattaccactagacacacatgcagtggaattcgtctcgatgtagatactagatgtacgcttcgagcagtgtcgtgcagtcgctggcatccttcacgtcgagcagtgttttggtgatcaaatgttcaacacaccaccttgagctaacggtctttatatgagcatgaacacatgtattgatataactagagtgcccgatctttcggtgaggtggataatttcgatttggtggaggaggtgactctcgcgatctgactacgaacgaacatgtcgtggctcctaagcaatcgcaaaataactccaaatgtttattgaccttgctggtggcaaaatctacttgaacacgaagttttattcctgcgaccaatcgaagaaacaagcaagaacaagatgtaggtaaaactgaatatcaatcactcatgagttggggttcactaggttgtccacaggtggtcgttgagcacaattgtaacacggaaagtttgcatgatggctaaaaactataaaaaaaccaactctaggaggaggcgcagcccctagctaaatagagaggaggaggtgggcgactagcctccctacaatgcaggaaattaggcacacaatcagccaatcaatctcctgcccacaaggcagggaataggcaccaatcaaccatgccatctctttatgcccattccttatttaggtggtgtagcaccttcttgattatttctttccaaactaaaagatagataggtggtgcagcacctagactttattctgggcagattcatcatgagcatagatggtgcatgcactttagaaaacttttagtccttcattcttcggaatcatcatgaagtttaattcacatgcacgagctctagtgagtggtcccggtggcgcttgtgttggttcagttggagtag

SEQ ID NO: 52722 - DNA, 371 bp, Zea Mays
tgaatatcttggcattcctttgaaaggtagcattaagggatggcgcttcgagtggttcactatggagaagcataacatatcgcttccctctcgatcgaggagatagcccgacattcgaatgcttagttggatagaggtcccaatagattcagagcttgctgagtctagggtgttgcttgtcgagatatgtgcattgaagaacagaggcctgaccgctaaagttgtcgttgttgactttgttttcaagaatattcagcctttgaaggatagagtctaccctgcttacctgtacactagtgttaatgcccctctcgttaccaacaagcgaatatctgaggaggacgtgctgagtcaggttgactcggtgctga

SEQ ID NO: 52723 - DNA, 995 bp, Zea Mays
ttctattgtgtcatgtgaataactaattaaactctccaacagtaaaatccctctctttcttgaatcttattctcggacctgtaaatagtgttctgctttctttcactaaatgcagcagatagatagattagaatgtgccaattcacaagcaaactttgttgattactttccggttgttatttccgagctaaatgattaacactgctacaaatgggtaaaatcagatttgtgcttatttatattcttcgtagttctattgtgtcatgtgaataactaattaaactctccaacagtaaaatccctctctttcttgaatcttattctcggacctgtaaatagtgttctgcttcctatcactaaatgcagcagatgaaactctcttgttttttgaataatggtattacgtccaggctaaaggaaatgtagagagtacctgtcgtttctccttatattttttgtatgcagtcaagttctattgactcccaacaagaaatggagttaatataaggagtgctctgcttacaaatatcctgtaaatagtgttctgcttcctcttgttgaaccatgatgaatgcattttcatttaaactttctttaattggtaaaggtacatcaccgttgtcggcttctcctgctcactgctcctcttgtgcacgtctctcatctccggcaaggtattgcttttaatttgtagcgcagcctcctgtacagcttctgtttctgctaactcggtgcaaggtacgatgccgccatcccaatccctacccccagatcgagttaatacccataaatacagccatttcttttaatcgaagaaaggtatgatgcaaattgttaattagaatgtgccaattcacaagcaaactttgttgattactttcctaaaagttccctttgcccgggaacaggatctggatgtcacctagagggggggggggtgaataggcgaataaaaaattatcactttaaaactttagttcttactctactcaaag

SEQ ID NO: 52724 - DNA, 531 bp, Zea Mays
ctcggattccggtagtgactgtgaagagaagactgtctacatgcatggtatgtatcacgctcttgctgcagctggaaccacacagcaggttcatgcatgcatcggcaggggagcacacgaacacgaatcataaggagggggaggaagcgcacaagacgacacaccgacccgcggattagacaagccaatcaagctaattgagcacatcatgcatgtatgcatgcatgcatgtatcctgtggctgtatgtgtcagttggtaagtacagcacctaccacatacatattttgttatgcatgggaacctatatatatctgctagcatatacacggagtactagctatacaactcaagaatattaaatatagcatacggccgaactttgcacatgctgcaattctattaattctagtctatcaaactttaaacaaatttaaaaaaaaataaaaggaagcttgtccgccttcacttttcacacgaaaagtgcctatctctgccggcccaacaatatatataaaagcaagtatccgga

SEQ ID NO: 52725 - DNA, 844 bp, Zea Mays
taattttccaagtctggcagtaaaaagaaaaggaaaatagaggaacagtgatgggctgaaacgagcccgaattcgcccacgtccaggcgaaacacgcccgcgatgtccattttgcacagaggacctcggctgttcgaatatctgttgaagagtccctagttactattccctgtctcactgacaagtgcatcgagccccttcttctttcttatcttcgcaaactcgggtccccgatggtgatcgctggtgagcacgccttccggtgaacctgtacaggccaaggcgctcaacgaccagaaccctagtttggccaacacctaattccaccctcggtggcactaatccctcaactaattgcactaaactggcccccggagttcgtctgtccacggtggcgacgaatactggagacatttcatggtgctctaggcgattcaaggcggtctaattcaatcgaacgggtctgtgagcaacagaagacatgagggaggctagaacatcacactgaagggcctgaactaacccgtagatgaccggccacggcgagatgtctcgcggcggcgttctgaccgatttggggaaatgggaaattgagaggctctggtggacgatcagaggcgagagctggtgctttggatgcataataacgtagcggagctcactggggcatcaatttatagagttcatctgcggtggcacccaattttgagaagatgtgctggcggccggagagaggggaggttcactggcgcgggttaccgtggcaatcactggctgaggagctacggcgatcactggtgagctatttcggcgagtaatgacatggtgaaagggtcacggcgtg

SEQ ID NO: 52726 - DNA, 282 bp, Zea Mays
agcaaactagctctaactaagactgcctagactaagacactaaactaagcattattacagactctgactctgtcgatctagggatccaaatctatacgggtcctgtagtctggggtaccatagtcgaagcaaccacgaggcggtgaacggtaagggtgctgaatcccgacaggggcgggagaaccaccatccagatagtggcgtgccgtgcattcaacacgcaattccgcagcctccgcccgaaccttgcccaactcgtcaagggcatggtccaactctgtt

SEQ ID NO: 52727 - DNA, 414 bp, Zea Mays
aaccatcttcgcctcctcaaactttagtacctttactccatcatcacctctacaatcttcacatgctgctcctcatcctctttctaatccactatctccaccacaagcatcaacatttaggacaccaccactttctccacaaccatcaagggattcacgacaatcaaagaaatctaaattgcctataccaaaattggtgtccacattcgagaaaaagaagattaaagctactactgctggatagctcgatttttgaaagggattgcacgggacctcatgtcacatattgttgattgggccgagcacgaggagtttgcagaaaaggctaaggcaatggccgcaaagataaagatcccaactaaggtagattataaaaatgtgcctaaacaatatgtgccgggcagacctctacta

SEQ ID NO: 52728 - DNA, 450 bp, Zea Mays
cagaaggctgaattgcagtatgctgatcattttcgcacaatacaaactaagctgtgtatattgcatccaatacctccatttgcaacagagtgtgagtagactcataaaattgaaatgagtgaaattgtgaagaagctaatacctcccattgcatgttagatgttctaaacatcggataggcaactataaggactattccatccttcacatcactccaaaatctttccatggcggatagataatttttttgctactgcagaaacaatcaactgcatgtagcaagcttgagagacgactctagtgtagccctgtccaatccaacgaaaacaccgctaaaatgggatggtgggtttagaaggaacaaacctggttagcgagtgagatggagtgatattgcatctgtgggctttgcctgatgtcacctagttttgggtgctagaaatgaacttt

SEQ ID NO: 52729 - DNA, 295 bp, Zea Mays
ggtagcttcaatacatttcaaccaatcatcgtttggttcgtcaaacttctctctgaatctgaaggtatatttcaatcgaactaggccaccttcactggattcaacagtagtctccttcggcatttcctagctatccacaagtggccacaccctataggctatgtgctcttggattatatctcttgtgccaatgaaggcacaaacattgctaaaggccctctggcatgcttcgatgtcaccttcaatagccatcttcggccttcggaggccgaagcgagaccaaatggggcgctgg

SEQ ID NO: 52730 - DNA, 483 bp, Zea Mays
ccgggtgccagacgacggcgtaaatgacaattggaggaaaaccagaatttgtgagctctggtggataattggaagtgaggaagggtgcgctgagcgcataacaagagggcggagcagggagggccttcaatttgtagtaactacatgagtgcttcgtgaatttgggatgagatgatctcacggccggaagggaggtgagtcaccggagtgcaactgccgtggcgctcggtcaggtaagacccctagctgtaaacgggctgtccacaacgacatattgcgacgtggtaatgtccccaagcacgtggcatcctcgcggcgagtggcggacaccgacgatgacatcccggccgggcgtgaagcaagtgggtatggtggccaactcacaatcttatccgcagtcacgatcttttcacttgcccggtaatatccgcgtcgatccctgcatgaatctttacgacgagcttgaatcaccgcgctcgatca

SEQ ID NO: 52731 - DNA, 453 bp, Zea Mays
aaaaagtaaacaaatcgaaaggaaaacgcgaccaagagctgggtagctgacagtgtgcttgtcaaagtagcaaaatacgtgacatacatagagaaattagaatgggagaaatatgtgtttgaagttgcttggcgtggagtaggtaggttcttgttgttgtcatttgtcaccttgccaagcgatgcaccctcctcgttggctctacttggagatgacagcagagtggcagccctctgcatcacattgaaaaggtagagaatctaatgtttcaggcgaagaatgttttgaggcatttcgtcaaacagctcttgagcagatcagtggcaggagcacggctcttcccgctgcgtgcgctatctcggtatctcctctcgagagaggccggcggcgtggagaaagcctatgtgcatgcggaggaggttcggcgtcgctgccgaattttttttatctttt

SEQ ID NO: 52732 - DNA, 465 bp, Zea Mays
gcgcctaccagtccaccgttcagccagtatgcacgctttggcggttcgcgttcttctcctgcaaggctatataaacaggcaggttggtgagaagttaccgcaacattcattgctattgcatcgttgtgctgtagaaaattttaaccgaagccaaagctctttgcgttgtactttcgaacaggcacttcatcgcttaggatcaacttcgtctgaaagaagctgaataacgaaatggccaaagtaagatccactgcaagggtgtcccacgagggagatgaaactgaagcaactgagacagcgcccatctcagaaatgatgaggcggtcagggctggttgtgccaggtggagctattgtcgaaggtgtctctaatgccgaagctgaacaagccctgaccgaagctgagagtgataacaaaactgagttggccgagagttggctggaaacgtagctcaaaatctgctca

SEQ ID NO: 52733 - DNA, 409 bp, Zea Mays
ggcaaacagaagaggggaaaagctaggatgtgcagaggagttgtaaacatgctacctcgtgttgctcgtgttgggaataggaggcaaactggaaactcatattagatagagcacaacgtggatggtgactataggaagactaagctcatgcatcaaacattgtccggccattagagatctatttgtcccttctagaaagtgagacgaaagttttattattttaacgggctgattgtgtgccaatatttgatgattgcatgttgctacaaggaccttatgcctcagttaactcatctcagtgccacagcggtgtccgggcatgtgtatccgtttgtgctaggcgaataagatggattacacgtagcagccgcatgttgctggcttgggcttgttgcttatagattgctcg

SEQ ID NO: 52734 - DNA, 694 bp, Zea Mays
taaatgattatagttgtttctaatatacacaaatatgcaatgcaaaataaaaaaataaatcgagtcgtgctcggaccagcatgtcgtgacacaccaatggcctaagcatggcacgaataacgagtcgtgtcgtgctcaggacggactaaaatcgtgtcgtgccacggggtgccaggtaggcacgaccctcctcatacacatattaaacttcactctacgaacaatatagtctacattacaaaacagtattttaggtgactatataggtgaactgttggacacggttttaggagtatagttgcattggatgcagtcatgccgagacatctaatataggacacgtattttctgctctaatgcccacggtcagagttgtacaaaacaaccactcatatgactcaacattctcattgaaaggaaagtcgacgacatcaagacacgccctacgcaaaggaatgtgtcgtcatatagaatactcgttccccttacccggccgaggatctggaaatcctgccacatctcctgctcctcctggtcgtcgagggcgaacgccggctcgccatccggggagttgcaatctagccacatgaggcatggacctcccagcttgaagggattcctctcaatggtgaagatggcggtgctctcctcctcgttagggaagagcgcagtgcgcactaggaccgggaccttg

SEQ ID NO: 52735 - DNA, 671 bp, Zea Mays
tgaaacttaagaaaatttatgatggtgccaaagagagttatatcagtgcgtattaatctactgcacttggatcataatcatgaattctttaagaaggatacataaaaggatcaattgcggtgcaacaagactcatgatcctgaatacatggagttcatcaatgtaatgcaggaaagcagaaccccacaatattgtattatggattatgtttcagaaatgcatggtggtcctgagagcgtccctgtaacagcacaagacatgtataacctgtaagttgtaattttttagcttataattgtggattgaaatttgcatatgtgttgatatcacacaatgctgaaaatttgacaataattataggtaaaaagcaaggcaacaagagagaaatgccaatgatgtagctaagctactctctttttttgcattgtgcaaaaaggataatccacaatttttctttgacttccatttggataaggagggaaatattttgagcatattttggtcacatgcaagccagcaaggggactacatggattttggtgatgtagttatatttgacacaacgcataagactaatctatatgaaaaaccactaggaatgtttgttggttcgaatcaccacctgcagtgcaccatatttgccttcacattattgggggatgaaactgttt

SEQ ID NO: 52736 - DNA, 556 bp, Zea Mays
gccgaggattcttctgataccactcctgctagaacatcggcagtggcgcctctcccagaagctagtaaagccttggatattcagaggcctgccagtgctcgccagaaacgcctttgccgagccagtcagcctgcttctcctgctgatgggcagaaaaagaagaaaagacgtctttgccgtgtgtctagcttggatcgggatgctggtccttcggctcctgctgctgaggaagtgcccgtgcctgaatttactgaggctgatcccaatgggtgtgaccaatctagtgctgatcccaatgggtgtactgtccgtgttgttgatgaaaatgaggaggaagaagaagatgaaatcactctgattcggaagaacagtcggcgctacatagccagtggggaaagtagtggagtgccttctcctgctttgtctgccctcgttggtctgcaagaattatctctggcggactttgatcaaactcttgaagacatggttctagaagatctgttatcagaaccggcagatggtggcgcgatggatgtttgtgttgatgtgctcgatg

SEQ ID NO: 52737 - DNA, 564 bp, Zea Mays
ctaggacgtgaagccctaggaatagatgggtagctaggtggctatttatataggccataaaggctactactactattaataaggatgttgtagaagcatccgaagaattagctaggtctgagaagacgactagaatgagcatgcatcatgattgtcgcataattgtctcttgtgcactaacatgcttctctcacctttattccaataataagaacttgtgaataatgtgatgtattgctatgttagaaatgccttacctcgtgtcagattggtaagtcttgttaggttgtgttatgtgtttctcttgccttgctatctaagtggtattgaaattgttcaaccctttttgcaaaaaaaatgttgtttgtttgctcataaaaagacccccacccaaacaaccttgagcttagcaagtgaaacctttaaaaaaattcatgtgcttgttttgatgtttccagcccttgagtgttttatccttgaagttacacctgcacagcttatagacccccacagcttgaccgctagaccaacccaagtctccttgtgcacttgtgtcaaaaaaat

SEQ ID NO: 52738 - DNA, 734 bp, Zea Mays
ctttagcaccaattggttagagcttgtgtggctatgccaaacccaacctaatctcgtctaacatcaaccttgccctgtcctcgcctttcattgttatgctacatgagaacatttgggttcacaccatttataagccaccatatcctctggatgcgctaatctctataacaatgcaatcaatatgttttgctacgacaaccacatcccccagacaaaaaacttgagtgctctatcgaacatgacctactcaacctgtcccaatgataacagtaacaccttttccatgccattcattcttaaggtcgttccaataatttaccatgcaagccaaagccccaagtgtgccatagaagctagcccaaacctcttagtcgtgatcaccattgttagccatataaacaaaacacatgcacatgatggctactttgtgttgttcaaaattcacccacgctaactaatcgttctttgattccttataccatgggtgatctaggttattatctcaccccattatgtggccttatcgtgaactatcaacgtcaagtgacaaatttgtaaatctcattgtcgtcatccgccattgttgcagggccaagataaatgtgtgaccaaaaatttattatctttcttttttatatttgttatgtattctgcataaattccttgcaccatccttttcaataatttggctagtcttcaccatttatcgagaatgtcatagtgcatctcattca

SEQ ID NO: 52739 - DNA, 371 bp, Zea Mays
attagactgaggcttaccccttcggtgtttaaatcctgacccttgttgtcggatccagcggataggagagcgtgccagttagagttagatttaatctaatcctatccatgtgcatccgatcggacggctcggagcgttcgataccccttcgccatgtacatttcttaaagagcccctcaggtcttagggatttaacccgctgtctagttcaatagttctctgtgtcttaggcaatttgcgcaaagacccctgcgcttaacagaaaatgaggcccagtccagtgttgacttaaaattgaataaatgaatggaaaaatagatttttaatataaaataagtgctagaatttgtataattcatagaaaattcata

SEQ ID NO: 52740 - DNA, 347 bp, Zea Mays
gcgagggatttcagctatcttggagaaagcgggatacgaccatatcaagaccatggcccaggacgtagctgccttctccgtaaatgatacgaaggacccctcagctaaagcaagttaataggcgggaaattttataacgacatctaggaaaatggtggtcgagaaatggctcatgaaattatgaaaaagagtgaaaaggacatccatgagaccggaggcaaagcaaaacaagctgaagaagctgcagagcacgaaaacatataggtattatgtcatgatttttaacttcagcatttgtttttatagcttcggactgattaactttatctttcttcagctgaattatc

SEQ ID NO: 52741 - DNA, 1231 bp, Zea Mays
atcgatctcactgcagctctgctctcagcagggatctatagtttttttttactgcacatctcagggtcagagctgagactaatggggattactgtagggtgcacaactcgatcgagaaggccggtttagggttgatagttgatactgatcagagcagcaggacaagacacgggattccgctaatcctgtggcgggcaggcaccttgccacaccgtcgtgtcgtgcgtgcgagtgcgaccacgcccgcacgctcccggaaaaaggacttgtctttcgcctttccgataaagggagggagctgactttaaggccataagagtaaaaaaggcccactaatcctatggaggtcgcttttgcacgtcacctccgatcgtccgagctgtgtcgcattcggcttcagcggttgtgagtgactcgttaacgctagtgcctgtcctgtttcgaacggccgcatttttgttttatcgaggaaacaaggacgagactcaggaagaaaccggtgagtacggcccattagcgaaatcgctcttcttcttttttacccaccatacggtgtcacttttacgaacgattcagcccattgtagcaaaataaggcccattcagtggctacagctgcgtcgtttccgaaaacgtcttagggcctgtttggaagtggagtttttctatggtttttaagaaataccatagtattcattaatactctagtattctagaccaaaagctgtttgggagataagtgaaaaacagagttttcaataccgtggttttgtcaaaaccgtggtaattctggagtattccatacacagctcaagaccaaagtttcatgttctgcatgcgctgacgctcattttttctcatcacggcatgtgtttactgttcttttgtctcattaaccaactgtcttattagcagcaatagcagatgcaaaaaaataaacgcattgaataatatcagattgtgtattcgctaaaaaattatattcgctggaaccaatttttttttgtttgcaaatggttgtagcgatatggtttgaagtgcagtccgtgaggccgtgacaaagttgtagttagtatttgaaattgaacttgtctctagccaaaaattatgctaccaaacagcgctatgtatcaagaaatactttgattttactctggttttgctgaaaccatagtattatgtcgtaacatactgtataccatggtattaaaatactacggtactagaaaact

SEQ ID NO: 52742 - DNA, 430 bp, Zea Mays
ctatagatatccaagatcagtatatccaaacataaggagagcatgagtacatctagagatcataactcgatctcatgtgttgttagctagcaaatattgcaaagcaatatccggccggatgctcttgcaagatacaatagcacatctcatgatctgaaagaatcaaatgactatgattccattatattgaatttcttcaatatacgttggatatagacaactttgtatccaagatactcaagatagtttagtttgaattgaaaatctctttcaattcatatcctctatctcgaactccgtcgataagtaatgtatgtttaaaatatgttgcacatatttacactgaacataccatactttgtgtatcctttcagaaagaaggattcactaggtcgaatgtaccatatttgaccaagatgctctaagtcac

SEQ ID NO: 52743 - DNA, 605 bp, Zea Mays
aagaagggaaggtgttttttcaccgaaggctcaaaagtggtatgtacacaaatttcatacatcgcaaagaaatttagtacattcatatatatacaaatatctaatgtttgacccatacttaaatattacatttcctagttaacaagaatctagtcttcttttagtattgtctcggtagcttcactcagtagcctgtcaacaacttcatcaacgattgtattggcgacctccatcacatccaaggcttcttttatgacggggtcagcctcaggattgaatggctccggtggtggcgaaaggccggttgtaccaaagtatatgataattagggttcaaagctagaagcgaataataaagaaaaatggcattaaataaaggtacctataatcaatgcacgttcagatgcttcttcagctttctttgcctctacttgagcatcatgggattctttttcacttttctttattgcttcgtcggctatctcacggtcgcccttcatccaaatatcggagtaaaatttcccgtccatcagagtagcttcgaccgaaggttccttcgtatcgtctatggagaagatgacttcttcttgggctgcagctttaaca

SEQ ID NO: 52744 - DNA, 559 bp, Zea Mays
ctcgaaacgccgacagaaggctatggtggcggaccatctgggagatcgaaaggcctaatctcttatggaaggtcattgtagccaaatccttcccctgtgggtgtcgcagctatgtgtgttgaggtaccctccgtaggcataacaaaggacatgacatgtacgtcctgtggcacggcagtcctgcaaccacaacgagcggtcgctctgcgtagtcgtgtagataagcgttgtgggacaatagcatgtttcagaacataagtgtaaactaattgactatgaaggctattaaaaaacttatctccaagaaggtacgcataacgttgtcgcccacattggaactaatccgctcaatatcctgtactgagcgttttagtgtgttaccctgcaaaagtaatcaatgttgattacatagttgtcatgttattttgaaatgaaaacaaatatgccaagtttgaaccagtaccactcggtccaagatcagtgcagcctcgactagcctacccactctagtggattggtcgtatgtcgtgtcttcatcctcagacgaatcgatgttggc

SEQ ID NO: 52745 - DNA, 747 bp, Zea Mays
gaaaaagaccacatcgacggtctttggcattcgaccactccgaagtcactgcgagaggaagcgtagactaccctcccgtgcgacactccgcgcaaaagtcgcctaagggtgcagctggaatagcacaacaagtgcgttaattgaagtcttttatttaaaagacactccacgcaaaagtcgcctaagggtgcaaccggaatagcacaacaagtgcgttaatcgaagtcttttatttaaaagacactccgcgcaaaagtcgcccacgggtgcagccggatcagcacaggcgtgcgaacacggccaacaggccacatcaccatacaaattacagttacatacactcggtgagggcatcatatattacatcggctgaactttcgggatgatacccatctctctgtaattgaacaacattatcctcaattcctcaccctcgaaaaggtttcgtagatccccttcacctatgcttgccccaatcggcgaggacaacaattctcgtttaccaatccggtctacttgaagacggccacactccatccccatacgacggcgcctaccacttcgcaaaaactcacccacactatgtttcgacaccacccttcaccgcctataccaagtactcgcactaggaagatccccggcaccctccacacgcggcaaagactccgctgcagccacatctaacgcagcaaaataatccaagccttcatccgaggactcctccgtccaggaaaatgaactcccaga

SEQ ID NO: 52746 - DNA, 723 bp, Zea Mays
tgaagttggactgctgaaagagagaggtcttactactgaagccgtggttactgattttgttttcaagaatattcagccattgaaagatagggcatacccagcttatctgtatcgtgggctagccgactcaactcgggttaccaatagaagaattccctctgcagacttggtgagccgacttgagatgatccttaggggcaaagtgtcaaatgttggtgctccagtggcatactcggcctggaacctgcctcctcccaaagccttcaccctttttgtgtcgaatccacctgttactgatggcagtttgggccttagagtgcgaccctctgctgatgaagttagtgccttggttgcttcgcttggggagattcctgatgatgaacggcaagttcattttgaggtgcccttgaaccctagtgatgctgagataagtgctatgcttgatttgctggctgaggattcttccgacgctgctcctactggggcgttggtagtggcgcccctcctagaggctgatacaactttggatactcagaagcctgtcagtactcgcccgaggcgcccttgccgagccaatcagcctgatccttctgctgatgagcagaagaagaaaagaagacgcctccggcgagtatctagtttggatcgggacgctggtacctcggttcctgctactgaagaagtgcctgcgattggatttactgatgctgaccctaatgggtg

SEQ ID NO: 52747 - DNA, 631 bp, Zea Mays
tcaaagctgaagctccctcggacgtgcccagaggagccggatgacttggatcagcagcattgagagccagtgtgtccacgcgagctagaccgccctccaaggtcgacgaagcatgagagactgtccgagttacctcttgcccggcaggatcgcacggcagaagaacatcatctgggacctctgaacgaatgatgggattgtcaacctcaggaggctccaataaaaggttctcgggaatgatctcctcccatgcatggtcaaaatcagatatcaacaacccctgaaagctgacaagtgctgataaggcttgcatcggaatgtcactgctcctgctacgacagaaagggaacttcttcttcttcctcctcatcctcatcgagcacataaccgccaacccgagcatcgtcacaacccctgacactatcctcgaggatggtgcccaccaggccatcgccgaagggtaatgtgaaggggccaacatcttgctccaagcatgataaccgccggagtcgtttcttcttatttttctcctcgtcaggcacaactaaatggttcactcggcgtgatcgcttgcgatgagcacctttaggtttctaaatttcttcgtcttcaccaaggttctacccaatcg

SEQ ID NO: 52748 - DNA, 378 bp, Zea Mays
attgtactctattcatgtagctttctagagacttctcaagagatcacatatcaaatgagattaggctgtgtccaacaacgaccggtaaatggttctgtacgctaaatttagcggacaactacctcctctatgggtccagcaatgcacgctaaaacgttcggtaaatttagagcacgtccccgtacacgctaaagctagcagatctcgggcatccgctaaacgacctttttctactccgcgcgctggggctgaagcttcctgctggtgcttgcaaagctctcatccatggtgccggggctgaagctctcgagcaagcaggagggaccgtggaagctggccaaggtcgcagggacgggaaacgacagcgaaaagtggatg

SEQ ID NO: 52749 - DNA, 946 bp, Zea Mays
cactccgaagtccacgacggtggacggcgacgcgcagattttcggcaagcttgtaccggctaggatacttaatgaccagggccctaacctggccgacaccgaattctacctttggcggccatttcccctccatcaattccataaatccgagtcggactctccctgtccacgatgacagcggcaaccgagaacattttgatgtgttcatgatgactcagggtagtctagcacaaatggataggtttacgagtaacaggagacttaatggaggctagaacattaagcaaggatgctagaactgacctgcagacgtctggccatgatgaggtgcttacgggcgcggaaaactgatttggggagaaaagaaaattggagctctctggtggctaatcggaggcagtagtagatgctttggcttcgtgatgccttaacggagctagaggtgtgctcaatttatagtatctcaaagcggtggctctcaatttggtcatggcgtgctggcggtcggaggtagggaagagtactggcgcaatagctgcgtgtccttcaccgaggcaggttcactggtgatgagtccgcaatgtaaagcagcctactgcaatgtggtgaagtctcaacacacgtggcatacgatcggcaggcagccaacgtcggtgagcttatctgcgccggccgcaaggcaagggggtacgacggccagccaccagggttatcccctagcgaagatcttttacctaggagcgttatccggtcaccggtgagaacgaatcgcaatggcggcatggatctgggcgcacagtcgccggtggtaaggtgcgctgcaccagcgatcttgttcagggtactgtaccatcacgattaaccttcaaaacgactgacagagctcttttgagggcaatttgtgtagtgaccagaccaacactctgcatcaaaattgtagttcaac

SEQ ID NO: 52750 - DNA, 294 bp, Zea Mays
tatttgaatgacttgcactttgcacattcaagcttctatagaactagaggggatcacaacataccttggtcaaggcatactctaccactttcatcacccaaagatgccaatttgaatatcaaatgaaacgctacttaacaccaattgaaggctaaatgaaaggttgactaaatacagcaatgcacgccttagtgacacctaagccaattgaatactcacggaagtctaacatttactcaacctgtacatgcttcatatttaactatcattgcatataccaattgaagatcaaca

SEQ ID NO: 52751 - DNA, 338 bp, Zea Mays
agaattaaggttgcaactagctcatgagaaagagagggagaatggagcgatgaaatcaccaacaagctcaccaaacttcacctcacaccaatggtcctccaagtggttgaaggggatgagatttggggtgtgagataggaagtaaatacacttgtttgagagttggttagccaagaatttatggatggggcaagagtgaatgaggagagaaagggctaggggtatataaaggaatccccaaaaagtagttggtcgtttgacctttctgctcaaatatcggctgagctagtattaaaaccggctgagccggtatccagtagagaggaactcgatggatc

SEQ ID NO: 52752 - DNA, 460 bp, Zea Mays
gatggttgataggtctacaactttggtgcagagggaggatggagtcgtcacataaaatttggtgaaaatccgccctgaaggtgcttggtcagtcgttctgaagaaactaggcgatggtacagtatcccgattagactgtcagctcagtcagctcgccgccggcgatccgcgtccagatttgtgctggtcgccaggattcgtgctttgcacgtagaagatttctacgagaaggtaaagatctcacgggggggatggataggatcacggattggagtttatcatcgtgcctatagccgttgcgacgtggccggactaccggcgtcgccgtggaagcgccggtgaccttggttgcgccacgctgtagctcatgccctttgaacttcactattgactccggaaaccctaagttctcgaagatctatgaaggaaaattgtattcaagaccttagataataaactt

SEQ ID NO: 52753 - DNA, 860 bp, Zea Mays
gaccttggctgcttcgccaaaacttttagtctcttttgcttcgacgtagcagaaggtgatttctaagctctctttctcttcttccccttaccttgagctgaggagtaatcaagatatatagagcgaatagaatcgaaaacttgattcaaccttcttttccctcgagcaccaaaagcaacactcaaagcttcatcttccttcttcatgtaaattcccaagatttcattacacgttgattcaatggcctctagccattcgtcatttggttcaccaaactgacttatgtatcgctatgtatactttaaattcaccaaaccacccttcccctcccttgttcagatgcgctgcactcgtcaacctttgagatttcccactcattcacagggggcataccctgaaggctatgtgttcctagactagatctctagtaccaatgtaactgtacacgacattaaaagccaccaagcaagcttgagcttcttcgtcattagaaccgttggcctctttatacctaaacaagacacaatgggcctcgaataatctccttgatatcctccttcttctttaagtcatttttacgtaaaaccactgccttgtctaggaagtcgaccacttgcttcggtatgccaagatagggcaccgagcatccgatcgatatgcgaaggtgtagcaaccaaaattgttatgaagctattatttcccatttgcttttgtttgataatgcaactcatgaatattgcagaaacagtcagcattcggatccacgccttggcttctcactacccaaataaaaatatctaccctcatcaaagcttttggggttagttgatgaaggtaaatattaaatttcttcaatagtt

SEQ ID NO: 52754 - DNA, 384 bp, Zea Mays
gaaagttgactgaatgtaaacattacttaaagattagcttgttgatattgttgatttatggatactgacataccagtggcatgtgtcgccctgtatatttactgcaaagtttatatatttataaaccataaactcaaatgtattctactagtccaattttcatgagcgatggctagagtattaaaaaaatgtctagatatcgcggtatcttctatgtactacctgtgttcgttgccattattgcatcatgtccttgtgttgctttcgagttcattgtgattggctaccgcatcttgtatatgtggtgtgccacagtttcagttgtgatgttgaatacaccctaaaggtcctaaaccctagacattttagctgcacaattttttt

SEQ ID NO: 52755 - DNA, 456 bp, Zea Mays
gtgagaatttccagcgtggggtgaatccagtcactggccggaccggtcgtcgtgtcctgccgtggttaatcgcgctggcatcaccggagttcgccgttatccggccaggctacgtgcctcgacgccttaccacgtcgcagtgagtcaccgtaaaccgctctatagtcctggcttgtcgccggtgagtctgccatggtgaaagccactaatcgctcgcaccagtgcaactttccttctccggccgccaccacgccattccaaattcacgcgccaccgcccccgaagcctataaattgagcgtgccttcgggtctgtaaggtagtcaagcacccaagccaccaagtcgtgcctccaattgctcacccgagctcgccaatttcagatttcccccaaatcaatcccgagcactgcgcaaagtgatctcactgtggtcagcgtgctccaggtctgttcgtg

SEQ ID NO: 52756 - DNA, 289 bp, Zea Mays
gggggttagccggatcataactctcatcatcactgtcaaccatttcatagccaacaccatctgaaggcgcaagttcgtcattaatgtcattgccttcaagtatttctaagtcattctcattttgcacctcatcatcttcctcatcaacaaccatttcaatatctacttccatttcgatagcttcggttaagtctatcccaaatcgcccttctagcccatcttcttggaagaactctctgtcatatgtgtccggtgtcacacccggttttaagggacaaagccgggtgca

SEQ ID NO: 52757 - DNA, 561 bp, Zea Mays
caaatctctagtaccgatatgctcggacacaactcgaaattcgcccatagcttcttggcatggtgacccttgcagcatgtcgcacaggggcctagttaacccgaaggttaggtccagtgggctctgaactatcttctccttctcatcaaccttagcataaagccactcattcttccaaccggttggccatttggtgcgatagctgatcaccagagtcttcatatctttgcggtaagcaaagttgtaacagccaaaattctcgtgtatcccatcctctctagccttcatctgataatgaagctcgtgcacccgacagaaagcttcgacatgcggctccactccttggcttcgaagagcctagataaaaacgctgagcctaacgatggcgttaggagtcagctgatgaagacaaatttcgaaatcttccagacatccccaatcatttcatgcaaaggaaacattaatcctgctttgaagaaacttctgaaaactaccacctcatcattttctggcttcggagtggtttcttccccgccaaaacgaatcagcttcttctcggct

SEQ ID NO: 52758 - DNA, 779 bp, Zea Mays
catattgttccttcatctaattcacatggtattttgaaacgagaatgtgttgttcgaccacctggtaggagtaaagaagccacacctgaagaagcaatagataacactatgtgtttgcggctgcgtaagaatgttatgatggagttccatagatacgttttgcctgtaccaccgtaaccagagacaaagtagaagcctggtctctttgttagaacagtttctgtaatagttttgaaagcatgtagctgatcattgtttagccttgagataagcatttctgattcggattgcatagtattagtatcatatgtaagttcatcatcaattaggcgatttgtaggcacttgaaaagaagaatttgttctagatggtaagttgaaatcctgaattcgacttcctcttttgctaaataaagtttcaagttcctctatgagctgatttttaagtgtttcatcaggcatctggtacgctgggtgattaagcgtctgtcgagtgttatattgaatatcatcagctaataatctccaaactttctcaaagaaagacaattcatcacccacttcacagaaaagaagcatcgtgacaaaaagttggcgaagctgatttgatgtggcccaagacgcagcctcatcgaaggcgttgtaccattcttggtcatcttctaggagcccatgtgctctacaagcttctttgaatgttggatgtaaaatatgattgtatgttcgtaatgattcatagctctgagctccctttacaaccattagaagcattctgacata

SEQ ID NO: 52759 - DNA, 521 bp, Zea Mays
gttgtcgatgttccaggagtgctccaggtcttcgccgcttggcgttgtgagcctgtaagcgctgggggaagctttcatcttgactatgaaggggccctcccacctgggctccagcttgcccctggactctgtccgagctgttcggacgagtacgaggtccccttcgctgaattcccttgggatgactgcatggtcgtgccatgcttttgtctgggcttggtatttgtttagagcctgtagggcaaagactcggtctccatcgatgagatcctttgaagtgggctcatccacgttggggacggctgaaggaactgttcgtggggacccatgttttatttcttgtgggtcatggcctccgatccgtatagaaggcggaaaggagtgaacccggtcgccctgcactcagtcgtgtttagtgcccagaccgcctcgggtaacaaatcggcccacttgccctttttcatcgaggagcatctttttgacaactgtgaagatttttccattggcgcgttccacaactc

SEQ ID NO: 52760 - DNA, 620 bp, Zea Mays
gtcgcaggggaagcttatcactgtgcctgtagccgttgcgacgtggccggaccgccggtgtcgtcgtggacactccggcgacttcaattatgccacaccgtgactctttactacgcggttgtaaccgtggcacacttgagcttaccctctctgaaccactgcaccggtgaacgccacgattgtgccaccagtgacctcttccttctccggccaccaccgcgccaactccaattcacgcgccaccacccccggagcctataaattgagcgtgccgttgggtgcgtaaggtagttaagcacccaacccacctcaccgtggccaacgtgtttcaggtccgttcatgtcctctggttccttgtttcagtatccttgggtgctcttgatactctctaacccatccaattgagctagaatcaattggatcatcgggaacatctcggtcggtccattcctcgcgttgtcaccgtgagcagggtgatgtagagctcgaatccagcaattaagtgaggggaaatagtcgcatatggttgaattcggtgtccagcaaaggggagggctagccgttgtgtagtttggccagtacaggttcgccggagttcggtctgtcgccgcttgccgtc

SEQ ID NO: 52761 - DNA, 754 bp, Zea Mays
tctggctctatattacctcaccttccataacaagaacaagtgcctcccgttgcctccagaaattcaaagattcaagtttgcacgctagtagtgtcgctggatcaaccttttgtgaatcgcaactgtttgatatggaacaaccttttgtggcttccttgttacggaacagcattttgtgaagcccaactatctgttgcatgtctatgtaactgtattgaaactttctatgtttttaaaccaagctatcaagccactcatgtttaatgcagttcttagataaaacttcgacctatgtgtattaaacaagttatgaaaccactcttgtataatgcactgttcagttcaaactacgactattcgctcatatttctatcagtgatttactcactagttattgttattctctgttttcttcacaaatatattattcaccagtatgtgtcacgaattcttctgtacagacgaattacgctgttttgttagcacaattacgcaaatttgcatccagtttacaataactttaattatagacactgcatcattttaacttatactttgtcaataacaattggtatcagatttataaactcgctcacatgtgtaataacaattatgttactacattaatcacaagttattttgacgtgtgttttcttcacaaagacatttttagccggtttttggccaccaagatttgtacagtgtcgatttacgctgtttcataacacaattacgcatattttgtatacagttt

SEQ ID NO: 52762 - DNA, 326 bp, Zea Mays
acgagatcgtgggttcgagaattaccgaaatcggagttacggttataaagttgtgattttctaaagatttatgtgattaaaccggaaaactaggttttatattgattattatgaaccatgtgagaaagatatcccaataactaatttcaaccttaactagtatagtgcccgtgcgttgcgacggcaaattattatcgactccaatctttattcaacagaatgttattgtataacgattacatgaaagtgacgacatatatatcgacttcaatctgtcacaatttctttgttgacaaccattgcatttcgaggtggtcccttgcctg

SEQ ID NO: 52763 - DNA, 873 bp, Zea Mays
gtgaatactagcaggaacacaagggttgcacactcaagtagtgagctatggctaaaatctgagggcaagcgaaaatcttcactgaacacagccctttatggctgctgaaatgggcagatgtcactagatttggcaaccatgcagtggggaggtgttttcccatgttgacagcagtgcaggagctccactacatggctcacatgcccccataccacacaggtttataaacatacaagggacattgaacttggtccatgccacaagccaaaatatccacttgacataactaatgaagtagcaaatatgaactccaccgtggcaggctcaaatgagttcaaaagtgatattttctgcaggggatatgagtccaattcactcccccaaagaaccagcagaccacattttttatgcacccaaaacagttcaaacattgatattttcagtggagctgagatctctagacctttgactatgcatcccatccatatcctatttcataccatcagatgaacacagcaggggaaaaagatcttcttcagatatttttgaaccaaccctgaactgccactacctgactgaacccttccttctacctcaatgctctcgccaattccacaagtagcctgaagatccacatcaaagaatgttgtttactaaacaaccctctaacactttgtcataggtaccttagccttatacctcctagatccaacacaaaacagctccaaaatctggagaaccacactgaacccaaaattacagtcaactgaatcaccactacatcctacaggtctgacagagacaatttaggtgcattttactcccagctttgcatagcacccaacctatctctctgtaggaaacttgtgcccc

SEQ ID NO: 52764 - DNA, 320 bp, Zea Mays
gcaagatcgtggtctacggaggcgacgacagtcgcgcagtaacctccccttcaccggtgggcacatgtcttcctgcctgatgaattagcggagagtcgcgctcagcactcgcctagtgaagctcttgaggcggcgtgtggcagagttgtcattgtccttagctagacgactgtggaagcaagatcgtggtctacggaggcgacgacagtcgcgcagtaacctccccttcaccggtgggcacatgtcttcctgcctgatgaattagcggagagtcgtgctcaacactcgcctagtgaagctcttgaggcggcgtgtggcgg

SEQ ID NO: 52765 - DNA, 703 bp, Zea Mays
tgtcatgtaggaggagcgaattgtgataatttcatatttcggaacgtccccctcatctcatcataatggcaatggcaccatcattgcagatttgcaccgcttgcaaccaccaaagtttgggggatctgacagcccgattgaggcagatgattggtcgcacgagattgagatgaaggttgaggtcgtccatgacgatgacaaggacaaggtcttacttgcggtacaacagttaaggggacaagtcgttgactggtggcaaagctactgagaggttaatggagaagcaattgtgatggagtgggctgatttcatcaatatctttcgagagcagcatattcctagtagtgtgatgaagctcaagaaatatgagttcagaaagcttcgtcagggtgcaatgtctgtgacagtgtatcttcacaagttcacagagttgtcccgttatgccctcgaagatgtcaatgatgagaggaagcaataagacttttttggtggccttaactttgagatcaggaccctagttgaattcactatccataaaaactttaatgccatggttaatagagctatcactatcgagaggaacaaaaaggcagagctcaacgagcacaagtgtcagtttgagaacaagaagcctcagcagcctgagaagtttcagagaactcagtttcctgctcactttggccactggagccggggtgcgttg

SEQ ID NO: 52766 - DNA, 638 bp, Zea Mays
gaggttggccttggaggagtcgtgactgcgtcttccaccctgggttggcctcggacgagttgtgactgcgtctcccgcccaaggttggtctcgggccagtcgtgactgcgtctaccacctaaggttggcctcgggtgagtcgcgactgtgtctccctcccagggttggactcgagcgagtcatgactgcgactccctcccgaggttagcctcgggcgagtcatgtctgcgtctcctgccccaggttgacctcaggtgagtcgtgactggatctcccgcccgggactttgcagagttggtcggtgtagtcggtcggtggagttgggaccttcctgagcattgcccgagatgccctcgggcaaatcaaaaatgggttgcttgtccgaggatggcctcgggcaagttgtgactgcgtctcccaccagggttggcctctagtgagtcgtgactgcgtcttctgcttgagcttggcctcaagtgagtcgtgcctgcatctcctgcccggggttggcctcgagcgagtcgtgactacatctcccggttggggttggtctagggcgagtcatgactttgtctcccgtccggggttggcctcaggcgaggcaccctaggccactgccacctagctccaccgccatg

SEQ ID NO: 52767 - DNA, 805 bp, Zea Mays
gtcctggtttgtagactaagatagcggagaagaacgctaggatagcctcgtttgagacgggtggctcaattagtgcacctgtacctactcaatgtacacattgtgagggtttacatttagatattatttcctacaaacacatcaagactcacactaaataagaaaacacatacgtttagtcagtcttgagctaggtgtctactaatgagtcctagttgggcatgatggccaaccaattcatgagtgatacttgttgtggcaaggttggaaagtgtgtggatcgacatattcaaaaaaaaacctacaaccacttcctaactcattaaactcactccaccctaatatgtaacccttgttatgtgagacaaagtattcgaggaagtttgaagagtgccacccaaaaacaattgtcaattcccaaacctaatcatcttaaaaacccattgatactctgcccaacatctctggtgatccctttcctagaacatcactgccacccaaagtgaaccatgcccacaaaataactccagccaagagagataccattgcaagtattgcaagagggatgttcacttggttgagtattctataggatggagagaaatcagtggtggggctttgaggtgaatagtaagagtgtgcacaacctttctcacttggtttagaggcatgctgctgtgcctagagatgttttgcctcatgttgctaggactcaagtagaaaaaccatgtggtggtcaagccctgttggttgttcttcatgatccatatgaccatggactctatagtagattctttgattccca

SEQ ID NO: 52768 - DNA, 461 bp, Zea Mays
tatttatatatgatagaagagtttagagatttggacaaattagtacagtggttcactttgatcgatcctttagaaaaggttgataaaggtgatggtagtacaccgaggccgacttttgtaaacaaaaacttaaaatatgattcaagggtaaaatgatcggattgttacacgagtatattgattgttttgcttggagcaatactgaaatgccaggtctaaggcgtgagttagttgaacatcgattaccaattaagcctagatttcagcgattcaagcaaagaccgataccttttcttccaaatttgtgtccaaggatcaatgacaaaattaacaaactcttggaagctagttttatcgtgcactgtagtttatgctgattgggtcttgaatattatgccggtgaaaaaggactccgacaaactaagggtatgtattgacttccaaaatttaaatagagcaac

SEQ ID NO: 52769 - DNA, 811 bp, Zea Mays
gatgggaccatccactttcatcaactatgatgacgcatgctcgagaataacgaccgctgctcctccatgccgactactatgattcggacaactctggatgggacgtgcacatgtctaagcatggtctcaccctcgggagggaactccgtctcgcctgaagtcagccacatcctcaaagaaaactctgcctcgcccgagctcggcttcgaccaactgccccagcaacaactccccgtgaatcccacagggggccacttcgacaactatgctacctcctcctagtatgactgtacgccccaggcaggttcgacaaaggcctcagaagtaacctccgtctcgcccgagcctggcctcggcctagataacatcgaccaaaggacttcaccaactccttcgtgaaggttgccggcaacaggatggtacagaacccacgtcaagtctgctttgtgccatacaggatggattaccatgcgcttttcaccatacttatcactgtgtcaacaactaggacatggacaacgcctccatcagacaggctctggtacgcatccaagccccagaccctggcctcgtctcagcacacgatcaaagatgcaaatacatggactagacatcctcctctcgattcaagtcaacaccaagtacgaaggccataccgatgaccataccggctacaggggctcgccctcatctcctctccgatatgcaacaaattgtggcgctcctgagagccctccttgaggctataaaaggaggagcctagggcatcattcatggaggagaacacttcgcggtttttcacctccatgac

SEQ ID NO: 52770 - DNA, 664 bp, Zea Mays
ggagggttagagtggcgggtctatggtggtcggggctcgctcggccgctggcacgccgttctctgggcaaacgccggtgaactcgtgctcaggcagggttaggagcgcgcgggggtgtacggccgaggctagggttgaatttatagccgcgggcgcggggttaatgcagcgcggcgcgcgcggggccaagcgccagggcgtgctctggcgttgccagggcgtgtcgaacacgtggccgtgttaatctgcccgaattcttgcacctgcagagctcccaaacgtgcgaatcttgccatatgtcttgcgtaagatttcttccctgcacctagagctatctagttcatgtgagttccaaggggagatcaggtttggcttggaagatatggtggcaccaagtcttgtctgtctgcactgttcaccccacgacaaaacagatgccaaaccatgtcacacgaccccggtttggtttcaaatttttcgggggtgtgccttgggtagtttggctactttttgttttttggaccatgtggttttggcaccagaaaaggggtgaacacttctgatctttaggttagggctgattttggacttagagaaaaatggatggctctagtgtgctctccacttgggggcttgatttggggtttttgttgggcctttttgt

SEQ ID NO: 52771 - DNA, 346 bp, Zea Mays
ccctatccacaaaacagatcctatctctaaaaccgaccctatccacaaaacagatcatatctctaaaaccgaccatatccataaaacaaatcctatctctaaaaccgaccctatccataaaatagatcctatctctacaaccgaccctatccacaaaatagatcatatctctaaaaccgaccctatccacaaaaccgaacccccacccttccaacacctcgccagaaaccctgactcggagtccaaatttaaaacggccataactttagcctcggaactcgaatcgggcccatttttttcaaatcgcacaaaattaaattttgcatccgattctttccggctttgc

SEQ ID NO: 52772 - DNA, 375 bp, Zea Mays
accacaaggacatgcgccacacccttcggaactgcagagacttcaagcattccgtgggtaatggccgacccttccaacctctgccgcctcccccaccacgaggaggacctggagaacctcgacaaccccaacagcaggagaggggaggaggtggagccttcccacgcgtcgatggagaatttagcgtcatcttcggcggacatgggtcgcaagaaagcaagaggcaacaatagctcaacgatcgtcagatattggtggcgaccgttggacctcccgccccgtatcgatggtcctagcacccgatcaccttcactcgggcggatcagtggctcaacttcgaccacccgggcaagtacccgctccttgtcgatccgg

SEQ ID NO: 52773 - DNA, 523 bp, Zea Mays
tccatagttggactcctccatgttgagagtgatagggacatggtggcgaatggagacgccttagatagaagaggatgacacagggagtgggagttcttcatcagaggagtcggaagggtgggagggcgccatgggtgggtgatcgtgagagggtggagcagaaccgatgattaggctctgataccatgtaagaactagatcgatcaactaatgattgtattgatcagaggcaatagcctatatatgtattttacactgctcaagcatgtgaggctgaatcgcacaaggcatgctggtgaagtgctatgtgcggagggcagttcccagacgtgggcaacaagtgcgggagtcagttgagacctgcacgaatcgatctagagcatatttggtgaactgcatatccggtgaactgctaatacagtgggcgaggtgaggaggaagcaacatcttggagaccggcatgtttgccatcacgattgtcgacgaaggagctctgaggcggtagaggtatggagcacgacgg

SEQ ID NO: 52774 - DNA, 679 bp, Zea Mays
ggaaagagggctctgctgggaggagacgaattgttgcacgccgccgtggtgagcacagagaggagcacgagggagagaggagaagggagcatacctggtaaccgaaggctcacacgatctggatctgggaaagtgggatatctgcgttgggaagagggttttcagcattggagaaataggagaaaggtacgtctgcgtatatatagaggaggggtgaggcgatgctgctatgtgcccgacgcattgggcgttgcgcgacgaggcaaggcaaaacgaggtgactgcgacagattttgagtcgatgcatgcgtgtggaatagataacaatttagggaaaacggaaatgatccatggcctgaagtgtcagcgagaggagcatgtgaggtgattgtgtctacgcgatacggcgagtgcggggaggaggttgcacgcacagcgttgtgtgacgagacgacacgaggtgagattgatggatgggttcggtgatctcgcgaaaaagtacacgagatctggaacagactcgacgagaggaagaaatatatatattatcgcgtttccaaaatttatagttttcgcaaatactaatttttttggtatttaattaatattagagggactgaagttcatattcaatactcgaagaaacgttttgaaggttcccgaaaatttttgaaaacat

SEQ ID NO: 52775 - DNA, 683 bp, Zea Mays
tcacccaattcacatggattagcatcaaaccgaacaagccctaaaatcaaacaaatacacatggatatacatcaacgccttgcttacggtcgcgtccatccccacgacccgcacaacaaagagtgccctcgcgcgactcgctcacatcgatctattctcaggcacaagcaacaaactagcccacgaccttctacccaccatgcacttggctccacagctcatgcatggggcctaactgaaaacccaactaaatgggctcaagattatccactaacaattctccctctatgcttgtggccctaataaaactatgtaacatatctcgtagttcctgaaatcgtgctcttggcagcgccttagtcagaagatcagggagttgccctgttgtgctaatgctaaccaacctaatgtccccgatatccattgtatctctgatgaaatgatacttgatttgaatatgttttctttgatcatgatgcactgggtttttcatgagtgccacaacaaatttgttgtccaccatgagttcaacgacatgaggtggtgtccccaaaagatttcccagcagtcgtcctagccatatgccctaacatgcaccagaagcatctgcaatgtatttagcttcacatgttgagagagccaccaccttctacttcaaagattgccaactggtagtattgttg

SEQ ID NO: 52776 - DNA, 410 bp, Zea Mays
taaggattaggtagttttgagcttcaatggacatttggaatagtgatatgatctttgtttttcttttgttgtactataaaggggacatgaaacgattagcttgccctagacatgtctagttaagtgtggtctatatttgtgaaaactagtggtagataaacccaagagagctcgtaaaaaattgaaacaaaatccaattcaaaaagggatctaaacgagtgagtttgttgtgctacagtagcatcagccgtgacagttgtttcatcggataaagcatcagacaaaagtgtgtcctgttgtattcgagagaaacaatgtatgttcggtgtgctctggatgtggtgcactagacatgatgaacctgcaaaactagcctaaagacaataatactcgtggatgtgtctagtgta

SEQ ID NO: 52777 - DNA, 329 bp, Zea Mays
ttcctcacttcctcacgtggtcgcgccatacacacgcaactacgctaaccctagccccgttgttcctcactttcatgcctataccgccacctcaccaagcagacaccaccacaacaacggatgagatccctggggtgccgggactaatgcagtataggtcaatcttcctcttccacacaccctttgaccttcactcacttggaagatgaaccctagtcgccactcgtggtctcgccaatcctgttgacccatcattcgtggcacgtggagtcgcccatgcggagatcggaatggtcaagcctagtaaatggcgtgatagcccaactgtc

SEQ ID NO: 52778 - DNA, 527 bp, Zea Mays
aagttctattccttcgcaacaccaggtccgcgatggtggtcggcgacgagcacatctccggtgagccaatactggccggaatatgccaagaccggacccctaacttagctggcaccgaattctaccctcggcgacactaacccttcaatcaattgcactaatccgggccggagcacgcctgttcacgacgacggcaaaacccgagaagaagttacagtgtttcgggcaattcagtacaatatagttcaatcaatcgagcctacaagcaacaggagatccaagagatgctagaacattcaatagagggttatgaatcaacctgaagcaggctggccacagtgagctcacatcgcacggtgttcttggttgatttgggggaaatcccaaattgaagttctctagtggataatttgaggcacgagttggtgtatgggttgcttgactaccttgcggagccgacaacacactcaatttataggctccgggggcggtggcacgtgaattggagatggcgcggtggcggtcgg

SEQ ID NO: 52779 - DNA, 613 bp, Zea Mays
aattcatagaaatgtcaaaaagctcaaaaaattaagaaaagttcctatggtttcagaagagtcttgacactctgacacaataaacaaggttactgaagagtaacattagcagctttatatcggcattccatttgcctgcatagtaagcctatcaatcaagaaacctagataatgtgttcaatcatcatatcaacaacaatagtcatggtttctgaggcgcatactgtggatgtgtggtgctagagatatgcctggacgcctatagtgtaactaaaaccttgtagcgtctcttatgcatcaacgtcaaggcaaaacctcaaagtaaggctagcaactctgggaataaggcaaccaccaaggacttcatagctttatatgaggaatactgcctacgcagaaaaatcaataagcataaaaactgacctttcatgggaagctgaggaaccacaaggcctttagattagttgataaattatgccacatgcatgcttaactagataaactgtgtgtatcaacaaaatatgcaatgaaacaaaggttggcagaggcgcctcctaggccccaagtatgtatttgtagattatagaatgctaactgcaaatttcacgaattc

SEQ ID NO: 52780 - DNA, 511 bp, Zea Mays
aaggcttataggtacctttactgaggtttagcttcgaaatttgcgttcagcttcggaattaacagacattttttataatgtagctgaactttcacctccaccagagccatataaccccgaagctgacccgaccatgaaggaggcgttagatgtaataaaaatcgctaatgaagctgttgacgaagccatcgacagactgctaaatgaagccgctgagaaagtactgaaagaatactaaaactttgtatatttgatagcttaatgcttgtatatagctttcgtcttctgtaagaaccaaacatcaagtttttgtatgtatattaatgtaatgtatttctttgtgatgcatgaaaccttcgtacataccatttttgagctgttggcgaaaaaacacctttccttcttttcatgcttcacgaagaaaaagattctccttacgtcactgctgacgaagattaacctcctatgcgaaaatatctccgccgaaggcacatcttgtgctatagtatgt

SEQ ID NO: 52781 - DNA, 755 bp, Zea Mays
tgcatatgtatccaaacacctccaccattgagagtgctgcttcttgtaatggttgaatcattaatcctccagaaccttatgaatgcacgaatcttaaacaaggatgacatggacaaagtacaagagaaccttgttgggtttcccattgctctcgaacaacggtcgtcgtacaacctacccgatgtggccccctcaagaggaggacgacaattatgtggtcttatatgctcatctcattgttggagtccattttcctccctcttgattcttctgtaatgtccttgatttacaacctctagcttgggtatcttatgcctaatgttgtccttgccctccccaccttttcttgcctccacgtgacttgtgttggagtaagaccctgcgtcaccttgttctgccacttcttcgtcgattgtacctccaatggtataagtcccttcgggaaggtatattttcaattgggcactgggcccaagagtcactcccactacatttctatggacattttcgagaagtgggatcattgaaggacaccttggatatatgttacaacttgttagaacatcctcctagagatgtcgattagggagctagaagtagataggttccagtgggaggatgatcttgagatggatgaaggctaggaaccgtgccggtgaggatagaagaactcgtgagggctaggctcttgacaactacaccccctctttcactttctagcctagaggatcaccccatgggcctgggtggctggg

SEQ ID NO: 52782 - DNA, 717 bp, Zea Mays
cgataaagatccgatggataggatataacaacgaaggggtaagtaatcgcaaaccttgatctatggatctgcggtctagatttaatgaaggcgtgatctatttcgaaccgtaggatctcgatcaaacggttcccttttaacgaaacgaagggctattctcttatctaatctccaccgttgactcatggatcagtggccttggcttgttcttccacttctctcggtcagatgcggtggcggtgaacaacacaccacggcggtggccatggttggcgaatgcactacgacccttaagcacactactcatttctatgctcggctacatgatgcggaggatataacgaattgagccatagtttcttaccagtgctcatgggggcgacgcgtgttgtccatggaggtgcgtggccagcggcggccttctaagttcggtgagcaattcaccatgaccgttctgcccaccgcccaaggaaccccccacaaaaacgtccgtcgagcccccatgtaactcctcgagcacacatcaaggtcaaagcttgtttgagagcatgaatcaccgacgacgacatcgtcttctctctccctttctgcgctacgtcccttgaaggtggctgctcgatggaggcacggatggaggtggcttggattctaaggcgtgcagcacctaggattatatagccccaaaggcggatgagtctggaaggccgtgttcatcag

SEQ ID NO: 52783 - DNA, 771 bp, Zea Mays
cttgcagtgctttgtcaactcgccttgtcatgccgttagttcttgcacttgttttgtcaactcgcttcgtcacgccgccgtgcgagcccgaaaatctgagcttcaacgaacaacaagtcaacagctgatggcgctatcctatcgtcagaaatttttttgtcagaacagacaagacaagaaccacatttcagtcaagagtggcagaaaagtctgagaactcgccttcttctaatcatctgagttgaattttctgagggatcatccagtgagtcttagctataattctgctcatatctccttgcccagaaccttataccaacgggcatggcatacctttacctgcctgttttcatattcttgctgtccatggcttgttcatgccaatccgacgacaggctaacacctgcaaagccactcctgccgggcgacatgttgatctcacatggtggagtctttgctctcggcttcttctccctgacaaactcaagttcgagttcatatgtcggcatatggtacaacaacatccctgagcgcacatacgtgtggatcgccaaccgcgacaacccaatcactacagatgtgccagggacgaagctagcttttaccaacagttctgaccttgtcttgttagactccacaggccacactatctggatgacgagaagcagcatcagtgcaggaggcggtggaactgctgccgtcgtcctgctcgactcggggaacttggttatccagtcgatagatggtactgccatatgggagagctttgat

SEQ ID NO: 52784 - DNA, 2887 bp, Zea Mays
taactacatctagcaataatatttagatttccatattgttgcatttgcctgcatctggaacccgcctttgaaactgtaatcatgatgttatgtattactgctttatattcctacataattttgctatacgttttatttactaaattattttatttatgatatttgcctttcctaggaattcttggggctgctgatttgagggaacacttgaagtctgataaatctcctccaaaagaatctgagtctggtggtggtggtatccatgggccatgtgctgaatttggacatcagcgcaatgccttggaccaaggaactaaagttggtgatggtgaaaatgttaacccagaaaacctctctctgtactacaaggatccaaaagggtgcatccaaggtccttttcctggatatgacatcattggttggtttgaagctggatattttggtattgatttgctagttcgtgttgccagtgctccctgtgattctcctttcttattacttggggatgtcatgccacacttacgggcaaaggtaagggtgcctccaggcttcagcaataccaaaccaagaagtatgacagatgcctcacatctaggatcagtgtatcttggaacatctgattatggatccataaacaagaatggctgtgtaactgaagcagaaaattactttttggaggctccagtgtctagtaaaatccagaatcctagagcagcaactaatgttgttactggaggtttgtttctcatcaatggcgttctttatgcccatttcttgacattttctcatgttgtgccagtcatgatgtgattgctattttattttaatttcaggtatgaatgaatggaggtttgtttccggtgagaaagtgaatagtataaaccatcttgaagtacagaaggtgcagttagagacagaaaatacctttcaaatagaaggtgatgtcatatcagttggagagtcacaaaagaaagaatcagtacagtcaacttcacactcaacattcttcccgcaaatggttgacccatcgagtgaagccctccaacctcagaatattaacctgctctcaatgctgcttcctgcagaaaaaggacaagcaccgactgctacttctggattgtcacttcggtcaaataatgctgactctggaaatctgcatgctggtatgtgtggtatagatgttactcaagagatactaaatgtgcaccaaaatctgcataattctcagcaaataggtattgatgctcaacagcattacgttttaacacagaatcaaccaactttagcttgtttgaactctcaaatcacacagccagaaaagtttctcggtggaatatatcatgatcctcagttaaacatcaaccaacaacagtatctgctatcagagctacacttgcaacccctgattcctggagtccctgaacctcaatcctctctattgaacaacatgctacagctcaggcagcaggagcaacagcaacaatacatttctcagtccatacctcatgatcgttccatgcagcagctttatgattcttcccatgggacaatacatacttcattgtcatctggtgaccgtatgaagctttgtcttcaaagaacagaagagattcttgatcttgctctgaagttacctggtcatggtaagcataatctacaactacatgcaagtgtgaaattgagagacacaggaaatattggtttgtcggaaagttgcgctactgccctaccactgccccatgaaatgatgggtcatgcagcttggaaagaatgttctgctagtctcacacagggctctgcagttgttgatgctctttcacaaaaagaaagtattgtagactcaccatctaagaaaactccaagttatggttctaacgattatagcaagatgactgtttttgaagttacaggttttcctcaaccatttcaaggtcttcagaaaccgaaaagtgtagcatctcatatctcaaatgaagttcatgaaatggatatttcctctgtccatcctcattcatggaaacctactccaggtgttagggctaaatcagtgttggaaattcaagcagaggaacgattggaaactcagagggaaatagccctggaaaatacaaaggtaactacaacaacagcttccgggctatctattcattgggttgatttggttgaaacttctgggcaacagtttggagatcaggctagacctatgtgtgataaaaaaaatgacaatatatcacagagtaacagaagtcatttacatgatttatcggcaagagaggaactgataaagtcaaatgctaaagctggtgttatcataaacagtgctgatgatacatcttttcctcctctggcaccttctattactcagtctgatgctcatattcatgatggtgctgatttcattgagttcaagggcacaagaaagataagtaacagggggaagaaacccaaaggttctgcagttaaaaccccagcatcacatgcaaatgttatacctggaccagctactgatcctgcacaggtacgcgaaccatgttctctgagaaatattcaggtggaagaagaacaggaatcagctaatcttcagcaactagtaccagcatcatcccatgcaaaagggcctatggaccagcatattcatgggaacaattcatcctggcaaggttctgaatcacctccatcgaggggtaacgaattcctcaaaatgacttctcatgtttccagtcactccactcctaattcagaagagtatctgttttgggagcctcgtgagcatgcaaagcaagataagtatgttcttaactacgggctcaactttgtcagcttttcttcattctttttattaatgaaaaaatggaccttcttgctaagcttataccctctggaagca

SEQ ID NO: 52785 - DNA, 506 bp, Zea Mays
ggccgacagcgcaacaccggactagaccataaatgtagattaatgataataacacgaatattaaatgataatctagtgttcccaaaaggatatgaataccaaaaatcctttttggctcccgaaaggagagctagagggagaaaataggtggactgactgaggacgaggcactagggcggagcagccgcatcagcgcgtcgttctggcgagtcatcgaatttgtcgtgagatagcgttggtgagacgacgataagtaggaggagtgagtgcaggaggcaaggtagcgatagatgatggtgacggcaagcgacacccattgtcgtgttgcaatggcgcggtgggactctaatgagttagcgagggacaagtgatgccatggtcccaccaataacttgcccatgtgctggtgcatactaggaggcaaaatatcaatgttgtgtgtaggatcccgacgagtcgacgagctgatgagtgatgagaaggcaaagtgcgcagcagcgggcggg

SEQ ID NO: 52786 - DNA, 533 bp, Zea Mays
catcgacgtatacttccaccttgtccctgatcaggtccccgaaagtcttactcattgcccgcacaaatgttggcaaggcatttttcagaccgtaaggcatcacgacatagcagtaaagcccatccactgttacaaaagcggtatgcttcctatcttccctagacatctggatttgatggaaaccagaataagcatctaataaagacaaaaggtcacacccggaggtacaatccacgatttgatctattcgcggaagtggatacgggtccttaggacaagccttattaaggctggtgtagtcgatgcacatctgaagcttcccattcgccttggggacgatgactgggttggccagccacactgggtgatgaacctcttcgatgaagcctgcgtctagcagcttccagacctcctttcgaatgaagtcctgccgctcgacggactgtttgcgaggcttctgactcaccgacttggtgtcagggttgatcttcagatggtgctcgatcacctccctggggatcctaggcatctgc

SEQ ID NO: 52787 - DNA, 465 bp, Zea Mays
cttttttgcttatgtccacacgcagtttggcaccaccatcaaaagcgtccagtgcgacaatggtcgtgaattcgataattccccggcgcgcacgttctttctttcctatggtgtttcccttcgcatgtcgtgcccttatacatcccagcaaaatggcaaggctgagcgccctcttcgtaccattaataacatcttgcgctcactcttgtttcaggcgagtcttcctccgatctactgggttgaggcactccacactgccacataccttgttaatcggctccccaccaaaaccctcacctcctccaccccttttttccacctccacaccactccaccttcctatgaacacctcaaagtttttggctatgcttgttacccaaacatgtcctccacaacatcccataaactcgctcctcgttcatctctatgcgtcttacttggctactcctcagagcataaaggcta

SEQ ID NO: 52788 - DNA, 545 bp, Zea Mays
cgcgatcggatggatggtcacaaaccaccctgcaagcggtatgccatcttctaattctcacccttcatcacggagccgatggcacgctcgctgcagtctcccttccctcacaccggttgataccgtgcggtggcgcacgacgaccaacagcagtccaacgctggcgagcagtactccccgccatgacacacctatcccaacgctgataggtgtagaagattgaggagatccatacaaactcaacagaggatgacttacaggcggttacgtgatgccggtaccagcccacgtagaaacgcgatccacggtggccttcctgctccggtgagcaattcgctccgagcccaccacgaactcccacgcaggtgccccatacacatcccacgtcacctaccgaagctcctggtcccttttccttagctccattgacggcgcaaccacggattgatcgccctctcaccctttccccccacggatgctcgatacttctctactaaccaccgtcactaagtattccgggacactaaggtcgacaggcagctccg

SEQ ID NO: 52789 - DNA, 646 bp, Zea Mays
aaatggaatagaaatagtcagtcgtggcctctactcgtgtatctaccaccctaggtctcgtatctaccatcactagtctcctcctccaacatgccaagttcggggactgcgtgtaataggtggcatacaatacacgtggggaggcttcaatgtgacacgccacgtcgccaccaggttttggacgattttgcacgggtaagttaagttcaagactcgttttctagttttttgagttcggggacccaaataacataatatgctaagttctaagcgccgatccattttactcccggtctaatatagtattcttcgggttttttctggctttatgcaattgtgggatgttcatgttcctcgtttgctgtgttacaggctcattggattcatgtctcacaatggccggagatcatttgggcttccagttttagtggtgacgctaggttaatggattcttggtcatcttttgcagcaattagacggtgcttttcaacgagtcaggtacatgcatatgcaagaagctcccgtggtgtttgatcatgaagtgtttccaaggtttgatgcatgtattgtggatgattgatggggtgatgttccttgatatagtcgtttagcacctaatagagatagtagcataggtatagtgaac

SEQ ID NO: 52790 - DNA, 305 bp, Zea Mays
actcaattataatagttataattaccattttattcaaagtttacactcatcctagatgcactaaatctattttttcttattgtataccaaatggccacctgcttttcatgctcatcagcaattggtttggaaatcttgcaagttctatctaccaccaactttatcaacatcatcaacaactgctttgaaaaccttgcaagttctatctacgacaggtaagccacagatattcagtttttttaccaatcattagttgctaactttttcacttctcccccacccagatacagtacaactaatttttt

SEQ ID NO: 52791 - DNA, 278 bp, Zea Mays
cccccaaaaagttttcagaaaagccccaaaaagttcacccaaggttgagcacaagggaaaattcagaatttgcctaagtctaaaaactaacccttgaacaaagatcccacatgttcaccttaatccaaaattcaaaacacttcgacccaattgacaaagtggcgccaaattaaccctagaatgccctggaaagaggtgacacctaccctagggtgtttgacacgacttgacaccttttttgtctcggctcggacctagctgacacagccaacttctca

SEQ ID NO: 52792 - DNA, 1136 bp, Zea Mays
gccgatgtcattgtagccaatggtttagcttcgattcgtttgaataagtactcgatcgctaccacaacatatcttaagttcccatgagttggtggtagtggtcccaacaaatctagtcctcatctctgtaatggccaggtaggctgaattaattgtgttagagaagaaggttgctttttgtccctagcacacctctggcaattgtcacatttctgcagcaagtctgctgcatccgaagcagtttttggccagtagaagccttgcctaaagaccttgcccaagagtggcctagatccaatgtgagcaccacatatccctgaatgaatttctctcatcagttcttgtccttcgactctagataaacatttgagcaatggtgaacagactccctgcttgaataactccccttctattattatgtatggtcttgtcctagcctgcattcttttgatataagcttcatcatccgaagggtaattgtcctataggaagatacaatttttgttctccaatcttcactatgtatgggtgatattgcgagtatagctctttccataagatcaaccgaaggtggcttaagggtttcaaaaaagacttctaggggaagaggtagcccctgtgctactgatttggctagcaagtcggcttgttcgttatctcctcttggaatgttttttgctgagaaaccttcgaaggaggcctacatcctttggattgtatcgagatacttttctagcttggggtctcttgctttgctgcttttgttaacatggcccatgatcacctgagaatctgacttcaatattgctcttcttactcccatggctttgagttttcgaagccctaacaaaaccgcttcgtattctacaatgttctttgcgcactggaagtctagtctgactatgtaggatgtctttattttcgatggggagatcaaaacgtctacaatgcctgcaccgaaggtcccccatgacccgtcacaaaatattgtccatacttcttcatctagtacccgctcttcgtcgtgagtccctggcgtccaatcaacaacgaaatctgccaatgcttgagactggattgaggatcgatgaacagagtcaatggtgaactcatttagctctgcggcccactttccg

SEQ ID NO: 52793 - DNA, 1022 bp, Zea Mays
ctccgatccgtataatagacgaaaaggtgtgaatccggttgcccggcattcggtcgtgttgagggcccagactacttcagatagttggtcggcccatttacccttcttgtcgtcgagaagcctttttcttgatggcagtgaaaatcttgccattggcgcgctcgacgacgccgttggattgtggatggtataccgaggcgaaggcaagcttggtgccgatggagaggcagaagtccctgaagtcctggctgtcaaactatttgtcgttgtcgactgtgagctcggacgggactccgaatcggcaaataatgttttcccagaagaacttctgggtagtcttcgacgttattgtgaatactgccctggcctcgatccacttggtgaagtattcgacggcgatgaaggtgaacttgaggttcccttgagccgtaggtagtggcccgacaatatccagcccccagcgttgaagtggccatgtgtgggcaatcagcttggtgaactgcgaagggttgcccgagcggggagaaaacttctggcaagctttgcacgacctcgtgactcgattcgcggtgcaaattatcgtgggccaataaaatccttgacggatcaccttggcagcgagggccctaggtcctgagtgggagccgcaagttccgctgtggacttcgcgtaggatctaaattccttcggtttcggtgacgcattttagcatgggttgactgatccccttcttgtatagctggtccccgactagtatgaagtctcggctttggtgcttgaggcgcttggcctcattgacgtcactcaggtggtagtatccttccagaaacagttttattgggccccgccaatcttcagtcataatgaggttgacgatgcgatggccttcagcgtcgttggttacttttaatccctctgggttgcgtacggctagtgagccaatgacgtggtagaacacgtcggagggcaaggtctcacctctggccgctgccttagccaacgcgtcggcctcttcgttcctg

SEQ ID NO: 52794 - DNA, 501 bp, Zea Mays
  misc_feature (438)..(501): n is a, c, g, or t
cttcgagctccaactccgaggcagaggcatacacacacattttttttgaacgtaaggcatgcacacacatgacccgagcccgaggttaatgcatcgtcggtctgaacgcttagcttttttgaaacggaacaggggcgccatgtcgtcatgtcgaggaacgggttggtgagacgtgctaccgtccaagcccttttgagctcctgttcttgagtcaacaatggcattgggtcactgacattattatctacatctattcaccatttaacatcatttttcctctactaataaataatacatgtgcacaaactttaagaaagtgggctggcggctctcaatctggcgcttccctgattcatccaccccttcactgttgtgcgtagggggagttgaagagcacggcattacggtcgaagggacacgctatattgctacaaggtnnnnnnnnnnnnnnnnnnnnnnnnnnnnnnnnnnnnnnnnnnnnnnnnnnnnnnnnnnnnnnnn

SEQ ID NO: 52795 - DNA, 3143 bp, Zea Mays
ctaacctgaggtctgataaactcaagctgtcttcaatcttgcatcagagatttgtttcagcaacgttatagccaaaacatagtaacagtgttaaattcatgatgcgttacaaaaatattgatacaattttttataatccaaaaaaaattgtttaacatgtagcttggccaataaaccacaggtttctctaatctgagatctgataaacccaagctgtcttcaatcttgtatcagagatatgtttcagcaatgttatagccaaaacatggtaacagtattaaattcttgacgagttacaaaaatattgatataatttttataatccaaaaaaatgtttaacatgtagcttggccaataaaccataggtttctctaacctgaggtctgataaactcaagttgtcttcaatcttgcatcagagatttgtttcagcaacattatagccaaaacatagtaacagtattaaattcttgatgcgttacaaaaatactgatacattttttttataatccaaaaaaatgtttaacatgtagcttggccaataaaccacaggtttctctaacctgaggtctgataaactcaagctgtcttcaatcttgcatcagagatttgtttcagcaacgttatagccaaaacatagtaacagtgttaaattcatgatgcgttacaaaaatattgatacaattttttataatccaaaaaaaattgtttaacatgtagcttggccaataaaccataggtttctctaacctgaggtctgataaactcaagctgtcttcaatcttgcatcagagatttgtttcagcaacattatagccaaaacatagtaacagtattaaattcttgatgcgttacaaaaatactgatacatttttttataatccaaaaaaatgtttaacatgtagcttggccaataaaccacaggtttctctaacctgaggtctgataaactcaagttgtcttcaatcttgcatcagagatttgtttcagcaacgttatagccaaaacatagtaacagtgttaaattcatgatgcgttacaaaaatattgatacaatttttttataatccaaaaaaaattgtttaacatgtagcttggccaataaaccacaggtttctctaatctgagatctgataaacccaagttgtcttcaatcttgtatcagagatatgtttcagcaatgttatagccaaaacatggtaacagtgttaaattcttgacgagttacaaaaatattgatataatttttataatccaaaaaaatgtttaacatgtagcttggccaataaaccataggtttctctaacctgaggtctgataaactcaagctgtcttcaatcttgcattagagatttgtttcagcaacattatagccaaaacatagtaacagtattaaattcttgatgcgttacaaaaatactgatacatttttttataatccaaaaaaaatgtttaacatgtagcttggccaataaaccacaggtttctctaacctgaggtctgataaactcaagttgtctttaatcttgcatcagagatttgtttcagcaacgttgtagccaaaacacagtaagtgttaaattcatgatgcgttacaaaaatattgatacattttttataatccaaaaaaatagcatgtagcttggccaataaaccacaggtttctctgatctgagatctgataaactcaagctgtcttcaatcttgcatcagagatatgtttcagcaatgttatagctaaaacatggtaacagtgttaccttcttgatgcgttaaatgacacgtagcttagccaataaaccacaggtcattcaaacctgaggtttgataaacccaatatgtctttaatactgcatcacaggcatgttttgactttgtttcaacagccaaaacatatgttacattcttgatgcgttaaagaaatgtcaatacaatttttatgatccaagaataacatgtagtctgaccaatgaaccacatgtttctccaacctgatatcagataaaactcaaactttgtttaatcttgcatcagatatatgcttcagcaatgtttccgcacccaaaacatggtaacagtgttatattctcaacacgttacagagatgtcaccctaatttcaaccaaagtgaatagtatctaaaaaagaaacatgcctctaaaaacaaaatcatgggtgtgagtacaaaatacataaccataacatccaaaaaaaatatcatgtatatttgcaaggttaacaaatcagagtatcaacaattttaataaacacataagcttgtaccttgttaaacaaaaccatatagagcataaagaaaattggtaagttagatccataagaagttttcagtatgataatgtcaatcctagtagttagatccataagttctcataccatgaagaattacaaggtgtcatatctgaattggaccgtatctgattacagctcttactaatatgctccaggtaatgacagatggcataatacctgttgcaagcacctcattcaataacaggactccttcaggtgtcctattacaagagcacaggcccttaattcttgtattgtaagtaacaatatctggtttcaaaccattatctaaaatggcagcccaaagagatgctgctgtatcaatagaaccaatctcataaaatccatccatcaatgtgttataggtcactagatttggggaacaattcttttctttcatctccaaatatatacaaaaggcatcatttactttcccagcagaacaaagaccatgaattaagatgttgtgcacaattacatcaacctgaatacccgcatcaagaatttcattccaaatacaaagggcagcatcaatcttcttgactcgacaaaggccacgaatcaaagaaccataagttctgatatctggtttaaaacctctctctaacatttcctttgttaagcttgaagcttcttggtatttttcagccttacacaaaccatctatcagagtgttatatgtgatgatggttgggcaacaaccattgccggtcatttcaatgtaaattttaacggcatcactaatcttgcatgctcggcagaaaccatttattagtgcattgtaaacatgagaattcggtttgcaaccatccttcatcatattcttatatacct

SEQ ID NO: 52796 - DNA, 772 bp, Zea Mays
gcgcctcccgctgcacccatggtggagatccccgtcacctgctatcaggtgaatggttggagtcgcctggtctgttttatcgactgcaatttcgaaaacggcgctcaccttctgttgtctgatcgccgccgcttgatctcggcggcgccatgtcaattaattacctgggttgcagattgaatcggcgttttcatataacgaatcgaattcaatgtgcgcatccgtaattgtatgcgcttccctcccattttgagtaaaaaatatgtgtgaccgcgttctgatttttcgtctgatcagttcacaatcgattggaccatttgtcctttttaaaaacttgttggttgacatgtttaagcttaacaatgaccgtgtagatgctaggcgttaccgagaaggctgagaaagatgaaatcgtgaaggccgcgatggagttgaaaaatgctgggatagaagatggatacacagctgaggtctccactttcagacaggttcctgattagtttctgcaactatatctatttatgtaccccatgttttgttttgtgagggaatgcaataatcctgatgttaatcatttgcgtgttgccttttgtcaggctctcctagtagatgtcagagataaacttctgttcgaacaagattatgcaggaaacataaaagagaaggttccacctaggtcctctcttcatataccttggagctggttgcctgctgctctgtgtattttgcaggaggtaatgcatcacacagacatttctcatcaaaatgtctg

SEQ ID NO: 52797 - DNA, 640 bp, Zea Mays
caggaatgtattattcggtacgagatttatatgttgcatatttataattcaaagatatgagtcctcctaggatctcatgacggatcttcagaatcttattaactgcatattttaattcatgtcatttgccagatatattatatagcagaacagtgtttattcaacacatatgtgggatgggtctctcacaaaaccacttgaaccatcggattcaccacacattatttcaatagtgtccataaatgtccgaacttcaagctcgtgactttcattttgcgattattggttcagactcgattgcatttatcaatgacccgataagagagcttaaagcactcatgcctaggactttgttttggatccttttgcaatctagagaggcaagataggtgtcgacatatttgtctcccacatttaataatgatctccgtcatttcccaaaacgaaagatctgtatttctagcacaatgatattgcgcgcattgctaggaacttcatcatcaagatgaacctcttcgtgaggcaaatcaccagcagggcgagttcatcggaggagagttattacagaccatgcatgtgaatctgcaatcagaatatatgctttgactaagaccaacgaatcatattcgcaggcgtcccc

SEQ ID NO: 52798 - DNA, 1344 bp, Zea Mays
agataatattaaaacaaaattattgcaactgaaacggattaaaaaggagttaaaatggaatttctatgaattaaataagttctgggtatatttttatagacaaaaacccttttctaaattattttcctgaatttcctaagcttccgaactgggcccaaataacagagagacacaggggttagtacgcaaaaattcatgagacttaggattccgacacacaggactgcgggttattttaacaagagtgcaggggttctttagtgaaaccgacatggcaaaggggtatgaataatcactagtcgtcagatcagcaacccacggccacgattagatctgactcccccgaaccgctggtcgttagatcaaagagcgatgatggagatttaaataacgaggatcgtttctcacccgcccgattgaccatcaacgacccacaatcaaccctaagccgcacgttcaccatctcacggcccacaacacttcatccgaagcggtatcctgactctgatcttggccgcaccctttgagatcaacggtctaaaaggtcgttctccaacctcccgtgcacaagcagtggtgtgggctggcaacggcggcgccctggccgcagccacccaggcccgagcaggggaccgccaactatgcttattgtcgagctacatgtggggaagacgaaggcgggcacaatagtatgcttcttacctaggtttggcgtgccagggtatgcaatcgtcggagggaagcgaccaggcggtggattttcaagtccggcgaggaatcgccccaacattgacgtcgtacttctcgaattgatggtcgctgtgtcttccatgcgctctagcgaggctacccgaccacaattgaagccctggcgctagcgtggatgggaaatcagcccacagcgacaatcccttttctctcccctccgcctacggttcaattggtgactgggtactcggtgagatggataggggagctggagcggctgggttatataggggcggggcgagtccgagctcaagaatcacgaggatccgcaacaactcctgccagcgtagatcacggagcggtagctgcgggatcgatggagttcgtttcggcgtttggtggcgatatgcggaaggtggcgtgcctgacacccgaccccacatggcggtgattgaggaagaaagcgagcgtgggggcggagcggctggccaacgggcccggcttgacaggggcagcgaggccaagtgcgcgggccgcgcatgcaaaatgaagttgggccagatgaagttagtgggccgaatcagggaactcaacccaaacacagggatttattctttttcttttttctatttctat

SEQ ID NO: 52799 - DNA, 713 bp, Zea Mays
cagagagagcgcacgagataggagcctccgaactacttggggccacccgtcagcgagggggtaagggaatcgtctacccaagaagcacgcaccccagataagccccgaggcaccgagcctagggttgggcgtggaggagcagcagaagggagccatgtgaatcgaaaggaaaccactcgagtgggttcctcgcctggctcgagaccgacccgccataagtggttggccacattaagtacgcctgacaccaggtcgtagtacaaccggtctacctcccaatcatgacctatgccacccctcgacttatagcgcactaggacctacataaccctttggtcaagcggtgcactcatgacctacaatcccatcggcctacgaagcactcataacctatcaagcctaggcctaagagcgcgaaccatccacagggcctgcaacacgatgagccacaccgagacctgggctacggaggctaggggttgcgtggcacaaaggtagtaatgatggtgccaagaccccgtgccatccgctgtaatgagcacaaatagagacgataaggcacatacggacataagacactcgacggaaggtgaccacacacacggtgagacctaaagaactagaggctggagccaaggcttagtgtaggactccagttctgttgtattagggccacttccacataagagacttgggagcccttcttccctctc

SEQ ID NO: 52800 - DNA, 434 bp, Zea Mays
gtgaatgcttgaagctcgcagcaatggcgcctccgcgcccatattttcgcaccgccatagattcgtctcgtgagggagatagcggtggaccgttggattcctgaagcaccactccgatcagatctgggcgttggttgatgaggaccgttgatctcaaaaacatgcggttaggattagatgaggtgtgcggggaatctggaccgtaggattttaaatgagcgaccgcgattagatcttagatatcgtttcggcttgatctgacgcaggccgtttgatcgggatcagacgctcggagattagacctgggcgttataaaatccgcggcattgatttctgatcggacggttgttattgcgtacccgctcggaaccatagcgatatgatcttggccgttggttctgatctggcggcccagatacgcagataccccttcg

SEQ ID NO: 52801 - DNA, 820 bp, Zea Mays
cggaaaacagatttgggggaatcgtgaattgaggagctccgatgaacgattggaggcgaggagtgatgcactgggcgcgtaacaacctagagaagcacgctgaacgctcaatttatagtgaccaacagcggtggcgcccaatttggggaagacacgctggcagccggagagagaggaaaggtcactggcgtgagctatcgtggctttcactgaggcaatggttcaggcgataggcgggctatctactgcggtctactgcgacatggtgaagcgattgacggcgtggcataatccagggaaacggtggcacgacggcggcggtcacgcagacacgtcgccggtgcaagtgggtatggcgaggctggttctatccattcccccacggatcttttaatgtctatggtaatatcctgcccgagctgagcatgaatcgtggcagaccatatggatcgtggcatggcgatcgccgtcgacaaggttcagtgaatccgggatcttcttcagactactgtacaatcagagtattcatcagagcgcctgatagagcattttagaaggcttgattctcaaacttttatgtgggaactcattaatccttctgcagcaaagttgatgtccaatgtaccagctacaactttgttacagaggtcttgcacaaacatccactaaatcccccacaattcgataacaaagttcatctggtttcagtgtcagtcagaattcagtcttagagctgactgacatccagacttcaagttcatttaactccgatttttgtacaacaccaatacttagtcacttaatcaaagttgtactccta

SEQ ID NO: 52802 - DNA, 295 bp, Zea Mays
tcttgtttcaaatacttacatctgaatttcttctgcctacttaaacactccagtttatatgtccacgagcttcttgtcttctgagaccccttcctattccgttgttaagtcattatctgtcgacaatttctattcccttggtcttagtatgctcgtatccttggagtcttacatactatcatattttcatgtatgcttatcttcataccttaatgtctgtttaagacacttcagttaacatgcccttgaccacccttgtttctgaatgatccatgagcggtcattttattttgca

SEQ ID NO: 52803 - DNA, 377 bp, Zea Mays
aaaattgctgcaacccctctggcaccggcaaaggcgcagaaatcaccacggtcactaaggatctcgtcaaaagcttcagcttcttcaccgatccattcgatgattccttcgggatcgcctctaataaatttttgctcggatgagtaagcacccacctttgcaaaactatctttcagcttcttggcacaatccaaggatttttcgtaatatttctcctttgattcccgaagctcatctacattcttttgcaatcttgcgctagtccactcgcttatttcctgttttgctttagccacttcaaaatcttcattcttctcagcaagttttttatttgagttttcaatttcggctctatgagcttcggactgcgcggcaag

SEQ ID NO: 52804 - DNA, 784 bp, Zea Mays
gattttcctaactgcttctgttttacacctttgcttcgatgctcagtgctcttcttgcttgtaggaggagaggcgaacgcttctcgattctcgtgacaatctggatagattgtaccgtgatgccagcaattccctcactatcttggagaggagccatcgctttactatgtcggaaatagaccatcacaaggatgagttgagggcttaccagactaaagtgtcacgacttggtaatctaatgtcttcgaaggattctgtcatcaaggagttgcgcgcctcaaagaaacccgtcacgcaggaattggaagccactcgtcacaacattaaagccttagaggatgaccatgttgttatgaaatcaatgtgtgacaaagcaatggacaaagttgttcgtgccgggcgaatcctgatgaaaacacctggttgtggtgcatgaggacatcgttgctgatgttctcgctgtatctgctagtgtgagcaaaccttcttcctatggtaatcctgctggcaaggtcccctgcaagaatgcccctgcacagtgattcgtgtgatgaagacaaactttgattcgtttagataaggaacacttttcattgagttagtatttttagcaagacaatgtatcatggaattgacgtgtgtgtgatcatgctatgcttggaccgattgttccgttagcggggtgttgagatcaccctcgaatatgtaagcacgttgcattgctttgaggcgctcccgacttgagctcactacttcgttagtagggtatagtaaccaccctaaa

SEQ ID NO: 52805 - DNA, 1332 bp, Zea Mays
aaatcaaaaagaaaaaagtaagaaaacctaaatgggcctcggtctacacatttggcccagcagaaccaaacctgcgcacgacccaacagtcaaacggcgccgacatgtggtcctcgggagtcagcctcagcctctccttgctctgctattggggcccatatgtaagccgttattcggccatgagagtgcgtgctgataggtgggaccgattggtttgcttctgctcgttcctcgctgtatctgacgcgtggggtccgtttgacagctagaaaccctgcagttgcgccgtgaccttgcatctctaactagtggggcccacgcgtacttctccacctcgccgtcatccaccgcgtgcaacgaactccgcgtgaaccgggcaccgctctcccatgtcgcaagtccctggtggacttaaggaggccgcaaccctatttccctaacctcctagcacctggctgcctttattcaccagtacatgcgcgccaggagctcgacatcgtagggagagagagagagagagagtagaattggggccaccgtgtggtcaaccgggtatctaggtcattggtgatccagatcagggccggtgggcatcgcgggagcgtggcggtgttgctcgcgggcacttcgtggagaatcggacgtcagagcgacacaaattcctcgtcggagcaaagaccgtgccgatcttccgctgtacaccatggccagcgtcgccgagtcatcaatccccggtaataagtctaccctcgtcctcattatgtattccgcattaggtgacttagccgaattagaaaacgggcgtgggagtgtggggattaacatcgctggtcagggctcgccaccgcggctgtcttgtttaccgccgccgtcgtcgggtcgggggtaggagacgtgcggtggaccgttgatcgggatgcatgcgattatgattagatccaccgtaccccttcgtgtgatttgatcgtggtcgtcggtcggtcgatcgacgatcagtgttggttatggatctcattaaatcgagagcgttgatatcggatcgaacgatgttagtcacgtaccgattcaatgtaaggccgatctaacctgggccacagatttgtaatcgaatggctcggatccgtgcataacccttcggccattcgagttaacaattagacccctcagtttttaggttaataacccgccgtccacaccagggacgctttgtgtcttaggaattcttactcctgagaccctgcagttttctgtaattgaggcgcagtccagacagtgaataaaactcataaaatcatttagaaaaagaattttaatgtaaaaataaatgctaga

SEQ ID NO: 52806 - DNA, 744 bp, Zea Mays
tgatcaccagtaatggtgttttggaatattagagaagatttagtagattaacaataataaacttcgtcagtacatgggatcgacatgttatgtcataatttatttattttctcttttttgtttctctcgattcatatgccccgtagagtacccattcacatcgtaacctcctcgcccacgcgtgacctttcgtggtgcaactcctttcgaatgtgccattatcaaggggtgccctagctctcacatttgttagtgcatcccttttccctactagcgcctgcatctatcttcctcctcgactcccctcttctcctagttgcctgcataggttcacctctctgctactagcgtgtgcgatcattcatagggtccctcccactagaggcggacccatgacaaaatagaagtgatatcatatttataaaaactaccaccaaaatatccgattatgagcatctaagttggacggagcaggggatgtcatgcaaaaatctaggctctactacttacaatatagaaacgagcggggcttgggtcctcactcacctctatgtaagttgcccctacctcgcacaagttgtcgcccacccttttggtttcatcttggcgtgcatctctcgtcacagatttgcctcaatatatgttggaggggggtgcatcgtggtggtctatgggtaggtgtgtaatcgaatcagatactgacagatattactcatttcatatttgttttcatattttatcttt

SEQ ID NO: 52807 - DNA, 408 bp, Zea Mays
tagcgacgacacttcaaacttagtcctcctgccatctggattcgccatcctcccagatggccatggcagggctcaccatgccgctgcttccaactcctccagcgctcttgccggactcaacggaactgcaggatgtcttctcaccgcagcctaccaggtaccggtgccattcaacaatctccgtcatccagatgtgcaagagacctacgagaatgctggaaagcggatctgccatgcgataaagaagatcatggatgctgttggggcacctattgttgtcccaatctaatgcgggtttatttgttacataaacatggcggtgataccatttgggtcaaggttggagcaaactttttactcttatttccgcagcagctttgtttctgaaagacgactccatgacttctg

SEQ ID NO: 52808 - DNA, 349 bp, Zea Mays
gaaggggtatcaactcgtgtgagccacacgatctaatctgggcggtctagattagatcccggtcaccccgaaccggtatgcgacatgcgccgttggatcagagataaacagcacatatttaaagcgtccgagatcgaatctggatcacgggatccagatcggacgactcgggatggtcctaccgaaggggtatgcgcgcgcctaatcgcaaccaccggtatttgatcagacggccaggatccagggcattgaagaggtatcgccaaaccgatctaaacggttcatcagcagatcgaaggtcaacctgccgtcttccccacaccggccggtaccaagcggcggcgcacca

SEQ ID NO: 52809 - DNA, 314 bp, Zea Mays
ggcaaaaatagcatacgccatgaatcatgcaccgaccacaaatacgcaactcgaactttgaatatctgttttttaaaaacatcgtatgcttcgactcctttccaaagctccttcaactcttcaatcaaggattttaacatgacattgagtttctttctaggatggtccagtccaggaatgattaagcaaagaaatgtaaattcatatttcatacaaagagatggtgaaaggttgtatggaataacaaagatgggccaacatgagtatgatgatgccatttgaccaaaaggtgtgaagccatcagtcacgaggcc

SEQ ID NO: 52810 - DNA, 868 bp, Zea Mays
cctgccaacgaaggcgtccacactctggctgcccccgcaaggtttattgagctcatttatttctgtattgcactggcacatgagtgttctatgtatttgttaaaatgaccaatagcgtacttctgtagagctgcgatggactgtagtatacatgagcgaaattgtggttggttaaatgtccagatagggataaaaaataacgcctctgcaggttggttaatgtacaggtagggataaatattaactagcttggaactacacatttggtgattttcctctcacctgaacatccacgagctgatccgcgggggatgagtaggcgatgaagccgacgacaacatgggtgctgagggatggagcctcccatcacgatcatccttacccctaattatattagttgttgtctgtcatgcttcaatctatatatttattttcccttttaatttggatgttcgatttacttggttcttcattcagatcgtcctttcaaggcaagaaatgcatgctaagcggagtgatgaactccatctaattcagatttcaacaaagttatctaaaactttattcagatttcaacagttatctgaaactttgtcttgattacttacaaacatttagttgtctagctaggtcatctggaattttatcattgcaagcaatctggtaacgaactgcgagcagcagaaatcacacttctaagttctgagcacacacgctaatttgatccttacctttctgcagtcttttcatgcactgtagtgaactcatgcaagaggaacaagttagcaaccagttggcagcaacaacatatacgtttcaacatatacgcacacaaatttctccaacaaaaaatgcactcttcacacat

SEQ ID NO: 52811 - DNA, 718 bp, Zea Mays
ttggagtgtctagtaaaaacttgtgatcccacaatacatttttctatctcttcttattagaacctacacaagattgcgtgcacgagagtcacctaggacgacacagcctcctttgccgacgcgtagcgctagcagacacgaaatttttatcaaatgaagctatggcctttctcgaggcctgagtactctccctcggtcccactatggcaatggcaggaaggcttgagatgaagtcggcgatgaagatggtggccgttgagaagaagcagcacgctagtcgccgcccgtgataggagcccgcttcgtcgcctcaaggacggtgaggagactgcccgaaatgctcaatcctcttccttatctgatttgtggtagtagctctagggattttggggtgggattgagaccgtgatttcttttggcaccgcagttttgctagggttttatctccatggacgagcattgatgggcctgatccctagcccacatcccaacctaatgattggagtcgccccccatggaagaaagaggtggaagcgaggttgggtgcagggaagacaagcgatgtggatggtccatcaatgagtgagtgcaggttgctaaaaattgaagctccctaggctccgcggggttcactgcctggtatttttactgagatctacaaacaggcccccttttcttcttaaagggagtaggttgggctacaaaatgctaaaactca

SEQ ID NO: 52812 - DNA, 537 bp, Zea Mays
ggaatgaccgctgccccatacacatgttggcccgtgttcgttatccccatcaatctccccccccggcgtatgctttcaaagacagaaacatattcgtgtcgttgataattcctggacacccggggaataaaatgggcgtgtacatggagcctttgattgatgaattggtccgtgcttgggaggaaggggtatggacgtacgaccgagctacaaagacaaacttcaaaatgcatgtttggtaccagtactccatgcatgactttccggcgtatgggctattttgcgcctggtgtgttcacggtaagttcccatgcccagtttgcaaggaagctcttaggttcatttggttgaagaagggtggcaaatattcatcattcgataaacatcgacaatttctccctcctgaccatgcattccgactagacatcaagaactttacgaaaggtgtcgtggtgacagaccaccaacctgcaatgatgactggtgccgaagttcgcgaacagatagatggtctcgaggccaacccagaaggtggtt

SEQ ID NO: 52813 - DNA, 962 bp, Zea Mays
tggacgggtcagtgattatcaagagcaaacaagagtgccgaaacaagaacgcagagggcgagattggacctgatttgggctggccacggcgagcttggttctacggtggcggaaacagttttgggaagaattccaaattcgtggattctagtgaatgaccgaggctgattcgtggtggctgggcagcttactactccaaggagctggtggcacacgcaatttataggcgcatcgagggtcggtgacgaattcggccgaggggtgctggcggtcggagaggggaggcaagctcagtgcgggggaaaaaggtagctttcaccgtggcagtgactccggtgatcgccggacatgcaaccagtgagtcaccgcgaggaagtcccgcgctgagacacgtggtgcgcaacggcggtagcttatcggcgacgaggctatccaaccgacgatgagctggggggtgaagtacggcggccttagccgtagctcaatccggtaccggatttttaccaggtcaagcttatatgttgtacacggtgcacgaatcacaacaagagatcgaccaccggcgacagctcaccggcgacgagcgggggttaagtcgggatctccttcagttcagggtctactgtaccatggaatttattcaacagtgcgcctgacagatcatgtttaggtcacgttttctctcaaatttccatggcaacctatccgaggctctgcaacaaatttgtagagcaatatgccatctacaatattgccatatgatgttgccccaaaaagccactgcatctggtttgaaattgggcttgaagttcagggcatccacttgtcagtctgattttcagacctagtcagcctgacagccggactttaggcttaattatctctggatttttcttaacaactgagctcacaaccttaagcaaagttgatctcctatgattgagctacaaacttgatgtggt

SEQ ID NO: 52814 - DNA, 659 bp, Zea Mays
atggaaaactaaactataacaaacatacaaagattagggagctgattacaaccctgggagaggggctgatagaagagtattactcctagcccctaccatcttccaaagctcctgttcttcccctgcccttctgatgaccgttgccacgtaaggagagatttttatcaaagatacattggttcttgtggttccaaatgctacacgctcccaatataaccaaggaatttaaaccttgtcttatcactacttctaccgaaccattgatcctattccaccactctgaagttcgagtcctcaatctgtggagtaagaaactgcagcctcacttgccctaaccaaagaagccaaaattgtcttgcaaacacacaactgaccatcagatgatcaattgtttcagtttcttgttcacacaacaaacaacactctagatgatccaaccctcgggcaaccaaccacataaagaagtggcacctaggccatctctagcagaccgtgtaaatggttgtgcaaagtactactttgtactctagattgcactgtctccaaatcctttcataagggtcaaacaaaacagaaccaacaaaagcactttcatatgtagctgcagttgtgtaagaatgtccaaagtccacaatggccccaacaataaaggcaccttg

SEQ ID NO: 52815 - DNA, 742 bp, Zea Mays
gtcaacacttcaagcttcgaaggatatttcggtatagagggttttctaaaatctattgtaccacctataaacttgttgtgctaatttcttgttattttcatcttttcaggattatgcccgaagttgagatgtcatccataattgaggaaatcccttctatgaaaaccaaagggtcgacgattctatcgccctgatagactaaaaagttgttcctttgaaacgactctcaaaaagcgaagaagaggaggaggaagaacagataactttagtaatgagctcattcttcaatattgatgaaggggtctaaggaaaagatactgctggcacaattctagcatcgaagggtgttatgacgcctgctgcagatgtggctataccaagaagtccaaaggttagactgacagccgtggtgatgacaccttcggtgattataatagccgagaagaaggtaggctcttcaaaacctatgccggcaaaagataaaggtaaatgacctacaaaaattgaaatggcaaaaaggctattgacgatgatacaccccttggtgaggagccctatgatcaagagttgggtggtcaaagatatagagttcatcatgttgctgggaagattatgggtgcaaagcaattagctgaagccatcagctacaatgaacagcttggatacccttcggggtccaccatcttcgatggagggctagacgattatctgtgttgtggtcgagataacctagaaacaaaat

SEQ ID NO: 52816 - DNA, 988 bp, Zea Mays
cgcagtcgaccgaattgggggaagaggggaattctccggctacggtggttaattgagggggagaatgggtgcgtcggcttcgcgatgacctagcgtagtaggcccggccaaccatttatagggatagcgagcggtggccgcgaatttggacaagacacacggtggccggaggaagggaagcttcactggtgcagtggtttcgtgtcctcagtcgtggcgaaggctccggtgatcaacggagagcaagggtgagtcacagtgatgcggtagatggacagagacacgcggcgcaaggccgagaggcggtggctcaccggcgagcaaatctgttccagccgcaaagcagcagagtgcggcggtgagtcaccggagtgacgtccagcgcacggggtgacgaccgaagcgttatccccaatcctagggcacgaatccacacgccggtgacacgaatcatggcggagggagccgtcggcggtgagatttttctgccgtggcgatctgatccagtattgttactgtaccatggcgatttcagtcagataaacctgacagagcaactttaggtcctattttctccagattttcaatggtaccaagcccaaacatctatagcaaagttgttcctctttaataactctacaactttgttatagcaaccctaggtagattcttactggatcttagtcgaaatggctctcaaacttggatccaagtcagtgtctatctgaaattcagactgtatcagcctgacagcctaacttcaagcttaattatcttcaatattttcttaacaactatgctcacactcttaagcaaagttgttctcctatgattgggctacaattttgatgtggtgacctagggcaaaaaccctataatttgaaagttgcaagactcaaaagttgagcaaaaactctgaaattcacacttaggttatttaggaattaagaggtgatttttgcaaataagcccaaaacttagggtttgg

SEQ ID NO: 52817 - DNA, 902 bp, Zea Mays
aaatattttacccgtgggtatccagtggatagccgagatattaattcaactatttacatgggttatattcactagaaattgtggcccataaagacatgaaacccacaaaaccctaatacagtaccatccccaccccacctgcatggttgcaacctatccattgcctttgaccttgttgttctttgttttaaggaagttgtttttatgtaggattccttgctacggcaactcggcgctgccataggattccatgctgcaaacatcacgtggatcggagtaagtgatctccaaataaaatagaatatatattgcatggggtgcttcctaataacctactgttcttcggtgttgccataggctacaatcgttcatcgcgacatctgttacaggctagtgaaaaatcattaacgctcccatcaggatgtgatccaatgccacgctattccattgctcatgtcggctgcaagcctgcaacaaaacaaaaaaaccactgatcattgcatcctaacggataggagcagctattcccattagagttgccccttttgtggttgaatcaaacaacaccttggtctacaataccatatccacttgatacctgatacccgatggatacccaacggacatgggtatgggtatagattctcgtctggttgacttgttgggtatgaatatttgtagaaggtttgggtataatgtcgggtcaagtattgctatactcgaacacaactcggcctgctaccatccctacctagggcattgtcattgcttccatcactatgactaccacttggatcattatcatcatcatcatcttcaacatcacctccactagggtcatgtgtgctattctcactccaagtgtcttcctcctcttcattgtcactagcaattgacttttc

SEQ ID NO: 52818 - DNA, 438 bp, Zea Mays
gagaaatgtaaggcttggtttaagcactaatggtatgatccctttcggtgagtagagcagtggtcatagcactttgcatgtaactctatgtatgtagatcctatctccctggctatgtttacaacaaaaagtttgttatgatgccaacgcttattcaagacccaaagcaacctggcaacaacattaatgtgtacctaaaacaattagtggatgaacttttgcaattatggcctgaaggtgtatgtatgtgggacgagcacaaaaagaggcttttcacctacatgctttgttgtacgtaaccatcaacgactgtcctacactttcaaacttaccaggacagtctaacaagggattcatggcttgcatccattatttagatgagattaacaacatatatctacattgatgtagaaaagttatttaaatgtgccattgttg

SEQ ID NO: 52819 - DNA, 618 bp, Zea Mays
tgctttcgtcaggacagcaagggagttttatggtttgaagaccgattggttgttcctaagaatcctgaactcaaaaagaaaatattggatggagctcacctttccaaattctccatgcaccccggcagtaacaagatgtatcatgatctcagatctttgtactggtggaccaggatgaagagggaaattgctaagtatatatctgaatgcgacacttgccaaagattcaaggccagtcatttgaaggtagcgggtaccttacagcctcttcccataccatcttggaaatgggaggatctcagcatggattttattgtgggtttacccaacacgtcccgacaccacgattctatttgggtcatcatggacaggctaactaagacatcacatttcttgccagtacataccacccacagggcagaaaagtatgcagaaatctatattgaccagatagtgcgtttgcatggaataccaaagactatcgtgtcagacagaggagcaccatacgtagcacgtttctgggagcagctgcaagagtcactgggaactcaggtgataatgagctcagcataccatcctcagacagatggtcagacaaagagggtaaatcagattttg

SEQ ID NO: 52820 - DNA, 666 bp, Zea Mays
ataagatatactattatgaagtggcatttgcattacagggaggcacccctgttggcacgggcattttagagagctcggtgggtattttaatgaaaccgcatgttggtgtgggcagtattccaattatctcatgttttgagagctcccagcaactacctgtggctttcaataaaagctggaccattgggtttctggtctaaagaatattgagtgtgaactcagaaatttgactcttgatggaggccattgggttggtgatggatctctttgttgagatcatacattttagagaatgttgctgatggttcaaatttaaagttttatttcttgtcaacaaactgagaacacatcacatgtcaaactgtcatgctagcgaacagaggttgagctattgagatgaattcacctttttaccaactactatgaatgttcatttaactgttcatataaataaggcatggacatatttgtgctttgtgggcttatattctactgtacactccacttgtcatttctggatttttctgcttgtttgatctaccgttgctgtcagtgtgcatattatttattatttagtagttaatgcctaagtttggcttacttattggtacttctgtatagcaagatatgcacactgttttgtttgctaatgtatctttatgcaag

SEQ ID NO: 52821 - DNA, 636 bp, Zea Mays
cgtcgagggcatcaacttcgtcttcaatatgttctaatgtttttggcaggttttcagctgaaggtgtaaatttcgaagagctagctccgacagagtgaaacacctccttcagccgctgcacacatcgaatgccgaagcttaagcatttctcctgaagttctgtaaaggatttctgtaaatttgcgtatttatccacttcagccttcaggcttgcttcgaaatatttcttttcttgctcgaatttttctgactgaaggagcagttcattctttaatttgccattttcaatttgggcttcagtcaaggagccttccatggtctgaataacaaaatccttcttttctaatgcaccttcgtgctctttgaccatgagttcaagatcttgaattgcgaagtctttcttttttagattggcttcgtgattctcaactttttcggccaagtcttgaatgacagctttgtttttctcttcctccagatcttgttgcatcttcagaaccttgcttaatagtatactctgtcgaaatgaccttcattagaacacgacccaaaagataataataatagtaataaaataacaaaaatatttgttaccttgaagttggcataaagcaagcttccggcgatgtggtgtcg

SEQ ID NO: 52822 - DNA, 273 bp, Zea Mays
cgatcaggggtaccctctcctacagcatgaagacgccgcatccgtacaacacctcaaggccacgtgaagaatggcgcccaaccccaccacattgggcaggtccaagggcgccacgtggcaaggaaaggtggtgcatctcagtcttcaccgttgggtccggacctccgaaggacaccggacccctatacatacaagcccagggcccccaagaaggcacgccaggtcccttgggaaggctccagtcctcctccaagtaaggtccgagcattagca

SEQ ID NO: 52823 - DNA, 536 bp, Zea Mays
gactgtgcgatgatggactgatgggttcagacttcagagagggagcataccgtgtggtgcacgtcctcttcccagggcacatccgggctggtgctacattctccaaccgcaaagatgattcatacagttccctttagggacgtggcatggctagcgacgccgccccttcactccacgacgaccacgggctagggccaggaaagcatgaacatgccatgttatagccaccgcgccagcaaaaattggtggtttgagcgtagaagatgttctggggagacagtgtcgggcgagctggagaggcaagaagtggcgaaggcggaggcgaaggtgaaggcagggagagcgatcgccatggaagtgtgtgggcatgggcgacacagaggtcgtgggatccaaacgcgacctcaaccaccatatccgctatcgtggtagtcgtcggatatgtatgaccctgacttaagtttgggaccgctcgagaagatagggcatccgtgcatgccaccctcacatcgcacgcagagacggcgcaacggcca

SEQ ID NO: 52824 - DNA, 522 bp, Zea Mays
ctaagtccctaaccctaactaactgaggtgagatgtctcgatctagctcttcatggaccatatgctcctgatctgggtatttatttcttggaacatgcttgttgttatttgattattgcgtccggtacctcctgtcattgcttaatgtggctgtgcctgatctgctctgctcttctctgtgatgaactcatggtcatgaccttgctgtattttggtaggtcgtgagggatcggtgcgcgccaccttggcggcgacggaaccggtgcttcgaccctactgcttacgccattaacgagccgcgtcaagcacagaggtgagatgtctggactctggatgatggttgttgtcattactgcttacgccattaactcatgatctgttcttctctttgatgaactcatgaccttgcttggtattttattattgtatctagtaccttctgtcattacaaaatttgagtgtgcctgatctgttcttctctgtgatggactcatgacctagctgtcgttaattaatttgttg

SEQ ID NO: 52825 - DNA, 653 bp, Zea Mays
ctgtgatcagctcaggtggagacggggcggctctgggcgagtgatgcctgcaccgaggaggaagagcgtgatcatcctgaacttcgctctgaaatcctacgtcttcaaggtgaggtatcatccttgcgcgtggagtgtgacggtgcttgcggcgacgtggatcgcctccgggacgaaagttctcgactcggggagacgcttcgtggagtgaagtctcacaccgagctggcggatcatcctcatgggaggtggaggttcgcttggagcacgcgggctcagagcttataaaggagcgtgacacgaccgaaggtccgcctcccttcttattcttcaagtcttgaccatctgcagcctttgattgcttcgtgatttttcttccacagagctctgcaagatgctcgcttaatcatgggatgcgaaagctgcgacaaacaaggtgagggcagcgaccatagaaaaaacgcgcgagctttcactagctcgcaaaaatgccattgtcgtgggacgtcgggtgtacgcccttccttcggaaaggagcttcgaactccacgagctctgcctggtttctggcatggtgtgtgcgcacctctctcctccgccatcggctgaagtgctcctggttgaacgcccacaagagctccccgaccacgtgg

SEQ ID NO: 52826 - DNA, 1254 bp, Zea Mays
agaacccactcggacaccctcgggggctgggtcacagctcgcgctacccatccgagccggatcatctccggcaacaccctcggggctgggtaagcgcttgcgccatccatgggggccgagttctctgcaacagccacctctaaggctgaaggactctcactcacttccgtgggggcagtgcaatccagaccagcctcctgaccctcaagaccgcgctctaaggtcgatgaggcgcgggacgctgcccgggatgaccccaacccggcatcgggcacatcagcacaaacaaccatcgcgccaccatctgccggctctgacaacatatcttctggaaccatgtcttcaagagtttgatcaaagttcgccagagataattcttgcagaccaatgagggcagacaaagcaggagaaggaacaccactactttccccactagctatgtaaggccggctgttcttccgaatcagagggatttcatcctcttcttcatcatcttcatcaacaacacggacagtacacccattggggtcaacttcagcaggatcacacccattgggctcagcagcagcaaattcaggcactggcacttcctcagtgacaggaacagaaggaccgacatcctgatccaagctagacactcgacaaagatgtctcttcttcttctgcccctcggcaagagaagtgggttgatcggctcggcgagaacgcttcgggcgaacactgtcagacttttgagcatccaaagctttgccggcttcagggatgggtgcaaccaccaatgtttcagcaagagcggcgtcagaagaatcctcagctaacatatctagcatggcacttatctctgcgtcacttggattcaaaggcacctcaaaatgaacctgcctctcgtcgtcaggaatttctccgagtgaggcaaccaaaacactaacttcttcgggagagggtcgcactctaaggcccagaccgctatcaccagcaggaggatttgacacgaaattggtaatggcctgggaaggaggcagattccaggccaagtatgcaacaggagcgccgatgttagacaccttgcctctgagcatcatctcgagccggctcaccaagtccacagcaggaactcttctgttggttacccgggttgaatcagcttggcctcgatacagataggccggatatgctctgtctttcagcggctgaatgttcttgaaaacaaagtcagcgaccacagcttctgccgtcagacccctttctttcaac

SEQ ID NO: 52827 - DNA, 337 bp, Zea Mays
tgaaaacaaacatccaaaaaagcagtgtgtacccaattagatgtggggaagaggaagtggcgacccttcaggagtgtctcccctgtgagatctcttctttcccctgtaaataccttggcctgcctctgtctttgagcaagctttccagaaatcaaactcaatacataatcgacaagattgctgaccagctcccggggtggaaagctgacttgatgactagagctggaagaaaagttcaagtccaatatgttatgacaggaatgatcatctaccttgcaatggcagtggacttacatccaagagttctcaaggatattgataaaatcaggaaaggatt

SEQ ID NO: 52828 - DNA, 631 bp, Zea Mays
aaaataaatagtctatgtgttgttgtcgcctttagacataaaacaaaagccgataaacaactagaagtttgtagatgtgtgaggagtttcgtcagctactcagagggtgggacagcataagtcgatgcgtcgttcgaatgacttgcctatgatgttcgtgaacactgatggtggttggatgagagtaccattgtcctaagaagagccaaaggatagagttttcatattggctaccgaggtgatccaacaatgatggaaactatgaagagatcgttagaatgcttcaagcataggaagcatgaacaacacaaattcaaactagccaaaatgtatcaagcatagagaaacatgaacaccaaaggttagtattggccaaaagatttatttattacgttaaggagtggcgagattaccagaaaaccatattacaaaaggcaaaggtatctaataaacctcctacgcttccgctccagcccctcctcaccgctatcgttgttgtcatcgtcgtcgtcatcattgccatggtcatcatcattgtcgttgtcatcttggacgctatccttgttgaaatcatcattgaaatcccagtcgaggtcttcctcggtctcctcactagtgaatccactactac

SEQ ID NO: 52829 - DNA, 730 bp, Zea Mays
aaagcgtttcaaccaactacgcatcccattgggcctcacgtttaactaacatgaggccaaaagcatgctcatgcatgaattgtaggcgatttcttgaatggacgaaaccaatcatagatgcaaatgcaatgaaatttcaagtaattgatcacccgatttccataccaaaaacaatagttgtgtggtatgtggtaaggccacaatattgatacctgttgcactactcgacagtcactagaaatagcacttaattagaaccaataatcgaacacaagctagcctattagtagtcaactactaatagtgagtcgaccaatccataaggaagaacaaatcataggctcagctcactgagatacaactcaaagcacataatgcgacagactacgccctcctttacgccctcctccttgttggcgttacatgaggatcatgaacacttacgtctctttcagtcgataggggctgactcaagtaggacatcaccaggagatacttccaccagttggtcgactcattcgagtactcacacaggcacgacgcctactaccataagctcaagccgcaaaacatactcgtcgatgagctcgacaacctcattgtgtctgatttcagactcatcatcctctgagagtgccagaaacaggatagatggttgcacaccacctgccgagagtgccagacggaggaatgacaaacattcgaatatctcatttccagttgcctctaa

SEQ ID NO: 52830 - DNA, 383 bp, Zea Mays
gaaggttgtatggaacaacaaagacgagccaacatgagtaggacgttgcagttagattgaaaggcgagaaaccatctgttgccaaaccgaagcggacattccgcacttcatcagcaaagctggaatcaaaagcatctagtgccttccatgcatctatatcagttgggtccaccatgacatttggattctcacgtaccccttctttgtgccacctcatgtgtctggctgtatttttggagatgaacaaacgtttcaaccgaggtataagaggcatgtaacgaagttgcttacgtgcaatcttcatcgtcacagtcaaaccatcgtcgttttcaacctctacgaatctacgctcaccacatacagtacatttcttctcactcgcg

SEQ ID NO: 52831 - DNA, 906 bp, Zea Mays
gggatatacaactgcgcggtccgagtgcagctgcagtgtgcagccgctgacccagacggcgtggtgtaccctctttaccttgctagggagggaaaatgcctccgcccggaacatatggagctacaagttctagtggggctcaattcctaggttcccttcacagacggcggtgaagatggccacctaggcgatggagttcgggttgaagttgagcaactccatcccgtagtggtgcggcagtgcccgcatgaaatggctcgccgagactccaaaccctcgctcatggaacaaggtgaagctcaccacataagccgcggatggagctggctcttgctcatcgccgagcgcttaccagtctagctacgggccatgggagcgggcggagcagaccggcgtccaccaacgcctccaaatcctcgtcgctgatggaggagatgggctatgggttgcggtgaggaaggatgttgatcttctcagccatcagaatggaaggagacaaaaaggaggcatagagctcttttgcgcagaagaagaggatggcgtgtaaagcaggaaggctgaagcggcaaggtaacggtccgaagcgtccatctcgggcgaatttatagggacgagcggagtcaccgaggtgcgagtcacaatggccagccggtggttgttttgaatcccatgcgcacgcacgccacaaatggtcggctgacaagtcaggacgtcccatcgcattaaatgatcatgctccctccaagaaaaactcaccgagcgccgtttcacattatacctcaaaaggtacaccctcttctctctctacctctctttcctttttttattttcgccctcaacagttaaccagaagaaggcatcttctaccacgggaactcactgtgggaaggaaaaagtcaaggcgga

SEQ ID NO: 52832 - DNA, 402 bp, Zea Mays
ccaactttaaagttaacttctatacctttatactgttgtacgcaaggctatcagcaagatcatccttcgacatagccgaaaggccttcctcaagcttcagaaatcacatacttttagctatcttccggcaaacggatatttctttgttatccgggagacagtataggaaatcatcttcgttagtgccattgaacactaaggccccctttggatattttagtttctgggcgtagtgtctggcttctaggatttcttcttcggacaatttttccccaaagcatgtcgaataatgtaatcaacgtttttggccggagcttcaggggcaggagattttggtttttccatcatatcttgccccgctgtcatgccagtatctgaagtttgttgctcagctttatcttc

SEQ ID NO: 52833 - DNA, 420 bp, Zea Mays
ggatgtggctgcggcggaggcttctccgcgtgttacggatgctgaagttttgcctggtccgagtgctgggtgtaggcggcgaagggcggtggcgaagcgtagagtgagtgaggtggatggtggtcgacttcgtgtgggcagggctggcaagcgggaattgttgtcctcaccggttggggcgagtgtaggtgagggggagttgcgaagtctttttgagggtgaggagctgaggataatgctatttaactatagggagatgggaatcattccgaaggttgaaccaatgtaaggtttgatgccctcgctgtacgtgtgtaactatagtttgtatgatgaggctgtgtgccttcgcgtatccggctatgttcataggggcgttgcgcacttggtctagcacgtttattatgtcggtccggctgc

SEQ ID NO: 52834 - DNA, 308 bp, Zea Mays
cgggaaccgaagtcctgccttcaaaaagcttcggtaaacaacaacttcattttcttcaggagtagtggcggtgctgtctcctccaaccctcagaatagacatatcacgaaagtaccttcccctcatggcatcaacctgactttgtttaatggtcgactttccgaagatagtatggcttggccgccagggtcgatctttggaatcttcatctccactttccacatcaaaatcatcactgtcatcagaatcttgagacaaatcctccattatctccttggtaatattctctgtattagtttttgccttag

SEQ ID NO: 52835 - DNA, 385 bp, Zea Mays
aaacaatcaaattaggaccaacagtaaacttactaactttttatccaagttatttcgtgcactaggattaccacataattaacaaacacattcaccaaataaagcatttcggcacacatgtccgacatcacacaaaaccacgatgaagcactactaatatttagctttagaccatcatgacacaaccacttaacctctaattggttttaaggtataactcaagcctttcatgaatatgcatgattttgtttactccgaattttcactaagtcttgtaattataaaatggatattattttagcaccatatgaaactatctaatttggtgctgggatttttatgagacataggtaataacaaatcatgaccaatgtataaatttcac

SEQ ID NO: 52836 - DNA, 620 bp, Zea Mays
atcaatttgaagttcatatgaattttctacaaattaaacaaatttctgcacttaaatatgtactaataactattttctaaataactttcctggttttatcaattatctggactgggcctcaaatacagagaagtgcaggggactaaaccaaagttatcccatgtctcaggccgctaacgcatgggtggcgggttgattcagggataatacagggtctctattataaatttctcggccgaagggggtacacgatcaccctgaccgcccgattagaagtggatggtcgcgatcagatcggcttatcaacaactgcgacataaccccgacccctcacagcatgatcaacggtccagattcaatgtagattacgccgatcgccaatcgaacgatcaaaaccgaatggcgactgctaacccctcaaagcggtacgcccctgatttaatccagcctcaacgcccgatctaacggcccggcagctcgtctcctacctctagcaccgaaccacggcggcacgcagagcgagggaggaaccactctggcgacccgcccaggcgcaatcccgcaccacaatactccccgattgacactacatgctcgcagagttaaaacgaaatgggtgg

SEQ ID NO: 52837 - DNA, 1350 bp, Zea Mays
cggcccctctgcattagtaccgcccccactccatcgtcacaagcgtcagtctctaccacaaaaggaatattgaaatctggtaatgcaaggaccggtgtggacaccatggcctgcttcaacctctgaaaagccatctctgcctctgatgtccattggaatgcccctttttgtaacagcctggtgagaggcctagcaatggcaccataaccctgcacaaaccgcctgtagtatcctgtcagaccgagaaagcctctgagatctgtgacattcaacggcttgggccacttgagcatagcatcagttttcttggggtcagtcgctaccccattcccagaaataatatgacccaaatatgacaactccttttgaccaaagacacatttcctttctttgagatagaatttatggtgccgcaaggcagtgaaaaccagcctgaggtgctccaaatgagattgccaattggggctataaaccaggatgtcatcaataaagaccatgacaaacttgcgaagaaaaggagctaacaccaaattcatggcacactgaaaggtggccggagcgttggtaagaccaaaaggcatgactcggaactgatagtggccctgatgagttttgaatgccgttttaaactcctcggatacacccatgcgtatctgatggtaacctgaagtcatgtccagactcgaaaagatttcagtacccgccaattcatccagaatttcctccaccactggcatgggaaaccgattcttaatagtcatatcattcaatttgcgataatcgacacaaaaacgccatgtaccatccttcttttgcactaagaggactggagacgcaaacgggctcacgcttggagtgatcaaaccagatttcaacaaatcagccacctgtctctcaatctcggtcttatggtgaggggaatatttgtagggccgagcattaactggtatggatcccggaagcaaaggaatgtgatgatcaaatggccgagatggaggtaagactgtaggtgcctcaaaaatatccatgaattctcctagcaacccttgcaaatctgtatgaatttcgttgctgctcgctgccgtcacctcttccagcagagcaaacacccagatatcatttccacgcaaccaccgctccacttgtaaagaagatacctcctgcaccacttgttgttttggatgattccccaccaactggacctcgatccctttgtccacaaaactgatcacctgagcgtcccaatcacaatgcatagggctgtgccttctcaaccaatcataacctaaaatagcatcataggcccccagccctagcaccctcatatcattctggtatgtgtgtccgttg

SEQ ID NO: 52838 - DNA, 792 bp, Zea Mays
caagtgggagggcccctttatagtcaagacaaaagcttcccccagcgcctacaggctcacaacgccgaacggcgaggacctggagcactcctggaacatcgacaaccttcgcaaatttttttgtttgactcatcggggctgattctgcccttgtaattcgccaaaaacaatcttgtaccggcccgcactcttttcctcccggggggtgaggtttttaacgaggcagagccatgtaatatatgtgtgaaaaatcccccgcaaaaacatgcgtcgaaaaaagaccgcgacgacggtcttcgacataccgtgaggctaagcgctagccaccctcgcgtgcgacaaatccgcgcagaagtcgcctaagggtgcagccggactagcacaacaagtccgaaaaaacacgaagtctatcgcgaagactatccgcgcagaagtcgcctaagggtgcagccggactagcccaacaagtgcgaaaaaacacgaagtctatcgcgaagactatccgcgcagaagtcgcctaagggtgcagccggactagcataacaagtgcgaaaaaacccgaagtctaccgcgaagactatccacgcagaagccgcctaaaggcgcaaccgaactagtacaacaaaagtagaaacgacagcatcaaaccgtccgcgctaagaccgactataatcacaccagcacagcataacaaaacataccagccaaagtacacaacgcctccgcaggcacaggcaagcgagggcacacaacttcatcgtacaagcctttacacatatacacgcgagggcg

SEQ ID NO: 52839 - DNA, 280 bp, Zea Mays
aacgcacggaccgtaccaaactgatttcggtcacgataaatttagattgcgcttaactcgtcaacctgataatctcatccactgatcaagcacccgatttctttgcggaagacaacacactggaaaaagaggcccaattattacccttgcgctcgccaaaacagcgtgttggaggataaattgggtcataatatcatgcacgatttctctcagacaacgcatgattaagattactttgccccgaacattttagtcgtcgagttaaaattaattagcccgg

SEQ ID NO: 52840 - DNA, 544 bp, Zea Mays
attcagaaagcggagaagcagtagaggaaaagtaagatttagggttcagaactcaagaaggcacgtcgacatgagtataagttggctccttaggtcgagcattacctctaaagtgtcagatcacaattcggaaaagtaaagaccacaatcgccattcgggcattacctctaaaatgccgtcactgtcaagcacacggacaaactttcaagcgcacgaataaaaagcaagcatcggtgattaaatggagtaacttcatccttcattcgtaataggggaagtaacacaaactcgaagctggctgattatgagtcagcctcttttacccctggtcactgcagtacattacattacatcaccttactacttacactacactacgctactaacttacactactttattctgcaacttactactactactactatttatactaatatttaaaccagtggcattgtgccactagccttgccgctgccaccgtcgcccttgccgccactgccgtcgttgccaccgccgtcaccgttgccgctgctgttgtcg

SEQ ID NO: 52841 - DNA, 931 bp, Zea Mays
cacctgccagttgagtgtcgtgtcgttgtgtccctggtacatgggacccagtcgtcggaagctccttcctgaagttcgttgcaacagcccgcaagcaacggatcttggataaatctctcccccaccgcctcatccatcgcattcacgaactcaacccagggagtatataagccaatgagtgcatgcccttgccatcaaccatgagccatcgagccccgttcctaaacgaaagctcatggggtagccgaagacttcgttgatgagcagagagaaaaattgctatgtgttgccaccgttccaatttggaagcatgcagtcaccgaggcgagaagaccgtgcgcaaggcgtcttcgagcatggagaaccccaagaaacaacaggaattgctcggcggagttcgttcttcatcgtcgccaagctgctgcgcagacgatccgtcctccacggaggtttgggggcgccaccacatatttgcttctggtctgaggctttgaagaatcacggatgcataaggatcatacctacgacgttgttggggatcgagaattgatcggtgaccaggaaccgctcaccggcgttgttgcacctccccggattttcggagtgtcgtggacagagctctacgttgcgtctacataggtgagtacctgccagtcatgtttgcctcgtcctttgcttcgggtagcaccagtcagctcggagttgggagcccgggaccactgtgcagggcttcgccggttaggctccgtcgctcggcgtggtggcgtcgccaccctgctcctatctctgttgggaggtaggagacggatccctggtcgttggatcgtgggggtgagggttaggattagagctgggtgtcctggtcatggagaaaatcaggaccattgatatgtagatggacggtcgggattagaaggtcaataaactctcg

SEQ ID NO: 52842 - DNA, 401 bp, Zea Mays
caatgaacgggatgatggtttcaggtgacaaggcagagccgattttgctgtgtcaacaactgtagcgcgcgcgggaaacaaagagatggacgataggggcatgcatcacgatgacatccggacggggcgagccagtgcgacccgatggcttcctgactcctgaggaacgatgctgcaggggcgatggggacggaggtgcgaatggtggaagcagttagcttcggaaaagacgtcgaaataggaagcattctgcgttcggaaaagaaagcgacgctgaggcagcctatcatccgcgagactgggattccgtctcacgcgaactcttcttacttcctcccggagcatagcacctcctggagaactcgaggagtattcccttctagagaactcgatgcttgtac

SEQ ID NO: 52843 - DNA, 420 bp, Zea Mays
attccgtgggagcggcgctcaacagtgaccctgaggaagtggtggagagggcccaagtccttcatcacgaactcacgctccaatgcagcaatcgtgtgctcgaggagtatgacattggacaccatgagcacggtgtcgttgacatagagcaagaggtagacagtgttgtcgtcgacatagagcaagaggtagacagtgttgtcgtcgagccgaaagatgaatagggacgtgtcgacaaccagcttggaagtcaaagagggtcgaaggaggccatagtcgagagtgtcatggaggtagtgaagaatctacttcgcatcggtgaggtgtggcttccgcggggtgtgcgtgtgaaggcacacctgctggaccgcgtaggcgatgttgggccaggcgaaggtgaggtactagagagccccggcg

SEQ ID NO: 52844 - DNA, 546 bp, Zea Mays
agggtcactaagtcaatgaaaaatgttgatgactacatacatatatgtatggaaaagttacactctgacactggagccattctggtagtacatgggactaaatgtaaccttacatatattgtgaaaaagttggcatcaaacatgtttgatgccctcaaaactgttgagtggggttctaatggctagttctaaccatttgcactatttgtacccctcaaatcagcttcttgacatgtcttgcctccagctgaagcatccatttgagattgaggaagatcctttatatagtgaagagattagagaagtgataattgcatggttagtgacatcattggtgcataaagagtgatatgtgtgcaaccatcaccctcattagacttggcatggtcaagttagagcctagtgctagttactcttagtgatcaacatcatctagactgctcggtggcaattgggagagtggtgaccactcaaacagttatgggtgacctagcttggaatttgtatttggttgtgagcagttcattgtgccagtcggcaaagaac

SEQ ID NO: 52845 - DNA, 466 bp, Zea Mays
acgggtgttcccgacgagctggcgcaacttagctcaattgaatgggtcgaggagcatcaggataacctatggacactgaaacgggagagcagagagcatgaacagacctgggagtagctggccacggagcgcggaggattttcgttcgccgatgacataaaaggggaaaacggtgccacgacggttctgggcggaattaagaggtgaggttggggctacacggtcgcaaaggactatggtttcaccttgcacaaccaattttgggagaggtggagaggatttcgcgaatttgtgcttcaaccgagttcactggtgaagatgtgaatacctcgccatgggtggcagggctatttaaaggtgtggtggtccggctaacgatccacggccatggattacaccgttcatgcatggttaccttgtaaagaagggacacagtgagggaggagcgaggcatggatgacacggt

SEQ ID NO: 52846 - DNA, 315 bp, Zea Mays
gttgtagattttgggggttggttgcttcgcttcttcggattgcggcgctgcacgcgtgtgaatcatctaggccccttagtgatgttttggtaattaatgacgactgtttgtggactaacggttcttggagaaataagaatgcagggttggaccatatagaacagaaaatcttggagattgataagcttggttgtggatcaagtgaaggcaaaggtgtaacataggttttgtttttaccggtctccaggagtttagagaagatacttgaccggattagtaggctagatagtcgtactattaagaggggtcaatgac

SEQ ID NO: 52847 - DNA, 450 bp, Zea Mays
ctcgatttatgttttcaagcagtgactttatatcgtgaggagaaaaatgacataaaattatatcgaaccaaacgaggataaccattcattcattgcattgttcatacaggtttttccgagttacatcatgttaggagatccaccctaaagcctagttcaaaagttggtaccaaaagctaagcttacgtggttttctcgttctcctaacatgtttaattctaacccgtctaaccctaattcgtagaggcaacactggccgtaggtgtagggggcactccgaagtaggccgtgttcgggctagaagccagctctatttcctcgggatcctcctcctcctcactgcctacctcattagcgttcatgtcttggtgatgcatttctatgtgagcgttggcctcctcaaacttctcttgcacatcatgcagctggttttctaggacctcaatggtg

SEQ ID NO: 52848 - DNA, 287 bp, Zea Mays
cgggtacctagccaggtctggagtgtctggtgctccaagtcgtctaagggggcagcttgtcaacgaaattcataaggatgcaacgattatgagtctccagacattagagaccaataccactgaggcttatagggaggaaaatattatcctaggcgactaagcatttccaaccatagcaagtatcctctcctgcccagaagaaggcatgtctatgtctgtcaatagcatggaggatactcttagggaccaccacaacagacatgtagtggagagacataacactgaaa

SEQ ID NO: 52849 - DNA, 486 bp, Zea Mays
gaaacgagtaccacgggcactcgactgattgtgttgagcaggggcaggagtgggatggatgaaaactggttgtttgaaaggataggcgggtggactaggaaaagagcaatttgggttaaaaggacgaatcaccaacctcaaaccgcttctcggatccttcagaggatccttcgcccccttcacacccatatctctttgtctttccctgccccgaattcttggcttccaccgaaagcgttgtgctcacggccctgctataagtgagatctaggcaagtggccatctttcgatgtagtcgatcatttagacctctcatgaagcaattcttctttttcaggtccgtgtcaacttgctctaacatggaaatgggaagatatcagtatggatttcattgtgggattgcccaagaccgctaaatgatttgactctatctgagtcataattgaccggcatacaaagacaacccattttctgccagtcaaaaca

SEQ ID NO: 52850 - DNA, 476 bp, Zea Mays
caggccacatacgcgaaccctatccctaatcccctcgccccctcggctcctccatccccgtctctagcgatttggcaccgtcgttctcgcctgttgcatcccatcgactcctgacctcgacgacggtcgacagacttctctctgtcgttgccgtctttggttctctagcctgcttggagttggagttcctccgtcctcccttgtccctccctccatttgtgactgacgactccctaaccttaacccctccagtctccggatccggtggttctagctcctcggttatgtaaggttcgtttatctcacctaatcccatctagatctggtgtctagctggtggttggtgctctgtgcttgtttgtggtgtctggatgtcgttgccggtgtgctgtcgcctgtctgcttgctcttcgccattcgctgcctcggctcctcgctggtggacacttgacatgaggagtggtgggtgtgaccgt

SEQ ID NO: 52851 - DNA, 354 bp, Zea Mays
gcgaatacttccttcatgccgattgagtcgtagaattccctgaaatcctgattgtcgaattgttttccgttgtctactgtcaactcgaaggggactccaaagcgatagacgatgttctgccaaaaaacttttgcgttgtcttcgttgttattgttgacacagctctggctttgatccacttggtgaagtattcgtctgcgacaaaagaaaatttgaggttgccttgtgcggttggtaatggtccgatgatatcaaggccccatcactgtagtggctaggtgtgggcgatgagctttgtgaattgcgagggggcacccattctaggtgagaatttttggcacgcttcgcacgagt

SEQ ID NO: 52852 - DNA, 335 bp, Zea Mays
ttcgagtgttggtgatggttgtccccgtgtcctcctttgacaattatgccggttggcttgattaggtgttgcttgctctcaagtgatacgcctttgtcaaccacatcttgtttgacccttcgttggacaccggtttgtgctgggatcgaatggacatcatctgttggatctccgacaccatctctctaggttgtgtcaggtggctagggagcgcaatggcacgacatgccatctttggctcactctcaagaatcagtttcttgggaatcgtgagatcgacaccctctagctcgacactaacttccacaccttcatccagggcgacctactcgtgg

SEQ ID NO: 52853 - DNA, 286 bp, Zea Mays
cgggcagttccgccacagagggtccctcaattacttccatgggagcaagacgatccaagtcagtttcctgaccctcgagaccgcgctctaaggtcgacgaggcgtgggacgctgcccgggatgatcccaacccggcgtcgagcacgtcagcacaaacctccatcacaccatcatccgctggctctgatagcaggtcttctggaaccatatcttcaagagtctgatcaaagtttcccagggacaactcttgtacaccaatgagggcagacagagcaggagaaggaac

SEQ ID NO: 52854 - DNA, 1604 bp, Zea Mays
acaggtctgattaccaggccaattcctcctggccaagttatcctttgttaaagttacacctcttttgaggtaccacataaaaacctttattttcagaggtatcttaagcttccaaaggtccttgttatccctaaccaccccattgttaagaatttcctaatatagggattgaacagagaacatcccattagcagtcaagtcccatctgaatgaatccctgttagtagtcaaattagtatacgccacgaatgtcgctagttgaaaccattgagccctcaactggtgcaccaataccctacagaatgatatgtttaagggtaccgtggagaagacaaaagcaacaattgaattcttcctccttgcaagattatacaaatgaggaaagcggaattttagcgctcccaacccaagccaattgtcctcccagaaacgcgtttgggacccatcttttgcctgaaaggtacctttactcatgaatagatccttaatcatcataaggccactccaaaagtgagaatctgaagctcgacgttgtgcttgggaaagagttcgattggccaaatatttctgtctcagcaacgattgccacattccttcttcattgagaagtttatccaaccatttacttaagagacatttattttgaatctctaaattcaaaatgcctaacccgcctaactctttaggttggcaaattacatcccatcttgccaacctatattttttcttatggccatcaccttgccaaaaaacgtgatatgaaataatctatcttctctagcaccccttttggtacttcaaagaaagacatcataaaaatcggaagactggttagaacagaattaattaacactaaccgccctcccatggacataagctttcctttccaactacttagctttctctcgaatttggtttccactgttttccaatcaccattagccagcctgcgatggtgcatagggattccaatatatctgaaaggcatgcctccacttttatagctaaacaatcttgtgtacctcccttcctcctctttggccttcccatagtagaagacctcacccttgtggaaatttattttcagacccaacagctgctcaaaggcacataatatgagtttcatatccgttgccttgtccaagttgtgctccataaacaagattgtatcatctgcgtattgtagaatggaaagccctccatctaccaagtgcagtaccaaacctctacttgctcgttcacctttgctctattaatcaaagtggcaagcatatctgctaccaaattaaagattataggtgacaacgggtcatcctgtctcacccctctttgagtctggaaaaacggacccatttgatcattaactttaaccgccacatgacccccttccataaaagtcttaatccaactacaccatgtatctgagaatcctttcatacaaaggacttgctggacgaagctccacttcaccttatcgtacgctttctcaaagtcaattttgaaaatgaccccatctcttttcttggtgtgaagctcatgcaaggtttcatgtaggaccaccacaccctccattatatttcttcctggaagaaaagccgtctacg

SEQ ID NO: 52855 - DNA, 489 bp, Zea Mays
cgggccgtggaatccgacctacagcgtgagcaggcaccgccgctgcgtcataggcaaccgatgaacacttagacagttcaccacacaagtagctatgcatagtatcgtgtttcatcgaaggtcgtgctcgagggcgcgttaatgactttttcggcaagggtgccactatctgctacgacaagcattgccggtccgcgcgcagacaataggagaattggggagaaattgcactagccattgatttggaaatggaagggtgagattagagcttaggatacactttcgatgcatatgtccagaccgttgctcggccggtgggcatatcagattaaagataggcgtggagagtttctagccgtagataaaagattgaggggttttgatagcatactagttcgggtgagggcagatttatttcgtgccctccgttttaaatcgaatggttcataatacatgataccccttcgctgtgcacttcttacataagag

SEQ ID NO: 52856 - DNA, 693 bp, Zea Mays
ggaaatatcgcgccgtggatgaactccggccactattctactccggtcaccgtacccgcctgagtcacagccgttgtggataggttcgctggagttagccaccttgcgaccttgcgccacgtgccctggcatcttaccacgtcgcagtagctcgcattatgcatatccggtgatcgccggtgagctcgccacggtgaaagccactaatcgcttgcaccagtgcatccccttccctccgatcgccaccgcgcaatcacaaattcacgggccaccactcaagggccctataaattgagcacaccctcgactccgctatgtaattgtgcactaaacacacccactcgtgcctccaattactcaccagagcccccgaatcgctcagtttccccaaatcagttttccgccaccgtgaacaagctctcaccgtggtcagtgcacttcaggttcgatcttgccctgtgctctcttgtttcagcactcttacatgccactgatgctcctcgacccattcaattaagctagaccgcgctagatcatcgggaacacttctgttcatccgtagttcgcattgtctccatggacagggcgatttaggggaaacgattattaggtgttgaattaggtgacagccaagttagggcaccgaccattgcttatcttggccagtacaggttcgccggagctcgtttcatc

SEQ ID NO: 52857 - DNA, 587 bp, Zea Mays
cttgggtatttttataaatcatttattgcatgtgaatagcattgtaattctcatcatcactatctacaacatgcattccattttatactatgtctcaaatgctaggatgaagagaaaataaatgattacgcatcttatgactccaccaagaataatcctcctcatgaaagtcaggaggtttgcaaagaggaatagacaataaatgatcattggcgttgtaaggaatgcacgagtaattaaaatacgtcttagagtagttttgtttgaccatctttttctttcaagaggatgaatcattgttctcctttggtgaagatgaagaagcatcacggtcgtagaagactataccctcgatgcgctttttcttcttcccatccttcttcttcttgcctaacccggagacgatggtctctcctaccttgggtgtgtcaccagagagtatctccttcttcttggtcacctttgccatccctttaggatccatcccttcgggtgattagtcccttgatgaagagaacgactccgatacacacacataatattcacccaaattcaggtgttaccttctttctctctttcttttctgt

SEQ ID NO: 52858 - DNA, 615 bp, Zea Mays
ccttctgttgtcaagatcttgagccaccgttctagaggaaagggtcttcttatcaactttagcagccacctcaggagcaatgtcctgaatacaacagtcattcagccatctatcagaccagaacaacgtgttgtttccgttacccacaaaggagatgatcgagctagcaaatagttgtcgagcctgaggctggataggaagatccagaccactccaaggcctatccgggtctgttttctacagccataaccatttcgtttgtagcgcccaactcatatatcgcaggttcggaatacccaggccacccagttttagcggcctagtaactttgtcccatgacactaacagctgcccccattcacttctttccttcctttccaaagaaacccctgccgcagcttatcgatagatttgatcacccactttggcacattcatggcaataagaaggtacaccgggatagctgataggacaaactggacaagatcaaatatctcaattgtcagtatttttgtttgtttctattctaatgctcttaagacaagatttgctttgatttttgaacaattgaagcaacagaaagctggtgacatggatgggcacattgttaatgtc

SEQ ID NO: 52859 - DNA, 547 bp, Zea Mays
cattttcataatagcccctatacttctaattctttacattccgaggacctcgacggtggacggcgacgcgcagagctccgacgagctcgcataccggccaattcgctcaatgactggcattctactttggccgaagccaaattcaagacctaccaatggtttcccccaacttaatttcacaaatggctacctggtttgctctggccacggtgaccgcatgggcaacggaagaacacgggcgttcacggcaacccagggcggtcaagttcaatcaaaggagtcgtgaagcttgaggaggacctaaggacactagaacaatcgaccagagtgcttgaacgaacctggaataagctggccgcggtgagggtgtctctgtggtggcggaaaccggattgggggatgtaagaaatttgtggtctctggtgaacgatttgaggcaatacttggtggcttggtgcgtgatcatcctacggacctgaccgcgcgctcaatttatagaagacaagagcggtggccggtgaatttgggagggacgcgcggcggccgg

SEQ ID NO: 52860 - DNA, 280 bp, Zea Mays
cacaattaatgaaccgaacacgtcagcctggcccgagcatcgcggacggtccggtgctcagatagatggtccggctaactcagctggacagtctgcctatgatcgaaggcgtcagcctctacacaaagcaaggaaaaagacgcaagggcaaagcacatatggtcggctgatcaaagctgaccctacttttgatcagttgctctccaaaattgctagcaaaaagactattccacgtgatcggtcaatgaagaaacctcggtcacctgctaaaacgaaacgg

SEQ ID NO: 52861 - DNA, 866 bp, Zea Mays
gtggtttgcatacttgatctcttataaatctggtcgagtcgccgcacacaggttacaagaaagttgtgtgcggtggagagtgagttctcctctcgatctagtggtggtgtggtgactgtgagagggctagaggattatccctttacaagtcgtgattaccatctacctgaatcctccttttagcgcgacatgtattcttgctcatccggaattcagttgcccctcatctaagttgtctctgggtatctagcacttctggtacgctcaacctccctgcacgaggtagtagcgcatgacttagttgtctggtctttgcctccccaggtcgagctcatccagcttggttgtggcccgagggcatgccttgctaggcaagtcatctggaggcccatcaagcggtccatgaagtgtttctgcactctcgcccaaggtcagcctcgggcgagtcatgactgcttctcccgcctagagatggcttcaggtgagtcatgactacttcttccgcctgaggttggactcgggtgagtcatgaatgctttcccgcccatagctagctttgggcgagttggaacaacgtctttcgtccataattagcctcgggtgaggcagaacattgtcgccaattcgaggttggcctcgagcgagacagaatagcatctcccgtccgaggttggccttgggcgagatagaacaacatctcctgtccaaggttggcctcgaccgagatggaacaatgtctctcgcccagaggtggcctcggtcaagatggaactacgtcttttgcccataggttggccttgggcgagatagaacaacgtctcccacccagaggtggcctcaggcgagatggagctgtgtctcccacc

SEQ ID NO: 52862 - DNA, 1100 bp, Zea Mays
gtttggaccgccagaattccaaaggtgcagatacgctttgaacgcggagcaggagtaagagcgtaaccgataaactgcgaaaccaacgttcttgcaagaaagcgaaaaacgaaagacccgatccgaaaggtgcgagaccctaaataaatccgcctcgccaccaattaaagattgaagaagaagccccacagactctgagcacagtcgcaaggagcatctgccaaaggagacgactaaaaaaactcgtggcgatcgaagttacccgggaggaggttgatcgggcggttaaacttgctggaaatccaatcccgaaagcgaagaccgttggagaaattcaaagccgagcaacccaagccaacctgatgaccccccatggccacgtcgatatatgatttactctccatatgtcctctttatttatctggtcttcaaatcagccctaagaaaattccagccgcttctaaatcacatgtgtacataacaattagcccaacacaggaggtgctgatctgcggtgttgagtagctgcacaggcaccgttgcaccagttgcaaggagctactgtgcatgcaggcgtcaccaggaccaggagacgctgaccgacaatgttgatttgctacgcaagcactgaggagctaattaactagcagtgaggagctattatgcaggcacggccatgccggctattggcgcttggtgtcacgggagcaggagcttcatcatcgacgaccttgtgagttctgctctgaacttctgatagctctaattgacggggcagatatccctgtggggataaattctccgtacggtcttgttcggttgcataggaattaaggggactaagagagattaaatctttttttaattttaattagcaagagatttaatctccttcaatctacttcaaactgaacaagcgaaaatgggagagacgctccctggcaaccttgacagggacgggggaatgtgctagagctaaccaacttagctgaatttaagaagtgcttgtcacaccatttgacactaagcacttcaaaaattcagtaagcctggtagcatgtcattttagatcattttgtacatcacgtgcagtgtcacaa

SEQ ID NO: 52863 - DNA, 630 bp, Zea Mays
cagttccttcacctttggcttgctgtaaggtctgttcagttaactgaccaacaggacactgtcacatggagttttgggaacaccaattgctacacgactagatcagcgtatcaagtccaattcttcggtaccataaacaaacacaagtggatgaagatttggaaggcaaaggtgccaagtaaatgcaagatttttctctggcttctcctacatagtcgactacctactgtggatagaattgtcaggcatgggggacacgctgttcttacctacactctttgccagattgatcctgaatctcatatacacttgatggcatcttgcagttatgcccttagttgctggcaactaattgcaaactgtttccatcttaaactgccgtcacaagtcccacatggaatatcgcattggtggcagacattggtccggtcggcgcggaacgcacatcaactgcaggtgatgatctacactatatggaatatttggaaagagcgatgtcgcagggttttccattgcaaggaacaagccttccaagtgctggcctcacaaatccaagaggagatctgctcatttcggttggctttcgctacaactctgtattccatatccttgtatccaatcaactataat

SEQ ID NO: 52864 - DNA, 714 bp, Zea Mays
acacatcttcatcgccttttacatccgatgccgagtcaacatcttcaaagcgctatgagcgcaaactagttaatcaaaacctctttcgatatcctcacaatcctcttttggtatatgggtcggaagcagtattgctaacagacctagccttcagggcacctaggctaaccttttaaagcactatagaagcagaagcaacccggctcgaaaaaatcaatgtactagaagaggaacgtctaaatgtagttattcaatcggctagataccagtagatcctgaggcactaccacgacaaggcgatacgtcccctatcatttgtagtaggggatctagtgctccgccgcatacaatcgagggaaggacgcacaagctatcaccaccatgggaaggacccttcatagtcacggaagtaactcggtcgagctcatatcggctaactcagatggatggtactccaattggaaactcttggaacattgaacacctcaagaagttttacccgtagcagcaccataaactctagatggtaggttgtcgcttgtaatcctatgaactcatttcaataaagttctactttcttccttacctccctatatacaaatgtaccttcatattctactaacggagcaatcaacttaagtaggtaagtggcttaagtcggtgttacatgctcacgcacacagataatgtgtgacaccataccctacaaacgga

SEQ ID NO: 52865 - DNA, 375 bp, Zea Mays
ctctgacgctgctatccacctacgctgcttcagtcagcgatgctgctaggcgaactctgtggtccctcagccacacttactggtagcagctgcacaatacaaagtagcatcttcatgtgcatcttcgtggggaaagccataccaacattattccaggtggagctggagaagatcgcctcaacaccctagttggtgtggtggcaggtattaacaccgacttggacagtgctaccctagacctctccagggcacatttggagctagaagatgcacacgcaaggattgcagccctagaagctcaactagaaggaagggatccccctgaagctcaagtccctgccatggcgttgtcctctccctacaagaggatccgct

SEQ ID NO: 52866 - DNA, 782 bp, Zea Mays
cgataagcacggaagtgtaatgcatgaccaagaaaaacaccgtcaaaagatagttactcaaatttttccaaatttccatgtttcaatacaaagcatctacagccaaacaccctgaaatggctcaccttgggtggtcgtccaaatcgcagctcataagaggttttatttagaaagcacgaagaaagatgcaattggacacatggcatacaatgttgatcacatcgacccaaaaactcctaggagtcctatgctcattgagcatcgtcttggccatctcaacaagggtccgatttctttcattcagcaatgccattatgccgaggcacatacagagaggaaaactgatgctcgagtcccaaagaagcataaaaggtcttaaaattaatattcttgaatgttgtgccattgtcaatgcgaatcgctctcatgaaattttttgaaactcatttggcaacctaaaaatcaaatcttgagtatgagtaaaagcctcattctttcccttaataaagaacacccaagaatagcgagaaaagtcatcaacaaccacaagaacataccacatgcccaaaatagcaaacctgagctacaccaacaatgtccatataaagcaattcattgggttgcgaggtcatcacgttggtgaccggggaatgggaagcaccaaccttcttgccatgatgacaagggtgacaaacaagatctttctcaaatttcaattttgtcaatccttggatgaggtcaatgaacttagtcgacacaaaagatcaaagctcaaatgaccc

SEQ ID NO: 52867 - DNA, 1228 bp, Zea Mays
cagagaaaaataatgagataaataactaagtacacttgtatgttagtggtttgggaattgtttgattctttttcttgtgcatactcaattaaggggattaaagtagtcaagtaaccaataaataaataaatgtgcatctcatgccgatgttatttttttgtgatccattatatttgaataaaggaatcataacttaagttcgaactcaaattataaatgaaaataaaacagaaaatgagaaagaaaatcaattattacttccataattaaatactagggagaataataaacaaaaatattataaaacaatagaatttatattaggatgttattagttgattggaaatctgaaatttaaaacaaaaatttgaatttggcttgaacatttgaattgggaaaagaaagaaatgcaaaatataaaagagagacactctctcagccacatgagccgaattcccctctttcagcctaactcgcgtctgggtgacccaagtcacgtggcccagttttccccacagcctcctgtcaccgcctgacggggcccactcgtcagacctccctcttccacctcattgggtcacttgcgtgtgggaccatgcgctccgtttcgtctccacagaagcgcgttccgctgcgccgacctcgccggaaagctcgcgcctaccacgccccacggaatcttctcgtggcgggtataagtaccggggacgttgcgctctcggtccatctcaccacgtaggaaagggctggtccaccattgccgaaccgagagggagatgagggagcgcagagagaagactgccgccgtgctaggaatcctcagacaatgctcttcgggtccctgtgcgtgatctggggcattcgctggtgcttgccgaaggcgtccaggtccttgtcgtgtatgggtagagtccaaggaatggggaattgtttgtcggagttctatcctccgccgcgggccgcgctgctcatggccgggtgctctccacgccgcgacaaccgataagaaccttcgcccagcttcgccataacccccataacagttgtagctatattaattcgggtttctggcaccggtgtatggaatcgggtgtcgccggtgatgtctccaccgtggagaagacggtgccgccgttcctgggatcgggttgatgaagaagggccgctggccattggatcgggttcaacgacttagattagagcacagcgtatccgttgaaggttttta

SEQ ID NO: 52868 - DNA, 894 bp, Zea Mays
gaataccaacaagtgtcccaaaggaatcttgacatatgaccaacattggcgtccatctccaatgaactcacgaacgaccacgaccactcatcatacctctcaagcgaactagggctatggtcctatagaaccaaggtcaactcgaaggtacctagcctcctgaagacaatgaatgaaggttggagaagagaaaggccatcgatccaccaccacaagatgacctcgatgagttgatcaagaaacttgaagtcatacatcaacaagttgaagcaagaaagaaaaaaatgcttcgagtagctcaactacagagacatatcgacgaagcatctaaatagattcatcgcatggcaaaacaagatgagcaagcataagatctatgccattacaatataagacatctcgacccccaaaggacaaaaccatgatgtcttcgtctatgaccacacttctcttctggtagtggacttatgagtcacaccatgcccaaccctctatatgccacctcatcttccaatgaatgatggtctgtcaaacctgaagcatatattgatgagcaacgaagcaatcatatcttcctatgggggtaacacagtggtgatggcgaagtcattcgtcatggaggttaagagtgtgtcccaaacctagtattcttcccttcgattaggttccattcattcatgttagaaactaaaggatcttctccttactagtttccaaggcttccaaacgaagcatgtaacagctcaagctttgttcaagtgcgctgatgacctaaatgagtaccttcaagcttatgttcgaaggttcctttgcctttgcgcttgggtgacaagtgtgcctgatgatattgttgttgaatcgatggttaaaggacttcgtcctggccctgcgaca

SEQ ID NO: 52869 - DNA, 613 bp, Zea Mays
tatctcaaaccgaggtctcaagtttgatcaatcaatcaaaatcagtgtttgcagagaattctggtcctagacttttgggctaattgcaatgttgacgctgcccgttctttagtttttgttaaacaattttgtttggtccaaaaatacaagttagagtttataagacggagaagaacttacagaaaaatagactatgacccgtttggattctcctggttacttgtttgtcaatggtttataattaatcggcaaataattagctagcaaactatcaaccaaaccctcaagcaaacaattagccaatttattatccaatccgtttagagtacaaggagctaaaattagtcggcaaatggtttgccagatagatccaaaccgacccaaagattgaccaaagttggaccatgtaatttaagggccaaaacaaaaaaaaccctcaagtggtcgtgtctggtgttgagaatataggtcgggctttgtcgctgcactgcacgagcacgacccaaaaacagtagttcaaagcacgccgcaacgcgaaatgatataggccgggctagcacggcccgaaggtagacatgaaccaggcctcaaattccggtctgtcgggtccccg

SEQ ID NO: 52870 - DNA, 370 bp, Zea Mays
aaagacacaagtctttatcctagttcgggcaaaaaaaagaccctacctccagcagacggggatgagacttatattacctgcacctaagtgcttgcagtagggaaggtggccgaggccgagctcgggctagacaaagtttgtcatgaggccaagaccggcttcgggcgagacgtagttttctccctagggccaggtcatcctctgccgtatgtgtgtcccattcggagttggcagacgacttgggggacagtagccgttgttgggcatgcgtcatcgtagttggtgaaagcggacgagaccgcggtcctgtcgctcctgttgaccgtggcatcacgtggggtagatatgcgtattgaatgctcatgtcccc

SEQ ID NO: 52871 - DNA, 881 bp, Zea Mays
cttctcctgcctttgctataagatccaaggcgcaacgctggaacaaatccagtccaagctctagtgttgttgcctcctaacgtgatgccctattatcttctccagttgccacaagccctgtgcccatctggaagtccttacaccaggttgactgggatgatgctggttggcagatgtatgagtgctggtggtctcgtctgagacagttgcgcgttccacctcgcccctgccaccctatccctaaagacttgaagggtaggtgcttcaactgcttgtcaccctcacatcgtgtagcggactgccgctatcggacgcattgattcaggtgtctgggctgacctctctgctcagcggctggattggcgcctggtagctcgtgcaccaagcaatcatcgccgcatgaatgctcagtccttggcgagtgtgtgcacctctactgctgaccccgatgatgataacaatgtggctggcgggtgtatgaacacggtgcgcaatgttggacattcttcgtcggcgtcgcttccagaactgctgtgcttccatccctgttgcagccaactcgtccccttcatgcccgagcggtgaagaatctggagttgacagccccctagcatcctagatactcatacaaggctccagaggtgctgatgtgtccttcctcgctcagctgagctagaaaatgtggagaacgagatgcggcgggtgctcatcgtcacgcagatcagagaatctgagggtcaccgcagctatgatttctttgtccagagcttcaatctgcctgaggattctctggtgttccaccatgtctcgtaggtggaattcttcctctgcttacctaacaaggctaccgcaattcgagtatacaatggaggatagctgat

SEQ ID NO: 52872 - DNA, 893 bp, Zea Mays
gcgcggggcgaatcttgatgagaaggcctggtgtagttgttcccgatgacattgttgtagatgtcaaggctacgcctgatgcttcgagtcgcccttcctcctcgattgctcctgcgaaagacattgccaaatagagatgttttgctgtgtttagaagatactgaatgtatttgtgaactatatgtgtgtgtgatcagtgcgcttgaatacttggtaggatattagaatgtgttcttggtgctgaaagctataacattttgtttctgttgttaaaattcaacagtcgctatgaacatttgcagaagtaagtgtggcatgctggtttttggaatcttttcttaatttatgccaattgatcagctggtagggcatagagatcgccctatgacgagtaagcgtgagcatgttgcaccatcttaagtctttgccggcttaagtcgattgctccgttagtagggtatagtggtcaccctaagtcgagtaagcgcgagcatgttgcaccgtcttaagtcattgccgacttaagccgattgctccgttagtagggtatagtggtcaccctaagtcgagtaagcgcgagcatgttgcaccgtcttaagtcattgccgacttaagccgattgctccgttagtagggtatagtggtcaccctcggttgagtaagtgctctgattccaagtttaatcaagtcgaagtcgatggataaccaatagtttgaatgcttttgagaatgaaatcttttattgatgacgtatttcccaattacagaatacaacattgccccgatagttcttgctaagggtaaaacttcctgaggtgctctatattccatgaattccctacttccgtgtcatccatttgagtaagccgatatgatcctggccgtgtgacctc

SEQ ID NO: 52873 - DNA, 380 bp, Zea Mays
ctcagcacattagatcaactcaaccatgagctaacccaaccaatagtgtcatgatgaaatgattaattatttgtccccacataacatcaaacaaacttttaacctacatcatgtagactatctcttcttgacaaaattctatcctacctttggatatccaccttatacgactagttacccccaatctggacataaaacaaaggttaagccatgctaaagaatccttagatcataaccaactagtagcctattcgttctgtctaccaaataatttcccttgcaaactattttaccatatgcttctaactttcatggtcaataccatgaagggaagattatcaggcaacaacaaacagaaatgaatcctccaaatcctccac

SEQ ID NO: 52874 - DNA, 1170 bp, Zea Mays
ctactatatacacggtcttgttggcccctcttatatcttctttctggctccgcccctgactccatcgtctccgtcgagcagtgctgagttgcgcgcgctcttcttcgaagctcaagctcgctggagaagtgctcgccactgtctccgtcggtctgcagtcgcatgtacgcgcggacccgcgtctcccgtccacctcttgccggtccgagaccctcgtcgagctcgtcttccgccaccgctcctcctcgtcacctcgccgtgcttcttcaaccaccaggtgagccgccggcaggagcccaaatctctcttcccctctctctgtaacgatggaaggagaaaggggcaaggaggagaagaaatagaagtgtgggaggatttttacgaatgcagtgactcacataaatagtggccgaggatttaaatgtaggggtttagtttgagaatagttcaggggtctctgtgcatttgttcttttcttttttttcgtttttctttgtttaaccagctttaaagctttggaaaatcgtaacttgagttctaggacttcaaaaatagtgaaacaaaatttgtaaagtttcttttgaatggatctacagtctaaaaatattgcatgtgagtttctagacacttttgtataggattttcaattgaataaagaaatgatatttttcttccaaaattcctagtaatcagaataatggtcagaaaaatatgatttcaattttgttaggtttcttctaagagtgcctatctgtgataaatatattgtgagtatgttttgtggatgaaatgacttttgtggtagaaaaatgagaagtgatgattccttagaaactaacaaattaataggaaatgtcgtgagtttggtctgaaacttctgagcattacttatgtgttttaccacctctgattctggtgagcatggctatggaaatttttgtacgatgtttttgtattaaatacttcatgataaaattaccacatatgttgtttggtcagttttgtaatacaaagtggttcaaagtacttctttgcgttgttgtttgttatttttatagggaaaatattagtccacatgagttaatatttttatggtgaactctagtagctgataaatattcactgtattttttgtcactgtattttttttagaacttttggagaattcga

SEQ ID NO: 52875 - DNA, 505 bp, Zea Mays
gccctcaacatgtcttccaaaatctgattcaccctttctgtctgaccatctgtttgaggatggtatgctgagcttcttattacatgggtcccaagtgattcctgtaattgctcccaaaatcgtgccacgaatggtgctcctctgtcagatactatagtccttggtattccatgcaagcgaactatctggtcaatgtagatttatgcatacttctccgtcctgtgggtggtatgtactagcaagaaatgagctgtcttggtcaacctatccacgatgacccaaatagaatcatggtgctgggaggtattgggcaatcccacgataaaatccatgcagatatcctcccatttccaagatggtatgggaaggggctgtaaagtgcctactaccttcaaatgactagccttgactctctggcaggtgtcacattcggatatatacttagcaatttccctcttcattctggtccaccagtataaggatctgaggtcatgatacatcttgt

SEQ ID NO: 52876 - DNA, 591 bp, Zea Mays
taccacaacattcattgctattgcaccgctgtgctgttcaaaattttcaccaaagccgaagctctctgcattgtactttcgaacgagcatttcatcacttaagaacaacttcgtctgagagaagctgaacaacaaaatggacagagtaagatccactacaagggtatcccacgagggagacaaaactaaaatgactgagacaacaccgatttcagaaatgatgaggcagtcggggctggttgtgcgggaaggagttattgccgaagatacctctactgccgaagctaaacaaggcgtgactgaggttgagagtgataatgaaagtgaagatgacgatagcattctgtgtccaaataagcctagtcatgtcgaatttgggaggtctacagttaaggctgaagatctgattgtgacgaagaaactaggatattttggagaaaatgatgatgaattggttcgctttgctggagaggaaataattccagagctgaaggaagatgaagttgtggtattcaagagcttcttcaaggcggggcttcggtcccccctttacgagatgataggtgaagttttaaagaagtttgatatcta

SEQ ID NO: 52877 - DNA, 384 bp, Zea Mays
gacaaaaaacattggatggaggagaatcatcttcagactgtgttgtacagctaagagagttgccgcaagagtcttttctgtacttggggagtaccaattttctctggaaaaagtacaccaggttctggaggattaaccattgttaatgctatagtcttgcttggacagtccttaaggttttactaacctagttgttctggtagttatcgagcatgatttaatcatttaactaaccttttcatcaaataaaggctcccattttctgtatttcaatgattatttaagcaccctaaagctaataaaatatccttctgattttgacaatagagacatatctattgttcagtgaaccaaacttaagaacctaattctcacctaattcac

SEQ ID NO: 52878 - DNA, 604 bp, Zea Mays
ggttcaaaagaaaagatggaaatagagaatgtgtgtcgattacaccgacataaataaggcttgccctaaagatccattccccctcccgcgcatcgatcaggtggttgattccacctcaggttgtgaagttctaagtttcctcgacacttactcgggctatcaccaaatcgtgatgaaggagtccaaccaatcggcaacatccttcatcacccctttcggctcgtactactatgtgatgatgtcgttcggcataaagaacgcggggcacacaccaggggtgcatgatcaaatgctttagagacctcattggaagaaccatggaagcatacgtcgacgacatcatggtcaagactaggcggttcgaaggccacatacatgacctaacagaaacatttgataggctaaaagccaacggtttcaaattgaacaatgaaaagtgtgtctttggcgtcttgaggggggcatgttgcctagcttcttggtttccgagcagggtattgaggccaatccataaaaagtttcagccatcacaaatatggggcccatacaggatctcaagggagtccagcgagtcatggggtacctaccctcccttagtctcttt

SEQ ID NO: 52879 - DNA, 638 bp, Zea Mays
gtcgcctgcagctctggtgttagtggggaggcttcgtcgtggaggaaatcttggaagttgactggtccatgacgaagattttcatggttatggccctcatagttcttatccttgtagttgtgctaatctggcacattaatgttacgcattctttggttgcttcgtcaatctttttctgaagctcaaaaagacgaagcaccttctccctacgcttctccaactgctggtggattacttcgaggttattgaattcttgatcaagctcctcgtcttgtggctctgggctaatggctttcctcttctggtttcttgcctccctaaggagagctttgttcccctggttggtgtccaaggtcctgaggacggagctggttgtcattgccttctttaacaacatgatgtaggttgtcgttgtggtttgaatcgccggaggtgggcgctaatgttggtcacttgatttcaatcctctggtggcattgagaatcaaggcaacacaagttaaatatacatgaaccttagtccttgttttaacacttctatgaagtgttagcactaaggacaaaggtcttttaaaagaagatgtgaataaaaacatcatgaaacgggatgacaatgtacaatggggtgtgaaactcatc

SEQ ID NO: 52880 - DNA, 440 bp, Zea Mays
gtttctttgtaaaaccaaaatatggtaaacaaatcttgtctttttgtgcttttgctttagcatttgttttgccccttcttaagttctagcttgttttactcttcatttagattctatattgttgctaagttcaaatttacacttatatttgttagcaacaatagcaagtagggataaaatggtttcagaatttttcggaatttcagaaaccattttcgaaaaaatttccatcggattcgtcggtaacggtatttctcagaaacagaatcggtcatcgaaattttctatcgatatcgaaatcggtctagtcttttaccaaccgtttcgttcggttacgaattttatttggaatttatcgaaattaggtttcaaattttttcgaatatatgatctggcccagccacccaaatcgtacacacgtccagcccactcgcgcacgc

SEQ ID NO: 52881 - DNA, 609 bp, Zea Mays
aggacactcatgagtccgtcgtccatgttccttttcttatctacggcctcgctcttcccgtttctcccttcttccgcggaatccttgatttttacgatctgaacttgacccacttgaaccttaattttatcttgaaagtttccatttttattcatctgtgtgaggcctatctcgggattcttccccatttcggcttcttgaagtatctgtatcattgtcagtccggaatggctaggggacaacaccaacttgttggcggcgccagtctagaactgcgtcgcgggaggaaaacagagtacctcgacatccctctgaaggatggcatcaaggggtggcgcctcgagtggttcatcatggagaatcactgcaagtcccttccccctcggtcggggaggcagccagatgtccgtactccaagctgggtagaatctctgaccccttcagagataacaaatgcaaaagtattgcttgctcaggtttgcttgttgaaagacaaaggtttgactgctgaagttgtggtcgctgatttcgtcttcaagaatgttcagcctttaaaggacagggcatatctagcttatctatgcagtggtatcaatgactctacccggg

SEQ ID NO: 52882 - DNA, 300 bp, Zea Mays
cacgtatggaaaggctgtcagcacagccttatctgttgaagccaagtacacaaattctgggaagaataagggattcagtggtgagaggcctaatcagggccaggcgaagaagcaacggtttgtgattcgaccttcaaaccaaaatcgccctttttctcgtccaccctcatttcccttcaaacagccaatcattatccgccccaacaatacccccactaccccaaaacagccgggtgccacaggcactcgattcccttccttgcctagttcttcaactgggtgttttaattgcggcaagtc

SEQ ID NO: 52883 - DNA, 479 bp, Zea Mays
atactacagaaataatatgattggaattaaatatatagatgactcagaaataagcttcccagcccgaatgacctcgagttaatgaattagccagcgacgatgctcaagtgtttggaaatagaataatgcagcccctgagttttgggctggttggaatataacattctccagcggacttgtatcataacctagttgtggcatatcatacttcatagaagccgtgagataattaatcggaaggatagagacaaacaatttgccctcgtggaacaaatctcccagtagaacttgtgtgtgtacgtagccgaattgataaatcagattttccgtatgctagagatacgcagcagcagccttgtacctgcattccaagattcgtgtgcgtagaaagagaaaaaatagcagcacacctctcaatcgtgatgcacaagcactagcagcggattgatttgttttcccgtatagaacgaagtgttgcg

SEQ ID NO: 52884 - DNA, 1254 bp, Zea Mays
tcccattgcatcctttcctcattagcagctctaagactcatggtaacactggggttgcagccatgatttggaacgtgcaggccctcaattccagcgcacggcaagatgcagttagagaacttgttattgcttttcgggcagagattgtttgtcttcaggaaacaaaaatgcaagtttttgctagaagcacctttctctctatgttgggccttgagtttgttgactgtttttctgccttcaatgggggctagtggtagaatcttcgtggcatggaggaatcatttaggatatacatgggagaagagagtggataatcagtgtctcaattcaatttcgtaaggaaggaggaggtacctggtggctgacttgtgtatatggtcctcaaggtgatgatgagaaggttttatttgtgcaagaactaataaacctcagagtggattgcagtggaccatgggtcatagctggagattttaatctcatatataaggcttctgataagaacaaccataatttcagcagggctatgatgggccgatttagaagattgattgatgatcttgctctcaaagaggtacctctccatgtccgacgatttacttggtctaaccaacaagtggatccaatccttgtctagctggacagagtattatttttggtggactgggagcagttcttccccaatgttctgctccaaagcactgcctcccacgactctggtcattgccccttaattttgggccttcatgacaacaaatcggggaaaagacgcttccattttgaggcattttggccaaagttagaggggttttatgaggctgttcagactgcttgggaatcggttgagaatgtgggcgtgtccataccaaactctttttctaaaattgcagaagacgactaggagtctacaagcttggagtgataaacaagtgggccacataagatcgcagctgatcttggctaaagaagttttgcacagattggagatgacaaaatgttaacgcctgctgaaatttggttgaagaacagactcaagaagcactccttgttactgtcctctttgaaacgcactatggctcggatgagattaaggaattttttggctcagaaggtgatgtcaatacgaagtttttccagttacatgcctgtcgggggcaataattagggacacccgaattatccccttaacaaacgcactcagagaacctgagggtgacagccgagccacctataaaaaccgagacgtccccccgagag

SEQ ID NO: 52885 - DNA, 842 bp, Zea Mays
aatgatcacgtcatcaattggctgcaaggttttccactccgcgctggaggtcttgtactgtatggttgtcgagggagttatgcctgacaacgtgacgctatctgcgaccatgaaggccatatctttgtcagcttcgccgagtctaatcagctgccagatgctgcattcctgggtcttcaagctgggcttcgaagcggacatggttgtgtgctcctccttgatcagcgcatacgctcgagccggtcaggtgcacagctcccgctcggtgttcgaaagcctgcggagcccaaacgtcgtctgcttcacttcgatgatatctgcgtgcgcgcgacacggagatggcgcaaaaggagtggagctgctcagggagatggtttgtagggggctcaaacctgatgacgtcaccttcctgtgcgcgatcactggatgtgatcaggcaggactgattgaggaaggcaggctggtgtttgagtttatgagagcgacccgcgagctgggccctgacgagaggcacttggcctgcatggttaaccttctcggccgagacgggtttgtggaggaggcgatgaaggtgatgatggagcagcactcgccgctgcggcactacaccaaggcgtggagctcgctcgtccagagttgcaaggcacatggcgaagacgcgctgggaaggagagcggcagatacgctggtagacatgggacgagaggacgcggccaccagcttgcaggtgtcgagatacttctacgagattggggacggcgagaatgtctcgaggattaaaggcatggcaagtgggcaacgggtgaaggagatcagcggtcgcagctcggtcgagatcggcc

SEQ ID NO: 52886 - DNA, 561 bp, Zea Mays
aagatcgcaccggacccaccagtgcttatacttattcatcacaacttgttatacccttgttaattaatcttgatggcacgatttatatgctcagataggcttgttgtctggatggtgtggtactagtcttgctagtgaatgtggcggactgataatgtgtcaccactcgccagagcttattgaaatgactttgaaatttagctacaaaaaaagagagaacaagctcagagtagcgagtgccatccacaaagttcagaagatcgcaccggacccaccagtgttttatacttattcatcacaacttgttatacccttgttagttaatcttgatggcacggtttatatgctcagatagggcttgctgtctggacggtgtggtactagtctttctagcgaatgtggcggagtaataccgtgtgtcaccagtcgccaccgtgctttatacttattcatcacagcttgttatacccttgttaattaatcttgatggcacgatttatatgctcagatagggcttgttgtctggacgatgtcgtactagtcttgctagtaaatgtggcg

SEQ ID NO: 52887 - DNA, 669 bp, Zea Mays
gcaagagatatatagcagcagatcttcagctggttgagctgacgtggctcgccgtggtggtttcagtactggtgggattgtcaagaattttttcagtgcgtccaaggcttcctgcgcttctgaagtccactgaaacttgtccaccttcttgagtagctcgtaaaacggtaaacctttttctcccagcctggatataaatctgctcagagctgccatacatccggtaagtcgttgaaccttcttttgtgatcgtggagcttccattttcatgatagcttcaatcttttccggattagcttcaattccccggtggcttacaataaacccgagtagcttccctgttggtaccccaaaaacacatttttcgggattaagcttccaccgataccgccgtagactgttgaaaaccagctgcaagtcttcgatgaagttttccgagttctccgttttgattaccacttcgtccacgtaggcttccacacgtttgccctagtgatcggctaagcatgtttggatggctctctgataagtcgctccagcgttcttgaggccgaacggcatggaggtataacagaaagcaccaaacagagtgatgaacgccgttttttcctcgtcttcctttgccaagctgatctgatggtatccggaatagcaatccagaaaagatag

SEQ ID NO: 52888 - DNA, 425 bp, Zea Mays
gttcgacactcaggctacagcagctgatgatgatgatgatgatgattttggggttcctcctccgcctcctatgcctccacgctcacatgatcatgaggctgggagttctagtgctgcccctgctacccctcaggctatggaccctgctcttgcttcgattctccagtctatcactcagcagcaggctcacctggcagccgagcaggcccggttatccgagaggatgctctcgatgtttcagaacatgcaggacaggcaggatgcgcttcagcagcagctacttcaggatcgggctgagagcagggcattcatggctctcatgctacagcattctggtgtctcagttccccagttcagtctgctccacctcctccgcttcaggctccagttgtgccagcgattcagaccggaccccctgttccttc

SEQ ID NO: 52889 - DNA, 503 bp, Zea Mays
aaaattgattgggcaccaatattaacacataaataaacagaaatatatacatagtacttgggattttctaggagtcttctgtttagacttgacatctatatcaaactttggactgcttttcacactcggaacttgtggggaagggactttaatcttctttgcactgttttttttttctgaaggggaaggtgaggctaatctgaattggcacttcaaagatggaacatccatgaaatcatcatcggacagtgtggatggagcagaaggaggatttctttttacacgacaagctagtgcctttctgcgaaaacgatgaactagtgctggttgtggctcagtctgcttctgattatgtggattatcatcttgatgtgctgagctgctagatcgagttcgtctggaaatgtcaacggaaaaaacctcctaacttgactcaatggttagtctttttggattagttggagggcgatcaacagatctcatgattaaacactgaataaatc

SEQ ID NO: 52890 - DNA, 600 bp, Zea Mays
agtgcctgcaaaagatcacagattcactgaactcgtcgctgatgacccttgcgcccagattcacgcaggcgctgtgattcgcgcctagtaacgcgtggataacgacttagggtgaaaagatcttcgtcatggctgaggtcggggcattgtggccgccctgttgttgtaccaacttgcgtcgcaatgtggccacgcggccgtcgcggtgatgatcaccgttaacctgagcatgccatgctcctacctggttaccacgtcgcagtaggtcgctatagatggcatgtctatcggctgagtcgttgcgccagtgaatgccacgataactcgcgctagtgacctccctctctctccggtcgcccgcgtgtcttccccaaattggacgccaccgttgttgatgtctatagatttatgccccagtgagctctgttaggttattatgcgcccaatgcaccagctctcgcctctgattatccaacctagcgtcccaattttgttttcccccaattccgttttccgcaccgccgtgaacatctcgatgtggccagtcatctgcaggttagttcaagcttctttgtttgatgttctagcctcccttaagtc

SEQ ID NO: 52891 - DNA, 301 bp, Zea Mays
cccctccccctcgcttgtggaaccttcttggatcaatagaagttcataccgcgccgtagccgaaccgtagaaccttagtaattgcttgacggagtgattggctccgtcgtggcttgattgtgtcgtgggccgggggtctgcgttgtttcacggctggaattgagaggcaacataggtgcgggccgtcatgaatctcacgagggtcgagcgaatttgaggttggagcgagggtcggccgaaatttcgggtactccggtgaaccaccgccgtgtgcggcgtcgggtatgcgcgggtttgagct

SEQ ID NO: 52892 - DNA, 894 bp, Zea Mays
ccaatttcaaaccagattcagtgactttttgtgacaacaccatgtagcaaagttgtagctggtatgtagcactacaactttgatgcagagacttggacctgttgtcacatgaacttggaagaaaacttggctccaaaatgcgctgtcaggttcatctgactgaaacttgtgatggtacagtagcttggattggatcagactgccagcgcggaactctcaccgccgacgatacctccgccgtgattcgtgtcgttgccggcccgacttgtgcacgggatgggcagataagggcgcacggtaaaagatcttcgccgacggtgagctggcgatcactccagtgacctccgtggccctctctccccctttgcggctgaacagattaactcgccggtgaccgccgcttcctggctgtgtgccgcgtgtccaagcctatccaccgcgtcgccatgactccctgtacccgtcccatcgtcgacggggaggttgccacggcggtggacacgaattcaccgcgcaagcttcttccccatccccggccgccgcgcgtcctcctcaaaattcacggccaccgttttactctccctataaattgagtccatgactagctccgtaaggtcctaagcttaccagccaccgttaatcagccacaatcatccactcgtgtgctcgaattcggagtttcccccaaatccgatttccgccaccgtgaaaccaagctcaccgtcgccagccatactctggtcagtttccgtcttctgctcccttgtttaagcattcacatacatcggtgatacttgccaacccatcgaattgaactaagagccctctggtcgccgggaacacgaccgtatagtcgccatactcacggccatcgtggccagagctccatagttg

SEQ ID NO: 52893 - DNA, 686 bp, Zea Mays
ggagtatgcacgtagtataataataatacgatggaatgaagtacgtagtgattaattaaggattgttcgagacttaccattgcagtctgtagggcgaggaatgatggcattccactgcaacacattacttgagtctttacccccgcatgagatgtaacacgtagggaggtcaaaggtagtgttccttgaaaccatgtacacacataggagcaacgacctttttccagttcatgaattgaccagatgccgatggaatagaggaggacatcgctgcatgagacagtagggttttgtggtgctgtctcctggcaggagagcagcgccacgctggtgaagtcaagcccgcaactcagcgaggagcaagtaggtgacggcggcagcagtagctgcatgatggtgacaagtagagaaacagaggatgaggccatcgactgctctagtatgtactagtgggtagggtagtggcgattgtgacccggtcgttcctatcgattgaggtggtggtccattttatagcccatgcaaacagccgggcgctgctgcgtctgcgtgggccatccctctctcgtttgatcggggacgtagagcataacaacgcagagcagagcagctagccagcgtccctctcatcactagtagtactatcgtacaaccagcccagcagcagtagactctcatcattatcg

SEQ ID NO: 52894 - DNA, 563 bp, Zea Mays
gtggatggttgctccacactcacactacacctacacattgccattcctatatatcctcttcctactcactgcattctgtcgcaacatgcaatagttcaattcacgacgatcgcctctatcttgtgaaacatatttaagaaaagccggaatgcaatgactttcaagacatcagcgttgtccaaattatcaggaatgcaaagaacttgaagacatcagcattggtactcgaccatgctaatcgacgttagcaacttcttctgccattaaatgtggacgacgatccttgagaatgtaacgggacgaaaacgtttttctgctccaaaaatagtccgtatccttttatttatactaccaaaacgcccgtacgttgatactatttattcttttatttatactatactaaagtgaccctacattgatatgatttctatctatgtttgaataagtataaaatagaaagacatatatgttatgttggctaggtgagcgagtatttgaaacataaagacatatttgctccattttttttgcaatatgcgcattttataaaaaaataaagactg

SEQ ID NO: 52895 - DNA, 490 bp, Zea Mays
tgtcgagcgctctacaaagagccgaatttcgatagtgtgagtgtaatgtgtatattctaacaataaccgtatcgccgatcgacgtgcgtgtatatatgcatggccactcgcgtatattgacgtgtgatctacgtacgtacgcacgttctaagaagatcaaggaccatgcatgcaacaaggtacaacaactttgcactatatgcatgcatctcttttgattgatttcaaagtgcacgtcaagtcctcgcacgacgatgtacgtacgactatatatattcgagctgttgttgttgtttgcatggagacgaatcttgccaccagtaaagcagtacgtacgcgtgcatgcatggtccatatataaatattctctatctctctctccctgtatatggtgtacatgtacgtattattccagtgagatattgtttcactcttgagattccgtgttgatcgatttgtgtgtatggcgcagcgaaggctccagatggat

SEQ ID NO: 52896 - DNA, 680 bp, Zea Mays
gtgaagtgtaatgtagtagtagggatgtcatcaactcataacgagttgatttgtaaattttgtagcttcccttttatgaagaatgatttcgtctcctcctgtgttaattactttgcctcccggtcagttgacgattgctgcgacgttggtgcctcgaaggtagtggccgagtcactcggggtcacattgtcgctttttggggtgacgaccgagttattattgacaacattggtgcttctgaagtagtgtccgaatgatggcagggccacatcagtgtttttagaattaacgaccgagtggttactggtgatatcagcgttatagaggtaaccaccgagtgactgatggcaacgtcggcgttttagaggtaacaactgagtgactgatggtgacgtcggtgttttagaggtaacggccgaatgactgattgtgacgtcggcgttttagaggtaacagccgagtgactgacggcaacgtcggtgttttagaggtaacgaccgagtgactgatggtgacgtcggcgttttagaggtaacagccgagttagaacgggccgcgtcggccgttttggaaataagggccgagtgatgacatgtcacaccagcttttttaggaatagcagctgagtgatgacatggcacgccagcgtttttgaaataaccgccgggtgatgactgggc

SEQ ID NO: 52897 - DNA, 678 bp, Zea Mays
gccgcccagttttcacgacaaaaggcacggagcgcgtgatggcagaatggaaacttaagcatatcatatctcttgagatattatactcctatgtatatgtataaaggatataaatatatactactcctatgtatatgatattcactttttttagtggacgccaatgattagtaggtctccttgggaagaatttaccatgacatatattgccattggcatggacccctcccccccgtttcaaagattccatgggcaggatgacaaaaagaaaaaccatgcaagtatgaacccactcactcgccagtcttgggtcatcatgcatgatcttccacgtgtgtgtttggtttggtccagagtatgcgcatgatcaaacatgcgtgagcataggggcacaccacaactacccctccccaccattcagttttaatccggctacggcttctacagtattttatccatataaattgtagcagacagccagccagccgaacaaagatcaacagatgaagggtccaaaatcccattcataaaggaatacatatacacatgtacttcagtccaggcttgcttgcatcatcacatacaaaaaaacaaagtctagtttgaagaatacacacatacaaaacaatacaatcaccatctttcagctagtgctggtggttgtggttgtaagatggc

SEQ ID NO: 52898 - DNA, 589 bp, Zea Mays
taaggtagcttacagatggaaaccagtggttttatggatggaaaccactgcaaaaggggcagaacctgcatgagccgtcgctaatactattaagtattaagcttctaatttaaatagcatatagcacttgtaatatgtagctggcttgcctgtttaataggagtgacatcagtgacagtgacaatattttattgtccccaaatgtttagcactttattctgtgcaaaatggtttaggtttctcctaagtctaacgaccagttctatgttaattgctggcaggaatttgatgcggtagtaggtgacataacaattttagccaaccgttctctatatgtggactacactctcccttatactgagtccggggtacgcatgctggttccagtttgggaccggagacagaagactgcatggacattcctagaacctttaacagctgatctatggttacgaactggagccttcattgtcttcaccggctttgtagtttggtttatcgagcacagaacaaatcaggaattcagaggaccgccagccactcaaattggatcactcttctacttctccttctcaacatttgtatttgc

SEQ ID NO: 52899 - DNA, 348 bp, Zea Mays
tcaccattgattttgttcatagatcctcgatccaatcccaagcactagcaaacttcattgttgattggacgccaggggctcatgaagaaggacacctaacagatatcaaagattggacaatattctatgatggatcatggagaactttcggcgtaggtgcagtcgctattctaatctcaccatccaaaatcaaaacctgctacgcagccagattggaattcaattgcacaaacaacattgctgaatacgaagccgttcttttggggcttcgaaagcttagggcaatagggataagaagggcagttcttaaatctgattcaaagtcatcacagggcaggttaataaaag

SEQ ID NO: 52900 - DNA, 316 bp, Zea Mays
cccctccactcttgtggtacgtaaggagtacaccaacgtacgcatggctcacatgcattgtacaacatgcatgcgtgtcgtccgtcgcttctctatatccactggatctcttgcctcatctagcagctcgaaaccgagcactacacttccttctctgacttttacttcggagatgggacagtacagacacgcatgtctgaccttgctgggcgcgaggtcacaggcctccacgctgtggaaccaaaagccgtccctcacattatctaggatggtatatggaccatgcgtattactaactccatttttaaaatatttg

SEQ ID NO: 52901 - DNA, 320 bp, Zea Mays
agcatatagccttcagggtatggccacttgtggagagctgggatatgccgaaggagaccaccgccgattccagtgagggtggcctggtccgattgaagtataccttcagatttagggagaagtttgatgagccaaacgatgactggctgaagtgtattgaagctactagtgatgagctacttggggcatactccaaggccgaagataattctttgtccgcagctttcgggggtcggggcaagaaaagattgaacatggtatttgatgctattggcttcgtataccctgattaccattacccgctacgagggcaagggaag

SEQ ID NO: 52902 - DNA, 742 bp, Zea Mays
aacaaaatgagattggattggaggaggttggcagtgcccagccagacttgcaccagcctgcgggttcactggactgtctggtgtgcatcagacagtgttcggtgcccaggttggcacgtcgatgaactcgctgctctcaggaattgttgggggaagttgtggctaaaattcacccgatcactttcagtcgggccaatcagtgactcaacttcaatcacctgagcaattaccctctgctcgtcgatcccatgatccaagaaagtcgggtcaacaatatgttggtggacggtggcagcagcatcaatgtcaccttccccagaacgctccaagctctcggatcctgaccgctgacctcatcgagtcagatacccccttcttcggcattgtcccgactgaaggagaatacacactgggccacgtctacatgttggtgactttcgacaccactgataactacgaaactgagttcctacgctttgaggtagctcagtttgactgcggctacaacgccgtcattgggaggccggggttgactaaattcatggccatcccccaccacccctatatggtgctcaaaatgctcgggccccacggcatcatcatcgtctgggtcaactttcaaggagcagcagagtgctaccgagggccattcaggaagccctcaccgttggcccctcggcagtcggcggctagggctggacgaaatgctcgtggctcattggcttgctcggttcatggtcag

SEQ ID NO: 52903 - DNA, 532 bp, Zea Mays
caagcccccaacactataaaattctagaaactcgataatatatgtatatatattttcctctcgtcgagcctgttctggatctcgtgttcttttcgcgagatcaccgaaccgcttctcctcgcgaaaagcaagtcgcttgcatctgccatcctcgactacctcgtcgacccttcgtctattcccccggtctacccttcgtctaagtctatcccttccatcaatctcacctcgcttcatctcgtcgcgcaacgctcgtgcgtgcaacctcctcctcgcttcgccacaccccacctctatttatatacgactccttccctctacacagatacgaacttcttccctgaatccggatctcgcgagcagcagttaccaggtacacagctctctcatcctcccttcgtcctataccgacgcctagatctatagagctgccgcggcggtcatcgtcctcgaagtcggtcgtcccctgagctacggtagacgctcgcctgcccagcgcagtgccgcggcagcgacggcccacacgcccact

SEQ ID NO: 52904 - DNA, 308 bp, Zea Mays
agctcacctcagagcgaggcacgaagctataacaactgaagttgttgtggtattgctcctttcgagtagcctttgtttcatatgacagttcatgcatgttgcagaagcattttgcatttggttctagcccctggctcctcatgacccaaataaagacccccatcttgataatagcttcgagagtaatctgatgaaggtaaatttcgaaagtctttaaaacttcgaccagaaacttatacaaagggaaccgaagccctgcattcatgaagctcctgtagaccaccacctcgtcagctttgggtagaggg

SEQ ID NO: 52905 - DNA, 813 bp, Zea Mays
gcggagttgagagaatctcctaccgcggagggtgagctcgagtgggtctttggtgttcgccactctcgtcctccgcgctcggcaacgagattctgggcacgggaggtgaaggaccgtgcctcgttaactcgtcaaaaaggaggggggaatcatggttggattttgtgctccatcgcaagtccaccgtcggtggctattgacttcatcgctcaacgcatctatgagtatcgcctagtgctctgcttcgatctcctctccatatctgagtagcgagggttgggttgggccgctacatggtgccagccaatactctagggcgggtcgtcgtgtcgcagtgaatggagggcgccaccgcggttatcagccggtggggtagatggatgccgtgaccgagtttgacacgaggaagaagaacatccctggccattgatgcgaagattgagggtcgagattagaacccgcgtaccgtttcgctagagtgtgatcggagccgttggatctccttttgatggcctagatgtggtgactgcgtagcgtttcggataggggtaacgggaaccgtccgattaggatcggatgatggtcatcactctggggttcattaaactggggtcgtgagatctagatccgagggaccacgctgagtaccgattcgcccgtgtctagatctaatcagatccgttgatagttgatccatcggcccagacttcaggataccctttcgcattggctattttgttaaagagccctcctggaatttgggaactaactcgcaatctagttaacagtgcgctgagtcttagagacttttac

SEQ ID NO: 52906 - DNA, 438 bp, Zea Mays
gaaaaagcgaatcgtgagatagctgaagctaaacgcaacagggttcagacagatattgaagaaatttgggcgtcgaaggaacaatgcttctctactgctgcacattgctgcgagaagctaaagaatatgtttgctatcgttggtgctttttcaaatgatgaaaatttcattcgcggcgatgctgaaggagcaatcagatgaatagaaggtgaaattgaagcttttgatgatgttcttaccggtcagagagacttctgtccctgcttgaaaaagctggctccgaacatgtgaaagcaatggttcgaccagactttatgattttggctaatgacataaagaagccttgagccaaagctattgcactgggggaaggttttattataagatctggcttgcaggcgacagacaaatggtagatgaagttattagataaagtga

SEQ ID NO: 52907 - DNA, 563 bp, Zea Mays
ttaaatcaagatattcttcagtgtgttacttcgaatgagatcttaaagcaccaagtcgggtactaggactcatcagttttatcatgttgaaggaaaaggaagcgggtcttcagaaagacccccctcagtaggctaaatcttgggatttagcaattgacataccatcgggggggtgtgcatgtaagaattcgagccaaaatactctacaacttcacacatcatcggaagaaactatcgctgcttggattccctctttgttgccctcaaaagggtctttatattgccctatcggtgaaccaaaccgaaaggggcttttgctatcccacgaatgggtcacaagcgacaagcagggccatgtaggtgatacttgccatttccctagagtgatccctactccatccaaattgacgtttaggcgttttagcggtggtaatcgaatccccttaatacccttaaaattactatcaagatgtgatgtggtaggggggaggttccatcgaagctttgcaccaggtggtagctaaggcatgtaggtggcacagatagagggtgaggcccaatct

SEQ ID NO: 52908 - DNA, 414 bp, Zea Mays
cgcagtgcggtctgatacggcgatgcagtagtgctaaccttgtcgttgccgttttatagaaagataataaagagcagtacagttgctgcgacggcgatgcttgagagcacaaaagcgtttccgtcacgtccgaaggaacctttttattggttccgttttagttttgttgagaggtgcagacgtgcaggtgtgaccgtgtgacgtagcagccttcctaccgaagccgtctgcgtgtccgattgctgtcgggcaccgggacgttcgccaacggaaaatacaccgcatgctgctgctgaactgtacacccccactattcagattcagacgatggaggtggaacgaggcgtgcagaagcagaagctccgcctccgcacgcgagagcccccacgccccccgtcgacgtccgaccatccg

SEQ ID NO: 52909 - DNA, 421 bp, Zea Mays
ggcggtgccaggaagaagctctatggcaaactcaacttttcgctctggtggcatgcctgttaagtcctttgggaacacatctgggaactcggacacaaccttgataatctcaagtggatctgcttcactgctatcaacagtcatatgataacaacttcctttcttcggctcaggcgggactaacttggtcaccacttcctctcctagtggggacatcaacttgattgtcctcttatcacaactgataactgcctgatacttatctagccaattcatccgtaggatgacatctattccctgagtacccattactatgagattagcaagaaacgctatcccccttatttccacacttacattcaagcaaatgctatcgactcgaattctaccaccggctgagtcaatttgaatgggtgttgac

SEQ ID NO: 52910 - DNA, 960 bp, Zea Mays
gtccgaccttgtgccgcggaccgtccgtgcctccatagggagccactagtaagaatgtgatcatcagtgacgattttctcgtgacgctggtgacttcagtcacagattgatacatttctatgaccaaatttacatcttcgtcaacaattacaaatgatgaagattagacttgaatattaatgacgaaaatgaaaggaatgtcatagacacaaagtttggacgcaacaagttcgtcacaaattagatttgatatcgtcaccgctaatttgctttgatcggctgacgttatgatgaaataaattggtcacggatgagttttagtaaaaaacgccccacgtgtacacaccacttgacggcgtgggatccttggcctacatgggccccagttttttggtaaagtgggacacagcccccgcctggcgacgcggccccggcccaccaactggaagcggcatatgtttatttggcaaaaaaaacttgcgcccgtggagcttcgaaccaaagacatgcgccttgcttcaaatcaatgttaccaccagactactcacttgttcttgtaaataaagaaagttagagtgcataagttggtcagttgggcctaatcagaacagaatcattagcgtagtacctgttcccatctggcgttctgttaacaggcgttcccagccgccattctgcgatctgcatggctgttctgcttctgccttctgcgatctgcacttctacgttctatgattgacgatctcagtctcggccctcaggttacggcacacaacgacgccggcgtcggtcgtccgcttgatcggcaactgggtagcgtcgcagcaaacgagcgatcttgtcgcctgatccattgatccattggtcagttagaagaacagcgtcgtcgtgaaaacagcgagggcagagaagcttcgggcgtggcaaagcagcggcgttgtgcgcagagctacgatgggc

SEQ ID NO: 52911 - DNA, 1036 bp, Zea Mays
gccgaattctacctatctcggcccaactacctctcagtcggcccaacccatttccacccaccgcgcgcgcctggttctttctcttttctcgctgactggtgggccatattcgccagagctgtgatggcgtccgcctttggggtgatagctggtggggcctccttgccagaccgtattctccgccgtaacaaccaggagaattccgcgcgtgatcctcgccgataggttcgccagtcgaattccccccctcgcgcggacttgtccgtggtgtataaaagtcaagctccgcgacacccttgacccaacatcgaaacccggttggcttctcaggggcggataagggagaagcatcgctgtcgtgggggaactcacgattggtccgtcgtccacgcctggtgtggtgcacgtgaccttcaccaggattgaaggaaggtccgccacagtatcgcgggtggtatttgcctctgccacttcgggaattcttcaccggagtcccctattgacgtccgcgccgccgcttaccgtcgtcgtgtcagtacgcagggaattgtggggtaagcacccatccatcctattcgttttgcatggtgcgtcgtgtagcatcgatcggatcgaggttttgtgtgtcatgccggtgatccacgcagtccggccatggcgccgccagccgtggttcctggggaagaagatatcactaccgttgatctctctgcgaatggctaggattagatctaggtgagggtgttcttccgccgtcgatttggtagcgaacgggcaagatcgtgctatcggatacctcttttgtatattaaatctggatccttgatccatcaatggacgatcgtgatcgactcggggttgcttttgctccgggccgtagatttgtgtttgggcggtcctgcgctgtccgcggattcataatacaccagatctaatctgaaccatcgggcgctgatccatcagcttagatcctagcataccccttcggtctgtcgatttatcaaaagagcccctctgttatttggtattcaacccg

SEQ ID NO: 52912 - DNA, 674 bp, Zea Mays
ggcaggcagattaatgactgatgacacgtatctggacaagtgacagcatggccgatggcccacagcccacatgaggcagtgaattattaggggggcgtcaccacgtcaggtcaggtttgcatgcattgcaacgtggcgtctctgcagggggtgggacatgcatgcattgcatgatgttcatgaatcatatgaaccatgcatgattcgactgactccaaccgtatcagcatcttcttctgttttggtctctgttaagaaaaaaaataaaatgactactgattctgcgtgtcatggtgttctttgaaaagttgctggcgcgaacacaaacacgctaaagtccatccatccgtgcgtccattccatgcacacgacatggcttcaatttcgcgtaacgcatgcatgactagggccgttggaatacctgcctcgtgagcgtgcatgcgctgccaaatgtggcggtaacctgctgctagctgctttcgtgtctacaaacagcctactccgtgtgcagcgacatacgtgcggccgggcagatgagtggggcattggcagcctgcaaactggatcgggaagagacaaaaaaaagttaggctcgggatgcatgatgcatgcccgacttgattacccgaggacgccttaacccaaccggccaaccttggtacggacggacacgg

SEQ ID NO: 52913 - DNA, 1774 bp, Zea Mays
acgagtcatcgaaggactccttttttgtctcctggatgcatataatgtcataattggtttccataatgctattccgcagcgagttccacttggtgttagagttaattcctctaatgttgtgagacaaaattttcagggaccaatgcatattctgaggaggattagccatagggaacagtaatcatttcgttaaaagccacaagtgcgcatagcatacactgacagaggtccaagaagaaatatgatcgaagacaggtatatccagaagaccagctaagattcgaagattgcatgaaaaagctccccaagagaatcaaatgtgaagtttcccataaagaccataagaacagaccacatgaatcccacacattataaacattcatgccgacaacccaagagccataagctggaacagaggttgttgtgtcagacaaaaagggcgccacaagcgcatcaccagaaagagttgttttgttgttatacataagttgcaccaaaagttttccaccatcacgggcacaattaaaactgccaggcccaagggaaaaggcaataagccttacttcccagccggggcacatgacccctcatcgtcttcagcgtcagaatcatccctctgaactttaggcttcctttgcatatcagtcctgctgctagaggaagcacttggcctttgaatggcaatgctggaagtcctggagctgttcagggcataacttcgaaggatcaactttgcagaattcagctcccagcttcttgataatcttgtgataaatggagggtggagagatccgagcacaacaggagcattttttcccaatcccagagcatcttttaaaacccctagccttctctcgaagtctggcactccttctgacctcagtgtcgaccaagattgactgtttcttcctcttgacgggtttagcaggcaaaggagactgaggttccacatgggagtcctgactaggagggggcaggcacttggagggaatcttgatcgagacagtttccatgctgggctcaacgaaggcagagatagcaccggacaataaaaatttcttggcccattcaaaagagtccggcctcaacagtaggcccatgaagaaagcatcccacacctttgggactggaactaattctgagttggtggggaacaagtcagcccaagaagaaaggcgttttctagccaggtaatcttcatatgcaggatcatggttgggctgctccaagtgttgcatgaagcccacattgatgttttcttccacttgcatgttctcctccccctggtcgttgtttccctccaaaagcatacccgctgggggaaaggctggcaaagcaagaactgcatccacaggttctggggcttccacctgagggaagtggacctcttgtgggataatgatgtcattgaagagacccacagattcatatcagagggcagatcttcaaggcctgagagctgataactgaattggtcctccacattattatcatttggcactggctcaggaggttgaacttgttgaactggccagacatcccaaccatcatcagcgttattagcattgacttcttcctcttcaatccctcccatggggggatattaatatcaaattgaaaattggccacaggctgccccatcccaaagtactccataggaagctgatgaccatcatgaggataagggggcacaaggtcttcatcttgcagttgagcaccaagcataagctactggacaatgtcacactgaactatacaggagactccctgaaat

SEQ ID NO: 52914 - DNA, 307 bp, Zea Mays
gagcaacaagttcctgacaacccggaggctactgaagtatggcgaatgtatttcgatggctcgctgaaactgcagggagcaggcgcagaaattctcttcattgcccctggaggtgaacaactcaagtacgctcttcagctattattcccagcatcaaataatgcagcagaatatgaggctctgatccatgggttgaacatcgccatatcactaggcattaagaggatgatggtatacggagattcactagtggtcataagtcagataaataaagattgagattgctcgactgattccatgggcaaat

SEQ ID NO: 52915 - DNA, 416 bp, Zea Mays
caagaagccaattagactcgtagtgttcaagcatgcacttagaaccagttgtttgagtcactcttatctttgatcagctgacttgtctagtttattaaattgcatctgaatttaaactcatgaagtttatttggctttcaaattgacacactgtgacattgaaggcacaacttttgaggttcttattttgtggactataaaaaactgatttaatcttgcaagctgtttaatacaaaccttatacttatcactttctttctagttgtgggatagctgtgcttgaatgttgtaccatttgtgttttgtaattacatgactcatggtggatgtgagatggcaataagatatgattatctcagccaagcttgtagtgggtgatttcgtcttgaacgtaattagtgcgtatacccctaagc

SEQ ID NO: 52916 - DNA, 389 bp, Zea Mays
agagatggttttaacagatgagttgttgcaacagcttgagcaggaggatgatcaataggggttgtgttaccaggtttcaacacatgctttatcgggtactgttgggttgcagaatatgagaattcgagcagtagtgcagaagcaaatcatggtaatgttggttgattctggtagttccactaccttcattagtgaacatatggttcagaagttggcattacctacacatccattttcaccagtgactgaaaatggcaaatggagcttctatgaactgccataaaatggttaagaatgtggaatggtgggcaaatggtcacttctatcatactgatatgagagtcttacccattagtgcttttgatgcaatcttggggtatgactggcta

SEQ ID NO: 52917 - DNA, 587 bp, Zea Mays
gtgatggaggaagagcgattgaacacagtaatttagtcagccagataccagcagaccttgaggcgctatcatgataagactatacaacatcgatcctttgtagtgggagacttgatccttcgccgaattctaacgggggaaggacgacacaagttgtcaccactatgggaggggccattcattatatcggaggtcactcagctaggatcatattggcttactcaaatggatggtacgaaagtggggattcatggaacatagagcatcttagaaagttttacccttagcaagacctcaaaagctactctataatggaagaatacatcatcaataaagttttcattttcaagggcattcaaactgttaactatcacttgacatcgattcgattggacctgggatcaacacgcttactcgacctggggtgaccactataccctactaacggagcaatcggcttaagtcggcgacgacttaagacggtgcaacatgctcgcgcttactcgatttagggtgaccactataccctactaacagagcaatcggcttaagtcggcgacgacttaagacagtgcaacatgctcgcg

SEQ ID NO: 52918 - DNA, 672 bp, Zea Mays
ggagaatattggactgatctccaccaagatggcccaacaaccatcttgggcctttgatccatgccctgatcggggacgcccaaccctacatggttggtggccctcatcacattggcctataaataaaggtgtggagatcgacggctcaaagcacgccattagcctgagccctgccgctagttttcaccgtcaccaatgtcactttcctgaccgtcggcgccctagcacagatcttcaccgacgaacatgatggcgaccagatcaaatctagcatcttcaccatgcccacaatacccaacgaaggtataacctgttttatgggttgagatctagtggttacggcacacgaattacgtacataaacaaagatcacccatgcaccccaatgatctaacacacgtgtctccaaagctacccgcacgcgctatggatttgattctctgcctcgtcctcgatgagtttggtcatcattccgatggccacaatgccaattgggagcttcagttctttgagttgtaggttgcctgcgtctgctacgtgcctaggcccctatgaagcgtcatgccgacaaggcgcattctgaaccaaggatggcaatgggtgtggatggtgcgggtggagcaaacattcacccatgttgacacccggcacatgaaatcacacacgcacctg

SEQ ID NO: 52919 - DNA, 551 bp, Zea Mays
tagacacctagtctcttccctcgtaacgtatacacatctctacacagtcataccttcgacatcttttcgcacctgtcaaactcgccgatggccggtagtggtactggtaccactgcgctgcccttgcgcacgaatcagagccaatgctgttcactgctcactgctcacggacacggtcacggagctctgctctccatcctattcaaatgcatctctctggtcgatggcgcgctactacggaaagcagatgcgagagtgccgtgagtgactgccgtccgtccgtccgtccgagtggtactactaggcactagcactccgaaaaggtcaaaaggtgaaagtgaaaccgatggctgtgtccgcgtttggagcaaaaaggtcgatatgacgttcagggttgagtcgacgctttgggacggacggacggacggaaacggaaggcacatcggaaaagcagggcgcgagtgatcggagaaagaatcgtgccgttccttccgggtgagagcatgggaccggacacactcactccggtcaagcaatcccgtgacttctcc

SEQ ID NO: 52920 - DNA, 706 bp, Zea Mays
acggtgttcttgattgatttgggggaaatcccaaatcggagctctctagtggatgctttgagacacgagtgggggcactgggtgcttgaatacctagcggagctgagggcacactcaatttataggattcatgagcggtggcggctaatttggggaagatgcgtggcggccggagtgggggaagagtttctggttgctcagtcgtggcgcttgccggtgcaatagctcttgaagtggtgaatccagatgcgccacgattactacagcatggtaaagaactacggtgtggcatatttgggatcgtcggcgtatcacggcgacaccgatgatccggccacgttgtgtggctatgggtgcggttgataagcttcaacccgcgatcaaatccactccccttctgatcttttcaccctcccggtattatcctgcctgagttctacacgaatcactgcaatcagcgcgaatccttgcgcggaggtcgccggcagcgaagttcactgaatctgatcctatccagtcactgtaccattggaaccggtcattagagcgcctgacagagcagattaaaggccttggttctccaatttttgtgtgataacttgataatccttctgtaacaaagttgttgttctatatatcaactacaattcaactacagagaccttgctcatttacttactccctcgagctagaatcgaatccaaag

SEQ ID NO: 52921 - DNA, 1206 bp, Zea Mays
agaaagtaatgttgtccatgaacccaccacaggaatggaagtgacgggcgatgccataccgaaagcactactttgcatgacctagggaggggcccaccatgagaaccaaaggactttttctccctctactttctctctctaagagagatgtcaatgtaaggcctaccccttgagatataaaagggaaggcccctcttcctctaacacgggtacaagatgtaacacattccattgcaatactacgatcaacactacactggagtagggctctggcctgagccagtgtaacccccgtgtcccaagttcatcattcgagtcctagacattcaccattcggagttagtccgcgctaccgtcccccacgtaaaacaaatcttattgtcccccagtttccaaaaacacgataatgatgaactacctcattcttcaaaaaacacgttgcctcgtggcctttggaccttctctcactttgactctagaaacgaccaaggttccatggacattgggacaccatggccctgaggaacattgggttatgtcgggcactcgagagccatcggaccttatagggtgtgtcagcattcagaaaatatcataccttcaactgctaccaagacatgtcatggatcttgatgcaaaagatagacatctaggaccacagcagagaggtcattgctagtggaccccgacactgagtatgtatgaacaaaggtatcccctaaagtagacttcatgaccacataccatagcatacaagttataagccctcggggccctcgtgtctcgtgcacctacctatataaaccacatgttctcttgtgtcccaaggcatctcgcgctatactaaagtaagtattagaagactcctcgatgttttaccgaggcctcgaagagtcgacactctttattaatcctcgttggagcaccccacgcaagggtatcactctcccttgttttatgcaaggatcaagtgctatgtcagatgcacctcatctggtgcacaccaaacacaccaatgtaactttgaaacactaaatgacacctcatccgctgaagcatcatacacatccgatgccactgtagactctccaattcactaattttaatagttttttgagttgggttttctactaaactttttgtgggctcccttgagtttgtttaaaactagtttttataagtgtgcatcaccacacctaactagac

SEQ ID NO: 52922 - DNA, 692 bp, Zea Mays
cgaatgggtatggatatgggatgaatcttatacccatgatgggtaagggtatggggatcgagatgagtatggctttatagggatgggtatgcggcattaccttcaccttcgatgttaaccactgtctcctaactacacacatgcacaccacaagccgagagacatgtttgtacatacacaataatgttccggctagtccatacaactcaacccaagacagtactcattgacaatcactgatcacaacccgaacaacaagggcacatgtcaaccttgtgttcgaaaagttcacttgatacatcactaggacatggaagaggtttagttttttgttttaacttctcacccttttccaaaagacaaatgtgaggggagtgatggtcaacatcatcggtcatgttgttgaagagccttggtgtagaggatggcttttgaatagacacagttgcaatcttatcatcctcttcacttgactccttagttgagtcccattcatgtctgatgtgtgtgtctcccttagtattgtacgtatacctcttcttgtgctcatgtttgctctctttgttgtagtccttcttgtagttattttccttcttttcttaaggacacttggcaatgaaatgctcaatgcttccacaattgtagcgagttcgcttttttctttgtttgggaagtttcttgatacaactttg

SEQ ID NO: 52923 - DNA, 783 bp, Zea Mays
taatatttgtcaactcaaagtgtggaaactctatgtgaaagttgttctcagagccaaacataatagaaaacagagttgtagacttgcctaggataatgtcgtagaaaggctcaagagtcagatctaattatttctccaatagccccatcatactaaaggttttagtgaagagagtatttagattgctcctatcatcaacaaggacacgatgaatcatgtgtcgcccactattggattcaagatcagagaatacctacatggccaaggaacatgattagggtgatcaaatctatcaaaagtaattggtaccttagactagcggaggaaccctagcgtgtttggctccacaacataaatgtacatcgtgctctggcttctgttttattttggactcatacgagtcgaggccaccaatgatatacatgatatcttgcattggctctagaaacttgctcctagtgtcgtcgttttgagttgttgttcctagtggtattggagctttctgactttgggtctttgggtttacaccctttcaggagtttctacacaaaatccctgacatgtcagcactcttgtgttgtatgttggctatatggatggtatatgcatctcccctccttgatgctttggaacttgttgaagcccacctccttgatggttgcattacctcggcgttgtcgagttccccacttgaccatgttgacttgacgatcggatctacgcttctgggctttcttctaattgaccttatggttggctttgactttatccttttgtgatgag

SEQ ID NO: 52924 - DNA, 756 bp, Zea Mays
acatatagcactagtcttattatagaaaagtgcaacattattgaaattgtcacatatcataccctttttaagtgtagctatcgtccaaataatttgggaccaacaacaaacaaccaactaaataatcgataacagtgcaaggaggtaagggtgttggagcatccctagcctccacgctagatccgtccttactaaactaggtctatgaaccataatgtcaaacaaatgaaagcataaatcgaaaaaaggagaggaatgataaactaaacctaatatgaatcaacaaacgaatcaacaaaaaaaatactctccctattctaatttataagttattttcaatggaaagcatcaaattaacaaaagacaattgcatgaagaaacgtcaaagacatcagattatagccaatggggaacaagagcagcaaccattagttcatgtaaataataaaatgacaaaataaatagaagtaaacttaaaaggtgtgcatgtacaaactaacgtgactatgtgagtatacaatagctcatcaacaactagatatggtagcgtcgggatctctaaatagtgtacatatttttcctaataatggtaaactaactagttgtgcttcataacatattgatgttggtttagactaaaattattattttgtaaaacaagtcacttatatattggtatcacgagctaactaaaaacaaaatagtcttcttttcctttgatgtggtgggcctgaccttttctagtgctaatgtttt

SEQ ID NO: 52925 - DNA, 745 bp, Zea Mays
gtgatgtctgtgtctgctacagctgctaagggcaaccgataggtgagctcattaagctttcacaacattattttaaggcagtttacatcctggcgaggatgcttcgtgatttcggcggactagcaagggtcctcttccgtgaggtgagtccctgcccttttcttttcttgtgctgttcttagatgcttgtgtgcccatgttccggtgcctatccattaacctgatgttctgtattatttgctttgttgtttcgtgttttccagtttagttgctatgaggcttgtgtgcggctatagaatattctagatggaaatagcagcggtgtgattggaagaacagacatttggcttgcacgattatcaaatgccactatagaatatttgtaggtcgagataatacagatgtgaccggtaaaacaggcaggcatttaacttgcaagatcatatgatggcttaggaattcatgtgctgcactgctgcatttgttgatggcatagtcgaagctttaagctggacctgctggcctgcctcatgcttgtgtgggcatggctcagcctggtgtctgccctttgagctcatgacgattgtctaatttctattgtttggcaacagaacaagtttggtggcctcccaggccaaggtgtctggttcctgtttcatgctggcccttctggttcggtaacctttgtctttctggctcctaccctgttcttatgcagtcctgcttgtgcttctgtgtaaccttc

SEQ ID NO: 52926 - DNA, 630 bp, Zea Mays
acatcaatctccattagagctgacaatcattcccaaaacacttgtgcaacaccttcaagccattaagagagattcgaacgccccatttgtgtagaggtagtcattttagagagtgttctcttgtgatatgtgttcttggtgttgtgttgctgtgtttcttgttgatgtgtgggtgatactctattgtaaaggctagcaagagtctccaagtttgtggagtgccttggagagactctgtatcttattttacaggatctaagggctcatgcttgaacgatgggatcgcttgagaaggtcaagatataacccgtcctttaggatacctcaattgggatgtaggttctttggaaccaaaccacggtaaaaaaattgtgtgtcttcgtatgttgtttacttttttgcagtgatttgttcgtctctcccccttctaagttctcttattttagttctcattctaagtcacttaagttgctctccaaattaattccacatctataagagcaagaagtgcaagagaactcttgtctctcactcattcatattctctctcattctaactattgatcgagatcaagttttctttaagtattgatattttaggttgttccctattcaccccctctaggcgac

SEQ ID NO: 52927 - DNA, 672 bp, Zea Mays
cttctgtggaaacgaaggtacaagatgtgtcgaagtagattatgagcccttcttcgtcttctgctgctgaggtttcagaaattttgaaggtaatgactgaacctttcccatttgcactactaagtcctctgaggttggatctgactagcctcttgcagtcaaaggaaatcgcttcggttgtcgaggggaaaaacggggggcaaaagaagcagcgtatgatgaatgtaatggaagctattgaacagacctcggcccctacttcagcagataaagctactatacccgccgatgctaaccgctgtagctgaagccgagaatcttgcaaccacactatcagaaatcgatagacttatttcggatttgattgttgagaaagatgtagccgcagtgccttctgataaagggaagagaattgaagagacctcttcggaagatatgaatttcgaccttcggcacctgggcggccaacaactttccgaagaggacatatcagaattgaaggaatttgccatatcctgcggctaccaacctagataaatgctcttcagcggggttgatgaagagattttgggatgcattcgcaaccatgccggggctaagattataagcactttatctaaaagcattggattccataagctagaaaaggatattagctgctatagacgacat

SEQ ID NO: 52928 - DNA, 428 bp, Zea Mays
atatatactcgttggtggactgaccttggacaagtatgtcggcgacgacgggtggaatgggggacggggtccaagccccagtcagcctcatgccatcacctcctccgcgaccgtggcaggtgggtatggcttcttctctggtgtgggaactgtcgatgcgaagggttcggcactgatgggactctgatgggacgttgccatgcccccgatatagtcgctgcaaacaatgttatagggtgattgcattctaggaaaggacgacacttgatgcaaacgatgttattaatcttactccatgcattcgagataaaatttctcataatcatcctgcattatgtagatgttagtatatgaaaaccctttgctgaaaaacagagagctttcacctgtcaaatcaaagaacaattctgacctctgagagctttcta

SEQ ID NO: 52929 - DNA, 411 bp, Zea Mays
gttgccttcggcccaggagagtactcttcaaatcagcctatgatccctttctatttggttccatttgttttgatccagctgagagcatttggaagacctaggcccctcagaaatgcaaatttttcatttggttgacaactttgaactaatgttagacaacagactgtttggcccggagggggctagatcatcctgataaatgtcctctctgtgaccagcaggatgaaacaatccaacatatccttgtgtcttgtgtttttgctagagaaacttggacaaaggtcctgatggttggtttactgcctctggctccagatagtacatatgaagtgtttcagaactggtgaagggcatcagaattacaagtgctcaaaactcaaaaaaaggctttaattccttggtgattctagt

SEQ ID NO: 52930 - DNA, 294 bp, Zea Mays
tatattacaatatatattcctatggtgctttgtttggcacagaattagattcaaacaagctctatcaacattttttatcactacaggtcgtgaacagtctagaaactaagagaatgctttaaaactaaaacatttatgtataaggagaatgacaaaacattcaaggtttacaagcaagtttctaaaacattagctttgttactcaaggaagaatgccagtctcgcgaatcgcagagtatgctgggccacaatttagctcaaattccatcaaaacctgacagtttattgtttgtg

SEQ ID NO: 52931 - DNA, 832 bp, Zea Mays
gtggggatacgcttgagaccgtatgttgtggcatgccgtcatgtcgatagggacctctcggcaccccttcggtatgcctcacccatggtccggacatggtttggtgatgaactgatgaccggtcttttcatggctgacgtggatcaatagtactagatcgaagcctctgcctcgctgagttgctcggtgaggacttggtcgacagctccgcctcgtagggttgctcggtagagagttggtcgtctgctcctcctcgcagggttgctcacccaaggcttgttcgtacgctctgcctcgcagggttgctcagtagagacttggttgtacgctccacctcgcggggttgctcggaagaggcttggtcagcaaatgggtcgttaagaggcttgggcctatattgagcacccagttcttgggtacccgacaacagtctcaagctttcacgtaactccttggagttgcacgaatgtttttgtttgagatttttagttctgggtgcgcacacgcatctgctagatgtattcaccgaacccctgagtaatacatgaggattgcttaagggtttattcggtatgcatgcagtttagggatggacccttcctgcgatggtcgtcacgtgctgagcgtgcgtccatgtttttcagctttttattgaggaccgaatttccaggtgcgtgcaagcgcatctgctagatgtagcccccgagccctcgagtaatccatgaggattgcttggggtttattcgatatgcatgtattttagggacagaatcttcctgagatggtcgtcaatcgatgagcgtgcatccatgttttccgcctttttattgag

SEQ ID NO: 52932 - DNA, 803 bp, Zea Mays
gccgacctagtacaaagatgtgaggcatgtcaatttttggccgagaagcagcgtctgctgacgctgcagttacaaactattcaagtcacctggccctttgcatgttgtggactggacatgatcgggccattcaagaaagctcagggaggatacacacatatgctggtagccattgacagattcacaaaatggatagagtacaaaccgatcgcgaccctgacttcagccaaagttgtagagttcatctaggaaatcatctttatattcgagatacccaatagcatcatcatagacctgggatcgaacttcactagcgcagaattctttgatttctgggaacagaaatgcatccagctcaaatatgcctcaatagcgcaccctagagctaatgggcaagtggagagagcaaatggaatgatattagaggcgcttagaaagaaagtctttgacaaaactgaaaagcttccaagaaaatggatcagagaactgccttatgtagccttgagtttgcgaacccaacccagccaagccttgtaggaaaatactcctatctttatggtgtttgggtcagaggcagtattgctaggagacttggctttcggggcacacaaattaaccttcaaaaacatcacagaggcagaagcaacccgacttgaagagattgatgtgctagaagatgaacgtttgaatgttgtcattcagtcggctagatatcagcagaccctaggtgctaccatgacaatgatgtacgacactggccattcacagtaggagacctggtgctctgtcgcatatagtacaag

SEQ ID NO: 52933 - DNA, 480 bp, Zea Mays
gccgaaaagtccacaggccgaagcgaaatcggtccgcggggggttggttacggatacagtaccaaaaagcaaacaacctgagctgagagcctgagaccgtgccgttcagaaacgagtaggagtagacgtccacggacacggagagcatatggttggttgttgctgtgggggaaaaacacgacgtagacgtagaaaacgagcgccccctttggcacgatcacaaagttggggcctagcagctttggttgtattgtgtgtatctatcttccattgcaccccatcgtccgtcgtctgtctgatttgacttgctcttggctggtttttctccgtagtggatacagtgcgcgtcagctttggacaaaagtacagcccggtcgccttcctaatgctttcagagaatcgaccgcccccaccgagctttgacgacctgcgaaagcagtggctactggctaggctagcagtcggagttcagcgccaaac

SEQ ID NO: 52934 - DNA, 424 bp, Zea Mays
cttctctatcctgtgggtggtatgcactggcaagaaatgagcagtcttggttaacctgtccacgataacccaaattgaatcatggtgcctggaggtattgggtaatcccactatgaagtccatgcaaatgtcctcccatttccaggatggtatgggaaggggttgcaaagggcctgctgccttcaaatgactggctttgatcctctagtaggtgtcacactcggatatgtacttggcaatttcccttttcattctagtccaccaatataaagatttgagatcatggtacatcttgttgctaccagggtgcatagagaatttggaaaggtgagcttcatctagtatcttctttctaagctcagggtccttgggcacaaccaatcgatctccaaaccatagaattcccttgctgtcctgtcggaaa

SEQ ID NO: 52935 - DNA, 659 bp, Zea Mays
tcaccagtgagtcttggacgtccatgttcgcctattcctcctccttcgattgtgccaggtaattgccaacatacttcgttgttccgtgggattgcgtttctccggtgaggtccaccgccgtgcgcgtcacgtggccggagggagaacaggagaagggagacgacgttctgaccgttggatcatcattggtcagttgcaatgagagagcgtgggtgttagcgtattagccgtagatcccagagtatacggtggagattggatccacagaacgattcggcctgggcgattctaggcgttggatcgcgatcgtacgggtccggggcaatcacgggggattttaaatctgaaccgtagaatcaggatcatgcagtcatcatgccataccggtttgtgttgtcatacgggctaatctgtgtcgtgcgctgaagatctgacggccctgattacaggataccccttcgtgggtcagaatagcataaaagcccctggaaattagaaaatagaacccgccgtccatcagcgttattctctaggtgtgagaaaacttacccactagcccctaaactccctagaaatcgtcgcctagtctagtaaatagaaaaataaaggaaaagaaaatagaaatctatttttaatataaaaataatggctagaatttg

SEQ ID NO: 52936 - DNA, 1106 bp, Zea Mays
gtggagcgacggagaaccgagctccggtgaactcgtaccggccacgacacttaatgaccgatgctataatttggttgagacctaattcaacacctaacaagtgtttcccctcgatcaattgcatagctcgagcactaaatcaccctgttcacagagacaacgtagacaacggatgaacacgggtgttcccgatgatctagcgcggtttagctcaattgaacgggtcgaggagcattagtggtatgtaagagtgctgaaacaagagagtagagggcaagatcggacctgaattgcactgaccatagtgagagcttgttcacagtggcggaaaacagatatgggggaactgagcaattcgtgggctctggtgagtaattggaggcacgagcgggtggattggatgctagaatacctaacggagtcgagggtgtgctcaatttatagggatcttgagcggtggccggtgaatttgaactcgcgcggtggcggtcggagaggaggaggtgcactggcgcacgcgattggtggccattacagtggcaacctcaccggcgatcactggataggctatcatgagtcacgatggtgtggttaaagtgccgaggcacgtggcacaaggccgcgtagtgtctaactccggcgagggtagatccaaagcgaccggggctaagcggacacggcggccggagtgaacagtggccgaagttcatccactggggatatttcgtactccctcagtgttatccagccgtgccgagcacgaatcactgtggcggcgtgaatccacgcgtgggggtcgctgacgatgagtttactgagatagcgatctgatctggttactgtaccatcacgtagttccttcagtcgatctgatagagcatgtttggggtcgatttgctccatattttatgtagtgacccgaccaacactctgcatcaaagttgatgcctaacaaactagctttaactttgttacaatgttcaccatcaaatagacacaggatcttactcaaaatcaagctctaagttcatccaacttcactgtttctgaaaattcagacatagggctgactgacagcacaactttgagcctagttttctcccaac

SEQ ID NO: 52937 - DNA, 507 bp, Zea Mays
gtcagaagcctcagagacagtccgttgagcggtaggacttcatacgaaaggaggtccggaagctgctggatgtcggcttcatcgaagaggttcatcacctagtgtggctagccaatctagtcattgttccaaaggcaaacgggaagcttcgaatgtgcatcgactacaccagccttaataaagcttgtcctaaggacccgtatccacttccacgtatagatcaaatcgtggattctacctccgggtgcgacctcttgtccttcttagatgcttactctggtttccatcaaatccagatgtctagggaagataggaagcataccgcttttgtaacagtggatgggctttactgctatgtcgtaatgccttacggtctgaaaaacgccttgtcgacatttgtgcgggcgatgagtaagacttttggggatctgattagggacaaggtggaagtgtatgtcgatgacataatagtcaagactaagagagggttgaccctagtggaagact

SEQ ID NO: 52938 - DNA, 738 bp, Zea Mays
agaagattgatgtttgccaggacaactgtatgcttttttggaaggaacatggcagagagcagaaatgcttaaaatgtgggaagtcgaggtacgtggatcttgtaaatgaagatggtgagaaggtggtgacaaaggttgcacataaacagcttcggtacatgcctctcactcctagagtgaaacgtttgtttctctcgaggaagatcgctatgcacatgaggtggcataaagattgaacggacagacaagatgggttaatggtgcacccgtcagatggtgatgcatggaagactcttgacaactttgatccagattttgccagcgatgcaagaaacgttcgtatcggcttggcaactgatggtttcacgccgttcaatatgaccgctgcgtcgtattcatgttggcctgtcattgccatattgtacaaccttccacctgctctttgcatgaaatatgagtttatgttcctatgtcttgttatacctgggcctgagcatcctggcgtatgcctcaatgtgatgcttcaaccactgattgaagagttaaagaagctatggcaaggtgtggaagcctatgactgcttcaagaagcagaaattcaatcttcgtgttgcatatctgttcttggttcatgattttatggtgtacggtattttctctagatggagcgtgcatggtagtttgacgtgtccttattgtgccaaagatacagattgttttcgtcttagtgctggtggca

SEQ ID NO: 52939 - DNA, 498 bp, Zea Mays
cactggtgccacacattttttgtttctacatcttgggtagaagcacataacatccccatggaaccaatgattccacccttaagagttgattcattttggggaaaagttcagtccgataggatttgtccaaatctaaagattgaaataagggggatagacttccccgctaacctactagtaatgggtactcaagggttagatgtcatcctagggttgaattggctacatagaaaccaaaccactattagttgtgacaagagaacagtcaagttggtgtccccatccggaaaggaagtagtaaccaaactgtacttgcctaaactacaaggagcctgtcaccatttgtcagtagatgacaaggaggccaatccaattgaggatattagaattgtgtcggaattccttgacgtgttccctgaagagttaccaggcatgccacatgaaaggaaagttgaatttgccatagagcttatcccaggcactgcccctatatccaag

SEQ ID NO: 52940 - DNA, 581 bp, Zea Mays
ggttattcctcttgtctaaactacctccagatacatatagtctatccactcagctacgacaaaatgtactagctcttaaaattttgatcccacgaccacacactctccataaagttattttgccttgatgcacccttcacgatgatgccacgtgccgcttctgattccctcaaaaccttaccattggattttgaggcccaaatccaacaaaatctaatgaaacccatgatctgttgcactatgtggatttgaggctcaaccactgaaacaccagtgggttacgtactccatacaggccccccatgtcgagacatgtatctcgccggtccgcaaccgcatcgatgacatgatcctctcctctatgtccttgtgcctgttagtgtccctagttgtcaaccaccataactagtcacctggcttctctagaccgtcgatcaagacccaatgctcgtccttttccgtcccttgtccatcggcatgaacctgcatgaccttcacctttgcgccgaccgccgtctctagactacacacatgtgcaccataagtgaagatacttgttgcacaaacacactcacacccca

SEQ ID NO: 52941 - DNA, 553 bp, Zea Mays
aataatatctgggtcgggcgggttagggttcgctttaccgatattttttttgttaggtaaagacatcggctgctgactttgagatactccaatcgttaaaacgtacggcgggtatctatctaattaatccgttacaacagagcagggaactcgatcgaattattgtcagaaacggcatcgcgtctcctctacagctggagcgaaccgtcgcggtctgggcattacggggagaagccgttccatacttccatcgcggagcctctcctcctgggctacggctaaccatggcaggcaggcagcctcggcctcgaaaaagaccccgacggagacgctcctcctcctcccctggcctaactcagctccgaaacttaaggaggacgcgtgagacgagatgcctcacgaacctggaaaacgtagcctgcgtgcgtgtgcagtgcagacccgtgctagctcgctcgctatgcgtcttgcagttacccgacccgaaagttgccagcctagggtgctgcttatgcaaatctgcagaggtcgcatcgttctcatgcaccccaac

SEQ ID NO: 52942 - DNA, 324 bp, Zea Mays
ctttaggggacgaaatttatgggacgttgctggagacaatctaactacgtcagtcggcggatgcagcgtaaacaatattggtcctccttccactcatgatctacaagtcttaggtttgagtcccactcatgacctacgggacataggcctaagtcccactcatgacatacgcgcaggacatcggaaggcatcttgatgcagacgaacgcgtcaagaaggctgtgtagtcgcctgcaaccttcacgtcctcatgtggttcgtcctagtgctccagatgcagcacctccgagttatccacacgtacaagaaggaagcgccgcgttc

SEQ ID NO: 52943 - DNA, 760 bp, Zea Mays
gctcaaccaaagggaccctaaatatgattacatttcaattttctctactatattaaagcactagcttcgacggttgtctcgcatcatatttttataaataacccattatattgtttgaaatggcccacaagacacattatcttcatatcgattgcatctaatccaattcatctatccgctccccgtcctcagcgaatccgcaccccgcacgacgcgcaagcacctcagtcacccacacaatgacacaaacccatgcactctatgtcttccgttcatagcaacgaccggcatgtcaagtgggcctgcgccaaatgtatcgcgacaggagcccaacaacccatgcacgtcgctccgtaggggatgggaaagcggtgtcagcagacccgcacacgtcgcatcttccatgcatagaaacacgaggaaaatggtttcagtagctgcggggtggagccgttttactcatcctaatccacccaccaacctagctacataaactcgtattgtggccccttgagcaatagcgatggtggatctgctcaccgccggtggcctaacgctctccagttactccgactcgcctacgtcctccaaggtacgcacgtacgtacatctgattttctggctcgttgactccacgggcatcttcataggcctatccatcgaattcgcgtcgcgttcgtgggacctaatggagatcgatgctgtcgggatggaggacatcgacggttaggcacgggccacacggagggcatcaacggca

SEQ ID NO: 52944 - DNA, 1000 bp, Zea Mays
caacggaaatccaacctcgtatgcatattgactataaaaattatacgcctcgtccacgttactaaatgtcataccgactttaggtatcaatcttatatcaatattgtccggctgcgcacagaaatttaacatttactattcaatagcgtctaaatttaacatagtatatgtacaacattacaaagaagtatgtaagagaataagagtatcatatttgggagaacttacatggctttgaagaatatgaggtgtgtcctattcatgcggcccaatatgtctcatggggatgtgcttctctgcgccgaccacatctgccgtttttgtgtgctcatcgatatgtccaggtgccctcaatgctgccgggggagtaacggagacaccctctgtgtatggggcgatcgcagacgctacaggatgcatgtccattgaaatagacgtacctgctggcgtatttacagatgctacaagtggcatgtcatcgccagctccggtgctagacattttctcgccgccggcactacctctaacttccgccgccgctaaccgcctccaatacctgagataaagacgtggatgagctaaccttgtatttgtttcctcccgtaactgcgcctttatttacgcgcacgaagagcacgtatttccttatctcaaactggtgggagattttaaatgttgcatggtttacgctatcatgtctcacagcggtatgcaatcgtaaaccggtatgcacatgcaaatattcgttcccgtgattcgtggcagaaacttttccatttatgcatgagttatgcacatttccatatacctttatgcgtgcgtatattggttgcagcgtctcagccgggatacgttgctatcctatgcatggctgacgcaagctggcgtccattgggccgaacgcgacccgatcagcctcctggctgaggcttcgtccactaacggaagcccagggcttccattacctcttccctatatatatatagacacgcgctccctc

SEQ ID NO: 52945 - DNA, 685 bp, Zea Mays
ccccaaccccaatttcaacccgagccaccgcaacgccgattttccccaaattggtccgccgcatcgcaaagaacggcccgcccgtggctgggccactctggtgagttcctatccaattaaagtgttgtttccatgcctctgtgttcttgcgaagctcatggtggcatccgttcgctctaatcgaccatggtttggcgggaacatgtgctcccatgctcggtgtccgccgtgcatgtggacaggccattctctgtgcgttcggatcaaattaatgtgtgttccagggccatctcaggtcagtgaagcctcatagatagttagcttgagcagtcatcgccggccatggccggtacagacctcgtccgagatgaacgaacagcacgacgtgaccaggggtgtttttggagaagaaattgaagtctagggtcttttctgcagttgtcagcgactgttttaaatagtgccttggactctttcgggatattcaagaaggcgagggcctctgtgcaagtctgccagcgcgggcgcgggtgcgcgcacttctgctggtagtgggccgacctagactggattcggccgagtactattcacgggttttctttttctttttcctcccgagttaaaacaattctaggaaatcgtagaaaaatcctaaaattgtgaaaccaattttcctaggtttatt

SEQ ID NO: 52946 - DNA, 649 bp, Zea Mays
tgatgatagaaattggttcagagtatgtggtccagattatcattgacaatggagcgaactacaaaaggacatgtcatatggtagtcgtgaagcatccttctattgtgcgacagtcgtgtgtggcttataccataaatttgatgttcaaggagaatgatttattttagcataatattgtggttcaaagtgctaggcggatatcacgatttctttacaatcataacaagttacattccatgatgaaggaggtaatcgatgaggagttggttctgtggaatgtcaccagatttgaaatgacttatgtggagcagggtattagttgctcacatcgaaagattataatatggcacaagatcagtggaacacgcacccgcgggaatgatctttaccagagggtgcattgtatcttcgatattatttgtgaactatgaaagcgtgatatgtaatattttaactgctaaatgtattggacttgtggtaacattcaagccattttttattcaattcaattgttgtgatctaaacgcgcttttacttgcaaaaacaagaggtttagtttcacctgatctgctgttggtttatcagttctggaccgattaaccggtcatatcgacggataaatcgatgttaaactgagcggattaaaaaa

SEQ ID NO: 52947 - DNA, 504 bp, Zea Mays
caagagagcgtgactgacatgtctttggatctatcagtgtgtatatcaatgtgtaggctggtgttggctcaccgaggcatggtacctagtgtgcttcaccatttgtgaaacagcacctgatacatcacgcaggggccctcctctctacaaggcacttttcacggttttggcaagggtctacggcaataatgcggctcatgggcatgtgccacccgaaacaccgcacagcacagcacagcacggtggacgtaagaacaggacagagtcctgaacaccggatagacatagacccatgacaagtcggtggccgggggcgggcacatgtgttttacacatgcatgcagctcattagtttgttactaggtggatacctttcatctatgcacatgttcaccgtatgcaatgcaagtgcaacgatgatagattcagattagatagatagagcacgccgaaaggaatcctaaaacttccaagagcaagtcactccacaaatttgtcaccaat

SEQ ID NO: 52948 - DNA, 845 bp, Zea Mays
tggtcatcaaagtagtgacggagcttgcgagcagttagaagtactgcatacaatagtttttgaacttgaggatacttctttttagagggtcccagaacttcactgatgaaatagacgggatgttgtactggatatgcgtgtccttcctctgcctgttcgactattaatgcggtgctcaccacgtgagttgtgcaggagatgtacaacagtagattttctgccggctggtcgggcatggctcggtgtggcggctttagcactggcggtgtggtcaagaacttcttcagtgcatcaagagcttcttgagcctctgaggtacactggaacttgtccaccttcttgagcaatttgtagaatggtaggcctttttctcctaaccttgatatgaacctgcttaaagctgccatgcatcccgtaagcctctgcactttcttttgtgatcgtggtgcttccatcctcatgatagcttcgattttttccgggttagcttcgattcctcggtggctgacaatgaacccgagcaacttcccagctggcactccaaagacacatttttctggattgaacttccaccggtacctcctcaggctgttgataatgaagttttctgacctttctattttaatcaccacatcatcgacataggcttctacccgcttgccccagtgatcagctaagcatgtttgaatggctctctggtaagtcgctccagcgttcttgaggccaaacgacatggaggtatagcagaagctccaaacggggtaatgaatgcagttttttcctcgtcttcttttgccaagctgatttgatggtatccagagtagaaatccaggaatgacaacata

SEQ ID NO: 52949 - DNA, 629 bp, Zea Mays
gaactactgtacttgatgactatatgtattatatacaacaatgggtaagaaagccaacctgatgtagaacacagatttttttgtacggagtaactatttatgtagggttcatatatcaagaatcagcggtatatagtatgtttcatatatttgaatatttctcataattatatgataataaatctgggcacatgagaatttgattgtgtatagtcgttccatggcaccagaaatccagcacatgtaactttggaaggaaaaaagtgtgctatatagtgcatctgtgcatgatacaagcacttcttttattttccaaatgtatatgatatgtgccttggaaccttggagagtggggtgggggcaggcatgttaaattactgatgttctctcaaaacatgtcacatttgatttgaatgataaacataatattaatggcaaagtccattttcaccctcaaacttgcgaataatctgtttttcaatcttaaaccatgaaactgggtaacaaacaccctccaattgtcaaaacaggacaaatttagtcctcgtgttggttttgtatttttgtaaaaataataaaaatctgatttactatctaaaaattcattaataatttcttttaaatcagaa

SEQ ID NO: 52950 - DNA, 374 bp, Zea Mays
cgatggttaactcaacggatgtgactccctttgttttgatcgaactatcagtctcaacaacgcttagggtcatattggtcttgacaagttcgtcatcctgtttacctaattttctgtacaatgaataaggcattagatttacggccgcccccatctaccaacatcttagcaatcgatattccatcaatgtgagcgcacacgaagagcggctttaaatgatttaccgattcttttagcttagtgaaggcggcctctttaggaccaaattgaattgagcaacgacaaattcatcgtcgccgataatagtacaatcggtggagaatgtaatgacatttacatccatacctgagtgtcctagagtagcttcatagtcg

SEQ ID NO: 52951 - DNA, 714 bp, Zea Mays
ggaagacgtgatggccatcaccggcgcccatgcatatgatgtcgccctgggtcctcgggatggtcaggatcgttcgccagtatgtgtggatgctcatcaaggcttcggagtgcgagatgagctctctgggagtcagtgattccttgcagtattttctccgtcgccgcggctccgcaaatgaccatggtcgggagcctgcttcgcataaaagccgatgagcacctccccaaatgctccaccttcttcttcttaatgtgtatcattgttcgaatcgatgttcggggctgtggtgaggggttggtatgaatccggccatggcaccaccggcccagggttgcgccgccgccgtctccggtcgcgggaggtggaagatgacctaggaaccgttaggatctcaatggacgaccgagattagacatgtgcgtgccttttcacaagatcaaatcgggaccgttgatcctggatcaagtgggtcctattcgatctgggcgttttaaatccacgtcgtcgatctagatctgtgcggctaccgttgtttaacagttcacaggggtttagatctaatcctaggcgtaggactcagatccaacgactgtggtcgtccgatacctcttcgcgtgtatgttttactaaagaaaccctaaggaatagaatagctaagtcgcagtacctctctgtgtaaaggaccttaccagatagtcgttttcttttaaa

SEQ ID NO: 52952 - DNA, 729 bp, Zea Mays
tgaaggtcgtaggatgagtcaaatgctctcggtagctctctggtcatatcctatacagtgttggacccaaatgtattagtctaatggtgacaatagtgaaagcatcaaacaggaaaaccaaaatgttcatcaaagcagttctctagccccattattagttgcatatgaaacttcaaatagggtcgttggaccctaagctatgtctcgacgtggactatcaaatcaatctgacgtagctaggagatctctagtggctttctgcacaacatcaagccctggttgactttggtccaatgctcgttagactctagtagtcaaaccatatgccatcattgttgtttgggagacaacgaacaaattcaaatggctagtacacatggcaagtttgaaggacattagacccatgccatatggttcgatgattggcattagacagtctgacacccatgctttctgtaaagtaaaaggccaaatggctctttgcctcttaggaccttataataaatagagcttcttttgtcgtagggtagaaattgtggcatcccaacctgataaacacccaagcaagcctaagaaaatacctcccactcatctctagtgatattgattcatccaaaaagttttttgggagtgatatctagtgatttgcattgagttgttgcatctagtggcactagtaattatcttgagcagtggattcttgttactattgatggttgttgccaccta

SEQ ID NO: 52953 - DNA, 580 bp, Zea Mays
gaaattcatgaaggaattacaattgtgaagagtgccaagctatatgtgtgcaaagggaagtttgagcagtttattatgaaagaagatgagagtgtatccgatatgttcaacaggttaaatgagatagtgaatgaactcaagggacttggttttaatgtaccggatgtggatttcactcataagttccttagatcacttccagagaaatatgagaccattgtgacaatgttagtaaggagtgatctatctacaacttctccaactaaagtattgggggaaattcttactcaagatatattcaaaaagtctcaagccgatgctttaagtttggcaaagaaagtaaaaaatgaatcaattgctctcaaagctaaagcctctaaggcaattgaaaaagaagatagtaatgatgaagaaaatgaaagtgagagtgatggtgatatggctctatttgtaagggaattcaataaattcatgaagatgaagagaggtcaacctagaagaggtcaaacatcaagaagaaatgctttcaatgatagaaagtgttttgagtgtggggaacccggtcacattgccatgaatt

SEQ ID NO: 52954 - DNA, 788 bp, Zea Mays
caagaatttgcttaggattgctataacagtattgtagctggatcttagagctaaaactttgctaaagggtgatgatcatgttactgcacaaaatcgggagtaaacaaccctgtaaatcgctctatcaggtgactgaatgggctttcccatggtacagtatctgaagaagatcagattcccagctcagcttgccaccggtgatctccgccgtgattcatgtcgccggcgtcttgattcgtgctcggggtaagtggataacgtctcggggtagaaaaatatcatcgccgtcgttgagctggacaccaattcgactagccgccgtacccctcccttactcatcgtcgatcagataagatctcaccgccgtcgagccatcactgtcgttcgccgcgtgtccaaatgctttaccacgtcgtggctaaccgtgctatgcacgtccggtgatcgccggaggagcagccacggtaatagcaacattgtgcggccaccagtgactcaccccgtcttacagatcaccatccaccgctcaaattcgctgcactcatgaccgattgctataaatcaaagcctcctagagctccgtaggatcatcacgtgcccagccaccaagaattacccttagttgatcaccagcaagcgcgaattttacaattcccccaaatcggctcaaccacaccgcgaagaacatctcaccgtggctagcacaattccggttagttcataccgtcggctccctcgtttaagcatgctcatgcgtctgtgatgctcgccgacccaaccaattgaac

SEQ ID NO: 52955 - DNA, 563 bp, Zea Mays
agcttggtagaagaatggcgaggaaaaacagagggcacaaccggacttggttggaccaggggaagatgaggagtcggtcgagcacaggaaaccgagcaggtggggtgtccaggaaggagatgccatggggaagaagaggacctgggtgcggtaggattccaggagaggtactcaccgtgtagtagataagatcaaagtcgtacacaacaataaattagaagacaagagcggtggaaacgatgagggttgacgatttttccatcttcttttgttttcctttcttcctaacatacatatatgtcttggttctgaaattcatgtttgagtggggtgtaaatggattgaaaagagatgacaaggaaataagatgcatacacgtgttctcatgggtgatgtcacgtgtcgttcttgtaggtgagaagttatacgttgtccccacacaggttcgtgcccgccacacgcgtcacgatgtcaggctatagatagacttgtgcgacgcaagcttgaaagaattcaaacaaatttttaaggaaccacatttaatttcaaagattatagtttgg

SEQ ID NO: 52956 - DNA, 421 bp, Zea Mays
cttcactaagaattcctcgtcgatctcatttggcagtgttgaagccttgcttaattacatccgtccaaacggtccaagtccagtcgttgcaaacagctagcatgtggcagacgtactcctactccaaccaagttcattcccccatgttacttgctttgctatacaccatgcatatgccatctaccgctgcggtccaggagcaaaacggccaagaatgaactgaactgacgacaacgtcccaatgattggactgcggaggaagctagatagctagctaaagaagcagcagctcggcagtgcaatttgccgacgatatatggggtcgacacaaagcgcggccggtcaatgctgtggacactagctaaaagagacagatggtgcttggccaactcctcctcctcctcctcctccatgtggaggg

SEQ ID NO: 52957 - DNA, 1014 bp, Zea Mays
cggagataggttcttcgttaggtctggccaaactttggcttggtagggttgactttttgggtttgggagggggacctctgagttttctaaactggtggtgtggacctcgcgctcttgttcagtggaggtggttagctacttttttgtggtgtggccctcgccctgtggattcgtggtggcctttgggttaggtggtggggaatggtcagcagcgagggcaagcttacccttcttggcgacgagggttgtcctggcatcatcatcatttggtggtgagctaggacgattgtccttcttgggaggcatcgtgggaatagtcttcgtcgcacaaatggtgggcgccaaatgtttggtgctgacacatggtcatgtgggcccgaacacgcagagacggaaaggacgagctcaggtgcacgaaaagacgtttggtaggaaactgtagtgtcttgttttgtgtgtcgcatctagcttcaagacaggggtattatagggccgttcgggggtaggtagtccaaagtacagtccagccccctttcaccaaccagttccgaggaatattctatgtaacagggtaattacagcactgtgatccgtataggtggcacatactaaataatacacacatacattacactggtaggtgggcctcgtagacgtgtccttcggtggaccaacgacgagcttgtcacctcgtagccttcgctgccacctccggagtcttcatggctcagcgcccttcgctctctcccgatgcacgcatggcgtgggttagtagaggctttgtggcgaaggccttggtcgatgttgattgtagcagggcctccgtgtgacttcatcctccgctaaggtcaggcgaagagtcataggcctcctcgatccaagatcgtggtcctgcatataggttagtaaaggtgacgcaagtcaaaggccccttcgctctatgatcggggtcatgtccggcctatgcccaacaatgatgacgacggctcctccgcctcctgccattgtcacgac

SEQ ID NO: 52958 - DNA, 853 bp, Zea Mays
tgtcgatcgacatgctttagggcacatcttggtcgtccaatcatctttgatcgggctcatttatgacgggcggcatgggtggcgaagagtcctggcgcggtgccgacccctggctaccatagcctgggtcttggcacgactcgtcgcattgcagaggttgtaggtggctagcgcgcttaggcctaggcttgataggccatgactgggtcgtaagcctaggagcccgtacattatgagtggaaggtggaccgactcgtactttgtggttcgacgccagacacagttaatgcgacacgtcaggttagttcctgtcaggcatggaatcaactcgagtggcttcccctcaataagctcaacccccttgcggctctgccatgcctgacccttggctcggtgtctcagatttaccaggggcggatccttctagggtgaacttttcctttgtttttctactgactagtgggccctgggggctcggggatcgtttccccaataagattatactaatgcattttcatgatacaatcctttattgtaagctggcaagaagtgaccttcactattaatgatgattgaatgactgagatgtacataactctgtaaatcgaaaatatgttattcagtatggtcttcgcacggacaactatggactcaggtccaatgttggtttccaaggattccttcttcaggtgcgagaatgtcgaggagctttcaaggttactcaaaaggtgcgagaatgtcgaggagctttcaaggttactcaattgtcatcttgaattcccgatattgttgaacatgccatcctttacgaacggggcgggtgtaaatgagtattttgtgtccatattcggta

SEQ ID NO: 52959 - DNA, 523 bp, Zea Mays
aatggagccaaattggacgcgccatatctttggattcactcgattttgactcaagtatcctatagtaagtttgaagatggttgttaggtgaacgaactttattaatgaagtttgctctgtgcttaacaagaatcaagagaataagtgggtagaagggggtcggttcaggcaaactttgaagatccagtgcacagaaatatctgagacaaggatctgggcactgttgaatcagatgagctcggatgaatcggtgggggatttgattgcggagaggtaactttggacgtggtaccatcccgcgaactcagtcgtgcgtggccggagatatcccaccggcggtcgccgtgactcggtcacttccgccgcggtgtcacccatgcctcgatttccccttactgtgcctcttctatatgtggttgccatgcgtgaacaaagccttccacggtcgtcgatcgttagccggaccgccgtggctataaatagcaccatgggtcacggcgaggtattcacatctccaccagtg

SEQ ID NO: 52960 - DNA, 539 bp, Zea Mays
aaaaaagcatggcaaagggaaagaaatgcaaatgatgtgtcgaagctgttatctttttttcattatgcaagaaagataatccacaatttttttcagactttcaactggacaaagaagggaaaattttaagcatattttggtcccatgctagccagcaagccgagtacattgattttggtgatgcagttacatttgatactacacataagactaatatgtacgataagccattaggcatgtttgttggctcgaaccaccacctataatgcacaatatttgggtttgctttactaggagacgagacagttgatacattcgagtgggtcttcaatacgttcaaaacatgcatgggatgtgacggaccacgagtgatgttgacaggtatgttgcaatagatggctcctattaattatggcacgtactatatgatatcatattggcttgcataatgtgatgtaaatttatctatttcagatcaagaccctgctatgccaatcgcactaggcagagtattcccaaacacaattcatcgattgtgt

SEQ ID NO: 52961 - DNA, 473 bp, Zea Mays
gttatccaagtaagatctgaccaccctatatagtgtctagtcttggcgagcagtcccactgggggctggacccgttggggcatctcatttagtccttccttattctattccatattgccctccggtcaatctggccgaccggaggggggcatagccaccctgtcagtcgggttgccgcaagagaatgtgaggtacgaccttggacgtgggaccgagcaaatgacttatgggtcggtcatccgacttgcgactcaccaggagctagctcagcccacccctcgctctatgcgaggatttgaattttggtttttacctggtgcgaggcagctgcagtggtggcgtgatagaaacagaatcatcatggctccgttcgatgtgggcggctcgacgggtcacgaagcggcctactcaccttatcacgtgcgggtggcgtgggggtgtggttaaccgctctgtccgtcgctgacaccttt

SEQ ID NO: 52962 - DNA, 655 bp, Zea Mays
tagtaataaaagtaagtttaaatcgattttattgagtactttttttctttcggatacggatagtatcggatatttcacggttttgtcgaatgttgtcgaatacgaatcttaaatcggatagagaagaaacgaattcggatatgtctatttaacatccatattagaatcgaatacgaatacggatatccatattagcgctttatccgaatacgaatacggatatttcggatctccagacatccgaatccatccctacctgtacggctgtttccgttccgtctcgatgcggtctccccgtgccgtgtggatatgatagaagcgtgattatccgttagtacaccgtgcactccacggttgtgacgtgtgtcgtcacccgtctggcatctactgtgccgtttcccacgagaaccacgacacgagtcgacggtaggtaggtgtctaggaacggaaatcgatgcgcacgctgccggacacgagaacgctatcgtcgaactcctgattgaggcttggagcagactggttgcactgggccaaagccgaaccgacatgggtctcgcaagaggccagtccttgttgcatcgggacccggaggactgaaaaccttggcccaagctagctcttcaggccgtaggccgtgagttgatagccctttgtt

SEQ ID NO: 52963 - DNA, 522 bp, Zea Mays
gtaaatgacccaagttcctatggtagaattggagctggtatattggagattaactttgttaaagacggattagggagttgccacatgaaaatttatgaaaaacatctctgaagttgctctatcacgcgctctgatgaacggttcgatggtacaatgactgaatatgatcaggtgcagtgtatcctgccatcggtgatcccgcgccacgatcctcgccggcgctatgattcatgcccggtggagtgcagataactacacagggtaagaaatatcgcacatgagatgaacttggggcactgtttcaccctatcgccgtgcccacttgcccgacgacgtggccgcacggtcatcgccatggctgccaccgttcattcggtcgtgccatgccttggtctgttttaccacgtcgctttgagccatggaggctaaccagtaattgggcgccaccgctgatggaccctataaatcaatgccccagtgagctccgttaggttgttacgcgtccagtgcaccagccctcgc

SEQ ID NO: 52964 - DNA, 599 bp, Zea Mays
gcctaacacgccagcgggtcaggcctgcttccttgttcagtgtgtcttttccatcagttccaagcaggagggttttgcaggatggcctttatttaatcgtagcgctcaccattgtcctgtccaccttgcttttggttccctggaccctcatcttctttgcttggcctatccttcctttgcttgggtcttctgtcactgctcccattgtcggattagcgctgatccttgacgagttaggagaacctttaggccctcatcaagcgtggtttactggatgaagtaggtggttgattccaggaatcaaggaggccttgactctgcctcccaattatgtggtttcgtttgttcatttctatgagtggggtctcgctctcccccttcatccttttgtggtgactctcttcaagtacctataggtgcagctccattttctgatcccgaatgagatccagcatatagatgccttcatctccatatggatcccatcctcaccttaaggtggtacttcttctgcatcgagctattgtggaagagggaggagcaaagggtaatggaagaatggccagtcagaagcgccaacattcgcctccacagcggaa

SEQ ID NO: 52965 - DNA, 820 bp, Zea Mays
gccgctagaatgcataacaccctagttcatgtcgaggctgtgtattagagtttcactggtgtacatggattacaggtgagttgtgggtagcggagaatgagttctcttgtcgatctagtggtgcgtggttgctattagaaagctaatgagctatgaggtggtactgggatgtgacgagacgagatgctttcgtaggggtaccccaccggccttgtatagatgacgagatggttatccctttataagttgcgatcactatctaactctatctagatcctattttaacgtagcatgcattcttgcctatccggggttcgatcgcttcttcagtcgagtatttagccctttaggtgtgccacctctttgcacgagacataagcgctcctattgcacataacttggctgtcaagtctctgtttccctgggtggagcttgtctggtctggttgtgactcgagggcctgtcttgctaggcaagccatcgggaggcccatcaggcggcccatcaggcggcccatgaagcgtttatgtgttcataaggacccaactgatatctatctcccacaaacccctgaggctcaagctaatttttgagggtaattggctcaagactctaaggaagaatcgtgttatttgactgttttaagcttttgtgtgtagctttgttctgtctttgtatcgcaggtgcacccaataggtgtagctccttgagttttgaattgatttgagcatcaatcaactcgaaggtcttcacggtcttgcttctgagtgcagctttgttccgtccttgtatcgaggcacccaatgggtgtagccccaag

SEQ ID NO: 52966 - DNA, 760 bp, Zea Mays
atttttagaataaccaggcaatgccatctgtccatgccttgttaggtctggaatcaatttgatttgtgacaagttagacatctggctgcttgaggcagagggccctcggctggacaccactctgccccgtactttaatgcttctgttgattggacttgcgcttcagtaaccacatttgggcttcctcccgtttcagccgatctcctctttttgtcgtggtacattcattgcgtatattttatgggtatcacctcttcagaaaatcttgaagattccgggcgatacacccaatgggtgtctgccccgcgaaaggtgtttatcgcgttgtcctaaagtagtaatttgatgtgacggaggggtgtaatcatttgcctgagcagttgagttgggtccaaccagtgtcgtgttacgtgaaacgacgctagttgcctgactcatttttaggtgtcttgaattgcttattgaattcttgcgagtgttcggtgagcggggtaggaagtggacggtcacccctcggcctctttaaatagcctgcttgccatggctgttttcttcacttcctcttgatcacttggtctcttcttcttcgtcacttttccactttctgcacgaccatgggcaggggcaagaggggcaagggatggcctcaccgtgctgacggcaagcgcaagcatcctccatgtctaccctcggaggactttggtgactcagagtactcggaggaagtttcctccgagtatgatcggtcgcccgctccaac

SEQ ID NO: 52967 - DNA, 534 bp, Zea Mays
atgaattctcacatagatccccagctttctgtgtgcccatacatgtacgctgcggtggtgagattgggaacatacccaatgtacgcatgggaaatctttcacggattcccacgtactaaaaaccataggggaacttgtacatgcagtagtacatgcaattaatcacaagtcaggagcgtgcaaaatttcctgactccaaccataaccagttggaaatgacaattcattactgatggtcattaataatctgaaatttttgaatctatcacagattcatcatatcctttatggatatcattctgaataccaagacaaacaatcatcattgtaagcacatttggtaaattcagcagtgtggacgctaatgtgctcaagtttgagacattataacttaatggtcatgtgttgtccgaaggacacacttgaggtcatcatatagatgcaccaaataaccatataaagtcttcaatgtccatacaactctgtaatggaccacactcgttcctttgaaacaattcaaagaacttaaccaat

SEQ ID NO: 52968 - DNA, 1054 bp, Zea Mays
tggtcaagccggaactgcctagatctgatcatacgattgaggtttattgagcaaaggggtatgtccatgttttaatcagagccgcctaggagaggatcatctgctctgctagcttttccctactcgaacctggacaaaggtcgtgttgcccctccccacggcggaggttcaccgcagcaacggccacaccccgccacaatgtctaaacctccaaatcaaccacatctacgcgttccaggggagatattgactggaattagaccatcattaacgcaaacaaccatgatgagagccctgccaggcatatagcgacccacggcggattcgtaaagtccggcgaggtattccctacccacggtggcccgacctaagttaccgtgaagcaatctaccgaccctaccgtgcgatgaaccaacagggttaacacttaccaggattcaagcggtggaggtcgctgaccacgaagaaggaaggactccggcggcgtttgaccctgatgagcgattccggtcaggcccgccctaatcttccacctagttaaccacgaacgtgatcagtgcgacttggcgaacgtgcttgaccttcccccgaccaaggctgggcaactatagcacgaggaacagctacggctgcgcgaagtcggcttgttgggacacggtgagctcgtggtagcaccacgcgactaaggggtttgggaactgagctagggacggacgggttgggaaaggaagggttagtacttggatttgtaccctaggcaaggtcgatggggtcattgtaacaaatccctgtgaagtgcgccgtgatcgagcttggtagtgtcgcatgggcgaagaaaggggagggtgcctgacgtcccgggcccgcatgtaagccgccgcgggatcacagagcgaaggctatggccaggaacgggtagactgtccatccgatcccatgcgatagaggaaatgagggtgtgtgtgccacgagcaactgacatcctgggccctcctgtcggtgcaagaattccagtcgggctggtggcgtggaggggcaaaaagatgggctggcc

SEQ ID NO: 52969 - DNA, 501 bp, Zea Mays
ataaggagagaatatagggggaccgatgcgggagatgaaaaagtagaggtggaatctagctaaggtcgcacaaaagtaggatatatggggagaaatttaaagagaaccgctttgtatagcctaaccctctgccatcagccctcacgagtcatgcccctgcccctacatctgcacagctacccataaccttcgccgcctcattggccccacccctatccacgaggtgtcatgccccggtcgcacactcactctgccatccgaagaagcacggttctcatatcgttggtgccacctctaggctccagcaggtgtctgcctcctgggccacaaaaatgtggcttctaagactgtctgcagcggtctcctctttccctcccctacgggctcctctccgacgcggtccccttctctctcacgccagatgaagcggtgcactattgactccccagctcctgcttatcgcagaagtcgtcgcccgcgccacaccgaggaaagttctcg

SEQ ID NO: 52970 - DNA, 539 bp, Zea Mays
ctgtaaagcgaagaggttcattgaagcaaaagatatgttttttgagatgcccaggtttggggttgctcctaccgtccatgtacacaacagttcgatggatggagcttttaggtctggaaatgcacaagaagcattgacactttatcaggagatgactcgcttaggcttgtgcccagatgggttcacgtgcaacattgttatgagacaccagatcaaatttttagagcaaaaaccagttcaaaggttatgaaacattttagtcacaggctcagtcatcaatatggtataccgttctgttacacatgtgttgtgcaaccattgtaagttcgttatttggaaagccctatgcttattgaccttgttctcaatgcaaataaaaactaaatgtattgtaatggtttgaaacatgtttcaatatctattcctcatattaatattaatatcatcaatattaacgttatggtgatagtttgtcacgctgattttgcatatcataatgatgtttattgttttgtatatatgtttcatactaatttttt

SEQ ID NO: 52971 - DNA, 791 bp, Zea Mays
cgaggacaaagtagtggaaactcaaataggaggccttagaggacttcaataataatgttatcaaagaaggattttgggagaagatgcaaataacatgcatgtgaatatggcaacatatatttgaaggtatcttcaaaggtgtttgaagtgactaaaacaagaggatgcaaacctaaagatacttgttataggaactaggatgaagaagaaagaacaatataggtggttgtgccatgacataatatgaactatgtagagaagtttaagatggtaaagaaggctgcaaaacatgttgtgagtgagagggtcatgcctatgagaatatttaccaacacctaagtacaaacaaagaagagaaatacctatatgatggatagggttgatgaaaggaatgtgagagaccccaatcaagttaaatgcatcaatatgatgatggattcattgttggtgaaagaggataaggccaaccataaatcacaatagtgtttatacaaaatattcaacggtgagaatgagaacataactatttaattggatggctcctttgatgacattatagattctaggtgcacaagattcaagaatataatgtctagcaaacgaggcacgttgatgagccctaatggtatcctaattaaagtatgaatatgcctcaagggtagaggtaaatttaggggcgattgttatggtttaatttgtcgatcctgaaattttttgtaatcctttagtaaaatatcattaaaacttaacaaagtccatgtcatgtaataaaattaatcctaatgatattt

SEQ ID NO: 52972 - DNA, 325 bp, Zea Mays
tccggactttccacaattaaagcagcctgttgaagagcttgggagggcggggaaacgagtaccaggggcacttggctgatttgttgaggtggggcagtggcaggacggataaagaccggttgtttgaaagggtaggtgggtggacatggtgaagaacgattctgattaaaagtcggatcaccaacctttgtcttttctcaggcccctgattgggcctgtcgcctccatagccctttgattttccctggcctgcatatttggcttcgacggccagtgccgtgctgacagccctgctataagatagatcgaggcaggtggccatttt

SEQ ID NO: 52973 - DNA, 546 bp, Zea Mays
aattctggtcagagaagatagccttcctcgagcatatcttaactgcagaaggaatagaagtggacccatccaaagtagaagcagtatccaaagggaagcagccatccaacgttagtgaagttcgaagctttttgggaatggcaggatattaccgccgttttatcaaagggttctccagcatagcaaggcctatgaccgagctcctcaagaaagacaataagtttgtgtggaccccgaagtgtgaggaaagcttccaaatcataaagaagaagctcacaaccgcgccagtattgacactaccggacatccaccaggatttcatcatcttctgtgatgcctcaaggcaaggtttaggatgtgtgcttatgtaaaatgagaaattcatcgcctatgcatcacgtctactcaagccgcatgagcagaattatccaacacatgatttggaattggtagccatagtgcatgccctaaaaatatggaggcactacctaattgggaacaaatgtcacatcttcacagatcacaagagcctgaagtacattttca

SEQ ID NO: 52974 - DNA, 407 bp, Zea Mays
tctattctgggcaaggggtacttgttcttgattgtgacttcattcagagctcagtaatcaatgcacatcctcctagtgccatccttcttctccacgaacaggacatggcggcctaaggtgaggtagttggtctgatataacctttctttgacagctcatctatttgcttcttgagctcaaccaattctagtctagataccctataggctctttagatatggggggtgctaggaataagctctatggcaaactcaactttcctctcaggtagcatacctggtaaatctttaggcaatacatccagaaactctgacacaacattgatactcttgagtggatctgcctccttgctatcaatagccatctgatgacaacctcctttccttggctcgggtgagactagctta

SEQ ID NO: 52975 - DNA, 396 bp, Zea Mays
ccaaggcaccgacattagtgtgatgaagtgtaaccttgtcatcaactctcggtagttgttgaaatatgggtacaggctacaaagcatcactggtacaattgaaatcccctgtgagctgattgatcaccacttttgagtctttgactatttatataggctcaattctagcttataaaatcaaccacatctctttttgaatggcttcatactctacatgattgttggtgcatcttacttctaaccgtagtgaaaaattgaatattgcccccaaggtgagagtacccgcaccccgacaccacaacttacatcaaaaattgatccataaaagaagagtacccatgttttgatgacaactgtcaatgttagtggaggtgctcttttagtgatgagatctat

SEQ ID NO: 52976 - DNA, 651 bp, Zea Mays
gcggtgccaggaataagctctatggcgaactcaactttccgctcaggtggcatacctggtagatctttagggatcacatcaggaaattctgacacaaccttgatagcctcaagtggatcgacctctgtgctattaatagtcatctggtgacaacctcctttctttggctcgggtcagactagctcagtcaccacatcttctcccagtggggacaccaacttaattgtcctcttatcacagctgataactgcttggtacttatctaaccaattcatccatatgataacatctattccctgagtacccatcactgtgaggttagcgagaaactctatcccccttatttccacacttacattcaagcatacactatcgactcgaacttttccaccggctgagtcaatttgaattggtgttgacatggtggttattggaagattatgtgcttctacccacgatgcagtaatgaatgaatgtgttgctctagtatcaaataacacttctgcaagatgggattcgactggaaacatacctactgtcatgccttgcatttcatggactgcttcaacctccaagtggtttagtctcccatggttgtagcgtgtctgaacacgattgcctacccctggatgaggcacattctgctttact

SEQ ID NO: 52977 - DNA, 319 bp, Zea Mays
gttcttcaatagcacttgcaagtcctcaacctcacattctctgcagttaactaattatgccttgctatctcgcccttgtcagacaacagtatgaaatttgttcagttgctaatgtgaacctgcgagcatttgtttagcttagttttaggttggtttcaacgtagtaagtgtgtgaattcggaaagcagcataagctctagccactgagtattagttcagttgctacatgtccataggttcatgctcagcgagtcagcctttatcattgacattgtgtcaagaaatcttcgtatttggtgcacaccatgtgccaataatc

SEQ ID NO: 52978 - DNA, 463 bp, Zea Mays
cgcagaggacctcctagaacacgcacgcaggaatgtccaattgcaagtatgtcgcaacactagccgacagcccgacaccacacaaaagccttccgcgaccgatggccagctcctcgtcgacgatcacatgtctggagggacatgcacgcgccgtggggtgtgcaccagaccatatgctcaaacgcatcctcccctacaccaaacggtcttcagttgcgtacagccgcgaggccatcgatcaccgcttactccgacgatgactggacccgttgccccgacactcggcgttctacatctgcgtcttccttggcaactccctcatcccatggtcatcaaaacgacagactacggtttcacactctagtgccaagatagagagagtatagagcgagccatcgccagtgccatcgccgaatgttcctgtcttcgccacctcctcgacgagatactctgcgaggtctcc

SEQ ID NO: 52979 - DNA, 546 bp, Zea Mays
ccgcacgctcgctgactcgcatcgccatgcatgtgaccatgccgtagacttggctctgcattgctccttgggtcgatgattggtttgcccccctgtgtttttaattccttgccggtcgacttgcttggcgtttctccactccaagtcaaaaactaaaatgcggctttacctaactaccatacggagtaccctttggatttttttttctttctgaagatgttgccgtcgcaactcgcaagtggcaactaaaacaggcaactcctgctgctcagattgcaacattgtgaacatttccttctttgattctttgttgccccactatactactcattcagtcacaccaaattagtactacccccaatcagacggtttggtaatgctgctgatgttggtactccgatccaaatgtttgtagccacaaccgctagccggtactactgcttgtccttgctttgcatctccatctcctgcctgattctgaatgaatgctgctgatgttgatatgtccatggcggtgcagtggtgcagctctgctacaaccagctc

SEQ ID NO: 52980 - DNA, 1508 bp, Zea Mays
cataaaattctgaccttgcacttcaatcaaaactcaagcactagtcgatttcatatcaaaatggactaagcaccaggtcccagaaaacccagaagctactgaagtctggcaaatgtactttgacggctcgttgagattgcagggggcaggagcggggatccttttcattgccccaggaggtgaccaactcaagtatgcgcttcagctcctgtttccagcctccaacaatgtcacagagtatgaagtcttagttcacgggctaagcatcgccatttcgctaggcgtcaaaaggttaatggtatacggtgactcgccagtagtcatcagctaggtaaataaggactgggactgctcaaccgacttaatgaacaaatactacgctgcggttcgaaagttggaagataactttgagggtttagaatttcaccatgtggaaagggatcgcaatgcagcagcagatgcattgtcaaaattagggtcaagtcgggcccaagttccacctaggattttggtccaagaagtatagcaaccaagcatcaccgcatagcatgctgaagaatgcaatgccatggaccaagcagaaatagatcccaacgagtggagggagccaattatccggtacataaaaaacaaggaagaaccagataacaaggccgcgacagagcgcatcgcaaggcagtcagcccactatatagaagaggcgcaagaggagtcctcatgaaatgtattcattccgctacttgaaggcagctactggatgaaatccacatagggcaatgtggcatacatgcagcatcaaaaacattggtagggaaagcctttaggtccgggttctcttgtccaatagcaaagaatgatgtggcagatttggttcagaaatgcgaagcatgccagttcctatcgaagcaacaacacttccccgcctagcatttgcaaactattcctgtaacttggccctttacgtgttggaggctggatatgatcggaccattcaaaaaagctcaaggagggtatactcacatactcatcgctattgacaagttcacaaaatggatagagtacaaacttaaccaatcacctctctaacttcagcaaaagcagtggagtttattcaggaaataatattcagatttgagatacccaacaacattatcacagacctaggatctaatttcactagctcaaagttcttcaatttttgcgaacagcggagcatcctgatcaagtatgtgtcggtggcacaccctagagccaacggataggtagaaagagccaacaggatgatacttgatgcactctagaagaaagtgttcgacaagagcaaaacgtttgcagggaaatggatcagagaattaccatatgtagtttggagcctacgaatccaaccaagccgggcgttgcatggaaacactccattcttcatggtatatggatcagaagcagtgttgccagcggatttgatctttggagcacccaggctaacatttgaaagtatagctgaagcagaa

SEQ ID NO: 52981 - DNA, 477 bp, Zea Mays
gggcggaagcgtatggtgacaagcgacgcctcaaggtggcccaccgtgaagtatacgtggcagaacctgtcataccacggtatctccagtggtcagagttcccgattgtcttcgactgccgtgaccactcgaacaaaatcccgcacctcggaatctaccccctcatcgtcgagccaatcgtgggctcgaagcgcctcaccaaggtgctcatggatgggggaagcagcctcaatatcatgtatgttgagaccttcgacggtttagggatcgcatgcttcgcgctgtgacccagttcggcgccgtttcacggcgtcatccctggccaccaggcctacccgctcgggcggatcaccttgcctgtcgcatttggtgacccctccaactttcgcactgagcggctgcagtttgaggtggtggacttccctgggtcctacaatgccattcttggaaggccatgctacgccaagttcatggcca

SEQ ID NO: 52982 - DNA, 341 bp, Zea Mays
gttcatcacctaaaccacactcatcaaccccacccgacgcgtcattcctggggcctgcgatggacgcgttttaaaataaggtaacatatcacatccaataacgaaacagctgaaactatgatagaacgaccaaaactgtgagaagaatgatcgaaactacgactgaaactgtgatgaaatgactcaaaactttgacgaaatgactaaaactgtaacagaaataagtgggtgtccgaaaaccgtattaaaatacataaaatgggcccacctaaaaagtaatggacgtgaaaaaacctgttgccctaacagaaccccaccacacacgggcccaacaaaataac

SEQ ID NO: 52983 - DNA, 703 bp, Zea Mays
tttactagtctcagatatatggagatcccgggcttcatctctggtgggttgacgaaagtcatgaattttaatcttgtccccagaaatgtcttcatcagagaatccaagaatgtgagcaaaccttcggtagctcaccttgtaccagctgcctttgatatagaaatttagataaggaaagttacagggactttcctcatcggccagcttgatccaaagagtggaataaaactgagcaatgacctcatcattccaatcatattggaaggtcataatattcttcattttcttcctctcacaggccctcaaagcctgtgtcatctccggatctccaatagcttcacatccttcccagttgatgtatctttgatgtagaataggctgatgcttcttgggaagaatcacagagttataaaaatcaacatgctgaagggtccagaaccgattaccatcgatcctagcatcacgaatacgcaatgtagggttctgaaatcggatgtcctggagaagagcagaccctccgctggcagtaaaatctgtgatgggctcattcgcagatcgacgagccaccgcccggtggagtaccaaccctcggataataggagcgtgggcagaggggaggtcaatctcatcatccttgctaccatcatcatcactggtgggctcccatgcttgagggtttgccgtgggtcgagaccgatcggat

SEQ ID NO: 52984 - DNA, 497 bp, Zea Mays
gagccgatagcatttgcttgaatgtaagtgtggaaataagggggatagcgtttcccgctaatctcatagtaatgggtactcagggaatagatgtcatcctagggatgaattggctagacaagtatcaggcagttatcagttgtgataagaggacaatcaagttgatgtctccactaggagaggaagtggtgaccaagttagtcatgcttgagccgaagaagggaagttgttatcagatggctattgatagcggtgaagcagacccactagagatcatcaaggttgtgtctgagtttccagatgtgttcccaaaggacctaccaggtatgcaccagagcggaaagttgagtttgccatagagcttcttcctggaactgcccccatctttaagagagcttacagagtgtctggactggagttggttgagcttaagaagcagatcaatgagctgagaaaggttacatccggccaagcacctcgccttgggccgcccttgt

SEQ ID NO: 52985 - DNA, 752 bp, Zea Mays
cgacataacacaaagcatccccaaacggtccagatcagcgatcaatggcaaggccacttttggaaccccggacctgctaagggcatcaaccaatacattagccttccccaggtgataatgaatggacaaatcataatcttttatcaattcaagccaccgacgctgcctcaaattcagctccttctgagtaaaaatatacttgagacttttatgatcggtgtaaatgtcacaagcctcgccataaagataatgccttcacgactttagagcaaaaaccaccgcggccaattcaagatcatgagttgggtaattcccctcatgcttcctcaactgccttgagccatgagcaatcactttgccttcctgcatcaacacacagccaagaccaatacgcgaagcatccgtataaactgtgaaacgcttaccgctctcaggcaaagctaggataggggcatccaccaacttgctcttcaatgtctgataactgacctcgcaatcgccagaccagacgaagagaacacccttctccaagagtctagtcaaaggcttagcaatgctggaaaaatttggtacgaagcgccgataatatccagcaagccccaagaaacttcggatttcagagacactagagggtctcttccacttcaccacagccgcaacattcttgggatcaaccgcaatgccctgttgattaatcacgtgccccaggaaagccacttcggacagccaaaaggcacacttcttcaacttgc

SEQ ID NO: 52986 - DNA, 1655 bp, Zea Mays
cggcagtatctaaatttgcagaagtaaaatgttgtatgctgattttgaaacttgttcacgggacatagaggtcgcccctatatgagtaatcgtaagcacgtggaaccgtcttaagtcgttgctgactcaaaccgattacttttgttaatagggcatagtagtaacccgagttaagtaagagcgagcatgttgcaccgtcttaagtcgttgccgacttaagccgattgctctattagccgggcatagtggtcaccctgagttaagtaagcgcgagcatgttgcaccgtcttaagtcattgccgacttaagccgattgctccgttggtagggcatagtggtcaccccaagttaagtaagcgtgagcatgttgcaccgtcttaagtcgttgccgacttaagccgattgctccgttagcagggcatagtggtcaccccgagttaagtaagcacgggcatgttgcaccgtcttaagtcgttgccgacttaagctgattgctccgttagcagggcatagtggtcaccccgagttaagtaagcgtgagcatgttgcaccgtcttaagtcgtcgccgacttaagtcgattgctccgttagcagggcatagtggtcaccccgagttaagtaagcgcgagcatgttgcaccgtcttaagtcgtttccgacttaagccgattgctccgttagcagggcatagtggtcaccccgagttaagtaagcgtgagcatgttgcaccgtcttaagtcattgccaacttaagtcgattgctccgttagcagggcatagtggtcaccccgagttaagtaagagtgtaggtcgatcatgaacaaactgagtattcttgaagccttttttattgatgacatatttcccattttacagagtacattgtcgtcccgatagcttttgaaatacagctagggataaaacttcctgaggtgttatatattccatgagttcccaatttatgtgtcgtccatctgagtgagacgatatgatcccggccgagtgacttctgctactatgaatggtccttcccataagggtgacaacttgtgccgtccctcccccgttagaattcggcggaggatgagatctcccactgcaaaggatcatcgtcgcacggacttgtcgtgatagcgtctcagagtttgctggtatcgtgctgattgaattactgtgttcagccgttcttcttcgagtacatcaatatcctctagcctagtagcttcggcttctgctatgctttcaaagaccaaccttggcgccccaaacttgagatcagcgggtaatactgcctctgacccatagaccatgaagaaaggagtatttccatgcagagctcgactaggttgagttcttatactccaaacgacgtagggcaactcccttatccattttcctgcgaacttttcatttttatcgaagacctttttcctgtgtgcctctaatatcatcctgttagctcgttcaacctgcccgttggctcttaggtgtgccaccgaagcatacttgatctgaatgctcttttgctcgtagaaatcgaagaactctgaacttgtgaagttggatcctaggtcagttatgatactgttcggtattccgaatctgaatattatgtcttgtatgaattccacggccttagctgaggttaaagaggc

SEQ ID NO: 52987 - DNA, 652 bp, Zea Mays
cccgagagtggatgggacacaacgcccctctagtattttgataacattgtgctcactgcttctactttagccctcttgcatctgatgattacaacccttcaacacaagtatgtgatgaaggatctaggcccacttcatcattttttgggtattgctgtcgagcatcactcaactggcttgtttcttcagtagcgtgagtacacatcacatttcttgcaatgtgttggcatgctgtactgcaaaccgtgtgtgctccggtagacacccaagccaaggtctccggtgatggccctttggtcagtgattcgactgcctactgagcagtgtttaaaaggcggcgcctaggggtccaggcgccaaaaaagtgcaaggtgtcgcctagtttcagacgacctcaaaatttgctaacatcttttttctcgaaaagtgcaggagaactgcgccccatcatattaagaaggagataaaggtctaagaagaccaggtacaacaagataaaatttgctaacatcttgatcaagagacttccctcggtgttcttggagtttcagtccagtctcaacgtccaccgtggctagagttttgattgtgtgtgggaggggggtagactgtgttgtatgtgttgtgggcctcaggcccagcctatatagag

SEQ ID NO: 52988 - DNA, 378 bp, Zea Mays
tatgttgctcaccatatcccacaaaaccaccttttggattggccacgagcccatctatctgttgacgagattcggcaccagtcatcattgcaggtgggtggtccgtcactacgacacctttcgtaaattcttgatttctaggcgcaatgaatggtcaggagggagaaattggcgatgtttatcgaacttcaaatatttgcacccatcttcaaccaaatgaacctaagaacttgctagcaaactgggcatgggaacttaccgtgaacacaccaggcgcaaaatagcccatacgccggtaaatcatgcatggagtactggtaccaaacatgcattttaaagttcatcttcgtagctcggtcataagtccataccccttcc

SEQ ID NO: 52989 - DNA, 933 bp, Zea Mays
cacaccgacgtctccaccaccaacatcatcaagtcgaccatggagatagtctcggctgatggccaacatcacttcgatgacctcataaggcgtgaggaggaggtgctgcaacaactcgccgaacggtgcgataaagaggaggaggaggtattgcgacaactcaaggaacggcgcgaaaaggcgacataaaagtacctatcatatttcacagtggatcgccaccagaagatcattcgtcgaggggagatcgatatgacatctctcctacctccgcctcaggctcccattgtaagtaccccaaatccatcttatgaggctttcatggaacaacaaggggaattgttaaaagaatacatagacaactctattaaaatgggcgctttcgtataagaaccctactgccatagttttccctcgcttgaatccatacgaaaccacccgtgccaaacacatcggctacgaatgggtctcccttggcccaaccatcatatgatatgccgatgcacacgttcgtgtcaccatcacaaccgccgccaggcacatgaccggctctagacatagtcggaccgtctgcgagtcatctaggatattccgaccctacacaagcccgctcgcaaatcacaaaggtagttccatacatggccggaccatctggcatacccatggattgtccgggtatgcgtacatagaaccaggagttgcacaatatgaacacttcccacacccatcacaacaacactatggtgccccccgacaacatattataaccattccatgccaccacatgtacacaaggctgaatattcttcggccaccagagaacccgagagatatagaggaggaggtggtggcattaataggatacctaacacccatctcagacatccttgggaggaaagtcgacagaatgatgtcaggcaacctgagttttca

SEQ ID NO: 52990 - DNA, 506 bp, Zea Mays
tgcacggttctattgagctcgggctcggtggatggcagcagtgaccgaaatcccgcaccggggttggggatcgaccacggatccacgtgccccatgggcagccagcacttctgcacgacaacaggtaagaagccatcccgttgcgttcgtcgtcgcctcctcttggagttgcactggttcaatacctcggtaggtcaccagggtgcaagattcgtgttcgccgacgacctcaccgtcgtgcaccgtggcgctgccgctacgttggatctggtggggaagacgggcgccagctgtccattccttgattgatgaccatgagtagagcactcagcccccttcaatccattagatctaggtcgtgcgattgtgtctgggcgggttagatgaggtgtatggcgtggttgaatctgggccgacgatctttaatctgatggtccttatggcttaccggttcaaagaaagtaaaatctaatctggacgattggtgatcgatcggatgtccagat

SEQ ID NO: 52991 - DNA, 465 bp, Zea Mays
atgaaaaaaatagtaaactaagttaaactagagtggatccatggatttctctatgccccgtacttgaacatgagatactttatcccagcattgacaaaccaggaccagatatgataggaggtattaccaacgtgttatgctaatagacatgatggtccagatataaacaaactagcctctaccaaaattcggaattaagatctgctaccaaattagcctctactacagttagcttgagatgtaaacactgattatataatagaatttgcagacatctaattatctaatcgtgaatgaatagcaaaacagtacagaatttgtcgagtccaaagtgtagattgcagtagtgcattgtaaattaatgatgcaatttcagattttcaaaaaaacatggttgcaaattgtgaaatcaaaaagcattcatggtcctgtttactactccctcggttccaaattggaagtcgg

SEQ ID NO: 52992 - DNA, 324 bp, Zea Mays
ttttccacatacaaaattcaaagtttttacaatagttcaatcttcttctttcaaaactttttcagcaacttcgtttaacaaagtattaacaacttcgtctattgctgcgttgaccaccttgaatttattaaggattccccgtagtgctggatcagcgttaagatcatacggctctggggggagaaagtttcgctacataaaaatgtagttttcttaaattctaagctaaaacatttacgaagccagagcataacagaaacatataccaatacgcttttctcgctctacaacttcttcaactctcctcgcctcttctgaagcatg

SEQ ID NO: 52993 - DNA, 396 bp, Zea Mays
gacagacgcttctgccacggatgggttacaggtaggctgccactcatattcagctttggctccttggtgccctagtttctcactcagagtttgatgttgtggattttctcatttgtgagatcgaggacacagtactggatggtctacgtgctcgtcgacagctgccttatgctcactatctgtgccacatctttgctcagctgattcggcccccacagttctagggtactcttgaggcctctcgcctcatctttgggtcgtaccgtccagctccagaggatcctgtgccggcaactgctccagtgattgatactcaggccgaggataccacttttcaccagtttgagactcaggacgcagcagtccatgatgatgatgatgatgatgatgactttg

SEQ ID NO: 52994 - DNA, 762 bp, Zea Mays
ccgcaaaagattacttgaagctcagagtcggcagaagagttatgtagacaacaggcggagagaacttaggtttgaggaaggagacttcgtctacctcaaggtctccccaatgcgcagagtcaaaaggtttcaagtgaaagggaagctagctccatgattcgtcggcccctatcctatcattggcagaataggacccgcagcctaccaccttgaattgccagaatccatgtcagatatccacaatgtgtttcacgtatcccaactccgcaaatgcctgaaagtgccagaaagttgcatcgaaggagaggcaattcagatttagaaggatctgcagtaccgagaaaagccagtaaagatacttgactcagtcgtccgaaagacctgaaactcagaagtaagactctgtaaagttcagtggagcagagaaggagaagaagaagctacctgggagagtgaggactctttgaggtgggaatacccttacattttctcaaacccagtctaaatctcgagggcgagattcctttaagtggggtaggtttgtaacatcccaattttaaccccaaggttagaaaccctaaaactcctaaacccccctaattatctcttaaggaccccatctcataagacatctcattcatcatatgcatacaccatggttgttagtagcacctcacatagaatatttttgacacctcacatagaattttgacaccgtcagtcctttcgtccccgcccgtgacttcagcggcgtgatccccg

SEQ ID NO: 52995 - DNA, 472 bp, Zea Mays
tcggtcttgtactggcggcgccaacctgtcaaaaacagatgtttggggtgccccccaggcggggtactgtggcatcccaaatggatatggtagcatgccccacatttcatttcggacatatggtggaggtaagtatgtgtatggatacgacatagacggataagggggtggaggtgtccatgttggtatgttaggtctcaattgtacagtatgacctttcatttcttccgattggtggggtggtccaatcggcctgacctgacgtagctcatgaatgggtgagcggggtcgctttgctggccggtcactggggccggccttctttttcacgtatttagacaacaattgatcgaaagtcgggccaggcttgacgagccgaccagctgctttaaatgtatttgttttccacgtacctatctctggtcgtcgtggtttgaaggtacgtggtgagagcacctagaggggggtgaat

SEQ ID NO: 52996 - DNA, 818 bp, Zea Mays
gtatttttagcatttttctacaattttctaggaattctataatcctggtagaaaaagaaaaagcgaaactaatgaacagtgttgggcttaatctggcccgagctagcccagcattgacagaacgtgcccgcgtggttagttttgcgcagaggaccttggcaatttgaataacttgaaaaggggtcgcggcactattcctgtgtttcactgacagcttacaaaacccccctggatttctatttcttcaccacacttggtccacgacgcaacacggcggcaaaccgagctccggtgagcctgtactgggcaagacacgcaatggccggtgctctaacttggctgatacctaattcaacatctaacaaacgtttcccctcgatcaattgcacggttcgagttcccaacctctctgctcacggtgaccgcaaaccgaggacaatccgtggtgttcccggtgaactggccaaatctagcttaattggccgggtagctaagcattcatagcacagagtgatactgaaacgagagtaaggaagccatgaacggacctgaaacgagctagccacggtgagctcacaccgcacgatgtttttgattgatttgggggaaatcccaaattggggttctctagtgaacgatttgagacacgagtgggtgcgctgggtgcttgaatacctagcgaagctgagggcacgctcaatttataggatccacgagcggtggcggctaatttggggaaagacacgcggcggccgaagagggggaagagtttctggttgctcaatcgtggcgattgccggtgcaatagctcttgaggt

SEQ ID NO: 52997 - DNA, 440 bp, Zea Mays
gccagcttgtgttgcactcgctgtcacttttgtgcttgtggggagggtgccaactgccaaaacagctggtgctctgtttccacctccacactgtgagtgtgtttggattggaggtgctggtagcacaggtacagtacagtagcagcccagtggctggctatgaattgaaccacccagttgctgcaactgaggtgatattgttgatgtcactcacatgcatgtaccatctctgttctgttcctcctccatacaccactgtttctgatcctcatatacatacaaatacagatacaacaatgatggatgccccgctgagttctttttgtttgcacatgctgctcccggcccggatccgactgcgacgacaagcgagcgcctggccgcttgtgaaggatttctgttgtaccgctgttcatccttagtccttattcggattattc

SEQ ID NO: 52998 - DNA, 376 bp, Zea Mays
gttggaaccagacgtcgattgcttctgtaatatacatgaattatcttatgagacgaaggcaatgggaaaggaacaatatcacaacaattttggttgtttttccttcgtgtatcactctgatgtaagacgccccattccaacgcttcgtaaaaaatggcctgagtcttagatgaagcaatggttctatgttaagaatgatttggttgagagggaggatgtaaaagatataatttagcgtccaatacgatctcgcctcagcatccgaaggccctctattgtgaatagtgacaaagctcaagcctgcctggtagccttcaacattgtgtgcagctacatttgcaccatagacttggtccaagagaatatagcttccaaa

SEQ ID NO: 52999 - DNA, 545 bp, Zea Mays
tccggcgttaatgcgtgtgcagccattagggctaggacaacacaacaagccttcataataagtgcaacaggcacaattatggctcggtaattgggtacacgataaatccacgcaacgtgcgcaacaagcgcaattgtggctgaattgttgcgacacacatgcaatgccttcagggcccacgaaaaatgtgactcgaggatggcggtctgactcaacgggagcgatccgattaagcgagagcgtgatatagcaatcacatgacgtagccaagttcgaacggcacaaatattgtgtcgtgttgccacggcgcagtcaatattcagctaatgccataactcagccgataataacatagcttgatcaatatgttcgagtacccactataatatttaatcgctcggcgtgaatcagaaactcaacgcaccacaaatatttagagcgatttaaaaatacgcaacatagccttcacatgcaatttaattattttctattaattatttgcagctagaaataattattaatacagaaaaattaaataccaaaat

SEQ ID NO: 53000 - DNA, 832 bp, Zea Mays
ggcttagaatcattgcatcaagtcatgacaccaatgtatgtcgatcatgaagctagtatgggagattttgcttgggatgatgtagttgcaaatccagtgatagatttgccaaatgtgttgagtcctcatagggttgtctacatggacaagcgacctagtgagaagttgtcagtgttttacactgatttgaagaaagggagagttgagcaaggtagtggatagtctgaacatgaagaacatgatagtggccagtccgaaggattttttgtagatagtgaaaatgtggtagatggtggagatgaagaattgtttgaagatttggttgacatggatatggaatgggtgaaaggcaacaaaaaggccagaggaagcaagctaaagggatatgagacaagtagaccatcaatttgtggtgatgaaaaatctgaagatgaggaattggaccttctagatttagatggcgaaggagaaagtaggctgaggttcaagtcatggactgaagaggatataaagaacccgcaattctttgttggacgagtttttgcatctgttgtggacgttagaaaagctattgcatagtatagtgtgaagaatagggttgaaatcaagctacctagaaataacaataggaggttaagggatcactatgctgaggggtgcccctggaacttatatgcttctaaggacaataggcttaattcatttgtagcgaaaacatacaatggggttcataactgccagaaggagtgggaattaaggaaatgtacttctaggtggcttgcagataaatacatagacttattcagagcaaatgataagatgagtataacta

SEQ ID NO: 53001 - DNA, 622 bp, Zea Mays
cttttgcgtggagtgtcgcacgcgagggtagtctgcgctacctgtcgcggtgacttcgaattggtcgaatgcgaagaccatcgaagcggtctttttcgacatgttgcatctgagtttttgtttttgcgggggcttttgctggtgtattacatggctccgcctcgttaaaaacctcacccccaggaggaaaagagtgcgggccggaataacattgtttgctgaattacaaggacacgtgggtcctgatgattaaacaaaaaatttgcggagattgtcaatgttccaggagtgctctaagtcttcgccgaaaggcattactagcatgtacgcgctgggggatgccttcgacttgacgatgaatggaccctcccatttcggctccagcttgccccgtgattctgtcctcgtggtccggacgagtacgaggtctcctttgctgaactcccttgggacaaccatgttgtcgcgccaagccttggtttgagcctgatatttgttgagggcctgtagggcgaggacgcggtctctgtcgatgagatctttggtcgttggttcgtcgacatcgggaactgctgatgtgcttgtccggggcgacccatgtgaaagtcgcctagaggggggt

SEQ ID NO: 53002 - DNA, 597 bp, Zea Mays
cagtcatccaactgctcctgccgaggggaagaagaagaaaaagaggaggcttcggcgagtgtcatgtttgaatcaggatgtcgacccttctgctcctactgctgaggaagtgccagtagaactttttactggaactgatcccaatgggtgtgaacctgctgacgctgaccccaatgggtgtgacctcgatgatgctgaacccactggatgcaatccagtcagagctgaccccaatggttgtgttgttcgtattgttgacgaggatgaagaagaggaggaggaaatccccttaatttggaaaaacagtcggtgctatctagtcagtggggagagtagtgatgttccttctccagctttgtctgctctcgttggtctgcaagagttgtccatagcgaactttgatcaggctctcgaggatatggttcctaaagatctgctgtccgagccaatagatggtggtatgatggacgtttgcactgacattccggatgtggggttagagttatcctaagcagcgtctcgcgcctcgtcgaccttggagtgcggtcttcaaagtcaagaagctggtctaggttgctccattcccttggaggtggc

SEQ ID NO: 53003 - DNA, 1057 bp, Zea Mays
aaagggggttatacccacatactagttgccattgacaaattcacaaagtggatagaatacaagcccatcgcctctttgaccttagcaaaggcagtggagttcattcaggaaataatgttcaggtttggaatacctaacagcatcattaccgacctaggatctaatttcaccagttcggagttctttgacttctacaagcagaggagcatccagatcaagtatgcatcagtggcacacccaagagctaatgggtagatggaaagagccaataggatgagactcgatgcactcaggaaaaggtgtttgacaaaagcgagaagctcgcagggaaatggattagggaactgacatatgtagtctggagcctgcgaacctagccgagccgagctttacacaaaaacaccccattcttcatggtgtatggatcggaggcagtgttaccagtagatctgatctttggagcacccagattaacatttgaaagcatagccgaagcagaagcaaccaggctcaaggacggctaaatgtgatcattcagtcagccagataccagcagaccctgaggcgttatcacgacaaagcggtacgacatcgatccttcacaatgggagatttggtcctccaccgagtgctaacgggggagggacgacacaaattgtcaccaccatgggaaggaccattcatcgtcgcagaggtaacacggccgtgatcctaccggctcactgaaatggacgacaccgaagtggaaaattcatggaatattgagaacctcaggaaattttacccgtaagaaatgcctcaaaactcttgaggatgagttgtactttataagcagaaggtttcattatcaataaagcttccatgttccaaggcatacaagttcttgatcaaactactgacctaggttagactcaactcgaaatcggcacggcactcgtacacaacttagtgtgatcattataccctactaacggagcatttggcttaagtcagaaatgccttaagccggtgcgacatgctcacgcttacacaacttagggtgatcattataccctac

SEQ ID NO: 53004 - DNA, 523 bp, Zea Mays
tgagggcacagattgaggataagggtgttcaaatgattaaggaaatgatcaagcaaaaggcagaaaaataccagtgtttccgtcaggacagcaagggaattttatggtttggagatcgattggttgttcccaaggaccctgagctcagaaagaagatactagatgaagctcacctttccaaattttccatgcaccctagaagcaacaagatgtaccatgatctcagatctttatattggtggaccagaatgaagagggaaatcgccaagtacgtatctgagtgtgacacttgccagaggataaaagctagtcacttgagggcagcaggccctttgcaaccccttcccataccatcttggaaatgggaggacatttgcatggactttatagtgggattgcccaatacatccaggcaccatgattctatttgggttattgtggacagattgactaagactgctcatttcttaccagtgcacaccacccacaggacagagaagtatgcagagatctacattgacca

SEQ ID NO: 53005 - DNA, 950 bp, Zea Mays
gaaataatgtttaggttcgagatacctaacaacattatcacaaacctaggatctaacttcactagctcagagttctttgatttctgtgagcagaggagcatccagatcaagtatgcatcagtggcacacccaagagctaatggacaggtggaaagagccaacagtatgacacttgatgcactcaagaaaaaggtgttcaacaagagtgaaaagtttacaggaaaatggatcagagaactaccatatgtagtctagagcccgcgaacccagccaagccgggccttgcatggaaacacccattcttcatggtatatggattggaagcagtattgccagtggatttgatctttggagcacccaggctaacatttaaaagtatagctaaagcagaggcaaccagactggaagatgttgatatattagaagaacgtctaaacgttgtcattcaattggctagataccagcaaaccttgaggcactaccacgataaaagtatagctaaaccttgaggcatcgatccttcgcggtaggagacctattgctccgctgagagctgacaggagaagggcgacacaaattgtcacctccatgggaaggaccattcatcattgcagaggttacccagccaggatcctaccgacttacccaaatggacggaaccgaagtggggaattcgtggaatattgaacacttcaggaaattctatacgtagcagtacataaaaactctggtgggcaagctgtactttgtaaacaaaaggtttcattatcaataaagcttctgtgttctaccgcatacaaactcttaatcaacaagcggtttaagtcggagatgacttaaaccggcacaacatacctacacgcttacataacttagggtgattactataccctatcaacagagcaatctacttaagtcggaaacgccttaagtcggtgcgacatgctcac

SEQ ID NO: 53006 - DNA, 1510 bp, Zea Mays
cttatttatatattaaaaattcatttataatttaaattatctggttttatactattctggacagggcctcaaattcagaaaagggcagggactctggcgcaaataaatcccagacacaggcgaccctgacataggactgcgggttcaatctaaaataacaaggggtctcttttgtaagattagcgccgcaaaagggtattctctattatcgtccgtaggatctagatcttgtggcttggattagattgcccactcttcgaaccggtacgcgatacccgccctcggattcgcaatacacgaccaggatttaattacgcaaatacaactcggacccctcgatcccgatcgaacggtctagcacactttccaccctattagcgcacgggatctaatctaagccgtcctagggcatcaacggtcacgacccatctccctaccccgacgctgccagggcagagccaccggaatcccctcggccgtggagctcaccggtgcacccaaagtcagcgacccagacctctaagttcaaatcgggcaaagccacgcgaaggagatggaaaaatagagctgtgaagtggttaatcacctcggtacgaccagtcgagaccccagcccacagagcagtgcgatggcgtggcggtgctgcaattccggtgaggaattaccatcaatcgagtggtcccttcttgtcgcgaagacgaccgacaacccctggaagacgaagcatagctccctgccccagcccaaggaacacgacgcggacgccaacgagaattcacagtggcggcggaaaacctccgttcccaggcgaggcgcgtatggcgacagtttataggaagggaaaaacaaagggtgacgacgtacgcatccatatataggccacgcggaggttgcccaagatcaccagggaagtcggattctgttattcccccatggcgctcagaaaaaaatccgggcgacttctggttccggtccaagcggcgcataaggtggggaagaaggatctggtcaagggaccccacctatcggcgcgaaggatcacgaaggcgcatgcgtgtgactgacagcgaggaacccgcgatccagtggcccaaggcaagagcagcaagcgtgtgtgtgaggctaacagctggggtccatctgttagcgtataagggggacgtgggttatgggccgcgcgatctaggaaagaaggtgggccagaagcaaagaaatcggcccatggaacggttgggggggtatttctctttttttctgctttcttctttattcctaattcatttgaatttaaattttgaattccacttaagtgcaaattcaagtttatgttaactatgcaatttagtcacaccatcatgtggtgaagttattcaattttaatattattttatattgaataatatctctttctttacatttttattcccaaattctaagatttgaattaggttttaatcctcaattcacatcattaatgtaaccttattaatattttctttattattaaatg

SEQ ID NO: 53007 - DNA, 696 bp, Zea Mays
gcgtgcatgtaccagccggataactcagctactggtgctcccgtgcggttgacaccgaattgaacccttaataaccatttcccctcgatcaattgcacgatttgagctttatatcaccctgtccacaaagacagcgcgaactaaggatgaacacgggtgttcccgacgatctagcgcggtttagcttaattgaatgggttgaggagcatcaggagaatctaaggacactaaaacgggagagcatagagcatgaacggaccttgaacgagctagccacagcgaggtcactatgcacggtgtttcggactgatttgggggaaatcccaaattggggctctctggtgagcaattggaggcacgagaatacctagcggagccgagggtgtgctcaatttatagggcccttgagcggtggcccgtgaatttgagctcgcacggtggcgatcggagagaaagaggtgcactggcgcaagcgattggtggcatttaccgtggcaagctcaccgacgatcaccggatgggctgaggtgactcactacggcgtggttaaagcaccgaggcatgtggcgcaaggttgtggggtggctaactccggcgagcctatccaaagcggccatgactcaagcgggtacggcggccggagtagaatagtggtcggagtccatccacggggtgatatttcttacccccttgccg

SEQ ID NO: 53008 - DNA, 458 bp, Zea Mays
tcaacagggtcagagtaagaaggaaagaaaagagggttgtctagaccctggaagaaaagtttgaaccagccagatacatccctaggattcaatttgctgccaggaagtctgtataaagcctgaccataactggtacacctgatgtgcctactagattcatcgaggaaggaattgttggccaggactgggaagttggggatacatcattgaaaatacaactgagcccataactgaatgaaccaccatgggccaccagtcctgagtttcttaccactgagaaggtttgagatggtcaggtgtaggaatcagtaaacctctcccaggaaacgttttccaagaccaatagggctacctccagctagtcgatgagccagggaaatataattcttagtgggagcaagggaagggccacaaaacataaagtgctcaagccaaaaattaagaaaagtattatgttc

SEQ ID NO: 53009 - DNA, 434 bp, Zea Mays
aggtttggaataagaaagataatataacatcaaggagttgggtacgaattatcaaggagttagacatgacatatttgttggtggccaatagtgaaataagataaccatgaactaataaagtgaggataaatgatataaccaaggatatgaagtgagttagggacaaaacattatcaaggagacaaaatagagaggcattatcaagtaggagtagggagacaaagaattcagtatatcaaggtagatattgagcaagggtggcaatataatggcaagaaaacaaaagtataagtcaagggttatatagcaatattagagattagaaaaccactatagtataatataatatcgcccttaccgttctagtcgaaaatcttaatactaaagaacaatcctatcatcctagccaagaagtcagataatagatccagggg

SEQ ID NO: 53010 - DNA, 410 bp, Zea Mays
taggtcacttgccatattttggaatattagattagtgtactgggagggagatctgggtgaccacacgcattgggagggagatctggcacatcaaggaaagttggaacaaaagaaaatagtgataaacaactattagtaggctatgacactgttctcaaaaggctaagaatatatacctaaaagaagcttccgagaaactgctcgagtcaatgaggttgtggatggcctgaatcatggcatgggatgagatcaggagatgggaaaccctccacttctttgactccgtcgtcgacacaagcgcgccctccgcggctttggttgtgtcattcgatcctggcagaccgcctacgagggatccggtaccctcctgcgtccccgcggtgaggcctcctcgtcctcgcctcacctcc

SEQ ID NO: 53011 - DNA, 302 bp, Zea Mays
atggtccaaatataaacccctatcctgatgatggcttcagggataagctgatgaaggtagacttcgaaggttttcagcacttcgaccagcacattatccaaagggaaccgaagccccgctttcatgaaacttctgtagacaactacctcgtcagcttcgggcagagggacattactctctcctccagcccacacaatagaaatgtcacgcaaatacctttccctcatggcatcaatctgtccttgttttattgtcgattttccgaaaacaacatggcttggcctccaaggccgatcttcggc

SEQ ID NO: 53012 - DNA, 426 bp, Zea Mays
tctcagacaacgacacggtcgcagtggtgagacggcggtgggactaggaaagcgaggcaccgcaggagcctcaactacggagtccgagcagcaggggctggcggtgaggacacgacgcgcccgcgcacggaatcgatgggaacggcgtggaggggagcacacaaatgttctgcgagtcaggcggttgcgtccacacacacgcacgcagggagacatatctggaatcatcgcggtgctatggtcactaatccagctgggggcaggctcgccgatcgtggggatgaagcaaggttgaccggtcgtgtcaccgaaaaggggaccgaggtggctatgcggatgggagtcgagacgcaggggctctgctcgggaagggtgtgggctcaacgctagcgccatggtggacaaggccgcgcctgccgaacaggg

SEQ ID NO: 53013 - DNA, 1372 bp, Zea Mays
gcccgcgcacgtgacgacgaatttgcgaataagcccctgcagtttttaataacccgaaggagtccaaaacactatttaaaacagtcactgacactttgcagaaataccctcgcacttctatttcttctccacaaacatccctggccacgacgcgctcgccgttcatccctgacgcggcccgtaccggccatcgccggcgatgactgctacggctaacaaacggagaggcataactgaccaaggacgatctaagaacacccatttatttgacctaaaccctactgggaacagtctgtccacgatcatggcggaaaccgagttcgtgaacacgcgttcccgccaaaccatggccgaattgagtaaacgggcgccacagtgagcttcacaagcgtgcagagtcatgaaaacaatacgtgaattggacagtgtcttaccagagcgggctggccacgggcgggctgttcttggtggcgcggcagaccgatttgggggaaattggtgattcaccgacaatggtggctaatcgagggtgggagcgggtgcttcggcttcgcaatttagagacgaagagctgtgcttggttgatttgaacagagggggttaggatgcggtgaatttataggcgcagtgagccacagccatggccatggtgataaccatcgccggccttagctggcgatcaacagcggcgtcgagcgctatcctttcctacgagcttgccacgttcccgtcgcgacagtaacgcgctcaaatcagtgagggcgtggatgaacgaggaggagcggcgccgatgaccggatatggccggagtgattagtggccgcgtggcggccggaatcatcacgctccaccgcggcgatcttacccggattaaaaagatctttgcgaggagatgcacaacgcgcgcccatcccgaccttggcgcaaatcacggcgcggattggtcttcggcggcgagggtctgaagcttatcctcccgggcactgtaccatggcaatgttcttcagtgctcctgacagccaaagtttagggtggattttctctaaagttttcatggcaactcacccaaatttctgcagcaaagttgtagagttacaaaccagctacatttagactatcgaaactaaacttagttgagcactagatcatacataatttcaattccaaagctcgaccaataacattggtcgtcatttttcagtcagtaacccgaatgacagcccaactttgggtttaattatctcccaattcttcataacaacaatgcttaaccccttaaacaaagttgttcacctttaatagctctacaatattgatgtggtgacctagggaaaaaaccttataatttaaaaattacaaagctccaaagttg

SEQ ID NO: 53014 - DNA, 744 bp, Zea Mays
agtggacaaactgaggcacgggctgatgtgttgggtgtgtgattacttagcggagctcactggggcggcaatttataggttccatcggcggtggtggctaatttttgagaagacgtgcggtggccgcaaaagagagtgagtcatcgtagcggtctaccgtggcggtcactgggcaatgagctacggtggttactgggcagtcactacggctcgcgacgacgtggtaaatggcctaaggcgtggcacaaccacggtgaatggtgcatattccggtgacggccgctcagccacgtcgccggcgcaagtgggcatggcaacaaggcaaaacagtggcccgagttcatcctcaacgcgatatttcttaccccgagcagttatctacacttcactgagcacgaatcgcaacgatggcgacgatcatggcgcgggatcactggcagcgatacactgaatctggcgatcttcgtcaggtcactgtaccatgggaacttgattcaggcgcctgacagagtaggtttcagggtcttgatctcaaatttttatgtgataacttgttaaccttcctataacaaagttgttgatctatactccagctttaatcttgctatagtaatcatagtcaaacaatcactggatcatggtcaaatctgatctcaaagttcacctaacttcactgctagccaatattcagttcaaagactgactgtcagcccgactttaagtccttttatttccaatttctgt

SEQ ID NO: 53015 - DNA, 400 bp, Zea Mays
gccatgaaggaggccaggcgaaccaccagggaaccactcgagtggattctgtgtgtggcctacagatcaccctcaccatcaatactgcgcatgccgcactaaaaatgcgcctagcaccgagccacgacatgggaaagagtcggtcctcctcccacttatggtctacaagccctaggcctatgccccacccattacctatgggccctaggcctgagtactttgatgccttacaaagcacacaagacaacgatggaaagctagaggccaggctatgaagaccaagggtcagcgtgagaagaggaggacaagaggagtaatgatgacgctcggactccatcacctgcacgcttccctaacaatcttaaatgagcacgattgggtatttacatgaggatgagta

SEQ ID NO: 53016 - DNA, 445 bp, Zea Mays
ggcgattatgacggccgtgtacgtcctcaatcgtaccatgaccaagggaaatggcggcaagactccatacgagctggtgaatggagtgacgccggcagtacaccatctgcgcaccttcggctgtgtcgcccacgtcaagcacgccgcgtcacacctcaagaaacttgacgatcgcagtcgtccgatgattttcgtcgggtacgaacctggctccaaggcgtatcgagcctacgaccctggaacgggtcaggtccaagtcagccgcgacttcgtcttcaacgaggacgcctgctaggattggaagggcgagcagaaggaggatctcctggacttcactatcgaccccgtcgtcaacacatttcctgaatttgcttctgtgtcaggttctcgtacacgggagctcactccgttgggagcgcagacaccggtccaggcccactcgccg

SEQ ID NO: 53017 - DNA, 811 bp, Zea Mays
atgtatatgcatgactttgtcataagaaaacatcctatctaaggatattcaacaatcaagaaaaatgtaggaaaagatacccttacatgacattaaatagagttatgtacatcagacttaaaaagttcattacatggtcaaactattacatctatatcctccactatctctgatgtcgctgccttgctatcatcaaatagttcatagaacttctcattagagcagtcagtagcaactccttcattgacccgggatatatccatggtaggatagtgggacctagtcaaggctaggcttagggtgctagcccactccatacctacccgagcaaatcaagatattcttttagcaaacccactagcttttggggaatggaccaactcaatgcttgggaatcagacttgtaaagacaagttaagcatgtctaactgacatgccttcaccagttgtaggctatgtttcatctctataaaaaagaagagcgagttacaccctagtatgaaaagatcccaacaaagaagtatgggcacacttcccaactcctatgccatctccttgcctttaagagcataattcaactttcatggaggacggagttggtggccttctccctttcaagttctttgttgaactcgaccaagctcttcttcaattcaccattactactcatggctttgttcttctcggtaaatgctaagtccatagctgtaacaccctaggtgttactgtacgcttaacgacgaatatgaacgactgcccaaaatatttcgcgaagctcggactttagtgaccttcaaaaaatgccgagtcc

SEQ ID NO: 53018 - DNA, 516 bp, Zea Mays
aatgtaaaaaaggcaagggaactggaaagaaaaatacatgtttccttcgctttgtcagggtaagtaccaaataaacaatgagggcctgagacacgccatgattctcaacccaaaaaaaagctcaccacgcgccttgcgataacatgattgcccgcccagctggagcttgactaataatatgacccaaagtcatgcccgcggccggaagtgctcacagagatccgtcggatgggacgcagttcgaaacctaagaatcttttagatcatcctggcattgtactggcgtgcaagaacacactattcggcaccttttcggtgacagggaggaaacatcttttgactcctccaaatgcaagcaagcatcttcagaagctactacaggaccgaagcatcatcgatctgacacgaacacagaaggttcagttcttgtgtataggttcagatggccattgtcgtgatatcttgaaatatcaaacaaactttgctcagagtacgataatatgcgaaagccaaaac

SEQ ID NO: 53019 - DNA, 284 bp, Zea Mays
gtaaaactttcggaggtgctctatgttccaggaattcccaacctctgtgccatccatttgagtgaggcgatatgatccgggccgagtgacttctgctactatgaaaggcccttcccataggggtgataacttgtgccgtccctcccccgttagaattcggcggaggacgaggtctcctattgaaaagaaccgctgctgcacagctttgtcgtgatagcgccttagagtttgctggtagcgtgctgattggattactgcattcagtcgctcttcctcaagtacat

SEQ ID NO: 53020 - DNA, 674 bp, Zea Mays
cagagatagacttgaaatccgaagaagaataagcatggagctgaagtgagggtgtgctataaaagaactgacgacggccaatcaatcaatggtaccgcaaaggtagagaaggacatgaagaagatgaccacagtggatgctactgggagcagacatgaactgacttagaatgtggacgctggcgaaggacactatgaccttggatgcatgggactagaaggcggagtagctgaaggcgctcgacaccatgctgctcatagaggcaacagagcgctgggccaggtggcagcacttacggcgcgcttcgacgagctcgctgttgccgatgaggtgtctgtgctctgggcgtgccttgccgtcgtccaggagtcgctcacggacgcagagttgcggacggctcttgagaacgttgcgagggtgacacgcgacttgaggcggtcgtcgctgagatggagcggtagctgcaactgctccatgagaagaaggcagctgaggcttgccggttgaaaatggaggacgaggtgaaggtaaagttggaggaacaagaggtcatgagtgctatggaggcagcgatggatttgagggtgtagattttggagtcagagctagctgctgccctatctaggatgagggaaccgaaggctagggtattggctaggagagagagtctcatt

SEQ ID NO: 53021 - DNA, 901 bp, Zea Mays
ccctcgcggtgactttggtgtggtcgaatgccgaagaccgtcgatgcggtctttttcgacatattgtgtcttagtttttgcgggggatttttgcagatatattacatggctccgcctcgttaaaaacctcacccccgggaggaaaagagtgcgggcctgaataacgttgtttggtgaattacaagggcgcgtaggccctgaggacttagacaaaaaatttgtgtagattgtcaatattccaggaatggtctaggtcttcgcctgatggcgttgttagcctgtatgcgctgggggacgtcttcgacttgacgatgaatggaccttcccactttggctccaacttgccccgtgactctgtccgggtggttcagacgagtacgaggtctccttcgttaaattctcttgggacgactgcgtggtcgcgccaggccttcgtttgagcttggtatttgttgagggcctgtagggcgaagacgcggtgtccgtcgatgaggtctttggacgtgggttcgtcgacgtcggggacggcagatgcgcttgttcgaggggacccgtgctttatttcctgcggggtcatggcctctgatccatatagcagtcgaaatggagtgaatccagttgcccgacattcggttgtgttaagtgcccagactacttcaggcagttggtcggcccatttgcccttcctgtcgtcgagaagcctcttcttgatggcagtaaaaatcttgccgttggtgcgctcgatgacgccattagattgtgggtgatatactaaagcaaaggcaagcttggtgccgatggagaagcagaagtctctgaaatcctggctgtcaaattgtttgccattgtcgactatgagctcggacgggacttcgaatcggcaaacaatgttttgccagaa

SEQ ID NO: 53022 - DNA, 516 bp, Zea Mays
cagaaccgactcacaagatggtaaaactgactcaacaagatggtcgaactgaaggtttcaattgggagacatgaaacactgaatgaatggaagtggactccgacaactttagtttatatgctacttcacccaccttctacaaaattttgaagggtccaaagtatttgtatgacagcttgtgactcatatggggagcaactgaagtcttcacattgggttgaagtttcaactacagcatatcccctacttggaacacacattctgaatggtgcgtggttgcctagtgtttcatacgcaattgagccctaataagatgatgatgcaccaaccgaagcatgagatcccgctgagctaaccatgaactcaagtctacatgtgacacagaatcatcgattgaaagaccaaagtggcgaggagaccggtcaaacaagacctcaaacggtgagcgacctagagaagagtaaaaatagcagttgtaccaatactctgccacttagacaaaactttttgtggtag

SEQ ID NO: 53023 - DNA, 717 bp, Zea Mays
cgggtcacccatgaattgaaatagaaatccacatccacatcgtgaaacttcagatcagatgtggatgcacccatgcatcaaaatcttcacccgaacatgcaccctatcgagctgggtacccgttaggtttcaggtccgggttaaattgccatccctatttagctacaccctcaactacccatcagtttataagttggttcaatccagctaacatcgactatttgttagccaactaatttcattaacatttttagatagctaactattagctctagtacattcaaacatgttttaatttcacctaaagcaaatccatgtatgtatagtaacttaagccctatagtaatggaaggtattggaccattaagtcattgtccaccactctgggactcaccacatggcagttgttgggggagagccttcgtcaccgaaggtctacaagttactgacttcgtcatgaaaagcaagttttaggtaaaagtcttcatctttgtcaccgggtcgaagctaacaacagggacgaagctaagaagattcaagtttgcgagagtactaagccatttgataatgaaggaggtagcttcaggtggcaagctgtagcttacaaagcagagacgaagataaaaatcgtggaagacctgatctgcaagatatgtagatggaaaagtacaatgttgccctcataatgtttgtagtaactatgtataggatttggag

SEQ ID NO: 53024 - DNA, 668 bp, Zea Mays
gtgaggggccccggtgggggcagatattgccagagacattcttcagctccttccattccacagcgtgccaccgccttgcaacttgcaagctacaagttctcctactctgcaccttagccggttctggagcttgctgacgacgctgttttttttttttttgccccctgctgtgacactcgttgacgttttttatttttagaaggttcgctgggctaaggacgtgatcgatggggtacgtagctactggtgcattaatcaagtaacacacaaaagtatccgcgcatttcggcatcggaaggaagtagtagtagtagtaggtggtggcctcgcccactggcgcaacaagtcaagacaggtatgcatggatgggatgttccggccggccggggagtggacttcccttcttctttgaggctgagggggggatcggttctctctgtactgctggcaggacaaaacgatgacaggaaacgacggctgtgccagccaaaggcgctgctcccctttctgctttggttgctctaacgacctagctaaccaccacgcacgtagtcgtactcagcaaatgcgctggaccgcctggtgggtttcatttggatcaatcagtcgaaaattcgaagcggactcacgcatgcaggctgcacggaacggccacacactgcgcatgc

SEQ ID NO: 53025 - DNA, 391 bp, Zea Mays
gggactataggtttcattgtttggggccgaggtagacagtggtagtcgggattgacatcaggctcgatgttgtgcacatgcgtcctagttcatctctcagttcttgcgtagtaggtccttggagatgagtgtcggtgtctagaggcataggaacgttagtctctatgggcgccatgactagggttggaccatttcctgtcgctactctctaggtgagattgggtctcaactgaatgtggtggctagggtttttaggagcacatgaagcattggcttctgtgccaactcctatccttgtcaatagagtgtctctgactggttaccacaactacgagaggtttacactctcgattagaatgtgagatcattcaggttcggtcccttgaccaag

SEQ ID NO: 53026 - DNA, 315 bp, Zea Mays
catggagcttcgggtggtcgccagggagctattcatagtcgccctggttgggattgagccccgtggctccctcgatttctcgccgccgtacaaccttcgccttggctccgctgcacaccgtaaacatggtcgattggtacaccgaaagccggtatgttcctctccacatccttgccttgagtcccactttctttttggtgtgttccgggtagaaaatcatgtgccgtgttgatagcgagccggcaccggcgatgctccgccgttggggggcagcggcgccacccagttcggtcgggaggatgaaggaggcctctt

SEQ ID NO: 53027 - DNA, 394 bp, Zea Mays
cagagagcagaaacgcttaaaatgtgggaagtcgaggtacgtggagcttgtaaatgaagatggggagaaggcggtgacaaaggttgcacataaacaacttcggtacatgcctctcaatcctagagtgaaacatttgtttctctcgaggaagaccgctatgcacatgaggtggcataaagattgtacagacagacaagatgggttaatggtgcacccgtcagatggtgatgcatggaaggctcttgacaactttgatccagattttgctagcgatgcaagtaacgttcgtatcggcttggcaactgatggtttcacgccgttcaatatggccgctgcgtcgtattcatgttggcctgtcattgccatatcgtacaaccttccacctgctctttgc

SEQ ID NO: 53028 - DNA, 1089 bp, Zea Mays
tcgcatggtgcatggttttgaccccacaaaaagtaaatttgtaggttagggtggggccagcgtgtcgctatgttgatggctttgctctagtcgaacctaaggaagagagtttagactgatttagagagaactcctatgtccaatatgatgttgaattctttgttacttgcttttatgtgttacaagctggagcgcttggttctcatgtttgtgtaagaagtgttacatgttacaatctaagtttgtgtgcccctacatggtgggcatttccctttatatagtcgaggagcaagggacttgttacatggacgtttttatgggatgcattactcatgtttttggatgtgtcgctctactagtaccttcctaaggtatgtcatgatgaatatgtctacttcatcatccttgaattgaccccaaccattcttgagctgtctacaccatgagggtggttgggtcttgtagttgtaggtgtatgagctcctattgtggggtatgcctccgtgatccgtgtagatagtttgccttgtagttgccccttcatactttagtcttgtatgtctttgctggctttcttccccatgagatgaagtggttgggtaaacagtccctagagtcctctgtactttacctgccattgtcttgcgctagaggcatgcactaaatggtcaaaggatcctaaacaccttggctctatatgctttacctttgggcagtgtgacgtgtggaggaagcacaattgtcctattcaagctcatgattgatcagatgagaatggaccaatctaggaggatttgggatgggggacattggccatacttgagtgcgatttagttgtggtggcttagctgggtctcacctagtgagagggaccaggtcgggggatttcagtcgagttcctgtcatagggcctaacttggttgaggtgacttggtcagagacgagctttttttagagtttgttcctatggaagctttttatcccttcgagtggtttatttatgttcactttagggtactccaattatgggtacactacagtatccctcgagccattggacgggttgtgagattcaatcaaggatttttc

SEQ ID NO: 53029 - DNA, 612 bp, Zea Mays
ctgtacactttgtcatacgggtcaggcaaaccagtggcagtagattcatcttgagtaccatcaatctcgatgtcctcgccgatctcatcatctaatatttttttggaaaacaacgattaagacacgtgtagttatataagtcgtggtatcataataaaaattgaggtacgcacattgcccagcgaataggtatccatcgttctcatcatcatcctcagcctcttcgaatatgacaccctcatcatcatcacctgaatcatgaaaatatgagccacgtaaaagacaagggcatctagggtgggggaaaatgtaacgtgaacaaagatttttaacgagtaccattggaaatgaacgttggcttcgtatgtgtatggtccactccttgttcaaccatgcctgcactcacatgtttagttggactacatgctatcgtcatcgtgcaatattcatttaaaattggttgtaattaccattggtgtggatctctgcagtcggatggggctgtgtccaatcgtctccttccatagcgtcacaaatagtatcctcggtcactgtagccacattccttccaatgtcgtcttcaaattgttggtttcgacggcctaaggtagc

SEQ ID NO: 53030 - DNA, 806 bp, Zea Mays
aattcttcaaactctgtccactttctgattttgaatttcaaatctgatttgatgcacatatatggatagttcgaccaatccaagggttagtatgcatgcacatacacattatgtatttgagaaatgcactttttcatatcaaactacttagatcaaactagaatgaaaaattcatcaaaaatacccaataaatagcctagagagcatatttagaagcgaaatgcaatactacacatgtgtgttcaacctcaagccacatttgagagatcaatcacattcatttcacttctcaatgagcaaaatctagtttcatccaatggctttgtaaaaatatcggccaattgatcatccgtgccaattgaatatatagagatgtctccctttccaacatgatccctcaagaagtgatgtcgtatatcaatatgcttagttcttgagtgttggaccggatttgtagccaattttactgcactctaattatcacacatgagtggcacattcttaaaaaatgattccataatccaatagagtttgtttcatccataataattgagcacaacaattaccggccgatatatattccgcctcgacggtagagaaacaagagatcctccaataaattgacaacaaccggaggtgctcttcctatcaactttacaacccacgtaatctgaatccgaatatccaattaattcaaattgagcacctttgggataccatagaccaatattgggggtatacttcaaatatcttagaattctttttgcgaccttcaagtgaatctctctaggtgaagcttgaaatcg

SEQ ID NO: 53031 - DNA, 382 bp, Zea Mays
ttccgtacggttctcagatcaaggcgtggggccgtcactaggctcgacgaactgatgggagtaagagagagataggacattgtttgccgtgctgacgccgaggccagtacgatggcctagactgactggcttatgtagttatgttggctccccactcctacttcaactatggacgttatcgatcgctataggtcggtatctatctctatttttaaagtatttagatctcgtttggtttctttagtcgactaaagtttaatttatcactaaaagtgcacttgagccacggagggttatggttggaaaacgctaattttagtcccgtttagtcaccctatttagtcacgttgtttggttctttagtgttaaaaataactaaaat

SEQ ID NO: 53032 - DNA, 293 bp, Zea Mays
tactgaagattcttgtggtatacttagcaaattagggtcatgcttggttaagctaattggtaagtttattttggtgttctactgatttccctttaatgtcttagtgagagtttattaaggtttctagctgaatcattagagtgagatttattatttccctctcttcttatttcttttatgcttttaaggtgggtttgaactactagatagcttgataaatttacaaaaattctgcaaaacttacagtggcttcttactggtgtataagtctttgtcgcaaaatttggggctta

SEQ ID NO: 53033 - DNA, 1222 bp, Zea Mays
aaaaaatcttcgccagctgcccggggtatcggaacattcctaggccagcgaccccgataaccttcaacattcgcgtcgaggtttctaggacctcgggcgaagacatcgtttccccgggagctgcacacgtctctagcaattccccaacaaaacgaccagaagccctcagccccaaatcctcagccgttgtacctaattttctctttctagcgaccgcacccggagccttatcccatgaggggccttcatcgaccgagagccttgtctgcttcccacgacgatcagcggtgtccggttaacgattcagctcaaaaacgcggttcaacctagcgttggaaccgtgaatatcccagctcctcaaagtctctgtcctcggtgcgtatttgccaacaatcttgacggcctcggcctcgacctcacgcacaaacgcgtccatgtcttgaccgcgcagatccacgacgaaggcaggactccgcaccagctagcccccagtgtcggcatccagcgggggtaacctcacccagcatccatccatgcgctaggggccaaaccctgtaggcaataaattcctcgaccaagtcgcgtccgctactcaggcgggccgcatatcgaagggccccttcatcttcatcttcttctgccacctcaaattgtggaaacgccacatagcaatgtgaacacaggatggtagggggcagactcagcaacccttcgatatccctgggagctacataaaaccaaaagtcccaccaattgccccacttatacctagcacagggaacaatctcgacaacttcagccgaggtcttcctagtcctcggtgtgaaagtgcatgatccaaattgagctatcttatcacctatttttatcttctgcttgtgcagacaacaattcttcacaaagacttccacagatgactgtccaccgtatgaggagatgacccatatatacttcacaagtgccattactgcatttgttgtcaactgatgaacctgtacctcacacttccgcaaaacctctactacaaatcgatgcgtcgggaggcgaagaccagcaacgaaaaagcttcaaaaacaaccaattcccctctggctcagggacctcttctgcccctggagcccacccgacaccattcccaaaataacctagccgctgcgtctccagcatgcggcccaaaaaaatcctcgaggtcccgaactcgacggtgtgaccgagctgcagt

SEQ ID NO: 53034 - DNA, 686 bp, Zea Mays
atatgagtaactcatcttcggagtcatctgtcgcgcaatcctcaacgacaacttcattccacttgctgcattatcctgcatcacacttgtcaccagttctcttgtaataattggcttctgcttcatctgcagcttgggagaatagctcatcctcagcctcagcctcatcagacttcttcttgtaataagctgcctctacctctgcggcggcctgagacataaactcatcctcttcctcttgagcacgtaatcctgcctcagctagtgcgatgagctcactcaaccttgatgtgtcgtcctcctcttcttggtgtaatcctgcctctgcgagagcgataagctcactcaatctagatgtgtcgtcgtcctcctcctccatcagctcaaccgttgccattttatcctaaacatatctcgcatgcgcctcatcggccaaatagtttacgccgcttgcaatctctgaaatataatgagaaaattaagttagcaaagtcaggataaataaattgtactaacataattataatatcatttatttcacttacttcccttgaggcgatcagcaagattatccaacatctgtttctcggcttgagccgcttcccattcccttgcatcctgtgctctcttctcatctgccgcaaacaacctcctatactctgcacgcttcgggctatcataaaagg

SEQ ID NO: 53035 - DNA, 632 bp, Zea Mays
aataatgttactaatgtgaacttgacactgctacggagttgacacgaccgaaacaagtcgaaacaggtttgcgacgcacaacgcatcgaatagctaacaattcgtggctaaataatgacgcgacgaacggacaccctagattacgcttaaacgcggaaaactatatttctaagttcaacatagttaacatagattatttgtgtggggtattttagataaagtgaattatcaattaatcaatgatttaaatgagaattaattactacacatggacgattatagcgaagtgattaactaatacgcgcggatcgtgcgcgacacgcgcgaaacagtgtgaggacaatacgcaaacaacgacgatggcacgcgcaatacccgtagctgcgagacttgacgagtacgtgacgcgctaagtaacagtagcgaggcacggcgaggagcatgcgagggttgtgcgcaggggctgcactaggcacatttagcagctgagcgctggccgcgttcgccatgccagagccgagccacacaggtggacacgaacagccgtgccacgagctacacagggaggggagggagaagaaggaggagagagctcacctcggcggccgacggggacacgacacggcggtgct

SEQ ID NO: 53036 - DNA, 469 bp, Zea Mays
cgagccagaggccttcttctccctctgtgctctctgctctctgattctctggcgaccaccctctcctctctgatcaccggcgtccaccgtctccggccatgctctggcgacctccagccgctgcgctcgtcccttctccctctggtgagcagccttgccttcactcatctctcttctctctgattcagcccagtgaagccccctcttccaccctttttgtgccaaattccaaatcctgtgaatcccagtgaatccatgttgtgcaatgtgttcctttgtggccattgagtgtccttgcaggttcctagctccttcgggagggttttcccaccccaaatagtcttttcaccgaaaccctagaacttcgcacgtcacgtgctcggtgaaatgcccaaaccagccaaaaatgctccaattgaacccaaatttttcaggcaccttcacaacacctccagtaacatattcgcaa

SEQ ID NO: 53037 - DNA, 299 bp, Zea Mays
atttctattattaactctctgtttttactatattctggactgcacatcaaattccaaaaaggccagggtctatcctataaaaaaattcatagactcaatccccactagagatgaaccacggttaattctctaattctcagggggttctcatgaaaatgtgtttacgaaggggtactggccaaatctggccgttggattgaggatgtgtgacaccgattatatcggtcccttgtcgaatcggtacgacacaacagccgttggattctatatctacggctacgatcagacctaccagagat

SEQ ID NO: 53038 - DNA, 482 bp, Zea Mays
caaaatagtggtgttgttgtaaaaggagatgaaagttctagtaatattaactagtacggtgtgattaaaaaaattattgcactatattttcctcaaggtaaggaagttgtcctctttcagtgcaactggttccatgttcctactaccaagaacaaagaaataggctaccaaagggattagtatggaattattgatattgataaaactcggttatgctatttagatgagccttatattcttggttcacaagatgagcatgtgttttatgccaattaaacaaataataagattggtgcactgttgtaagaatgaaaccctaaaatctgttcgccatgccagaatctaaaaatttagaaattgatcttgattcactggacgtgggattggaaggcatgagtgcttcaagcagcgatgaagtattggtgaagtggtgaaggtctgacatggaaggtgtaacaggtgatgttgtgtccttgagaaag

SEQ ID NO: 53039 - DNA, 598 bp, Zea Mays
gccagattaaaaccggatgctacctgtgatgagcattctatagtcgtatagtagtctcgttttgagttgctaatagtcctagtcaatgaacaatgatctctccctccgtgcgtctcaaatttgggtcttgttgtgctgttgttttgtatgtataatcctatgatatgtacaaaatttgagtaagggataaaagaatatgttttcgggagtttcgtagccaccgcatgctaggcccatacatattactctggtacacattatttgtgcaataaccaggaggttgttcggagtatttttaattggttatatagacaacatggtagctacactacactacaccttatcacaccctgaaagctatcacctagctagtgactgatcggatcatatcacacatgcatgatgcacaaaggatccagccaaacacatgcatggtatccatccacaatgggccagcacacaggtggatgagtggggccgtgggagtttgctagtaaaggtgaagcaagactagatggggaggttggaggaatttaaactcccattgccctagtcttttcagccagcctttcatcaatttggtagtaatctttttcga

SEQ ID NO: 53040 - DNA, 394 bp, Zea Mays
cctctatgggaaggaccattcatagtagcagaagtcactcggccgggatcatatcgcctcactcagatggacggcacgaaaattgggaactcatggaacatagaacacctcaggaagttttacccctagccgtatttcaaaagctattgggacaacaatgtactctgtaaactgggaaatatatcatcaataaaaagacttcaagagcgctcaaatcattcattgtcaacctgcattcttacttaactcagggtgaccactataccctactaacggagcaatcggcttaagtcgacgatgacttaagacggtgcaacatgctcacgcttacttaactcagggtgaccactataccctactaacggagcaatcgacttaagtcggcgatgactta

SEQ ID NO: 53041 - DNA, 571 bp, Zea Mays
aaaatattagcagatggtcactagtcagaaattcagaatggtgagcaaattggcgcataacaaaaagaccaggtgatttcaattaggaatatctaaatgcaatccctaacgaaagagaaacacacatctcaaagactcaaaccatggtcgacataacaagtgattctgtttcataccagattactagcatgaagccaagccatgaactaagatgtagatgttccatggatggtgttgcttcctgttcctatacctgttgttgttgttgcttcttgttttccttttcctttaccaccaaattcttcttttagttctgcaatgagataaaacactgtctagttaatatgtgttgatatgcaatgaaccattgaataataatgaaaaaataaggaatgctagacctttttctagcatggttaattcttcaaggttttcttcaatatcaataggtattgaccacctcaaccaatcttgtgcacatactagagcttcaagcatgaatggagtaagggaactacggaagtcatctaaaatgcccccacttgtgctaaatgctgactctgatgctaca

SEQ ID NO: 53042 - DNA, 1387 bp, Zea Mays
ccaattcatgaactagaaaaaggtctttgctgcctatgtgtgtacatggtttcaaggaacactacctttgacctgcctacgtctcatgcgggggtaaagactcaagtaatgtgctgcagtggaatgccatcatccctcgccctatagactgcaacggtaagtcacggactttccttaattaatcatgtgggggtaaagactcaagcatgcgggaatgcagcagcagcgtagccggcaagcaatgctgctgttgggctggtagtggtacgataatgatgagagactgctgctgctgggctggttgtacgataatactattagtgatgagagtgacgctagctagctgctctgctctgcgttgctctgctatgtgtccccgatcaaacgagagagggatggcccatgcagacgcagcagcgcccggctgtttgcatgtgctataaaatggaccaacacctcaatcgagagggacggccgggtcacaatcgccactaacctacccactatacgtacatactatagcagccgatggcctcctcctccgtttcgctgctcgtcaccacatcatgttgccgccgtcacctacttgctcctcgtttagttgtaggcttgatttcaccagcgtgacactcagtaaagattactcttcggttgtgttggtaatggttggcgagtgctgactcttgttgttgggaagcagcgacctagcagcaacaaaagtcgctgtataaaggagcacgcatacgatatgatgtgcggaaatgccgttccagtcatgagtgttccagtcgacatcgacatgacaattgaatgttttctcgatatcgatcgtcttcggtcgtggaccacatgcactcccaaccgctcagcttgctagctttgacgtcaaggcgacgtacgggtatatatacactgcttgtaggtcgatgtgaacatagcaacgtcagcgtatgtgtgagcttttcatggtctttcgtaatcgaacgatagtgtacaatagcaatcaagctactaggaacagtactgtaaccaagaagctagcttttgtacgtagcttctcccccacacacacctaaacacacttaataagtaggtgtaaaaaggaatgcacgcgcgtgtatacattggtgcacgtaacatctatatatattatctagctgcgtggtgctgctagctttacgtttttctacacttgcacttgcttgacgacgccttgggagaggcctccaaaacatccatcttgtcgatcagctcgtcgtcacccatcccagctatcatcttctccgtccagaggcgtccatcgccggcgtacgtcctcggtccaaataaaaagtaatggggcgcctccgttgtgggtcgttggccgaaccctcctcgctccatttcc

SEQ ID NO: 53043 - DNA, 386 bp, Zea Mays
gtgaaactggggaaaacacacgcgattcatcggctacaaattgggatgaccaatcccaacccctttacgggatgccgatagacacatatcctgtacaaccacagcctcgtgcgcacatcgatgataaacccgccgatctgcgcaaaccctaaatgaccaattcggaccgcaccgctgcacagcaccagacagtccgaatacatcactgaacggtccggccatgcggtcgggcagtccgcgcacacagccagacgatccacgtgtttgaccggacggtctggcacagagtacgcagaacctagtgataattattattacccatctatacatccgtcccagccaaacctcttgttgcgtcctacagtgccccagcaccgtaatgctac

SEQ ID NO: 53044 - DNA, 776 bp, Zea Mays
aacttcctgcaacgagttctgtccattcagtgttccatgtatcacagttgaaacctctcatcggcactaacatccggataagtccatgtttgcttaaattgtcgcaggatttcaaggtgcccgagtgtaacatcccaattttcaactatggaataaagcttattttaaaattattgattgatttgttagcttaatccaaactatgcaaaccaaggcatccatcagttattcctctatattcttctaaattatagatcaagcttgtctttcaccatggtaacttttagaaaatgtctgatgcccgctcgccataacgcacgctagacagagggagcccacaaccacttgtggcaaaacacatgcataaagaaaccgcaagcctacctctagccgcattagatttgtgcatcctggcaagccccacctacatcctctgccctgagacagccttgtcgtgcgcttcgagctgctgctatattaaagtgctgggttgtagaccttgaagtgatacctcagtgcagaaagccactccggcaagacctcgtgcacccgcctgagcacatgccagccacttgtcacaatcacaacaaaatgaatgtcccaccatgagccaagttaccctaccaacctcaggatgttgcgactacactgtgacgacgttgccactcacaatacgccgatcaagactccctccattataaactgtcgttcctccgcctataaatactgatgcccttaccagggaacctcacagtccagccaccatctcattgtcg

SEQ ID NO: 53045 - DNA, 1077 bp, Zea Mays
tttgattatcagagaacttatgtaatgttttagggtctccgactaaaactgctggatttgtctttggtttctaagcattgggtccgcgaagtcaatattgtaaatttcttatttacgacatcgttggatctccacccttcaggaaacatagtaggtatatatatgaatcagtagtgggcaacagagaagttaaacatttacagaacccaggtgctgataattaaaagagaggtcgagcacattccgttggtatatctaaagtagattgtcaaatgagagccacatcacatcaacgatgttgaagtagtggtcttatacatgcacgccaatgatttatgtcccatcgactaattcctttatataccggtcctagaatctacacaattgagttgtaagttctgcaacctcttctcgtcggacacaagcctggccatgcttgtacttccatgcaaactactatgatgacactttttctttgtaggtttcttcatttgtttcccaatcatgcgctcatagtcagaggtaggttgattctttggtggcttgctcatctttacaaagaaaacttttgttgaagggtctattggtgtctatagaactttcgtttttaaatgtttcttcaccttttcgttgacaatgtcatgtatctccttgtccgtcattttgcagtgtagttttgtgggtgtggacttatgtaaagagcaatggtaaagtaaacgataaatggtagatgaacaacaagactccgtttagtgtttagacttgtttaaacgtgcttaaatgtaattaaacggtcgatgattttgtattgtagcaacatttcagcaagactaagtagcttttcactaacctttttaagtaaacacgaagcttttgatgtcatctccattaagccatgtatctacaaaaagaagtaatgatgccatttcagcaaacatttagtgtttagtatgtagtatgtaaatgttagcaagagtaaatgagtaaatccacaaatataattcagcagtgtagagtcaacaccatttctctacaagacagtgaagctatgcaatccctcagcgtctagcatacaac

SEQ ID NO: 53046 - DNA, 652 bp, Zea Mays
ctttttaagtgattagctacagtttatattgaacaggtcagtttagatgaagaacggaactctttcagaagaatcggataaactttccatgactcgctggcttcttctagacaaaaagttagagcttctagaaaatttcagactagagaagaaaaggccatcaaggatagatggaggtgattcagacttgagagtgagaccaagatcatgcctatctacacacaggcattcctttcagcttttttgctaaaagatgctaaccgaattctaaccaggacacaccatcacgtcaaatcaaaccagcggaaggtcctctagttcagtgttcagaggtcaagtttgttgcaaccacaggattaggacaggtccttgctcgacagcgactccagacctgacctacgaatgaatggatgaacggcacaatcagacaacagtgacgagttcactggtcagagtcagtggtacagcggcaaccgctgtatccttcgccctaagcacaatgcatgcggtcgccaaaagcagattaggagcaccgtaaagcagacgctttgcacctaaaatcggcaatgattaggccggcaaatctgtcattttgtggccgatgcatggtacgtgctccgaattttctttgacatgcatatttcagggtcta

SEQ ID NO: 53047 - DNA, 642 bp, Zea Mays
caggaacagtatatttgagacccgtacaggagcggcccaatactgtttcccacgtctttcaactcccacggatatttcacggcgctgtttctcccctccgcggccgccaccatcaagaccacgatccagcatcttgcaaacgccatctaccacatatcccttctttggttcctggtacgttgctcggatcatctccacactttttctccaccattctgttgtccttctccctttcctaatcgttttgatggcaggttcgatggatgctcgacctcgttcccccatgtcacggccgtcgacgaagaatcggcgtttgtctttgaataaggttcttgatacaatcggaggtggttctcagcccgcccaagccacatctcgccaagtaccagcaccagcttctcgccgtcgtccctcaatcacggatgctgatcatcagtctgcgtcacaaccgacacacctgcctccattgccaaacatggatgcgtacaggtagatttctctgttatttctttacctgttttccttatgccagatttaggtttcgtgcctgtacaaagttagtttgttttttctcgttctcttgccagatttgggtagtttgtttattttagtttatgttgatatttgtttacagtagtacac

SEQ ID NO: 53048 - DNA, 510 bp, Zea Mays
gcaatcaatccgagccacctcgaagcgcaagaactcggttcaatagttgtctggggcaccaaaggtgacagacatgtagaggtgcccagtgggtactttccctcagttggcacgatgctgaagaagggggtatccgactaggtgagatcggcgatggagactctcagagcttgaagtgttcgaggaaaagtgacattgatgttgttgccaccatctactaacacatttttaactcggctctctcagatcacaggatcgacaagtagggggtacttgctggggtgatcaaagttgagccattggtcggcccgactgaaggatatcgtgtgttccgaccatcggtacggggctggagcgctgttcgtggccaccagaacctaccggacggtgagtttctgttgcctcctgttttcctatgccccgtgtcctcaaaagatgaaattgacttctcggtaaatgcatggaaaagccccaccaccgcctcccctgctgctgaggctggcccggctc

SEQ ID NO: 53049 - DNA, 422 bp, Zea Mays
ttttctttcacggtatcgggttattgccacaatttctactccagcacttggagagtaaaaaaagagtcaatttagctcctttagtcacgaagtctcagctctctactagtgaatacttgttgtccattctagattgcgtgaaaaacaatgtacatcaataagagactcccagtaagaaactatatacctattgtccattccaggttgcgcgtaaaacaatgtacatcaataagagactcccaataaaaaactatatcgagaaggttacctagtcctccatcaacccatctaggtgctagcaaataccaagaataacaaatcattaatagcatcctaatgaaaaccaatccaataacactaaaagtgcacacaaagcatactctcacgattggcaatcttgacttggatatggcttcacacac

SEQ ID NO: 53050 - DNA, 455 bp, Zea Mays
catttgctcgtacatttgcaaagcaagtaactttagactacagcttcacctttcatccgcccgtcgcccgtcgctccatctttctgttaaagattgtctgagaggaggaagaatataacatgtctggtttttttgcagggatagatacggtattaattgtgtgctaacttttcgttcgccggttgattaccagtggtggtggaaatgtgggtgcttgctgtgcaccactagtacttgcttgctttcaggccttgacatgcatttttacatcttctaaattattaaagcagaataattatggtcattgtctcatctttagttttcgatctacaaaaggctatcttttcatcttatatatgggctatggctgcagcagggttattgcggggttaattaggtgctagtgatgagtgacgacgacaccggcatttattacgtacaacgttttatttcat

SEQ ID NO: 53051 - DNA, 395 bp, Zea Mays
tggacagaaacaccacaaatacaagttgttcacttaataaatatctgcttcattggattcatcttgactgggcaaatgcagtacaccggcatggctaatgttaggatacgaggttccaaatctttgcttgcattggcaactaagggtgaactcaaaatttggaggggccgtctgtatggactacaaatcctaaaccgaaacaagggtacaaagtttgttgcagcaggtacctaaatgggaggatgaacaatgtaacaaggtgacagcttaaactaaaagtgtggatctggtaaagtcgtaagggttggggaaaataaactaggattgttgaactaaaccataggtgttgtaaatcattgttcaatgaagtattcatatgacggggtacaacatgg

SEQ ID NO: 53052 - DNA, 378 bp, Zea Mays
atattcataataacaaaatattagttatcccaaggctggggtggtttctcctcaggattatttttctaagattttcctaagttttcattgtttgcctaaaataaaaggaaaggcatttcttttgcactaacagagggtctaataaaattttccagtgaactatattaactaagtgagctaacaaaaatgtggttgctccctggttcttattttaaactcccttttctattttctttaactttgagctaaaatgattttaaatggtaaaacctaccttaatttggtgtactgaggggtttactatttttaaacagattagggagtgattaagtacttctctgatttttcttcactccagtctaaaagtgtaactatttc

SEQ ID NO: 53053 - DNA, 525 bp, Zea Mays
gggactttcagcgtgacagacgcagtggaaaccgtaggcaccgcagtctttccggttgggcgcgttcatcgcgatgccggggagggatggatgactgctatagctccaacgacaagcataggcattcaactcctttccgtcgtcatggtcgagggatgacaccgtcaactcgctgctgggtgcccaagagaaagggcaaaactgtttcttttgcagaccctgttgtttctgctgtctggccgcaggttggcgacctggagcttgctgctggtgttggaagcacgccagggtctgttggcggtgtcaaccaggaagcctcacatgaccctgatgcctccaagtgcaaggtaaccaattccgttgatcttaataatgtattcgccacaattctcaatagcttagacagtgttctggccctgaacaattctattcctgccaaggccccagctgtcaaaccgactgaatttttaggctcccaactggtaaacgataatcaagctgtagaacacaacttgccagctgctg

SEQ ID NO: 53054 - DNA, 600 bp, Zea Mays
ctcgggatgagttcgggacactgtttcgccctggccgttgtaccccttgccttacagccggtccagataacctccccagagttggctgcttgccactcgggtgccacgtgcctaggtgctctaccacgtctcagtgacttcctttagcatgtccggtcattgccggttgtcaggccacggtgaaagccacgaatcacttgcgcaagtgacctccccctctccggcccgccagcgtgccattccaaattcaagatccatcgccctcgggcactataaattaagcatgccatcagctctgttaagtcatcacggagccaaagcacccgctactgcctccgattagccaccagagagctccaacttctttctccccaaatcagttttccgcacccgtgaacacctcgtcgtggccacacgtctacaagttagctcatgctcttccgcgtgatgttctagcctctctcaagtcccctgatactcataaacccttcgaattaaactagatcgccctgggtagcccagaacacgtctgtgtgttcttagtttcctccgttgtcgtggacagtgaattcccaacccggaattgtgcaattcattgag

SEQ ID NO: 53055 - DNA, 1285 bp, Zea Mays
cgggcgtaaagactccagaacacgttgttttccgattgggccgactttggtcatagtttgttgtgcgaaaacggtatccattgatgtcatgcccagaatatttcatgaccctataagcaaagcggttggctacttgtctcaactcggcactcataggcagatctctttggccctgcaagtattagcaagttaaaagacgctaaattgagttcatagacagatctctttgacaaactaagcacgtaccttacgtttgaaccaggaaatgaaatcaagcaatccatttctcgcaccctttctaagaagagtatcatattcctgtggagttgggtcccttgattgatgctagaattcatgtagaaattgttccatgtatggcgtcacctcttcaaggttggtcaatacatatagcatgatatgccgccactcttcatgtgttagggtcttagtggtcgagccacttgtgcttccgagttggcctcgaaatatgctgagcttcgattcattgccgccatcattgtaacaagggggtggattatgcacgctcggtagtttgccaccacagtaagttgttgtgaagtttgacacctcctctagaatgtatgcctctacaatggaagcctcgattttgcatttatttctacatttcttttgaatagtctttagacatctctcgattggatagcaccaacgtccctgcatggccccccattcgtgcctcataggagagatgaagaatcaaatgctgcattggattgaagaagccgggtggaaatatcttctcaagctttcaaaataacacgggtgccaatctttccaagtctgcaaccatggtccgagataactcttttgcacaaagctgacggaagaaatagctcaactctgaaagcgctagccagacatactcagggacatagcctcgaaccatcgcaggaagaatccgttcaatccatatgtggaagtcatgactcttcatccctaagactcgcagagtagataagttcaccccctactcaggttagctgcatacccttcagggaacatcaacatcttgatccactgaagtacttccttcctttgggccctgcttaggacgaaatcggccttaggccttctccatgtctttccaccacttggcggcttcatctcttggtttggtctatcacataacactgccagatccactcttgcctttacgttatcctttgacttatcaggaatgtccataattgttgcccaaagtgcctcgacaacattgttttcagtgtgcatcacgtcaatgttg

SEQ ID NO: 53056 - DNA, 1093 bp, Zea Mays
ataaaagccttaaagatggatctggaacacttacaatgggagcatgaggcgaaggtaagagagattacatatcaatctcccaatggatgatcttctggtggcgatccaccgtgaagtatgataggtactcttacttcgccttctcgcgccgttcagagagttgtcacatcacttcttcctcatcgtgcctcatgcggtcattaaagcactactgatcatcagccgagagttcctctagagttggcttgatgatgttagtgtcagagataacaatgtgacgatctttggaaccagccatttgggcccccgattttagtacatcttgacaccttcgtccccagcagagtggctaaaaagtgtgttgacgtcgatctagcaccaaacactaggtgtgaaccgcctggcggtgctctctacggtagcgtcggacggtctgtggccctaggccggatggtgcacgacctcgctgtaggagcgacttctccctgctcacttgcctaacgatcttcgcttggggctcggacggtccacatgtgcgcaaagggtcttattctctggaaagaacccaaatctcgcctcccgagagggaccccgttggggaggagagatacatgggttttttggggtcgacatgccacctaagacgcctctagacgacgtcgggccaaaaagaggtgaagaaataggtcaaggaagactaatactagggctagattactcctactccaaaggaatggaaagaacaatgcaaataaggtaaatatgatacataggtttgattgatcgattgtggtggcgtcaatcggccgtaccacttcgtttatataaggggcaggtctagatcaataacaagccagtttttgagttaatcccgtggagtttgttaataaatctcgtaagaaaggagtaaccctaattgattctacacacgcacagaccgtctacgccgccaccacagacagtccagaccgtggactgtctggccagtcaattttggtgctcaacatgttgttacaccacatatataggttgtgaaaaccacctaagtcaaatatgacaggaagccacacacatcataattcccttgcataat

SEQ ID NO: 53057 - DNA, 555 bp, Zea Mays
cctcgcctcgctcctctctagccttccacgcccgccatctctgcttcatccacagggtcacagtcacagggaacccacgcgctgtatcatccatccccacgtgtcgccaggtcagaagggctatgtgatagcggccctagggaagagggccaatattgcttgggcgataccttggtctagcccaattaaagaccagagtgaaaaaatctaatccctaatccccaatgaaagactccatgctcccgcatcctcctagcgtcgtagcgagccaccgccgacgcccgacgcgaacaggaacggccaagccactgtggtctccactagatggtcagctccatgactctgtcgccagttgtcgtcgccccgagcagagccgtgttcccttgcccccgcccgcggtccacctccggctctggccacctgcctccgctcgtctgctaagtcgtcggggtggcgccgggaacgcccatgccccaggccgagctccgccccggccgcctgttgccctccagtagagctccgcccagagctcctctccgtggacccatgaccctc

SEQ ID NO: 53058 - DNA, 908 bp, Zea Mays
tcagggggcactgaaggcccagcttcggtttcagcctgaattgttgcagcttcgacttctgcctgcttcgtttcagttctgggttgtgccttggaagcttcggcaatttttcttgtaggagcaggactaaagatttttgctatttctaatacatctagcacattcgccatccttctcctcttaggagttgcggcggagcttttttgtatcttcggcactgttgcctctgtcgaagggctcaaaatctctggcatttttgttatttcttcaattttttatccttcagttttatcagctgtcgtctcaactagtttaattgaaggtaacttcggcattatagccggctcttcagtcctctacgcaggaggagcggtctcttttgttttggcagctgaagaggccccttcatcaaatttaggtatcacagccggttcgatgtaacgcggccggtgggttagaattttcaactttttcccttcggcacaggctcgtctagagtggctgaagtagcagctttcctctttttcccttgtccccgcagcgggtagcggtagtcggggtaaacgaagccaatcgcgtcaaaaactctgttcagtctctttttccccgatctccaaaggctacggacagtgcattatcttctgtcttggaatatgctccaagcagttcatcacttgtagctttgatgcatttcagccagtcgtcgtttggttcatcaaacttatccccaaacctgaatgtatacttcaaccgaatcaaatcaccttcgctagagttagtgatggtctccttcggcatctcccagctttctacaagcggccacaccctgaaggctatatgttcttgaattaaatcccttatcccaataaaagagcaaacaatgctgaaggccctctgacacgcttcgg

SEQ ID NO: 53059 - DNA, 502 bp, Zea Mays
attcgcgccaccgccgtcctgattcgtgcccggtgaggaacggataacgccggggatggataactcgtacgtggcgccatctcccaagtccagccgaagttcttcagcggcggccaccgtgactcggtaacttttgccgcggtgtcactcatgccgcgacctgcctcactgtgcctcctaccgacgtggtatgcatgcgctagcaatgctatctgtggccagagatcgtctgtcgggtcgccgtggctataaatagcacggtgttccacggtgaggtgtgactatcacacagtgagttgaatcgaagtcgaattcgcgctacctctgcccccacctctcaaattaagtgtgcgcagtaaaactagagttctttgcaaagccgaagcacctgctcccaccctcgattagcctccatagccggagaatcaccaatttcccccaaatcggtcagccgcaccaccgagaatagcccgatcgtggccagcccgctcttgtaagttcc

SEQ ID NO: 53060 - DNA, 294 bp, Zea Mays
cttgacacgaaacccgcaccgctgccatacaatcagagtgtggaggagaagatcccacatgaacatccatggaagtgttagagggagaaccaactcgaacaccctcgggggctgggttatcgcttgcgctacccatccgagccgggtcattcccggcaacaccctcgggggctgggtaagcgccagcaccatccttgagggccgagttctctgcagcagccacctctaaggctgaaggtccctcagtcacttccatgggagcagcgcaatccagaccagcttcctgatcctcaa

SEQ ID NO: 53061 - DNA, 433 bp, Zea Mays
gttagtagaatatgttgcatcaagagaaaccacatcaccaaaaatactataatttttcctacttatggcatcaacccaaaacactcgcattagtcttccatgatcatccacttcaaagtcataaaaaatgcagaattgacttcctttttcctctcgagctgagacacacaaatatctgggcatctacatccttgatttttgtccttaggtcacggtaatagtttttgagatcactcagtgtacacccaacattttgaaatcccccatcactaacatgcatcaatctgaatgcaagggatgtgccaatactagatttatggcaattgtacaaagtactcttcgccctctctgtaacatgacggttggatcgaagaaaatgtcggtggaacggcgatacaagaccatgattatgctgctcaaccattgaagcaat

SEQ ID NO: 53062 - DNA, 965 bp, Zea Mays
ggaaaagatgatgatgttaatctccctcctgctaatgcacccattatccaggggttagtgcttcacagagcgcaggcccgtcgttccgccaatgaacaggtcattgatttcactgccagcggagggtctgcccttcttcaggatatgcgcttccaaaatcctacattctgtgttcattatgtcaggattgatggtaatcgcttctggactctccttcatgttgatttctatagttcagttatccttccaaagaagcaccagccaatcctccatcagcgttttattaactaggatggatgcgaagccattggtgatcccgagatgacacaggcattgaaggcctgtgagcggaaaaggatgaagaccataatgacattccaatacgattggaatgatgaaatcattgctcaattttattctactctctggattaagcatgctgatgaggaaagtccatacaactttccttatctcaattttttattgaaggaagctgatataaggtgagctacatgaggtttgctcacatttgggatttactgatgaggatatctcaggagacaaaatcaagattcatgactttcgtcctcccaccaaggatgaagccaaggatcttcacatctctgagtctgatgaatattggaaatccaccaatctgcacaagtactccaggtacatcaattctctctacagaatgactctcatcccccaaagggggaaattagatgaatattctgggagagagcaaagtcctgctctcattcatgaagccaaacagttctgaaagcttaaatgtttttgatatgatttggcaagagatcatccatgccgcctgcttccctctcaaaggatgtcttcatgcccccttcatcatgaaaatgattgaagtggtgacaaaatttcgatttgaaaaagggacaagacatctctcctatacccccttttggattgacccaaacaatcca

SEQ ID NO: 53063 - DNA, 798 bp, Zea Mays
ctttggtaattttcttagtaggagtaggggtcaaggtttttgtggtctccatgacagcgtctagcacgctggccatcctccttctcttgagagttgcggcgggagctttctgcattttcggcaattctgcctttgcttgtgggctcagaatttctggcattttcactgtcttttccacttgtggctcttcggccaagtcatctttggcttcagttggcccgattgtaggcaccttcggcactactgtagacccttcagcgctctgagtggcgggagcagcttgtcttgcttcggcagtagaggaggtcccctcaccaaattcaggcactacggccgtttcaatataccgaggccggtgtgtcaaaaccttcattttcttgcccttcggcacagcggtggctactgaagcagcagttttcctcttctttcctttccttgcgtcaaaaaccctatttaatcttttcttgccctgacccctgaaggctgcggacaaggcatcaacttcggccttggaatatgtcccaagcagctcgtcgctggtagcttcaatacatttcaaccagtcatcatttggttcgtcaaacttctctctaaatctaaaggtatatttcaatcgaactaggacaccttcactggattcagcagtagtctccttcggcatatcctagctctccacaagtggccacactttataagttatgcgctcttgaactatatctcttgtgccaatgaaggcgcaaacattgctaaaggtcttctggcatgattcaacgtcactttcaatagtgaccttcggcc

SEQ ID NO: 53064 - DNA, 450 bp, Zea Mays
cccgtcttcggagctgttgtattcctccccacttgcttatctattcctctcaaaatagtgatggatttcggtcctcggatttttaccaatcggacaaatccagtgaattatgttgagaaattgttatactgaatttagtggtaggttggtattacgacctgcaaaacttaggtttggttatatgtttctttactggcctgtaggtacgacgttcttacatactttaagtaccttgacacattgagagtattagaaggtgtctgatcaatttggatacttgctgatccaagccataggtatttgagcttgcaaagaggtgcgtttaccaggcagtgagaacaaatggtgttaatgttaacacaaatattaagggcacactgacaaagaagaggaaagtggcacataatgctacgaagaaaggaaaagaaatcggtagtggctcttggcccc

SEQ ID NO: 53065 - DNA, 462 bp, Zea Mays
cgcttgcaggctgtcgagggatgaactaagctctgccacacgagctagagctttcgcttcacagtcccaagcgaaagagtgtgaattgacggcccaatcaatggtcgtatcacgttctaaaatttcgtactgcaggcgactcactttggctgacagctccgtaatacggtggctatcctgctcacgtgccctgttcctgtggcataactctgaccgaagttgctccacctgggcttccaggtctccaattggatcattacttccactactacttccttcgtgcctggaggctagctgatatcgtggcacaccaagaggtcctgtaacaccgctggtgttactgtcagtaaaacttgagcataacatcataagcatatcatgtgtttgtcacacctagagtgcattcactaggcaaaaatttcaaacaagttgtattgatgtgacatgtcatgggtaaaaccc

SEQ ID NO: 53066 - DNA, 1070 bp, Zea Mays
acaagtacaacaaagaatggagttaagtcaaggcttgcacgcggcaaggaagcgtatatagccaagggcgagataagtaaaacaccgctctcaaattgagatacaaaagaggagatttcaaaaagcagacctaagataagcatcaaggcaagatctatacattacaaaggtaaggatgatatcaaacaaaagctcaataaaggatggagtcaaggtaaaacaagacttgcaacacgataaaggaaaaggaattgatcaagagcgggataggtaaaacaacactcttgaactgaaatagaggaggtgaggctttaaaatgtaggtaagtgtcatggtaaatattgagagatgtcaagggttaaaggtgataacagacaaggatgtaagggaagaggtaaatgtgcataagaaccaaggatctaagtacaaccaataatagacttaagataagtcttataagtggtaaggaataggatgtaaccacgggtgagataagtatgacaccactcttgaattgagatgggagattggagattttagataacagacataatgtaagcaccaaggtaggatcgatagatgataaaggtaaaggtaatacgcaactggagcacaacaagaatggagttaacaactcacaagcgacaaggaagaggatacaaccaagggaaaataggtaaaatataattctaaaattgatatggaagagaggaggttttagagggcaggtacaatataagcatcatggtaagatatagaggtggcaagggtaaagatgataatcatgaaaagcacaaccaaggatagagttaaaacaagactcatgaagtggcgaagcgaagaaaacaaccaagggtaagttaggtaaggttccaacagagtggttgaagtaaaaatcaattcattaccgagagaagttataaggaacaacgagatcaccaaggatgtgcgaaataaaatgatcactcatggatcatctagaaacaagagtggtcaagggcatgtgaactgaaatgttttaagcggacattgggatttaaagtttagcatacataaaaatgcaagatttc

SEQ ID NO: 53067 - DNA, 349 bp, Zea Mays
tgagcacaaagttgagtttgccattaaacttattcctagcgttgcccttatctccaagagagcatatagagtgtctagagcggagttggtagaactcaagaagcaatttgatgaattgttagagaagggttatatcagaacaagtacttcaccttggatagccctacttttgttcgttgataagaaagataacaccaaaaggatgtgtagactatcgagcctcgaaagttgttacaatcaagaataatatccatatcctaggatagaagatttgtttgatcaacttaggggagcaagtgtgtattccaagatagacatactctcaggataccatcaactcagaatccga

SEQ ID NO: 53068 - DNA, 658 bp, Zea Mays
aaaaaaagagagtcgccaaactctatgaataatatcattcatagatatcgtggcaacgacatgatcagccgcctcgtcgtacccctccagcatctcctccagtacgttgtctttgacgtcacgaggaagaacaacatctcgaaggttctggccaaatcaaagctccccgatgaccaaggcgacgactgcccctcgatgaacgacatctcgaacatgccttgggatgtcatccaggcgctcctcaagggatgacccaacaaaagggagcactccttggttgccttcgacgcaggacatcgtgtttagcagaaaaatcgaacattaggaggttgaaagggaaaagctaaaaacttccaaaaccaaagccttactccgaccccaacatgccatgacgcggcctttttcctgttggacactcatcggcaacctgcatgcaaggatccaactaagaaaagaacgagcatcgggcttaggattgggaggcgtggaggtacgagtacaacaagcaacgacccccgtgcttataaacactgagagaacgtcatgccaatgaataaaaggggatcaacccgtggacgcctcctcagcttccaagcaatttaagctgtaataagttttccaaggaaaatgactcttcagattgcctgtcagaacataa

SEQ ID NO: 53069 - DNA, 459 bp, Zea Mays
cggcgaaccattgtcgccgaaggtctttgaagcagcagagtccacagtcaagcactcttcgggccttcatatatagtaaggaggtgtatctttgtccaaagtgacgccagaagaggagacaagtcaaaaccttcgactttataaatggcactacttcaagcaaggtcgaaggagagagctttggcctacacgcaacgaagagcgaagaagagaaggtgagaaatctagaagacccgatcgacgaagcgagcaaagcgagtgaaggtgtcagtcaccacgacaagtcactcggcttctccactcccttgtcaagatccaacggtcgtctttcactactcccgacgaacctgcatgaccttcactttcatcgtctacaaactccacacttgtgcaccacagaccaaaatacatgttgcacaaatacactcacatcccacttagcccacaactcaatccaaa

SEQ ID NO: 53070 - DNA, 447 bp, Zea Mays
attggatgcaccaaattatttgattgtatggttgcatcgacatgattgattgcatagaatatcttcctaagatataatgtgcaatcaaaacgtgttttgacctttttattttggtatgcatttgctaaacttacaaaatgtgatgtgtttgctagggttggcatctatgtgatccatatgctagatttgtttttgaggctttgcaaaggctggtgtcaaaaataattgtcatgtccaactttgacatgccttcgacaaattttacaagcactgaaatgtgatgtgaccgctggtttgattcagttgctgtatgtgctgaggtactgaaatgtgatgtgactgctggtttgattcagttgctgtatgtgctgaggttggtttccgtttcagaatattccttagacgggcttgtttaactagatctgatcatggaccacctgacgcgcc

SEQ ID NO: 53071 - DNA, 438 bp, Zea Mays
gtggccgccaccgtcggtgctgatgtggtcgcctccgctggcgagccgctcggagctagctatcccgtggccgttaccggtgtggaggtagttcatacctgcagagtagaaatggaactagggctccacttgaagataaatgtaatactttcgcattttgtaaggtactcaagagtactatttattaagcagtattagcacttatctattttcaatgtgttcctgctgtgtgtgatattgttgactcctccctggtacctggccctgcctgggatgcaggcttaacatgttgaggttggataccagcgcatctgaaaagattgtcaacaaccctcgggaggcaaactcgccgggatctggatctgtacacaacttttagctaggaagcattagtagtacacctcatagggttccctgtctgacattagtcgtcctttg

SEQ ID NO: 53072 - DNA, 700 bp, Zea Mays
aagaagaaatcttcaagacttgaggatcgcctatgctacatatgccgaaagaaggaacataatgcaaggattgtcccattggtaacaatcccactcctagcttgtcaatttattctcatgtaactaggcaacccaaaaatgcaacttgtgctagaaaagtaatgagtttacctagtgctagcacaaaggacgtttgggttcctagatctttgttgactaaccttgatggacccatcaagagatgggtaccaaaatatgcttgacaagtttttgcaggagaaggaaatgatatgaagccttggggtgcttgagagagtcaattcaattcttgttaacttaatctatcaatcttcaatgatctatatccatgattgacccaaggttatttttcaaattactatgtcttaaactcatatcatctcggggaaagtattgatgttgtaggaaataaagaattatcctgtgcagaaacaacaaggcctacaacgtggaggaaaaccataggatggtaacatctatgttttaagtgaaaatatcttaaattatcatttcttatgtgtcttgtgtagtcacatagaaaatacttcaaatgtttttaaattatgtcacaattctttgaagaaattcctctcatatggtagaatgcatattcatcatttctattctatggcaatctacatgctttaatttattgtaagca

SEQ ID NO: 53073 - DNA, 816 bp, Zea Mays
tgatagccacctgatatagcaaattctctcagttcagaaatgtcctccttggaaagctgctggccacccaggtgccaaaaatcgaagattttgctttccgaagaagcttcttcagtattcttcattttttatgtcaaagtctcggcagcaaccactacatcaatttccctatcgggtaccacatcagcaataatcgtgtcaatttccgatagagttgttccgagaggagccccactgcttttggcttcttggggtgctttggtagtttcatcaataatggaaggagcagttctgttctgtgctactggtgggggagtatcgtgaacggccctcataacagtcatcatatgtcgcctctttttggacatcctcccggtcgccgaatgaccctttttggtttccacttcggtgactttgttagcacttttctcccttggttgtaataagctagtcagctctaaccctagaggacttagcatagcgaaaggcaaaggttcagtcatccctctaggattttcgtcacgacaatagaagatgtcgaaggggttttagcgatctacttcggtagaacagactctttctcctcagtgtgacttgcttctacatatttccgtttcttgagttccaaagattttggcttcaattttgaaattttagtccctcccaaaacctttaatctttttgatagtttgttcttcttgtcttcctcaatagatctcattgcttgcttttttagaatactcacgacccttttattttttaccccaccatcttcaacttctccctcaaacctctcataatctgggtattcgaagc

SEQ ID NO: 53074 - DNA, 590 bp, Zea Mays
tggccacggcgagctcactcactgtggagttctaactgatttgggggaacttcaaaattagagcgctctggtggacaatctgaggcacgggcgggtgcgttggatgcatatatacctagagctcactagggggtaatttatatgttccatcagcggtggcggctaattttgagaagacgcgcggtggccgggaaagagagtgagtcatcgtagcggtctgtcgtggcggtcactgggcaatgagctattgcagttactgggcagtcactatgagtcgcgacgacatggtaaatggcctaaggcgtggcgcaaccacggtgaatggtgtatattccggtgatggccgctcggccacgtcgctggcgcaagtggatgagcgacagagcgcaatagtgcctccaagttcgtccacggcaagatctttttaccccgcgaagttatccgtgtgttaccaggcatgaatcagaatgtcggcgcgaatccgagcgcgaggttgcctgtggcgaggtgcactgtatctgtgatcttattcagttcactgtaccatcagaaaccctatcaagacgcctgacagagcgatttgcaatgcc

SEQ ID NO: 53075 - DNA, 479 bp, Zea Mays
gagcattccgaggccccatgtcccttgggttttgggtcattccccgtggatgacagttgctatgataaccttacaggtttgggggacccgagatcaagactcttgtcatggtgggcccttaccgttgctagagcctaggtaagtccctagggcatgaatccttgagagcggggtctggcaataattaggccctagtaactactttgacgggtttttaaaaggcgtcttgtctatgtctagagatatggccttccttaggccctaaaagaatatcatgcccctctattgacatagggtggcctgcaggtgggcccaatcttctcgcaagatgccagacaaactcgattctccatgtatgtggggcctatgggcttcaatgaatatgagtgtccggaggtgttgcgttaaccaacttccctatagtgagcatgagtacaagggtagggcaaaccaaacttagaaagagtggcccaccatgg

SEQ ID NO: 53076 - DNA, 420 bp, Zea Mays
gattttctaaccttcctagattatttcaacactaaaaaatcatttcctgctctaatttattaataatccatgattaatggactatggtgcctattgtctaaaagctcagggtcaaatccgcaaagttttggacagatatgcaattatttttcaatgtgtttggacggtgggtttattctacagaacggaaggggttcttttgcaaatgggtctcggctgaaggggtatgcttgattgttagccatccgatcccgatctgaagggccagattagatcgtgaagcggtacacgacagacaccacaggatccaagatccacggtcaagaatctttctcctgctttaaactactctagccttggatccaatacccatggaccagatccaatactggaaatggccatccccgatctaatcgtgac

SEQ ID NO: 53077 - DNA, 550 bp, Zea Mays
ccggctcctttaaattgagcactaacctcgctccgcctctctattacgcgctcataccaccctcagttagtctctctcgctcactgtagcccccagtcatcggatttcccccaaatcgagtcactcacaccgtcgtgagacaccctgccatgattagtcgttcctaggtccgttcatacctctctatgccatgttttagaatttttgaatgttaacgaagctcgtcggctcaaccgattgaacactacagcgatagagcatcgagaatatcacctcgccgtcgcggaacacttccgagagcgcactcacgtcgacccactctcccacgcccgctccgtccaaattcacgcgtgtacccgacctctggtgagtcagtgaaactcgccctagcttcaatttaaacgctaccacattttgttgctcggaacacgcttacaggagctctagcgccgccgtggccatgaacaagcatcaattaggatcaaaccagttcaattgggtgagggcatatgctagggtagacttgcgcacgatgtccgagtgcttgtta

SEQ ID NO: 53078 - DNA, 1099 bp, Zea Mays
ctaggggcgatgacacggtggcgcacgggcccgaggagggcaaagggcagtggcgttgcatggtcgtggagtgagcgaggggcaatggcacggtggagcacgggggataggttagtcgaggggcggtggcggcggtgcacacggggtagtggagcagcatgggcatgttgtgtcggtggagaagacaagcatggatacgtgggctgatggactcgataaaagccaaaacttggcgccaatggtcatgtcgtcgagctcatcgctaagatatacggcgcctaggttggtgccaccattgacattgagctcggccacgtaggtgccacgttggcgtaggcagtagggaccttggtgccaccaatattggcagcgacacgtgtaactttagagccaatgatgatgacgccgaggaaagggcccaattcctgaattcaaacaaaaaaggacatatttgtgaaaatctttaccctaggagagaagtctacttgttagacacggtgatttgtgctcatgaagattttcttattgccaccgtcgaagagcccatctcaccgacccagctccatcaacttcgactacaacttctgattacatggaggttgaggtacgcttgggttaggcagatggagccacatccatttggggttagccttttttagatggggatgtgatctaaagggatattatgattgatacgagcccctgtttcatccagcactatactatctgccattataggcatgatggcattccactctgtctttgtcgtggtgtcttcactaggaggggatgggttgtcacgtttgggttttcccttgtactataaggacactacattcataaaacagacaatctcttgttttggtcagttgatccgatggaatggtgcagatgtttcaatggctaggtttttgtccaaatgcttatttaataacctagaggatgtcccttgtacccttgttttgaaaataagtagggacctagatggtgagacctattcgtgggtagtccatgtatacatgttgaatgtcaatttctttgatggggcgcttaatgatgaggttgatccacgaccaaacaatggtaacccccactctct

SEQ ID NO: 53079 - DNA, 950 bp, Zea Mays
acaattttaggatttttctacaattttctatggatttctaaagttttactgaaaaagaaaaggaaaaaggttgaacaggactgggccagttctagcccagtcggcccaacccagaggggaaagcgcgcgcgcgcccgcgcgttggcggctttgcagaagggtccctgttttcttgaatatcccgacaaagcccaaggcactatttaacacagtcgctgacaattgcaaagacaccctcgcacttctatctattctcggtttgaagtccccgacgacggtgaacgcggccgcgctccggtgagcaactgtaccggccgaacggggccatgaccggcgctcccgagtgacagacaccaaattagacctgccccgagcatttcccctaagtcaattgcatgattggtgacctatttcgctctgcccacgaggacagcgaaagccatggacattagttcgtgttcccagtgattggtgggctcctagttcaattggacggtttggagagcatcaccagcatacagggacatgagaacaacgcgcgaattggatggtgccttaccagaacggactggccacggtggagttgtgctttacggtggcggagaccaatttggggaaaaaggggaattctccggctatggtgggcaatcgaggggaagaacgggtgtgtgggcttcgtgatgacctaacgcagccatcccggccttcaatttataggaggagcgagtggtggtcgcgaatttggatgagacacacggcgactcgaggaaaggaagctttactggtgcagtggattcgtggcctctaccatggcggtcattccggtgatcaacgacgaggctagagggagtcacggcgatgcggtggtgaggttgggacacgcgatggacaacggcgatggcacgacggcgatgagattccaatccgagggcggtgagaaaggggagggg

SEQ ID NO: 53080 - DNA, 630 bp, Zea Mays
attagatctgatctcactctttgtgcctgtgatgtctttgtagatgccctaaccataaccttctttgtcttttgggattctttcttcttccatcaagttgctaccatttagcaatctctgttcccttggtattgacatgctcgtatccctgaattctacaattctcttgttttaaatacttacctctgaattctattgcctacttaaacatttcagtatatatgtccatgactttcctgtcttttgagaccctttcttattctgttgttaaatcactatccttcgaaaatttctactctcggtcttggtatgctcatgtccttggattcttgcatactctcatctttttatatatgcttacctttatatcccagtgtctatctaaaatattttagcttacatgcccttgaccacccttgtttgtcgatgatccgtgagcgatcattttctttcgaccacctaggtgatcttgtcgttttcttataacatcccttggcaatgaatttttacttcaaccaatctgttggagccttacctatcttacccttgattgttttcttcacttcgtcactttgcgagtcttgccttaactttatgctttgttatgcttttcattattatcatctttac

SEQ ID NO: 53081 - DNA, 2344 bp, Zea Mays
aacattctggttgctaatctccattagctaaaatggtgattgcatcaactaagagaattatacaagatcacataagaaactagagacacggtaatttttaacgaggttcaaccaaagcttgtatccgcaagacactggacgtgtcctggcaaggtgttgcctcttcctgtgaatttctcatcgtacaatgttgcccttctctcatttttgaagtttcatgtcacaagagcaagtccatagcccagcggttggaaccaggggaggagtgttgatatcttggcatgatggagttttttcatcagtggcttcagttatcaagcagttttcggtctcagttcaattgcaggaaagaaatggtgattgatggtggttcactggagtttatgggattttagggtttagggtttagtctcttggaggcaaataatatcagccttggaggatagaattgtgtctcttacataatctcgcctagccttattattaaggccacgggcgttctagataagaatgtttgatagattcattgaaaacaaatagaacacgaccaaggaccacaggtattaacagccaaccaggagctccgggcctctgaaatcatcaaagcgctccgcctgccagccaaaaatggcagcaagagcaaagaggtgagagtccgtcagtcgcccctcgaacagcttacagtagttgtcttgagctttttgatcaaaggcttcatccttggctgcaagacccaggctcctgatgactttcttttgggcttcgatgatgatcggacctggagaacagggtttgacaccagccaccctcctgctccgacgaggcacggcagcagacgtcttacaacttcttttcttggcaaccggcataggcagcagctgcaccactggcttgatgactttctccaggtcattaagagaagcagtaggctcatccggctcagaacatttcttagtgtggcgccttcgcctaaaatatacctgacggtgggaagggaggccacctctgctattaatggtaacatcctgcggctcaacaaacataggcctctcaacagggtgaggaataccctggttaggcacaatgtctggaaccacagcagcaccaagtctgccttcttccaaaagaatcagaggcaaattcacggatggaatagatgaaacagcatgagtatcatcaatactgggcaccagctgctccacggtcccgagctcatcaaaagggggccaagggaccctggacatgctcagggtctggagccatgccccccccagtagtagacatgacagcctcaaccggaggaagcaataaggtctcagacggagaccgtgggactaccacgtccaaggcatgagaaactgcaaggggttgatccgtgctcgcatgtggtggggaggaaccaagcaccgaatgtgcccgatcagcaaccaagtctgcagatataccatcggtgatctccacggccgaggacacctccaatatctcatagtctccaactgtctgatcactctaaatggcttcaccttcttccctaggttgtacatcagaccttgggcctagacgttcaagaatagatcgtctgcccttatgcacatcgtcctccgcagagtcccttctaccatcacggtcccctggtggcgaacgtgaacggaaacgccatctccgccgtgcagaaccatccataactgctgggacctggatgggacctaggacaacatgttgtcccaccaacactttaataggaacatgataggcaagagatagcctaccaacgcctggtccatttcccagcgattcagtaatccaaaggtctctagactgagggaatgaggtcgggtcataacaccaaccataacaacgaaagacatccaaattcttgagttgtaaagtctcatcatgtacgtccagaacccaggcaaaagggttcaaaatgtgttggacagtggtgagttcccaggcatgaattggaatgccacatagctcgaattccacagggataggcaaacttgcacctgaagacccaaagaacatggaccatcttttacaatacagggagaaggcgcctgcacgaatagtgttccatctcactgtcaactggtcagataactgaagggtggaaagcatgagcaggaaatgtccatgagccaatttcctcagaattagcgaatcagaattgacttcaagttttagagcgaccgcatctgcgatatcagcatctgacacaagcacatcactgaccacaaagatagacactgcgttcttcaaatcctcttctgctttttccatcaaattgtcccaaccgatcacacatgggtgctgatgatgcactatttccaccggcttg

SEQ ID NO: 53082 - DNA, 896 bp, Zea Mays
gcggccgcggcgacgagcgacaacagagcttcaaggaaaggtacgcgtcaagcctgtcgatgaacttcggagacggtgggcgtcaggttcgaattctactttttcccgtgatgaaactgctttgacagaagaactagatttggatgtagacagaatacaagatgaagtaaaactcaattggctcacaccagatattgctctacgtgttgatgctgatccccttaaggacctacgggtgaagggctccatctcacgtttttggggatatggcgatgagtgcaatgaggattatctgcaggagtctggatcagttgaaacaccatccaaatcattgattgtaaaaaaggcatatatggctggatactcctttcaggatttggttcaggcagatcgatatcttgacagctctactatcagtgcacaagtatctgccattgaaacaccatctgatttggggagcaaaggcaaattcgtcagaaacctactgacagaccttgttacaaacaaaaaaaagacaggtaaaccatggcaaggtccccttccggctccaaggatttctccacctttaacacttgcagactgtccgttccgtgttaatcatagattccaacgaattggtgagcagggatcaggtaacatggtgacaatcagtgaccagagctggggaaggaagagtgatgctgctcaaaatttgaaactccacgcgagatttcaggcttcagttacagaaggcagcacctcaaaaaaaggaaacaccaagttcaggccaaattgggcccttgcacgcctgttgaccagacggggcaagttttttggcaaagcccagcccacaaacgtttgccccaaaggtgtcataccctacgtaccaccactgcccagatttgcagccgccgtca

SEQ ID NO: 53083 - DNA, 732 bp, Zea Mays
ttgccactgtatagtaaatatttctatgaggctaacgcaattgcaatggatcaattccgagtaaaaacgaaggagatatggattaaacaagtttctaggtattttattattaaatttatacctaaataatacttccaagggctcttttgctaattccagggacttaactgtgaaatacttatactgttgagggatggagggttagttattaatttctgtggggtttcttttgcaaataaggctcgacaaaggggtatcgtaaattctgagtcgcatgattaagatcctgcggtctggattatatctgagcccccgcaggcacgcgagccaaaggatcagtaatctacggtgaggattctattaacacgggatctgatctccgccccacgatccctaattaacgaaccggatttgatctcgtgaaaggttacacagccttctaatcacagccacacgccgccgatccgacggcgaccgacccatcatctaccccaggcagcacagccctcagactccgcagcccacggtggagcacaggccggcgaactcctatcccatgcaaagatcaccaattccgacaatttcttggtgcaaaagcaggtgcacacgacgacgaattcactgggatgatcccccaacatgactttgcccaacgatggtggtcagagtgtcagacacacatggcggagcggcattgtcggtgaaagcgcatggcccacatagaaatccaaa

SEQ ID NO: 53084 - DNA, 553 bp, Zea Mays
tcgggtggttgtcgtacagcggcagcagcagcgatctcgaagacggacatcatgtctaggaagacgtccaccacgaagtagtcgaatagatcaacaacaaggagtcgcgacgatgctccccaaaaatctgatcaccgcacacccgacagaagctaaggtgctcttttgtaaagctgccatacgcgcgagcaaccacaaccgtccatatcccgatatagggctaggattaggtcatcacaatattgaaccggtacacatcttgatctgtctgatgcaagatcgacgacctatatttaatgatggcttgagtcgactgtatccctctgatctgatcggacggtctggtccttaataggcccgatcgaaacgttattatcccaaccgttgatctaccgatcgacgattcacctctcctccttccgccggtcacggaccgcggcggagccctaccactatggcggcacgtcgccggaatgagtccaactcgcaccccccgtgctccaattcctactcctacttgctctacatgacaaggaggtaaaggtgaacacta

SEQ ID NO: 53085 - DNA, 642 bp, Zea Mays
aaccaatgttccccgtcgcacccgttctccacactcctatcttactttgatcctgcgacagtgaagagaaagctgctgccaagttcactatcccgtgtgaacccatcgctctcatctcattgttactagagaagaacactggcccaaatggcgaattctagccctaaagatatactatgttattgttcatagctctaatgtttaaggtttaatgaaagatcaattagatttagcaaacagagctcacgacctcatttatgcatgcacgttttccccatgcactcacattcaagagcttgtatcaagtggaacgagcaagtccgcctagatttggagaatggctttgccatgcatcttcacaaaatatgcatgtctctctcctccaaataacagactctctagatcaatgattcagatagttaaccgaaaagctcctctccaacagttctctaagtgtgtgtttgatttggcttttgctctttgcgaactctaacaatgggcacccatattgcccaaccatttctgtcactacattttacctggtccatgacgggcttgctgtttgcaacaaagcaaccaaattggctgtggtcgttggcccaacttgttttcccgccaaatcacctagacatcttgttttcc

SEQ ID NO: 53086 - DNA, 489 bp, Zea Mays
cctattgattttactggattcaggcagttctcactgtttcctcaactcagcgattgggtcttctctggccggtgtcacacctttggaccaacctctgtccgtccgggttgctaatgggaatatagtccagagtgtgtccgagttgtgccaagctgaatggtctatacaaactcttcagtttcaaaccaatttcaagctactgcccttaccatgttatgacgttgtcctgggcatgtcttggctggaacaatacaacccaatgtttgtggattggaaacataagtggttgaagttcaactatcaggagtcaacagtgctcctccatgctgttcagtagtctgtcccacatggtactctattggaaatcagacattcagattcatcaccactagattcggcccagctgcattcactatcagaattgcctgtgcctgaacccatccgacgtctgttgtgttcattccaatctctatttgaggagcccacctc

SEQ ID NO: 53087 - DNA, 514 bp, Zea Mays
ttagagtttctcaaggtcggcattcaactcttgatttttggagcttgttcctagccggcgtgttacatcttccgcgagctgcaagggttaccctctcatactaagagtgaaagctcttggtttgagatcgaggaagggtgtgtgactctttgcctttgtggctctcctcaacaacgtggaggcaggcaaacctttgtggcgagctgaaccacgtgataaaatatgtgtctttgtgtgctgatatgcaatgcttacttgagtagtttgggtttgaatagttcctactttaatatcttcctaatctgtactcactgcttaccacactttactttactgcttttagcttcatactcgaggtagaagttaattatctacactattagaatccgcttaagtttgacttaagtttgaggtttttgggcgtccgacaatgtcgggtatcaacacgggagtgtcgggcatagagcggcactgccgttcgggcatttaacctgttctggaactgaatttttat

SEQ ID NO: 53088 - DNA, 288 bp, Zea Mays
ctgggccaagtatgacccatttgtagccgatgtgaaggcgcgagtggttctgtattagaatcatgcgagggaaaactaggggcagtagatttttcatatgaacgtgcccatcctttaacagattcatctatatattgttttaactgatcctcctgttgttctataaaagccttaaaatattgatttggaatacatatagtgggagtgtgaggcgaaggtaggagagatgacatatcgatctccccttgacggatgatcttttggtgggggtccactatgaagtatgat

SEQ ID NO: 53089 - DNA, 630 bp, Zea Mays
tcctccctccgatctaggtcattcttcacggaaaaccattgcttccgccaagagcccaaccacttcttccaaaatgtaggcatagggtaatttgcctcggagcggggcacaaagctttaacagtcgaagttgttatgatattgttcttttcctgtcgccttcgtctggtaagataactcgtgaatgttgtagaagcacttatcatccggctctagtccctgactcctcatggcccatataaaaacccccactttgataagagcttcggggataagttgatgaaggaatatctcaaatgtcttaaaaacttcaaccaatatcttgtggagcggaaagcgaagcccaagtttcatgaagctcttgaaaactactaactcgttagcttcgggaaggggaacaatgctttctccccgagccctcactatgaaaacatcacgaaaatatttgacttccatcatttcaatttgcccttatttgacagttaatttcccaaaaacaacatggctcggcctccacgacggatcttcgacatcttcatttccagtctctatgtcaaaaccatagctatcgctggagtcctcagacaacccagccagcatctcaatggtgattttctctgtgttagtcttc

SEQ ID NO: 53090 - DNA, 412 bp, Zea Mays
ccgagaagagttcaggtcgaaccagaatccgggatcaaatctcagcccttcatctaggattgacggcccatattccacccccatcgcccaagcctggtaacggcggcactgccctgtggccacggcggggcatcgccggtgagcctgctggatggcggtcatgtgctctagatcctaatccggggagcgctacacggagacgagatcccaacaacagatatagggttcacgtaccaatggtgaggatgctgatgttctccgaccatggcactagtggtcccgcggcggagcagcggcacgggtgagaaattctagtggccacgaggtccttctccgcccaacgacgacaacgcaagcatcgaagctcgccgtcgaccaacgaaccgaggccaaccatcacgcgctcgttgag

SEQ ID NO: 53091 - DNA, 1796 bp, Zea Mays
ttctttttggatggttgagaggctctaggaaggtgatcactaaagatgtcgggaagggtttcaagtgtgttcctgagatggttaggttttggaatccacacctatttttgaggaggggctctcacaggctccttaatcactctgtctctcatacgggtgataggcttaggtgggggattttgataagcttgggaatggatgaaggtttctctgaaggtgtcaaaccactgcactcaccaaccttcccaaagcgagtgacacccatccttagcatcaaagcttaaccccactccgttagttccctcatgaagtgactgaccatcatgcccgactagggctcactgcatgacacccaactcaagacagatcgaaggtatgtgttttcttccttgatccttttcttgtcatgtcagcgggacgtaagggaaaactgcaaaccctcacaaagtgcacactcgcaggtgcaggggcactcactgagctagccttctcaagcaaagctaccctagcgtctctctctgctagctcggtctgcaagccaggacaaatggtacatgcacccaacaagctagacctagatctcaactagccgtgctcatctagcaaggtggcatacttgctatgcaaactggtgatatttgacatgtgtagagcgcactcatgacatttagtctcgtcggacaccacaacttaagctttagaagactcaagttccctaagtgtgctcccgtacttggatctaaactctctcctctcacgagcagcctacctaagcaacttatcctgactagccaaagcagtgttcagctcttctatctcatcggcggaaggtaatacttcagaagtagtgttgtcaccgatgtctttgtcgtcgctggcaccgaccacgtcctcaccaagtgccatggtgtagaggcctccagtggcatcggtgatgaagcacaacccgttcagcttgtcctcgacccgcctcttagcatcctcatcgctcaaggaagatacgacatcatcggagtcatggtcgaggtcactgaggggggcgaggaaggcacgctccttgatctttgccttctgaaggtactttttctcgagcgcctccttgtcgaatcctcccttggacttgttggaggagtaattgcccttgtgccaaccagagtgatggtcgtgtaggccggactccgccttccctttcttggggcagttatcaacgaagtggtcaggattgccacagttgtagcatccgtccttggacctgccacaccgccggctcaaatgattgttgtggaacctcatgaaccgactggccacaagtgctagctcctcatccccaaggctctccacctgctcctctgtgatagacaacaaagaagatagagcaaacatagtaggtgaggggttagaagaagaacaacctccagagactagagccatgatgggtataccagggttctcaatcctggcccaaatctggtggtcaatctctatggacttgagcttgccaaagatctcgtccacggtgagagtctgataattgggcaactcaatgattgccgagaccttcacctcccaaaccctctgatctagagcacgtagtaatcagcgctctttcatgatcgtcatagggatgttgtgccttgttggcatgcttcttgttcacaattgacaggaacatggagaacatagtatcgatggtctctctagccaactgtgtgaagttctcgtactctcgcctgtacgtctcaaacagtttggccttcacatgatcgttgcccttatggaatctctcgagggtagac

SEQ ID NO: 53092 - DNA, 350 bp, Zea Mays
agttacaaggtcacaaagataagcacattacactgaaatttagacttagtcaaaagagttcaaatgtggctcttttgcaattaagtccaaaactcagggttcaagttgcaaatcttcataattgtgaaccacattacttaaaacaccttactttactagtttttgcactttagtccaaaagtgcactgattttacacttagccccctagggtttaggttagtttttcagggttccaattagggtttctggtatctcaggggtgtaaatgtaatgtaggtccattcttaggaacattttatgaccatttcacttaaacttcagggtttactctatttgggtcttgctttac

SEQ ID NO: 53093 - DNA, 404 bp, Zea Mays
gcgaagtggtaggcgccgtcgtatggggatggagcgggaccgtcttcaagtagatcggattggtaaacgagaattgttgtcctcgccgattgggacgagcataggtgagggggatctgcgaaatctttttgagggtgaggaattgagaataatgttattcaattatagggagttgggtatcatcccaaaggttgagccgatgtagtatatggtgccctcgctaagtgtgtgaaaatacaacttgtattaactgcgacttgtgttgtaatgtggcctgttggccgttttcgcgcgcttgtgctggtccagctgcatccttaggcgacttttgcgcggagtgtcttttcggtaaaagacttcgatggcgtgcgtattgtgcttgtctggctgcacccttaggcgtc

SEQ ID NO: 53094 - DNA, 556 bp, Zea Mays
agcgcgcgggttatgggaagctgtggagatcggcgacgtcgacggccatcacgatcggatggcgctcgacgtcatctgcagcgccgcgccgccggagatggtctccaccttggccgtcaaaccgacggcaaaggatgcctgggaagctctgaagacgctgcgaatcggcgacgaacgcgtgagaaaatcgacggcacagaggctacgtcgcgagtacgagatgctctcgttccgagacagcgagtcggtggaggcattcgcacttcggctcaccgacgtcgtcgcgcagctcgccatgcttggtgacccggagtctccagagaaggtggtggagaagtatcttcggatcgcgcgtccaaggtacaagcagctagtaatttctatcgagactctattggatgtctcgaccctcatggtggaggacatcaccggccggctgaaagcggccgaggatgctgacgatgcaccaccaccttcgacggggggtaaactgtacctaacggaggagcagtgggaggcgcggcggaaggagcagcagaagggaggagacgctggc

SEQ ID NO: 53095 - DNA, 403 bp, Zea Mays
ggaagcaacaaaatgtatcatgaccttaggtccttgtattggtggaccaggatgaagagagaaattactaagtacgtatctaagtgcgacacttgctaaagaatcaaagcaagtcatttgaagataacaggtaccttacagccactccctataccatcttggaaatgggaggacattagcatggactttattatgggattgcccaacacctcccgacaccatgattccatatgggtcattgtggataggctaaccaagacagctcatttcttgccagtgcataccacccacagggcagaaaggtacgcagagatctatattgaccaaatagtgcgcttgcatggaataccaaggaccattatctcagatagaggaacaccattcgtagcacgtttctgggaac

SEQ ID NO: 53096 - DNA, 943 bp, Zea Mays
atggggtcaaaaattttgttttgcgctagtgtagcctctccataatcctagagtggtatcgaggccaggttctgcgtagtttttgttctaggtctaggttcatgagatggatctacttgatgcatagtttgattagatcaattggttataaggggttgaagtagatcacatcggatatgaccgaagagatcagttcatccttctctgttatgtacgcgacttgcccctactgactagaatcaccatcagggctaactgtgtacacaaccagcagattggtgtaacagatcgacgtcatgagtgtaatcttcttctggtcgaaagtctcgaatttaggttgatttgatcaatcgcatgagatttctagtggaccaccgtggctatctgttgtagtggtaaacatatagaaacttgtttgtctaatttgtttttgtaggacatcttgtgatcggtatggctatgtgtatatgatgcatattaatgaattatacatgacctgtgtgtcgtgactagggcaatacggctggagccatatgtattgtccaaatttaacgtaatgacctgcgtgtcaacatgtgatgatccaaagcgcatatgtaatttatttatcagcatatgttagataggtattgaaggactcatcacctaaaggatgcatacctacatcatggagatggaaatcatagtgatggacagacaaatggagatggagatcaccatgtgatagcaagccataccgactcacaactgttgtgtgaatgatatccttaatgttctacttgttcatgttgcatatatgtctttgcgtgagatgatataagtcggacgatccctcccaaatgtttaagctttaaatacctctccaaaccttgcactatcataagtcttgtacaattggtggtgggtctatgaaattagggtactaccaattttccttgactag

SEQ ID NO: 53097 - DNA, 718 bp, Zea Mays
atttcgttttgcttagtatatttagtgaatatagttagattggtacttagttgttagtgaatatattttgatagctacttatatgtcagtcattgtgttgttttctgtgttggaaagtgtggatgtcagtcatcatgttgttcgtttatctgcaggttttagaattttcatcgtgtatgggaggtggtgtcgaatttttttactgaaatgactctgttatttttttagataggaggtcgtccgattccaccacctccgccaccggtagcttctctacactgtgacctcaggtgtacccgttttttacacagtattaatcgattatatagttgtttgatgtggttatggtttagggcaaattttgtgtttttagcattagatcatttaaactaaatgaaatgttattatgtttagggttgttggttcaaattttagtcaaaatttgtatggttgatgtagttgttgtatatgtgtggtggtgaatatgtatatgtgtagctgttgtgaatgtgtatgtgcacgtgatgcatcatgttgttcttttgtttgtgaatgtgtatgtcagtcatcgtgttgcacgttttttttgcaagttttagaaacctcaccgtataggggaggtgctgccgattttttttatagtaatatgttcatttgtttgtagatagcagggcgtctgacatcgccaccacaactggtagcttatctccaccacgac

SEQ ID NO: 53098 - DNA, 336 bp, Zea Mays
gggtagggtttgtttgtcctgtctgtcggtgagcgtttcaaaggttggataagaccggaacttccatgccaccgaaagccattctggatttctaatgacagattgtgcccaactaaacaatgtccacatttatttacaggagcaaagcacctgaagcctaactgccaaagactaaaaaggcacagggaatgtttggcatccacaaagaaatgtacatttgtctttcttaaggggatttgttcttgggctgctcaccaatcaccaccatctacgaagaccaaagagccagaaaaattcaacccttcctttgactcggtctatttgacctacccagac

SEQ ID NO: 53099 - DNA, 449 bp, Zea Mays
gtagtcaaaggagaagggaattaaaaaaggtgctgaggaagagaagaagaagaagaatgcttcggtgaccagggggcgggtttggtcagaaaaaacgacgtatgaatgctgtgatgagggtcatgcataagaccccccctgtcacgatagaaaaaattgttcctcccactgatgccgaagctggtgaagtaaaagttgaagccgaaagcagcggaggccctctcgagaccacgctgtcggaaattgataggattatagctggtgtggttcctaagagggaaatggatgaagttactgctgtcgatgcaacaacttcaaaaatgaaagaaatagaagaaacttctttggagggcaaagacttggacatacggcacctgggtggccaacaactctatgaagaagatatttctgaattaaaagaatttgctattgagggtgtaacaccccag

SEQ ID NO: 53100 - DNA, 409 bp, Zea Mays
caacgatgtcggggaggtcacgacagtcacgttggtgtgcaggtcagtgtcggagatggccggagttggttggtcctcgcgtgtaggcgagggagctcgtcggcggtgagagattcggcctaaccatggcgggatagctcaatccagtgagttgggagcttcacacggagatggccggagttggttggtcctcgcgtgcaggcgagggagctcgttggcggtgagagattcggcctaaccatggcgggatagctcaatccagtgagttgggagcttcacaggaagtcagggaggttgtaggtgcaaggaattggtaaatggctcacctggtagcccggtctacgtgcggtggcgggcgggcgaagtcctgcgaggtcgctcttgctgcttctttagggcagggtctcgg

SEQ ID NO: 53101 - DNA, 671 bp, Zea Mays
ccggaataacgttaatcgaagtctatcattacaaagacactccgcacaaagccgcccacgtacgcagccggaacaatacaagtgtacgaatacggccaacaagccacaacaccattacaattacacacacacggcgagggcatcgcctatcacatcggctcaaccttcggaatgatacccatctccctgtaattaaacaacattatcctcaattcctcaccctcaaaaaactcccgaagatccccttcgcctatgcccgccccattcggcgaagacaataattctcgcctaccaaccccgtctactcgaagtcggccatgctccatccccatgcgacggcgcctgccactccgcgaaaattcaccctcacactgttttcccaccacccttcgccgcctacacccagtactcgtaccaggaagatcctcggcaccctccacacgcggtgaagtctccaccgcagccacatccaacgcaacaaaataatctaagccttcatccgaggactcctccgtccaaggaaacgaactcccagactcacgtcggactcaaaacattcaaacatagagctaggcgcactatcatcggcgggcactacaactgaagtctccgccgcaaaatcagtattgtcagtagtggttgcttgcgcaggcccaaacgtcggaacctgc

SEQ ID NO: 53102 - DNA, 610 bp, Zea Mays
gaggtgtaataccccacttcctggggtggatctgtatgtggtgcgttacaagtggcgtctcctagatggagaagggctaatgagatgaaaatgatggggtccccctgggccttatatacacgaccgtggggcactccttacgtaatcacatatctcctaactaatagcgaaccgacttaaccaatctctgaaaaatctcgccgactcatccctgatccaccacgacattcgagggtgccaggcgcaggaaagtcgaacggtttctagggatagtgtacgattcgacggaccatctgggcttgagtctattgccttctcggaccggcccattccgctagtagccttcgcccggcccacgacaagatggccttgcggggtaactagcccgtggccccgcacaaggatctttcgccttctagtggaccccagggatatccgtcccccacagcgaccttagctcccaatatgtgaaaaatgcagatacatgcaaggtcctggatacgtgaatctgggctgggcaaacgggtgtagatagttggggctgcggtgcaaatgggatcaaaatttcatagcttaaaatattttttgtttttgcctaggtgcggccgca

SEQ ID NO: 53103 - DNA, 510 bp, Zea Mays
atccccactaggatcttgcgggctgccacgagcccttcgaggtggcataactgcagccacaggagtaagtaaataaataaataaaattggcataacaccacttccaataatatcaaactagcactgacaattcataatataacaatagtaaagcaagcaacccatcctatatgtgcagtgtgtcaatttatcattatttcttcgctaggacctacagcctatccctctgataccaactgtaacaccccattgacccaaacacaatggatgtcatcaaaacactttccccaaatggttatgtataataaaagatgaagatagaaaggaaaaattcgacagcacctcccttgaaagttgcataacgaggaaaccacaatgtttatacatgatgcaaaagaaaagtaatccacagtgtataatcatgatgcaagagaaaaaataaacattcaagacaaaattaattcagctaaccaaaaatacgaccaccataaagactagaacataatagac

SEQ ID NO: 53104 - DNA, 400 bp, Zea Mays
cacgggagagggtgaaaggaggctgggaaggagtttggcgagagcaggcacgcgatttatatccggggaggaggaacgggcgctgggatggcactaatggagaagaaactgtcgccattaacggggaagaaacggatgactctaatggacagggatatggacagtaaagaagaggagaggagagggcgcgacagttggggaggagaacgggacagacgcggtgctgatggtctccactacgggttggcggccgtgggaggcgaggcgacatccgttggtggcttcaactgacggcggcgacaattcagtgcgcagcaacgaacgggagaagaggcaggtagaagagatacgatgaatggggttgggcccacctggaagggagagaggtgagggagagagc

SEQ ID NO: 53105 - DNA, 630 bp, Zea Mays
aaaaggatcaccttggcgcacacccttatgagttttaaagtagggtcctaccacatcattagttcggatagcaactttaccacctttcacagtcttcaaaacccaatcactccacttatcgccaaagcctttcttaatcatcatattatgaagaaaattccaattaaccttgtcgtaagctttttcagaatcaactttgaaaatcaccccactttgtttcctccgttttacttcatgaacaatctcatgaagagaaaggacaccatccatgatatatctccctttgataaatccatactgaaggtcactaatcacagaggtaatgcagcgagccaatctattagtcagaactttggtaataattttgtaacagacattaagcaaacaaataggacgaaaggctttaatatcagtcgcatcagggacttttgggataagggtgactatcccaaaattaagtctctcaatgttgagagaaccatcatgaaaggatttaaagagattaaacaaatcacctttgatgacttcccagaactcctgataaaattcagaagggaaaccatcgggacccggagcactgttgtgtttcagggcaaacaccacatctttgatctcttccaaggaaaaagg

SEQ ID NO: 53106 - DNA, 282 bp, Zea Mays
cggagttgtggaacgcgcaatggcaaaattttcacagctgtcaagaagatgctccttgacgataaaaagggcaagtgggccgatttgttacctgaagtggtctggcattaaacacgactgagtgcagggcgactaggttcacccctttctgccttctatatggatcggaggccatgaccccgcaagaaatgaaacatgggtccccacggacagtcccgtcagctgtccccgacgtggacgagcccacttcgaaggacctcatcgatggagaccgcgtcttcg

SEQ ID NO: 53107 - DNA, 460 bp, Zea Mays
gcgccgctatgctcacgaggaggaagaagcactctggtgccgttagatttcaatactgcggctcagatcatagaatagcgatacctcttcgtagcatgaaaatctggtctttgatcgtccaatctgcggcttaggttatcacgtgtatatctgtcgttcgtcgcaaatctcatggctatggatgcgtagcggttcagcctataacagatctaatccgagccactcgattttgattggatggctcagatttcaccataccccttcgccttggcaattatgctaaagagcccccgtagtacttatgaatcaacccacggtaccccctcggttgcgcatgtgtctggggaattttattgtttaaaccccgagcttctctgtttttgtgcgcaaagtccagagaacagaaaatcaaaagaattcatttcggaaatacatttttggtgtgaaaataattatagga

SEQ ID NO: 53108 - DNA, 743 bp, Zea Mays
ctcatcaataataatggagaaatttttattcccaatatcatataagatagctttggaggtctcttttgcacaagcctcacacagttgcttttgtatttttggtgaagtcaatgaatggttagtaggagaatcaccaagaaggttttgaatagctttactcctctttctaaaccaatcacaaattcgagaaagtttcccttattgcaagaggtagaagactcatcatgaccacgaaaggcaagagcttgcaacaaaagaaatctcacgatcctcaacattatagtgattcgattcaaatattcttcttcatgcttcttagaaccacttgccattgcgtgtccaacactttacctttgacttctaaaatcctcacaatgtttcctagctttattatgcaagctatccaccttcccaacatgctcaacaaaagattttgttgcattcttccaattacaaaaaccgttgcttgtgaatgcatcaataccagaattttcatgtctttgttgtttgaatagataacagtaaaaacaaaaggcaacatctttggtaacactatactctaaccaattatggttcttgaaccatgaatcatgaaaacttctttgtcggtctcccatctttttttaggatatatatggccaattggttgacatggaccctgtaacaaatactctcttctaacagcatccctaatgttaacatcgtattcatcaattggttttctaagcccaggatcaacaact

SEQ ID NO: 53109 - DNA, 919 bp, Zea Mays
agacgatgaggtggtggtgcttgtgcctttctatgagcacgggttgggcttcccctgcatccctttgtctggggttggggctgctattcttctacgagatggagattcagaacctccatcccaactatgtcttgcaagtggcgtgcttttatcagactgtgcgagacatccgtagggattgacccccactagaagttgtggcactacttcttcagtggtagggttgtctgcaacaaccaactgtatgtcggttcggtcaacttccaactccgatctggctggaaggcgggttacttcaagatcatgttccccacctccatgaggtatgagggcaaatggttctacatcaagaatctagccggcagcgccctgtgctttattagtcgggagccgatgtcgacagacgattggaatcatggggcagagccaggtctgaagggtgaggtggaacctattttggtggtgctcaagacgctgaaggagtatgatcttaccaggacaagattgatgtgcatctttatgcaccgccaacttcagcctttgatggctcgctaaaggccaatgcacaagtattccggcatcaatgatctcgaccgccactcctccgagtcgctcacgttgtccgagattgaagcaagagtcaaggtcgtcatcgcgttatcattagggttatttatggacgaagacttcctgcacccctttatcggagcataccgagtggcctagtgagccttcctttctattcttctctctttttgtttcgctttgttagtgatgttgagttgtggtacttataggggatcagtcctctaggcccagtattccaccgctcctcgagggggtcgctatttaggcagggcttaagtgcaaaaggagtgaccgagagaccctaggggcgtgcatgagatgccttcatgcg

SEQ ID NO: 53110 - DNA, 432 bp, Zea Mays
cgggcgctgaaggcccagcttcggcttcagcttgagctttcgtagcttcagcttctgcttgcctagtttcggcttcggcttgtgctttggcagcctcagcaattttctttgtaggagcagggctcaaggcctttgtagtctccagcacagcatccagcacgttggccatcctccacctcttgggagtcgcggcagaagtcttttgcaccttaggcagttttaactctgttggagggcttaggatttctggctttattgtcgctttttccacttgtggctcttcggccttatcattttcagcttcggcggtcccgactgtaggcatcttcggcactacagttggctcttcaatgctctatgcaattggagcagcttgtcttgcttcggcagttgaagaggccccttcgccaagttcaggcactatggctggtt

SEQ ID NO: 53111 - DNA, 506 bp, Zea Mays
ttccttgtagcctaaaagtaaacattgtataacataatttagttgtgagacgttacctaggtagcaggaaaaataaggtgtttcagtatggtcatatgataacctgtttgggtggtggagtacttgtggataaattttgaaaaggatttgatggtgagttctcgattaactgcagttgtaacttgttctgtggtgttgatgtaccttctatgatattggttggcttcaatggtagtgcatgttgtctaccatgcgctgcagttatagagatgatgcgaagggcaatggggacctggtcttggttatcgaaagaactgtcatctggtattactctaaaggtgaatttcagtgaaacaatctgagctaaatctggaggaattggtgtcgctgcatttgtagatcgtaagataactttgcaagatttgccaacaatatatcgtgctatgttatcaaagcaaaacatttgtgctatggctgttgcatctgatgctcgaaatttgagcttg

SEQ ID NO: 53112 - DNA, 280 bp, Zea Mays
gcaggcttcgcacctctgaactaacttgactgcatcactttttgctgttggccagtagaaacccgacctgaagactttctcaaccatggtcctggatgcttcatgcactccacattgcccagcatggacctcatccagaagttgctttccagtatctgagagaatacatttcatgaggactcctgacgcgccccttctgtatagcgtttccccaatgagtgtatagtgagctgactaccttgcaatacgctcggccgtatttttgtcatctggttcctct

SEQ ID NO: 53113 - DNA, 683 bp, Zea Mays
cggatgttcgcactccgtgttggaccgagtcccccacggatcaggaggtggctgaggcaggggctttgctagctgaagttggactgccgaaggagaggggtctgactgcagaggctgtggttgctgattttgtctttaagaacattcaaccgttgaaggacaaagcgtacccagcttatctgtaccgaggtttagctgactcaactcgggttaccaacagaaggattcccgctgtagatttggtgaaccgacttgaaatgattcttagaggtaaagtatcaaatgttggtgccccagtggcctactcagcctggaacctgcccccttctaaggccttcactctttttgtgtcgaatccacctgtcgctgatggcggtttgggccttagagtgcaatcctctgccgaagaagttagcgctttggttgcttcgctcggggaaatttctgatgatgaacggcaggtccactttgaggtgcctttggatcctagtgatgcagagataagtgctatgcttgatatgctggctgaggactcttctgatgctggtcctgctgggacattggtggtggcgcctctcccagaagctggtacaaccttggatattcagagacctgtcagtgttcgcccgagacgcccttgccgggccaatcaacttgaatctcctgctgatgagcagaaaaag

SEQ ID NO: 53114 - DNA, 288 bp, Zea Mays
ctacaacaaataagctctatagtgacggttcagaacctatttttactggtgtttcttagaatcgtcggtgctagggaccagtagaaaccattaggtaggttttttaggatgcaaagaggagagagagtcgatttgcacggtagtagggacgtttgcaggtcatattgaaaatactaagaagtccactctcgtagtggttgaggtagtatatatgggatcgagaatcccgcactagggtggtcgggcaaagtttctaacccctcaccctcaggattgggtgaagcggag

SEQ ID NO: 53115 - DNA, 378 bp, Zea Mays
cgtcccgatagcttttgaaatacagctaggggtaaaacttcctgaggtgttctatattccaggagttcccaatttctgtgccgtccatttgagtaaggcgatatgatcccgaccgagtgacttctgctactatgaatggtccttcccataagggcgataacttgtgccgtccctcccccgttagaattcggcggaggacgagatctcccactgaaaagaatcgtcgtcgtcgcacagccttgtcgtgatagcgtctcagagtctgctggtaccgtgccgattgaattactgcgttcagccgttcttcttcgagtacatcaacatcctccagcctagtagcttcggcttctgctatgcttccaaagaccaaccttggcg

SEQ ID NO: 53116 - DNA, 433 bp, Zea Mays
ggcaaatgaagtgcccttcttcattgcagtagaaacaagcacctcttactttgacctctctgcgagtcagctttgctttattgctagcagatgatggttgatcggttgcctgcatgttgaacagctgagcttgatttgattctcttgtttgggtattcacgagctttggcgcttctgcttgcggttgaggtggtttaatcttgtacccaaacatttttctggtcctcttgttgttcttcattccattcagcaaatatctatgtgactcatccttccttttcaccattgtcgaggctggaatcttgtcgttgacatcatccactttatcttcattgggattcatcatctagatagggggaaaaagggagagtgagacaaagtatcacaaggttcatgatatatatagggcaaacatgaaacaaggacatttaga

SEQ ID NO: 53117 - DNA, 344 bp, Zea Mays
cttcttcacctatccattggataacccgtttgggatcgccgcgaataaaaatttgttatgaggaatatgcccccacctttgcaaagctatcctttagcttctttgcgtagtccaaggatttttcataacacctttccctggaatcacgaagctcctcaacattcttttctagccttgaacttgtccattcacttatctcttgctttgccttcgcaacttcaaaattttcattcatttcggcaagttttttccttaattcgtcaacttcggctttgtgagtttcgacttgtgcgttaagcctggtttcgctgacttttaatttatctactaaggagagcagaatc

SEQ ID NO: 53118 - DNA, 334 bp, Zea Mays
ggagtgcaaagcttccttttcattcaatggtggctaaaggcatccttccgtcttacacgagcttcgcaaaattctactatactccgttagtcgaccattaatgtaacgacttctgagtttcaaagtttcactaaggatatgtacagcccatagacagttgttgtttatatgtatattgaaaacaacataaaaatagatgtttacactctctgcgtagcttttaattgggacacaaatcacaattgggacataaacacacagcatacctggtttaatctttaggaaatagtcgcttcctcaagcatttcagtgtagatacatgttcttccttttc

SEQ ID NO: 53119 - DNA, 394 bp, Zea Mays
agcctttcctgtacgatagcgtatacgagtacaaattttagcgtaaatcgtagatatgttttgtatggcgaatggggccgaaaattaaggtgtggaaatcgcgcacatccgaccgtgtgtgtgttctggctcgagaagattttagcataaaatgtgaaccaaaacaacgtaaatagatacaaattttagcttaaatcatcgatctatttcgtacgacgaatagagcccaaattacagcgtgaaaatagcacgcgtacgacagtgagtggattctggccgagtaaatttaagagtataatgcgaatcaaaacatcgataatgagtcccagcgcgtccgacacgtcctcaggggtcggtcttgaggactagcgtgtcgaggatagcctcggagtcg

SEQ ID NO: 53120 - DNA, 1624 bp, Zea Mays
caagaagaagaacgccccgataatctattacgcgacgtaggatctctgtctttgactctaattgctgaggggattggatgatcttgattgatttattcgttgcttgtgtttctgaaggaggacgcacgcgcagataagccaggttgtccgggagtaccgcaagacgtcgtaccgagtgcgcatggccatcttggtaacgcctatttccatctgtctgaatttattttatttattgctttattctctagtaagaaagagagctcgccatccaactagagtagaagcgacaaacaaaattaagaatacttcttagaacccgtactctggcaatgcaggcctcaaggaagcactactgtgtcaataaatttgcttgcgcgagcgacaacattgatgagaaatggtactgtacacagtatactagctcttacaaagtgtttgcattgtcattgctaaccgaacttctaaccgaactaccctcatcagcaagtcactgctagacaagactgttcaaggttgcccagaattcaagtgagggttcttgtcatttcaacgtcagaaaatataattagccaggagagcgtcttttttcactttgaattttaatgcaatcagttaaaacttgcaggaatgcacagaaactaagtcggcatccatcccttcagattggtggctgctatgaagttcacgatattgaggatcttgtcagagttggacagaaagcaaaaggtacataaatatcttttagttgcacttgtttcctcctgaggatagtctcgctctgatctagtcactggctcactgctgtctgctgatacctattcgattatctcttttcctgttattggcaggatgtccgtattttgctgcacaacacatggcagaagcagcccaattggttttctgcccatataactacctgattagtccggttgtcaggagagcaatggacatcgatatcagtggttccatcattattcttgacgaggcacagtaagacttcacttctatgactcttttcagctacctgttgatttccttgtacttcaatagtttaatcaatcaaggtaaaatagtttttatgtcaccctcattatactcatagcaattatagtcttatgacatggagtctgaattccacctatttttcttcatatcggcatatcgcgtcctttttctcagcaacatagaagatatagcacgtgatgctggcagtattgacatcgatgaagaatcactttgctgtaagtcaaattccatgattgttcagttaaaattcatgttctgttaagatttaaaacagatgctaaagctaattcactatggcgaagtgttgcagggagaacttcaaaacctggccgctaatgaggccgttgcaatgatataccaacccttgcacgatattattcaggtatttctacaagaatagacgagatttaattgtcctgttctttccagcaaaaggacggatcatgttagttttaacatcacacttagagctaaacttttagtacttctgcaggctcttattggttggattgctgagagggaggacaatttgcataatcatgagttcggacatccggcttcatagtatgtagtctgagactcttttagtttcttatat

SEQ ID NO: 53121 - DNA, 631 bp, Zea Mays
cgccactaccctgtggacccagcgggtcagggctgtctttccagaggaatcgcgcgtgtgggagccactgctttgtggggtccgcacgtcagctgaaccgattcaacaccgccaccatccgcgcgagatgcggaatccgttggcgcaaacgtcggagtccgtcatgcctactcccatcctgacctggacacgcttataagaagttgctccgtaggctccgtcttccctttcccattgccgccacgactcaccagcacgcagctgagagggcgaagagttagtcatcgccgccatggtaaatccaattccaacggtgtctggagatcggagttaggcctgggaggcatgtgcaacttcgtggaactaccctgtgccatcaatcgtgtgcgggaggcggcaaggcgaggttaatttctcaccggagccgggtgttcgcgccgtgaagcttcccaccgcggcccgaccttcgggcagcacctctctcggtgagcccctatctgcatggttcgcatttatccctgctttacgataccgcgcttgtatttgaggattaggctcgtgcccaccctgtgttcgtcacgccggcaaggaatccactgcgacgttgggttgcgccgcagctgggcacgcc

SEQ ID NO: 53122 - DNA, 563 bp, Zea Mays
gtcatgacgaggtgttcacgagtgcggaaaactgatttgggggaagaaagaaattggagctctctggtggttaatcggaagcagtagcggatgctttgccttcatgatgacttaacagagctaggggtgtgctcaatttatagtatcccagagcggtggctctcaatttgctcatggcgtgctggtggccggagagagggaagagcactggcgcaatagttgcgtgtctttcaccgtggcaagcttaccggcgacgagccagcaatatagagcggcttactgcgatgtggtgaagcttcaaggcacgtggcacccgatcgacaagcggccaactccggtgaacttatctgagctggccgtgaagcaagggggtacggctgccagcccctggcgttatccgcggcgaagatctttttaccctgaagcgttatccgggcaccagtgagcacgaatcacctcgctggcgcgaatccaggcacgggggtcgccagcggcaaggtgcactgcaccaggggtcttcttcagtttactgtactatcaggacaccattcagatcatctgac

SEQ ID NO: 53123 - DNA, 2011 bp, Zea Mays
tcaacaaaacgacgtagaacgaacccagacattacagcagtccacctaagagcaggcctagccccctgaccagcaacctcagagaccatgtcagccatagctggaacaagtaaaagattaggggggagatagaatttaggggggagatagagattagggggaagatagtagaagtagcatagaagtaatagtgatagtagaagtagcatagaagagtaacaaaattgcagttttaacatagtacaaaatagcagagatacaagtaacagagatagtagaagaaacatcattgctagtagacaatggtatcaggatgacataggtaagtaatgacatggaaaagttcatcattgctagtcgacaatggtatcaggatgtaagtaatgtcatcattgctaatagacaatgttctcatcatgagcaactgagcacatcacataaaggaacttagcacaaagatagtgagttcaaaattgcagatagttcatcattgctaatagacaatgttctcaaccagcaacttagcataaagaaagtgagttcaaagttgcagatagttcatcattgctaatagacaatgttctcagccagcaacatagcacaatacataacgacaactatcccttatgtgaggccctattctgccacatttgttgagcccaattgtccctggtagcagaccaggcagcattgtccatgacaaggtcatggggagcttcctcatgaacttgatttgcagcccatgtttcttcttgtggaatatgttcatcattcccatgacgaagaatccagttgtggaggatacaacaggctagaactagctttacttgtgtcttgtatggatggaaagatttgttgtataatattttgaatctgttcttcaaagcaccaaaggccctctctattgtcacccttagtgatgaatgtctaaggttaaagagctcttttgggttctgtggattcctcccgccatattcactcaagtggtaccgtgtgccatggtaagggggtaaaaacccaggtctgacaacataaccagcatccacaaggtaaaatttacctaacataatagatcatatattagggaatactaaggaaagtgtgcattgtgtagaccaatactattttttttaccttggggcacttttagaccatcttctctttattcaagggcatcagcaaggataagggcatcatgtgctgaaccctcccagccagcaagaacatatgtaaaccttagatcaaagtctatagcacctaagatgttctgtgttgtggtgtgtttcctaccaaggaaggaagctctctgatttctaggaactcttgctagcacatgagtgccatcaatggcaccaatacagtcctacacattagggaaaacatttgttactacaaacccaacataaaaaggaagggatcaggagtggtctgtttggagggctgaccttgaaataagggtaccatatgtggctatctctaattttggttggtgtagcagttgaaggtggcaagatcatttcatttctcagttcaccaacagcatacaatacttccctgaagtatctgctaatggtctcaatagaccttcgaaaggtcatatgtataactctaaacctttggttatgacctaccacatgtaaaaacatggcaacctgctcctctactgagctatgaatgctatctctcaatagctgcctagtgcgaaaaagttcacacaattgcataaaaggggctcttctcatcctgagtaagtcaacacactcaacatcagtggattcaaaaataaatctcaagttgttttgcctctcttggtctctttggtgcattgggccataagtgatagacctcctagcatgcattcggtgcctcaaccatgcagccaaccaggctgacataactgctacaaggaccactgcctttgtaattagccgacgacgtgcaatagcaggatccattgctagagtaataaaatataaaaggagattagaggtctaagttggctcacatgtgt

SEQ ID NO: 53124 - DNA, 338 bp, Zea Mays
tccgtgagcagaagcacaaacctcccactaaagggctccttcaaacgagttgaatctagagcaagtttgggtgaaagaggaagaagtgtgcctttgtctcaagttaggtaagcaatgaatgtgggggtgaccagcaacatttaagagagaggtgtgggggtctatatatagtcatagttcaaaactagccgtttgaccagatatttcgagctgacaccggttgaaccacccctagtggacctgacaacctatctgccagtctgactggcagactgctacacagtctggtcagactattagagactggttgaactgccctaggggcggttgaaccgccc

SEQ ID NO: 53125 - DNA, 787 bp, Zea Mays
tgaaggtggggaaggcagcttggagaaggccagggggtcgtggaaattggtgcatgctggagtagctaaatccctcgccaacatggattcccagggtgttctaaaaatctcgtgcaaaggagaagtgaagaagaatatgtgatgttgtttctgggtcagtagagcaaatttcacaggtgtcatcagagatagttcctttcctatgtaggttagcccaagtctggagtttgtcctatgaggccagcagatgaagctagacatgggcgaggtctcacaaggcccatgcgacagccaggagtaaaggtccttggtgtgaaggcatccagagtgattagcagcaaagcagtggcattcgctaggggagacattgagctgaatctcagtgagcatgttttggagggaggccaactctagatttgcatgaggggagctgtccacacaagaaggcagccaacccctgctaaaggagatcagcagtcgtgacggggtctttggcatgctcaaagatagtcgtgttagatacttgatttcaattccctagaggcgttgaaaatgaaggtaacacaagttaggaatggggaccttcgtcctaagcttaacacttcttcaaaatgttaatgtgaaggtgtggggaaatgcaaacaaaagtaatacataatggaataacacatcaagatagagtatgaaaactcatcttctttgccttagcacttttattccatcactcattatgttaaatgagtttacaagcatacctttgactcaacacaaagtggcgcgaacgttc

SEQ ID NO: 53126 - DNA, 607 bp, Zea Mays
aaatccgaagctaaatctcagtaaaggtacctataagtctggcgcgctctgcagcttcttcagtttttttggccccttcttgagcgtcgtgagattctttttcattttttcctaatagcttcgtcagctatctcacgactgccttttatccatacttcagagtaaaatttaccgcttaacgaagacgcttcggctgaaggattcttaatgtcgttggctgagataacaaattctggctgaacaacagccttcgcatggtcacagccgaccttttccaaaattggtacagccccgcgggcaccagcaaaagcacagaaatcccctcaatcgctgagtatcttatcaaaagcttcgacctccctgttgatccactggataaccccatcggggtcaccgtggatgaacctctgctcagaagagtatgctcccacctttgcaaaattgttctttagattcttggcacattccaaggatatttcgtagcatctctctttggagtcgcggagctcttagccattattttatgcccttgatttttcaattttgcttatctcgtggttcaccattgcaacttcaaatttttcactcgtttctacaagcttcttct

SEQ ID NO: 53127 - DNA, 424 bp, Zea Mays
cttgtgtgcactagaagagagcctgagcagttactagcttcttctgaacccttggaagcttgtgatcaacgtatctttccatttctgccaagatattattatccctcgccgaagagaagagtaccaagtctaagctacactccttactgccatgatgaatgacttggccatgaaagctgtgttgcctccataagatgatatcatcgcttcgtaacacataacgaactgctttggatcagagtgaccaacgtacatgggctgagctgggcttgtacaaaggtggccatggaactgcctgcagctctatagctaaaggagaagcatcatcgtaagcaaaattgtcattgttaaaagcttcataccacatgtcttcatggtttaggccttcatgccgaaggtctctttggtgttgccgatactcttg

SEQ ID NO: 53128 - DNA, 791 bp, Zea Mays
ggcgttcacgtttgggcgactcgacagtaggaagaaaggcaactcaacagtaggaagaaaggagaagggagagaactcacatgtgtgtgaggatcggcgacagttctttgggcacgacggcgagatcgacctgcactccggcgcataggctgtgcacagcggtgggggtggggcaatgcaggtgtatgggaggtgatgtggtgtgagggagcagggcatttaagagagtggtttgaaagagaactagcaagcggttgtcgagctccttactatgtggctgatctaagcgggactggaggttacaaggaggaagatggtgggtgggcttcgtcgggcagtcctaagcgtgggacaagaagcttgggaggtttggctgatgggtcggggcgcatgaaatggtcttgcgggtgaatataggtgaggtattcgggcacagaggaggcagggtggttacggctgcatccgagtgagactagcacgtgtaaaaaggataacagtttgaggagatgaagtcgacacgcgagctccgaatgacaacgagaagaacaagtgaggggaaaacggttgcacgcacagcacgtgaggcactacgcgacgagacgaggcaatgtggtaggcgggggtagacgaggtagaccccagcagcacgacgttcgtgagaagatcggtttgaggatctcgcaaaaaaagggtgagacccagaatatgattgacgagaggaatacttatataatattcggttctcgaaataattttggtttttcgcaactactaattttttaggattaaat

SEQ ID NO: 53129 - DNA, 553 bp, Zea Mays
agcatccaaagttatactagcttttgggagaggcgccaccaccaatgtcccagcaggagcagcatcaggagagtcctcagccagcaaatcaagcatagcacttatttctgcgtcactaggatccaaaggcacctcaaagtggacttgccgttcatcgtcaggaatttccccgagcgaagcaaccaaagtgttagcctcgtcgatagagggtcgcactctaaggcccaaactgccatcagtgataggtggattcgacacaaaaagagtgaaggtcttgggagaaggcaggttccatgctgaatatgccactggggcgccaatatttgatgccttgcctctaaggatcatctcaagtcggttcaccaagtctacagagggaattctcctgttggtaacccgagtcgggtcagctaggcctctatacagataagccggatatgctctgtccttcaatggctgaacattcttgaaaacaaaatcagcaaccacagcttcagcagtgagacccctttctttcagcataccaacttcagctagcaaagccttcgcttca

SEQ ID NO: 53130 - DNA, 446 bp, Zea Mays
agaatggcaacaatcttctctgtgtttgcttcaattccctggttactgacaatgaaatcgagtaacttgtcagtgataatgccttaagatgttgaagacttgctatagattgttgatgaagtactttgagtttttggttttgatcaaaacatcatcaacgtaggcctccacacgtttgccctagaaattggacaaacatgtttggatggcacgctgatatgttgctctgatgttctagaactccaaaggcatggaagtgtagcataatgcctcaaacggtgtaatgaaagcggtcttctcttgatcctattcaactagactaatctgatggtaccctgagtaacaatctagaaagcagagcaaggaacatcctgtagtagagtctatgacctgatctattttagggattatgaagggatcctttgggcaatgtttgttgagatttg

SEQ ID NO: 53131 - DNA, 451 bp, Zea Mays
tgcaggggctatagcgcaaaagactctagactcaggtaacagtaatggtggacggtgggttggtttctgtatttcgcagggactcttatacaaagtgtgcatggcgaagaggtatcgggaagatctaaccgtccgatccatacccgatgcaccagattagatcgtcgtgatatataatgtgtatcatataacagggtcgccccgatcatccgatcccgcatcaatagcagagaggcagccacactctgaccggaccagaaccgcacatcaccgaatcaacgtctccgatcaaatctcgtgaaggggtatgcggcacaacatctctaccgtcggttatcgatccaacgacttcgtgctatcgctctcccccgaagtggcctgacgatggcgccaccaacccaggcggtggcgagttcgctggtgcgagtgaatctggtgcccgagccacaat

SEQ ID NO: 53132 - DNA, 567 bp, Zea Mays
gagaagtagacccactttgagatgtcgtccagtactgatgatgctgagatgaatgttgttcttagcacgctgaccggagaatcatctgactctgcctgcactgagccgatgacagttgcgattaggcaggaccttggtgaagacgaggaaatttagaaaccagaaggtgctcgtcgcaagcgatcacgccgagtgaaccatccaactgcacctgacgaggagaagaaaaagaaaagacgactccgacgattatcatgcatgaagcaagatgctggccctccacattattcctcggccatggcccggtgagcaccatcctcgaggacaatgtcagaggttgtgacgatgctcgggttgtcggcagtgtgcttgatgaggatgaggaggatgaggaagaagaagttccgttaatccacaagaatagacatcgcaacaggggcaacgatattccaatgcaggccttatcagcacttgtcagccttcaggggttatcgatatctgattttgaccaggccttggaagagatcatcctcgagaaccttctctaagagcctcctaaaactgacg

SEQ ID NO: 53133 - DNA, 685 bp, Zea Mays
ttttagagtttaaaattaaaaacagaaactgaccaaaccttgtttaattaagggaaattagttttgcttctgtgctgaacctaaaaaaaatttgtagatgttcaaccctcatttaagcactgtttaaaaatagtaagaaccccagtattgaagaatatagtgtagatatccgttaaaaaccatttttgcccaaaacttaggaaaatcagaaaggcattagaaattaatgaacagtgagtgaaattatttttcctagtttacttaagtaacagagaacctaagaaaaataaagggacctctagtccagatcagttttaaagtggaatgtgttatttagcattattccaactagaaatcaattattagaattacaaaaccagacccaaaattgataacaaaaatccagtggacttataaccaccagaaccccactgcaaaaataatgaacaccctagcccatcattttaagtagggtaaataagtgtaatatgataatgagtcattttctaaataaatcatgaataacccataataatgcaataatgggcaaataaaattttgctaggtcaataatgagataggccaccagagaaaaatgcaaaataatacctgttgctaatattttataagaaaggccatttaatccaattaatacataccaccccttcccttaagcaaaaagatg

SEQ ID NO: 53134 - DNA, 706 bp, Zea Mays
cgggcgctcaagacagtgccaccatttatcgctatacataagatgctaccacacgggcgtcacgatattacatccccacacgtgtggatgttggggaatgcctttaccgaagatccataaaactaactggtattaacagtttcacaatcttttataggagtaattaacccatattagccaaagacgtcaatacaactaaaaagagaagtggaagatgtttcggttcaagtgctcagttcaagcagttgatccacgaagcgggcaacgtacctactaatgcttcataagaaatgactatgttgtccctaatatcaaagctatgtgtataagattcgaggctatgatgtaatttcacacatagttgtataccaggttgtccctataaataggtgaataatgctcatgtacgaacacaggagttcacatactcgcttcacatcaagccgctttgtatctaaagctgtaagactctacctttgaactactgcctgagccttcgaagttataattgtatacatttgtaacaaaaaagggataatacatggagcacgacagtaatgattccttgtgagcgtgttcattccttttattcttttcagaattttgattacaataaccttattccatcaatttatatctcaattgaagataaattgaagggacgaaggtatcctttaggaatcaaagtatgtaaccaacattggtt

SEQ ID NO: 53135 - DNA, 369 bp, Zea Mays
aaattttcttttctttttgtttctccacatatacattctcaaaataaaaatttgtagagtgacatgaaacaacataacttatgttaaaaatacacttattagtggatgtactaaactataaaattagtaatgaaaaatccataatgtacttttaaaacataatatatgatgttcattatcatcctagaaaattttaacttaaagttcaagtgctactaatagtggtgttactatcgttgctatcttgctactttgtacagaagcagaggtcacacacgttagactacaacgccaattgacggcctcctgcaccgttgcacagagctggtctcaccctcgtcgttgttgctcctcgtagtcgcaggctcg

SEQ ID NO: 53136 - DNA, 894 bp, Zea Mays
ataccatatcttataactagtgtgcaggtcactagccttgttatgtcatcaactggataacagaccttatttcccgttgatgcgacagagcttaggatggtacaatcggtggaagccggcggttgagctactggaattatttgcagctgtggagtggtcatctgttgaacagatatcgcacttgccaactgttgcatcaattctggtggaggatttgatagcatttgagacatcaggtctttgaactctttctttgcctcctgcttaaaataatccgacaacacttctttgtatcgatcacgtttcttgtacaaaccttcccactatggtccgaatccttccttccatccttccttagatgagattcctcatacatggcctggatgctcagggttaccaagactagccgttaggatgtctctctccctttgtggcttaaatgatccttggctctgcttagctgccattgcatatatgtttttcacaacttctttgacatttggatcatcaaaagatacacccgcctcagtttccctgggatttctagcacggatccaattagtcgtcctttcaccaagttgctcagaaagcgtcggcaaccctgcgaccttcttctcagcgtcttcttgtctccatttagaaaattgacgcttgtaaccacctgtgcctaagcggtggtggtacttgttcttcttagatagtatgaattttgcctcgcttagagatatgaattcagggttgctcctctgctctagaaatactgcccactgaccttctgagattttatatttttttgtcgggtctaggactttctttgcaaattttgtattcatctcagacctccagtttcgaaaattgattgcaagctgcttcatcgtgtattccttcacgagt

SEQ ID NO: 53137 - DNA, 828 bp, Zea Mays
ttctatttgcagctcttcttctctctcccaagttgcttcatcttctccatgatgactccattgcactttgcacattttgatcactttactcctcatgagacgagtcaaagtatcaaggatcttgataggatactcaatataagtcagatcatcttgtacactcaattcctccataggcaattgctctttgggtactctgagacacttcttcaactaggatacatggaagacatcatgtacatctacaagatggtcgggtaattccagttggtaggcaacctctcccactcgctttaggatcatgacgggtccaataaagcgaggggacaacttccctttaaccttaaacctcctcataccccggatcggtgataccttcagataacatgatcaccctccttaaactccaactgtcttctccgattatccacatagcttttctgtcttgactgtgtagttctcaagttctcccttatcaactgtacatgttcctctgcctcttgtataatttctggtccaaagaactgcctctcactagtttgatcccaatataaaggagtcctgcattttctaccatatagagcctcaaacagggacatcttcaaactggcctggtagctgttattgtaagagaactccgcatagggcaaactcttgtcccaactgccgccatgtttaagagcataatctcttaacatatcttctagtatttggttggttctctcagtctgcccatcaatttgaggatggtaggtcgagctgaaattcaactgcgtgtccaagcactcgtgcaacttctgccaaaaccgagaagtaaactgtgatccc

SEQ ID NO: 53138 - DNA, 426 bp, Zea Mays
cgggttctaaaaatttcatcagaaaagtattagttaacaagaactactttattcattaaaaaggattgttttcatcctagtactaactactacttttcctacaagaataagctaccatgcaacagccgacgacgcttgctgggaggcatctcatcgcattggcttgccccgccatcatcatcgtcgtcatcgtcgccactgccgtcgctgtcctcgtcactactgccgtagtcactgctgccgtcgttgttctcgtctttgtcgtcttcatcattcgaggagccgatgcccatccaatgtccagacatcggctcgtcatcgttgtcgaaggactccacatccgacgattctctgtcgtacgtccaagaccagtcagtgctgttgtcggagtccagctccccgtcaacgaggaactggaggtcgtcc

SEQ ID NO: 53139 - DNA, 888 bp, Zea Mays
cctcttccacttctctcgattatttgatagggacctaagtatcttggcgccagcttacatttcacaccaaaacgttgcactcccttcattggcgaaactttcaagtaaacatagtcacccacatgaaactcgagaggtcttctacgcttgtcggcataactcttttgtcggtcttgagctgctttcatatgcctttggatagtacgaacttgcacttcgacttcttttacaaaatcaatttcataatatctcttttcaccagcttcaacccaattcaatggtgttctatacttgcggccatacaatgcttcaaatggagccatcttaatactttcttggtagctattgttataagaaaattcagctaatggcaaccatatgacccaagaaccctagctaatattacacaagctcaaagcataccttctaggatctgattaactcattcagtttggcctaacatctaaggatgatatgcagagctcctgattagatttgcacccaatcctttatgtaggtgttcccaaaaacgggtggtgaattgcagccctcgatctgacacaatcgactttagtacccgtgcaaacgcacaatctgagagatgtatagctcgacacactaatagattctataatccgttcggattggaataaaatgtgcaacctttgtcaggcgatctacaataacccaaatagagtcaaagttcctttgggtaggtgtaagtccaacaatgaaattcatactaatttcctcccacttccatctaggaaatgataatggttggagagatccggccagttttagatggacagccttgactctacaacatgtatcgcaacgcgcaatataagctgtaatttccttattcattttggtccaccaaaagcg

SEQ ID NO: 53140 - DNA, 873 bp, Zea Mays
aacgattctatctgggtgataatcgaccgtcttaccaaggtaacccatttcatcctagtgaaaaccaccttcggaggagccacccttgcccagatatatcttaaagaggtagtcagactccatggtattccacggaagatagtgtcagacagggggacatagttcacctcaaaattttggatgagccttcagcaagccatgggcaccaagctagacttcaacaccgcctatcacccccagtcagatggtcagacagaaagggtcaacaaggtcctcgaggatttgttaagagcctgtgtgttgacatttgacagaaattgggagtctaatttgccatacgcggagttctcgtataacaacagctaccaggccagtatcaagatgtcaccgttcgaagcattgtatggacgaaagtgccagacccctctaatgtggtccaacataggggaaaagacactagaagggcctgccttcgttaaagaggcagaagagaaagttgccctgatccgcaaaagattacttgaggctcagagtctgcagaagagttatgcagacaacaggcggagagaactccggtttgaggaaggagactccgtttacctcaaagtctccccaatgcgcatagtcaaaaggtttcaagtgaaagaaaagctagctccgcggttcgtcggcccctaccctatcatgggcagggtaggacccgcagcctaccgccttgaattaccagaatctatgtcagatatccacaatgtgtttcatgtatcccagctccgcaaatgcctgcaagtgccagaaagtcacatcgaagaagagacaattcagattcagaaggatctgcagtatcgagaaaagccagtaaagattcttgactcg

SEQ ID NO: 53141 - DNA, 1134 bp, Zea Mays
ggaggtaagtgcagtgtgatggttttgaagcttcttcctatttcgcggggcttagagatcgccctaagacgagcaatcgaaaacatgcttatgcttaatcgagtagtcgcgagcgtgccgtgccgatttaagtcactaccgacttaaaccgaccgctccgttggtagggtctagtggtcaccctgagttaagtaaacgtgagcatgtcacaccgccttaagccttcgctgactaaagtcgattgctccgttagtagggcatagtggtcaccctgggttaagtaagcgtgagcatgtcacaccgccctaagtcattgctgacttaagccaattgctccgttaatagggcatagtggtcaccctgggttaagtaagcgtgagcatgtcacattgtcacaccgccttaagtcattgccgacttaagtcgattgctccgttaatatggcatagtggtcaccctgggttaagtaagcgtgcagaaaacaattcaagtgcctttgagaatgaagtcattttattgatggtgtatctcccaattacagaatacaatgccgtcccaatagcttttgaaatctagctaggggtaaaacttcctgagatgctctatattccatgagttccctatttccgtgccatccatttgagtaagacgatatgatccaggccgagtgacttctgttactatgaatggtccttcccatagtggcgacaatttatgccgtccttcccccgttagaattcggcggaggacaagatctcccactgcaaaggatcgatgtggtatggccttatcatgatagcgcctcagagtctgttggtatctggctgactgaatcattgtattcaactgttcttcttctagtacatcaacatcctccagcgtagtggctttagcctcagctatgttttcgaagatcaatcttggtgccccaaacttgagatcagcaggtagcactgcctccaaaccataaaccatgaagaagggagtgtttccatgcagagctcggctgggttgagttcttaggctccagaccacatacgacaactctctgatccactttcctgcgaacttttcattcttgtcgaagactttctttctgagtgcttccagtatcattccgttggctctttctac

SEQ ID NO: 53142 - DNA, 726 bp, Zea Mays
gtcaccctaaatcaagtaagcgtgagcatgtcacaccgacttaaggcgtttccgacttaagcccattgctccgttggtagggcatagtgatcaccctaagtcaagtaagcgtgagcatatcgcaccgacttaaggcttttctgacttaagccgattgctctgttggtagggcatagtgatcaccctaagtcaagtaagcgtgagcatgtcgcaccgacttaaggcgtttccgacttaagccgattgctccgttggtaggacatagtgatcaccctaagtcaagtaagcgtgagcatgtcgcaccgacttaaggcgttttcgacttaagccgattgctttgttggtagggcatagtgatcgccctaagtcaagtaagcgtgagcatgtcgcatcgacttaaggcatttctgacttaagccgattgctcctttagtagggcataatgatccccctaagtgaagtcatgccgatttcgagtcaagcccaatcgaagccagttgtcaatcaagagtttgaatgcctttggaaaatgaaagctttattgatgatgaaatcttctggttacagagtataacttttcttcgagggtttttgaggaatctctaagggtagaactttctgaggtgttctatgttccacgagttcaccacttctgtgccgtccatctgagtaagtcgatatgatcccggccgtgtgacctccgctacgatgaacagtccttcccat

SEQ ID NO: 53143 - DNA, 554 bp, Zea Mays
attttatataggaataactatctccttttatttggtttacaaatttgggtactacaaatcctaccccccttaacaaaaatctcgtcctcgagatttaggaaggactaggaaaaagatgaggaaattctattcgaagctcttcttctctctcccaagtagcttcatcttctccatgatgactccattgcattttgcacatctttatcactttatttctggtaactcgagtcaaagtgtcaagaatcttgataggatattccgtgtaagttagatcaccctgaacactgagctcttccattggtagctgttcctcagggacacgtaaacacttcttgagttgagacacgtgaaatacatcgtgcacatcagatagatgatcaggtagctctagttgatatgccatctccccaactcgcctaaagattttgaagggtccaataaagcgaggggataatttgcctttaactttgaatctcttcattccacgaagtggtgacaccttgaggtacacatgatcaccttcctcaaactcaagtggtcttcttctattatca

SEQ ID NO: 53144 - DNA, 947 bp, Zea Mays
gtgacaacgaacggtgcagtagattcgcgcccctggtgacttcccataaagaaccgatgccaagggagtcggtgtttagtaccagcaatgcaccatggggtgtaccacatgatgcctttgtgagttggcaacatcaactgtagctcgatggttcgctttgagatgcgacaaaacacacgaattatataggttcgggctgcttgatgcgtaataccctacatcctgtttgcggtgggtagtattgctttgatatctagaggttacaatgagggctagagtttggatgtttgatgagagagcggggggcatgtataagattagatcctctctagatctaccttgggagggatccctagctcgccttatataatccggcatggcttgggttacaagtaggtttccctatatatctcctagtcggtttagatttcattagagtccttatactgtgcgccaagtgcaccttaggccgagaatatgcttcatgaggagctaggggttatccatccccaacaagcccctgagcttcaagttgacttgagaaacaatcagcttgaaggtccgaaaagaccatctaaagaagtgagttcaatggcatgcactgtaggtgcacccattgggcgtagctctcgagcttcaagttgactcgagaaacaatcaacttgaaggtccaaaatcagctttcaaaatgtcttgccttgtagtctttgaaaattttctgatggtatcctccatgcagcccttgaacctcaagttgattaagataatcgggttgaggatcaagcaacttgttcctctgagtgatcttggtgaggtgggcagcaacacccgagctgacgaagtggtcggcgaggtgtgtggtaatccaacccttgagctgacgaggcggtggcgtagcctcccagagtcgacaaagcagagagttggcgaggcgagcgatgacccag

SEQ ID NO: 53145 - DNA, 679 bp, Zea Mays
accaggaaccgaggcgtgatgttctctacccacgatgagacgcggctctgcggtggtgacggcactccaacgacgaatcacggtatcttcgtccaccagacatgcacagcaaggggtcaattgcttgagcgtgacctgatgaatcaccaggaccaattccccgaggctgaaagctaatgcaaaggatttccaggtgcgacggctttccctattatcctcctcctcgccatgatggtgctcctaggcgtgatttatttgtgatgccgatgggatgtaggagggtcgtgggaccctatttttatagcctggagaccggggcgcacaaccggttttgaccctgagtttcccggcggccgttgcagcatcccaggtgtatgatttctgttcaggttcagtaaggtgagcgaaggggtcgacaggagtgtcctgcttggcggcgtcggggatctatgtgcgtgtggcaagggagccctagtcgagcgggcctggttgccagacggccagcgtgagtccgtgtgcggacgagatcacacggagagtttcctgggcccgcgtgtcagtgccctctcgttgagtgagctagcgcgggaggtgggtcgatcaacgggttttaggcccaagtagaggtaaggctttctttttttctttttgttttcttatttctttttcttactttttg

SEQ ID NO: 53146 - DNA, 773 bp, Zea Mays
agaaaagctacaaatatagttaattgtacaataaaagtatatataccttcaagctattataagcaaggctatctgcaagatcatccttcgatattgcagataggtcgagcttaagcttcgggtaccccatgttcttcatcatttcctggcagacaaagatctctttattgtccggtaggaaatagagaaaatcatcctcatcattgccgctatacaccaaggatccttgcggataattcaaatccttggtgtattgccttgtttcggcaatctgctcctctgataattgtttacccgaagcatgtcgaacaataaactccaactcttcggtaggtgcttcgggaataggagacttggacttcttaggggcaccttctttttccaagattagtggtgtagtctccgaaggtcttgcttcggcaaaaactgagggtccaacctcagaatcagcttgtgcagtgccagtttcgtcagatttctttaaaatttcgccttctgaactaggcacttcagcagaagcaggagttgatgccttcatagattccatgacagcgtcttgcacgctggccattctcctattcctctgagttgttgcagggatccttgacaccttcggcaattccatctcgtgcggtggactcagggccttcagctgctctgccgctttcttcagttttggttcttcaaccggtcatgtcttagcttcgacatgcatagagcaacttggcttagatatagaagcagacccttcaattagctttggcacttcggcc

SEQ ID NO: 53147 - DNA, 1171 bp, Zea Mays
tgggtggatgaggagaagaacgatttgggttgaagggacggattaccaaccttgtccgcttttcagacccctgagatgatccttcacccgcatatctcttcgtttttacttggcccgaattcttggcttcaactgacagtgatgtgcttacaaccctgctataggtgagatctagacacgtggccatcttgcgctggagtctgtcattcaaccctctcataaagcattttttctttttttaagtccatgtccacttgatcgatagcatattgggagaggtgattaaacttgttgagataatgcattatagaatctcccccttgcttcagacgtatcaactactccagcttcatctgtagcaccacttctagaatgtaatgttccctggacgcctgtttaaattttgcccatgtgaccagatgtccagcaggctaaacggctgaaaaaatttgcccaccaagtgctggcaggacccctcaactgttgggcagcgaataggggcttctgtgttttagtacatcggatcagcccgaacttttgctccataacctgtacccattcatctgcttccagtggttcttcagctttaacaaagagcggtggacgggtttcagagaactttagatatgtggtgtctcgtggtccttgaggttgacctctgcctccaagttgctgaaattgatttcttgcgaattcacgcaggaaacgcgtgttgtcagtggtagcattgactaaggcagcgataacctcagccagtgtaggaggtacaggtggcgggtttggagtttcctccctgccatgggaagttcctgccctgtcatgagcacgagttcttaatggcatctgaggaagaaaaacatcctagattattacatgccaaacgtacaccatctttattacattgtgctgaactgtaataattatacatacccattagtacaactcaacttccttatttactttacataaggacactacttaaactacactactctaattatcttcgtccttggccgcaccattgccagcatcgggagaatgttcatctgcgaggttcatggaaggaggggctccaaaaaggtccaactccccatcaggtcctccattagctactccagatggtccggctcctatagctgcaacttctggtggcacatttgggtgcagccag

SEQ ID NO: 53148 - DNA, 423 bp, Zea Mays
tatttggtaacatccattgtgtgggatcagtggggtgttacagttggtatcagaggaataggttgtaggtcctagcaagtggaataacactaaattgacacactgcacatataggatgggttttctgctttactattgatatgttatgttattgtctgtgctagtttgacattatctgaagagatgctatgccaatcttatttacttattattctcacccctatggctgcagctatgccgcctcgtagggctcggggtagtccgcaagttcctagtggggactcgatgagtccggcggcaatgttagccacgatgcaggccatgcagcaggagttggccattctgaggcaagctattcctgttgcccctacgggtgctgctcagggagccgatggtggaggagtgcctgggggcgctgtcctt

SEQ ID NO: 53149 - DNA, 680 bp, Zea Mays
gcgagggttatccagcccccaagggtatgattgaggataactcagcccctgagggcgctggtgagggtggctcagccctcgagggtgttgttgagggtgacctagcccccaagggtgctgctgaggatgacctagcccccgagggtcctgaacttggctcttctttggctgcttctatggatgttcatgtcgagtaaccaccagttcagtttgaggaaccaacggtgacaagctttgatcttcctacagctcttgctggcccggtcactttagaggtcagtgatctaggtgttgaggatccgctgcatgctattggagttgaggtcccactaggtgtcgcctggggcatgagctttaatcctcctctggggctcaagtctgctcttgatattggctccaccagtgtcccgttgtttgatggcaccttagcacctccagctttgggattatacctcgccaaatttttattttttcttattttctgttctgtttatggtttacttgctggtcctattagctctattcttattcttatgcttacgatgccttttgtagatagctcaccttaggcacaccgctcataagttagtgattcccttcctgccccctcgccttgcgtaacgtccactttgtcacacggtgtctggtcagtcgagtcaccttgagagattgcgtcaccg

SEQ ID NO: 53150 - DNA, 463 bp, Zea Mays
aaaagtacagtcggaccattgccgcagtgtcggttcttcgtgatcgaggggtcacattggcgggtgcgatccaccactgggggtggctcctctcatggtcaggcgactgccattgatcaaggtgaccaccgaggcaccgccaaagggcactcagctaagcgctccacccctagtgatatggagatcgctcactggctcacggaggccatagaaatttgcaaaggcatggatggggccatcatcccatatgcatcatgagatgggcattgtagagttcgtgagtttgcctggtttcacctctcttttttctaattctttgttgattttgcaccctctgacccctttctcctccttctagtgctcatcttcgatgttgtaggatgacccgctcccttgccgaagagcgaggcagagaaggagggggctcacgagtgggcggagcagcagcggaaggacaagaaag

SEQ ID NO: 53151 - DNA, 877 bp, Zea Mays
gccctgatggcttaccgtcgagctaaaggtctatgttataaatgtggcttaagatggaatccagcccacaagtgcagccccactgtacctctacacatggtggaagaactatggcaattggtcggctcaattgaggccgaaaatgagcaatcatcccttcaagaggattctggagaagatttcatgtttttgtcagtgaatgctgtcctaggtactgaggctccacaaacagttaaattgctagcttccattttcactaagaaggtgattatgttggttgattctggaagttcgtcttccttcatctcggacagattggctaattcgcaccctaatctgattcctttaccgacacctgtccaagttcgtgtcgctaatggacaagttatctcttgtactcatgaattgccccagtgcaaggtacaactgcaaggtcactgtttctatattgatgtcaaagttctgcctttgaactgctatgatattatattgggtatggactggttatcttcacatagtcccatgcatattcactggcaacataagtggttgacattccagagtaatggtaaggaagtggtgctacagggattgcgttcagacaattccaatctgacacatatctcagttcctcaactgtttcatctacagcaacaagaacaattatggtgtgttctccacttgcaaactgtcaatcaacttgatcgaacaccaccccaggatgagctcccagttgaaattcagagtttaattcaggaatttgcctctttgtttgataaaccatgtggacttcctcctcccagatctcattgccattccattcctcttattcaaggagcaacaccgttccggttacgtccctaccgctataatcctg

SEQ ID NO: 53152 - DNA, 586 bp, Zea Mays
ggctgctgatatctccatcgcattgagtatcttggacttgtttggaagggcttctgggctccgtaataacgagtagaaatctaatgtttatcccatccagtgctctgagaatgatctattaatagtctagaatttattgacacgtgagaggtctaatttcccttgcaaatatcttggaattcctctctcctttcacaagttgaccaaggaacatgttcaatcaatcatagatagagtggccgaccgtcttccaagttggaaagccgatctaatgtatagagctggtaggaggattattgttcagcatgtgctcaccagtatgattgtctatttggttatggccactgatttttctctttaggcattagaggcaattgataagataaaaagggttttctttggaaaggtcgtaaagatgtcaagggaggacactatctgattgcctagggaagagtgtgcagacccctccatttaggaggtttgggaatttctagctcgaaggaattatgttgggctcttcgtatgagatggttgtggttgcataaaactgatccaggcagaccttgggcaaaccttcctatacaag

SEQ ID NO: 53153 - DNA, 646 bp, Zea Mays
tgagacttgtatgtggatgtgaatgaacaaacgtgttttaagacttatgttttgtgtgttaaaatttaagagtggatatgtatgagtgtatgaccaattatatgtggacaagattgtgttttgtgtacttttgtgaatgagacttgtatgtggatgtgaatcaacatctgtgtggttagaatttgtttattgtgggcttttccgattacagttaccgtttctcgatcaatttcgagctatttttctcggatttatccgatttcgatataccggaatttaccggtcgttatttgttttctactttcccattaaccgattacgaccgaacaaaaaattatgcgggtgaaaatggtgagaggtttttctgactgttaccgaccgttttcaccctttgtccccacgcacgacacacacctcggcggcggtggcctcttggggcttcgtctgcgcaatgtgccacacccggaaccaccccaccccagcgtagtcctcgtccgcccatctcgtcggcctccatcgtgtcgccctgcatctagaaaaactaaaatgacctataattcagaacatatggtggagaataggcactatagtgaatcatgaaggtagaaaatggaagaagcatttattttaattcactcacctggtc

SEQ ID NO: 53154 - DNA, 312 bp, Zea Mays
tgcaaatgcaaccactagatgctctatgaggcactaagttttacacatatcaaagtcattgacccctcttaatagtacggctatctaacctactaatccggtcaagtatcttctctaaactcctgaagaccggcaaaaacaaaacctatgttatacctttgccttcacttgatccacaaccaatgcttataaatctccaagatttcctattctatgtggtccaaccctgcattcttatttctccaagaaccgttagtccacaaacagttgtcattaattaccaaaacatcactaggggcctagatgattcac

SEQ ID NO: 53155 - DNA, 418 bp, Zea Mays
aaaatacgtcgcttcacgcccgacaagagagaagccatccttgcagagttggctcgcttggtcgtagccggattcattagagaagtgttacatcctgagtggttagcaaatcctattcttgtactcaaaaagaataaagtggattggcgcatgtgtgtcgactatacggatctcaacaaacattgtccgaaggatcccttcggactccctagaatagaccaggtggtagactcaactgttgagtgttctatgttgtctttcttggattgctacttcgggtatcatcagatcagcctggcaaaagaagactaagaaaaaacagcattcatcaccccgttcggagccttctgctatacctccatgccgtttggcctcaaaaacgttggagcgacttaccagagggctattcagacatgct

SEQ ID NO: 53156 - DNA, 452 bp, Zea Mays
agggctggtagtggtacgataatgataagagtctgctgctgctggactggttgtacgatagtactactagtgatgagagggatactagctagcagctctgctttgcgttgctctgctctgccctgcgttgcgtccccgatcaaacgagagagggatggcccacgcagacgcagcagtgcccggctgtttgcatgggctataaattggaccaccacctcaatcgataggaacaaccggatcacaatcgccactagccaacccactagtacatactagagccgccgatggcctcaccctcagtttcgctgctcgtcaccatcatgttgctgctgctcctgccgtcgtcacctacttgctcctcgctgagttgtgggcttgacttcaccagcgtggtgctgctctcctgccaggagacggcaccacaaaaccctactgcctcatgcagcgacgcc

SEQ ID NO: 53157 - DNA, 617 bp, Zea Mays
cttagttgtgtcttttactaaaaaatcgcaccatagtgtcagggttgtacatgccctttgccagggatcggatccctaggcccacaaaagatagagagaagctcgtccagacgagtccaccttcagaacacctctgtgcaccgcgcataggatcggatgaggcgagactacgagggggtcagacaaaccactagggagccactcgagtggatttcgcatctagctgtaagaccactctcgccatcgatattgcacactctgcattaactgtgtatagcacagagcctaggcatgggaaagagtcaatccacctcccactcatgaccgacgggacctaggcctgagccccgctcatgacctacgggccataggtctaagccccactcataacctacgagccttagacctgagtcctctgacgtcctactaagcacacaagatgacaaagggaagccaaagtcagactatgaagaccaaaggtcggcacatacataggtggacagaagaagcaatgatgacgctcggactcacgtcgcaagcacgcttcaccaacagtcttgaagaggtgcaactagatatttatacggggacgaataatgacacacaacaagtctttt

SEQ ID NO: 53158 - DNA, 340 bp, Zea Mays
tgcgaattgaaaaatgggcctgattcgagtttcgaggcgaaagttattgtcgttttaagtttggactccgactcagggtttctggtgagacgctggaagggtggggtcggtttgtgggaatggtcagtttgggtgattggatcggttatcgagactgagtttgtggaatgacagtggatggtgatgaccaagctgacccaaaaaagatctaaaccaggaacctaattagggttgttagcgaggcaaatgaagggtgaatggggtcggttttgtgcataggtcggttttatggataggtcgattttgtggatggattggtttatcgagattgagtttgtgg

SEQ ID NO: 53159 - DNA, 309 bp, Zea Mays
catatcggttcataaccttccccgaccgaatcatggcccttgatgcaagatccaacggctagaactgattagtaccccttcgccataaccattttgcgttggagcccctcggcttttgtaaaaccaacccgccatccaatacaggtgtataacaatacagtatggccctggaattttgcacagagcaccccagaagagttcaaaatattgtccgaagtccaaatgggatatctagaataataaaaccaattagaaaatgaattttaatatagaaagttaaatctaaaacttcacaaattcataacttct

SEQ ID NO: 53160 - DNA, 576 bp, Zea Mays
caaaaggcaccagccattctgaacaaaacccaccaaacttaaaaagcaaactttgaatactgaaaacaaaccgagtattctctacacagaagaacatactacatataaaatgtcacaacttagttttgcaacatatctatttggtagtgcagttggtggggttgaaacaccatagttgtcgaagacaggttccaaagtagtcgttgatccttcatgcagaaaggcaggaagcagaagcctgcgagaaaccacatacaacacaaattacctatgtttgcgagaaaccatatacaacacaaattcgataggatgctaaaacaccaaaccgacgatgtcttagtcatgttcagtcttgataaaactatcttgctcaatcttgttagaacttctgtataacagtcaaagtcactaccaacttgtttggttttattttataggtaaaaaagcagcaccaattttataaatctctagaaaatggaaacataattatctgaatcagccgggaatcaaagccataatcaaaagtatttgatttttttttcttttaccaggggtttagaaatgtcataaacatac

SEQ ID NO: 53161 - DNA, 795 bp, Zea Mays
atttatttgagcttatcagacggactcttctgccgaggatgggatacagggaggctaccacacatattcagctctggctccttggtgccctggtctcccactctgagtttgacatcgtggatttccttatttgtgagatcgaggacaccgttttggatgggattcgtgctcgtagacagttgccatatgctcactacttatgccacatctttgcgtagctgattcagcctcctcggtttcagggcacacttgaggcctcacgcctcgtttttggatcctaccgtcctgcgcctgcggctcctgtgccagcttctgctcctgtttttgactctcaggccgaggacgctgctcttcgtcagttcgacacttaggatacagcagctgatgatgatgatgatgatgattttggggttcctcctccgcctccgcctcctatgcctccacgctcacatgatcatgaggctgggagttctagtgctgcccctgctgcccctccggctatggaccctgctcttgcttcgattctccagtctatcactcagcagcaggctcacctggcagccgagcaggcccggttatccgagaggatgctctcgatgtttcagaacatgcaggacaggcaggatgcgctttagcagcagctactccaggatcgggctgagagcaaggcattcatggctcttatgctacagcagtctggtgtctcaattcctccggttcagtctactccacctcctccgcttcacgctccagttgtgccatcgattctgtcaggaccccctgttccttctgttg

SEQ ID NO: 53162 - DNA, 402 bp, Zea Mays
cattgtgggccctgcctcgttatcagcctgggttattgtagcttcaacttctatttgcttagtatcagctttgggttgcgttttgccagctttggcaacctttcctatgggagcgggacttatggggttggttgtttccaatacatctaatacatttaccatcgttctccttttaggagtcacgatagaacccgtttgtaccctcggtaccgtcgcccttgttggagcactcaaaatatctggcatttttgttatttcttcaatttctggttcatcaaccttatcaaccttcgtttcaacttccttagccgtgggcaccttcagcattacagccgactcttcagtactttgtgtagttgaagcagtttcttttctttcggcagcagaagatgtccctgcgcc

SEQ ID NO: 53163 - DNA, 507 bp, Zea Mays
gttctgaccatcgttacggggcgggagcactagtggccgctaccggtatctagcgatcgttgagcttctgctgccttttgttctcttgtgacccgtgtccgccgaagatgacgttgacttcttcatcgacgcgtgggaacgctccgcctcctcccccttcatgctgctgaggttgttgaggttctccgggtcctcctcgtggtgggggaggtggcagaggttggaagggtcagccattctcgatggagtgcttgaagtctctgcagttccagagggtatgacacatatccttgtggtatgggcactgggtgttgaggatgtcgtccaatgttcgttcgcctccgcggggtgcccctcgggcacgagagacgggtggtccggcggcatggacttcttcgcgaggcctcttctcccagcgcttgtcagtttgttggttcacgtcgcgccgtggtgtggatggagcgggcttcattcctccgatgaggtcctgggcacgttcatcggcgg

SEQ ID NO: 53164 - DNA, 637 bp, Zea Mays
ctgaaccgtgtgatggatgctatgaactttgagtatcctgattacaaaaagcttgatgaacaggccggaggggtcaagaggaaaaggattgttagcattctaagcaggcaggctatccggtcggtaaaagaagaccaagaggctttgaagaagcgaaaaactatatcggagccgaaagtatcggctcccaagaaacggaagcttgccgagatatcctctgagaagatgaagatgcaagatgcaccgaagtagactatgagctcttattcgtcttctgatgctgaggtctcggagattttgaaggtaatgactgagcttttcccatttgcattgctaagtcctatggggttggaactgactagcctcttgcaaacaagggaattctcttcggctaccaagggaaaaaacggggggcaaaagaagcgacacatgatgaatatactggaagccattgaacagacccctccctcagctttggcagataaagttgctatatccaccgatgctgaagctaccgctgtagccgaagatgaaaatctcacaaccaccgtgtcagaaattgacagacttatatcagatgtggttgtggagaaaaatgtagccgcaacagtttctgataacgggaataaaattgaag

SEQ ID NO: 53165 - DNA, 495 bp, Zea Mays
gcacggaggctgtagaggagccggtggtgcaggcagcaggcagagcacgaacactgcaaacagcgcggcagcaggcaggcagaggcgagaggaaggcaagcgaagggctgatgcgtgttttatagaggaggttaggaaagggattaagctcggattaatgtgccataaaggctaaataacgttgtattaaccttcggagaaacggcaaccattaagctccaacaatagcggctgtaaatggagagagaaggggagaagaaatgctaggcgttgaaatggggaggagaagaggtactggctggccacggcaggtgcgggcgctctactgcactaaatcgagcaggcagggtgaatgcggatggtcggcggatgcacttccagcaacggctgtaatgcccaggagacgaacgaacaaagaatttggggagaagaggaataggccaggtgggtcccatgtgtcatagagaaagaagagggagagcagatgatagggac

SEQ ID NO: 53166 - DNA, 1208 bp, Zea Mays
tcagcccagtagggatgtctccatgccagcccaaaccaacaaacctcctcccatagcccgtccccccacttggtacactaaccagtgacgcccgttgtttggccacatggcatcacgagacggagcgtcagtctcccaccacacactctctcccgcacgacagcgtgcgctcgccgacaggtgggcccccttggctggtcacccgtaactcacaaacacgctcgcattgcattgactcacgggcctgccttgtcaggtgtatcttgctcctccagccgatcaggattctgttcctgagcaagacgcaacctccaccaccgtgaccccatgatctatgcatgggggagggactttcgttacgaccaggcctatatatgcgagagcatcacgaccccttcatccagcgaagagatcccgagaatcgagagcaggagatagagaagagagcgccgctgggaggagagatcaccaccatcaaactctcgttgcactatcacatgggcctcgacaagtgatccaaggtttctctggtgcgtgtgatagctagtagaggcatcaaaaggaggggtcgataccgagaactaccacaattcatcaccggtgtggttcacggtcagagatccgcgtgaccatcgtggacactcgctacggtgacattcgggactcgtgtgctggtccgagtgcttcacgtcatcctggtgattgtgatcctggcagtcctagatgggattgtgctccgaagctccttcgattgctcatcggagtcactggctcttagcagagccgcctgtcatcgcgggcagaatcgtctgcgccatcaaccgaggtaaggaccccctctgatggtccgttttttcctctaattcacgtagagtcggtccaattgggtgctaggggctagaatagggaagcagggtatcctggcaatggcatgggcgcagtattagggcaacgctgccgcgacgtgctgtcggggaagaagaggtagcagaggatgttgatggtagaaggaactgtcacgattagatctagaagagacaatgtttcgacctttgggtcacgaccgagtggatgagattagagcgtccgcataccccttcacctgttaaaactggaccatggatcttagatcctatggcccagacacatccaagacctcagccatggcacattttcataagagccctcgtgtttccaatgaataaacc

SEQ ID NO: 53167 - DNA, 672 bp, Zea Mays
tcgatcttaagtgtgcttaggagatgcatggctcccttctccctcaaagctttctgccatcactgagaacaccacatctccataaccatagctcagcgcgtggcaagagcaggcctccggaaacccctatttatttgttgaagatactgctcgatcgggatgataggaccaataacgcacgtgaagctgctgctactggttcgatctctggtagcgtgcacgtacatacacgtacgcacgcatcttgcttggagatcgagttttccgttttggatcctactagttaatttaattgaagtttaagcaaagcattgaccactagccatatcgtattaattagcttaggtagctaggtcaaggtcaagcgcactagctagcaagtactacagctacgtcaatttaattatctgtcagtaacatttcagtaaacctaggcgacgactgattcgaggatcgctacttgagttccatggactggagtccgcttgccattattattattattatgaatccacgatctgtacgtgcatggcccagcgcgcagggcaatatgcaagctagctaggtcaacgtactggagctaattagtagctcccagatgatagtagtgtgtgccaatgactcacgtacgtacgccgcattgggtttttccgccatgaactaacttgcatt

SEQ ID NO: 53168 - DNA, 446 bp, Zea Mays
cctagctaatgtgactcctaaggtcggctaggtttactttcttgacaaagctccaaatcggaatattttaaattctagcaatggtaaggatgagatggatgattgggagctcccatattgaagaacttatgtgatccaagtactaaagttgataaaagtgtttagttgagtgcatttaaatttgttttgcacaatgatacattataccaaagaactactaaagacttgttattaaagtgtttgggatctaatcaagcaaaagtggctgtggagaagtccatgaaggtatttgtggtacacatcaactagctctgaaggtgatgtggttattgtgtggagccagtttctattgtccttttatgatgccgattgtttttattactacgtaggttgtaaaacgtattaatggtttggtaatatttaggtgatgcctactacaatgcttc

SEQ ID NO: 53169 - DNA, 413 bp, Zea Mays
caaaccccaccagcaaacctcccgacctaccattagggggagaccagacccaaacgaagttcctgttaccactaatgaagttcaaccaagaatcttcaaagtctttcttgttggtttcttgtaaaccaataaagtcaattttctctttcctgataatatctcgaaggaattcatttttcacttctttacccagaccctaacaattccaaatcacaccaatcattctgaacaatttagggtatgcccttcagtctgacctctccacttaatagggatgttcctattattgggagatttactagcctttttttttctttctcacagttttttttcctgtgacgaattttgcgaccttttctaaggaccataacatcatcaagatcagacaatgcatcatccacactatcattatg

SEQ ID NO: 53170 - DNA, 498 bp, Zea Mays
atgacaatacaatggcaagaaaacaagagtagaagaaatcaagggttatataacaatattatggattagaaaacaactacaatataacatcgtccttaccaatctagtcgaaaacttagcactatagaactatcctatcaacctaaccaagaagaatggtaatagatccaagagatctataacgaaacttcttgcggggcggggataagacagagaataggacatcgttgatagcttcgaaaaggtttcttctggcaaactttgcttcaagttccgcaatcctaacttgatcatcttgtagtgcttctgagtagagtcttttgatagaccaaaatcagactagaagagttgaaaataaaagagacgagtcttgatataaagtaagtttttatggaggacaatatatcaggctttgaaagactgactgggctttccatttctaactaatctagcgacctacgatcacattgctttgataccacttctgtcacacccgtt

SEQ ID NO: 53171 - DNA, 487 bp, Zea Mays
ctttcaggaatcaccagagtgtggatctaggagatgctctgagatgtggtgtgttgcccctgacatgttgtggtgctccgagatgtgctgggtgagggcggtaggtgagggtggcggcggtggagccctatccctgtcctatggttgaaggagccctatccctatccattggagggtggcggcggtgagtagaggtgaggacgagagagataggcgtaggacggtggggggcacacaaaaccgatggtcaaaggagtggaaccctatccctgtccaaaccggtggtgcgcggggtaaggaaacctgcatggagtccttccaaacgcgcagacaacgaggatgtgtctttttatctgtgttccgcccgtcccgccgaaaccggccagtgttggtgttctcaaacgaagcctcagctgtcggtgcatactacagtactagtgccatgaagatttatagagacgactggtaatctatttatatttcacgg

SEQ ID NO: 53172 - DNA, 485 bp, Zea Mays
gtgctcctatatgcccccttgccaaaagtattttattctagtatagtctatacttttctcaacctattagatctgatctcactcttgtgcttgtgacatctttgtagatgcctctgtccataacctttttgtctgttgggattcttccctcttccgtcattaaatttctaccctttgaccatcttcgttcccttggtattgacatgctcgtacccctagattcttcaatactcttgtttcaaataattacatttgaatttctcctgcctacttaagcactccagtttatgtgtccatgaacttctggtctttcgagatcctccctgtttcgttgttaagtcattatcctctgcctttttctattcccttgtctaggtacactcgtaccattggaatcttgcatactcttatttttatatatgcttacctttatatcccaatgactgttcaagacattttagtttacatgtccttgaccacccttg

SEQ ID NO: 53173 - DNA, 339 bp, Zea Mays
atggtaattccggagccttttccccgtattgacggccaataaacggaggagattatcatgtctgcaaagaaatgtcgtcgccttgttgagtcaagctggactacaagtctaaacaacctggacagctggtctgcatattcgtcgtacgtcaactataaagatcatcaaggtcctggccctccctgcttttgtgtcggcaatgcatcattgcacgatggacgacacgaaaagcggctgtggctagataggtagctacgaactggcagacatcgcccagggagcagccgcagctacagctacagctacagcccctgtcccactgtccgtgggctgcctgcc

SEQ ID NO: 53174 - DNA, 685 bp, Zea Mays
gcagagttttggcaccacgcgctagctaggctgaatactatctgtacggtgcaagaatttttagcagtccacttcgtccaagtttagatgccaaagtattttttttattgtttatctgatactgtcaaggtccacgatgaaattcagtgatgggcgtgcttaaactgccgaagatcgatatatctacctgctggcccgtgttggactggtttgcatgcgtggattattggtggatagatttcattcacgtcagtaaattttgctggatcgattcggaccattcggatgattctgttggcgatcagagttcagagcatcaggcgctacacggccaaattaaggacggtcggcgagggcagaactcatgatgatgcccgtggacgattgcctcctccgtcagaaacacgatcacccggacgattatgttggaccaaacggctattgtgaattcgccactgaaagcgggatatgtccacataattttccactacaaattgctgcgaacccttgatcctgccattggtgactgggttatcaacctctcctactaacacgttcatcttacacaaatactctactctttcctgcaccgtatagaaagatccagtaaagacaggttcgaaattgttcgaaaaatgtgaaaccaaaaggcaaggttctggctaagtttgggtaaaaaaaatac

SEQ ID NO: 53175 - DNA, 718 bp, Zea Mays
gccgaaggggtattttctgttgtgagccgctagatctacatcggaccgccaggatcaaatcagccatcatgtgaaccggtacccatttatgaccgaaggatctatgatcaacgacccgagagtttaaagtactcagattgccccccatacacacgatttgaatcggatggcacggacctggccacgaaagggtataaagaccttctaatcacaaccgttcatccattgatccacggcggacgggtcttctcccccctcgacacatcaccggtgatggagaacacccaccatgtcggcgccattgatggtgaatcccgcacgagcgctggcgagctctaaaccctacgcgattatgtgcaaaacagaaagggaaaagtggcgagtaacaaggtggtggccgtacggcggatcacactcaggcgacacaaccacgacacacggtggaaagcccagggttcctcggtgtcagcgagcaattgaggaatgaacggttggtttccgccctcccgaggtggtcgcgcacgagtggcacaacaaggcgaacctcctggacggtatccccaggtcacggctacagcgtagcacgcggtcgacggtggcgtgccttcaccaccctggacatggcattggcggcggtgatttggtttcagtgttcgcccgcgcaagagggcagttgaggggaggaaaggggcgcagggggggtgttcctacttattcc

SEQ ID NO: 53176 - DNA, 528 bp, Zea Mays
aaacaacaaccatgtggttcaccttcccacacacctagcacacaaggtgatctcctatgttggagctacctcgaccatggctagagtcaaagttgttgtggccatgatcgtcattgcaaccatcaccattgccacgatcacgggtttgttgcccacaattgtggtcactcttgtcactgattttgcagaggatgagtcgccttcttgttgtagatcaattcggttctcgtagctaagcagatgggagtatataccagccacctagataggatccgatagcatgacaagggcagaggcgaacatgttgtaattagcgtagaggccgttgacaaagtaggtgcacatcttgttgttgtcaaggttttttcccactataaccatctgaccaacaagacttttcatcttgctaaaataatcactagtggtccaatggatacgatacctttattgttgtcatgagggttagtcgcaaattaatggagttggagtgtgtttgtgtttatgcggagatcatgttgttcatcgtcg

SEQ ID NO: 53177 - DNA, 463 bp, Zea Mays
aggggttgggcatgattacataccaatttccttaggtaggcaatgggggaagttggaacgcaaaaattcctcagtctcccaggtagcctcttcctctgagtgattactccattgcatcttatacattttgatcgatttagcccgagttgatctttctttgcaatccagaaccttggaagggtactcttggtacgatagatctggttctatctccaattctggttcttctatgatctcagtcggcaatcgaaatctcccttgatgggtgataccttcagatatacgaaatctcccacctcgaattggagaggtttccttctcttatcatggtaactcttctgcctagcctgagcagcttctagattcttcctgattagtttgatcttcctttcggcttcagtcactaagttaggtccaaaaacttctctttctctaggctgagaccaattgaggggtgttcgac

SEQ ID NO: 53178 - DNA, 573 bp, Zea Mays
tttatgtgttacaaggcagaatgcttgggtctcatgcttgtgtgaagaatggtatagatttagtgtgtctgccttctaatggcattcttatccccttatatagttgaggaacaagaaacttgttattacatggccgctttcaatgggatatgttactatcgtttttggacgcatcgccacgtgggtacattcctaaggtatgccatgatgagaacgtctacttttcacctttgacatgacccgtccatctttgagttgaccaggacatgagggtggttgggtcctgcaggtgttcgagctcattttttggggtatgcctctgcgattgttggggtgaaggcgaaacgtccccctcgctcgagaatctcacgccagcgtatttaatactgaagaccatgaaggccctaaagattgaaccacacagcgaagtgcctaaggacgacgcacacgcgaagacttaggcactatcttcaccctggctagccgaggcaaagactatcgaagacttcggaggatcggaggatctagaccacgaagaccacacgttgtaatcctccacattgtaaaaggggg

SEQ ID NO: 53179 - DNA, 508 bp, Zea Mays
ccggaagcagtgcttgattctcgactgtctcgtaaaggaaatacgacagtttctcaggtgctgatcaggtggtcggggtggcctgattcgttggctacatgggaagatgagcaagctctgaagcagcagtttccgatggcaccagcttggggacaagctgttactgaagaaggaggggatgttagcatcgcagatggcctggttggcggacaggaaggaaggaaggcaaagctgatggtcgctggacccacaagacgcagccagcgtgtgattaggccaaatgtgaggattagcggtgccgagtggattaagtagaagtggttaaacaccttcttgtaagagggaaaaggaagggtctataagtacccgtgtaaccgagtaagcaactctggaacctggaaaacacaatagcctgaaccagaaataacacgaaacgcacagcgttggtgcgcatacctgcaagtgcctaacactccccggccgcatctttgctagggatgtcgtccgc

SEQ ID NO: 53180 - DNA, 796 bp, Zea Mays
ttcccattgtcgaccgttgtgcattgtatatccggtgcgccttcacttaacttgtgcattttgacatgctctttgagtgttatgtctggtgttctgaccagtactgcaccgaacatgtttgttgccatattactgactttgatctttttaacaccctctctgagtgtcgtatccggtggagtgttcagtgcccaatttctcccaaagtcagccttctctacaagtcgtatctggtgtgtcatccagtgcaccaccggtgtattatgcgtcgttttaagttgtttctttacttgggcttgtcgtaccttgtaccttagacttttatacaaccttgtcccatgttcaatttgtccttacaagtcgttctcttgatgcgttgatcttttgaatcacatcctttgaactctataaataatcacttagtaaagttatcagtccaaataattgtgttggtcatcaatcaccaataccagtagtaaaatggatcgaggtccatttttcttacaccaacatgtgaattgttgtgggtcttgcgccgaccagacatactagctaggttgggttgggtcaggtttttttttacagattggatcaagccagatcaagtagtcggtgatcatgtctactcgagactaacccgtgatttggagtagaatagtcttcggcaaaactagagatatatcttggtaggacgtctaaggtggcatctcagtcagaagacagcgttttctctagtggggagtagtaagtatatcaacattgcgagataatcatcagttcccttttctctggtttt

SEQ ID NO: 53181 - DNA, 734 bp, Zea Mays
ggagaagagggtcgaggcactttgtaggaggtccctacaagtcttcatagtcgcgtcaggggggattatcgacgggcgagccgaggatttgtcgctggagttccaacgccgccgcgaatcctctgtttgtcgactccggctcctgtgcaatgccgccaccggtaagatctccctcaatcgattcgcatccttcggtagatcttgtaggaactatctgcacacgaattgtatcgcctgggcgcctggccggggtgctcgacggcgcggcttgcaatggggtgagctctgtgctgcgatgttccggtgaccagggtagaagaagagtggtagccgtagatccataaagcaatgtctagattggaaccagggcgtacttcttcgcggattgatcttaggccgttgatctgcggggtaacggccggattagagctcgggaccgtggccgtttgatcagagatctaagggcactggttggttaagggtatgggccgatgtggaccattgatcgcagatcatagggctatggcagcgtaccggttcagataaacttgttttaatcgcagccgttccttttgatcggacgatcctgattgactcgtaccccttcgccgaggccaactttctaatgagccctcggggtcttggtgatttaaccagcagtccacacagaaggaagcctgagtcttaggaatctttgcgggttagcccctgcgctttaaaatattctgcgcgcg

SEQ ID NO: 53182 - DNA, 387 bp, Zea Mays
ctctttgttgttggtcaatagaaaccagacctgaagactttcccaaccagagttctggatgctgcatgtattccgcattgtccagcgtggatttcatccaataattgtttcccagtagttgaggaaatgcacttcatgaggactcctgtcgcaccccttctatacagtgcgccccctatgagggtgtagtgggccgactgtctcacgatgtgttctgctgcagccttatcatccggttcttcttcattctttatgtacctgatgataggctctctcgagtcattagggtccgattctggttggctcaaggtgttgcattcttccgcctaatctaagggaatacttgggcgtgatacttcctagacgaagactccgggtggaacctag

SEQ ID NO: 53183 - DNA, 655 bp, Zea Mays
gttatttgaactatttgcacatgtaatgttcaatatgcaatatatgtgatgcatgaatccctgatttgacatgttaagtagagttgcctcaacaaatagttataaataaatgcaatatatgtcaatcgtgtaggtagttaggtacctattgaaaattccagtaatgccaaaatttgattgttctgttcgtggaaatttatcattttttagaggtagatacatttcagttcacattgctagagctggtagggtttaaccgtaaaagtgagcaatctgcagaaaatgttagaaatgtatcagcacatgaactccagttttcttcctcaggaccaaaaaaatagactcacagggtatgaattatgatggttttgatacattttgcaggttatagaagtaattttgtgtgtgtgtttttacaatttgacttgcagcatgaacatgtaatgtccaaatgcctcaagagattgtgcacaagatcaagctgcatcataaggtctattcagattgtagagcatgcattttatgtagtggcaacgaatagaagcctaagaaaaaaagacatgctcaggttgttggcatgcatttatcacgaacaaatgctgaaggagttagggttaattttatggcaataactcccttttgcatttgttttatt

SEQ ID NO: 53184 - DNA, 366 bp, Zea Mays
gtcgaagttcgtcgacagatagatggtctcgtggtcaatctagaaggtggttttgtgggatatggttagcaacatatgtggacccataagtcgggcttgacttggctcccttattatgatgaccttttctttccacacaacatagatgtgatgcacactgaaaaagaatgtcgtcgagacactttgggcaacaattatgaacattcttgataagtcaaaggataacatagaggcaagagtggatctggcagcgttatgtgatagaccaaaccaagagatgaagccacgtactagtggaaagacatgtagaaggcctaaggccgatttcatcccgagcagggcccagaggaatgaagtactgcaatg

SEQ ID NO: 53185 - DNA, 603 bp, Zea Mays
atccagcttgcgtaagccaggggcgaagttaggtttgagtctgcagatgcatatgcccccacgaaaattaataaaatcagtggtttagaccaaattttcaccatatatgcaccacctatatgttagcactatgcaccctcaagatatttgcacactcctctgattcactctagctccgccactaacgtaagcgtatggcacaggatgctagtgcggagtgtggcgtgaagaattctaagatgaaggatggatcccttgctgtggtgatggagatggaagatgatctttcgttgatggtgggttactggggtcgcatgttcagccacccaatgagactcatggcggtaaactgcatagggttagggaatgacccaatagttttatgagtgatgtgtacatataccaaattaaggtatcctaatatggccccaaaagcccattctaagagaagagcacaacctaatgtggtcctaactaggacaaccctcgactaaaactgctttgacctagtcacatctaccaggtcgactttgaccagatttgtcccgacctgatcattccaacctcggtcgtcccaagtgacctcggcctagtcatcccaac

SEQ ID NO: 53186 - DNA, 624 bp, Zea Mays
cgaggcaagctagagccaaagtgggagggtcccttcatcgtcaagacgaaggcgtcccccagcgcgtacaggctaacaacgccatccggcgaagacttagagcattcctagaatattgacaatctccgtaatttttttgtttgaatcctcagggctaacacgcccttgtaattcaccaaacagttttattccggcccgcactcttttcctcccggggggtgaggtttttaatgtggcggagccatgtaatatacacgcaaaaatcccccgcaaaaaattaaaacaatgtcgaaaaagaccgcatcgacggtcttcggcattcgaccacatcgaagtaaccgcgaggggcagcgccggcctccctcgcgtgcgacactccgtgcaaaagtctcctaagggtgcagccggactagcacaacaagtgcaaaaaatcgaagtcttttccaaaagactctccgcgcaaaagtcgcctaagggtgcagctggactagcacaacaagtgcgaaaaatcgaagtcttttccaaaagactctccgtgcaaaagtggcctaagggtgcagccggactagcacaataagtgcacaaaaccactctccgtgcaaaagtcgcccaagggtgcagtcg

SEQ ID NO: 53187 - DNA, 402 bp, Zea Mays
ccccgattgacagataggggctgactctttcctatcgaagcctgaccttgcttcattggagccggtgtagtgtaggcagccctattgggacagtagttggtgtagtgtcccgattgtccacacttgaagcatgcacttgttggtggatgtgttaggagcaatgggtcctgctggggtgcttgcttgaggaggagcagtttgtgtctgttgagtctgttgcccggaaccgccacgagcaggtgtactttgagtggtagtataacggggacgggacctacttccagcctgtccctggttggcagtccttcttttctctccaaactcgcacctcttgttttccacaacaattgccttgtcaagtagttgttgaatggacggaaatgtgtgtgatatcagttggta

SEQ ID NO: 53188 - DNA, 660 bp, Zea Mays
tgctcaatttggcttacatgaaatgatgattcttgagttagcactgagaaaagccctaggtgacactggggtgtcacaggactcgaccgcaagcgtcgccgaagagcgctcgcatcgctacgcagcacacaacaacaggaagaagaaaggctgggagagagagtttgaatgagtaggctcacctatgcactacggagcttcgacgatggcagagcgttggttagggagtttggcgaagctccgggcgcgtcgatgatggtgaggcgtgactgtgtgcgtggttgctgcgtgcaagtgcccgactgagctatacgtgatctaggatggaagagcggatggctgagcgtgcacgactttctgcgggctgctagagcagtagttgccgagttggcaggagcaagggatgaggacggttttttagtcctacgcggggagacggttgggggagttgaagccgacacgcaagcttggaacgatagcgagaggaacaagtgaggtggaaatggttgcatgcacagcacgtgaggcactacgtgatgaggcgacgcattgtggtaggtgggggtatacgaggtagacccaagcaacacgatgttcgcgagaagagtggtttgacgatctcacaaaaagggcgagaccgagaacgagatcgacgagagg

SEQ ID NO: 53189 - DNA, 354 bp, Zea Mays
atcaacgacaaggaaaaggagaaggagaccctctatgttgatgagcaaaaaggtgacaagcccactgactcaggctcaaacaacaagaggaaggatgggaagaagaagaggcgcatgaagaagatcatctactacgacagcgatgcctcctcctcttcaccaagggacgacgaccgacgactcgtccacgaaaaagaaaacggttaatcggaattattcttttgattattctcgcatgccgtacattcaaatgctcatttattgtccattccacttggtaaacacccctttgatggagatgattactccttttggatccataaaatgcgtagtcatttattctctctccatcct

SEQ ID NO: 53190 - DNA, 348 bp, Zea Mays
ggtccttggggacaaccaatcgatctccaaaccatagaattcccttgctatcctgtcggaaacacttgtatttttctgtcttttgcttgatcatatctttgatgacctgaacacccttatcctcaacctgagcccttatgatctgctcttgcaacgtgggctccaccgagatatagcttaggtcacccgaagaaacaacttccaggttcagcttgcacaactcatcacacagggtggtcactcccacatccatgctcatgcaattgcactgggcctttctgcttaaggcatccgccacaacatttgcctttcctgggtggtaatgcacctccaaatcatagtccttga

SEQ ID NO: 53191 - DNA, 652 bp, Zea Mays
aatggctcaatttggagctaacatgaattttctatggattatacaaattctggcatttaattaatactaaaaatccatttttaaatgcatttctttggttttatttgtcctctggactgggcgccaaatcctggaaaagtcaagggcctaaaccgaagttttctaagactcagtaaataatgaatgtggacggcgggttcaaaaccctaaatcccaggggtttatatgcaattggtgcgactgaaggggtattgggggtttctgatcgcacgatcaagaatgggcgcttaggattagatctaggctttgactgaatcagtatgccatacggccctttggatctagatccattggccagtgtttaatgaaacaaagaggtacacgattttctaatctgggctgcccattattgatccgacggtcacgatacagggccacaaggttatacctacagaccaaacctcctccacagatgtgccatccaacggtccctgagcgtcttcaccaaatcgcgcctagacacggcggcgccgtgccctgcaacggcgaaccccgccgggggtcaacgatttcgcccataactcgatcactcccgatcacaagcgatcccgaacacaacccccggtatggtgaatcgatcggagctatcccc

SEQ ID NO: 53192 - DNA, 489 bp, Zea Mays
ccattaccacctgttgagcactagatttggtacctgggcatgactacatagttcgactatgtggctcggatggtacacgccctgaacgatccacatatatagtctggacggtctacgattagataaactcggttgagaatctttgtgcttgcatatccggctaaccacgtgggaatttgttgggacattcccctatatatacgaaggggtatgaccgattggcccacaacacaatcgatctaaatcaatctattcatcagtttctttacatttcttgccctaggagtaacattaattagtcttcctcatcctcaatcttcacctctcctcgactttacgttgtctagaccctaagatcttttctccctgatggggtccctcctagggggtgatatccaggtgctgaaagagaccccgaagccctctatgcacatgtggatggtctatcgcactatcgaggatggttcacgcgcccgcagagaagaccat

SEQ ID NO: 53193 - DNA, 774 bp, Zea Mays
catgctactgaaatagtcaaatttcacatgactctgatgttgaattgtggagctgttggtagctgctacaattttctgatgatggttctgactcacaacttctaagtgtctattgctcaaatatgcatgccatagttacagacattttactgatgtttgataaatactgtaagaaaatggaccaaggtctatttaacaaatgagttttggtgtttgataattaacataaccagttgaactatcaatgcctgctagtgtttttggttatagtttaaaagttgcaacgtgggcttgaacaaaggcaaaatgataatggataagatcaacagctcaaacaatactttaaaaatacttattgaagatctaaaaacacaaagaaacgaaataattggttgcacaacagcaccagacgtgtccggtaatgaattggacatgagttacattgaactgaagagagggctgcacataggtgtgcactggacatcacattggataggacaataggaatgcgaggatctttggtggacaaagctagttggcagcgcagctcgtgcagaaaattgtgcaggcggctaatgcttgtagtttgggtgcaggcgggtttcagtttcagggactaaaatgggtgtcgccgccgcttgagcccggagtgcgagaccaccaaaatggcgtttaggtcccgggtctttcgccaccgaggcattcgtcgcatcggtgcgaagcaaacacgacgaactgcgttcgtgacctgattcacgcaacgtgttccgccac

SEQ ID NO: 53194 - DNA, 829 bp, Zea Mays
cggtatttcggaaacatcggaaacgaaattttggtgcggaaaatacaccggtaactatcgaaatccaaaatacgatcggtaaacatatcaaacttcacaatacaacaaagttgacaaaagatcacaaagaccacaagttcacaatccatgatataacaagttcacaatataataagttcacaaggatcgcaaatttataatataaaaagtttacaaatatcacaagttcacaatatgacaagttcacggtataacaagttcacagactcaaagttcacaattcacaatatccacttgatctagctgacatggcatgcttacttatgaaatattttttcctcacataaagagtttttttcacagcatcacatgaaaatcctaaaacctagtatgtgcaaaagacagattgttatatattactaatacataacatgtgcatagaaaatagttgattcgttcgagagataataatcgttaatcccaactgctttccaacaccatctaacccaaaaaaatcttaaggcgtccaaaaaatacaaaattaagtaatccttatctagagacgtacatgcgatgcgaaaaatcacatgctggaaaatttcgaaaaattccgagacacaattctggaaaattccgagacacaaatccggtaatttccgacaaaaatcggtaaccaaaggaaacggtcggtaaaacacaccacgccgatttcgaaaatcgattatattttcgaaaaatactgttaccggtgaatacgatcgaaaaatttcgaaatcggtttccggaataccgaaaaatcaaaactgttttcatccctagctaagctttt

SEQ ID NO: 53195 - DNA, 649 bp, Zea Mays
gaaggtcttactcatcgcccgtacaaatgttggcaaggcgttcttcagaccgtagggcattacaacataacaataaagcccatccactgttacaaaagcggtatgcttcctatcttccctagacatctggatctaatggaaaccagagtaagcatataagaaggacaagaggtcacactaggaggtagaatccacgatttgatctatgcatggaagtggatacaggtccttgggacaagccttattaaggctggtgtagtcgatgcacatccgaagcttcccgtttgcctttggaatgatgaccgggttggccagccatacagggtgatgaacctcttcgatgaagccaacgtttagcagcttctggacctcctcacggatgaaatcctaccgctcaacggactgtctccgaggcttctaactcaccggtttggcgtctgggtggatcttcagatggtgctcaatcacctccctggggatcccaggcatctgcgacggttcccatgcgaaaacgtcgacatttgcccggaggaaggcgacgagcgcgagttcctatttctcctccaaattgcccgcgatgtgggtggtctgggagaagttcgcaccgatctggatggccttgacgggtccgccgtctgctctagatggc

SEQ ID NO: 53196 - DNA, 575 bp, Zea Mays
atgataaaagctgggggcacactgcgcaggccacatgggcgtgactaggcctgccagggtggggagacggagataccgagtactactaggagtactcgactcgcatcggaccggaccaggcgatcctgttgtgttgtgtgcgtgcgaaacgtacggacagagatgctagtcaactgaactccaatacgcgcctctactgcggactctctttgtgtaggacataggtgtaaaagagataggagtattactctatctacttcgtcacgtttcagttactacggtctaccatgatttcttttagaatacttgctaacgtcctccaaatataagcgctcggtttcataagtacttcgaacactaatgtgcacgtacgactaaataatgtactaatagttagttagttagttagttagttactgatgtttatatcttaaactaaacagtaatttagggtaaagtccatgctacagatttagtctaatgccaccagacaaaacttgctaacaaaatcaacaacaattcgagctgcagttttatttgcctcgaattcatttttttttgggtttggtttctta

SEQ ID NO: 53197 - DNA, 458 bp, Zea Mays
agaattcttttaagtggggtagtattcctggcagacttaaccgtcttgccgtccaaaggaattgatgtaatcctagggatggattggctaactaaacacaaaggcatcatcagttgcgcagacaagacagtcctcctcaccgaccggcagggaaagtcagtctcttgtcaagcacagccacccgccagtgacccaatgatgttcagtctaacaacgaaaagtaagtcagtagtagaagaattcatggacgtgtttccagaagaattgccaggaatgccaccagaaagagaagtggagttctacatagatctgattcctggaacagcacccatcgcaaagagaccataccgcatggctccaaccgagttagcagaactgaagcttcaaatctcagatcttcaacaaaaaggatacattcgtcccaactcaccaccttggggagcaccagtcctgttcgt

SEQ ID NO: 53198 - DNA, 431 bp, Zea Mays
aaatggtgttaaaatgacttgttttgtatctatttatgtagcttgcggctaccgtgtgtaggcaaccaaatatactatcagacaaagtcaacacatatgacgacccgagaacaaaatggtgctagcaaccatttaagcggctagtgagtgtacaccttcagtgtggcctcagccacagacactttcttctgcacaccacgcgtaacatgaaatctccggtacggtgtccggtgcttcttcactgaatagctccaatgcgatggaaagcatcatgcttcctatgtgagcactccggtgcctttttttcttctcgtttttttttcttcttccacttatgttgagcttcttgcttgtcttgtagagtctttatgactactctttatcttttgcttgagacgttgatcacttgatcttcaccatatatttcatcc

SEQ ID NO: 53199 - DNA, 582 bp, Zea Mays
tgcccgtcaggttgcaaggggctttggatagaccagagaaggttattcgtgagtccagtggtgatcaagtgtataaatgggaaaaaggaaatgaggtgtgggttgtggcgttgatacagaaggtggaggaagggttacagccaaatgtggaggtagttccagctgaagttcaagaggtgttaacccagtttcatgatgtgttcaaaactccagatgttttaccgccatcaagagattatgatcattccatcacattgttacctggaacagctcctgtgaactgcagaccatatagatactcacctttacagaaagatgaaattgaaaggcaagtgatggagatgctcatgtcaggactcatcactaggagtgtcagtccctttgctgcacctgtattgttagtaaagaagaaagatgggagttggcacttttgtgttgattatcgaaagctaaatgaaatcactgtcaagaataaatttcacatgcctgtgatagatgagttcttgaatgaattggcaggagccacatatttctccaagctggatatggcatcagggttccatcagataagaatggctcaag

SEQ ID NO: 53200 - DNA, 411 bp, Zea Mays
ccgacgctcacctataccgcacctcgtttccctggtgtggatgggagttttcctgtgcgtgatggaaccatccatggcatcaggtggtgaggtggggtccccggcgtctggcgacttctcactggtgtggtgctcggtcgtggatccgcgtgccaccgtggacactcacccacgatgacgttcgggactcatgtgtgtgtacaattgctccacgacacccagtgaatggtgaccattgtcgtcgtgggcggggtggtgccacgaggcttcaccgattgatcgccagagtttgggcaaactgcggattcgccccactacgacgtcaaaccaacttgctgcatagctcatggtgagactcatctccatgacttcacctatttgtccttcatgtgtagcatgggtctaatcggg

SEQ ID NO: 53201 - DNA, 500 bp, Zea Mays
gttgcggaaacttcatgcgtgatcccaatttcaccatagtactcatgaatgttggtattatcaaattcctttccgttgtcactccttatcttcttgattttgcagtgaaattcattttgagccttcttggcaaacttcttgaatattgatgcaacctcagacttgtcatgaagaaagaacacccatgtgtatcttgaaaagtcatcaacaataaccaaacaatagaggttgccaccaggactagcataagttgttggtccaaatagatccatatgaagcaactctagtggccttgatgttgacataaaagcattccagcttgacatgcactacaaaccttgtcccttttcaaatacaacatcctttagttctctaaccatgtctttctttagaaccttcttgagtgtgctcattccaacatatgcaagccttctatgccatagacatccaagagatgctttggtaaagaggcaagtccttaagtttgcatcttcagaaga

SEQ ID NO: 53202 - DNA, 473 bp, Zea Mays
gagacaactagagttatgatgaataatcaacaaaattggtgttagtatgagtttcaaaagttggactgtgggttagcctctcaatagcttagtttcaaatggtatgctttaacgtgtctttatccaaaattctattgctacttgaattatcaacctaccaagaaataaagattgttctgtttttgtgttcctttgatctatttactaaatttcatgcgataatctctgttccaggccaatcaagaggctaagcggggatgtgcaatagtcataagtggatacatatctaaatctaaacactatttgttttctttttttcgccaacatgaaaccatctcatccttgggttcatgcatggttctatttataacttttattcaacatgttatgttactttttttgcacaacccaatcaaaaccattcttccaattgctaagatggatacacgatgattacataggcttccattttt

SEQ ID NO: 53203 - DNA, 272 bp, Zea Mays
gctgattacttgatctattttgcttcgggtatggacagtccttgataaagtgtctggactttccacagttgaagcagcaagttgaagagattgggagggccaggaaatgagtaccagtggcacccgactgagtggttgaagtaggggcagtggcggggcgaatgaagaccggtttcttgaaagggtaggagggtggacgtggtaaagagcaattcggattaaaaggtcgaattaccaacctttgtcttttctcagacccctgactgggcctg

SEQ ID NO: 53204 - DNA, 714 bp, Zea Mays
tcgttaacgtacaaatcgacgagctgagatccacaatgcatcttctgtcccattagtctcttggactttattgtacgcatcacctctcctttgtcgtcgtaactctcccaaccgcatttcctcgtctcctacaaaaaaaagagtaaatacgggtgcaacattgcagctgatacaaacaaaaaataaataccaacctcatcgtaatctaccatatgtccacaaaaatagccaacaccaagctcagaaggaactaatccatatttagcttcaataccacatttgcatagtactggatcaaacttcaactcttccgcccactcattttttcttttcctttgcctctggctctggccaatgggacataggaccatacaaccactctatgaaatgacacttacgccacccgtatggctgcaggagaataatttagtacatttatgcaaaaaataataaaagtttagacatttgttatgggctcacataatcaatgttcggacacacgaagtgcttcgcagtgtcctcgtcgatgacatcacgatctccgcaatcgcatcgaggcggcgagtccattcgtctttctgttgctacctccttctctgcatccgtcattggtggagaatttaggggaggaggtacccaacgcttaaaacgctcatgactagtccttccacacaaccaattagcgaaaagaagatattgagggtcaaatttatc

SEQ ID NO: 53205 - DNA, 361 bp, Zea Mays
ttaagaataagtccccaacacccccctctaggcaactttcagcatcgctggggtccaagcatttaagcaggatgtcatcaaccgttcggcgatagagttcattactcatgaaaacatacttgaaagttgtacgtaacattcttacttgtcctaacactgggatttcatagataatcaactatgggtgtcctctagtcagtttcatcggctttgttatcaggcgactctactaggaggacttccctggccaccccgaacagtccggagcctgcacccgaactatccgcggcctggataactggccttgcactggttatcagattcttggtgctatgaaatttcccttgctttatccgatagc

SEQ ID NO: 53206 - DNA, 483 bp, Zea Mays
taagagatttagagagagtgggtcataggtgaggagtgtgttgaatttagtcaccatagggtatcgacacacatgcaatttagagagattcataccacaatgtgtgtaatgccctatgttctctttctaccccaacgattgatgaacacaaatgtaaagaaaatagcaagcttataactcaactaagcatcatgatcttccagctccctcttacctcttagttttggtggtgagttctatctaattggtcctaatccacctttatgactaccctgaggtgttgagtgtggtgagtctaaaagagtcctagacctcatgggagagtatgcatgaacatttaaccccactgtgagtaaaaaaactaacccttgaaacattaccctgccccccttgtatagagcaagcaggagagaggttacatcaaatggtaccatacctgcttctggggcaggtatgttatgtcgtttccctatgggtgccaaa

SEQ ID NO: 53207 - DNA, 751 bp, Zea Mays
aaactgctaagtataaaaaagactcctctataacagcatatagttgtaccaaagggcattccaataaaatcatcatgtggattgtgaattgagcttaggcgggaacaaaaattgcatgaagacatgactaatattgataatggcgggagagtttggatagtgtaatagtatggcggggctaatattttgtggagggaagcatgattagtcatttgaggcatatttggagtaattttagaaccaaaagactgggaacattatttgagatcagatactgtaacaacacaacctattgtagatgaatagaggaatagttttcggagaaggaatagcaatgtgaagcatatatatgagaacagagacaccttgtggctcttgaacactgattgaaatgcaattcgacagttcgtcagttcaacaaacacgaagaaacatgcaggcagatgttttttggctagtgtagaaacccaactgatttttacaggatcttcgagagtagaaaacaaggcacatcctgtaaaatattgtttacaggatggatacggtggaatcctttagcataaaaattgttcattcatcacatacattattttcaagagtagaaaacaaggtcgaccataccttatggcgcgtgatgtaggcctacacaaaaggtgctagaattagatataggctccatacaacagcacctcatgaatctacacaatccatacatagtctaggggcataacgtagaattgaaccaatggaa

SEQ ID NO: 53208 - DNA, 464 bp, Zea Mays
agcccgtcaaatggtgatgtgtcaatggaatcaaagtccattgtccgagaattttttattaacccggctgataatgtgtgtcttcaagaggatgaaattaggcatctattttttagtgaagagcttgaactgctctttttcgattatagggagcttgttctccttccaaaaagggaatgttgggactattgagagatgtgttcgctcttcgtatgctcagatttctgttttgtaatataaagcgcctttgctttgatttgctgatttttttgcctttgtgttgtgtgaaatttaaatcttacgtgttttttgaaccaaaggcaaaaaacaccttccattcttttcacacgttacaaaggcgacatcttttgtagtaatgcccttcagcgagggcacaacttcgaaggcttttgtaccttcatcataaatacttgagctctacattcccttaggaatgactttgg

SEQ ID NO: 53209 - DNA, 394 bp, Zea Mays
gggaagtagagaaggatggggggatccgtgcgtgccgttggatgatgtgtgggcggccgcgattagattagggcaggatcgattcaatcggttgatcgggtccgtcggtgggcacatcaacggccatgggagtttatgactttgttttcatcgtagccgtaggatcttgatccgatggctagtagtgcgtaccggttcacgagtgtggtgatctaatccgagcccttggtttagatcggtcggccaccattcaacgataccccttcgcggtgccattttgctaaggagaccccctgttttaaccaaataaactcgccgtccatcatacgatagatctgagtcttgagactttttgcgggttagcccctgtgctctctggttaccttgtgcccag

SEQ ID NO: 53210 - DNA, 493 bp, Zea Mays
ggcacggtgaccccatcgacatgcggcacaagggcctagtcaacccgaagcttaagctcagcgggctcagtactagcatctttagcttctccctcttcttttcatcggccttaacatagaaccactcatttttccaaccggttggccacttggtgcgatagctaacaactggagccttcatatctttgcagtaagcaaagttgtaacaaccaaaattctcatgaagcctatcttctctggccttcgtctgataatgaagcccatgcacttggcaaaaagattcagcattcgggtctattccttggcttcggagtgcccagatgaagatgctgagcctaacgatagcgttaggagtcagctgatgaagatagatttcgtaattttccaagacttccctaattatctcgttcaaaggaaacctcaatcccgctctgaagaaactcctaaaaactaccacctcatcattttccggtgtcggagtggtttcttcccc

SEQ ID NO: 53211 - DNA, 705 bp, Zea Mays
ctctaaacgaagttgggccgaaaagaggtgaagaaatgggttggagaagactaatactagggctaaactaagactagattatttctactcctaaggaatggaaagaaaagtgcaaataaggttaatatgataaataagtttcataggatcaattatgggggtccaatcggacgtaccccttcatttacataaaggggatgtctggacctgttacaagtcgactgctaaacaaattctatagattttgctaacaaatcacgcaagaaatctacaaccctaactgattatgttcacgcgcataccgtcagtgctgccaccgcagactgtcctgtaggccaaaattgtgctcaacacatgccccctccttttggcggagcttgtcaaaccaaaagcataatcactattagcacccttcgagaactaatcctgatgcaagtcaccgacttttcaatctaatagggcgattattcaatagagttttaatgcataaaggctatttaggattgcatctttctcggccatgactacttgatcaatggttcaataagtacaaaattgtggtacccccagcccgaataagcaaagggatgatacatgtaatacgagttcatcaccgcactaccccatgcttgaacagtaaaatatgtctgcgatgaataggctggtggaaagtaccacaacatcattggatgaacaggcgatact

SEQ ID NO: 53212 - DNA, 474 bp, Zea Mays
ttcttatcttcatcacatggattagcaacattttgcaattgatcatataaatcatgtgatgagttctcactagttttaatttcttcaccataaatcctgttagtgagaaaaacatgatcttgtaccaaatttttatgagcaacactaagttcctcatgactcaattttagctcctcatgtaaacaagtaataacataaagtagatgtttttgttgttcacatgaatactttagaaatgagttttcactttccaaatttcttgttttatctttctcattttctaaatcaatatttatgctagcaagtctatcaacaagctcatcatatgaatatgaatgattagtcacattagcattatacatgaagcaatgtggtgtaatggataggcttgtagtagcaatatcatcgtccgagcatgaacaatcaccataatcaccaagtatgcttgagatagaacaataatttgcatcactt

SEQ ID NO: 53213 - DNA, 564 bp, Zea Mays
gggtcgttgaaaacaacgtgagcaagtggcactattttgggaagtttcaggatttttggtgtctgttttgcgatcggtttgttttgttgaactcgtgtatgctctgagaatatctctaaacatgtagtgactatctggttgatatgttttttgtttgagcattttctgcatcttcaatgaagttaagcactccatttctcaagattagaagttttttctcgcaaacgtatttctagacgatttgatcgcttcattatgttctttggtcatcacctagaatatctagccaccaattggtgcttacatatctcttttgtatttttggagttttagaggtttaggtgtagcattgggaaacaagttaagattgtctgagcataaaaaatattggctcttattcactccgcctggttgcctaatttgatccttcaaaagaacatgcatgcatgggtctaagacacaagatggattaatcttgaaagaagacacacaaagaaacaaagaaaattggttctgcaccacttgacgtgtttggtgaggcatcagataaaacatcagatataa

SEQ ID NO: 53214 - DNA, 393 bp, Zea Mays
cagggacgtggtagcgctaggagtctacactacgtgcttaatagtagtagggatttgacctctgttggtgttttttcagcaccaacgacctccagtcccatacccaccgtagctacaacaaaaagaacattgtcagtgaacaggttgcaatgaagcagaactgaacaggttgcaatgaagcaggacaaaaaaatctaagaaacttctactcatggtttgcaatacatgcagttggctgaaatttattggcaaactatgcacaagaagcgtaaatacaaatctaaatttgagggggcatttaatgtacatacacaaaacacatccacaccaactttgcttccactacccaatgttgaatcaggcatgaaacctcttctcgagtccccctctcac

SEQ ID NO: 53215 - DNA, 329 bp, Zea Mays
agcaaccagtagaagaactagggagagcagggaaacgagtaccaggggcactcggctgtttggtaggagcgagggcagtagtgggacgaataaaaataggatgcttgaagggatatgaaggtgggtgagatgaagaacgattttgattaaaaggtcggatcactaacctggttctcttctcaggcccttgatttgacctttcacctccaaacccctttgattttccatgcccggtatttttggcttccactgccagtgttgtactgatagccctactgtaggtaagatccagacatgttgccattttccattgaagtctatcattaagt

SEQ ID NO: 53216 - DNA, 890 bp, Zea Mays
gccagaccgaaggagtatcggccgattacagtcgtccgatctgaaacgaggcgcctagattagatccgtgacaacgcgaatcggtacgcaatcacaaccgctggatcgactacctacgtccaagattcaaaatgaccttgatttcccctcgcctgcatgatttctaccctgcggtccagatctactagcgcgaaggcgtatccttggcctaatctcgtccattcaaccatgatcgagccgctcaggttcgtcttcttcctttcccccacgaaacggcggcgcgagtccgatacacgacagcgccctgaccggtgcaagccagtacgactctcaggcgagctaacaagtccatagttcgccccaaaacaaggcgaagattattacgaacacgtgggaaacggtttcgccaaccgccacgcagttggacacccccgaccgcaatacgggcgacgcccgaacgacattccgcgcacatgggccaaattcatgcccaattcgcccacgattaatgacagcgcgacaatagctaggaaaagggatacggtgagggtaaagaaccgagggctcaccgaatgcggaggtcaaattggcgctagacttcccacggcggatccgcttagccgccgtgctccgacgagaaattcccgcacctcgggacgctccagcttcaccctgagggcacaaacaacacccacgcgtccaggtgattcttcctagcggtgcgccgatgacagaacagtggtacaactatagtttttccggtggcggcggtcttcccccaatcgagaccgatgacagctatggtggtgcgagggtttggcgacgagagcgctttggaaatgggcattgcgaagacggtcgtggcgtgggttttatctccccgctggatc

SEQ ID NO: 53217 - DNA, 495 bp, Zea Mays
ggaaaagactcgtttttaggtagcgcctaatgcaaaagaggaatcaataaatacaacacgtaaagaagaagaattagagagggcaagctcttgtcgaaaaggtgatttatcccataatatcatatgtcaaaatgcaacctctaatttatgtcaaagttccaccgtggtacttcccgatcaccaaaccttccctatccatggtgtttggttcaccatagagactcctgccaatcatggcacattccataagccaacaaagcaaactactgctgctccacacttaccatcaccttagtgccatcatcaccactaagtttctctgtcatggaagtgctatagtccactcatctctacacacatgaagttattgcttctccacaccatgatttactataggcattaacactgtaactggtcatccacaatggcccccataatctcgatagcctaaacatataagagatcacctcaactctaaacctagagaattgatta

SEQ ID NO: 53218 - DNA, 801 bp, Zea Mays
gcctagttaaggtctccaaacacatcactcgaagcatattcgatgatggcattgtccaagtccatgtattcgatgtcagttagaagcagagggtcggtagtgcttggttccattgtagccatgcttaagcaaccagctccatccttcaagctaggtggggtggtgaagtgagcttcatatccctatccttcagcatttttgcccttaagagattgctggtatagtgccactaaatgatgaggaatgctacacttattagtaggatggttgaagcatccacacttcttacacttctcttgcttagaagtgggggtgtctttcctcggagcctttgtattttgcttattcatacgcttgttgcgtttgcgcttctttgaattatcagagttctcgggatggtttttggggccatcccctttcttctcattcttcacagcatgatgtatttcaggcataggagcagctccaacacgatgttgcttatgatttttcatcgtaagctcatcatgcttttctgcctgaagtagatcatgtatgagttcagagcaagtttgataattgcgagcacggtactgatgctgcaggaccctatcagatgggatcatagtttgaagtgtttctcaatcttatccgcatttgatggttctttgtcgcaaaaacgcaagcgagcacagatcttatgaacatcatggttgtaatcacctatagacggacaaatatgggtccattcatgatttgcctctgttaagattacaaccttttgctgctcatatctgtttttaagagataaccataatacat

SEQ ID NO: 53219 - DNA, 293 bp, Zea Mays
tgaaagatgcagcacgatgggcactttctcagtattgctcgttgttcagcggggtagctgatggcctcgacctgaaatactaccctcgccgttcgaccggcagtgctggaggtgtgattgcctcgccagttggcgagggcaatcccaggctgaacaacatggtcaacttggctgtcgtgctcaacacagagttggaccacacccttgatgagttgggcaaggttcgagcggaggttgcggaattgcgtgctgagtgcgcagcacgccactatttggatggtggttctcccgcc

SEQ ID NO: 53220 - DNA, 523 bp, Zea Mays
gctcttcttctctctcccaagtagcttcatcttctccatggtgactccattgcactttgcacatttttatcactttatttcttgtaactcgagtcagagtatcaagaatcttgatagcatacttcgtgtaagtcagatcaccctgaacactgagttcttccattggtagttgttcctcagggacaagaagacacttcttgagttgtgacacatgtaatacatcgtgcacattagataaatgatcaggtcgctccagttggtaggccatctccccaactcgcctaaagattcagaagggcctaataaagcaaggggataacttgcccttgactttgaatctcctcattccacgaagtggtgacaccttgaggtacacgtggtcaccctcctcaaactccagtggtcttcttcgattatcagcatagctcttctgccgagtttgtgccaccctcaagttctctcggattatacggacttgttcttctgcctcttgaataacctcaggcccaaagaactatctttc

SEQ ID NO: 53221 - DNA, 361 bp, Zea Mays
caaaggcacaacaggtgacatcattacaagaccttgagcgaaagggtaaagagatattgcaaaatactgaagatggtgaccatcatatgaaagatgctgataatatgaagggtgctgacaatgatgttgttctatgtggcactctttcggcactctcagaacaaagtgatgaccccaaatgggcaccaccacaagtaacacatgagttttcttatccttcggatgaggaaatagttcccaaccctaaagcaagctattccaagaggggacttcttcctaatctaggaaaggtccgtaagtggttcagggggtctaatgatcaagatgatgagagtgatatgaagtcttcaacagcaccatg

SEQ ID NO: 53222 - DNA, 566 bp, Zea Mays
aaaattagtgctccctccatgattttcctgactcacggaataaagggggagggagagagtgatccgttggagggagagagggggctgtcgtacactgagaagagggagagggtgaaggattgagtgaaacgttggattgagcctcaatggcggtagtagagtcaagatagcaaaccgttggagggagagagggggctgtcatacactgagaagagggagagggtgaaagattgagtgaaacgttggatcgagccccaatggcggtagtagagtcaagatagcaaaccgttggagggagagaggggctgtcatacactgagaagagggagagggtgaaggattgagtgaaacgttggattgagccccaatggcggtagtagagtcaagatagcaaaccgttggagggagagagggggctgtcatacactgagaagagggagagggtgaaggattgagtgaaacgttggattgagccccaatggcggtagtagagatagcaaaggaggggaatcatgttttaatttgtattaacatatagctcgtgctaacgtcatgctcacgaggac

SEQ ID NO: 53223 - DNA, 585 bp, Zea Mays
gtagaagtgtggtatcgatatggccaccattgcagtgtcggtaagcagaatgtggacaagtatacagtatacgtggacggggacggagacccgagtagcttgttcaggactcgacaaggtagtgttcgcctgctgcgagctgatgatatatgggcgcaccgcacatgcagaaacaagttcttcagccatcagtcaacgtgtcgtacgtagcaatgggaggaggacgatggcgtgaccatctggtactaatttcgtcaggcttccgttgtgggctttgcttgtcagcatcgatcctctccactgctctgcacatctagctaggcgacccacacggcttcagctggaacatggcaggcacagcctttcttgtgttcagacgcacaccgccgatgatgccggaaggccccggttgcagttgcagccagctccaccaagacagaggtgagaaacggacatgctatccaatccatggctccactccaccatgctcgatcgtcgaggagccgttgtctttctgatcggtcggtcgcgtcttttcttgcgagaacaaggcttcgagtagcgccgctgcatgtgccgtctcgg

SEQ ID NO: 53224 - DNA, 902 bp, Zea Mays
cacatcaatcccttgggatggcaagatggttaagtctgccaggaacactaccccacttaagagaattctgacttgagagcacctatgtttgcacaggaggtctgatcccgaggttcgggtgaccaaagggacaactaggggtgtagaggggatgccatgtttttccacaaacttagcggctataaaagaatgggatgctcctgaatcaaaaggcacagtagcgggagtaaattcaacaaggaactcaccgagcactactcccggggcttgctgggcttcttgagcgtcgatgtggttgactcgggctctgccctggtactgagtcctgctgtgctggctgttggaaggaggtgccttggaggtaggtgctgagggaatcttggggccattcaccgagttggagtaggtcggtccgggtgccttcaactgagggcagttattcttgaagtgactggggtctccgcagtgccaacaggcatttgctggcggttggttgctcgcaacggagggttcctgaagggagctctgactctgctgactgtagcgcgatggagtgggtccagatggtttattgaagcttggccccctgggtgggagcccaaagggtcgagctctctggtgacgttcttgctgttgagctcggaggacttggaatttcctcttgaggtgccctttttcttcctcttttgccctttccagttggatagccttgttggagaggtgagagaagttgaggaagtcctggctggcgaggatggtcttaagctcgggtcttagtcctttcagaaaacgggccatcttcctggactcggtgctgacatcctcatgcgcgtaacgggccaactttgtgaacttgtgcacatattcactgactgttctcccgccttgagtcagttcccgga

SEQ ID NO: 53225 - DNA, 495 bp, Zea Mays
gacgaagatggctgcctagaggatagagtggggcgtgaggtgctggagctgaagcccgaactcctccagcagcagcaggaagaagagcgagatcggcagcgccaactcgcaagagatgtaggaggtgaacaacacgaactccccggtggcaagattgcccagggggatggcgccggcatggattcttccggcgagccccggtgcactccacccaagcaggctgcgcaccaggttaagcgcttccttagactgaaagcggtcgggatgaccaagcgaagccatggtgtgtgcggcggcatgggtgtagagcagaagagcatgaaggcaaagaggcacagtcgattggaagagaatacgaaaaggtaactgctgcacgcggggtgaatcctttttcaaagaaaccagagtccttgtttagggaaacacttccgcgcgaccctgaatcgccgtaggaaatcccgctcgacgggcacctaggatccaggcagcctagtc

SEQ ID NO: 53226 - DNA, 456 bp, Zea Mays
cagaagttctttgacctcctcaaagcgtcagaagagcctcttcacgggcacactgacgtgactgtcctcgaattcgtaacccgactgatgtcaatcaagtccaagtttgcattctcaattaattgttacaaggagcttgtggatttgattagcgaggttcttcctacgggtcataagatgcccaaagacatgtaccagtccaagaaattgcttgaaggtcttggtatggagtatgagaagattgatgtttgtcaggacaactgtatgtttttttggaaggaatatggtagagaacagaaatgcttaaaatgtgggaagtcgaggtacgttgagcttataaatgaagatgggggagaaggtggtgacaaaggttgcacataaacagcttcggcacatgcctctcactcctaaagtgaaacatttgtttctctcgaggaagaccgctatgcacatgag

SEQ ID NO: 53227 - DNA, 457 bp, Zea Mays
aaagaaacgaggggaaaaaatctgttcacctccttcccctggaccgcgtgggtaaacaagaaagtgatgaaatacgacgttgggagatgtcgtaggagacgaagattctattcgcttgctacttccctctgctcctctgctactactacttcagttctcgccttctctttctgccctcacctgactcctcccttcctgccatttctctctcgatagtcgataccaccacacctccgctcccctccaagcctctccttttcctaagccccgacgtcttccgacttccaggtcggtgccgggcaacaataacttcttggtcaccgagccaaaagggggtcttttcggttcttgcgatcgattgatgagcggcgggtggcggcgatgagagcggatctcagcaccatccagcagacgctcacgccggaggcggcggcggcgctggcgcgtgccatcgacg

SEQ ID NO: 53228 - DNA, 301 bp, Zea Mays
atcctgttcagcttgctctcgctcgcattcctaggcgcagcgacgatcacggtgatgggagttgcagcgttctcggagtgctctttcatcgacggtttcctctacttcagaggcctcatctcgggagacaggttgtgctggatcctattccccggcttcatggtgacacctcacgttgcggcacctgtttcggcaccggcacgcatcgtgctggggggttcctcccccagtatggtgggctcgtcgtcggaaatgagtgcatcctccacccttcttttgatgaagaggatgtctgggaaga

SEQ ID NO: 53229 - DNA, 518 bp, Zea Mays
cttgaagtagattggatggcgatgtttgccacctcttcctcttcttcggagctagaactttcttcatcggagttccattcttcaccaaagtgggcttgaccatatttcttcttcttgaagtatcccttgttcttgcccccctttttgagcttatcctttttgtattccttcttggcttcttgttcctttttgtttggacaatccgctatgaaatgaccggtttggccacattcataacatgccctcttctttccttttctttgatatttatcattttcctcacaaacttcttgaaggttttgatgaacatagctgtgtcttcatcacttgatgtttcgaccactttctttgtcttgtgatctttgttcttcttggaggaatcttgttcattttagatcaaggcatgagtgtctcttgtcttgattggggcttctttagactcatgttgttgaatctttgcaaatagttggtgaggtatcatttcctcatagtcatcatgatcccttatcattcttgct

SEQ ID NO: 53230 - DNA, 503 bp, Zea Mays
tagcgaaaggcgcgctggaatcgaaggcgtttcgactgattttttcccccctccatgtcttttccatcgcaccagctggtgaattgaatgaggtttccgtttgggcccgggtgtcgtcttgtcagatgtacgtatcctactagtagtactgtagtaggcaaggaaaaggagacgcagatcagtagagagagtagaggtccagctgcgcttcttttcgttttttttgtattcttctggtatttctaagcagcctagaaacggtagtagaattccaatttccaagccgtttttgtaatggagctttggagttgaggtttccatggcggtttctgtcgtcttgtgtgttggtgtttcggatggacgctgtggaggtacggccaaaacacagctctgatgatccagcgcttcgagttttcaatcgggtttggtctgctactttattaccccctctttatcattacagtgccgttgagattggcgttagcggcgggaatcggttcggg

SEQ ID NO: 53231 - DNA, 733 bp, Zea Mays
gttttcctattgttcagaattcaacagtatctacatttgtagaagtaaaatgcagtgtgatggtttttgaaatttcatcatggggcacagaagttgccctaagatgggtgattgcgaacgtgccaagcgtgcagtgccaatttaaatcagcgtcaatttaaaccgactgctccgctagtagggcatagtggtcaccccgagtttagataagcgtgagcatgtcgcaccgtcttaagtcattgccaacttaagccaattgctccgttagtagggcatagtggtcaccccgagttaagtatgcgtgagcatgtcgctccgccttaatcattgccgacttaagccgattgctccgttagtagggcatagtggtcaccccgagttaagtatgagtgagcatgtcgcaccgccttaagtcattgccgacttaagccgattgctccattagtagggcatagtggtcaccccgagttaagtatgcgtgagcatgtcgcaccatcttaagtcattgccgtcttaagccgattgctccgttagtagggcatagtggtcaccccgagttaagtatgcatgagcatgtcacaccgtcttaagtcattgccgacttaagccgattgctccgttagtagggcatagtggtcaccccgagttaagtatgcgtgagcatgtcgcaccgccttaagtcattgccgacttaagccgattgctccgttagtagggcatagtggtcaccctg

SEQ ID NO: 53232 - DNA, 400 bp, Zea Mays
agagaatagagtgccaaaattgccttgcaaacatacaggcacacagctggagatgatatgctgcacggtttcctcttcttgatcacaaagcacgcaacactccgggaagtcaagccctctttttttcagcatgtctgcagtccagcacttgttattgatagctagccaaataaaaaacttgcatttagggggcgcccagctcttccataccatcttccaaggctcaaacactacaacaccaatgtagaaaagctctgtaagccaacttagatgtaaacagcccagaattggaggacctccaaacatgtttgtcagctctatcttgtagctggaattcttccagaatctcccccagcttcaaaaattccagaatgccagccagcgacaggttcccttcgat

SEQ ID NO: 53233 - DNA, 824 bp, Zea Mays
tacaccaacaatcatttcaaagaagcaaatcaaccatgaacacaagggacaatgaattcaagtataccagcacaacacaatccaattctactcattcaaccaaaagaaaaggtgagacaaggtttggaataagaaagatattaaaacatcaaggagttgggtaagaattatcaaggagttagacaagacatatttgttggtggccaagagagaaataagataaccatgaactattaaagtgaggatataaatgataaaaccaaggatatgaagtgagttagagagaaagcattatcaaggagacaaaatagagaggcattatcaagtaggagtagggagacaaagaattcagtatatcaaggtagatattgcgcaaggatggcaatataatggcaagaaaacaaaagtataagaagtcaagggttatatagcaatattatggattggaaaaccacaataatataatatcgaacttaccgatctagtcaaaaatcttaatactaaagaacaatcctatcaacctaaccaagaagtcaaataatagatccagtggatccataacaaaacttcttgcggagtggggataagacagagaatagggcagcgtcaatagcctcgaaaggatttcttctggcaaacttcgcttcaagttccataatcttgcttgattattttgcaatgcttctcattagaacattgtgatacactaagaatcagacaagaagggttgacgataaaaaaagacgagttttgatataaagtaagtttttatgaagataattaagtcaagttttgaacgactgaccgggctttccatttctaac

SEQ ID NO: 53234 - DNA, 420 bp, Zea Mays
cttagaccttaagcttagatttgtctcttatcaattaggtgcacagaattagtgaatttacttaggccgcgttcactgttatgtgcttgtttgttttgatagatactggttggagtcctatctgctgcacatgccaaccagtatcattcatatatgttcttccataaattggcatctatatcattcaaacatgaagaacttagtcatcctagagatacaaatcgcttcattttttgtctgtattatataaatactggattagacatgtactgttgttttttagtttcagacatatcaatttcttaaatagttttagtccgtccaatatgaaccaagatggctgttagcctgttacctatgcggcctctgtattgttgtgttgcttattttgatggtaaagctcaaaccttctaggattgt

SEQ ID NO: 53235 - DNA, 886 bp, Zea Mays
caatagccaaaatttggcttgacagaccatttagctagtcgtttagagatgctctaactgatcccaatattcctgaatatttaatttaggaaaaataaaataaaacaaccctccaatagatcctatttattgaccccatcttcccgcgtgcgaaaaaactatccttccgtgcgcaactttccgcacgcccttgttctcccaatcctatccgtcgtcgctgccgctcctcctatgcctcagctggtcccactcctcgtcgtcacgcgtcctctcccccgctgaccgaaggccccctgcccatcgctgcaaaaatggcttcgaccgccaccaaggacaatgtttacatcgacgaccactggcacgggttgcaggcgttcgatgacaccaagttgggggcgaaaagcctggtagactatggtttcgagtctgtcccgtccatcttccaccacgacatcatttctttgtcgcctctgttgtcctctctgcagcatgcccaaggagctcatgtgtcggcatgctctgcagggtgtgctatttcaacgagggcccatggaggcaaagcaggcgctctacaccaagaacctggctgatgtagtggtgtgggatctccgggcatggcagtggggtgaagcgcataagaacaaaatcgatccaaatctacaatcacgaatggaagctatgtcatgagtagttatctcgacaggaggttgtgtccatgattagtattattactagttagttgcacgtacgttgcaacgacacatagattatcatttgataaaatgttagtgcacaatatgcctagagcatacaggagaaatagaaacacgaagaaaaaattgcatgattatcaacaccaatcactttagattggggctattagaag

SEQ ID NO: 53236 - DNA, 857 bp, Zea Mays
acgcgcacgcgcccgcgcccgcggggcagatttgcgcagaggccctcagggtttcggctaattagaaaagacttctattactattttctgtgtcactgacggattacagaaacaccctcaagtttctaatccttcacagggaaaggtccccgacggcgtcgcgcggaggatgaactccggcgagcacgcagaccggccggaggaggccaagaccagcgctcaacttcggactaaaccaaatccgtgacctaaagagtatttcccctaacttaattgcactaatgaccaactaaggagctctggccacggtgatcgagagcatggcggctagatcgtcgtgttcccggcgattggtggtctcttagtttgaattgatggctcggcaagcatcacagagcaaccagagtgctcaaacaagggagagagagagatgaactaaccggattggggctgaccgcagtgaggttggtttcacagtgttcttgaactggattggggagaacgtgaaattggagcttggtggtgatcggctgggagtaatactaggtgtgggggtgcgcaatgatgttgcgaggctagtcacgggctcaatttataggcagcttcatcggtggcgctcaatttggtcgagcaacgcggcggccggagataagagagaaccgtggcgcagtgaattcgtggctaacgccgtggcaacttcaccggcgttgataagacagtggtagggagttacagtgacgcggtgtaaagatagagccacgcggcgcacggccgggaggcggcagtcaccggcgaagccatcggatttcaccgcggtgaacgcttgtacggtggccggaatattttatcagccggag

SEQ ID NO: 53237 - DNA, 354 bp, Zea Mays
atcatgcataaaacccctgtggggaaaaatcaatgatgaagcatatagcttagttgatattacctcgttaaaaactttggatgagaaaacctcaataaggcaaaactcatacaaagaaaagagtgtaatatgatggttcaaaacaggtcaaatatcatggagaattactccccctgatccttgcaagcacttaagtcttttcataccaatcacctcaacacatttctgaaaacattgagtatggtagagattttgtgaatagatcagcaagattatcacaagactttgtttgcaaggtggataattcaatttaggagcaatatgctgattaatgttgctcctgatataacctgt

SEQ ID NO: 53238 - DNA, 311 bp, Zea Mays
catttcatccagacttactcacatgaataaaggacgaaattcaccggctgctagaagctaagtttttagaccttgcagatacgcggagtgggtctccaatattgtgccggtggagaagaaagaatcaggtaagctcagagtatgcattgattttcgcaatttgaatagagcaactcctaaagatgaatatcccatgtcgatagccgacacgttgatcaataatgcgtcaggaaaaaaattatcagctttcttgatggtaatgccggatataatcagattttcatggccaaagaagatgtgtccaaaacggc

SEQ ID NO: 53239 - DNA, 302 bp, Zea Mays
caaacaccctataaatattccggtaggacttgtcggattatttcatctgaatttggtgccttttgcaagcctgaactgtgtatgtttgtagatgtcgtcttgatcgactgtgttttgttttcaacattccaagacgtgtgccgtgtccaatgaattactctcgcctctgcctgcctactcatcaaataaagaggaaccactggcaccacaagttataagcatctttccagtggcagtgggctgggcttctgaaggcatggaatgaggatttacgttggctataggttgcacagtgctcctac

SEQ ID NO: 53240 - DNA, 357 bp, Zea Mays
gactgatttgttacctgaggcagtctggacactgaacacgactgagtgcagggcgactgggttcactcccttccgccttctatacggatcggaggccatgaccccgcaagaaataaagcatgggtccccacgaacagttccgtcagccgtccccgacgtggacgagccaacttcaaaggacctcattgacggagaccgagtcttcgccctacaggccctaaacaaataccaagcccagaccaaagcatggcgcgaccacacagtcatcccgagggagttcagcaaaggggacctcgtactcgtccggacagctcggacggagtccaggggcaagctggagcccaagtgggagggccc

SEQ ID NO: 53241 - DNA, 679 bp, Zea Mays
gatgctatagaaagcacccgaaaaattagttaggtctgagaagacgactagaatgagcatgcatcgtgattgtcgcattataattgtctcttgtgcaccaacatgcttctctctcctttattccaataataagaacttgtgaataatgtgatgtgttgttatgttaggaactataagaaatgctttaccttgtgtcggattggtaagtcttgactaggtcgtgatatgtgtttctcttgccttgctttctagaaggtatgatagttgttcagtccattttgcttgttctgttcataaaaagacccccatccaaacaacccagtggttagcaagtgaaacccttaaaaaatcaaatcacatgctcgtgttggtattttctgacccttgagtgttttacccttgaagttacacctgcacaacttgtaaacccccataacttgaccgctatgccaacccaagtctccttgtgcacttgttgtgtcaaaaaaaatttggtgactagttgcgcaaaccatatgcagtccatgtttctttccataaatccttgcccctaaaacttcatagcattcctgttgatcatccagctgatcttgttgcctacctctcctttcacctggatccggtaatccttttcctggtgaatcatgctagctgtctcatccgaatctctggatccttt

SEQ ID NO: 53242 - DNA, 848 bp, Zea Mays
ggcggctcttgcagctgtcgggccggggaacaacatcggaggggctagtcatggtcttggctaggggatttctgatcgcctcctctcctctcctgccccgccgtgccgcaagccgcaatgcaactatgaaatctgagctcgccgcttccctccgccattcacgtcggtgacatttattcatttccttcattcaggtaacatcctcgacgccccaacatctatatgtttcgaaaatgcacactgccagtcagtctatagctgattgcgatatggatcatggatcgacagtccatgcccttcacacaatcaaaatcgaatcttggttgcacaactggaataacgcacatcgttttcccccctcaacataggatcgtctctgtctgaaagcacagcaagttggtatttggatcaggactcggtaacacgtgtgcctgtttttttcactttttttttttaatttttggtgtggagcataaagccgatgaccttacaggcactaacattgtaccctgcatctctcagtagggagcaaaaacggcagcgcattgccaggacagaggtcatcctgaagttctccttaagtcggacacttagaccaggctgacgatgtcagcttccgagttcagaattccataccagcaagtaaacggctcataagtttcgacaataatttttatgttctgtgctggagtttggctatcaatctgtatataccccaatgcactattcaagtgctttaataaaccagatattactgttctgagttggatagcaatcacaccgtatagtttacttcactcattctagttatgaatcattagttcataaaagagtaagctcctgtttag

SEQ ID NO: 53243 - DNA, 683 bp, Zea Mays
tgtaatccagttggtaacttgtcacgcaaaaattgaaggaaaacacctctgaagatgctctgtcagaacaactgaagaagaccctgatggtacagtcgcaaaaaagatcttctgattcagtgtatctcgccgccggtgaccttacgccgtgattgacgctggtcatcgcgattcgtgcgccctggttgcggataatggctggtggtgaaagatctcaacgcagggaaggattggagccttatcaccggactaatcactgtgccacttgtcacgcgattgattgaggtgtcctcgccggagttcgccgtctttcgtagccgcgccatgtacttagaagagctaccgcatcacagtagatagccgtaggtattctgtccatcacctgagacgttgccccggtgaacgccacggtagttcgcgccggtgactcacccctctcttcgaccgctgatctctccctttcaaaatttggaaccatcgcccttatacactataaattgatggtgctgctagctctgcaaggttgtcacaaagccagagcatccacccctgccctcgattagccaccatagtaggagaattttgttcttcccccaaatatgttgtccgtgccacggtgagacgtcgcgcggtggccagccgtctccaagtccaccctctctctccatggccatgttttagca

SEQ ID NO: 53244 - DNA, 438 bp, Zea Mays
gacgcggctgaccgaattgggggaaattggtgattctccggctagggtggctaatcgagggtgggagcgggtgctacggcttcgcaatttagagacgaaggacggagctcggttgatttgaacggagggggtggggacgcggtgaatttatagatgcaccaagccgctaccatggctatggtgataaccatcgccggtctttgctggcgatctacgacgggttcaagcgatatccattcatacgagcctgccacgtcctcgccgcgatagtaacgcggtcacatcggtgcggcgtggatgaacggaggggagcggtaccgatgaccggatatggctagaatgagagtggccgcgtggcagccggaattattgctctccaccgcggcgatcttacccagatcaaaaagatcttcgcgcggagatgctcgccgatcgacc

SEQ ID NO: 53245 - DNA, 503 bp, Zea Mays
gggctatgacaacttcggcaactttcttcatagggacatgaatcaaggcttttgtggtctccatgacagtgtctagcacgctggccattctccttctcttaggagttgtggcgggagcctttgtcaccttcggcaattctgcctctgccggtgggctcagaatttttggcatcatcactatttttccaattctggctctctggccgcatcatctttgactttggctggcccgactataggcaccttcggcactacaatagatccttcaacgctccgagcggcgacaatagcttgttttgcttcggcagtggaggaggtcccttcaccaaattcaggcactacggccgtttcaatatatcgaggccggtgggtcaaaacctttattttcttgcccttcagcacaacaatggtggccaaagtggcagttttcctcttttttccttgccttctcaaggggtagtagtaatcaggatatatgaagccaattgcatcaaaaaccctgt

SEQ ID NO: 53246 - DNA, 552 bp, Zea Mays
cactgcttcagcttatttcttagactcgattcagcgggggatagctgcctattttcttgtgctaaatcgagtctaagaattacttctagagccatatgccgatagagccttgcatctggaatgattttattattccactcacgtaacgcagctgctgtgttttgcaatttgtggtagagcctgtggaatggctcatgatgaaccgacggcgccatccatgctgcctggaccacttgcttgaaccccgacagcttggcccaaaagttctcaaaccggaaggaacgaggtcgtcttgggatggtttgatttgagaggaggagcggacagtgatctgatagtgaagaagacaaggcttgcaacccatgactgccaaagagatcctcccatttaccgttgcaaaatattctatccagcctgaccaatgttgggcgtcgcctttcattgctccaagtgaatttcctattctgtaagtgtaattctttaagttcacactcatctattgcctgtctaaattgattcatgagccgcaggttacgacagttgttatttttg

SEQ ID NO: 53247 - DNA, 628 bp, Zea Mays
gacggatagtagtcgcccaagccgaatgggtgagccacatctaatctctatcgtccgttcagatcaaacggcagaggcgtcttcttccctccccggcgcactacagggccgcgccagcacacccgaacgacggcgccctcgccggagagcgtgaatccggccctcacgaacgccataccccgattcactcggccctcgccggattgacgacttcccaaactcaatccccaaacaaatttcggccgacatcgagcacaggaaacggtccacggcgcacagatcacgacggcagtatatcagccacgcgacctgaaggaccacacgcttccactcaatacagccgctccccatcaaactggcgggactgcgcaacttgccggagcgagcaccatcattcttccgagcgcccattccccacagctactagcgcaacacgaagaagtgacgggaaaagaaattagtacgaggtgttccttaccgttggaattggggtgcagttctcagcccatggtgctacgcggtctcgcggtggaggaatatcccagcgttgaatccatgacggtgctgaaccggtggtccactccacgctctctaacgccggcacgatcctgcgcaccccagcttttcg

SEQ ID NO: 53248 - DNA, 775 bp, Zea Mays
aaagaaagggtgcaacttctgagaaggctgctgcttcagctgcttcaagcgagcccgcaccgaagaggaaaaagttgaaggtccttactcaccgaccgtgctacattgaaccggccatagtgcctgaatttggcggtgagacctctttagctattgaagccaaaggacctgctcttacgtagaggattgaagagccggctgcaatgccgaagactgacaaaattgaagaaccgagaatcaaagggacgaaaccattagaagttctaagcccttcagcaggagtggaggtgccgaagacacaaaaaggtctaacatcgacccccaagagaaaaaggatggctagtgtactagatgtgttggagacaataaaagcttcaagctctactccagggaaagttgccaaggcttcgaaagcgcagattgaaaccaagacaaagctgaccgaagccgaagctacaatgagccgggccgacgccgaagctgggccctcagagcccaccaaggagaaatcctcagaaattggagaaaaggcagcggaggaagaagctatagaacagattttgcctgaaaaagctgccgctcctactcccgaagcgccttccgaagtccttgattatattattcgacacgcttcggggaaaagattatctgaagaagaaaattttgaagctaaacactacacccgagaactgaagtacccaaaaggggccttagtgtttaatggcacagacaaagatgacttcttatattgcctccgagacaacaaagaattatc

SEQ ID NO: 53249 - DNA, 586 bp, Zea Mays
taatgtaatacagatttgtggcatgaacctctataaattctcatgtgtcggtatctaggaagtacctaggattaccatgcctctagcctgcacccctcactctatccttcaatcatccatcctctcaggtacctttggtaccctagtgtcattataggatgatatttggcataagtacaggtctgatttgttcgtgtgctttgctatgcagtgcaacaatggaatcactagcacactcgcacaatggattaatcacctctaacaccagctccaggaactccaatcatgagccacaacacaaatagtgtcgcaatcctatttagacttgtcctcaccgccttaggcaggaggacactacctagtacgtataacggtgttgttcccgttgaccccacttacgtacatgctccatcaaaagtaaatgacaccctagagacatcatagcacatgcctccctaggctctaagggatatgttgctgctaaatcctagctagattggtgcaataggagttggtcgatggtttagtattttatctagaagccaatcgacctatgagataaatagatctgagcatggaccaacaa

SEQ ID NO: 53250 - DNA, 320 bp, Zea Mays
gttgaatcgactaaggttgattctgtacttacacatgcatcatgctaagaattatactaataacattttccccttagaaagatgccgccacgcacaaggctaacggcacgtaagtcaacgggaccaattggagtaccccggcatcaactagcccctcgacacgaaagcagcagcagcggaagtaatgaccccataggagaccttgaagcccgagtaagtcgacttcaagcagagctgcaacacaggaccgatgcttgggtcgcagacggagatagaatcaatgaactaagaagggacatccgtcacctgcaggatcagct

SEQ ID NO: 53251 - DNA, 448 bp, Zea Mays
actcatcttcgaacttatatttgtagcgaagtctgattagcccaggttccgcgtccgaagcatgtttttagacatctcccatttagcccctagtggccatgttttaaatgctaaaaactcttgaacaagatcccttgtcataatgtgtgtacaaacaacattgaaagcaactatagcagcctgagctttgaagttgatataacatgttggtttttatacctgaagcatgtaagaataggagtctagatgattccctttatatcactccactcattcaaatcattcttaatgtaaaaccactctcttgcccactcattcggacacttgcttcggtattcaagagccagaaacattgcacctctttgataagcgaaattataataaccgaagttgtcgtggaggcccctatttgccttcgtctgaaagtgtaattcatggatttggctga

SEQ ID NO: 53252 - DNA, 288 bp, Zea Mays
gaggaggaagaagatgatcaggtactagctgccgaggacggtggctggctacagcgcggtgagggtgagcttcttgacgtggacgacagggccgaggagttcatcaacatgttctacgagcagctcagggcgcagaactttgccgcggttttccgttactccccatgattatatttatggtgtccgccgtgtgtagcgccgtatagagtgatcttgatcttgcgagacgacgatcgttgtgatgtggtttggaggagccttcgcttctcgaggatgcctttgtgtctg

SEQ ID NO: 53253 - DNA, 954 bp, Zea Mays
ttactactttggaagagacagaacagaatgagaagaaaaagagagaaggcaacacctaaattttggtggatattagataagaaattttatatccccaaattcgggttttacaaccatcacctcccataccttgtcgattacgtgcgaggcgtcgtcgcagcaatacatcaacatctctgtcatcgtcgtcatcctcctccataggagagaacactactgcaccagtagctggggctggagcttgtggtgggggacgagtctccagcacgtccatgtgtgtaacaatttcaataactcgtcgatcaagatgctcataggatgtcgccacagagtcctagtattttttgaaagcttcagtcatcacgcgcatcatctccttcaattccagctcagagacgcactcatcgttgttaagcttagggcccttctccttatctgtttggttctttggtcctgtcattgttagcacaaaatagagacaaaaaggcaacaaacaaacaaaaagtgttaccctacaactatctctgagggagggtgtggtggtcgaacacaaattatgaaagcgtcttttcccactcttacaaagttattaccagcactgtaggtggcaaatggtggccggtgtgactatccaaagagcgtgggtgtgattgcaaaggaggacatgttctgctcgagagaaatggtggagctttgggaaaactgactatatatatatggcacacaagtcaataacagatagcagtgctgagtaagtgttccaagtactcgttctagttactggcctagaaaatgtattagaatagtgagaccaatgcacaagaaggaggaacaagtatacaggtacaacaaagaaatgagttggaagcaaattaatcataaaggtgcacagaacaatggcgtttctccttatgtgctactctttttttctcttttcctatttctctctttttc

SEQ ID NO: 53254 - DNA, 785 bp, Zea Mays
caaatattgtgattatagaacccattgcaaaagtcataaaaatcaatacaaataactgcccatcttcttttcatgaattccaagttgaaaccatctggatctggagatttttccaaaagtacgttgatgatattaccaattttaggcttggagaatggtttagggttagagtgtcaaggtcttttacccttatcattagtcgatgtataaaataattgattctcaattcttctcccttaattattcttatatgggacaataacctttgaaacaagcaatgttttaagaagatacatgttacttcagataaagtatgattcttgtctaaataaataggcggggaaatgcatatatgaatgatgtgaggagtttcgacaatagaattataccttcgtaggttctgcgttaactcgaaatgatgccaattaccgattgcacgaatggtcgatccttttggtggtggtgctattcatctatttatatgggtcgagttcctatataaacatatatgcaattacatttttagctctctctctcttgcatagaaacacttatacatttaaggtgtacattttcgacttttcactatactgatatatcaagcatgtcttctcttgatcgaggtttctcccggacgctgttcttggacgaagatctccatatttgctacaagacatactttatatttatgttaagatatatattttatatatattaaaaatcagaccaacgacttgagacaggatgtcctttttctctctgcatgccttttgactatataccca

SEQ ID NO: 53255 - DNA, 922 bp, Zea Mays
atttggtgctcaatatataccccctaacttttggtggaggttgacaaactaaaagcacttgtactactagcacccttcaagaaacaatagatcttagaagtcattttgttcccaaagtaagaactcaacctgatgtaagtcaccagttttttcaatctaataggataatcatttaatagaattctaatgcataaaggtcgtttaggattgcatctttctcgggcatgactatttgatcaatgggtcaaaagacatagaattgtgatgccctcggcctgaataagcaaagggattatgcatataatatcggttcatcgccgtattattccatatttgaacagggcaatatatcagcgatgagtaggctagtggaaagtaccataaaaccaatgggaatagatggacatgcaaaacttattgtgttgccttttggaccgttttattcggacgtgttacttgtgcgggtgactagggttgctttgttgaccgaccgcgtggtacatccttgtcactaacatatttggagagtaattgatcaaaattagggttggctttaaccagtcgactagatgttttagatgtgttttgtttccacgtacctattcctggttgtcgaggcttgaaggtgcatggatgcagtggcctctggtcgctgtcgaattgtctagccaaatgagccaaactatccgtgtgggctccagaccatccgcacatgggtgtcggacggttcgtgatgcgtaggacatggagcattgatcggctggccgatcacgcttgccccccggcgcctccagactccggtcttattagtccttctcttgtcccgagcctcttgagtaaccactccttgcgatatatttgacatgtgaggactactaatggtaatgtcattgcctttgtatttatcgaccacatccggcca

SEQ ID NO: 53256 - DNA, 1302 bp, Zea Mays
aaaatccaggggctctttagcaaacttgcggcgctgaatgggtacgggcgcaagagatccattggatcatgatctaacggcaagagatagattataaagcggtacgcgatatcagccgtaggatccccgatcgatgatgaagattctaaacaaccaaagtctctctagatccgtccaatcccgcatcaagggcccagatgcacccggccgaatcgacacgcgatatctaatcctaaccctctatccatagatcaacggttccgattttaaacgctcggatctattgacatgcacccgatccagatcggacggtcccgagttaaagaagcgaaagggtatgtttgatctaatctcggccacacaacactagatctgcggcccccgaccctcctcctatctcgcgacggacgatgggcaatggagcgcccggcgcagtggtgacctctctggagtaccgcacgatggcaaccccagtgccccaaactgacgctaccaagtgaacaaaaatagcaggaatgatggcgatcctgatggagtctcacttatcgtgattcgcacaacgcggggtcctagcagcggcgctaggcggaaatcagattatggcgagcaatcgccggtcctaggtgcctccttctttgctatgttcattgcccgttggcttcaatggatgcctacgaacgcccctggcgcctttccacggccttgccgtagatgtgtgacgaattgaagggatggcgacgagcacatatcggcaccgcggacttccctcactatttaccaatggcgagtacagcgcaacacgtggtagggaagcatctaacacttctatggcttatcgggaattcaggatgcagactgcttatataccgcgccctaggcccgagaatctcgctcggaccgttgcagcagcagatacggtgatctcaacagccatggtcgtggccactttggaaggaggagagagagggaagatgtttgacatggtgaccccacctgtcattcacagaagcacacgtgggtcacaatactgaccagggggctcccaagtcagcgacgcacggcgtgaggctgacagcgaagccccaccagacgacgccagccctagtagatgggagagcaagctaagggaagctgtcgggtggggccccaacgtttgtggccgcgagtacgtggcgcgacaggatgccggttgggccgcacgggtgacgaagatgatggaccaggaggtggaatcggcccatgacgcaggtgagtgttcttttttatttttcttttcttttcttttcctattttctattttca

SEQ ID NO: 53257 - DNA, 570 bp, Zea Mays
gagcaatggtcagctaacgaccagctaacgtggccaccagtccggtggcgcatcagactggtctggtgccacctcgagaaggaagaatcgagtcaagatcttcgagtcaatgctactattagaggtccggtggtgcactagatcagttcgatgtgcccatggatagagacctgccagtttgttagcaacaactattttagtccttggcgctataaatagaccccattttgaccccaactacaacaccaaggtggcaatcaaatgtagaacaggtgcatactcatttccttccctatctattgtgtttctattgtggatcaagtgtttggtgtgcgtattatccgaaaagagaggtgtagtgctgctgcaagaaatatatagtgagcaagatcttgagcaaaggttttgtgttgagttcatctaccattgagatgccaagttgtgctagcctcggttctgttgtactgtaacctcatcaatattatggaagtctcggtttatcaccttgctgataaacttgagcaaacaaaggaaggagttgaaatagacttcaagctagattgggtacct

SEQ ID NO: 53258 - DNA, 484 bp, Zea Mays
gcagcttcttccgcgaccatattcaaaagcattgtatcaatactggaaaatgtgctctctagattcgtggcttcggccgtatcagcttcaacagttgcagctttggcgagggtagcttcggtagctggtgtttttgacgccgaggccggcggtggtgtttcttaaatggcttcaatcacagtaataatcatccgcctttttggcccagcagacttcttagctgccgaaggctcctccttcttctgtaaaagcttcatcagatctctggtcctgatctgctcggctaccaccctgaattctgacacagcttctcggcatggtgacctcggcatcatacggcacagcggcctggtcaacccgtagctcaaactcagcgggctcagcaccaatgtcttcaacttctccctcttcttctcatcggctttaacataaaaccactcatttttccaaccagttggctacttggtgtgatagctaatcaccg

SEQ ID NO: 53259 - DNA, 1335 bp, Zea Mays
tgcaaattaaaccttgagatttggacttatttgcaaaagtcccacttaaactctattgagttaagtctgaatttcagtgaattggcttaactttgaagccctatatcttccaaattatgaagattttgccctaggtaaacccatcaagtttgtaaagctatgtaaggagaacaactttgctataggaattaaaccatggtcacatgaaaaatttggagaaaaatgtgcccaaagtcaagctgtcagactgctttaagtctgaattcagactgacagtgagattaggcaatctttgagcttggatttgattgtgatttagtcattatttggctatgattgctatagcaagattgtagctggatcatcggacaacaactttgctactggcagatcaataagttgtcatgtaaaaacctaagatctaagccctgcaaagtggtctatcaggtgcactgaatagggactccatggtacagtaactgaacaagattccaagttcatcccccttcgccgccggtgaacgtcgcaccgtgattcacgcaagccgctgcgattcgtgcgctatgacatgcggataactgtgggcgagtaaagatcttggcgcctggatcgactcgggctcggtcacagctaagctcaccgtacccacttgctcgtcgaatcggtcagatagacctcaccgccgttggccgattaccgtcgtgcgccacgtgctaaagagcttgaccacgtcgcagtgaatcacatcgtgcatgcccggtgatcgcctgggagcttgccacggtgaaagccactaatcccgagcgccagtaactttcttcctctccggccgccagcacatcttcacgaaattggacgccaccactgtggaagcctataaattgctgaccccgcctgctccgctatgtaattgtgcaaccagagaagcaacccgtgcctcgaatcatccactagaactccctagtttgggatttcccccaaatcactcaagaacaccgagcggtgtgacctcgctgtggtcagctcatctcaggtccgctcatagcctcttccctctcgttttagtgttcttgtgtgccctgatgctcctcgaccaactcgattgagctaagctaccttagatcaccgggaacgcgttggtttggccgttgatcatacggtcaccatggacagagcaggttagagcgtcgttcgtgaaattagtagaggggaaatgattgttacgccttgaatttggtttcaactgaagtagagcacccgtcatcaagtaatccggccggtacaagctcaccatagctcggccctgcgctgttcgccgtcgtggacttcgggcgg

SEQ ID NO: 53260 - DNA, 363 bp, Zea Mays
ccatggttcaacggccgatttgagcaccttagcgtgcagatcttggcaaaacccccgtgtacggtctcttccctacaccaaatcctacctttttgatgtgagttccaaggggagatgtggtcggggtagggagatataggggtgagaagttgtctttgtcatagctgtccaaaccgagacaaaagctatgccaagtcatgtcaaacgacttagggtcgggttcaaacttttccagggtgttctataggtattttggcgccactttgtcaattgggtcaagtggttttgaagtttgaatgagggtgaacatgtttgatctttggaaaaggggtggttttggacttagaagaattctgatttttc

SEQ ID NO: 53261 - DNA, 419 bp, Zea Mays
tagatgatcttcaactttgatatagaaaatacagtctaaaaccacatagattaatcacaacagagctctaaactgagcactattcactaaaattcaggttttagttctgaacaaaaactcagtccaagtaacctgacagtccatatttaggcaaccttttctcctagttccaagtagctttaggggtatgatccttaaccaaacgtatacaccaacacatgatcgtccacctttgtatagctttcttagcctataactgcatgaatcagctgcaaatgggctccaaactcagcaactttcactgaaaccaaagtcactatctgtcagtccaactttgagcaagctttctctccaacttttgtgtaggatcaaaccaaagtaacttaaggagacttattcaccatcatatggtatttaat

SEQ ID NO: 53262 - DNA, 645 bp, Zea Mays
cagtcattacctctaagatttctgttacgccaatggaaaatgccgaaggagtctcgacaaagcgcttcagcagagcaggctcttcttcttcatcacggctcggttccacaattctgtgtctcttagatatcgaaggtttcagcaacatcttagaattttagttctttcagaaaccttgggcctttttttatagacttttctttttatccttttcgatagatcttattgcttgtcttttcaggatactcacaactcttttcttcttcactcccccggtctcttcgtcaagtctatcataatcaggatattcgaagccgagagcatccaccactcgatttaatctttgcttctctcgtgtgccgaacgcatcagtcatcaaccggtctttctttttcgtatagttcccaaggatttcattgcacattatttcaataacttccaaccattcgacacaagggccactgaaggctttttgaaatttaaagcggtatggcagtcttacaagttcatatttttccccttcattttcctctttggcattgcccacccacctgatgtgggaaagttttgttggccaagtattcttgcactaagtctcgagtactgatgtgctcggccacaactctgaattctactttagctaac

SEQ ID NO: 53263 - DNA, 404 bp, Zea Mays
gggagatacgtatcctatgggtcattgaaacgtggataaattccatgggtcgcctgataggcccccgataagtcgtgcaatagtctgtactatcggaccgtatccagacgaaacagaaactacagaagagatgacacaccaagtgggaagcggtcccgaagaatatggcccaagaatgctaccatgcacctttgtcgcagaaggagtgcgggactcagagacgcgttttacacgcgaccagacagtgaactacttggaggataactcggaggaaaagcaaccaaacatagaagagtaggcacgctcgtagtagaagatgatagactcaaacgatctataaaggatatatctctctagtcagctatataaggctacagaggtacccttaccaaaaactctctcgc

SEQ ID NO: 53264 - DNA, 512 bp, Zea Mays
aggctgtcataggtacgtcttcagtttgaatcttcaactgatgatagcctgatcttagatctattttcgagaataccttagctcctctcatctgatcaaacaaatcttcaatccaaggtaacaggtatttgttcttaattgttatttcgttcaaacttctataatcgacacacattcttctcgaactatctttcttgttcacaaataaaactggggctccccaaggagacgaacttgggcgaataaaacctttttctagtaattcttctattttttattcagttcaattaaatctttgacatccattatgtaagctccttttgaaatcagtgcagttccgggtaataattcaatagaaaactctatatcacgatcatgtggcatacctggtaaatcttccagaaatacgtgtgggtattcacacactattctgatgtgttccaaggatttctcctccaattgatttaccatagcttctgctagcatactaacattgacttcaattctttctc

SEQ ID NO: 53265 - DNA, 543 bp, Zea Mays
ggaaagtagaggcgatcatcactctggtgaaccatggcaagcaaagcaagggcaagatgaagaagaaactccatgccggaggatctgtggctccagcaccgcttgagatggaggtggcttaggccttgagtccactctactagcgtctttgggtttcatcatgtttaatcaaggtgttgcagtggtcttttttaaagtttctgattgtcggatgtgttctagtcgctccagtttggggcttagctgctgttggctgtatggtctacatttagtgtatggacttgggtttggcctgctttgtttggggcttgttcagctagcacgccgccctctcctcggattgttacctcatatttctccaaagttcttagcgatggctcttttatcaaatgtcagctttagactgtaatattctttgctggaacgttaggggtcttaatgcagcggcaaaacggtcaagtgtacgcaatctaattatttcctcaagagcctcgattgtttgcctccaggagaccaaaatctcagtctggaatgacatcctcc

SEQ ID NO: 53266 - DNA, 3980 bp, Zea Mays
acggtgttgtatagctatgttttaaattccttcatctatgatgattttattagactacgaaactatcaataaaaaacatgttatcttcaaaatttagacatctgaatttggattcaaatttacgatatccattttgcattagtattcgacaatatatgtatttctactcgaattcgagttaaagtatgataaatagtactatccaaaattgtatccagaagctcagagccattgccttgtactagccgtgtaggagtagcactatactatttttctctaaactacaagttacaggggaactggaacctgtactgcttctacacaagttgaaactcaactaaaactcaactaaagccattagaaagtcaaattcagaataggaaaaggtggagctacacctgtgtcaattcatcaaacgatctatgttatctgctagtgctgattctgttcagaatagcagcaaggtgaagatcagcagcaacatctgctcattcatcagttcatgctgcctacaagcctcagcaccaggcctctgtaatttactgccacaacacaagtaatagagtgaacatgtcaaacccagaccatataggcggatcatagacacacaagccttctgtgtgcataaaaatgaactcaggaacagacactgcgagcaagaagagtatgttccatcttccattcccataaccgcagcggccattcagttagagttaggacttctggacagaaaatatggaaccatcgttcaggggcaggagactaaaataggacccattctcatcgacacagcacgcctgccactttatctgataagagccttcagggaacgaggagacatccagcaggcatcctgagaacccctgcccactatctgttggttcaaagcatgcaaaggcagtcaccatctccatgacactatgggaattcttcttctcattcctagccttcctcagatcattctttatgtactgtagcagcttggagttcaattcgaccatttcagcggtcctgtgctgatcaaactgcttgcttcttgttcctgctgtatccaagcaggtctctaagcttgcggccaaaatgcagtacaatttcacgatgcgaatggtgcttctttctaacacacacttccacttcatgcagagggttagagacaatagaaaaccaggctctatagacattcctttttcattcaaatgatttgaatcaaatatgtaaagttcagcaccaaggcaaggcctgcatacatgccaaaaatgaaaacgtcatatcatgttgggaagctccatttgcccaaacattagcgtagtgtttggaacattattacatataaataggaaagataacaaagcatatcctgctgcaaaagtaacaatttaatactaataacactaacttttctttttgtccctaaacagtacttagttacttacatatgctaatacaaaaaatgtcatttgctatataattcatccagcatagtgaaacaacatactcactttactctgaaaaagtacttgggaaccacaaaaggcaattccaaatacttctgcaagatgctggacaacacttgcaatcctccttgcaaagcagataaacaatcctctccattttgtattttttcagcttcagcactatcacatacaccaagcaaagatgccacagcaaaatgacaaagagaatacaaatccttctccagattacatgaaccactgatccatgtgctggactgtaagctgtcaagttcgtcaaaagaagtggacataaactgtcgcagctgggaaacaacctgccagtcagacccatctactcttccatacaaatcttgtaggattgaagcatgggaaaacctctttggaagcttgcagtactctacgtagttacatgcctttgagaaataaacagaatatgcagtacaaaatgccaaaagtgagcacatgaaagcaagcctggctatactacttgagccatgtcgctccaggtccatatgggatgcagcaagaaggtcataactttttgccaagtcacttaatcttagagagcaatgatccaaagcaagcacttggtctttgacaaactctccagacaaagataaatggtctcctcttgcttcataggaagagtgtgcattaaggatatcaagaacttttgttaggacctcaagaaatgatgacctaaggctgatgaaccacctctggaatacgaagtcatgatctgaagaggcactggatgcaagagcattatttgctaataatgttctgccacaaatatcagatatctttgcttggaaaccatgtaactctgatgatctactgagggtgctatcagcatctgtttcattacagtaaagatcctcacttaaatcaccctccatttttagctcaccaactaactttatagttgctgaggaaaaaaacaatagcttcatctcaatttcgccagcagaaaaaagtagcaacgatttgagccaaaaactgaaagagcctgcttcaaaagcatctgccagttttctgaagacaaaagaagctgtgaaccaaagacctttacaacaacagtacatagaagacctataagcttcccagtatttctgcttctttataagcattttggtcattcgaagtgcacataattcctgagttatccaaacagaaggagtgaatagtgtattatgatgctcttttgaatcaccagattcttgattaccacgattgattttacaagtattccgggtaacacaagcacacattatcaaatggaaggattcatatgtgctccagtgctgaggggcatcctgacgcacatacttgattagacccttgatgctatcatgaagattgtatctagcaccagatgtttcacatagcacctcatgacaagcatttgcaaatttgagcatgcaacaaattagatcatgcattatggactttctattcttgcaatcaattttgagaaaatccagttttccattgccaataagtgttccaatgcaggaagctttgatgcatgtagctaacagttgaacattgtcatctgaagtactcaattctttaagggcaacacttgtctggaatggttcaacagatgtaacagaaacttcagagtaatcacttccattaattagaaacagttcttttacaaggcttttcagtatatgaagagttacagcagcagcagaagggtagcatgaaacaagctttagcataagtctgaaaggagttttgtatgccttatccactgcagatgatatgcagatatctctgctagcaacttcattggccagggatataatatgattcacaatcattgcaatgatcttacacagaggtccgttcatactattatcttcagttaatggtacattgttcgttattccttgccactcagcatgtgcaaatgacgaacccttgagaactgatatgttatctgacccaacttccttgagaatacaaaagatttccacaagaatttccagagcggtaccttgcacctccaaacaagaagaatctaaagaactttcagcagctagaagtagcttagataactcagaaccattggcacgatgattacttgacgttttactgcataacatctgaaaatgtacttttacaatgagataagagaaaatggtatataaatcaagcgcagaggcaagtagtcatcaccttctgcagaatccttaacacatcgctcttacagtcaagtggaaaatcctcatcatcaattaatggaaacaatctgccaaaaacattcctaataactggaaaatggcagatatttctccgaaacataaaacacatgcattttaacgccacagacttcatagaagaggaattatgatccataaacagtaacaataaatccacctgcaatagaaagttgataaaagaagtaaaattagttcaaaaccaatcaacagttgagaatagtcatatttgtggattgttgctagccccgagggtctcttatccagagaatcagat

SEQ ID NO: 53267 - DNA, 326 bp, Zea Mays
agcctctaactcaaaaccgagtgcgttcaccttaatccctatctcaaaaccctaagctcccattaacaaaaatgtgctaaaccaacccctctaccacatatctgaagatggcattgggattcggaccctagacacgacaaaatcgaagatttgcctcgggctcgggctgagagacagacccgacttgagagctccatatctttggaactagtaggccaaatcctatgacccccacacaagatcggaagcttatagagaggagaagaggttttgtgcattgaccaaggcaagagcaggctcggatgagtgacaacacgcgccagaac

SEQ ID NO: 53268 - DNA, 424 bp, Zea Mays
ttcacagccggagctagaatcaaccacgtgataaatgcgtgggagagggaacaaatctttcgggcacgccttattcaggccggtgtaatcgaaacacattctccatttcctgcttttctttcggaccaacacagggttggccagccactcagggtggttaatttctcagatgaaagcgacagcgaggagcttgccgatctcttccccgacggccctacgtttttcctcgtcaaattggcgcagccgctgcttcaccgacttagatttgggattgactcgtaaagagtgctcgacgacctccctcgggatgcccttcatatcagagcttccaagcaaaaatgtcttttttgcgtgcaggaagtcgacgagcgcgctttcctatttcgatgagaggttggatccaatgcgcactgcccatctattg

SEQ ID NO: 53269 - DNA, 885 bp, Zea Mays
agcctaataataccttgcacttggatggcgcccaaggtttcggaaactccaaggcttaaagactatatagcaccatagaagaatgctttgcaactgtatttagaagagaaaacaccatttccttcaggccggcaagagagctgatcctcatcttcagaaagagacacctcttcgaaagatcccaaatttaaacatactgcattaagaagaccgtccctgcagcattgcattaagaagaaacttttcgtgtgcaggctgagaaacaccccaaaggccggctgtcctagacatgccactgagcatcttggacacatgcctgcagccattgcatctcgctgaaagcgactcaggtggttacacatataactcagtaacacaacctatgagggatgtcttttaacccaggcctgtttagcagacccattccagtgaccatcttattgttcacacacacgtcttggcacacaagaaaccaaatcatgggcaaaatctgataaatagcatccgagtagccaattatcagtccaaatgagtgttctagccattgccaacctgagtaacaactgagatagcgaagattgctcagacttgaggttgtattgcaattgccagaggaattttgtagcgaaagccagctcgattgcaaagcccagtccattacttgtagattgtgaatgccaatactaccaaggtgcaatggtcaaataactttcttccaagccactagacaacatccctcattgatggcaattagcaaatatgttgggattgcctataaaacaaaatagaccatagtatcccttcctgccaaattcatgggacttgccttccaaccagtaagtcgatcagcaatttttacaatctatgaaagcaaatcactcctat

SEQ ID NO: 53270 - DNA, 370 bp, Zea Mays
cattaaccttcggtgttatgctttagctaagtagagcatagaacatgtgatagtttattgttgcttgatgtctgaattggatccaattaagctagaggaacgtgaatgttgtatttagtgctatatcaacatctacggttagcttatgagtgttgtaatgtgcctcgctcttaagtgttaattctttacattgtaacattatttattcttgtgctagttcttcttatgttcatacaagcgcaatatgcatttcatttaggtacgttaattgatcgtgtaatgcaaaggataaggaccgagttgaccccaaggtgatgcaaaatggtggtctactccacaagacgatgtcggcaagtggaccaacatgaaa

SEQ ID NO: 53271 - DNA, 399 bp, Zea Mays
aaaatggtcgtcgtatgatacgtgcgtgcgtgcatgaagatggacagagcgcgcagcaagccactgccagtcagatgagcatgcagcgagagagcgtatgcgtgcaggcttgcttgcttttgcgtggaggaacgaacaagatatttggcaatgggcaatggcgacggggacggcgacgcatgcatggtcgacgacgtacgagtacgaccggaggagccggggaggaggactgcgtcgtggtcacatcggtcggtcgctcgactggctgctcacggccatggcgtcgtcgtccttcctgctctcccgtcatgtttacatctaggcgtagctcttgtcttcttgccaaccagacgttcttcaggccaggactcccaagtgcgcgggccccacacagcccct

SEQ ID NO: 53272 - DNA, 623 bp, Zea Mays
ctaatttcactaatggcgctctaatacgctgtgtccacggtgacaacgggcaccacgaacaaccaagcgcgttcccggcgatctaagggatcctagctcaattgagttggtcggggagtatcaggggcacactagaacgctaaaacgggagagcaaaggatatgagcggacctgagacgcgttggccatggctaggtcaaaccgagcggtgttcttgagtgatttagggaaaataagaaattggagctctctggtgaataattggaggcacgacttggtggcttggtgcgtgattaccctacggacccgacggtgcgctcaatttatagagtctgtgagtggtggccggtgaattagacgaagacgcgcggcggtcgaagaaacaggaagttactagcgcgcgtgattggtgtcctattaccgtggcaagctccccggtgatgaacggacggctaatgcgagtcacggcgatgcggtggatgtgccaaggcacgtggagcaaggccatgaagcggctgtctctggcgaactcatccgaatccaccgtggctggctcgggtacggtggtcggagtaatctagtggccggagcatatccacgatgtgatatttactgacccccgg

SEQ ID NO: 53273 - DNA, 317 bp, Zea Mays
gaattgaaagcccattcaaaagtctgaactgtttcatctcccaacaacacaaatccaaacactgtacactgcagatggctgttagctccaataaacatgcctagtggtttatcatatatattcgtcttgtgtgttatatcaaatgtcacagcatcaccataatctgcatattccccctgcatacttacgtgtgacaaaaaaatactcactattttcccatcattgtctagctaaaaatcacaaaaaaattgtggattctgtttcttgcaatccgtaaagaaagacaaaagtttggctacatcatttgcgtagttttc

SEQ ID NO: 53274 - DNA, 721 bp, Zea Mays
ccgtgtgttgctgaggcatttgatgatatagtataatagttatacaacgcccgagggtctagtagcaagccagtttgatagaccatctccataaaaataaatttaaaattaaaatagacccccaaaaaaataaaattaaagtggacatgattaactcacataccagatattaaattgtagatattgcactttatcttaggtaaaaggtcgagaaaagtatgagttaaaaagagacatgttcttttttttagctcgctcggtcgcttttcctcctttacctagtgagatggtactatccaagaacgttgtattgcgtgtggtttcgtatcatattaggcttaggtgtttctcacggccctatctagaaggtatcaacctatttattagccaagatgtaggggagaaaatagatcaccttactcactttgcatgtgacgcacaatagacgatgcacgaaactcgtactttaaaggagtagagatatagacaaagttagaaaggtgggcttttagtcagtcgtggtatccgatactgccggacatgacataagaggataataagaaggctaattgcccacaagggagtcttccggctgagataccacttcatccgagattgcttggcagaagggagcatcaaggcgcgctatatcagcaccaaggatcagcttgcagacctgctcactaagccccttgggaagatcaagtttcttgagctttgc

SEQ ID NO: 53275 - DNA, 929 bp, Zea Mays
tgttgatgctagatgatttatagaaaaaaataaaatatacatttttatgattgaattaagtcattttattatagttacagtctaaaataataaaaccgttttgtgggagaaatatgggaaacgcgtttcttggttacctctgtttttttatttaatatcgataatgtaaaccctggttcgaggtcgcttggattactgctgggactgggagagggtgaagccggaggaggaggatcgaggacggccgctgaggctgtggcatctggcctagtagccgcctggcctggggccttgctgcccatgaaagtatccgtagcgagacctaggctgtctgagcctagcgcgcagtaggtgtcgcagatcggtctgctatactactggtggtggcctggtacttatatgggctctgccgttggagatgatgggcaaggccttccgaggagccgagatgaggatttaggccttccattgagttgcgctcgggccgtcctcggtggcacgaaccagtgggccaacggggccaacgggcctaactaatcgtgtctgatggatggtcctccgttccagagaaatcagacctgctggctgtgggcctgtggctgaggagccggcagtgatccatcgagtgctactgttttcttttttcagaacagcgtgcagcaaaggctcactgtgcagtttaaacacctaaaagacccgacaagtcggtgttggtactgaggacgaacccagaccgaatgattgcctcgccctcaccacctatttcttcccatctgaggtctgcactctcaccggtagtacagcacaaacaacacactcccaaagtagacaagttgtgttcaaaccgcggatcagaaacaaataaagcgaccccgcatgcacgtcaggtaccaacccaaatcgggaccctccccccggctccggccggt

SEQ ID NO: 53276 - DNA, 452 bp, Zea Mays
gatatagatagctctcactgtgtaaagtaagatgatgatgtatcaactaaactatattaatgaaactaaacagctggagttatggtttgatgtatggcggtacaataatgccaccccatgcgttgttgaaactgaaacgacaccaccttgatggtcgtggctacgtaagtgcctgatcagtggtatcttgtacatgtaatgctaccatgcacaatcatcgtcgtacgtacgtgcatactatttatacagaaccctctaattttgaaagatcagcagtctctgtcgctcgctaagtccacctagctatggactgtatgtactacatggaagtgggactcgagagtagtagaatgcaagacacagggaaattaggtcaaacacatgcgcttaacccactagctagctatagcctatagggccatctatcgactagccaaggtcaccactcacca

SEQ ID NO: 53277 - DNA, 630 bp, Zea Mays
cccacctccccccagggtagatgattggtccgacgccgaggatctatccctagcaagccttgatgatcttctcaaggagtttggggacaccttagagaaggaattcggtagtacctcggggaacgatcccatgtagctccacctgtagtagtcttgtgcttgtattgtgctggtgtaatgaataaaataacttggttgaaaataatttgcatatgcatgttagtgactctcttccctggcagatggcttcggataaaaccacgcctaccgcctccgggattggagcagggtttcccctgagaggtgaaggggaagccgttagagaggaaagtgaaacccacctccccgcacccccaccactaccattagacctagcccaagttctagccaatcaaacccgactcatcgaggtcctcactcgaaatctggagaatcaacggccaaacggcggaagaccgcaagacagagtgggggatttcctgagactcaagcctcccacgttcgccggatcgagcaatcccctcgatgctgacgattggatgtgcacgatcaaaagaaagttggaagccatcggttgcccagaaaatcagcgtgttcagctggctgcccatcagctttccgggatggcct

SEQ ID NO: 53278 - DNA, 685 bp, Zea Mays
tttttatctcaaaaaaaaaacaaatcagatcaaatttacgggtataaccaagcaatgtcatatggataaattgcactgaacagtgatgaaggtgcttgcttaaactaaataacagtagtctactatttatgtttaccgagacaatgctagctatgaaaatagatgagtcaaatatgcatagaattcggaataaacaaagccgcaatagttgctaaagttgtcacagttatacctactttcaacgtaaactgagtaaatagatgttaaagttacaggcactgctcatctggatgacatagatgatagatcgcatcatcgcaatgtgaccaaatcccaagccaattgtctatgtcaactcctgatcacctcaatcaaataggcaatctcacagaagctcaccaatcccaagcttcgcagacaaaaaacaaaaacaaaaacaaaaacggaatcccttaagcaaatgaccgcaagcacagaccgctcaaagcacctgcgtcaaaattttacccaaattcggctactccgtttcaatgaacttcaaaagtatcgcgataccatacaaacgggcatggattcctcatccaaaaccatggccaaacaaatcatgaccagatacaaagtcctaaatagcaatggcagaacaaaaacaatgtgatagggacgaggctgaccctccgcggccttc

SEQ ID NO: 53279 - DNA, 277 bp, Zea Mays
gttacctgatagtctatcggatgtgcataatgtgttccacgtatctcaactgaagaagtgtctccgtgtccctgaggaacagttacccatggaagagcttagtgttcaaggtgatttgtcttacacggagtacccgatcaagattttggatactttgactcgagttacgagaaataaggtgataaagatgtgcaaagtgcaatggagtcaccacggtgaagatgaagcgacctgggaaagagaagaagaacttcgtatagattttccccaccttttc

SEQ ID NO: 53280 - DNA, 989 bp, Zea Mays
accaccgacaacacgcgcttcctgcgcgtaatggcaggaaaccaatttcaacaacacagagtaagaggtcaaccacaaggaccatgtgacaccacctatctagtgttgtctgagacccgtccatcgctctttgtcaaggcggaggaacccctacaagttgatgaatgggtgcgggtgatggaacaaaaattcgggctaatccgatgctccgagatacagaagcccctatttgttgctcagtagttaagaggccccgctagcacctggtgggcaaacttttccgccatccagcgtgcgggacatcaagtcacttcggaagagttcaaactggcatttagggaacattatgttctggaaggagtgctacaaatgaaactggaagagttcatccgactgaagcaagggggagattctgtgatgcagtatctcaataaattcaatcacctctcccaatacgccattgatcaggtggacacatacttgaaaaaagaattgcttcatgaggggactaaatgaaagactccagcgcaagatggcaacgtgtctggacctcacatatagcagggctgttagtacagcactatcagttgaagccaaaaatgcgggacaagaaaagtaaaagggatatgcgggtgaaatatcaactcagggacctgaaaagaggacgaggttggtaatccgaactttcaattcaaatcgttcttctcctcgcccacccacatatcccttcagacaactcgtgttcattcgtctcactcctgcccccgccgcggccaatcagccgagtgcccctggtgctcgtttccctgcccttcccagttcctctagtggttgcttcaattgtggaaagttcgaacatttcatcaaggactggctatattcgaagcaaaacaaatccaactttcagcagacttctgggaactcaaatcaaggaaaggggaacacgaccaactcttcaacgggcaaaaatttgaagaaaactggacgag

SEQ ID NO: 53281 - DNA, 394 bp, Zea Mays
cgaatttcgatccttttcagtgggagatctcgtcctccgccgaattctaacgggggagggacaacacaagttgtcaccctcatgggaaggaccattcatagtagcagaagtcactcggccgggatcatatcgtctcactcaaatggacggcatagaaattaggaactcctggaatatagaacacctcaggaagttttacccctagctgtatttcaaaagctatcgggacgataatgtactctgtaaaatgggaaatatgtcatcaataaaaaagggcttcaagaatactcagtttgttcatgattgaccggcattcttatttaactcggggtgaccactatgccctgctaacgaagcaatcagcttaagtcggcaacgacttaagacagtgcaa

SEQ ID NO: 53282 - DNA, 877 bp, Zea Mays
ccaatgtcaatctatgaccaaccaaattcataggtctcccccccacatcgctttgccttctcgaggcacccataaccgacaacaacatggaagagggcatatggactatgaggacaacgtgatagccgctagaatagtgttagatcatggtggtagatccaccattgtgccactaacacgtggcgatgaggaactgctagaacttgatgaggaaaaggcggcatcacgtattgacaattaggtcgaagagtctgcttcacacgcgcaagtgtaggcaaagcttgatgatgctctcgggcataaaaacatcggcgagctcaagcagcaaggaagaaggagtaaacaaatggcacatccctaaatagacaacaccttatatagaatccaaaatcaatcaacaatctgaaaaatgtcaccctccaaaactgctcaatcgatgatcaaggacaatgtttgaaccatactttagtcttggggttagctcatttggttgaacctcgccctcaggggctattgtaggggagaaggctgaacatgaccttgatcatcagctaggttgagtctaaccaaacatcagactttgctgtcacctttaaggatgtaagggccatcaaaggcctcaaaggctatatggagtcttcacttcgagaatacatgttgatggtaatgggacaccaaccatcgagcttaatcaaaggactcgaaggctacgacaaggcctttgctattctgaaagaaggacaatggagacctcgtcgacatatatgctacgctgatcggacaacgaagcccaaccgaaggctacatgcatactagctaccaaggacttcgcttgttcaagaataatctagatgtacacgagctggagacttcaggc

SEQ ID NO: 53283 - DNA, 680 bp, Zea Mays
aaaaaatatttaaataattatagagtaggttataaatacaggaccctatatgctagagcaaaatcttcgttctgtatactatttctaacctttcgttttctaaatagtacagtggtctatttcctaatagtatgatataggacttaactgttgcacttgtaaatgttttttttgtgtggccttgagcacttcaaattagattctattttaacttttaggactcgagtttccaacgagaaacgagagtgcccactagtgacccgggcccaccacccattttctttggcgatcgaggaggcaagctaaaaaaagaactcaggccatatcgatctgatgctgggcccttggctgatcgagacgatttgatctgtgcatctccatccgcatccgctcggcaggtcgcgcatgcagctagcgggctggctattagctaatccaccctgcgcacgctgcacagtcgttgcacacagacacagtgcactgcactgcgcacggcggctgcgctagctcccaagtttcgcgcgtatatgcatccgccgctagagtaggcagtcggatgacctgcatgcattttattaattaatggcagagaaagattacccgcatcatctttattatttcctcacacactgtgggatcatcacgcatgcatcggtccaaaggcgcgcatgcacagtctt

SEQ ID NO: 53284 - DNA, 1305 bp, Zea Mays
gtcttgactcgtttctaggcgtcttccaacagcaaccgtggatctagagagataaaccgcgcggaaaaagggattagttgtgcctaattcgatctattcgcgaaccatccgcgactatggacagaccgtcgggtcgtgtctagtgccacaataatgctcaacggttttgtgttggggaggaggataaaataaaaacaatccgagcgatctcggttgcaattccgttaatacgctcatccattaccatcgtaattataccccaatggggtgaatagcctatccaaacatagcctccggggatgttgctagttgctactacccgctatggcctacgctacgctgccattcccaatgtctcaggctcagcctcacgcagtcacgctcaccactgcgtcgacccaggttcccactgagcaatgggtccatgtcgcgacgccgtgcgtttcgtgcccacgtgaactgcctgctataccgctgctgatctagctccgcatgcgctggctgaggagcgggccaaaaagcgtcagaggggggattgcgagtcaagtggtgcctgggccccgattgccattggctcgttcctcgagccgcgcggctgcgggcaccaccgcccatttctctggcgtatctggcttgcaggacaggagacgcaaacgcaacgcaacgcaaacgcaagcaaccaaccacgcttaaacaatcgttaacattaacgttatacagtctccgtggggacagcgtgtcatcgtcgcggaatctaaacctgctccctgcgtcgtattatagaacggaaaagaaatggtgctcctgcgggcaaacggtcgtccgtctactttttacctcttgcatgcattcgatgaagtggacgcgggtacggtcttctgaatttatgtatctgtgcagttatgtcactgtacatgggatctaatcatatttagttctgcgtgtcagtgacccatccacaaattcagaggatcccaatacgatggaagtgcagtgatgtttgctcttcctgattagcttttcagaaaactgacagcgcacgaacggcaaaggcacgcacacgaaaggttctgtatcgagcttggaacggaagcgatcagcgcattaggctcggacgtaatgatgcccacgaacaagagcgccacaatgataggtcccgtacgtcgcgaaagccgtagtagttatcagaaacgggtcataaagcgtcaggtcttcgtgttgccgtcgctcttaagtttcatgcatgctacacccccagtagatcgttttttttttgagtttttactattccaccgtgttccttct

SEQ ID NO: 53285 - DNA, 615 bp, Zea Mays
cggagatgaagaggcgcgccaccacgggtcaacagtacgctccttgcgcgacggttcgccttcttcgcactcggagatcagcgcgccagctatatgacttggggccgggcccccgtgtcataggaagggtactccagtgtgcctcgggggagacttcccgtgacgttttggggcacgagcgggggagtctgcctttaaaaaggggttcatccctcgagtagcagccatgccttgcttctctcccactcgctgtgccctttcgcctccgagttctctgcgcccctttgccttcaaggtctctgctttgcattgccgtagtttgccatggccttgtaagctcatcccgagcgtgcccagactgagtgggtgctcgacatggtgtgccgcctgcttggatgggatgcgtcggcgtttggcagaaggatttgcgccggcgccatcctcctcagcgaacttgccaccggagagttcgtgctctttgtcttcaatctccccagcgggttggtgctgccaatcttgcctttcttctactggaggtgcacggcctcgtgggggcgacactcttccaccgatgcttggcttcaaggatgttcatcagccttacggtggtggaga

SEQ ID NO: 53286 - DNA, 730 bp, Zea Mays
ttcagctctgcgtactaaactaattgcagcactacatgatagtacagttggagggcactctggaattcaagcaacatatgagagggtaaagaaggtgttctggtggaagggtttaaagaatgatgtgacacagtatgtgcagcaatgtggagtctgccaaaaggctaaggctgagagggtgcacccagcagggctgctgcagcctttaccagtttcacaaggtatttgggaagaggttactatggatttcatagaagggttaccaaagtctgaagggtttgataccattttggtagtggtggatagattctcgaaatacaatcattttcttcctctaaagcacccctttactgctaaaggcgttgcccaagtatttcttgagaatgtggtgaagttgcatggggtcccaaggtctatagtgtctgacagagacaaggttttcaccagtgcttttggaaaaatctattccaacttatgggagtgaagttgttgatgtacactacatatcaccctcaaactgatggtcagagtgagcgtgtgaatcagtgtttggaaatgtatctcaggtgtgctgtgcatgaccaacctaacaagtggaagagctagctcactttagctaagtactggtataatactacctaccattcggtgctggagtgtacacccttcaaggtgttgtatgggtatgaagcaccattgcttgttacaccaaaactgttgggaattgaag

SEQ ID NO: 53287 - DNA, 936 bp, Zea Mays
ttaatttagaaaggtgtgttatcaaacatatgtgccgaattgtgatgtagtagtgattgcgtaagttgaaccgaagtgtcccaagtacatgtcgtgatatggttgtattgagataataaattataagtgttgcgtgatatgagactcgatcgatgtagttaatattgaattggcctgtagagaggtggtgacatgccgaagtagtcatcgcttcctctacggttaagtcggagtcatgcgtgatgatgttatttatggggtgaatgcgtattgaaatattttatgttgtgccatatgattaggaagatgaaggatagatatgttgtttcggaaatgttagccaatagattcgaacaagcgtgatagaggttgagtcacttatgttataaaattgatgctcgacatgttaggtctcctaaaatgtggtgttttaggtgacttgtgtgttatccattttaagttgagaaatgtttaagagaagctaattaatttgctcccacccatgttttgagtcgcaatgtctaaaatggattgaatgaacttgagatgtattacaatagctgtgtgtcgtgttggtcatccaaaaatggcgaaaggtggtgtgcgatggtaattgggaaatagtcacgtcattagccaactcatgtcaggtaggagttgattgttttaagtgattgttatatatgttgtgtcacgaattgtgataataatatgcaagccgacgtgtaagatgtgtagcggcctagattgttactctggctagccgacttgttagatggctttggttaagtttgtagtcgcgatgaattgcttgttgtggtctaaatgtgtatggttatggttgcgaatgaaaagtagtagtgctcaggtgatgtctaaattaaaatgcaaactattggtgaaaagcgcttcgatattgattgttatagataatgc

SEQ ID NO: 53288 - DNA, 432 bp, Zea Mays
aaggaaaagaattgtcagcattctgaatagacaagccatccggtcagttaaggaggaccagaaggcattgaaaaagcagaaaactctatcggagtcgaaggaatcgactcccaagaaatggaaactcgtcaagatatcttctgaggaaacgaaggtacaagatgtgtcgaagcagattatgagcccttctttgtcttctgttgctgagggtttcagaaattttgaaggcaatgactgaacctttcccatttgcactgctaagtcctctgaggctggatctgactagcctcttgcagtcaaaggaaatcacttcggtcgctgagggaaaaaacagggggcaaaagaagcggtgtatgatgaatataatggaagctattgagcagaccctgcccctagcttcgacgtacaaagctactatacccgtcgatgctg

SEQ ID NO: 53289 - DNA, 760 bp, Zea Mays
gaagttattaagaaaggttacaaatcagttactctattctatagcaagcaccattgtccagtactctatacacagatcacagatcacagatcagttactctattctacagcaagcaccattgtccagtactctatacacaaatcacagatcacagattactctattcagttaaacaaattactctatacacagatcacatatcatagattactctattcagttaaacaagttattaagaaaggttacaaatcagttaaacaaattattgagcaccggttccaaagctgttactactacacaaatcagttactctattcagttaaactcaagctgtcaagcaccattgtccactcatgcataaatcaggtaaacaagttactactacacagatcacagcatattagattacctctacgccagacacgaagaactcgccgccattagtagtagatccggagcaccggttccaaaaggacgggttcctcacggatcaatacaactcacggggaagacttgcacagaaaaaaggatgaagggaataagcagatcaggtcacaggaacgacatccacaataaggtagaggtttccattgaacaccagatgtccagatcaggtcactaacctatgtgccggacgcagagctgaggccgccgttagcggtagtcggtagatccggtccggagccccggttccgtcgccgactcaaagtggagatcgagccgacacgcactggttcctcacggttaccgaagacgagc

SEQ ID NO: 53290 - DNA, 332 bp, Zea Mays
tctctctctctctctctcttggaagaataccttgcattagtaatatgctcaaacagcgcttatgcctcaaagaaatcaaactaaacggtctccgattcacttggagcaatgaacagaacaacctaactctgactagaatcgacagacttgtatgcacccctggatgggagggagctcatctttccagcctccttcctccatccgtcgccatccctcatgtcagatttaatatatagcaacaaatgcgcttcttgcatgaagaggcgaagaacacaatttagcttcatgtaggagttccttttgccgagtacctaggaccctcggcaaagaag

SEQ ID NO: 53291 - DNA, 589 bp, Zea Mays
cttgaagtagggctgtcagtcgaggggatgatctgaacctggactgactgtggcattagtctgactttggagccaaattaaggatgatctagtgaggttaatcccaagattcatgttacatagttgaagatgttatgcaggagaacaactttgctacagtcgagttggtatgctactgcatgaaaataggagtaaaaggaccccaaagttgctttgtcaggtgccgtgaattgagtatggcattatacagtgattgaacaagatcataggttcactacacctcaccgccgatgatcttgcaccgtgattcgtgcttcggttgagatatgtgcacacgcaggcgagtgtggataaccatcaggggtaaaaagatcgtcgagggggtgaacttgggcctatgcggtcgtacccacttgcacggcgacatggctgaacgaccaccactgtggtggttgtcatctcccgtggttgtgtcacgcaatgaccgattcgccacgatgttgggggtcatggcgggtagatagttactgctcaaggtcattgtttcaccatatgccacgacgggcaggcctcggtagtaatatctcgc

SEQ ID NO: 53292 - DNA, 468 bp, Zea Mays
gaacttgtacgactcccctaccactttaaattccaaaagagttttggcaagccgtgcgtcgagtggttggaattgatggagaaaatgtgcaatgaaatccttgaaaattatacaaagaaggaagatcaactaatgacaaccgccttcggcacacgggagaagcggagactaaatcgggtgacggatgccctaggcttcgagtatcctgattatgaaaggcttgatgactaagccgggggattgaagagaaaaatggttgtaagtgtgttaacaaggcaagcacggaggtcggttgaagcagaaaagaagaagaagttaacaaagaagccgaagctggcatcaaagccttcagcaccaaagaaaagaaaggttacaagttctgagcgcagagatgaagagggaccttcttcgccgaaacatttagagaagaccccttcggcaacttccgttggggtaacagaaatttta

SEQ ID NO: 53293 - DNA, 456 bp, Zea Mays
cgagcaatcattagagatggcgtattactcattgaggcatagtttgggttgcagttaggtcatcaacatcatttttatccactaaatccaagttatttatctccaccaaaaaaatgggacacccatactcttatcaagtgtcatcaaagaatggaacacccgtattcttatttattaactagaccctatcatcaacaaaaataatggtgattggttgataaataacaaataattataaaacactaatgatgaggactaggctccaataccaattggaagtaccaagtaaggcctagatgtggtgaactagtctattaaaagtcaaactcgattgtagtggttaacaaactggagatgttccatgaattctagtggatattatatggcttgcaacttctgagcaaatccgagggggatctacatctcctaactgaaaatacacacaacaacactgaa

SEQ ID NO: 53294 - DNA, 1542 bp, Zea Mays
aggctggttccactctgaaagttagatgttcagtgtaacagagccatctttgggtgtgaattcaaccatgatctagtgatcaaatgagctcagtcactatagccgaaatataggtggtataaagctctccaactttgctgcagagtttgggttgtgttaccacaggaatctgggagaaaatcaagctccaacttggtctgtcagacaagctttttactgaatctggcgcactgttcaccgtcttcagaaatatcgcgccgtggataagggtcagcccctcaccggcgataagaacaccaccgcagcgtggatggtcgtcggtggccgtggtaaatatcctcggcatagtggcagaaggtcactaaggtggcaggctccggttaaacggcgacccccgtgccatcaccggaatccgccgcgcggaaagcttgccagcacatctgaaatccacacttcttctccaactccggtcgacggcctataaattgagctcggactctgcttcttctccacattacgcacctcagtgcttaagcaattgactcaattccgccagagaacttgcggagccccaaattccctcctcctccgttcttgcttcgccgcaagggactccatcgtggtcagcgcgcttcgggtcagtgtttatcaaattgcttcttgttctagttttcctttgatctcctattgctctccatgccaatcaattgaaattcggccgaagcccatcaccggaatgcacccttgctctgtaaaacgccgccgtgacccaccctcaccgacgacctgctcttcggctcgtattctgcccaaaccaaagtgtgtgcataactcctggtgaacccgtgaacccttcctcagcctcaattcggtcgtcctcgccgtcgtttgatcggaacgcgttcgcccctgtaaccatccgctcggtcgccgtggactgctcgattcaatgcccccttgatgaaattgatttaggggaagtgtttgatagaagtttaattatgtccctgtcgcacgggagctccagccatggcgtcagccggccggaattggctcgccggggtgcggcgagggctgttcctcgtcgtggaccttagtctgcaaagggatggaaggtggaggtcctctttgtaaaccgtcagtgactcatctcaatagtgcgttgaccttgcttcgggatattcaaaaggacagggatctcaatgcaaagttggcgcgggcgcaggcgcaagcgcgcttctgctcattattgggccgcctgtatcgaatttggcccaacactattcaccagtttttccttttctttttattccagagctaaaacaattatagaaaatggtagaaaaatcctaaaattgtgaaaccaattttcctagacttcttattttccctagaatttaataaaaatagttttatgatttttagaggaaataaggaattttaaggcattttaaatagtttaaagtcttagttctggatttttagaaaatagataataatcccaaaattgctcaaactttttacataagctctatacattat

SEQ ID NO: 53295 - DNA, 544 bp, Zea Mays
ctgatgtttttttaatcgtaactaacatatcaagtgactattttaaataatccctgaacctataggtaccatatgcaaaactacttccaaaatatgtttcccctgttgcatgtgtttggtgtattattctcttcctttctagtatattgagtgcatgttttgtatcgcgtagacaatgatcggtttgtggaaaccgaaggagtttctagtgaagaccctaagcaaaagtttgacgaaggcaagtgtcctctgacctattagtgtcctgttctcacatgagaacctacttttcatgcataacatgatcaacctaaggatgactagatttctgtttttcctatccttgttattccattggaatgggatgtgatgtttagttttgatgctagtgcttaaccataatgaatgaacatgatgttatgatgatactaaagtcaatgatacgaagttctaatggaaataaaattggttttataacatctagaggtttgacctgtttctcaagtgcttcaccctaaggatcggttcgttgagaaccacctag

SEQ ID NO: 53296 - DNA, 623 bp, Zea Mays
gctaaacagactgttgctgaagaagaaaatgttgatgaaagtgaagattacagtattttgatcccaacaaagcccagtcatttagattttgagaaatctagtgtgtccgaagatgacatgcccatgatgatgaaactaggttattttggggaagctgaaagcaaacttgtccgatttgtcggagaagagactaccccagcaccgaagaatgatgaagtagtggtttttaaaagcttcttcagagcaggactgtgatttcctctgaacgagatgataggggaagtcctaaagaatttcgaaatatatcttcatcagctgacccctaatgccattgttaggcttagcgtcttcatctgggccctccaaagccaagggatgagcccatatgccgaagcgttctgccgagtgcacgagttgcactatcacacaaaggccagagcagatggtcttcacgaaaattttggttgttaaaattttgcgtatcgtaaggatacgaaggcaccagtcctcaattaccatacaaagtggccgtctggctaaaaaatgaatggttttacatgaaagttgatgagaaaaagagagggaaactgacgacgatggtcatgagtccgctgtctctgagc

SEQ ID NO: 53297 - DNA, 1594 bp, Zea Mays
tttatatattaagagccctgtgctctacatatttagaggaagccccagtcgtttggtgccttctggcctagccataccatctaaatccttttcaattaaaccacatgaacttttataaggtggcccatttaaaagccaattaatttaggccaaactaaagttctaccaaatccacatgttttgtaccctaacattttcactgctctagcgaggcatacggtcgctaccatttcttcgtctcccatcctcatcttcctcgagtgtcgccgccccgtgcgtcgccatcaaactcttcttcaccgcgtatctgggcaacagccccacccaggacggagggagaccggcatagcggcgcggcaccaggaccagccccgaccgcaccgatcgatccgccgggcaagaggcagaaccaccaccacgcctcaggtgtgggtcgagcagtgggtgactaattcggcaagattccccatcatgcatgtgtgtttgttaatctcccaaaccattattaggtcatgattaggggacacgtaaagtattaggaagagatctttgttaattgcctttagctagcatatggttttgtatccatcacttgcgggcaagacgcggttgtttacatgcattataatgtttgtgtcttcaatttcattcatcatttttatgtttttcgatcgagcaaattggagaactctgtgtggttgaatggtgatggataatcgtatatgtacagatcatgcgaaaggagaaagaccaaaaacgttcggcacctgtttgttgttttgtccaaataaatttttggtgctgcatacaatgtgagttgctgcaaatctatgccttctttgtattcacgattcagaaatcgttactcacggctactgatgcaaaacaaacaagttcatgcaaactcaattgacattttatacatgagtaagaccatcaaggcttgtaacacgactattttaatccatcgtactctgtgatatatgcacttaaccaatctaaaaataatagtttctataggatggagggagtatccattaggcgtgtgtatcgatctccatgcgcaagcgcaacgccgtataaagattgagcaatgctcagcagcatcggccggcactaaccacatatcaaataatgcagcaggcgcgcgatcgatatgattctcctctacttttgcatgcatgcacgcacatttggtcaagtacgcacatacgtagtagtaggtgcacgcttttggtgccgtcgcccatccatgcatgcactgcacacgcaccaatgtctccccttctttaatttatacgtatacatactattaactatatctctagctttgagctaaacaaaattcagtttacaacgaattttgtaggattaagatctgccctatttggaaagcaaaaaaactgaaccaaaatgcagattcttcgcatggacctttttacaacaaagagtattgactgtcgataaccttcagaagaggggatggccccgcaacccgattaagatctgccctatttggaaagctaaatttatctgcaacccgattaagatctgcaggaggcgcacgatcgatatgattctcctctacttttgc

SEQ ID NO: 53298 - DNA, 678 bp, Zea Mays
agagagtaaaaatcgagaagaccacgaaaaagggagaaactggcaaggccagtccccggatgagaaaatgcacgaaaataactacctcgtgggtatcctctgtcgggacagtaactccctactagatccgccaggaacatagttccttaggcggtagaacaccaatttcaacaagatacaaaaggttagcttctagatcgatcggagggatgtccagcgtagcagcactctattttctcttcctgggcaccatcatgatttttcaaatagcccggttctgggacaaaacgcgaaaagatgtgggaacttagaaagctggaaagcagtggagcaaaaaataggaactagggtacaggggccaagatgacatcgacaaaagtacaggttggtacactgagtggggagtagaaggatgggccgatggcttaggagagttttggtcgaagcaaagtaacaggactcggtcgttatttctagaaagctaaaatacagtttgacaaaacaacagaatatgcaacagcaaagtggcatgaaaacaggcttcattcatcattccatcagttggggatcattacaaaaggaagaccgactcattatgagtcagccaactgcccctcgatcaaacactatattacactactagttaaactacattatactactactaaactactactg

SEQ ID NO: 53299 - DNA, 973 bp, Zea Mays
gtcaaactagggtagtgctgaaactgagaaaccagtgacaattctccaaattgggagctaatccgtgcctaatccatggggttaaggactatgatcattacaacaaagttttagcccttgcattagggaacaaattctttataccgagttggacctagtgctgttcagaaattggagtaaaacacccccaaagtcgggctggcaggcggttgcaatggaaattcaggatgaacagtgactgcaatagatctatggttccgtgaacccaacgccggcgatctcccgccatgattcgcactcacctgagaggttcgtgcccagtggagagtggaaaactttggataggttcactgctttgcggattgagccaggggggtaaaacatctggccggcgtgcgacactcgcttgagtactccatgccgcggtgtcattggcgaccgagttgtccctcattgtgtctccttattacgtggtgtccaagcgcttgtgtcgtactctcatggccgtagatacctagccatgccattgttcctttaagaccccatcgagagtgacggtgttgagcttagtgccttccggtatggtcagtactgcgtgaaagaaaccaaaaattcacagtaccctcacctctttgacccaaattggccatgcaccatgaactagtgatcccttacgattgtatagctggagtttgaccgcctatcttcgcctgagttctccaccatgttcaagcgatctcgtcggaccctgccacacgcgctcacctctaccgtggctagtgctctctgaggtaaccatggtagatcctgtgggtgttttgagttcctttacatgtcgtgatgctcatcggcttgcccggttgaactccaccgtcgtcacaggattcctagaacaacgcgccaccggtgcggaacgctgtcgtggacactctccccgtcgacccgctactctgtcctttcacccgtcttcccg

SEQ ID NO: 53300 - DNA, 883 bp, Zea Mays
tggaagcaggccacggaagtggaacgttaaacttgcagggtctgagtgggtgaacatgtgagcatgtgtgtgtggcccatgagctggtagtcggtcgacccaagtggcgatgtatttaccagtgtttgaacacggcacaagttatggaatatgagataattcacctatcttctttcttcccaagtttcattcgctcttcccatcttcttctctgatctggttctctatcgtacgagtgtgagtggtgttaacaattggtatcagaagtaacttttcttggctaggtgaggttgtgtgtcctggattcttcaacccaccacaatcatcttacgtgtttttgtcgtcgccaaatcctcatgaatccggatacgcaagtgatcctggatgagatttcacgacggttctcggagcatgaggctaaatgggatcggcgcatggcggagcaagaatctcgctgggatgtggcgttctctgactttaccaaacgtcaggagcgccgcgttcaggctctagagaagaacgccgacgtggttgaagattagcgtactttcatgaaggagatggtggatgatcttcgattggaagtgggtaagatctccaaacattgggaacatgctgtggtggataattctacttccatggcgggggttcttttccctctctcgttcaattgtaacccctacagcgagcattgatcagcagggtgttgatagtgcaagccgtcaaagactgaatgtagggatgttctgcccgaaccaatataaatcttgcacccaccatgcacaccgtccggagcctgaaacatgcacacaaattcacttgtcgaagctaggttcgaacacttacaattggtgtgtgtggccaaagcagatgttattcaaat

SEQ ID NO: 53301 - DNA, 467 bp, Zea Mays
aaaggagcgaaaggagcttcttggatggcaacgccggttactgatggtggatgaaatgaaacgagagccgtcattcgggagaaaagaaaatcacgctgtgccaaaaagaagtcgacgagctgtcacgggcccaactgtttgatcgcgatagctcttttgcctgtgtgttggtgcctggtggtcctcaccttgtcccaaatttctttttagcgatttgtacgctctgacaacgacgccttcgctctagtttatcttacactatcaggcgccggctgtcatgggcacacaagtcaccaatgtccactggctgattagaatacgtagcagagcaaacttctccttgtcagtggatcgagtgaggaagtcttgtcgtcgtaacaagggaaaacatgtcccactcagaatatagcctggtatgacaactttctgcaatgcaaaacgtctggatgcaatgaactctcttcggc

SEQ ID NO: 53302 - DNA, 546 bp, Zea Mays
cccgccactaaagcttcagcctacccttccctctctcagagcaggcgacaaaatgtgatgtgggaaggctgctgttgagagcttgtcttttgttggcctgactgaccctgagatggaactgtcttttcttcaccctgcaccaggttgtgaatgcttcgtacatacctcgggtagaatcttcctccgaagcccttggcgacttcgatgtatctgtgcagctcctctcttctttggccaaaatcgttgtcggcccttatgtattcacccatcttctgtaataatttatctagagagtgcggagacttccctgcaaagtattgggttgctgcatagcccacatcctaatgtgtcacctgtttgtcactttttagagcaaagggtcatccaatagtagtaccacccaataaccaaaacaaatttgcatagatgtaatgcagactcatcttggttagccacagtatcaacttgtttagcactgcttgttcccccaaatttcgcactgagcaaacaaactgcatcatttcccccagatcccgataaaaccac

SEQ ID NO: 53303 - DNA, 433 bp, Zea Mays
gttgctcaacacctaattccaccctcggcgacactaatcccttaactaattgccaagttctagcacaaaatctctctgtccacagtgatggcgcaaactgaggacaacccgaggtgttcccggcgatctaacgtggtctagttcaattggctggactgataagcatccatagcacacaagggtgctgaaacgagggcaaggagggtatgaacgaacctgtagacgtctggccacggtgagctctctcacggcgccgttctgaccgatttgggggaaatgaaaaattgaggggctctggtggatgatctgagacaagagctggtgcgttggatgagtaaatacctagtggaactcacgggggcagcgatttatagagttctacggcggtggcgtccaatttgaagaaatcgcgctggtggccgagagagagggg

SEQ ID NO: 53304 - DNA, 452 bp, Zea Mays
tgggggcatttgaaggggactgcgtgggtgctctgcacctaggcgtgattgctgtgaactctgaggactctggtagggttgagccatagctagtggccgccggtagcaatcaccctccgcggaagccgcgcctcgacgaaattgaacatctcggtggcaaaataggtggtaaggaagcccctgtccggtttgccttcgcccctccttacataatggctgttagtagggtagaagacacacggggggcgttggggtgtacttcggcgacaccgcctccgcgcggagagctctgctcgccctcgagtaggtgacagtcttttgacttttcaaaacggtttgagtggatgagattaaaagtgggatatcggttcaggcttggcccttggatcgggaaccatgggacacgattgaatctcgaataattaaacctcgaccgtcgatctcgccatctg

SEQ ID NO: 53305 - DNA, 706 bp, Zea Mays
cttggctgcaagactaggacgatgggttgattttatcatacaccgaggactcttctacaaaatcgccacgacgaaggggtaggggcccatctgagccgttggatctgtgcccaatggttcagattaaatatagcgcattgcaaacctacgaacgaagcagaactgctcgatcacgatccaacgtctcggatctgaagtggcgaaggggtatgcgcgatcaaatcggagtcgtccaatccgcgatcaacggttcatagctcgcccaacatttcctcactccccatggttagcccacggtggctcatagtgcctccgcggcggcgagctcacctgcgacagccaaaacggcccgcagacgaccaatcttcccacccgagacacccaaaacagcgtgtgtataacggtgaacacagtgaggtggcttatagagcgcgatggacgatgacgaaaacaggccacggtgggcgcactgatgagaggctgggcgtgagctccgacgagaaattcctggactcccctgctcacggaataacttcggtgcggggatacaccatcctcttggtgcggtgatgccaccaggacagacatcgagccccgaacggtgcaataagtcgacggccgcagagatcccctctcccagcagatccttgtgacgagcagtggcgtgggaatggcggcaatcatagacggttgatgcgaacgtggc

SEQ ID NO: 53306 - DNA, 731 bp, Zea Mays
tttaagtataagcttagtggatcctttattcttaagtcaatttgatgttcatgctcaattttggttcacataagataatggttcttgggttagcacttgagagaaaccctaggtgacactggggtgtcacagccgacctctaaggcgacttcctcgcttgaagctaaagaagtatgcattgctattactccatcagatcatggtagagatgacccaacgtggatatccatggaggtatgggaaggagagctcgctcggacacccttgggggctgggttgtagctcgcactacccatcggagccagatcgctactgacaacgccctcgagggctgggttgcagcttgcgctacccacccgagccggatcattaccgacaacgccctcgggggctgggtaaccgccagcaccacccttggaggctgggttttctgcaacagccacctctaaggctgaaggatcctcagtcacctccatgggagtcaagcaatcttgaccaacctcttgacactgaagaccgccttccaaggtcgacaacgagtgagatgcttcccgagatacctctaatcccacatctggaatttcagagcaaacatccatcatatcaccatcagtcggctctgacagcatatcctcaggaatgacatcctcaagggtctgattaaattctgttatagataaatcctgaaggctaacgagagcagacagagatggagaaggaatatcactatc

SEQ ID NO: 53307 - DNA, 378 bp, Zea Mays
taaactgtgccattgtgaggtttttaggcttggtttccttcataatctgggttaattctatctctcctttaattgaaaggcaaagatcctgccattgcgttaaaaaagaaatatgagagtctctaaccaaggatagaaataaaacatgacggagaaatgcttattagctatcaagtagggtcactgaattatgagctggagtgtaagacgtggacgagtggctgtggcatgcatttaagtcaaattgaaggggtttataaaggtgttctctagctggcttctatctataagaaagaaaaggcagatttctagtgccgaacttccgtatctattcccaggactcatatcatggtgttgtatttcaatttcatcacaatt

SEQ ID NO: 53308 - DNA, 477 bp, Zea Mays
gtgggtggacagctccaaggggtggaatccgcagaaagtggtcaatccgtgcagagcaatcgcctcgatcgtatcctcagcccggtatccaaaagactcggagtccagcgaatgccagcctagctgtaggggatgaggctccagggtcatcctcaccctacagcggggcactcggtgcttctcgaactgctgcaccgcgtactgaggaggcgtcgtgtatccggccccctgaagtacctccaacagaatacggggaaagccctctcgtgcgagcccgtcagtgtgggacagtgcattcccttcgtccgaggatccatgggaagtcatctgtgtacagtttaagcgtaagtaaaagaaaaagaattataaaaagaaaaaggaatcacaactcagcctctctctaactacaacaatgatactggggtacttagttggtaatcattttgtattaaagtccttacccaattatccattagt

SEQ ID NO: 53309 - DNA, 373 bp, Zea Mays
ccggcgatctagcgcggtctagcttaattgaatgggtcgaggagcatcagtggcatgtaagagtgctgaaacaagagagcagagggcaagatcggacctgaagtgcactgaccacggtgagagcttgttcacggtggcggaaaactgatttgggggaactgagtgattcgggggctctggtgagtaattggaggcacaactgggtgtgttgagtgcacaattacatagcggagtcgagggtgtgctcaatttatagggcccttgagcggtggcccatgaatttgtgattgcgcggtggcgatcggagggaaggggatgcactggtgtaagcgattagtggctttcaccgtggcgagctcaccggcgatcaccg

SEQ ID NO: 53310 - DNA, 638 bp, Zea Mays
cggcggcgtagtcgaccgaattgggggaagaaagaaattctttcgctatagtgactaattgaaggtgggactgggtgctttggcttcgtgataacatggcgcaacagacccgaccatcaatttataggattgctaagcggtggctagtgaatttggattgagcgcggtggcggtcagagaagaaatgagtcacgggcatggtgattcgtggccttcaccgtggcggcctccccggtgatcatcggacgtgcataacactggtgattgcgacgtggtaattgctgaggcacgtggcgttcggtcgacgggctgccaactccggtgacttatccggaccggccgcaaagcagaaaggagcacgacggctagccggattagtgcccatagcccaacaacggtgacgatctttttaccctatggcgttatccgggctttagtgggcacgaatcacctcatcgacgcgaatctacgcgcgaggtcgccggcggcgagggggatctgcttctgttgatattttggtactataccattggaagctttttcagttagcctgacagccgaggtttagggcaggttttctccaaattttccatggcaacatcatcatccttctgcaccaaagttgtagacctatagat

SEQ ID NO: 53311 - DNA, 662 bp, Zea Mays
tgatgtcccacataagcatcacaacagatgaagtaaatgtccaaagtgaacggaagtcggggcacacacaaactgtctcaaaatatggattgcatgagcaatgttaggtagagtaacagtgggatagacaaggcttccgactatatgccaatatcgagaggaatctttaagaggtgtaccatcagtgggacacactcttaagtcgtataccatcagtgggacacactcttaagttgtataccatcagtgggacacaattgcaaatgaagatccataggtgtggcagccatgcgattacagtaatgcatggacgagcaataagatcatgtatgtatttggactgagagagataatattccttaggtgagtgcaaaacctcaacccctaagaaaaaactgagggcccaaatcagacatctgaaaattgctcactaagttgcaacttcacatgagtaatgctctatatcatctccactaatcaacatatcatcaacataaagaagcgaagtacgtccacttggagagagatgaataaataaggcatggtcatgagcactaggtaaaaaacaagcaacctttatcatagagcaaagcactcaaaccaagcacgaggagcttgtttaagaccatacaaagcacgacaatgtttaagaccacacaaag

SEQ ID NO: 53312 - DNA, 676 bp, Zea Mays
agtactctaaggagtactccaggtacagcagtggtgctccttgcctcctcttcctcctcctcctcccttgctgacgaccaactgtgacgactccctcgggctttccctagcggagcggtccttcatccaggcgcaaagaggaagactctacggaggaggaggaggacagcgattgcagtgggggctgcaacggcttcagcgatgaccctggtggcgatgacggtggtggagttagcggcatggacaacggcaagggtggaggcagcgacatgggtggtggtcagggttacagtagcagcggtaatggtggcgagggcgatcatgctggtggcaaggcaccaccaccttagttagtatggtagtagtagttgtagtgtagggtactgtagtagtatagtaagggtgatggttatcttctgctattggttagttcatattgagatgatccttctgtaaagacgatgatggttatcctttctatttgtgacaacatgtaacattgatttacgttgatcctcgactcaaaccgattatttcgttggtagggtttagcgatcacccttttctgtgtatgtgtgagcatgtaacaccaacttaagtcggactctgacttaagtcgattgctccattaatagtaagtatagttatagcaatgtaggaaaggatgtaattgagt

SEQ ID NO: 53313 - DNA, 812 bp, Zea Mays
gttacttcgggtaaaacattatgcatgaggagagagcagagaattaacttattcatgttctgttgtatttcaatttaatttcccagattattcaagcactatagagcttgatatagttgttatggccacttggcaatataaataaatatatggtgccacacaacacaagcaaataaaatatagagctaaacaaaattgtttacgaaggttgtgcataatgtgactttagagcttgaacgacccaccacaatccatgcgagtacaagctctatcatatctggcgtcaacgcgtgtgtggccatgtgggctacgacaacgcaacaagcctccataacaagcgcaacaggcgcagttgtgactcggtaattggggtacgcgacaagtccacacaacgtgcgcaacaaacgcaattgtggctcggtgataacgacagacgaacagtgcctacatggcatgcgaaaaatacgtgactcggtgatgccggtccaactcagcaggagtgatccggttaggcgagagtacaacatagcaatcacatgacgcagccaagttcttacgacacaaataatgcgtcgtgttgcctggacgcagccaatgccatagctcagccaattaaaaatgtagtctgatcgacgtgtctaagtacccactatatcatttaatcgctcgacgtgagcccaaaagctcaacgcaacacaaatatttagagcgatttgagtatacacaatataaccatcacatgcattttaataattttctgctaattatttactacgggaaataattattaatgcagaaaaaatgaacaccat

SEQ ID NO: 53314 - DNA, 299 bp, Zea Mays
ccatgagtgcctgccctgtgccttgcttgtttggtcgccaatggcaatggcatcagctcatgagccgtcaacatggcgtcgccttggccaggacatcgatctcgccgtctcgatcgcctcgcattgccgaacacggcattgcctcctcacgaccatgcctgccactggtaccgtgcaatgcatatagccattgctgatccatacggaccacatggaggccccagcgatcgcaacaagcagatggtccagacctacgcaagtgaggagacctgcgcagccggccaggaacaactctttgc

SEQ ID NO: 53315 - DNA, 296 bp, Zea Mays
attggatccatgaccaaaataagccccatgcgtaactctcatataaatgtgtgctatccttagatattgggaaaagtctatttgaccctcttcgtacagatggaaaagaaattatgtaaatgataaaaaaagctaacctaggaattcacctcttcttccatttagtattcagctaagccataagtgcctaattggccaccaaaatggtctgagttaaataggcctaataggaaaacagaggataaaagcaaaaacaccatgttctgaaattctcgtgatttttgtgcatacgtttt

SEQ ID NO: 53316 - DNA, 542 bp, Zea Mays
ctcctttgcaatcacactcacgctcgttggacagtcacaccgatcactgtttgccacctgcagtgctggtaaaagcgttgtaagagcggggtaagacgcttcataatttgtattccaccaccaccaccaccaccctgagagatagttgtagggttcacattgtttgttgcctttttctctctgtttgtgctaacaatgacagaaccaatgaatcaaatggacaaggacaaggggcctaagcttaacgacgatgagtgtgtctctcagctggaattgaaggagatgatgcacgcgatgactaaagcttttaaaaaataccaggactctgcggcgacatcctatgagcagcttgatcgacgagttgataaacttgttacacgcatggacgtactggaggctcgtcccccaccaacaactccagccccatatcactctcctgtggacgacgacaacgatgacaacgatgtttatgcaccgctgccacaacgcttcgcacgtaatcgacaaggtatgggaggtaatggtagacgtcgtcatcataa

SEQ ID NO: 53317 - DNA, 618 bp, Zea Mays
gcaagtcttgccttgggaatttgggttgattagtagggaattgatcatgtggaggcggtcctggggcaaaggaggcagctggtgaccatgtactcatcactgggttacttgaggcatttgaggccgaaggcaaatttggccttggctcttgtggctgagtttgaacatattgcgggatgtagggtgaacagtatgaagatgtattgaacacctcttttagctatgaaagttgaatagctgacgaagcaagctctttgtgcttattaatggtgtggtggcatgttcttgtagtgtagcctttgtcctcaccacaaaacaaatagaatggcttccttggagtcgcaccaaatctgccactaaagcttcagtctccccttcctctcggagcaggtggtgagaatgtgttttacaaagattgctgctgagagcttgcatgttgccctaattgactctatgaatgggtcattcattcctcaccctgtgatgggttatggatgcttcagacatgtcttggatggaatcttcctccaaagcctctgcgacttcgatgtacctgtggaactcttccctcctttgatgaaaatcattatcagcccttatgtactcatccattttctg

SEQ ID NO: 53318 - DNA, 347 bp, Zea Mays
atttaagtattgcccttcttattcccatggctttaagctttcgaagccctagtagaactgcttcatattctgcaatgttgtttgtacattgaaattctagcttggccgcatagtaggttcttattttttatggtgaaattaaaactgtcgcggcacctacgccgaaggtcccccagatccatcacagaatactgtccaaatttcttcatctattgaatgtccttcgttgtgatccccttgcgtccagtcagcaataaagtctgctaattcttgagattggattgaggatcaatggacgaagtcgatagtgaactcattgagttctgcagcctattttttatcccttc

SEQ ID NO: 53319 - DNA, 944 bp, Zea Mays
tgatgattttcgttacatgtaacaccatcactatggggcggacggcttgttggcaacaagcgtaacagtgtgcctgaacaacagtaagaacaatagtgggaggtttgttcactgatttacacgctgatgcctggtaacatcctctatttatatagagaggtgtactttgtctccgaagcatcaagagagatctatttaataataaccatatgcagaagatagtattggaaatctctcaatttcttaacttactaatatgctaaggggcaaacaacatatgccatgtgctatagcaatcttgggactttgatgcaaatgctctagccttttgtgttgccgacattaggtggtggagtggcagcgatgaagcttgacagaacaacaagttcctttccttgctgaccctgcctccctggagcctatacaaacaagtcagattgagaaattgagagaggtagataaggattggattcttgcctggcttattcttttatcctggcttccttttgtggaggagcttgcaattgagtgatactcaatcagtgacaacattttaggatataacttcaaagcgagggtaaatgggcaagctgtaaatcacaaatgacattttcctttcatgtgtccgttttcttgatcaatttgatattctcgcatgtttctttttcttccaacattcaaatatcctacataacatttccattttctccatagtttatgtaatgatgaatgtggttttgatcatgactattttatatttgtgtttattgcggacggtttggagatggagctctgaatgaatagtctgaagaaggcttgattcagtgaatcctcctcctgctggttctgaccatgtgcagactaatggccgatagagtcgagggatgcagtctacagatctggtgccctcttgcttgtcgcacgtgcatttgtacataggttat

SEQ ID NO: 53320 - DNA, 602 bp, Zea Mays
cttcatcatctttcaaacacgctctatagcacacctttttattcttcatcattaagcaaatgtggttgaccttttagaaagagagaagacttgttcaaggcaattatggtgaggtcatcatcggagtcagaggagctagcatctgaatcccactccttgtcgatgtgggcttcacctttcttcttcttgtagaactttttattctctaccttcttccctttgttgtcttcttccatgtcatcatcattgtcatcattatataaacagttagttataaagtgaccattcttaccacatttgaagcatgtgcgcttcccccttggcttgttatcattgttcttctagccttcaacacttgctataatctcttgatgataagcgccatctcctcatcatgaggtctcctgccttgacttgtgccaccttgcttaaggtctcctccttcctctcatttattgcattgaaggcaacaacctgtggtttgttggtggagacgttcccttgtgtgaagttttcaatgtacttgcagtccctcaccatcatctcatggctaaggaactcaccaagcacttcctcgggagacatgttcttgtacctggcat

SEQ ID NO: 53321 - DNA, 545 bp, Zea Mays
ctctggctgaagtagtaaggaatggaaggctgcacatgcggagttttgcactggataactaactccacgtgctattctactactacctgtccaacccttcacaaaaaccctaagtaacaggatttgtattctttaagcattagataaccacaagctttagaagccggtaacccacctgtcatgagctgccaccagaacagagaatatgtgaatgcttacactagtctatgcaagtctttgggcactggagcttaaacggcacgcacccctccccatgtgggcagataagataacgacgtccctgagaatggggaaccgacccacgcccctcttctcatgctgcacccaccggccaccgacgctggagtgaattcaccgaccgtggctcgtttcgccgtcacccagaaggagacgtgtagctcgcgctgaagagattggatgtttgtttggtttgatggttcgttttggcgctgcctgccactgcagtctgcagcacagtgatcaatggcgtttgatagcagcctattgggggatcccagacctgg

SEQ ID NO: 53322 - DNA, 517 bp, Zea Mays
cgctaccggtggaagctgaatctagaaaagtgtgtctttggagtgccgaccagaaagctactaggattcattgtcaacaaccgaggaattgaagcgaatccggagaagattgaggccatcatgagaatggaagcgccatggtcgtagaaaaaggtgcaaaggcttactggatgcatggcagctctcagcaggttcatatcaaggctaggcgagaaaggaataccattatacaaattgctcaagaaggtggacaagtttcattggacaacagaggcataggaggccctagagccactgaagaagttcttgaccacaccgctagtactcaagccaccgtgccgagctacgcctggtcagctggtggaagatctgctcctgtatatctcctgcacgactcatgtggtaagcaccacgttagtagtcgagcgggcgaaggaaggacatgcataccctgtgcagcatccagtctacttcatcagcgaagtcctcgggccctcaaaaataaggtatcctcaag

SEQ ID NO: 53323 - DNA, 850 bp, Zea Mays
gatttgtgttcggtgggggtgctaccgtggacttactccaaatggtgaatcactgggactcaaacgtggggttgagatagagggtttatactagttcaggcttgtgcctagtccagtgtagtgctgatctattattgcttaggagtgtgttacaactggtgcaggggttggaagaaggtgggggtcctgcccttttatatctcaacggtaggaccttatagaggagatcttttttcttagagagagagaaagattggctcccctgggttgtcgtggtgggtcctccatagggtcgtgtgtagccgtattcccgatatggtgttgttcattactctgactcttgtagtgagtccatcgctgatgtctttatagtggtgttcggtaggtcctacggatcagtctcacgttgcggtcgtacgtggcgtgacttctcctgtcgtcatgaaccctttgtcacctgccagtgtgcataggtgtacactcagtatgatgcgatgtcctgtcctttcgacgtacatgtcactgtagagacactggtgccgaagcccttcctgactaggtttaactgaccccacaaggcagtagggataatctcaagaccgttcatggggtcatacgatcgtgttgattgtgacctctcggcacccattcggtgtgttgtgcacatgtccagacatggcttgatggtgacacatcccgttgtagctgacgtgggttagtagcgctagactcagatgtctacctcactaggttgctcgacggtgagttggttgatcgaagttgatcggtggagagttggtcagctggtccgcctcgtagagttggtcggtggagagttggtctgcggagt

SEQ ID NO: 53324 - DNA, 551 bp, Zea Mays
ctggatgagatattctttgtacaacaatttgtgaagggtctcaagcctgagattcaggggtcagtattgtgccaggttccacgatggtgaatagggcgatgttgttggcccaacttcatcaggatgtgctagagaagagcaagtttaaaccccaaaagcaaccttattcattatgcaagggaagcctgatgtcaagaatggggctggtggattggatttctccaaagagaggcaactacgagattataggagtttacatggtctttgtttcacttgtggagaaaagtatgaagtaggtcatgcagctaaatgcactaagaggaatcaggctcagcttcaggtgttgacagttgaggatatgtcattggaattcagtgatgaggtgttgcaacatttagaacaggaagatcaagtggtcaaaggattatgtaacatgtctgtacatgctgtttctagtactaaaggggttgagagtatcaaattgagggctctagtgaagaatcaagtctttctgttgttggtggattctaggagttctgccaaattcatca

SEQ ID NO: 53325 - DNA, 465 bp, Zea Mays
tggatactattgttttctcaaaaaatactggttttctcaagcatgtaggagtgttatgtgtctttaagttaaaaagagataactggtctgaaacacacacaaaataaataatataaacgctttttagttgctctgtgaacacaagggtgtatcctttacaactgtttgggtcattttcatgactcacttcttagcttaacctccatatgcgaagctgaaaagaaagcaagtttggactgctctagtgtagacttaaaattccagggcatatgaggttagaaacgtgtgtggtgccattgtttcttgagctacattttttgttgaaaggaatatgcaggaacataccttgttgtgctgttgaaaggaacacacagtaacatacctagtattccaacaaaacataccttcttcaaaggaacaagctggaacatactttaatctatgtttctagttttacaatataat

SEQ ID NO: 53326 - DNA, 477 bp, Zea Mays
cccttgaccacccttgtttcttaatgatccatgagcagtcattttattttgcacatctttggtgatctcgttaattccttgtaacttccctcaataaataaattttacttcaacccttctattggaaccatacatatcttacccttgattgttttcttcacttcgccacctcgtgaggcttgccttaactctaaccttggttatgcttttcacgattatcatctttacccttatcacctctatatcttaccttgatgtttatcttatatctgccctttaaaatctcctcttttcatcttaatctgagcgttgtacttcacctatttttcccttggtcgtaccctcatctttgtcgcttgcgagtttttaactccatccttttgttatgctctgattaggtattacctttacctttctcatatcttgatcttaccttggtagttacactatgtccgttctctaatatttccagtctct

SEQ ID NO: 53327 - DNA, 488 bp, Zea Mays
attaattaaacaacacttatctgtatgctatttgtcctcgctgtgtgtagcgttaccaacttctccctagtacttggcccccctaggatgtaggctcgatgtgtcgaggctggataccagtatacctaagggaaaatcagttgtacggtccctaggaggtagtctctacggcttgagactacctgcgtctggattgggacctagacctgcacacaactttggctttgaagtgttagtagcacacccataggacccatcgtctgatatctgccatcctttgactcatgcaataggacctgcaggatttagtctgggaagccaagccgtatgcctggaccccttgaatcacagttccaaatactaggacacccgtcgcagagtggtggagcgtgcaggcttagggtacaagaccatgctaagcagctacacagctccgggccaccccaggagacgtgtgtccattctctagaaccgaaccctaagttgcc

SEQ ID NO: 53328 - DNA, 1108 bp, Zea Mays
gatcgatgggccaaatctatctgtgttgaggttggcagcatttggtaagggccagcgttaaaaccagcctaagtgaagattcctgatagccatagctttcttctttggtgttggacgatgggtcacctttgtgtcgctacaaacggagtgtgattacataggtcggaatgagaccatgggataactacagtgttgagtggctgaagttagtagttcctctattaaaaaatagttgttcttgattttttttgagtcaattgtttttaactttaattaaatttacacatgagtatattaatatctatagtatataattagtattcttagatagatatttgaatctgtttcattaataaatttatttgaaggtataaatattgttaatatttctttataaatctagttaaatttgagagacaagaaaggcatcacagtttggtggtgcagcgacttctgctgtgctaaaagtggtgttaacaaagcatcctgaagcaatggttaaaggagagagaattcgtgccattggatcttccattggttgccagagaaaagtgatgattgcttgtagtagcatgatgcgcagggattcttggaataaaagatacaactacatataacccgagcggaaataacattatatctgtatccatcgctcactaatagagtactagattcatattgattttttttccttatcttaattccaggtgtatctttgcccatcctcttgcttttgtctcgggccgcagattttcaaggctgatggcattattctcgagtcccttgaagaggtgaaaattacttttattagacattgctatggacaagtgcagttcgtggaggagtttgccaggtgccatgcaccaagcctgaaaaagttagtcgtcaactcaccaaccaaagggctacaagagatggtcggcggattgtttgatccggatgtcactgtcaaatgcaatgttatctagcgccagaggggtgtgtctttgaaaaagataaatctatatttgaaatttaccataaaccagctccaccagggaattcaggatctactagtgaactatttagatacacaatagctttaaatccataaaatataataggtttt

SEQ ID NO: 53329 - DNA, 339 bp, Zea Mays
actgcggcgggttcgccggaatccaggattcaaccccctggagcccgattccccgaaatttgttgacgcattaccatgccgaggccatggcgaacacggaagtgtagtatttaccggtgattgtgcagtggcgaggtccaatttctatgcccagcggcaatggcggccatgccgcgaactccacatctggtgagctccgattccgccacactggccacccctagttcccgagctgaagtccatatgccagcgtactccgacgagtttcccctgagctacaagccgaggccaagcggcttcgcaagcaagtagcgacatttcggattttctgcctcctct

SEQ ID NO: 53330 - DNA, 668 bp, Zea Mays
gtaatgccataagtaccgtgaattcgtagaagagaaactcacggcgggttatgctgcggaagtctctgcccacgcagcacggcggcgaagcgtcaccggcgagcgattcaccacgctccagtcaccccagcggcacaattaggcgatgaagatctgcggcttggtcccccgcttccgtctgacacctcgctggaccactatgtcgatggatgtgcgcttccacggacgagcccctcacccctgctttacggcaatggtgcgctcgatcccctggccacgattatggctggtatggttgggattttgcgggtaagcggaagaggtagggaggtgcgactcaaatagcactagttgtggcctcagaggcactttcctccgctcaattcgtgcaaagatctcggcgtagctgttaggagttcgctgtgaattgaccgcgagggaggaagacaaccgcgacactgacccagtggtcccacccacaatgaccagtagagacggcgtggagttagactgactgcaacggtgcactctacgcactccctctcctattactattcatgcgctaggagcaacagttgccctctaccacctgcaacggctagctctaccgagccccctagcgcgcggtccccttctctctccccctcaatccaggggttcactgttca

SEQ ID NO: 53331 - DNA, 706 bp, Zea Mays
ccgctagcgatgaactgccgactgtttttccgagtcaaaggaacttcatcttcttcctcctcgtcgtccacattagcaacacaggcagcacccccattgggatcagcaatagatggagcacccacattgggatcagcaacagattaggtacacccattggggtcagcgtcagtaaattcagtcacaggcacttcttcaacagcaggaaccgaagtaccagcgtcccgatccaaactggatactcgccggaggcgtctttttttctttttctgctcatcagcagaaggataaggttgactggctcggcaagggcgcctcgggcgagtactgtcaggcttttgagtatccaaagttgcatcagcctctgggaggggtgccactaccaatgccccagcaggagcagcatcagaagagtcctcagccagcaaatcaagcatagcgcttatctctgcatcactagggttcaggggcacctcaaaatggacctgccgttcaccatcaggaatctccccgagcgaggcaaccaaggcactaacttcttcagcagagggccacactctaaggcccaaactaccatcactgacaggaggattcgacacaaaaagagtgaaggatttgggaggaggcaagttctaggctgagaatgctactggggcaccaacatttgacactttgcctctaaggatcatctcaagttggttcacca

SEQ ID NO: 53332 - DNA, 400 bp, Zea Mays
tgatatggtaaaagaaacggaagagaaggttcaacgaataatgcataatttgaaagaggcccaagcttgccaaaagagttatgcagacaaacgacgccaacccttgtactttcacgttgaagattatgtctacctaaaagtctcaccaataaagggtgtatctcgtttcaggataaaaggaaaacttgcacccggtacattggtccttttccgatccttgaaagatatggaccagtggcataccgactccaattacccgaaacattgtctgcagtgcacaatgtgttccacgtatcctaattgaagaaatgtcttcagattccagatcgaaccgttgaagtgacggatgttgcctaagaaccagacttgacatattcagaatatcctattcaagtcttgg

SEQ ID NO: 53333 - DNA, 371 bp, Zea Mays
gccaattggtgcggcatcaaaacgcagaaacgatggatggaaaccgagaggacgaaaggaacgggcatacagctgcttcttatcgttgtaataaattcgatccggccggtatggtcttgaacttgaacgtatcggtgggactgctggggagcgtatctatctacatatccaaccatatgggcatcgacaacgacgcacacgtatatataggctagcagtactaggtcaggactaaactggggaccatgtgtatgtttatgtatagtatataccaacgccaatgcatacatgtcacttgaggacgccacacacaccacaaaaggaccatattcacggcactgacggacctaccgctggagagagtatcccac

SEQ ID NO: 53334 - DNA, 331 bp, Zea Mays
gcacaactagcctaggatttggcatgcgatggctatgagatgagattattcacctccttcataggggtccctaactcgccttatataggctgatgggtttagggttacaagtctatttccttcctaacttgccttatataggctgacgagtttagggtttctgatttgcgcatgagtcctcgtgccttccttaactaaaacaactgtcgctctgtcttgatccccaagccttcttgccatctttgggcctgagttggtcggtcggccaatgaaatcagccgccgggactacttagacccttcaaggacccatgcacagaatccacgctaga

SEQ ID NO: 53335 - DNA, 329 bp, Zea Mays
cgccgagtccctaagtttgcagagtctgaggatggctgcttcgtactctgctatgttattggtacatttgtctgtcttgagagcaaatcttagccgagcagcatatctgtacttggcgcctgatgggtctgtgattatcgctgttgcatcggccacacatgacaccaggcgccgtcacagtggattgtccaatgtgtttctaagtatgggtgacaaaatggtgaaggccccgtccaatctactataaagtcagcgaggacatgtgatttgattgaatttctcggctcgaagactatgtggtatccagagagttccactgcccacttgcc

SEQ ID NO: 53336 - DNA, 2606 bp, Zea Mays
attctttaagacacaataaatataatgcatcaatcaattatatcttctaccgagcatagagtcaagagacgtgttttcgtctgagactcgagactcaagagacgtctctagagttttttttacctgcaccctctagacacaatcaaacacataactcaagattcccgttgtacacacccttacaatttgagctagcaagtacagaaacactctcggttgcaatttgaatggtaagatgcttaagcatggcataaacttcctaagggagggaactgccaagttttgtgcaggaaatgatggtgcagttatgcatagctaataagtcgatagtagtccttaagtgctcaacatacttcccatgataccgtggattttgtaagtcacatcccgagttcagaccaggacagatcgaaccatcaacccttcttgttccctaggtcaccctcatcttcatcggagtcatcattcatggttcccttctcaagtagttccttcatcttatggtattcatcatagtgaaccttccattgttcctcaaaagctacacaggggaatgtgttagttcaaccttgctccgaagacaacacaatcgataggaaaaaaatacatggggtaaagtttctccgtgcaagatcttagatgaagcactgtttaccacctataaaaacagtgaagctactgtatcaaaccaagttgccttcacatcttttcattgcaatagagaaattttggtctattagaagggcaggcctggtgcagtggtggagctgtctcattgagtcaccacattgcaggctcgaaacggtctttctgcatttgcatgcggggaaaggcttgtctcagtttatctttccccaaatcccactgatgtgggagtctccggcattggatgtgcccttttttttgaacaattttggtctattatcaccatgcagttaatagttaaaactccgtgaattagaaaagttctgaatgaagtgaagagaaaaccgagcaggctgatcggaaggaacttgatattaatatatgtagcaattgatcatgatattatcaaggtgttgtttctatgtgttaatatcttctggatccagaaatgtaaatcagttgaagagtgtgctaaaggtatctgtaaaattcacattagcatataacaaaatcaggtcatttgagacttaaacacttatgctacctcctttcatatgtcgtttcattggatttattatggcaaaaataaaatgaaggtagaagacaaattgttacatggaaacaggatgataaagaatttgcacaagcaaccgctaatgataagaagagctatgagtactccaacttgagctttgaaatgcataataggatataatcaaagatgtcaaattgataacctttcccttgttttatggcttcttcactgtcacacgtatcccaactatttctgtcaaaaatcttcccacttgaaacagctttagctagagcggtctttatggcatcagcatgagcagatttatccactgaactttcactgagatgtaatggtgaaacaggccctgctgatcagagtgggtcatcatatttatgttgtttgataatggatagggatgcattacggaacagcagcaatctggatttagtgtgcaaaccccagatttaataccttcatcttcatcgagcatagggtggtaaggtgtcttaggctcagtgatcttctctctttctggtttgtttaactcaatgtcatttaaattctcctcattccatttgacatggcccctggaatacatcaactgtggtatttttgcagggcaaaccattatgtcagaaaaagaagttgagacagcaccactaaccttggcttcttgggttctctagctttcattgtgtcccgacaaatgcacgacagctcaagaaacacagcctcagaatctgcaacgggttaccaggaaaacatcgtgcaaagggaagtcagtataatgtatcacaggcaccttgggatgatcaaaactctgtacatcactatttactgaaacctacataactccacaagcccacatcaaccgacaaatactaaaatcatttgttgaacagaacacgaaggtggaactgtgaattcttagttgaagcagttgctgttaaatcgaaacaaaaattaaccgtgtgaaacattgtagggccaagggagcatccgattccataggaattagcaccaccgaaagcaagctctgagtagaaccaacacaaactaaaagaataacaatagaagaaaacagttcgaaggaagcaaaatgcccctattctttcaatacaccacagataaaaggacagacaccagaatcgcacccaattcgccccgcttgcagaaatgactaatccaaccagacgaaccatgaacccactgaaacgcaaatggggatcaatgctgagccggagaggaaacacaacactgccacatgacacacatggtcgtgcctgatgccaggcagatgagcaacaacaacgacatgaaacgctcacaaattcgttcggcacacgacgacgaccgcaaaacctaggattcagcagcagaggcgaaagatatgtacgcgcccgctgattgagacaactggggagag

SEQ ID NO: 53337 - DNA, 320 bp, Zea Mays
gttcacattgcttagtgactactgaacattataactatttagtatggttattactgaacacttttacttgttcttactcaggtttgttgttttaataagtaaccgaaatctgtaacaaaatatgccaaacaaactcatcgattttgctacaacgaaaaaatgctccgaaaaaaatctggtcggattggaagaccttttgttcggaaaacatcgaagagcttgaaaaaatgtaaaaccggaggcgatttggcaaaaatggatgatccaaaaacatacctgtgacaaatggtcgatcgaaaaccctaaatccgctgctgcag

SEQ ID NO: 53338 - DNA, 930 bp, Zea Mays
attcacctcatacagatcgtgcttattgtctcccatgttttcttttttcaaagaaaccaattgaaaagtatggatcagatacattcacagtcaaggggtttaacaattggaaaaaggttaatgaaggaaaggaatgtgcttttctaaaacacatgggaaattctggttctggccataagtattctgttggctgtttcaataatctgaaaaatagtatggctcatattgacaaggtggtggttaaagaaaatgagaaattagttgcagaagcaagactaaggcttacgactaccatcaattccattaggtaaaaaatcagtttgtttttgtatgatgtttatacctatgtatacattattatcatcatcatcatcttaataatttaatatcttacaaccttgcatgctgtgtaggtggctaacatttcaaggttgtccatttagaggccatgatgaatctcagaattcatgaaatcaaggtaattttcttgaaatggtcaagcttttggcttcatataacaaggaggtgaaaggagttgtgttggaaaacgctccaagaaatgccaaatacacttcatctgatgtccagaaggaaattctaagcattgttgcacggaaagtgcaaaaaataacaagagaagaaattggcactagcaagttttgcatcatggttgatgaagctcgagatgaatctaaaaaggagcaaatggcaatagtcatccgttttgtcaacaaagaaggacttatcaaggaacattttcttgacctcgttcatgtgaaggatactactgcattgactcttaagaactcaatttgtgttgtcttaactgctaatagcttgagtatagaagacatcagaggccaaggttatgatggtgcaagtaatatgagaggggaaaggaatggattgaaggctctaattctaaacgag

SEQ ID NO: 53339 - DNA, 767 bp, Zea Mays
gacatctcgatctctccttgcttgatgatcttattgtgtcgatccatcttgaagtgcttcaagtactcctcctccacatccttgatttattgtgcctctcatcgcaatgtctcttctcttcattgcctcacgtagtcctcgaatcgttactgatccatagtcgatggactctcaagagttgcttaatgatagatgttgctaggaaaacgttggtgcgatcatttgaaccggtcatgtatggctgatctttgctaggacacaactaattatgtccccagcagagtcaccaaaaagtgtgttggctccgattcgaggccgaacaatagaattgtactgtttagtggtgctctctgcggtgtggacggtccgtggcatgggtcctaatgatccacgcccctgctctaggagtgggtctcttctgctctcttcttagacggtccatgttctaggctggatggtccgcgcgtgctgagggtcttacaaagaacacaagaactcgcctccgggagggacccccattagggaggagagttccaggggatgccccaagatcggcaagggacgaccctagacgatcacaacaggaattcaggtaattcctgtcagccaagaatagatgggaatcaaccctaaaccatgaggtgtcggttctaggccgatggcaatccctggacgtggtttagttaattcccgtcagctatacggtagcccatatggattaaataattctcgtcggccttgtaactcccatcggcttggtctggccc

SEQ ID NO: 53340 - DNA, 787 bp, Zea Mays
ttgaacctatactaagccttcaatatatgttctttaagatgatactatgagcagactattgattcagccaatccaccaccctttcatccttagtcccatgaaaaccggcacgacaagatctgagagatcatacccatacaaagctttgaatggagagcatcccaaatagtaatgatgcgacgtatcctaccaaaattcagctagtggtagccacgatttccatttatgtggagtatcatgaatagcacacctaagatacatctccaaactctaattcaccctttcattttggctgcctgttcggggatggtaagccgtactcaataacaacttaacattgggcagtttgaaaatatgcttctaaaacacactggtgaaaaccttgtctcgattatatacaatggacttaggaatgccatgcaccttcaccaaattatccaatatgacttgagccacaccttgagcagtaaagggatgtctaagtgggaaaatgagcagattttgagaatttgtccaccacaaccattacggtataaaatccttctgatttttgcaatttattatgaaatccatggtaatttcctcccaagatacacctggcacatgtagtggttttaacaaaccaggagggtgttgatgctccccttttgtttgttgacatatcccacattgttgcaaaaacttctccacatctacctttagccctttccacgaaaacaactttttaacatgttggtaagtagccaacatacctgaatgaccaccaactgttgagtcatgaaataca

SEQ ID NO: 53341 - DNA, 648 bp, Zea Mays
atttcactaacgacgctctaacacgctctgtccacggtggcagtgggcacgacgaacaatcaaacgcgttcccaacgatctaaggggtcctagtctagttggcagggttggggagcatcaggggcacacaagaacactaaaacaaaagggcagagggtatgagcggacctgagacgagctgaccacggtgaggcctctttcacggtggcggaaagcaggtttggggaaaatgggaaattggcgagctctggtgatcaattgagggcacggcttggtggcttggtggcttggtgcttgactaccctacggagctcatggcgtgctcaatttatagagtccgtgagcggtgttgcttaatttggacgaattgcgctggcggccgagagaggaatgagtcacggcggcgatctaccgtggcaaccgcatagcgactgaactacgacggtcattggatggtcacttcgactcatactgacgcgataaacctcctaaggcgtggcgtccacccggtgaacggcgaacatggcgatgattgctgctcggccacgtcgtcggtgtgcactgatgaaccatcaagcacatagtatattccagcccatccgcggcgagatctttcaccccgtgatcgttatccgcgtttaattcagc

SEQ ID NO: 53342 - DNA, 1377 bp, Zea Mays
taaagactaaactcctaaacaaagagacaaaatgaaggagtaaactcttttagtctctatttccttaagtgtgactaaaggggaataaagcctattctcgatagtccagaccccttattaattgtatatacctctcattaattgcttgcagcaagggatattttggtctttattcatatgtattaatggtctttagtcccctttagttaaacaatatggggatttgtcgtggtttcgaaaaccaaggtgcagtaagatttgtgttcggtggggaaattagtgcggactcacttcgaatggtgagcctctggaactcgagcgatggattaggcttgcgccctagtccagtgtagtgttgattgtagtattgctccagaacgtgttacaactggtgtgcttgtgtgttcagaaaagaggggggtccttcccttttatagtttaagggctggactttacaatggggacatgtattctactcgagggggctcggccagaggcccttgggtagcgtaggtcctctgatgatgtctgtaaggtcatgcgtagccgtactcttatcatggcgtattgtcccgtccactcatcgtacgggccctttagctggtcttctgctgacatcctcatggtaatgtgcggggggtcccgcaggtcagtcgtatggagcagccatgcgtcaagcggtcttgtctatcgtcacgagcctgcgtcactagtcggtgtgcgtaggtgtacacccgatattggtgtatctgctgcgcactacccggtattcaggtcaatgtagaagctccgatgctgaggtactttatgaatagggccatccggtcccttgaggctatgggagtgcgtctggggacatacttggggaggtgcagtcatgtcgatagcggccactcggcgtgccctcgacctaccattcaggtgactggccatatcctagggacttcgcaacatttgacttgggtttccgtcttgcttctctttcttggttgggacttgggtggtcattttgcctcacgaactttctcgacagggacccggtcggtcgctccgcctcgcggacttgctcgatagggacctggttggtttctctacctcgcggacttgctcggcaaggacgtggtcggtggctccgtctcgcagacttgctcggtagggattcagtcgggtgctctgcctcgccaacttgctcgacaggaacctggttggttgctccgcctcacgtatttgctcggtagggacctagtcgattgctccacctcatggacttcctaggcagggacctggtaggccgctccgcctcgcggacttgctcggtagggagacttcggtcgacaagaaggtttacatgccttattttgggtaccccgttcctag

SEQ ID NO: 53343 - DNA, 545 bp, Zea Mays
tcagcagaaaaaacagtgccgaagatacaaaaaggtcttgcggtcactcccaaaagaaggatggcaagtgtactagatgtgctagaaacggtgaaggcttcaagctctactccagggaaaattgccaaggcttcgaaaatgcaaatcgaagctaaaacaaaactgaccgaagtcgaagctgcaatgagccaggctagtgccgaagctgggccttcagagcctgctaagaaaaaaccctcggaaattgcagagaaggcagcggaggaagaggctatagaacagactttgcctggaaaagttgccgctcctgctcccgaagcaccttccgaagaccttgattatgtcattcgacatgcttcgggaaaaagattatctgaggaagaaatttttgaagctaaacactatgcccgagaactgaagtacccaaaaggggccttagtgtttaatggtacggatgaagatgatttcttgtattgtctcccggacaacaaagaattatccgtctaccgggagatggccagaagtatgggttttccgaagctcga

SEQ ID NO: 53344 - DNA, 625 bp, Zea Mays
gtacgagaaagattctacaccgatgtgcgaatacaggtaatccgacgagtagaattttttatggatacatgtatgaaacaatactacctgatgggtatataccagttgtcatcccacttcgaaacaagttccagacccacaagccaagggcaaggtttggtagctactataaatatccaagctcgccattaatttggcctcttaatcgaagctctcgaacatctcgatcataacttcacatgattagtagtgactgtggcatcatcttcatcggcttcattatatttttgttgagaaatttgggggagagcatccccaccttttcatttccttcatagctcatatgtgagtaggttgttacatgtcaattataggtaggacaacatggtagaggggagaaaaactactgcccaggcaaggacaacaacatgatccgtagggggcaatctacaagcctagatcattgtagaatacaacatcataccagtgttttcatagacgccaacaacacaggagtagaaaagcattgaaatgggtagaatgggaggtgcactggcagccagacttgccatggagataccacatcatctttatccaactcaacaccaatatgggctcaaaaact

SEQ ID NO: 53345 - DNA, 530 bp, Zea Mays
tcgttttgcaaatttagcatcgcgctcgcataatggtcattagcccttttccagtgctcgtgctgccctcacgtcgttagacacttgccgccgtgttgttcttctaccgtctcccgtgagtctctcgtattccattctccctgtctcctctcctccttattctcgccctggccgtcgtcttcctcgagctgctctgttcgtctccgcgcactgggtgcattcgtgccctgtccttgtccggatctcgcccttccctgcctcgccggttcctgcgcccgtggtccattgccgacctccgacgctggtgagctttccttcttatgtaaccctagggtttgcagattaggcagccggcatggattctgccgccaagctttgtgcccagaagttgtccttggcggctgttgcagcccgtgacacactgaatgcttctgctaccgcgagtattgttgctggtgattattgcgccacatttttgttaggtaacgatgtggtttctactcttgatgttcttgaatctgctatggcgg

SEQ ID NO: 53346 - DNA, 742 bp, Zea Mays
caaccatgagatcgagattgataagcttttagagacatgagagatccaaaggtaacaacaacatccattaatccccatggatatgctgtttagagataagttgataacattagtgtcatgatcctcagagaagggggtatgagaatgaccagaaatgagagatttaggcaagatcaacattcgatacttgagaacgggttatagcagataaccagataacagggcagaatcaataaaggattcagagatttggatgataaggcaaatatgattcacaagaaataggattaccagatctaggcaaaaggagagataggcgaacaggatcagctaggatgattaacagaaatgctatgaagttttaggagcaaggatttatggaaagaaacgtggccttgatagggttgggcaactagacaccaaatttttttgacacaacaagtgcacaaggagacttgggttgatctatcggtcaagctatgggtgtctataagttgtgcaggtgcaatttcaagtgtaaaacacacaagggctagaaacaccaaaacaagcacgggatttgtttttttttaaagggtttcacttgctaaccaccaggttgtctaaagtgggggtgtcttttcatgagcgaacaaacaaattttttttttgcaaaagggttgaacatttacaataccacctagatagcaaggcaagagaaacacataacgcaacctagcaagacttcctaatctgacacgag

SEQ ID NO: 53347 - DNA, 506 bp, Zea Mays
ggaggatagagttccccactaatttaatagtgatgggtatgggatagatgtcatcttagggatgaattggctaaggaagcatcgagtgagtatcagttgcaacaagaggaccatgagcttggtgtccccatctggcgagaagttagtggtcgagtatcagatttctgaacatcacgcaaggagtaacagttgagctagaactcaccctagagcgggatatcaaagaagggcataaggatgatgagaagatcaatgagatccaatagctgatcttagaagggagaggcaaagactttcgagaggatgaagaagttgtagtatggttcaagggccgactgtgtgtccccgacatcaagtccattagggagctaattctcaaagaaactcatgagacatcatattccatacatcctgggagtcagaagatatagcaaaacctaaataagaggttctagtggtatgttatggaaagagaaattgcagagcacattaccatttgtgacacc

SEQ ID NO: 53348 - DNA, 599 bp, Zea Mays
ctgccgactaactcccaaccgagaaaaacccgcgaggaagaagtccccatgacgacaaggacaggataggcgtcaggaggtcaccatcaacacgactgtacgccccctcgaaaggtctcatgcgtatcgctagttctttatggggtcaatcaacctcagtcttgggaggacctcagcactagagtctcaatagtgacccatatatcatgaaagataagacattatgacgtatcgagtgtatgcctacgcatgctgttaggtgacgtagggctcatgacaacaggcaaagccacgccacgcatgaccacaccataagattgacccacgggacccgccatgcactactacgaagacatcagcaatggactcgctacagggaccagactagcaaggcgatacgccataccgggactgcaggtctctccctctataaggttcttcccttgagctataaaaggtaaggccctcctcctccttctacacacatgcactatatgtaacatggtactcaatcagtactacgatcaacactacactggactagagcgcaagcctaaaccagtacaactctctgtttcacgcgccctcttttggaatcc

SEQ ID NO: 53349 - DNA, 316 bp, Zea Mays
gcatcatctccttcaattccatctgagagacacactcatcgtcgttaagcttaggccccttgtccttgtccatttgattctttggtcctgtcattgttagcacaaaacagagacaaaaaggcaacaaatagtgtgaaccctacaactatctctcagggtggtggtggaggtggtggaatacaaattacgaagtgtcttacccctctcttacaaggttcttaccagcactacaggtggcaaacgtgaccggtgtgattgcaaaggagtacctgttctgctcgagagaaagctagagctatgggaaggctgactaaat

SEQ ID NO: 53350 - DNA, 561 bp, Zea Mays
acaagcatccaacataagataagcaaactaactctaactaagactgactagactaagacactgaattaagcattattatagactccgactctatcgatcttgggatccaaatctatccgggtcctgcagtctggggtaccatagtcgaagcaaccacggggcggtgaacggtaagggtgctgaatcccgacaggggcgagagaaccaccatacagatagtggcgtgctgcgcactcagcacgaaattctgcaacctccgcccgaaccttgcccaactcgtcaagggcgttgtccaactctgtgttgagcacgacagccaagttgaccatgttgttcagtctgggattgtcctcaccaactagcgaggcaatcacacctccagcactaccggtcgaacggcgagggtagtacttcaggtcgaggtcatcagctaccccgctgaacaacgagcaatactgagaaagtgcccgtcgtattgcatcttgcatggctgcctcggtagtatccctctcagtaatagaatagtgctctaagaaggcctctgcatcccgtagatcatcg

SEQ ID NO: 53351 - DNA, 583 bp, Zea Mays
cgaacgggaacggaaagcaacccgggaggaggggaagctgaccaagaagaaagagcgcttggaccaacaggaggtggtcatcacagagttccatgagaagttgaaagcatataatgcagtgctggagaagcagcgggataagcataccgtgaccgaggcggcactgcagaagctgcagcaggagcttgatgacaaggctggcaaaatctctcttgccgaagaaagccttagggcaaaggatgcctccctggagaagcgggcgacggatctcatccgacaggagaaggacctcgcctggagggaggagatgtgggaaaggcgggacaagttgctggccgagcacgagctcgaggcggagaagaacctggaggagcgggtccgctggttccaggcagcgccggcggcgcaggtcgcccagatggcgcaggcggcagagacgatgaagaagacgctagaggatctctgggcggagcattgcattggggtccagcgtatcgccgcatgggtcgacgaggcgagttcgactctggtgctgctaggggtgagccccatccctgtgtcgaagcagtcggtgtccatttcc

SEQ ID NO: 53352 - DNA, 510 bp, Zea Mays
gttaccacaacattcattgctattgcaccgttgtgctattgaaaattttagccgaagccgaagctctctacattgtgctttcaaacaagcactttgtcacttaagatcaacttcgtctaaaataagttgaacactaaaatggtcagagtaagatccactgctagggtgtcccgtgagggagatgaaactgaagtaactgtgagagcaccgatatcagaaatgatgaggcggtcagggttggttgtgcaacaggaagctattgccaaaggtacctctaacgtcgaagctaaataagttgtgtccaaagttgaaagtgataaggaaagtgaagaggacggtagcattctgtgcccgaccaagcctagtcatgttgaatttggaaaattcatagtaaaagcagaggatctggttgtgatgaagaaagtgggttattttggagagaatgataatgaattgattcactttgctctagaataaataattctatagctgaaggaagatgaagttgtg

SEQ ID NO: 53353 - DNA, 483 bp, Zea Mays
ctgagctcgatggaagcaggaggttgtgattcattgtaattcatttgtgtgattgggccctatgatggccatattagcagtgggctgtattggcctagtattgttgtactcgagtcgtttgcccctattgtgcgaactgctgagcactcgggcccacggcggtcagcggtccgagtcccttctcctccctctcgcttcgtcgtcatatagagacctgttccatggtgtagaggactgtgtgcctgattaggcttgttcgattagaggtgtattgaagggaattaaatcttcttctattcaattttgattagaaggtgatttaatctaccttaatcctctttgatacgcatgcaaccgaacaaggccagtttgttcgattaggctgatctagcatagaattggaggagaaaaaatccattctaatcaaaattgaatagaaaatgatttaattccctcaattctatttctggattggcctaacca

SEQ ID NO: 53354 - DNA, 1063 bp, Zea Mays
agaagtttatgaaacccctcatctttgctcgtgggtccaaaatgaaaccaaatgcataaaagaatgggaatgtccctccagtatttaagaaacttggttttcataagaatagcagcttgtctgaacagatggtcattctcaaaagcatttagatgtctatcaatttttagtatatgatgcaacattaatggagatgtggggtagtaaagaacagacagtgtgacatttgagtcatagaacagttcaagaaaagacaacattgagtcatagaacagttcaagaaaagacaacaacttatcatcaatgtattgatgattatcagttaacaaaggagaaccatctgaacttagtggatggttgctttggataaagatagaaattgtgtttctgcatggaacaatatgcttaaacatcaagtaagtagaattccatctaacatccatgtcaacatcaaacttacgagggcgaacaccttgactggcatgaaacatatgcactgaagctgctcgagaagactggcatgttgagttgcaatggttgtgctacacccatggaacccaggcttgaactgtccaaacagagtacagctcctgcaggcgatccaacctagtacagaagaataatcggtggacttcgttatctcttacacataaggtcttatctcacattcggtgtaggcttcttgagccggttcatggagtgtccaaagaccgaccatcaagctgcactaaaacatctcctacgctatgtcacggtgacagcagattacggactacagtacaagtggggagaagggagtctaaagctagtcgagtacccggacaatgacttggccggggacgtcgacgatcgtcgtagcactactggtgccattttcttccacggaaggagcccggtctcatggcagtcacaaagccagaaggctgtggctaaatcatcctgtgaggcgaagtacatggcgagcgttgtagcagctgcttaggtgatgtggctacatagtttgttggaagaaagaggtgctaggttttcctgctcagccaacgacgattcggatggacaacat

SEQ ID NO: 53355 - DNA, 716 bp, Zea Mays
ctctgtcctcgccgttccaccgtcacagccaccgtcctttcgccacaagtcatcgaatgtaagtccgtttattgttcagagctcaccatccacagatccgtttaccaccgtcatgttccctgttcgcagttcgatttccccaaatccgtttgccaccgtacgtgactgtctgtgtgtggcgcccctcgccataccccgcagtaaccttccgccagttcgcccatgctgatcccgtagacccacacgcagcagctgcaggagaagacgtggtgtggtgcgttcccctcctagtcaaaatcgccgctgcacggatccacattgtctccacgcctctacactgtcgaggcatgggcgacggacctgttctccggtctgcggcaacagggacagtacctctttcactttatttattattaaatgcctccctctatctctatgctctccctcccctcttcgcattttaggtccctacatctaccgctgtcctcgaggactctttgggtttgttattttttttggagttgccagctgccgtgagagtccctcgctttgctgctgaaccctagaacttgccaaggcatctgttggtgcgcgtgttagctattattttagccagtcatttgctttacaagaaaggaccagatgaatctgtcttacgttcttgctttgtttaaacctagctaatgttttctattatacactaacctccgttttct

SEQ ID NO: 53356 - DNA, 665 bp, Zea Mays
cacaaaatccccacagtctcagatctaacgcatggtggacggcgggttgatatatataaaagacacgggtccttttgtaaaacgtacccgcgaaggggtaccagatgtgtctggccgttggattagaacccagcggctcagatttaatctgggagtttaatatttgcccagtgctctggaccagaggatctactatcgacggttgggatctgttagacgactggttcatgtgcgatcgcatcggaaccgcataacccgaaatctacggtcaccatctcgtttttctcccgatctaatcctaggcgttggattaacatctaacagttccaatgattccccgcactcgtctaatcgtggccgaccaaatctggacggacagccaggagaccttcttcttcctatatccgccgagccgcggcggcgacgccatggccgagacaacccgatcttgacaccgtgcactatgccctaaaccaaaaggtccactacgatgcccaaggcaagggacatacgctggtcatgttcatacctcgcagtgcgccgcagagagtcctgatcacggcgagcggctgatctccgacttcggcgatgaattctcgtggcgtcatgaaccccctctccgattgcgccctcgcaccgcttctacgtgaacaacccaagcttta

SEQ ID NO: 53357 - DNA, 1037 bp, Zea Mays
cataaacctacacatagatgaggccctcctagttgttggccaaaggaggtcctgaggccacatcctcgggagtattattctctccatggtgggtcctgaagtcagtctcccgagtcagggaatggtcttccctgaatgctaattgttactagttaaactcactagtatgcaaattatgtactttaaaaattctacacgagtgtgtggggaagcacggtggagaggacgcaagtacggagatgcaaggcgacaactatcggtgtttagcactaacaacacactatgagatataccatagagtgattttgtggtcggcgaagtcgacggtagctcgatggttcgtgctaagcacgatagaacacgatcgaggatctatacaggtttgggccactaagaagcgtaataccatacatcatgtgtgctgttgagatggaattgctcttggggtctaaggttatagagttgacgagaactatgctctagctatgcctaatcgaggatccaattgttttgtagggatccctaacccaccttatatccgacagaattagggtttacatggttaagtagatcgctattgctatgccttcatctaaggagttgactcagactaattcgcaagtgtgtgaatctctatccggcttatcttgtcttatgcatgcacgggagttggttacgatgccttcacacccacgtattcgagttctgcatcatcctttggccgagttcgactaatcagtcttcgaggtttatctctctagcccactgaggtactataacggtccacagactgaatctgggtcgcgaggacccagtggatatatatacccgacagcagctggccacaatacttctttggaacgtcgggagatgtccgttcacgatcgtggtggaaacgagcgttgcggtggcggagaggactgttagtgtatgtgtgggcccgaaggacggcgggactgcgatggcggagagggttgttggtgtatgcgtgggtccgaaggacggtgggacttcggtggcggagagggttgttggtg

SEQ ID NO: 53358 - DNA, 459 bp, Zea Mays
atccaaactcgattacccatgaagaatatagacccagaaccagtgcacaacagcccaacataagtggcccagcccatcatcgcaaagcacaaaatggcccaacctgcatagcgggaaacctaaagatgtgtctcctaatctcttatgcatggacaatggtagctttactttcccggcttcccagttccccgtatccgcgctttaatgtccctaatggcttggttccttaagtctgccgctcaactccacgctccaccacgagggatccaattcttcacatgtcaacgaccacccacaactcatccgctcccatctctgccctagactccaacagggcacgtgtgtgagcgtccattagtctgtgtgccatgtgcttgcagctagagtgcctaacgcactgagcccctgacttcgtgaacctaagtaggtctttgcttgccagtcatgtgcttctgccct

SEQ ID NO: 53359 - DNA, 461 bp, Zea Mays
gtgatggtcttcattttaagatttaccaggtctatgcagaggccagtagtcctcatgtagtgaatacagcttgggcaatgttggctttaatttatgctggacaggtagacattccacacattgttacatttggagcatgatgagactgttatatgtaagatttatagttcatttatgtgcatgcaaaataggttcagcgagatccaacaccattgtatggtgctgcaaaagaactgatcaatatgcaacaagagtcaggcgagtttccccaacaagtaaggcttcatcttttaggcgtcaccatttggtagttgtaaggattatcttgcactttgatttgtcactaatcttagttggagcttctaaagattgaaatgctttatttcaacctctgtgcaaagcatgcacgcactgaactacagttgaatattatgagatagaaattctatagtataattcct

SEQ ID NO: 53360 - DNA, 580 bp, Zea Mays
gaaaaaataatgatatatatcattggaaatatgtagatcaagctggtagattagaatctctttttatagatagattgggcaatatcaagaatgtgtaggtcgacagtatatggccgagtttggttgagttgatctaagtcactaatttaggcttaagtgaactaggagtatggccttatcttttgtaccagcaccaagtaactcacactagattagatcataatagattggatcacattagattgggtagggtctagattagattggatatatctagattagactagtttaagttagatagacctaccagggtaggatatatattattaggatatgttagaatcttttgagataggatggattatatggttaggtaggtcagaatctctgtcaggttaaaacagaggggttatgcaaccatcggatggttaaggtagttgtataaggccgagttggtcggtcattcttaacttagtggagagtgaattaagttaaaacatattttataggagtagagtcattttttcatcggtattgtccttcttgttaagcaactaacattagattagctccactttag

SEQ ID NO: 53361 - DNA, 721 bp, Zea Mays
gctagctcaacggaactcccaggcgggcgcgaactccatcaccggttctctaggatccacgctgacctctggaatggattgactaggctcatcctcgctaaaacccaggccacgacctcttctccttatcccctccaccagaatgtcacggacgccgcacgatagccgcgtgccacacgagccaccgggcttgtcgtggttgttgagatttctccgctcttggccttaccctaggactacttgtaggacctcgttcacccctgcatctctcatatcgcagagctatgccagctcaaactgccgcatcacgtagtcaacccatggccatcggatgggggttgcccagcgccaccgccatcccccatcacctgcgcagtcatcgggcatcaggacttgtgcatggggtgatatctggattttgccgccgctaatcctaggctatcgtgtgtggtggatgggacactggttcttgtgccccatcgtgaacaaagagagggaggaaagcacaccaccgcatctaaccatgggcagtgcccttcgcgccgcgctatctggtatgagacattccatcaaattcgcaagtgcctgaattttgttttgcgtgtttttaggggcgatttcgatcgccgggcagtagacattgatttccagccatggcaccgccgttcctcagtgagtgccgccgtggagttcgctgggaagtggaaaacacgtcttagcc

SEQ ID NO: 53362 - DNA, 625 bp, Zea Mays
gtcgatcagcatactgtgaccacgcccccagaagatgaaacattggcgagctagctgctcgagtgtgatgagcaaggtgtggcacagtccccacctcgtcgacgctctaggtcaggcaggaacaggcggagcgtccccgacctaaagaaccagccatcggtcgtcggtacaacttgcgtcgtggaggacgttttgaccctaacaaggaccgaagccaaagcccgcattcgctaggccctcggactttcgactgccacatcctccgagcgctagtgctgtaacggtatagggcacccacgaatatcgcaaactcaaaccctagcctacggttgggggattatccggttggcatgctaaacgagagaggcggaccacgacaactttataattcgaaacctccctctatatttggggattataggttggcatgccaaacgagagaggcggaccacaacaactttataattcgaaaccttcctctatatttggtagactcagccctagcgtggctagaaaacttaaggatgtatctagagctgggccgatcacaaagatttttttttcggaaattttcagagcacatacgtataccagaggaaactgggtttaggacagaaggtagagg

SEQ ID NO: 53363 - DNA, 432 bp, Zea Mays
ggtttgggggggaatggatagaggtcatcgactccgcgatctatggtggggattgatttagtggtaccgctttggggtgcggtgatccgtgccgttggttttgttgtttgcggctcggattagatcacgacactttgatttcggagccattggatctggatcgggcggctctgggcgcgtacccgttcggtatagattaaatctaatctgagccatcgaatgggaatcaaacggtcgtgggatcacgataccccttcggtggggcaagacttcataagagacccaacgctttacatatatcaacctgccatccctcgcctctttgcgctgggtctctggtttcttgcgccagggcccctactctttctggtatttgaggcgtagtccagaggcgtgggaaatcagttaaatgaaatagaaaatgagttttta

SEQ ID NO: 53364 - DNA, 570 bp, Zea Mays
ggcgatctctatcgccggcggcgatcctccggcgaccaagcagtgccctccttcctcctccctcgcggtgagctcctctctcctctgttcttcctccctcttccctctgctgtctgtgctcaactcaccatccaccatttggttcaatttccaattcttgtgaaaattatatgaatccaagtgcatggctaggttcctagatgcttgttgaatacccctacagattcctagctccctttgggagggtttcaccacctcaaataggcatttctccaaaaccctaatccaccgcacaccacgtgctcggtgaaatgcccaaaccaaccagacatgccccaatcaatcccaaatttttcaggcaccttcacaataccttcagtaacatattcggcaaatttcacgccaatccgatatcccaggcttcaattttacacaaatccctgtttctagcgatcgtttccgagccgagtgcccagattccattttctttgactaaaatcaaaccaagtgcacacttcactcatatttacccatgtaaacctattcgtgaagtatcggctcaattccaaa

SEQ ID NO: 53365 - DNA, 435 bp, Zea Mays
gcgatgagcaagagaggcaatatcatgagtatgatcgacatcgtcggatctgtgactagcaacgtgacgagtatgtctccaactatgtttgatcgacgaggaggcaaaatttcatcgaagttcactcttagctttaattataaataatagtgtttcatctattccattcatagacaattttgcagtagatgaggataaacatgactttcctcgtgttccagatgtcgtaaccatgccaccatcgcaatgggattctacgttgatgttttgaccttcggtaatcatatatttagcaagcttagctcaattgccataaaattagccaattgagcttctagaaaaaatagccaacttagctcgattctatttaaacttagttaatctatcagaattagacatgtatagtgcatgtgtagaccttgttattcttgtgaa

SEQ ID NO: 53366 - DNA, 412 bp, Zea Mays
ctgtttcctaaattaaccattgcgactgaaactattttcagccttggacaagtctgaacccaccacttttaactccattacccctcacgattccaaacggtaacagggaaccgaccataacataaattgctctcccaacatccttatacatctttgctgcagaaaccccagtccaaaaccccatggatttggtactacagacctccaaagtcgagcacaaattcacaaaaactcagtttgcagctaactgaaccagagttcagaccatacccaactgacagaggatgtttaggtgcagtttattctcagatttgtacagcactaagcctacctctccttagaaaacttgctcaccttactttggtctccaagttctctacagaaactacggcctaaaagaacatggattgat

SEQ ID NO: 53367 - DNA, 348 bp, Zea Mays
cactcatgaccctaggatccaggatccatggccgagatctgcccacgcccaagcccgatcctggtcgtcggattcaagatgggtgccctagattccaccatacccagatcgactcacgcacgccggatccgaatccaacgtcccaggttaactcagccgaagcggtgccgcgggctaatcctagccgtcccactgaatccgacggccgcgcgacattcttcctccccaagaccgagaacgacgcccgcgctatagctacagtgagcgccattgccggcgacgtcttacatggggaatcctagctccaaatcccgatccgacaggtgcaacacataattgatgtgaaag

SEQ ID NO: 53368 - DNA, 897 bp, Zea Mays
atggttttggctgagttgctatgcttgagtcgatcctgatcgcatgttgtcgatccgacggcccaaaaatcatcactccgacccaatacacctcacggcggcgcagcaatcctccatggcggagagatggccggaggtcggcgaagctacgcaaacgagccctaaatcctaatccacggtgtgcgatatgtaataaagggcatggcgaacacgggaaaagggttcctcaccgagatatgcgcagcccaggtcccccgcccgcggtgcagtgcggtccagcggcggagatcgggcaccgacgaggaattccgggctgacagaaacgtaatccgtccaaatgaagtcgcggacgtgatccgcgagacttgatgaagcccccagacccaacaccgaagccctgacgatgatgaactcgtggatctaagccggtggccctttggtggcggcaacacacaccgttgttggaggcagggccgtcaggcgaagaagcgtgtgtccgatgcgaggcgcaggttcagtgctccactccctcttcccttctccggccgcgggtggagctcatgcttgcttctagcagcgcccacgaagaactccaggtggacggtgggttttatagaggcgagccgtatgacgttccttgagatggcgcggtttggccagctccagaatccagggcgcgttttgctgccgattcaaaccacccgagctacgattctttgatcccattggttctacgcctagcgaagattgagacgagtctataggggaggatttcgcagagggtttctcaccgtgagtcgtgcacaccgaggctcggtccccgtcggggttgcggcatcgcggcaagaaattccccatggtccgaggctgcccctgtcaaattggggtcacgcacag

SEQ ID NO: 53369 - DNA, 399 bp, Zea Mays
atctgatcctgcaggtgctgtccttcagaggatttgggcccaaatggcagggctggattagggatatcctccaatctggcacgtcttcggtcctccttaatggtgttccaggcaaaactttccattgcaagcgtggggtaagacaaggagaccccctttcgcctcttttattcgttctagcggcagatctgcttcaaagtataatcaacaaagcgagacagcaaggccttctccagctgcccctcactgcgaactgtggtcaagatttcccaattgttcaatatgttaatgacactttattgattttggaagcttgccccatgcaactttttttcctcagagcagttctaaactcttttgctacctcgatggggctcaaagtgaattataataaatcaa

SEQ ID NO: 53370 - DNA, 895 bp, Zea Mays
gtggagggagcgatggtgcccagggcggtggcggattgcctcctccagcgggtccaaggcgcatcaaatagaatagctcgtcggccctgcatgtcagtggcgatagagacgacaaggccctagatctgcttgcttctcccacagctgcctcccaccatcaactacgacacgttcatcgtggcgattccgagcttgcttcttccgacactgcctcccgtcgtggctcacaaggacgaaaagaagcgtggcaaacaggtcggatgtgcacgctctagataattgggggagactttccctcacgtaaatatgcgggacgaatcgccagagaaatgtcgcagcaaaaaaaattgggaaggttgtgggatctgttggaggcggagaaaatggagcccccccccaaatgtttttccagtgagttttggtgtcgtttttatagttgctctaactatttaacatccctaaccactccttttctctctcacatgcacccctcctcacacacacatctaaggctattcctagtcatgattttatttgaattttgtttttatcaaatgacctgtcattcgacaagtacaatgatatgacaaggatttaataaagagagatagggagggttttatgtgaggcgagagcaagtaacgaaactctatactaggaatagcctaacccacttagagcaagtataataagaggttgtaagcaggctaaatgttgaggtgtgaggtggaggacagaagaggagaaacaagttgtaaaaactttgtgagagagataagtaaggtcctacattaataatgaaatgctaactagtatataaatgagctaatagcatctttaagagactagtgaaattattcatcatgcctaattttagctacttaacagaaaaaac

SEQ ID NO: 53371 - DNA, 482 bp, Zea Mays
gtttaaccattttttttataacgatgcatttatatttctggttcatttcagtaacaactactttattattatattttccatcaatatagcatacaagttattgtttactcaaatttcaacaaatgctccagtatcctctccacctgttccaaccccagataatcagcaacatgatcaggaaatacatgttcctactgatgatatcaaagtatcagaacaggtaagttttttcatacaaactttatatataaatcatgtattaaatatagcatacaagttattgtttactcaaatttcatatgtttccattacagattgtcagtggaaacgtttgttaaaaaaattcagttatggatgcccctatatttgacaagactccaaaatcccatgtttgttttcctttattcacggttattatattttcaattacaatttatgccagtaacaataatatatatgcatgtttttatttactttattca

SEQ ID NO: 53372 - DNA, 491 bp, Zea Mays
catgacaaggtaattatttatttctatcattaactattacacaaaaatattgtcgtgtgcctccgcaggtaacgatggtggggattacttcctcgtccccgtttacccatcgggtgagaattttccccaatttacatccccgttctctaatggaggaattctctgtgaggaatcaaggatcggagctcattgccttctctactcccgacttggaaattgatgggggagacggccaggaagcaaattccagcgtcgtgatgccgagattggttcacaacaccgcagactctgaaccagtaggagtcacacactgtctctaatagatcttttatatgcccatgtaaagtattgttttacaatgtagatgatactatttatagagtgaagtttataatggaggatgagaaaggagaagagacaacctaaatctatagttgccaaacggacggttcgacccgacatgacacgggctcgtcagatgtaagaaatca

SEQ ID NO: 53373 - DNA, 488 bp, Zea Mays
cgctttgtttctcttatcgggtagcactgctcgtattcaagttttggggccggaacacctggattgagggcgtcggccatggcgccgccgtgggtaaagcgcgcgggtcgccggtgttggccgtgagagtgggctaggagggatatcatgccgggctgtgatcggcaccgtccaataaccatcgcgtggtctggattgaacgcaagataacctttcggatattgattgtggattgttggatgggatcggacggtctagatccgatctcgcttcatagaatagccgtcgttggattggaatccgtgggtccgaaacgaataccgattcgttctaatcggacttctaatcccagccattgcgtgatgatctaacggtctacattcccacgtacccccttcaggctaggatagttgcaaaagagccctcgggtaatggggaaataaacccgccatccctgcgcgggggcccctctgtgtctagggattttt

SEQ ID NO: 53374 - DNA, 1881 bp, Zea Mays
ccaaaatcttgaacgggccaatgtagcgaggagatagtttacccttaaccttaaatcttttcatgcctctcatcggtgaaactttaaggtatacgaagtctcctacttcaaatatcaactctcttcttctattgtcagcatagcttttctgtctcggctgtgctgtcttcaaattctctctgataatctgtacttgcttttctgcttcttggagaatttctggaccaaatacttgactttctccggtctgattccaataaagcggtgttctacacttttgtccataaagtgcttcaaatggtgccattttcagacttgcctggtaactattgttatacgagatttctgcataaggcaaacttttatcccaacttctaccatgctttagagcgcaagctcttagcatatcttccaacacttggtttgttctttccgttttcccatctgtttgcggatggtatccatggactcatgtagtattttccaaaagcgcgaggtaaattgggttcctcgatccgatacgatcttctttggtactccatgcagacaaacaattcttgacatgtataactctgctaactgggctcctgagtaagttgtcttcacaggtataaagtgtgccactttagtcaacctttccattataacccatattgaatcatagccatcccgggtatggggttgtccaactatgaaatccatactgattttcttcccatttccattacggtactttgagaggttgtagcaatcctactggtctttggtgtttggttttaactcgttgacacacgtcacatagtgcaacatgagtagccacatctcttttcaaaccataccaccaatacttttccttaaggtcctggtacatcttagtacttccatggtgaatagaataagtcgaatcatgagcttctctaaaaataagttggccatcaaactcatgaccttctgcagccctttgaaggacacgatgttgtatcatgatatcttcacccattaaacgttttggtggaccctctttaacttttatgcctcttctaaatgacttcatatcatttcaaaacgggtgattggatggaagaaactgtcgatgacaatcaaagaatgggacccttttaccatgctccaatcgatatgcttgtgtgtcccccatgcatatgggacaacacagtcgacagtggacacaccagccagaccaaataccatatgcaggcaaatcatgaattgaccacaaatatacagcatgtaaggtaaattcatgttttcgatgaccatcataagcctttacccctacccatagctctttgaactcttcaatcaacggttgcatgaatacattgatcttctttccaggatgtttaggccctggaataataagggcaagaaatatgaacccttctttcatgcatttgttgggagggggttgtagggcatgatgaaaaccgaccaacaagagtatgaagtggaattgttgtcgtaaggagtgaaaccatcagtggacaagcctagatgaacactcctagcgtctcttgcaaattctgggtcaaaacgatccagagccttccaagcatcgccatctgatggatgcatcataatgtctgggtcttggctatcacggtctccttccttatgccacaacattagcttcacagtttctagggttaaaaacagacgtttaagacttggagtgatgggcatatatcgaagctgtttaactgccactttgtagcaaaagtagctccatcctcttttagtacctccacatatcttgatttaccgcatttctgacaatgggtggccgcttcatattccttccagaacaacatgccattatcttcgcacacatcaatcttcttatacttcatgccaagaccagac

SEQ ID NO: 53375 - DNA, 693 bp, Zea Mays
cactcaccaaccttaccaaatcgagcatcactcccaaccttagcatcaaagcctaaccccgatctgctagttctcctcttgaattgactgaccatcatgcctaactgggtctccctgctaggcacctagctcaagactaatcgaagatatgtgttttcctccttgatcctagtcttgtcatgtctgtaggactcatgcgtggactgcaaaacctcacaaagtgcacactacataggtgcagatgcactcactgagctagccttttcaagcaaggctatcctagcgatattctctactagctcagtcttcaagctaggacaagtactacacacacctaacaagctagacatagatcgaagctcatctagcaaggtggcatacttggtctgtaattttacgatgtttgacatgtgaagagtgcactcatcacattttgtcttgtctgacaccataacagaagctctaacagactcaggctccctaagtatgctcatacatggatttataatctctcctctcacgagcagcaagcctgagaaacttgtcctgactagccaaagcagcattctgctaatctaccttagcggcgagatcatcggcgaaatgtgatacattagaagtggattcgttgccgagatccttgtcgttgtcgcacaccgcatcctcaccaagagccatgttgcaaaggcctcc

SEQ ID NO: 53376 - DNA, 502 bp, Zea Mays
atcctcttggtaccgttcttctcctcgattggactcttcccgctgagtataaatatcgggcaccgtgaccaccccgttccatcaaaccaaagttggtgcggcgtgcaccaagagagttagcgtcgagacaagagagagagagagtgagagagggagggagggagagagggataggcatcgctgaagttgtattcccgcccacatcgtcgacgaggctctgagcgcaacccaaggttttagccgaagtatgaggaaggtgtacataacctagtggagtaaaaagggtcatcgaaggaagaggaattcctcaccgtggttttttcgccaaagtgggaccgcatcatatcatggacaacatcgtcggtgccttcatagtaggtgatatattcccacccgtcttcatcatgttctacgttctgtcgcacacatagccacatgtactatagcaaactgaagagattggaacgatgttcgtggtgatgcctcactgcgcggagtaggc

SEQ ID NO: 53377 - DNA, 971 bp, Zea Mays
tgaggagccaaggtctggaactagatgcaagatgcttttgtagcatccatgagttttcttatgagacgaagactaccggaaaggagcagtatcacaacaactttggttgttacagtttcgtgcctcggtctgaggtgagctacccagttcccacattttggaagaggtgggcgggctcctggatgcatgaatggttttacgtgaagaatgacctaagtcaagggaggatgtaagagggattattcaatggcctatatggtctcgcttcggcattaggaggccagccactgcccttgggaatgatatacaaacatgccaggcggctttcaatacagtgtgtacttacataggcacaagagacttggtccaggagcacattgcttacaaagtgtggccacttgcaaatgggtgggaaataccgaaggagactactgctggctctagtcaaggtggtttagtctacttgaagtataccttcaggtacaggagccaatttgatgaactgaatgatgtttgggtaaatgccatagaagcgactagtgacgagctgcttggagcatattcaaaggccgaagatgaagccatgacaaatgccttcggggctcgtggcaaaaagagattaaatagagtgttcaatgttatcgggtttgtgtacccagactactgttatccgtcgcggaaacaagggaaaatgaggaaagctgctacctcggtgacttctagtgcgtcgagataaaaaaggttaaagttttgagacgttggcccaggcgcattgaaacgaccgacgtgacgaagctaattgagggggccactcctattgcagagccaagtcgctctgtgtcagtcgaagctaggacaaaaccggctgaagagccaaaactggagaaggcgacagagcagttaaaagcattgagtccaccatgcacaatggaactgcagaagccatcaagcatccccgcaacaactccaag

SEQ ID NO: 53378 - DNA, 551 bp, Zea Mays
ctcggaggtcgtgcggtggagtggtgccggtgcaggatgctgaagggaatgtactgctactatgcatcgtgctgcgtcagggtaggccgcgcgcgtcaagccatctgactgtcagagccaaggaccgtaagtacatacctgcagtcacgcgggcctgcatacgggcacatggcgggcgcaggcgctggggagcattcgtctatggatctggtggtgttggtgatgggcaaccgaaactgtgttcacgtacgtccacgaagcctactaccaatagcatgcatataatcgttctgatgatgccaacgtgtgccattgcagcgccaccactgaacgccacgtgccgggaaccacgcagatgaatcgcgtgcgttccgctttagaaaactcagactgacaaggatgcaaatggcgactgacatcgttgggaacaaattaaaacttttgcagggattttggatcttcaaccctagtgaagtagtgataggcggaacgccggcctatcgcgctcgtgcacggccgccgttaaacctacctgaaatacaatggcttac

SEQ ID NO: 53379 - DNA, 300 bp, Zea Mays
gtgggtggcgcaagctgcaacccagcccccgagggtgtccaagtgagctctccttcctacacctccatggatgtccatgttgggtcgtctccacctcgatccaatgaggcagcgatgatgcatgcttctatgacttcgaacaaacaggtcgccttggaggtcggcgagctagatgcaagaaatctggtatctgctggtggggctgagctcacccctaacaacgttcttcaaattgttccggttgatcttcctccgtcaagccatgacataactccccctgacttgggtttaccgtcattc

SEQ ID NO: 53380 - DNA, 511 bp, Zea Mays
cttggtaggtttgttctcgtgtttccgtgactgtgcttatgagttatgacagtggaacggatgtattacgtgtgactatgaccaatgatttgctcaaacgattgagatggatgttttaattgattgatggcgattgtaataccagtcttgatgataagtggtgtggctgcgagtgatgggatgccatgtgttgctcggccatggatggaaatggaatcgtgacacctgactggagagccaaagatacaacttctcatcttctcctgtcatgtatgcgctgatgctgctatgatattaattttgagagtaatttgcagtgatcttgttgtttgaccttttttttcttgctttactgaaagcggtccactccatatgctcagaattcaatgccttacatgtagctagttgtctgattactttcgtccatgaatggtttccagttaattggttgagaacaggtactagccaaatacgaaaaaaaagttcatgtccagttggagctgctaatcac

SEQ ID NO: 53381 - DNA, 403 bp, Zea Mays
gtcgaatgcgacgcttcgtcgcacggcttcgacgcggtcctcatccaggagggccacccggtggcgttctttagtaggccgatagcgaacgacaccgcgccctcgctgcctatgagcgcaagctcatcggccttgtccaagccatctgcaactggtggccgtacctctagggccatcgcttcctcgtccagaccgatcactacaacttgaagtacctgctcgatcagcgcctcgcgacgatccctcaacatcattgggtgggcaagcttttgggcttcgacttcaccgtggagtacaagaacggggcggcgaacgtggtggccgacttgctctcccgtcgtgacacatcggaggaagggactgtattggtcctgtcgggcctgcgtttcgacttcatcacgcg

SEQ ID NO: 53382 - DNA, 324 bp, Zea Mays
gcacattactttgtttttggtggagaccatttatcggtcaaaaatccatgtgttagctttcgatattaatgaaaacccactctttgctcgtttacggacagaaatgctggccatatgtccattgatcatgagttagattctcctattacttaccccacacatgtttacttgacataaaccacattatttcatttatggtggagaccatttttcaataaaaaaatccataggtgttagccttcgatattaatgacacttatgctttggtcgttctcgaccaaaaatcctagccatatgcccattgaccgtgagtgagattatcct

SEQ ID NO: 53383 - DNA, 617 bp, Zea Mays
ctaatttcgagatcaaaatctaacccccacatctaatccaacgaaattgcaccacaaataccaaaaagaaaacaagatcacattgaactccttcttctctcttccttcttcctctcaccaatccacaaatggagaatcacagcaccaagaggaggaaccaaaggggcgagacggttgctaggattgggggggctagggtttcttagaagaggagggtggctgcaccttggggaagaagagaggggagggatggctgcaatggggagaagataggggaggacggctcctaggttaggggaaaagagagaaaagtctcccatacccttgatgcaaaaccggcgacccacaatcaaatcccctatccgcgcccggattcaaatgaacgaataaccaaatgatatcgtttaaacgagagcttcacatccgcggactccgatctcccaatgacacaaagcaaagaaagaaaagtttaaccttccttttaataatattgggtatcacactctacccccttaaaatgaatccgtcttcaaatttcaccgcttctatggaaacgacacaaggaagatcagcaaggataagaactcaccagaaacgaaaagttcagggtacttctg

SEQ ID NO: 53384 - DNA, 906 bp, Zea Mays
atttgggcttagtatgaattttctagggattaaacatgttttaataattattttcacattaaaaatcaattctgaaatgaatttcactacctctggtctgcgcgcatgaaatctggaaagcgcaggggcttgcgggtaaaatctcctagacacagagcgtccctggatatactgcggattaatttcctagtattccgagggttcttttgcaaataggatggccgaaggggtatcgtctgttgtgagccgcacgattagaaactagcgcgccagataagttgattcataactgtgaaccggtatcaaatgaaggccactggatccaggatccatgggccatgagtcaccacgtcaaactctcatcctgaccctagatcaacgatcccgcggcccggattgtacaaacgaagggggtacggtagcttctaatctccgccgccagatgcgaaaccaacggtcccaaagtcgccccaatcagaccggaccacggcggcgcaccaaccatccacggcggagcactcgcccttccggtgacccactgtcaacgccccagagctcccaaactaaaattaataggtcccgacgcaaactataaaggaaagggagctgggccatggccttacccgcactggaaggtagcagaggtcaccggctacggcgcggatggcttcacggcggcaccgaagtcgtcgacgagaaattcccaagcaccgcaacccaattcgtgcgcgcagtggccttggtttgcttcctggtacactgaagacgccccctggttcacaagtgaggtcccggcgacgccaaaccggctacacccgtgaaggtcgtcgcagatggttgacgcgaattctgcccgcgacggagtactgcgcggctacgaagagaggaagcagagagggggcgcac

SEQ ID NO: 53385 - DNA, 662 bp, Zea Mays
gtagccaaaacttacagacaaagcatagccaaactaagcgcacgttcaaaagcattgtaagtacgtgtatacaacctacagaaaaggcgggcaagtgaattgcatcgttcgactttgaaaaaaaaaagatcgtgggatggtggtgggccggttggaatttttcgcacgtaataaggcaagagcaagatcagcatatcgaccgaacgtccaaagcgacgatgcgctggtagcagcactctcgagacgcttgtagaatgcagatcgttcgtcatcaacttttatatattccttctcccagccgagagaaaaaataatactacttggggaagcttcgatcttgatgaaccggaccaatctcgtgatgacgtgggtgtggattccggaggttgctgaacacacgcgtcgcacttgtcgtcgcggccgggtcgactagagtacacgtgaaacgctatccgctgtggctttctcacggaatcgtcgctgtggccggccactgtactgtacgctaaaataagaatgtcttgcccgtaagcatggtttctctactacatgaagcacgcgttattattagcgcattatcggctgctaataacaggtcgcgactcgcgagtggttagccagacacgttagtgtatgcgtgatgatcgtatggagctggccac

SEQ ID NO: 53386 - DNA, 772 bp, Zea Mays
atgcatcaggcttgcatggagtgccgcctctcattgaaggatagctacaaacctcgtctgtactttgaggtcgcggttggggatgaatcggatgactcgactatctcgtagttatccatatcatatgatcctatatgctcatccttattattcatattatacaaaatgataatgcacgcatgattacactgagtacttgctaggagaaatagtgacctagggttgcaagaatttgaaatcgagccttgagcatctcgattgccctttcaacatccttctgtgcccccatctaggcagacaacaaacatctcctactttggagtctacgggagtagtatggtcttcatgaacaccatccgtcgacagtatatgccatcagcgaggtagcatccctagttgtacttgtgggcattcaccgtgaagttcacatttagtgctcccccttgaaagcacgacagtgaacaacggtgattggttgagcatgttcatatcattgtatcccgccaccccaaaaagcatgttagatccacaagtcgtacatgtcaatagtttcgagcatggtagttggggatccaatgacccctcttgtgaactgtcatcttcatcccataggatggctcttccacttccaattcatgcaatctaaactacctatcataccagaaaatctcctttcctacaccttagctaatagacgcctaaggtcatcaacaatgggatgacacatgtactctggcccaaaacattcgataacacctttatagaaatattt

SEQ ID NO: 53387 - DNA, 712 bp, Zea Mays
cagaaggtagctttcaggtcatagttacagaagagcaagaaggataaatgaaaatgttcttattccacaacaaaaatatcttttcttggtcagccaattatatgtttggagttggcaggagtattattgagcatgctctcaatgtcgacccaagataaaaccaagaaagcaaaagattcaaaagatgaccgatgataagaccaaaggtgcaaaagcagaagtcaaaaggctcatcagtgatggggtcaatagagaagttacttacctagagtggcttgttaatacagtaatggtgaagaaatcaaatgtgaggtggagaatgtgcattgactttatagatcttaataaagcttgtccaaaggatgagtttactatgcttatgatcgattctctcatagatgtaatagccacttaggagcttatgagcctattggattgctattctagatatcatcagatatggataaagaaagaagatgagcctaagactagcttcatagaacctaatggcatctattgttacctttggatgcttgaggggctaagaatgatggtggaagttagtcttcggctcatcttctttcttctcctaatgagctaaattctaatgggttagtcaaaagagccaatgacattatcctattgggaatcttaaagtccttagttggattgccgaagggaaagtgactcgataaaatagtcaaggtagtat

SEQ ID NO: 53388 - DNA, 624 bp, Zea Mays
ccaggtgcggcggctcaattttcgcctgttcctcacggcggcgatgattgcactaagcacttactagtgtgtcaggagactaaagatgtcagagcgcagggatgctgaagaggaattgccagaggctgaaacggagatgggccacagccgtcgtgtgcgccggcgcagtggacgttttccttctgatgtatggaccaagtgagtccttattctgtaatcgcataaaggggaaacagagaggaggaacagatgcttttgggaacatagaaaataggtatacttccggccgccaactccttatctccttccttcgtccttagaattcctggttagttacgtaggacgctaacatagtgtgtctgcttgaggccttaagccgaggttgtggcggcttttacaggcgcgataaagggcgtaggtctgttaacggccaatccaacgtaatctcaacaaactcacacggattgtaataaaaaatcccgatggccaactccattgcagcggcggtaagaagaggccggcgcggataagccactggcggatagaccctacctggcgatgtccggcgtctacatcgcagaggccctcaagccatgaacgcacgcacgcacatctcctctcctg

SEQ ID NO: 53389 - DNA, 515 bp, Zea Mays
agttagtccagaggtgcgaagcctgccagtacttgtcgaaacagcaacatctaccagcgcagcaactgcaaaccatacccgtaacttggccgttcgcatgctggggattggatatgattgggcctttcaagaaagctcaaggaggatacactcttgtactggttgccatcgacaaattcactaaatggatagagttcaaacccattgcttctctgacctcagctaaggcagtggaattcatacaagacataatattcaggtttggaataccaaatagcatcataaccgacctaggatccaacttcacaagttcagagttcttcgatttctgtgagcaaaagagcattcagatcaaatatgcctcagtggcgcacccaagagccaacgagcaggtagaaagagccaacaggatgatattggaggcgctcagaaagaaagtcttcgacaagaatgaaaagttcgcaggaaagtggatcagagagctgccgtatgttgtttggagcctgagaactcaa

SEQ ID NO: 53390 - DNA, 438 bp, Zea Mays
aacttcatcatagataataggggagaaatggtcaggaccctagatgtctagcccttctcaactaaagacctcgttgacattgtcaagacctttggtggactctgactcgacatccctcaaaagtgcaacttaggatggaccttgtcaggacccatccacattgagtttgtggggatgacaaatccttcaagagattcattccatgacctcctcccatcgaactctggctatggccttagcgccccatccagtggtgccagtcctgacccctgcaaaggaatgtttcatagctagcactctaaggcccgctcctcgaatgctgacggtctagagggaatccaatcagcgtgacaatctgcatggtggcgtcctaccacactacccctgggttcaaaaaagagtcaccgcgagcccgaagtcccgcccagggttgtaatt

SEQ ID NO: 53391 - DNA, 880 bp, Zea Mays
aatgtaactgtggaatctttgagaggaatactgagccacttctgagaccagtgtataagcattgggctatgcttctaaagccaatccattcccacaatgagatcataagtggataactgaagcacccatagtgttgaagtaaaagatatgccactaatggaccatgaagcatttacaatctactgattataggataggtgtgacccattggctacttgaacctgtaaaggtttgtccatagcagcgacactcacacgttagcagccacatctgcactaatgaaggaatgggaactgcctgaatcaagcagtgctaaaatgtcaataccatcgatgtaatccacaaacttcattgtccgaggagcttcagtcccctccatagcctcctgagacactcttaccatgttcagctcaggttcatcttcttccattgtcgaacaagggtcagattcttcctcagttacttgggccatctgccacaactcctccaccacatgtaattgaactgtttcagcacacttatgatctatggaatactgtaaaccacatttataacaaagacctttcgctttacgatatgcatacagtgaagcaattctgtcctttgtagaagaactcttgttacccattgttttatcctcaggcttgcccaaactcagctgtctgacattcttagtgttctgttgctgaaccatggggtgtcgagtaggcctggtaatagttgaagcatctgaccagcgataatccctctttttcagcatggtatttgcctcctcctgcaattgagcaagaacaacagcagtatccaaatcttgtggtctttgaagcatgacaacgactttaatatcatccctaagaccatcgacaaatttcaatgtata

SEQ ID NO: 53392 - DNA, 1108 bp, Zea Mays
gtgcatacgtgattcaagaccaagtcgttaaggacctcggggctagtagggggccttaaagtttaatggatgtcgactattttagggccaagccacccccaaacacatgtattattttgaatacactaggacacgaggggccctaggtagttaggctcatgaatgttccaagacacgaagggctcaaggacttactcccacgaactctctaggcataagtagctcgaggttgtactctcatgagtgccctaggacacgagggattctaagggcctagatcactaatcattgccctaagaaataaggctctttagggacaacaccatgagcctcgatcacaagagtgccctagggtttgatgggccccaagtttctctatgtgatcttacatggagcaagcacaacacccacacacaaatgtgatccattttgtagcagcacataatctccatgcatgctatagaagagcacacaaatctctagccatcgaggaggtggcaaccttcaagagtaataagcaccatcggctcgcaatgcaaacatctagtgcccctcgttgcaatcactcaatgcaatacattagaattcactcactcaccaataaacatgtccaccactaattacaagtgagttagaggcccaaaagtaagcacaacacttgggaaaacatgtcctcaaggtgttcaaccagtccaaagggtaggacaccctctaatgttgcatgagaggactcatgtttagcctttcccaacgatactatgcatcatggtggtctgatcgcctacctgatggtttgatcgaccgaacccccactaatcagtgatcactcatgtgctccaataactccctgccatagcaggacccatcctatagccacactacctagtggacccaccgagccttcccgcagtccgactacccaacacatttaggccacaaaatggtcactagagggcatttggttccccacactaaaatttagtctctgccatattaaatgtttggatgttagttaaaagtattaaatatatccaaaattacaaaactaattccatagatgaggacgaaatgacaagacgaatctattaaaactatttagtccatgttt

SEQ ID NO: 53393 - DNA, 608 bp, Zea Mays
tgaggggcctggtgggggcaccacgttgggggaagagaaggcgttaacgcaacgatagtcactagcgtaggaggatgcgccgaagctgcatacgctgggacggcggcggctcgcacgggcttatcagggaccaacactatggcgtcgtggacatcatgacgatcgttgaggcagaggttgatggaataagtcttgtaggcgttgtgaaggacatcacgtggtgaacaacagtttggacagcagctttgctgcagccttgactgtgctttagcatctaaggacagcatgggggactgcagtttggacagcagctttgctgcagcctcaactgtgctttagcatctaaggatagcatggaggactgcagtttggatagcagctttgctgcaaccttgactgtgctttagcatctaaggacaacatgtggaggactgcagtttggacagcagttaggacaacaaccctgctgcagttttttactgtgctttagcatgtaaggacaacatctaggatagacctttaacatttgtagttcagcccctcaggctataaactgtaatcccaacccttagaagggcatgacattgtgtagtgtttgaagaagtaga

SEQ ID NO: 53394 - DNA, 556 bp, Zea Mays
gtgagctagtgtcgtcgtcactctctatctgtctgatgggcgttgttatgaaacaacggcgtatgacggtatcaacacataaactaatgcctgcatctaaggttagatgattagatacaaagtacaaaggcccactatagtacaccatggtttggggacctctgcccatgattttatatactataggtttctctgtcaaacgaaggcaatcaagcatgttcatgacaatctgtttgaactgataaataaacaagaataaaacagctcccccacacaaatgtttttgaactaatcaagcatctggcatagtataggcatgctcacgtgtacctttaaaaaggaacctacttgttaccccccaatactacataagtttccctgtgcaagaatctagcataatctgctacttgcatccctatttagcttacccatacttaagcatcatcgatacaacaacccatggcaatctgctactccaaggtttagacagactatcaagcatacagagacatggcagtgccagacttgaagtgaagtaatgatggataggttatat

SEQ ID NO: 53395 - DNA, 427 bp, Zea Mays
ttagggaatagatgtcatcttagggatgaattggctagataagtatcaggcagttatcagttgtgataagaggacaatcaagttggtgtccccactaggagaggaagtggtgaccgaattagtcccgcctgagctgaggaaaggaagttgttatcagatggttgttgatagcagtgaagcagacccaattgagagtatcaaggttgtgtccgagttcccagatgtgtttccaaaggacttaccaggtatgccaccagagcggaaagttgaatttgccatagagcttcttcctggaactgcccccatctttaagagagcttacagagtatctagaccagagttggtcgagcttaagaagcagattgatgagctgtcagagaaaggttacattcggccaagcacctcgccttgggccgcccctgtaaca

SEQ ID NO: 53396 - DNA, 428 bp, Zea Mays
gcaggagtggggcgaagaaatacgggttgtttgaatggatatgaaggtgggcgaggtgaagaacgattcggattgaaaggtcagattaccaaccttgttctcttttcaggtccttgagttgatttttcacccgcatatccctttgatttcccgtgtcccacatctttagctttgactgccagtgctgtactgacagccctgctgtaggtgaggtccaaacatgttgccatcttccactgaagtctgtcatttagtccccgcataaaacaattcttctttttcagatctatatccacgtgttcaatggtgtactgggagaggtgattgaatttattgagatactgcatcacagtatctcccccttgcttcagtcggaggaactcttatagtttcatttggagcactccctctggaacataatgttcccg

SEQ ID NO: 53397 - DNA, 1131 bp, Zea Mays
agagtgttcccatgatttagacaacatatatctagtgtctgtccaaccagccaaagccatgtaacttcatttctttgattcctccaacttagttttctgctttagcacaactcttgcttccaaaagcaccttttccacgttacgacttcttaatcctgctaaggtgctcagaatcctttctaagggaatttagaacttatctaagtatatgaaccactcattgtatactttatccaaaatatacccctttagcctttggttgagctatatgtgcattgtttatcagaaattgattcttatgaacctgcatactcatacttagcaaaattgttagcccatagtgttgtgttggtcatcaatcaccaaaacacttatagaaatggctcaaggcacattttcctttcaacccgttaatgactcttcttctcttctcgctcccttccacctcctccggttggacacttgtggtggtgctcgtcggggccacgataccggttgggctaacgtggcataggccatggtggctcatcggtcgagcactctctccctttccctatttaatctccatcggctccccactagccctagcctctttctagctaccattgccaccgtcaaagcttccttcgtcgaccgcatagtgtgtctccactacctctctcttcgattggctactcattgtgcttccccttgatcacccctatctttccactgtgctcccaacccttttcctctaatagaccgcaccaccgcaggtgtccctatccaccgctaagcttcccctcgatgacaactaccttccagcctctaacagttttatccattgttgtggtaagcttccctgggtaacgctcgtgccctcctttcctagtccatcttgtgtccttatccccctagccacccctttgcccgcgtggacatcatcacaccatgtccaatgcgcgcgtcgttgatggccttgaccagacgagtcaagttgacccctgttgggttctgacacgtggatccaaacactcaggatcaattaggacaaccatgcgcaacaaaatagggagctaaggttcccaatgtcttggcaagcgtgtcccatcctggttccacacatgggtatttatgggacaaccaaggggc

SEQ ID NO: 53398 - DNA, 432 bp, Zea Mays
cttggagcgtactcgagagcagaagaggaggctatgacagccgccttcggcgctcgcggaaaaagaggctgaatagggtgttcgacgttattgtgtttgtttacccagattactactttcttgtccaaagacaagggagaaaaaggaaagtcgttgcttcggcatcttgaggtgcgccgaaggcgaagaaactcaaggtcttgacacgtagaccgaagcccatcgggacgggcgatgtgccgaagttaattaaaagaacagatattgccccctagctacagagacggctcctgcaatgacgatcgaagctattgcagacctggccaaagagccggaattggagaaggcggcagagcagccaaaggtgctggtgatagtgttgctgaagctatcagctactacaaccacaactttgaggaagaggaggatgac

SEQ ID NO: 53399 - DNA, 643 bp, Zea Mays
gaaggcagttcacatatacatgtgtcaacaactataccgggacaaacagattgaataatatgcataaactatgcaaaaaatatgctgacgcgcagatcacgtgggacgactttataagtttgttcagtgtttacgacatcataagaacatgaaacgtaacatcataaaccattcaatatcgagatgttagaccatttatactattgtatatacgtgaccagtgtgtgcgtaaatcttggttggtttgagattaggaaagtagtattgtaaaatcgcgataaatgtgggacagttaccgctttattctcaatgttgcataaaagatgtgtaagatttgtggtagttaccgtatatcttgctttgtccattttagcgtaaaactgatacaaaagaagcgtaaaattgtgtataatttagcgtaaactatagttgactttataatgggtaagaggtccactgttcggggcataaaagtcacacacaatttggaaaagttgttgtgtatctcgcttcgcacaaggttgtcgtaaaacacaaaaaaatatcgtaaattggcgtaaaacgcatcaagaatttcgtaaattgacataaaatacatcaagaattttgtaaattgatgtaaaatgcataaagaagtattttg

SEQ ID NO: 53400 - DNA, 462 bp, Zea Mays
cgactaaatgctaagatggtaggagagaagaagagagggagaaaaaaacgaattgtaaatttacagtcggtccgatacaagaatcaagaaggtttgcgagaaaggtgaggtcctacattaatactgaatagctaaccaatatacggatgcctaaatggaaggctacaataatctttacagccaacggttgacactattattaaccttgctctaaggccaaacctagtggagcgtgtaatgggcatgtaaaatactgttttgtactataaactgcactgtttatagagtggggtttaaaataaggagctagatatggagttagatagggagaatgccgaaggtggtctaatcccatctccaagcattccccacgtatatagaacgtttctaaccagctagacatggacgctattttattatatttccctaaaagatactccctccatatatagaacgtttcta

SEQ ID NO: 53401 - DNA, 693 bp, Zea Mays
ccccccatcggcgacaccgacgaacggcgacatgcatacccatccgaagaaccagtgctaacgagcttcccccccccccccccgccggaccatgccacaccctgttactcgctccgcgactagaggagtcaattttctacggttgacatacgcagaacccgcccacggttcacccgcggggtaaacacatcatccatcaccgacgagaaattatgggagatcccgaacccggcaccccaattctgtgctacgagtcgaaaaggagactaaagcgaacaaggagaacaagtttttaccagctatagggggacggtggtgtttagccacgacgcagggtggatttggtggcggagttccacaccgacgtgcaattccggctttcacccggcagcgtccatgacgagaccttgtacatagtcgatgcttccccaggcgaacgttcccaaccacccaggggtctccaaacggtggcggagtcgaagagcgacgacggtggcgtttcctctctcaacgatccgcggtggagctgaatttgttcgtagccctgactcgatccaggaaggcgatgtgcgatgggatcgtgcaccggggttttatgcgcgccccacgacccgcccgcacgattaagtcagctagagcacgtcgcgatttcggcaacgatcgtggagggtcggtgagagctggagatcatgc

SEQ ID NO: 53402 - DNA, 415 bp, Zea Mays
atacatgaattgtcttatcagacgaaggcagtggggaaggaacaatatcacaacaattttggttgctattccttcgtgtaccgctctgatgcaagacgccatgttcccatgtttcgcaagaaatggacaggatcttggatgctatgttaagaatgatttggttgagagggaggatgtaaaagatataattcagcgtccaatacgatctcgcttcggcatccgaaggccatcgatcgtgaatagtgataaatctcaagcatgcctggtagccttcaacactgtgtgcagctacattggtactagagacttggtccaagaacatatagatttcaaagtatggccccttgttaacaaatgggaaatgccgaaggagaccactgatagctcaagcaaaggtgacctggtttatttgaaa

SEQ ID NO: 53403 - DNA, 587 bp, Zea Mays
tatatattacatgtttatatatactatgtgttgtgctggttttgcacggcatgtcagtgcatgcccggcataccccgtggatccgccactgatttgtgatatacatcttgtattcaatgacaccaactagttttacgaagaaactctcatgccagaggagagagggaaatgagatttttataaaatttatgctactgttggatatatgagacggatgttctaaattaaaatgtgcatgtgagcatcgtataagtatatgatatgttgcattgcaacagatcatgtttatctattgttcatagagtatagtttaaaagagtttgctagcaccgctttgggtgatatttttcattctcatgctttgaaggttaattacgattttatttcctttaacttgattccattcttgctaaggtcaacacacattgttttttcaagaaaagagagctttattaattacttctctatatttcagctgtctaaattttagaatgattttagttgacactcttaccaccaatcaatgtatgtaaattataacctttatgttttattatttgtctttatattgtgatatatcaattttt

SEQ ID NO: 53404 - DNA, 1307 bp, Zea Mays
gttgatttggcaaaaaactgaggggctcttaatgatgagtgccacaacgaaagggtatggacgtgatcaagccattcgatcaaattttattggttgggattaattcccgttgtgaccgaaccggtaagtgacccgagacgtccgatcgatgatcgacggttacggattaaaattcatgggatccgattctggacttggatgcgctacgtggatcaacgacaaccattaaatgaggccaaaggggtatgtcgatctaatcatagccgtccatcaaccgttcgacggctaacacgcgactttatccctagtcgaactcctgcggtgcttacgcctacgcggcagtgatcttcaccgaagacaggaatccaaggaccctaggccctaatctcagggcgcagagatgcacacgatgccgagactctagcaaaaccaaccagggccctattactaagagtaggaacatgggataacctcacccacacacttagcgactccacggtggcgccaatattttggtgagcaattcacgtgactaggacgatcacctacctataatacccagtgctatgcaacataggaagtcaggtgaaggatatgatgatttctcaccagcggtgatgtagtggtgaggtcgaatcgtgtggtggacgaatcctcgacagagatttgcttcatgagcaatctgccatgagtagggcgactccagcctcgagtagtcaccaaaccgactttaatggctctagacgatgaccttcaggcgctttctcaaagctgactttgtcgacaagctaggaatggcttacgatggattttgtcctttctgtccgtcggttcaccaccgacaattcttgttccattgagttagacccctctagtttttccgtgaaggatctggccaccaggacccctctcgcccgctatgtcagcgccgggcccctctacacgctctggcattcttccactggcgcatctccaccacccgtcctggtctccaccaccacctccacaacttagcatcgtcatctcgaccacctaggaactgacgtcatgaccaagctttccagcagtctaaattcttcttgtagtaggggacattttgagggtctgtgtcatgcttgtcagtaaggccgacatactcgtctcccatttactacctcttcttctcatgctgagcaggcttttgagctggttcattgtgatctctggacctcccctgtactcagtctttctggatataaatactatttggtgattttggatgattttcccattttctctagacttttcctcttcggttgaagtctgac

SEQ ID NO: 53405 - DNA, 1425 bp, Zea Mays
ggaaaaagaaaaagaaaaggtaacgcccgaattttggcgagtaaagaaaagaaaaaattcaactgcaaaaaattcggggcgttacatctgctgatcgagagatgaatctattcaaggcatcgagccttcctgttagcttttgcacgtcgcgggctgactgcggtggtgtcatgtctagtatagcttgtatcttggccgggttcgcctctatgcctctgtgtgttactaagtaacccaatattctgcattgttggatgccaaataagcatttttctgggtttaggtgaagtttgactttcacgcacattagcgaacatttccgtgaggtcagagaggtgatcttctttatttcttcatgagacgactatgtcatcgacgtacgtgaaaatgttgcaacaatctagctctctagaattgtcttggttagccttgaaaatgtggagccagtgtttttcaggccttcgggcatacgcacgaagcagtatgtgccaaagggtgtgatgaagcttgttttttccttgtcttcttccttcatgtagatttgaatactctgagaagcaatctagcaagacattactgtgcatcctgccgctgagtcgataatcttgtctattcttggtagggagaagttgtacatcgggcaggctttgttaaggctggtgaagtctatacacattttccatttttttgtttttcttctgcaccattacaactttggcgagtcaggttgggtagtcaattagttcgatgaattttgctttcaacaggcggagaacttctgccttcgctgcttctgtcttctcatcggacatcttgcgcaatttttgctttttggggtgtattgttgggtcggtgcttagaatgtgtttgatgattgtgcgactaacgccgatgaggtctagggcagaccatgtgaataaatccttgttgtggtttaaataagacaagagcttttcttcttctgcttcgtcgaggtcttcactgatcaagaccgtttgattggtggttgccacatcgagggtggacttttttggccccttcgttgctctataactgggccctgattatctcctctttgaccgggcgagggctcttgggtcttcgttcttggtggtgagaccgtgtatgttgcgctgggcgaggacgaagtctctctcaatgtttctagcaacctgctggtccccgtacacgattatcatgccctgagggctcatgatcttcatgcacaagtataggtcgtgtatagctgcctcgagttcgtttatcgatcctcgtaccatgatgacactgtatgggggaccatatcaactatgtcgaaggtgatatgctcatttcttgtgtttggggctgtgcaacgcgatagtggcaattctatattgccaagtggaaaggtcccttttcctctaaagccatagagggttgtct

SEQ ID NO: 53406 - DNA, 803 bp, Zea Mays
gtagaagcaagaacatacttgcctcgcctcgtccggtggagtaaaggacatgtgcgtatggacatgtgcgtgaatggttcgccgaatttgaggtccaagccctgcatgattgctcgattgcttcttcttcgtcttcaatctcgtcgccccggctcgtgtgcctactcatcgtgtaggtcttttacgttgtcgtcaagaacgagctggtgctgaatgtcgctgtcatcttctctgccctatcgttagcaagaatgaatgtacagccatcttcctctcatcatgtttttcataatgctctgtctactctgttgagacatggttttactagttcaaattctattcttaattagcatgatgtgctatttagatatgttcactttctgtacatgtttgccgtttaccgttatggtcatgttttattttcggattaaattaaaatctaaaatcctaattttttcaacaccaccaacatcaacttagctttagctccggacaaaaaccaggattaattggaaatgacattgggcttttgagttttgacaggcaacaatattctgctcaattattcatgtgagaacctccaggtggttcggtgaacgatggtttcgttgagaagataatgctcaatgtaatccaaattaactttgacatactcgcagcaacgtcgtgtgcaggcttttgccctttggtatgtggccatgggtaacaaggacaaagggtgttttagctagctagctcgatcagagaagggccgggtaagcatgaatcggtgcttacctgcacgtactgcacagcaaaatccg

SEQ ID NO: 53407 - DNA, 620 bp, Zea Mays
cttgtcagccagagcaaggagtgtggtgacgtcgtccacatcgtgtgtggccaacttctctagcatcttctcatcatgtaccccctggcggaaagcagtgatgatggaagcatccgagatatgggggattgtcccacgtaccttggtgaagcgggaaatgaacgctcggagggtctccccgggctcctgcctcactccatggaggtgtgcctccacttcatgccgctggtaagcgctcgcgaagtttgccatgaaccgcgcacagagctcttcccaggagcagatggatcctagggcttggttcatgagccaagtccgggctggtccagacagggccacatggaagtaggttgccaatacggcggtgtctccacccgctgtcgtaatggcggtgacataaacctgcaggaattgtgacgggtttgttgtaccatcgtatttttctggcagatgtggccgaaacttgggcggccatgtcgccacgcggaggtggtccgctagggcagcgcaacccactccagccaacgggatgctggtctggaatcgagcatcccctggggcctgcagcgcgaccgctgcagaatcttgctcgagattgccacagcgctcacgcgtcttct

SEQ ID NO: 53408 - DNA, 859 bp, Zea Mays
tgagacttatattacaagcaccttggtgcctgtagtaggggtttacaagcatggtgagataggggaagtccccaagtccctagagatgattgaggcaagtgccaatatctaagacaaagtgggaaagcaagaactcatctacgtatgtcgctctatttagttgttgatcgattcccccattcatggagggtctcctgccctattgatgcgcctatgggagcacccttggtgaagccgggtcttgtattcgaaggagagatgccctgactcctgacatgacggtggaccgtgcagtagattcgcgcctgctagcttcccgtagagagttgaggtcagggcatcgtccgtacgctcgagctctctagggagaggccgccacgccgtagtggttgtaacagcgccgggatatgggccaagggccgcttacggggtacgtcatcatcctggcgcgcgatgacgtcgagattctctatagcattcatcgagataagagcctttgtttagttgatgcagaagccttcccgaggcgctagccgagtcatctctcaatgtgcgctacagtcgggcagagtggctgtctacgggatctgtggcgtagtcattgatcgaggctgagctcgggcgaggcggagagcttgtccgagggctgagcttggatcgggcgaggtggagaccccgaagactcgtccacccagcttgtcgtatttatgcatcccattagatggtgccaggtggcgtgcgcacactgttgggcataatcgtaatcataccgctatgcttagacgtgatcactgtcttatccaccactgtgctcctctgccacagcgcggtttggcacatgcattaaatgagcctgtcc

SEQ ID NO: 53409 - DNA, 553 bp, Zea Mays
tagaggatatttattcttgattgtcacttgatttaaagcacgataatccacacatagcctcttgcttttatccttcttctcaacaaacaataccaggaaagcccaaggagacctgctaggcctaatgaaacccttagccagcagatcgtccaattgctgcttcaattcaacctgctcctttggagccatccgatacgaggccttatgaataggctgcgtacccagaatcagtttgatttcaaaagctgcatcacgctccggtggaatgcctggaagctccgctggaaacacgtcggcataatcacacaccacacggatgtcctgcacccgcaaggcagtctcactctccaccaccatggagaaaaagattcctgacttccttgactgacgatccggaagtaattgagacaacaaggatagagtgaactttggagaacttcccaagaataccacctccctacccaacgacgcctgcaataacactgtcttccaaaaacaggatataactatgcgatactgagttaaccaatccatacccaagataacatcaaat

SEQ ID NO: 53410 - DNA, 382 bp, Zea Mays
gtaaagtttcgaatgttggtgctccagtggcatactcggcttggaacctacctcctcccaaagctttcaccctttttgtgtgtcaaatccgcctgtgactgacagcaatttgggccttagagtgcgaccctctgctgaggaagtcagtactttggttgcttcgctcggggcgattcctgatgatgaacggcaggtttattttgaagtgcctctgaaccccagtgatgctgacataaatgacatgcttgatctattagctgaggattcgtccgacgctgctcctgatggtaccttagcagtggtgccccttccagaggttgatacaactttggatgtcccgaaacctgtcagcactcgtccgaggcgccctagccgaaccagt

SEQ ID NO: 53411 - DNA, 437 bp, Zea Mays
agcaagcatttacacttttgctgatacgcttgcattgtcgacattggccaagaaaattaatcgatgtgctcttcccctgtattgcggttaatcccctcccagcctgggtatgtcatatctaccaacacacgcgaggacggcgaggcttgggagcggcgagaggacgacgagaacggcaggcgatggaatggtgctacaggcgtcaagggctcaagaggggtgacggtaggagggaatggctaggcggacagactcggcaaaaatacctaacaatctggatgggatggtgagcaggatacaatagcgagcaagaaagagagtccgttggatcggattttaatcctaatttttctgtttttgcgtatactaatctatttagctaggtttttggagttgctctaacacttactctttagactaactccagctgatctcga

SEQ ID NO: 53412 - DNA, 502 bp, Zea Mays
gtgacataagtataatctaacacttcaactctaagtcaggttcagaaggtgtctaatagctagcccttgtgtggagttataagatagcaatgcttggaggcaacaccctagtagtggctaagccatggtatataccaatcactccatggtgtgtcatctcttcttcaacctggtatgtcatcctctctatgccactacctagctagggtctaatagtagttgcaccaccccttgcaccaataactagagaagcattagaattccctatacgcatgatgggttagccctatcaggcgtttgcgggaagaattgtcccacatatagacctcattggtctataaagggcttggggccactattagtgtctaaggaaaggaataccattggatcctaacaaaacatcttttaagactccattagcaaaagatagacccaaactaggcttggtggaagctagcatagaattcttggtgccctccacctagggccaagccactaactg

SEQ ID NO: 53413 - DNA, 679 bp, Zea Mays
ctttatggaggaggagcatgacaatgctgattggggtgatcccgagccgaccccactagctatgtatcaacagatgtcccgctttgctcactcagcttttgttgcctcttttgagccctgatatgttggacacgctttgtctgatcctaactgggtcaatgctatgcttgaggagcatgaaaattttgagagaaatcaggtttgggttttgatgccacctccttcaaactaccatcccctaggtacaaaatgggttttcaaaaacaaagagagtgaggatgggttgatagtgagaaacaaggtgaggttggtagcccaagggttttgccagaaatagggtattgactatgaggagacctttgcccctgttgcccatttagaggccattaggatccttttagcatttgctgcttcaaagggttttaagctttttgaatggatgttaaaagtgcctttttgaatgggtatatagaggaagaaatctatgtgatacagccccctggttttgagagttccaagtttccaaaccatgtttataaattgcaaaaaactttgtatggtttgaaacaagagcttaaagcctggtaggagcgattgaaatcttatttttttgcttttaaagggttttaaaatgggctctatggacaaaactctttacctactcaggcatgacagcaat

SEQ ID NO: 53414 - DNA, 739 bp, Zea Mays
tgtccacggagacagcgggcaccacgggcaatcgaacgcgttcccggtgatctaaggggtcctagtccaattagcggggttggcgagcatcaggagaacctaaggatgctgaaataggagagcagggagcatgaatagacctggaattcgctgaccacggtaagggatctaccatggcggcggaaaacaaaattgagggaactgggaaattggagagtggtagtggctaatcggaggcatgagcgggtgctcaggcttggtgatgacctaacgcagcagaacatgtcgtcaatttatagcggcgctaagtggtggccagtgaatttggtttggcgcggtggcggccggagagtgaggagagtactatcgcgagagctcagtggcatctaccgtggcggcctcaccggtgacgaaccagtagtagagagtggtttacggtgactcactacgatggggtaaggcgtcgaggcacgtagcctggccggataacggcgaacgtcggtgatgctagcgcgactatcactaaacgcacacgagtagctctttcttgcttgatctctcttttgtggcacttgtgaggctttgatgtgtatataagtgttgctctagtagataggagtgaatacccaactcttgtgtatgaaatggatgaatgaatgcttgtgaatgggctggttgggtggcttttattgccctcaaccacccatatagccgttggggcgcatctgccgaaaattgc

SEQ ID NO: 53415 - DNA, 1478 bp, Zea Mays
ggaaatcctcgtcccgcccgaggtcccctcttcacggaacaacatttttcacctcgcccgtctcgagcaaggaggacaaccccaagcccgcccttagccagaggccgcgggaaccacagggacatgagcatttaatgcgtttacctaccaaacgtgacaccgcagtcaagcaggagcgacaagaccacagtcccgtccaccttcaccaactacgatgacgcatgcccgggaataacgactactgcccccatgctgtctaccgagttcgaacaactccagatgggacacacgtacgacagagaacggtctgaccctcggaggaaactctgcctcacctgaagccgccctcatcctcggagcaaactctgccttgttcgagctcggcctcgaccacctgcccaccctcgcaaatcccgcagaaggccactccttcaactgttccctgcacaactgcaaaccctagagaaggctcgaccgtggcatcggggagactttcgcctcacccgagcgtggctttggccttgatagtatcgaaaaaaggacgcccgacgtcaccagaagctacaaagctgacgtcggttactctacgtattcacaagagcgttttgccatacttaccactgctccaactactacgactcggacagctcctccatcggtcaggcttgatacatgcctgagcctagaccttggccttggctctctgctcaatcaaagatgcaaatacaggaaccagacatccccttcccggctcaagtcagcagcaggtacggggcccatatcaatggccatgctggctacaagggctcggacgcgccttctccccccatatgcgacaagccccaacgctcccgataaccctccttggagctatagagtagcacagagctcagagaagagggacacttcacgatttttacctccacgtggatattgacacttgcctcaatcaatgccagggacttgggatctttttcttgtcccggccagcttgtattccctattggaagcacttaggtgcaagtaatataagtgtcatcatcctctgctggaagtagggctttcttttgcccaaaccaggataaagaattgtgtctacttctagcacccatctgagctaggacacgcaacactaattcactagtcagtaggatcctcgagtcaaaacaccgacatgtgtagtctacagtataagggctagtttaacaatcctattttttcaagagattttcaatttatcaagaaaaatagggttgccaaactagccatatacacgaatgagcaccacctaagtccatttctaagcacactacctccgtaaatctatttctacacttgccttaagttgttgtttttaaaaattgtactgaacttataaaaaagaataccaaaatttatgaaaccaattaatatataatgtacctgtcataaatatttgtgcttttcataaattcaatcatcaaacattaaaaagcaag

SEQ ID NO: 53416 - DNA, 512 bp, Zea Mays
gaatattgttgttgacatcatttacttcatttccattggggttcatcatctggttagagagtaaaagagaaagtgagacaagattacataagaggcttgtacgatatgaagataaagggcgaacacaactttttgatttccaagattagttaaggaacaagggtggtttcatatttctcctagcttcatcatactacaagagcgtacaagtgttataatccttaacatagatccttttgaaccttataaattacagagcatgatatccaaatcatctttttgatccaacagtatttctttgagcacaaattgagagaaagacttgagcgggactttagggcaactagaatagagcatcatattgtttgcatatagcagatgacaccatactttattctctttgtaaaagggcaaaacacaataggtgcgaaagattctccaaatttattcatatatcacttaacacaattacaaatcttgaaagcggcaacaccttgacatttttttctttg

SEQ ID NO: 53417 - DNA, 542 bp, Zea Mays
catctaaaacatctagttggctggttaaagtcatccctgcttttgatcaagtgccctcgaaatacgctagtaagaagccatccaacacagtcgcccaataaaacaaccctggtcactcgcaaaggttacatggccgaataaaacgacccaaaaggcgacgcaacaagtgtcgtctgttcatctattgatgtcgtggtacttttcactagcctattcatcgttgatatattgtcatgtccaaccatggggtatcgtgcggtgatgaacccgtattacatgcatcatccctatgctaattctggctggggcaccatagctctgtaattattgacccattgatcaagtggtcatggccgagaaatatgcattcctaaacggtctttatgcattaggactgtattaagtgatcaccctattagattgaaaaagtcggtgacatgcatcgggcttagttcttactttgggaacataatgacttgtgagatttattatttctcgaagggtgctgatagtgcatgtgcttctggttcgtcaacctccac

SEQ ID NO: 53418 - DNA, 875 bp, Zea Mays
cctgaatctgatgactgcaaatgagagagagtgactaagcatagaccgataatatccgatagaatagcaaagaatgagatgactacctggaaagctcacacgagaggtgacgatccaggcaggacaggaaacggcacacgggcaatcaaggtcactgaaatgatagaagatgtgagcacgtattagtcacatagtcataagtatatgaaatgtgaataaatacatacacagagaaatatggcacaggaaacacgagatgagacgatcgagaggccaaacgacgcgaaaacgacgtttgaacgataaatagtgtcataggaggtttggaatttgaattgaggcacgaaacgacatggaattgagccgatacttcacgaataggtttagataggtgaatatgagtgaagtgtgtgcttggtttcaatttaggcgaagaaaaagagatttgggcactcggctcgaaaacgatcgctcgaaacggggaatttggtgaaaataaagcctggaatctcggattggcgtgaaatttggcaaatgagttactggggatgttgtgaaggtgcccgaaaaatttgggttcaattggagcatttttggctggtttgggcatttcaccgagcacgtgacgtgcggagttctagggtttcggtgaaatggctatttgaggtgggaaaaccctcccgaaggagctaagaacctgcaggaatgctcaatacacacagagacacacataccacaacatggattcacaagatttcacaggatttggaattgggcaaaaggggtggaaacagaagtgcttcactgcctctcagacagagaacaagagagaaagggatagagggagaggagagcggagtgctgctcaccgagcg

SEQ ID NO: 53419 - DNA, 289 bp, Zea Mays
gagcaaggaagaaggacggccctcggccgtcgatcgtgtagcgaacgaccacgattagaggtagaaatacccctttacgtattgtatcccaaccgttgacgcgagatcggacggatgcgtgctgatctcggccaaataaaatcttgaccgttgatgtagatcggaggggcgtggttgagagtgggttcaagatctaatatcaaccgcgagtgcgtgatcgtgcggttgagatccttcgataccccttcgtgatgtacactttgctaaagagccctcgggaaactcagaa

SEQ ID NO: 53420 - DNA, 520 bp, Zea Mays
ggtgaagtgacttggattttttgcgatgctcaactagtgttgattgaaggacgttattgcatatgagacatgacatggtgtcatgtggataggtggggaagatcaagaaacaatgttgggctttgagggaccttgttgctagtgtgaaggacaagacaaaggctcatgtgcgatggattgtgtggcggtgaagctagagcaaggaattggtgctgataaaccgggtgcaacaacgaagagcatgtgaagttgtgatcgatgagtcaataagaccacatgatgacataaagtggatcgtattatctacaaggtatcaagtcattgaaggcttgtgtttattacaagtggtttgatagaggctatgcttgtgtgacaatggatcaggggagatggatataagaggagaaaccaagagagagcaatgatgtaggataggctagatgacaagggcgcacacagtgcatgtcctccatgttgttgatcgcataagatgggatcggaaataaggtggtgcttatcg

SEQ ID NO: 53421 - DNA, 528 bp, Zea Mays
tctgtttttcctctctcctctccaaactctctcgagctctctcccgtttggaggtgtggttggagatccgttcttcccggcgtgtttcctccatcttcctccttctcgttgggagatcttgacccccatcttcggatcgaggtattgttctatgttatttccttgtactcgatcatacgcgttcttgattatcttatgtatcattcgttgggtacattttggtttaagtgattgcaacacttagactatcttcattttgtcacaaacactgtttgagattagcgacttgatattgttcattgtagttgaaccgctcatatgaacggttgaagtgcatgattcaatctcttatgcgtttcttctcaaacgtggttgatccttgctcatcataggttctttctcttatttcttagaatggtgcgacgaaggaacccgtcagtggtagaatccgactcttcggatgaacaagagatccatggtgatacccctcctcgctctcgatccaagcgagggcgcggatgtggaaat

SEQ ID NO: 53422 - DNA, 430 bp, Zea Mays
gttgtttttaggaagtcaactgtcaagcaagggcaagtcgaagcaatgaagggcaaatattttcatgatgtttctatagtgagggtcgggggcgaagcaccattccccttcctaaagctaatgagatagtggtttttaagagcttcatgaaagctaggcttcgctttccactccacaagatgttggtcgaggttctaaagacattcgagatataccttcatcaacttaccccgaagctcttatcaaagtggggggtttttatatgggccttgaggagtcagggactggagccggatgctaggtgcttctgcaatattcacgagctatcttaccagaagaaggcaaccaggaaagagcaatatcataacaaccttggttgttatagcttcgtgccccgctctgaggcaaattacactgtgcctacatttcg

SEQ ID NO: 53423 - DNA, 489 bp, Zea Mays
tggaaggaaaaatctcgtcactgtcacagaaggaaacacatcccctcgctgttatccaagtctcgcagcaatccagcacgcaggaatcccatcgtcgacgactcgagcgcgcaggaccaccccgcccaatcattccccccatgcaccgtggatgccctgcccatatcccccgcgccccaaacgcaatccacgcctcaccgctatggaaggaatcgcaacccaatcccctcgtcgccatccagcgtacaggaccaccattggcccgcatcccatcacaagtgcatgaccaccccgccatctcattcttcccattctacatgccagcccgcccggatcttgcgatgcttgagtacttcccattctacgcgccagccccacccagatcttgcgatgctcgggtataagatggaagacacctctctgagcactcaaatctgaataccacacctctctgaaacacaaacatacttggtttacgaaatagagaac

SEQ ID NO: 53424 - DNA, 734 bp, Zea Mays
gacgcaccggggctgaaccaagacaaagacgcaccggtaccgaccgatacaaccactgagaggtcaaggaaaaggaagcagagcgaccggaaaagaggtgataggggactgaacaagtttcctgacaaaacatataaaatctcagatgtgagccgaaaggtcagcccctagctccagaagaggcactccctaagttccggaatgcacttgggttcttagttagggataatcttgacatcacaatccgacattggaaagatgtgtcggttgatgtaaagaatcaaatatggaataagctattaacgaggtttgttctacctcgaggttcagaagaactcgtgaaggaatacacgatgaagcaacttgcaatcaatttccaaaactggaggtctgagatgaatacaaaatttgcaaagaaaggcctagacctgacaaaaaatataaaatctcagaaggtcagtgggcagtatttctagagcagaggagcagccctgaattcacaagcgaggcatattcagaactatctaagaataacaagtaccaccaccacttaggcacaggtggttacaagcgtcaagtttctaaatggagacaagaagacaccgagaagaaggccgcagggttgccgacgctttccgagcaacttggtgaaaggatggctaattggatccatgctagaaaacccagagaaactgaggcggatgtatcttttgatgatccaaatttcaaagaag

SEQ ID NO: 53425 - DNA, 440 bp, Zea Mays
tagtccgattacgaaatccatgcctatttcttcccacttccaattgggcactgggaggggttgcagtaggcctacaggcctctgatgttctgccttagttcattaacaagtatcacaccaggccacatattgagctatgtcctttttcattcctccaccaatatctggtcttgaggtctaggtacattttggtagtccctcgatggatagaataggctgaattgtgggccttgtcgagcaggattcctcgtgcctcttctttcggcacacactgacggttcctgaaccaaagggcccccttttcatctgtcctgagatccggaagttgttccttgctagccttttctgcaagtcctgccatctcggtgtccaaacgctgagctttgcgaatgagatcttccagcattggtttaacttctatgctgccattttctcccaaa

SEQ ID NO: 53426 - DNA, 331 bp, Zea Mays
agcgaaatgggcaaagactgggggatggcccctcatgaattctgcccgcttgtctctgggcacttgaggcatctggacttgcacctgaggctgaggtggtggtggttgttgctgcacctgatgcatagctgctaaggcttgaccaattgcctggactgcttgggtctgcatcaggaacatttgctcaatgatcatcgggggtggaggtggcaaatgctgttgcgggggctgcttcctcttggggtgcctgctgttctggctgagcacgcctcgcacctctgcgcctgttctcagacatctgtagaaatcacacacatatatcaaatctgac

SEQ ID NO: 53427 - DNA, 401 bp, Zea Mays
ggcttctccagagcaaccggacccggagttggaaaggagccatacggggcctatatactagtcacatataataaaatctgtagatctcaatagttgggaagaaacattctactgcaaatacccagctgatacagggtgtatcagcataagtcggttgccattcccagttctccccaaccactagcactggtggcatcatctctccttgaactagcacacaattggtagctccaagcctccaactaggcaactacccgttaaattggtggcactcatcatgtggtcaacacttacatatcggcctttcatttcccagtcatttaacattctgggccttttcatgtttccgcatctgattacttgtcctgtcctaactttgtttttgacatgtttgttctttt

SEQ ID NO: 53428 - DNA, 861 bp, Zea Mays
caagcgcaatgtgtggggcttatcgttgctggaaccacggtgagtaatccctcaaaaatgtcatactgttaccctctacctattaccgccttcaaatcggagtttgggcatagcaatcgaagtttgggtggccgtggccatggcctccgccgtgggtctcgggcggcggcaccgggctcacggtcgttgggggatgcttagcgcacgaccgtgggatcctcgatggagggtcttgattagatcggtgtatgggttagatgtgggggttggtgtgtcatcgtggcccttggattccgtgatggacaattgcgatttgatcacatcgtaccaattcgattgtgtgatcgggaccatcgatctatgtgtgcacgatgaagattagatcgtgccgtgggaaatgatggaccatcggatctggatcaaatgggtccggtgggatcatggggatttcagatctggggcgctgatctcagaatcaagggtcgtgggcgcgtatcggtacattacatgacttgatctaatgttggccatcagatcttaatcctacgacggtcagtgtgtaccggtttggactatataacaagctaattgcggtcgttaacaatagatccatcggctgatctcatcttgtatcccttcggtcgatcccgttttgcagtttagccctcgaggtttcttgaaaccaacccgccatcccagcctgtataaagatcagtgccactaagtcctaaaatttgtagtttagcccctcgctttgaataaaaatacgccgcagtccttcagcacttagaaattatgaaaatgatttttagtacaaaaataattctagaaacttgtttaattcattttaactcctttttg

SEQ ID NO: 53429 - DNA, 362 bp, Zea Mays
tataaaccatgttcatcactcaccattgaaataggagattgaattatgcagagtagtttttctttttctcatgtttgctggattgctgatttgagttattgggcaaacaactgttttgtttttcgctcctggtcccggtggcttcctcaaccattgctgctcattagctctgtcattctcctcgagcatctgtcgttgactgcacagaatgaattgcccatttatttgttagcatctatcgttgactgcacataatggattgcccacaatcaggtactgacatctgatttgaggctacctgtttggttaaagtgcagtgtgagaatatatggtttggtcggttttattttttgctaaccatc

SEQ ID NO: 53430 - DNA, 516 bp, Zea Mays
ggaggatgtgctgattcgtttattaggctgtttccaagtcctcgactgtgcaattcgtctattccactctttgctctccgctttcagtctcacgctctactaccctctaggactttctcagttgtgtgcgatcgtcagtggtgatgatgagctttttctttgatgattgaggcggcgtgacccatagtgaatagtatttagtgagttcgctcggttttgatttgtttttctcacgagcggtggcggtggcgtgagaaggagccgactatgagtggggggtaggcgacgacatgtgggtgatggcaacgatgagcattgtaggtgaatgtgttcatgttttgcatgggcgtgtttaggttaggttatcatgtggttatttttctgaatttatttccaaatcctccttaatctattatttttgttagggttctcatcatcggtcctttgccttttgtttgccgattgggctgcgttgaggagaagaaggttcctcacattgccaagtttaggttttag

SEQ ID NO: 53431 - DNA, 312 bp, Zea Mays
actcaagacaattgattgctttttccaacgtgataatcctagagctactcctgtcgaaaatcctaacctaaccaatgtgcaagattctgatccagttaatttgcatactgaggcagctgagctaaatcaacaagagactttagccacgacatttgagagagacccaggtaaacgtgttcaaattttgaggctaccttttgatcaacaagatgaagctcggagattttatatgtcggagggcccatatcaagttatattagatgagtacccattgaatgatgcatctcatgctagtcggttctagagcaattg

SEQ ID NO: 53432 - DNA, 408 bp, Zea Mays
gaatagggtgctctgaatatgtcaagtctggttctaaggcaacatccgttacttcaatggttcgatcgggaacccgaagacacttcttcaattgagacacatggaacacattatgtatggcagacaatgtttcgggtaactggagtcggtatgccactggtccatatctttcaaggataggaaaaggaccaatataccagggtgcaagcttcccttttaccccgaaacgtgatacacccttcattggtgaaactttcaggtagacataatctccaactacaaagtacaagggttgtcgtcacttgtctgcgtaactcttctgacgagcttgagcttcttttcgattatgaattattctttgaaccttttcttctatttcctttaccatatcaggcctgaagaaatttc

SEQ ID NO: 53433 - DNA, 433 bp, Zea Mays
cagcctaggggatcaaagctcatccggaaggggatagggtggaacactgtccctacctcccggatcatgagagaaggagctgataggcttgccatgggagcaacatgtgttggtgtcattgttccgggtgcgaggctgatgcaagacatgtccctcacaagggacctacgtcgtcgtcctgcccgaaagcgtcagctgggcgtggagtgctgcctacggtacggttgcggttgttccatatctgtctcctccatcgagaaacgacagtggaggactgggtgcccctcctctagcttggggagcaagcgcggtcatgctcccctggctaggagagacggtggtcagtgtcggtgtggtgtctaggcaggaggagcaccatgtcataatcgaagccaagggacataaactcgagactcccgaaccaggtcatcgt

SEQ ID NO: 53434 - DNA, 1200 bp, Zea Mays
ccgacgtaaacgaacggggcctgagggagcaaaaatgtactgtacgcacaactgcatgaaagttttacacacaactgcagcggttagatgatatgagaatatattgagaggacagctagctagcgacaggggttatgcattggtgatagagatgggtgtcgaggaattggtctcccaatgcaaagaattcgtcagtcacgtcctaatccccccgaccggaaaagaggggaaaattcaagtcaatagaggactcggaggaaagtaaaatgcattgagccattgacggtcgcagacttttctggttgtgtgggtcgctgttgtcctctcaaccttatttaataagggatttcttgagggatttgtaggaacaaattaaaaaaaatataagaggcggggtttcgctcatctctacatgactctctgtctaccactcacaatgcaatgaagaagcggtgatccaatcaagctgcaataatgaagttagtgctcctcaatgcgtttggtgtggtgttccgggctagaaaaagagacaagatggagtcacggtgtgtcagaaagacaacagaggacgacggcgccgatcgagctcgacaccatcgtcgtcgtttttcaaatcggatggcatggcgagagtgagagagatggaagcacaggtagtcaggtagatgaagctagtagctagctaggcttgcttattaccttggtcgtttgcagttgggaggagacgatctcggccggacttgagtcgagataagagaggagagtactgaaccggagtgggagaggcgaactgttgtggatctctgccggcgcggtgatggccggagaattaagatgcattctgtatatatcagtcccaagtcaaggagctagatagactcctgatcgacaaatcgcgtcgctcggctatggctgacttcactctctcccctccctccgatcctcttccttctcctccccttgtttccaggaaacgtcgagcagacaggcatgcatattgatggatgccaatgccacggcacctcgcctcgtcaagtctactgtcctacgtacacgagaccagatgcatgcatcttgctttattttttttacataaatatatatagccgacagcgtatgcccagcaggccagttcgtgggatccgttggtcggctacagtacgtactacaggcgcgcaataattgggacttggccgtccg

SEQ ID NO: 53435 - DNA, 599 bp, Zea Mays
caaagactcgacacgttgtattccctctattggacgagcttcttgttccagacaactttgaaatcatccaagaacatctcgtcgagtttggcctgcattcttttcctggcatcttccaacatctgatattcttcaacatacagactgtctgtagtcagtttaatgatactgcttggggagagatcagagttatctctagggtcggccatagggcgcagatctgatagatccaatcttagtatccctagagaagtcaccaaaaagtgtgttggtgcggatctaggcgccaatcgctaggagttgttcgactccgcaggcactttatggcggcgtggatggtccacggcctagggtcagacggttcacgaccagtcaacataagcatggttcactgcgccgagctagacggtcaacgcgtgcacatggctgatggcgttcactaacaacacctagatcttgcctctcgagagggaccccattagggaggagaggttctagggtttgtcttgggattggcaggccacccaagatggctccagacaatgtagggtagaagaggtgtgaagattgagaccaatgaaggctatgttactggctac

SEQ ID NO: 53436 - DNA, 351 bp, Zea Mays
gggaaacgagcaccaggggcactcggctgagttgttgacgtgggggcagtggcagtgcggatgaatacaggttgtttgaaggggtaggagggtggacgaggcgaagaacgattttgattgaaaggtcagattaccaacctttgtcgcttttcaggcccctggttggacctgtcaccttcatttccctttgatttggctgggcctgcatacttagcttcaactgccagcgctgtgctgatagtcctactgtaggagagatcaagacaggtggccatctttcgttgtagccagtcattgaggcctctcataaaacaattcctctttttcaggtcagtattgacctggtcaatt

SEQ ID NO: 53437 - DNA, 2988 bp, Zea Mays
tggggtacaagaggaggtactaagctagaaccaccagcctctacatcgtgtggacgaggggtaacaataggaggtggtggttggtcatcatggtcatcgttcgaagattgtgaggagtcaattgtagcttcgtgtaactcaagcaatctaaactttgtatcctcctcacactctaaagtaatgctccctacaagaggtgtactatctttgtgagtcccagggtgcatgacatcctccatcggaggcttgtaaactccaaaagataagtttgtagctcttaaagcctcctggaactgagggggacaaattagctaagcaagtgtatggcaaagaatgtgagcatatggtagctgatgctgggctctcagggcatcaaatacaccatcgaatactgagcgaccaaggctcccagtagccacaactgaaggtgggtgtgtgcttccttatatcctgtcctcggtagcatagtgcacctcatcaggacttgaagaacttgagaaactatagtgaagtcgtgtggacagcgtctcgatctattagagaagggaggatggagtagtgctgagatgtgagctgtcaggggtgctatgccaccatgaggatgatgaggaggatctgatgaccataacataagttatgaatcttcgtagtcgactcgggcaacccaaacaactctttgatctaactaacctgcaaagtcacgtcctctccctcaaacatgaagtgaaaccacttgcggtcaaggtgattgcaaattgtggcatagaaagctctaacccactgctcaacttgaagaccacccaaactaagcagtgcagacaaagcagacaaatatgtgatgtgtgcctcaatagctagacctattgcatgtcgaagtgttggaatatccaaaagtcgatgtggtctcaaggagacatgagcaagtctctgagcagtaaagaatgactcttgagtcaaagaaatgaaacatgagtctgctatagggtctcattgtgctagaaacttggtctcaactggaacatgtccgaatctcccgtaccctagttgcagtaacacagtgaaggtcgaatagcctcaaatcaccctctagaggtgcaacattagttttgtcgcgctcctgaaagcgagtaggtggaataggtggagtgaatgagggagtggaggtagcagtggtaggagtgatagaggccgcgaatgtggtggaatctatgggtgtagtggaggttgctggaagctctgaggcgggtggtggtggtatgatggcaagtgtggaggaagtcggtggagtgataatggaagatggagtgataggctgaggtgagggatcaaggatggctggagaggaacataactgagacgactgatgtctgacacggtaggcaatctgatctgagccaatctaaatacttccccatgctccaccctctcagttgttgctgctgctatcgctgctcgaatagatttatcaaatttgtgcttcttcttgcctcttcgctgctcttaataaattgccttgcccttatcctgtctaggagggcaaggagggtcctaatcatcacctccacctaatggacccaggttcttgatctaggccatactatcactgagctgagtccaactctgatactgccaatagttgactgcgcacacattacccactaacacactgcatgggaatagagaagatgaggaactacagataagatagtcctttgtagcaaagcatgagatacgaagataaagtgaaggatttgctacctagggcacgtctctcgagggaaaccaagtagggaagaagaattgctcgagcgggcgcgtcgtcacattgaaatgacagaagaagtgagcacgagttagtcacatcatcatataaaatgaaatgtgaactaaaacacacacacacgagttacaagggtttggagcaaagagctttggcacatagattgatatgaaggtaggcataatcaatgggagattggagcatggatagaggttgagcaaaggatgcaaaggtggtgtatgaggatagagaggtcatagggttcaaggtgcttttagggcattgatttgaagttgaggctcatagaggtttttgaggtttgaggaggataacacaaggttcaaaaggattttgatatcttgtacatgggcatgaaaggcacaagtgaataatgatctaataggagagggagaacttttatgcataggtggtatgaagattaatcaagggatgggggaccttgagaagagaattgccaagatttgggtatggacaagatggttgtcatatggtgcaaattaagtggaggtaggtttataggggaacatataagaaggtggagggggcgagatggtttctagctttgaaatagaggtttagctaaactagaataactatggaagggtgtgatatacaatggggaacaaaggaaagctttttggctttaagtactagttggggcaaaagagcaaacacttggtgtgcaaggagactaggagaggagaaaacaacactgaggaaagggacaaccccataggaatatagaacctgtaggagaatgcaccaccacacagatagggaactgaattcacaaggataagatcgcctgagagggaacatagaggatgattcaaagggtgtaacatggatgagagcatgagtgaaggagatcatgcagacatacaaacacatgctcaaggggatcaccagagcggaaaagaagctctagggcatgggcacaaggtcgacggggagcagtaagaacaccgacgaagacgggaggtggcggcggcaaactagatcgagcagggaaggcgaaagagaaagaagacaacattgaaattaaaaaaagtgaaactaacacgcgggcccgggcgaggaaatggaaaagggcaagcagttatgagcacatcgaaccatgcacagtgcaagtccgatgggccaccagaccgatttaccagagcagataaatcctcggtagccagctg

SEQ ID NO: 53438 - DNA, 718 bp, Zea Mays
tttttgaggaaaaggaaaagaatacttgtgtccttgagaaaagaataatgacacagaaataacttagtttttgttatgtttgtttgtgccctgcatatgcagtctcaagcaatcaaaatattttaataatactctcctcaaaaaagagctgcctctaaaactggcaagacttctgcaacacaacatatcactgctgacaagccaacgaacatgtgctgtgtttttacagcaattcagctttcgtaggtgccagtaccacgcacatcactattgggaagagttggagtaaagaataaccaaaagggttctaagtgattgaaggtacggtaacaactagaccaaacctcaaaggcaatgccgaaacggcattaaggattgttgaaatttgcattgtacttgccctgaccaaaccaccaagacattactcgtatttttatgtgcctcactgcctcaggtacatgagatgatataccagcaatgagcctgtcaagtcatgtgacctcttgaccacaaccgtgcatcatccacatctccataacatgacagtttgtggacggaacagaagagccagacaaacgaaagatgttattcgcccaagacatctcacccactagatatgcagagtcacaacctgtaataagctgacacaccacaccactgctgtctttagatatacacttccatttcatacgtgtttttgcaaaagtcaaagtttgca

SEQ ID NO: 53439 - DNA, 577 bp, Zea Mays
ctcaactcttcgcgcctctcttcacgctcaggcggcgtccctcaccagcatctgagcaaccgtcaccgacgttctcgcgccggactccactcaataccctcagtggcgcgaccaggtcctgcagaccctccaccgctacgccctcgccgaccacgtcctctccacggtcactgacccgacggaggattgactcttgatggatgaggtggtgctttcttggatccatggcaccctcacggccgaacttcaggacatggttcgagtgtcggacgatactgctcaccggatctggggtgcccttgaggctcagtttctcggcaaccgctggactcggattctgtaccttgagaccgctttccgccagcttgctcagggcgatctctctgtggacgagtactgtcgtcagatgaagacgatggctgacactctccgcaccctcggggccccatcaccgatgagagcctcgtgctcaacctcctttgcggcttgagccctcgcttcgatcgcgtgacgcccatccttacctgcatgaagccgtttcccacttttacggaggccaagaacaatctgcttctcg

SEQ ID NO: 53440 - DNA, 378 bp, Zea Mays
gcatgttccaagcgattcatggcggtataatccaattggataggtcggggagcatcacgggtacctgaggatactcaattgagggatcagagggcgtgaactggcttgacttgcactggccgcggtaaggctgggtttcagtgttctagaactgaattggggagagtgcggaattggagcttgttgatgatcggctgggagcaatactaagtgtgggggtgcgcaatgacgttgtgaagctagtcccgagctcaatttatagggggaacgggcggtggccgcgaattttggacgagacgcgcggcggtcggaggtggagaagaatactagcgcgcgtggattggtgtcccatgccgtggcaacctcaccggcgttgat

SEQ ID NO: 53441 - DNA, 728 bp, Zea Mays
ctcgaacgagcatgaggttcgagctaggtgctcggggtcttcgatggtgatcgcggggcgccgcggtccacaccgtgcgggtgccaggattgcctcggcgagaatcacggttagggcaccctgatttgtttcgctgtctctctggcgtggtgtagaatcggttgttcgtgtgtttggggtgcggggtcctgggttggcctacgccgcgactgacatcgctcgcgccgccgcgcttgtgccttgtgcgtcaggaggatgagggcgagatgtgtgccattgctcgcttgttggacggtggagattagatatctggttgtcgcattgaagctgagatcttggccatccatctagagttcaacggagtagattagatcgcattaaataaaatctgggtcgtcgaccgctcgttgggcagctcggatttcataccgattcgggtgagattcaatctaatctaggccatcaaaaacagatcgtgcggccaggatgcgagggtacctcttcggccgggtattttctataaagagtccctcgagttcggaataatctacccgcagtccggttcttgtcaaagaccattacagcaaggtcctaaaacttacaaaatagaccctggatttcaatgaaatagtggccgcagtctaatagccgtgtatgattataaatttaatatgagaattgcttattaggtatgaaaataaatctaagaacctaagaaactcataaat

SEQ ID NO: 53442 - DNA, 572 bp, Zea Mays
aaccaagagggacacaaaatcataaagaaataaagcaatagaagggttctgcgggcgtcacaccatcctaagggatgccaacccatacactcaaaatcaaaccctaaacgatagaataataggaagcatcaaatgtagacgtcgtcgcacaaaatgatcttacttttcactctcacagaaggcactggatcatactaattatagggtgtcaaaccattaagtagagtctaacggttatgcattaaggttctagagagtgaaatgggatgtcgggctagtccgacagtaggcgtaaaactatatgggcgtgcctatcagtcaacaatagttagcgttaaccgttaacacggtactaacatagtaaccattgagagcacgtcagactctaacataatggttcaatggtatacccgtcggatggtccaacagtacatagtaaggcctgataaagttgcaattgctagttcacttcttggaggctgtaaataagactccattcgaccatttgaactcagtaagtaagagctcagatagccatattcttgataattgagatagtgctttgtgtgaga

SEQ ID NO: 53443 - DNA, 925 bp, Zea Mays
ataacagatcgcacccggaggtagaatccacgatttggtctatacgtggtagtggatacgggtccttgggacaggccttattcaggctagtgtagtcgatgcacatccgaagcttcccattcgctttggggacgatgattgggttggccagccatattgggtgatgaacctctttgatgaagccagcatctaacaatttttggacctcctttcggatgaagttctgccgctcaacagactgtctgcgaggcttctggctcaccggcctggcatcggggttaatcttcaggtagtgctcaatcacctccctggggatcccaggcatttgcgacggctcccatgcgaacacgtcagcatttgcctggaggaaagtgacgagcgcgagttcctatttctcatccagatcacccgcgatgcgagtggtctgggtggaatccgcagcgagcaggatggctttgatggggacaccatccgcttcggacggtcgtacctttggtgccttggtaccggaggttgagggattcctctctccgtcggctgggcgagcagtctctgccgccagggcgtgcagcttctctacggctgtaagtgcggcggtacggtcaccttgcacggtgaggaatccagttggggatggcatcttgaggaccaaatacccgtaatgggcaatggccatgaaccagtacagggtcggcctgccaatgatggcgttgaaggggaggttgacttccgcaacatcgaaaacgacgctctccatgtggaagttctcctcagttccgaatgtaaccgggagtgcgatgctcccaaggggatacaccggctatgggcccactccggagaatgggcgtgagggtcccaaacgggaccccgggatttgcagctgcttgaacgcatcatggctgatgacgttgaggcctgccccgtc

SEQ ID NO: 53444 - DNA, 1725 bp, Zea Mays
ccagatgcaccccgatgatgcaccaggaccgcagaggcagagggtggtgttgtgttagctgatgggggtgaactggatgcagactcagaggaagaagtagcacttgtgtttgcaccaggtggaaattctccagggggtagtgatgtgtcagagatagacactgatgcagaggattagaataggcactaggtctatgagtgcatcctctgttgtaatactagtaccagcagtagtcaggaaattttggtattgtaaccactaaggagcatgtattttgtttttgtaatatattcctagttgtggacacccatttatgagttctgtttcatttcagatgcctaggcgtgttcgactatctgatatagttggcacctctcacgacggtgtggaagatgactctaatcctccaccgccaccaattcctccaaccctagctgatgcaattgccgcgctggtaaatgggacggctaataatgcacgtgttttgcgtgaagtacttcagcaccaaaatcaacctggggctcgggtacctccaaacaatgccagaaatgcttcttacatggaattcatggagacccgacctcccactttataaaagctgaagagccacttgaagctaataaatggctttgggtgttggagcaaaagtttgggttgatccaatgtacagaagtgcaaaaacctcagttcgcagctcagttacttcgtggacctgccagtacttggtgggcaaactttgtggctgtacaaccagcaggacatcaaattacttgggctgaatttaaggaagcttttagagcacattatattccagatggagtcctgcaaatgaaactggaggaatttttaaggcttaagcaaggtcctgacacggtgatgcaatatcttgtgaagttcaatcacttgtcccagtatgttgttgatcatgtgaacactgacggtaaaaagcgagattgtttcatgcggggtttgagttttaaactgcagaagaaaatggcaacttgttatgacttgacatttaatagagcagtcagtgtggtgattgcagtagaagacaaggggcgggtgcaccaaaatgcaaaaaggatgtggaaaggatctagaactggatcttcctaagatccagccaagcatcaaaaggtaatcatcagaacagctggctctaccaacactccctatcgttcagccacttaccctgctaaaactcctatctacattcgtcccaccaatatgcaacgccaatcactacctacaaataaccaagctccccgtttgcctgctcccactggcaccaaatatccttgctataactgtgggaaagcagggcatttcattaaagattgtccctacccccgccaaaacaactcaaatttctagaaaccagcaggaaataattctcaaaatcagaacaagaatacttctggcaacagtgcaaaaggaagggacaacagaaaattcgggcgagtattttatacttaagtggatgtgactccagagggaaatcctgtgcttatgggtatgtttcttgttgcccatcatcctgccaaagtactttttgatactggtgcatctcatacattcattagtagaacttttgcggtgaattatgatgttccaattcaaaaaacaaatatgggagttattgtaaaatctcctgggggaaagttaggcacaaaggaggtagcctttcatgtgccagtagaattgggtgggcatatctacccc

SEQ ID NO: 53445 - DNA, 775 bp, Zea Mays
tggaagtatgaataatttatgcggctaattcgttttactcgaggtactactgaaggaaatgatgagtagtagttgtgattaaaatctgggtattcagtaacctgaagttacttcgcactattcagatttgttatagtgtactaaatgacgatctcgtttatcactttgtggtcatgtctcaagtgaggagtgtacaatttatatgaaagacgatgtcttttgttactgcaaatagtctacaaagcatgtgaggaatatatgaactctttgacgttgccgctactagtctactactagaatgacaaaattcgttatactgcagagacacaattgtattggccgagttatactgcagagacacaatagatgaacactttttttgttttgctcctttcagtttagtctcactgagctaagaccattcattaattatacattacacgatcagcttcagttagctatttaccatcacctttagtaacttagatagcagatgtgatgtttattcatagtttcagaggctgtttttatttttagataattcccctcgggccaaaagtgattacaaaaccagcagctcatacgtgtgcagacacggagggacaaacctccgaactgatctgaagaagcacacatccagacggcacaaaaagacacacatacaagttcaatcacaataaaattctatttgtaatcctccaaccaaaacgatctactgcgacggcggcgcctggctcccgtcggccttccgttagtactgaaaatgttccttttg

SEQ ID NO: 53446 - DNA, 706 bp, Zea Mays
gtaatgaatgttgtcttcggaatgtctgaaggtcgaatcctgagctggtgataacctgacctcaaatctatctttgagaacacgctggctcctctcaactggttgaacaggtcttctattctgggcaaggggtacttgttcttgatcgtgacctcattcagagctcgataatcgatgcacatcctcctagtgccatctttcttctccacgaacaggacaggggcggcccaaggcgaggtgcttggcctaatataacctttctctgacagcttatttatatgcttcttgagttcaaccaactctggtccagatactctgtaagctcttttagaaatgggggcggtgccaggaagaagctctatggcaaactcaactttccgctcaggtggtctgcccggtaagtctttcgggaacacatccggaaactctgacacaaccttgatattctcgagtggatatgcttccttgctatcaatagccatctgatgacaacctcctttccttggctcaggtgagactaactcagctaccacttcttctcctagtggggacaccaacttaattatcctcttatcatagttgataatttcttggtacttatctagccaattcatccctaggatgacatctattccttgagtacccattactatgagattagcgggaaactctatcccccttatttccacacttacattcaagcaaa

SEQ ID NO: 53447 - DNA, 696 bp, Zea Mays
gcgagtttcaacaggtggtatcatgaacctctgacccacaccaatgctaggttaaccgcccttagttttcataccctgtgtgtcctctggggaaacatgaatatcatatcgagggcaacagggtcgggccgcgttgctagctggtcgtgtttctgcccgagccctaccatatcattatttgtgctcgagctccttgttcgttacaataggtccgtctagggaggtgcatcgccccttcccatgcattctgttcaccggaaggggaagggcgagtcatttcgtgctccctttgacggttgaggccatgatgcttagttggctggtcttattgtgacctcctttttgcaaggcgagctcctgattcccctgttcattatgggggatccatctaggggcacatcctatcttttcactgttccttcccacacattccattcatcagaaggggaagggtgagctataccctcgatggtcaagaccatggtgttcagtgggcttcaatcggttgatccgaatgtgccctccttttgtggagcgagcccctgagtccctcgttcgttataggggatccgtctgtggcgccccatctttttaatacttcttcccgcacattctattcattggaaggggaagggtgagttgtatcatgcttccttcgatggtcgagatcatggcgctcggggagctccaaatggg

SEQ ID NO: 53448 - DNA, 736 bp, Zea Mays
tttaatttcaaagattatagtttggggcaagatgtcgatggcttaaccccaaacgatactggatttgatgtttcggaagattactaaagtctgaatttttgcaaaataattttggacaatttaaacagatggagacagacacgatatcaaaatcgcgatagacaaagatgatcaaaatttagtgtacattttattcaccgctatcacgttttaaagtccgcactcgtggtcgagcagacgataaacacctggggtgttacagttttattcgctaggtttcctgcaccaaatccctagtgctagtttcagcagccaccactctgaattcgactttggccacctggcatgtggagccgagttgtatattgcacaatggccttgtcatcccgaagctcaatctcagagcactcataaccatagtcatgagtttttccctcttcttctcgttagctttcatgtagaaccattcgtttgtccacccggtcagccacttagtgcagtagccaatcaccgaggccttgatgtctttacggtatgcaaaattataacacccaaagtttttgtgaagaccaaccgctctggccttcatctgatagtacaactcatgcactcggcagaaatcttcggcattggcacttttgccttggcttcggagagcccatatgtagacactcatcctgacaatggcatttggtgtcaactaatgaagatatatttcaaaccttttcaaaacttc

SEQ ID NO: 53449 - DNA, 498 bp, Zea Mays
tgaaggtaaatctgataaattttcaacacttcaactacaaacctgctcagtggaaaccgaagcccagctttgaagaaactttggtaaatcacaacttcgtcttcctcgggagcagggacgttgttgtctccaccaactctcacaatagacatatcccgaaagtaccttcctctcatattgtcaagatgactctgtttaattgttgatttcccaaaaattgtatgacttggcctccacggccgatcctcagaatcttctcccctgctttcagcatcataatcatcactgtcaccggtatctttagacaggccttccagtatttccttagtaatcttctctgtatttgattttgccattgactcgataaacccagctatgtaaggatttgcagccttcttttcctcaaagagcttctcctctttagttagcttcgtctcagcagcaaccttcttgtcttgagacattctttccttcggaaatgacgaaaatgtgtctttt

SEQ ID NO: 53450 - DNA, 1026 bp, Zea Mays
ccggtcagatgcgcgcgcagtcgggctgacatgtggggctggtggccagatcttcttcttctccgtggaattcgcgggcacgataacaaccgaacccgtcggtgctggatctccgggtgggccccgccaaaaccgcccgcggactccatggagtctatatgacgggtgccgcgacctcctcgacccctcctaacctccttgcaccatggcgcaaagccctatcccgggggtttgccaccgccgcagtgagtgttaaggagggaagtcctccgtgagcctgcagctatctccctctctagtcaccggtcgaccaattgcaagcgtgggtggctgcacccaagcgtggcggacgcgttccaggaagcggaaggaagaagagacctgcggtgatcccggtattgctcgtcggaatcgagctgttctgtcgaaccaacgtcatagcgagaccaccgtaacctaggtaacaacccaaggtatgtgtcaccccacctacttcgccttgatctcctgtacgctcgacgcttggcggaatatagggttaggaccgggttcgtcgggttatcgccgctgatgaagcgcgcggctgtggtagctctcaccgccgtgcccaacctcggcgagggaacaaagatagctcgggtctgtggaagtaatgatcgatggcccagatcgatcgcgcgtctggaccactcgatttggatccaagggtagaagcgcgctgcgtgtcaggaactaatctaagccgtagatcacgtatcctgcggctcagattgcataccggttcaacgtatacaacttctaatttgggccgaccgttgcggatcgggcggccaggactttgcgataccccttcgcgactgcagttttgcatatgaaccctcatcctttacgtaaatagaaacccgcggttcgatgatcatggctgtggggttagctctgagtcgtggaacaattatgaattagccccccgactcctgagtattaatgtgcgtggaccagagcagtatgagaaccaagggaattaat

SEQ ID NO: 53451 - DNA, 1212 bp, Zea Mays
cgcaggacgctgcccgggatgaccccaacccggcgtcgaatacatcagcacaaacatccatcgcgtcaccatccgccggctctgacaacagatcctctggaaccatatcttcaagagtctgatcaaagttcgccagagacaattcttgtagaccaatgagggcaaacagagcaggagaaggaactccactactttccccactggctacgtatcgccgactgttcttccgagtcaaagggacctcatcttcttcctcccccttgttttcatcagcaacacagacagcacacccattgggatcagcgacagatggatcacacccattggggtcagcgtcggtaaactcaggcacaagcacttcctcaacagcaggaaccgaaggaccagcatcctgatccaagctagatactcgccgaagacgtctctttttctttttctgctcatcagcaggagaatcaaattgattggctcggcaagggcgcttcgggcgaacactgacaggcctctgaatatccaaggttgtaccagcttccgggagaggcgccaccaccaatgtcccagcaggagcagcatcagaagagtcctcggccagcatatcaagcatagcacttatctctgcatcactaggatccaaaggcacctcaaagtggacctgccgttcatcatcaggaatttctccaagcgaagcaaccaaagcactaacttcttcggtagagggtcacactctaaggcccaaaccgccatcagcagcaggaggattcgacacaaaatgagtaaaggccttggaaggaagcaggttccagaccgagtatgcgacaggggcgccaacatttgataccttgcctctatgtatcatttcaagccggttcaccaagtctacagcaggaattcttctgttggtgacccgggttgagtcagctagacctctgcacagataggccgggtatgccctgtccttcaaaggctgaatgttcttgaagacaaaatcagcaaccacagcctctgcagtcagacccctctccttcagcagtccaacttcagccagcaaagcccctgcctcagccacctccaggtccgtgggggactcggtccaactcggagtacgaacatccggctgtctccctgaccgtggggggagagaatttctgtggttctcaacaataaaccactccaagcgccatcctttgatactatccttgagtgggatttcaa

SEQ ID NO: 53452 - DNA, 1107 bp, Zea Mays
cggtccaaagagcccagcacaagaccgccgctccaagtagaaacacatatttcagtattttattaaggccctgaagccatcccccaaacatatgttccacattatgcggtggattgaagccggtagccatttgtacaatattccaaactgaccgagctaaacggcactcaaagaaaaggtggttgatggtctcttccttatggcagaaaacacaagttaaacttctatgccaatttcgtttggtcagattatcttttgtgagaattactccctttcgtaagtaccataaaaaagtttaattttcaaaggggccttcatcttccacatgtctctgtttacattaggggtagtactaatctttaaggctgtgtaatacgattttatcgagaacttcccatttggggtaaggttccaataaaatgtatcatgttcatgggacaactccaaaccctctatgtgtgacagcaaggaaatccaatccaccaagttggatccataaagttgtcgtcgccaggaaaaattaggagggaaggaactcatagctttcgctatagttattgatttgggtcttgtaatgttatacagggagtgatattgatctttcagcgagaccctgtccagccagctatcctcccagaaccttacttgagatccgtctttgaccagaaaggttccgaagcgtagaaagtctggttttgccttcattagacaagaccaaaagtgggagtcaccaattttccaatccacttgagccagtgattttgaacctatgtatttattacggagcaattgttgccacataccatcagaggtaagcaatttatacaaccatttgctaagaagagctctgttcatagtgttcaaatctaggattccaattcctccctggtcttttggttggcgcagaatagaccatttagtaagcctatactttttttgttttcatccccctgccaaaagaatcttgaacggaaataatccaatttcttgataactcctatggggatggagaagaaagacatcatatacatcggaaggctactaagaactgaattaatcaaagtcagacggcctccgatggagagatgtttccctttccagctactg

SEQ ID NO: 53453 - DNA, 924 bp, Zea Mays
gacaaggccaagaattcatttttttatctgggaaaaatcaccatataactagcttttgatgaagcaaatgatgataactgcttggcaaggacgaaacaatactggtatccacctaggatccatcttcaataacagatattactgctctcatacgaagaaatcatcaggagtagagaggatacaataggtctctacaagatcttcatatttctatcataaattatcatcactagtagtttataggtcaataattatggatctttcggcgccaaggaccaatgatatattaatgcccaatttcacttcaagctctgtggtgatgtgggatttcatagttatttgtctactcttctcacttctggtagatctgaggtagataatggtaagcatgccaatgggtggaattcagtgtagttcggctacataaaccccgtgtatgtgtccattcaggaccgacctttaccatttagcttacaacgtataccaaacttgtcaaaggactatctcgagtcaattcagtgactataagtatttacaattccgagagatgtatgcggcacaagtatagaggtcctagatagaacgagtaaagtggttcgacgggaacacactatggttttcacaccaacatagtgaaattttcttataataacctctcggtatactcgcaacttcgtgttgctagcgattacatgtccttttatctcatagtttgcttcatgccattcagcgacaaagagagcaatgtgctaacatctggttgagcaatgtatgactgagatttctggtctaaaattatttggtaaggtctttttgcttactaatagaatcccaatttgtgatgtcttatatgccaaaaaggctttcatgcattatatatcttcgggttacttcgggtaaaactttatgcatgaggtaagagag

SEQ ID NO: 53454 - DNA, 389 bp, Zea Mays
taactggtaatggctgaggatctatctgctgcttggtctggggattatcagcatgttgggatgagctgctagatcttgtgcgtctagaaatgtgaactgaaaacacctcctgacttgactcaatagttaatctttttgcattcgatggagggcgatcaacagacctcatgatttagcaagcaatataactgttgacaaatgattggatttaagtaaaatgatttatgcataaatatatgctaggaacaattcgaatagtgtatataactgtataaaatgcatactacagaatacgaaaggagttacatatcttaaactaccttttctggttatatgccataatatttaagaaccatgtatatatacaagcataaatattaactaactag

SEQ ID NO: 53455 - DNA, 303 bp, Zea Mays
agcgtgtagcagtcttgcagtttgctgaactaacatgaaattgtcttggatgaatcggcccttgataaacgcactttggttcctagaaatcagcttgtccatataaccactaagtctatttgccatgatcttcgtgattaactttgcgaagctgtggatcaagctaataggccgaaaatccttagcaaggatggcatcctctttcttaggtaaaagagtgatgaaggctgtgttgaggaatctgaaattccgaaagtccttgttccaaacagccatgatagcagccatacagtcttttttgat

SEQ ID NO: 53456 - DNA, 1496 bp, Zea Mays
gccatctcacgcgtaaccctactgtctacactgttcacccctgttggccttcttgcggctgatagcaagttccaacatttaacttgctatcagccgcaagaaggccaacatgttgtatgcctgctcccgtggtgtcatttcggttgcgccgtgttagagttaacttgtatgtcgcacattcatagtggttgaggcaaaactagcctaagaatcctgcattcaggtgatcgggtaaagtctgcggcccctcaccctcgttgtcgggcgaagtgcatactaagacggagatgaccgagttctcgacccttcatggccaggggttggacgaggcggaattcaaggtggatatgcccttatccttggcccttcgtggtcaggggttaggcgagactgatccttcttgatgaaggtcaatcgagtccaggtgatcagatatttgcttattcctcattaatcacgcgtcatgttatatcgatgatatatgttcccgaccgaaccacacaagatgtggtaatatagagttcttgttgaggtggcgagatagtggcatatagggggacaagtttagagagaacgaccatgcaaagtcttatcatcaaatcaccacataagtggcttatttgtaatattttctaactcattattttctccatcacttacaagaccatttttagcaaggtcgtctgtgttagacggctcagctaccaatcgtgacaatacaatatcttttaacaaattaatcgatcgaatcaataacttgatgaggattgctacccatgccatgatgctaactctaggagtggaagcacaccgagatacctcaatatatataccaatgttcaaaaaagcgtgattaagttcatgcataatcatgattagacactaagaggcatgttagcattgcacttaggccctgggtggtggtttacgtggttagtatgcgtaggcggcgtgtaatttgcgttgtgtgcgatgaggcggaaaggagccacgtggaagcggggcttggcgcacgaaaaagagatgcacatgaacaaatataagcacacaagggaaagaaggcaagagctgctgtctgtgagagaaactgaataagagggaaataaggcgggagctgctattgcgtgagagagagtgaacagggcaggagctacagccgccgtcgcatgaggagggaaaaagggtcgccaccagactggtcctcttcccggtcgtctagggccgctgccggcggcatccccttccccttctggccaagttgtccatgccactaaggttagcacctctttgctccttttccctagcatctagacatgctctccctctccctcctttgctcttgctctactactcctccatctcctatgtcctatacttctattcattattcaacatggatgctttgacttggattcttaattacttcatgcacatggtttgtattgttgaattagttagaaatctaacatgtccatactttgcattgttaatttaat

SEQ ID NO: 53457 - DNA, 851 bp, Zea Mays
ctttccttcaggcaaatgccgacgtgttcgcatgggagccgtcgcagatgcttaggatccctagggaggtgatcaagcactgcctgaagattaaccccaatgccaggccggtgagccagaagcctcacagactgtctgttgagcgacaggacttcattcaaaaggaggtccggaaactgctagacgctggcttcatcgaagaggttcatcacccaatatggctggccaacctagtcatcgtccccaaagtgaatgggaagcttcggatgtgcatcaactacaccagcctgaataaggcctgtcccaaggacccatatccagtgccatgtatagaccaaatcttggattctacctccgggtgcgatctgttaccattcttagacgcttactctggtttccatcaaatccagatgtctagggaagataggaagcatactgcttttgtaacagtggatgggctttactgctatgttgttatgccgtacggtctgaaaatcgccttgcctacatttgtgcgggcgatgagtaagactttcggggacctgattagggacaaagtagaagtatacgtcgatgacatcatggtcaagactaagagagggtcgaccctagtggaagacttgaccctggtcttcgacaagctgcgggcaacccgcacgaaactgaacccggacaaatgcgtttttggcatttccgccgggaagttgctgggattcctggtttcgtaccgaggcattgaagcgaacccggagaagatcagagcgatcgaggcgatgaggcccccggcccgagtcaaggacgtccagaagcttacgggatcattatccacccttagccgcttcatttcgagg

SEQ ID NO: 53458 - DNA, 273 bp, Zea Mays
gggaaaaaagaatggcgtcaatcgttgatcgtggagtggacgctccagattagaagggagagtaccctttcgcgtgaacgatctaggccactgatatgttaatagacggatcctgttggactcatttcataaaatcgtaaccgtaggattaggatccaatggtccaggatggcatgtaccccttcaccgcggttattttctaaaagagcccctcgacttgttctgattcaacccgccgtccagctcgggtttgcactgagtctggggaaaatt

SEQ ID NO: 53459 - DNA, 684 bp, Zea Mays
cactggcgacatactgtcgactgttctttcgagtcagagggacctcctcttcttcctccccatcgtcttcaccagcagcacaggcaacacccccatttggatcaacaacagatggagcacacccattgggatcagcagcagatggagcacacccagtggggtcggcatcagtaaattcaggcactggcactccttcagcagcaggaaccaaagtaccaacgtcccgatccaaactagatactcgccggaggcgtctctttttctttttctgctcatcagcaggaggatcaagttgattgactcgacaaggacgtctcgggcgaacactgacaggtttatgaacatctgaggttgtaccagcctctgggagaggcgccaccaccaatgtcccagcaggagcagcatcagaagaatcctcagccagcaaatcaagcatagcacttatctctgcatcactaggatccaagggcacctcaaagtggacctgtcgttcactatcaggaacttccctgagcgaggcaaccaagacgctaacttcttcagcagagggtcgcactctaaggcccaaactgccgtcagtgacaggtggattcgacacaaaaaaagtgaaggccttgggaggaggcaagttccaggctgagtatgccactggggcaccaacatttgataccttgcctctaagaa

SEQ ID NO: 53460 - DNA, 696 bp, Zea Mays
agattctggaaggaatgtccgtcgacgaacagaagaggaggatgaagaaggtggcatcggcagttctgatgtatgtcttcttctaggactaataatttgttgtatattaaagtatggaattatggtttgtcaactactttactactatctccactctaaataggtacttctaggtttgttttgggtaaaaaaccccgatatgttaacttttaaccaagtttgtacaaaaataattaacatatatgacaccaaattgaaggacagacctggtagagtggcgagaagcctttccactgagccgtcctgggttcgacgcaccctctctacaaaatacagggggtaaggcttgtctcggttatttttgccctggaccccactcatgtgggagccaccataactgggtctgtcctttttatatatgacaccaaatcagtacattccgaacatatatttcataattgatcaaataataccagtttagtgcttaaatgttgctattttgttctaaaaatttggtcaaatctaacatagttcgaattaggacaaacctcgaagtatctatatggagggagtattatttattgttgaatctggtttatttgatgccttgtaggaagagaaagaaatgattagagatcagcaggaaaaggctcagctagaaagaaacatgagagaaagagatgcagctaacacaag

SEQ ID NO: 53461 - DNA, 442 bp, Zea Mays
catgaatatgggtgattactataccctactaacgagacagtcagcccaaatcaaagaatgcctcaaagtaaaacaacatgcccacatattcgagggtggtctcagcgccctgctaacagaacaaccagttcaagtgtagcgtaactacatgcacatgaaatccataatacattgtctcgctaaagaatactaactcaatgaaaagtatcttctcatctaaacgaatcactgtgcaggagcatttttgccggaaacctcgccagcaggagtagcagaggaagaaggtttgctcacgccagcaggtgcaacgagaacgttggcagcaatgtcctcaggcaccacaacacgaggcctcctcatcaggatttgcccggcggggacagccttgtccatggctttgtcgcacattgctttcataacaacacggtcatcctctaaggcc

SEQ ID NO: 53462 - DNA, 372 bp, Zea Mays
gcccaaaagttcttctggcaaaacattgtctgccaattcggagtcccgtccgaactcacagtcgacaacggcaaacagtttgacagccaggacttcagggatttctgttcctctatcggcaccaagcctgtcttcgcctcggtctaccacccgcaatccaacggcgtcatcgagcgcgccaacgacaaaatcttcactgccattaagaaacgactcctcgatgacaagaagggcaaatgggccgaccaactacctgaagtggtctgggccctaaacacgacaaaatgtcgggcaaccgtattcacaccttttcgtctattatatggatccaaggccatgacaccgcaggaaataaagcatgggtcaccccga

SEQ ID NO: 53463 - DNA, 529 bp, Zea Mays
ataagtactagtcttccttcaggatcttatcagaaacttcatttagcaacttgttaacaacttcgccaacaatagcttcggccatgttaataatctccagggcctccttcgtttctggatcggctaggggatcgaacggttccggtggcggagataattcagctacagtagaaaaagttaattagtccgaagccataaaaacaaatgctgaagttaaataccgcgaaacaatacctaaacgtctttcacgttctgcagcttcctcatcttgttttgcttccactcggacatcatgaatatctttttcacttttcttcataatttcgtgagccatttctcggccaccatttacccagatgtcattgtaaaattttccacccattaaacttgcttcagctgatggatcctttgtatcatccacaaagaaagcagcttcggcatgggccagagtcttgacaaggtcgcaccccgccttctccaggatggctgaaattcctcttgcaccggagaacgcgcaaacatccccgcg

SEQ ID NO: 53464 - DNA, 490 bp, Zea Mays
gacggggcaagaaaaggttgaacagagttttcgatgttatcggcttcgtgtacccggactacacttatccctcgcgaaagcacggaaagaaaaggaaaactaccacttcggccatctctgttgtgccaaaaggcaagaagattaaggttttaacgcaccgacctaggtatattgaaacggccacggtgccgaagcttggtgaagggacatcttccatcatggtgtctggacagtctgctcctgtcggtcgaagcgccgaagaatcggctgaagtgccaaaggttcctacaaccggatcggccgaagcgctgaaacatactaccgaagctaaaggaaaggcagctgaagagccagaccgagaggaaacgataggaccacaactagagccagaattgctgaaggtgtcaaaagctcctgcaataattcccaagaggaggagaatggctagcgtgctggacgctgtcatggagtctacaagggcactaactcc

SEQ ID NO: 53465 - DNA, 477 bp, Zea Mays
ggacgactaagtcccccaccgagtgagcccaatcgttgggccagagccgcaagcatacgttgaccacaacaggacatgtcgccaggagcccgagcgatagctgtagacacaattgtatgccccttttcttgtaataagtgtatcatgctgtctaatgggacgaggcagctctagccagaggcgacctcatcaccggagcctccacaatagccggtatgatggaaacgacaggatgaggcgccacatcgaatagacaaatccgtacgcacgaaaggacaacgtagggtccatgatgacgggaggaagttgtgtcgtgtccgtcaagcccgaggctataccatgggaccgccaatcattatcgcagagacgacatccatgaacctgccacagggatgggagtaacgggtgtcgctataccggaaccactacttcacacgactaggagagggggcacaacagccaaaggactcttactcc

SEQ ID NO: 53466 - DNA, 377 bp, Zea Mays
atactagaatcagctgcgccctatcgggcgccatatagattctataaagcagcataagtttcacataaacaaaaacatcatgattatacgtatatttgcagataaatatacagtaaataaatctatatgttggcaatgcatgcatgcctatgtatgtaccatgggccctttctagcaaataaatccagctgaaactccaagcattgaaccaaaaatttgcgtgtggaagatttcagaatcgattacttcgatcaacacatataacatgtgctagtattggtacaatttgctgtctgtttccattgtaaaatgattctgtcaagtcaagtaacctttcccctattcaaaatatacgaacatcgtattctgtataagct

SEQ ID NO: 53467 - DNA, 410 bp, Zea Mays
ccgggtcatccacggcaacaccctcgggggctgggtaaacgctagtgccatccttgagggccaagctctccgtaacagccacctctaaggctgaaggaccttcacccacttccatgggagcagaacaatccagactagcctcctgacccttaagaccgcgctctaaggtcgatgaggcacgggacgctgctcgagataactccagcccggcgtcaggcacatcagcacaaatatccatcatttcaccatctgtcggctccgacaacagatcttctaggaccatatcttcaagagtctgatcaaagttggccagagacaattcttgcagaccaacgagagcagacagggctggagaaggaacaccactactttccccgctggcaatgtagcgtcggctgttcttccgagtt

SEQ ID NO: 53468 - DNA, 441 bp, Zea Mays
aggtgatgaatttggagttcattcgtggagtttatttaggctatagatggcatacaagctcgcaatcaggagtttagaatgttttgctctgttttaggctaggccacaattcatattctgtcgtgatggcgtagaagagatatgcaactctggattgatgcttctaatactagatcagttatactaattattttctctggttttataaattttgtagaaaacacttctctctagccatctatatctttttagttggtaacattttcatttcaaatcatcagtcaaagagtattaggttgggttctcaaattttgaaccaggtgacgtgaaacaaatttcacatggaaaccgactagaatagaaggcaacagatagaccaacatttaagcttgttactgtgtccatgggactccatactactacttgcttgcattggacctg

SEQ ID NO: 53469 - DNA, 338 bp, Zea Mays
gggaaattaaatttttgggtcccaccatttcttaggatgggatatcggttgatcctgagaaggtacaagaagtaatggattgaaaacctcctaccacagtgcggcagattcggagttttctaggattggcagggtattatcgacaattcattccggatttctccagaattgccaagccaatgactgaattgttgaagaaaggagtcaagtatgattggagccagaagtgtgaggatgcctttcatacactaaggcaacatttgacaacagcaccagtactagctcagcctgacaacaccaagccctttgaggtttattgcgatgcttccggtactgga

SEQ ID NO: 53470 - DNA, 406 bp, Zea Mays
ggatagcacagactcggcaaaagagttatgctaataaccggagaagaccactgaaattcgaagagggtgaccacgtgtacctaaaggtgtcaccaatttgtggaatgagaagattcaaagttaaaggcaagctatctcctcgctttattggacccttcagaatctttaggcgagttggggagatggcctaccagctcaagctaccagatcatatatctgatgtgcatgatgtattgcacgtaactcaactcaagaagtgtctccgtattctagaggaatagttaccaatggaagaactcactgtgcaaggtgatctaacttacacggagtatcctatcaagatcattgacactttgactcgggtcacaagaaagaaggtgataaaaatgtgcaaagtgcaatggag

SEQ ID NO: 53471 - DNA, 435 bp, Zea Mays
gagcaatcgccggccacgagagctttcttttcccccgagaaagtggctgacggctccccgtagacacgacgaagcgattcaggggtcgtaccggcgtttggggagatagcagaggtcaacgacggcgcacgcaggggcgggcatagcggtgacccattgctccaccggccagatgactccgcggcaaaacgacgacgctgatgattttgtggtatggtggctctctctctggtcggcaatggcggtgctcgtacctgttggtcatccttgttttgatgggagagaagtagtgtatgtgcctcgtataaatactcaagggtggagcctgagtcaaggaacgacagccgtatcctaacaaccccgccctagatcgtaacaaaccaatgctaatttcacggcggccacaataaagaagataaacaacgtcaaggggcc

SEQ ID NO: 53472 - DNA, 517 bp, Zea Mays
gccgaccgcgtcgttaatcggtgtccgaagatccacggagggcctaggagcttcactgtgttacttggtggtcgctcgtggccagggaaggaaggatcgaccacttgggcggccagaattggtcactgggcacacgattctgcctcgcgccatgggtggggtttttcacaccttgaatctcggtaaggaccttcctttgcgaacccctattatcaccgctactcgttactacgtttggatttgagattaggcataggaattgggattcggcttgaacgccggtgatggcaccgctgtgatggtgcagctgccgccgtcgtccaataatggagttgggggaaataagcccaaccgtcggatgaatgtcttgcggttaggattagattctagcgtacccgttcgcccggatggatctgcaccgttggatcgcgttctggcgcatctgaggctgtgtaggacattttaaatccgagccgtcgatcgtggatcgaagggctatcattgcataccaattcgg

SEQ ID NO: 53473 - DNA, 609 bp, Zea Mays
gcgagggttaagtgctatatatatcgtaaaccgttatggcaacaaaaaaacattgttgcaactaatgatgttgcaacaaggagaaaatgttgcaactaatgaagtcaaaaaaatagatccatgttaattatatcttattgcaaccaaaaaaatcattgcaattaatgatgtcgcaactataaagataatgcaactgaaccatacaacaatgaataaaacatttgcatttacatatagtcaaacccataatttatacgacaatgcattttgcatttctattgggtataaaatgttatgcaaaagaattatattttacatatgtgacgtcagaaccaaaattaacaaccataatatttgtctcttgacttatatattaactatatccataccataagttgtaacaaatatgttgcaccaaataaatagtgaccaaatacaaaataatttgataacacagctcacaatcacaacatcatcatactagcttggattgtgataacatagataataaactacttaggactaacatatgactggaagtgttttgggccacagtgtacccctccattgatgcaagcaatggttacctaggttgatgacaatatcgtg

SEQ ID NO: 53474 - DNA, 609 bp, Zea Mays
atcctgaacacaaaattaggagaattcatgctagaaaacctcataatgtttctcatcatgcttttatgtaggtcgggaggtttgctggtagggtttgattctgacatgtttgatgttagagagaaagagttgggtgaatttatgattcggactctggtgattcaaaaagaatcaggatttatttggaattttatcaatgtttatggggctgctcaaaatgataaaaaacagaaatttttgagtgaattgtcctctttctgttccaagtgctctcatccaatgttgtttggaggagattttaatattcttagaaatgattcggataagaacaagcctgggggtaccaataagtggagttccctttttaattctattattgatgttcatgagctgattgaattggatctttgtggtagactttttacctggtctaataatcgaaatccacctacttatgagaagttggacagatttcttgttagcccggagtgggatctgcattataataatgtgaatgttgctggtcttagtagatcattttctgatcatgtgcctttatgtcttaaaactgatttttcttctcctgctaaaagagattttagatatgag

SEQ ID NO: 53475 - DNA, 753 bp, Zea Mays
gcaatgtatggctgagatttagtcttaaatcatttggtaaggccttttgcttactaatagaatcccaatttgtgatgtcttctatgccaaaatggctttcatgcattatattatatatcttcggttacttcgggtaaaattttatgcatgaggagagagcaaagaattaacttatctgtgtttcattgtatttcaatttaatttcccagatttccaagcactatagagcttgatataattgttaaggccacttggcgatatatataaatatatgatgccacacaacacaatcaaataaaatatagagccaaataaaattatttacgaaggttgcaaaataatgtgacttaaggggctcgaataacccatcacaatccacacgagtacaagctctagtgcatgtggcgtcaatgcgtgtgcgaccatcagggctacaacaacacaacaagccttcgtaacaagcgcaatagacgcaattgtggctcggtagtcagcatacacaataagtccacataacatgcgcaacaggcgcaattgtgactcaataattacgacacatgggtagtgcctacagggcctgcgaaatatgcgtgactcggcgatggtggtctgactcaacgggagcgatccaattaattgagagcgcgacatagaaatcacatgacacagccaagtccgaacgacataaatactgcgtcgtattgccagggcgcagtcaatattcagctaatgtcataactcagccgattaaca

SEQ ID NO: 53476 - DNA, 391 bp, Zea Mays
ggggtacaggtgcacgtgattagtggctttcactgtggcagactcaccggtgacgagccagggctatagagcggtttatggtgactcactgcgacgtggtaaggctttgaggcacgcagtcgggccggataaccgcgaacgccggcgatgccagcgcgattgaacacggcgggacacgacggccggtgagaacagtggtcggaggttatctacaacgcgatatttcttaccgaggagcactttctgtgttcgaccgtgcgtgaatcgcgacgccagcgtggatctgggcacaagatcactggcggtgagggggggtgaacctgcgatctctttcagtcactgtacaatcaaaacgccattcagtctatctgatagggctatttgcagggca

SEQ ID NO: 53477 - DNA, 607 bp, Zea Mays
ctaaccggtagggaccaacttttccaaacaatctctttgaaatccggtcgaagtttccagcacaactcatatctgaagtctcttttaggagacacactagaatcagttttaagatagagaggaacatgatcagacaaagttctatcaacaccagttaccaccacatttttgaattgaaggacccattctgggctcaccagaaatctatccagtttttcaaaagtgggaggctccctattattagaccaagtatacattctaccactcaaatcaagctcaatcaaactattaacatcaatgatggaattaaacagagaactccagcaattcgtacctccaggcttgtttttatcagattcttttcttaaaatattgaaatcacctcctatcagcataggatgattgcaatttgaacaaaaggaagccagctcagttaaaattttttgcttgtaatcattttgggcagcaccgtagacattaataaaattccaaataaaaccactttctttatgaaccaagagaaccttaatcataaaatcccctttatcaacttgtctgatatcaaaaacatcagcatctaaaccaacaagcagcccaccagatctcc

SEQ ID NO: 53478 - DNA, 604 bp, Zea Mays
cggcgacatgctcaccggacagaacagcaaggagttgccaaggtgatttcagcctgaaagacttggcgtgaccggatgagtacggacgagaacgtagtgacagtaagaccttgagcagtcctagataaagagcagaaacaaggagatatggtgtacttcccgagtggtcacggttatagtaaaaaacggacactcggcaagacatgtccttatctgagcgacgagaaagttcggctaaggttggcatggactgggcacgcggcttcgacccccatgtccacgcaaactcgaactacagtgaggcaaaggccagcgcttgctagtgttttgacagaggagcgtaccccagctgagtcactagcttctaccaatttcttttgattgtaccaggcttcaaatgtttacaaggtgaagcccgactttctggctcagcattagaatctcctagaccccctctaactcacttctagccacgtccaacctcatccgatcctggacagcacggtggaatacagcggggaggggaaaatctgttccagagtttggacttgtcaaaactgaattcgcactccaacatatacctgtccgactcctgtttatgcct

SEQ ID NO: 53479 - DNA, 664 bp, Zea Mays
cggcttaaggtttttccaacttaagtcgattactccgttagcagggtatagtaatcacctaagttgtgtaagcgtgagcatgtcgcaccgacttaagacgtttctgacttaagccaattgctccgctagtagggtatagtattcaccctaagttatgtaagcgtgagcatgtcgcaccgacttaagacgtttccgacttaagccgattgctccgttagtagggtatagtaatctccctaagttatgtaagtgtgagcatgtcgcaccgacttaagacgtttctgacttaagccgattgctccgttagtagggtatagtaatcaccttgagttatgtgtatgcaagtatgttgtgttgactaaagttgtttccgacttaaactgcttgctagttgggagtttgtatgtgatcgaacacaaaagctttattgataatgaaccttttgtttacaaagtgtggcttgctgactgtaattttgatgtagtgctatgggtagaatttcctgggtaagtcggtaggatcctggccgagtgacctctgcaatgatgaatcgcccttcccatggaggagacaatttgtgtcgcccttctcccgtcagcacccggcggagcactaggtcccctattacgaaggatcggtgccgcactgccttgtcatggtagag

SEQ ID NO: 53480 - DNA, 555 bp, Zea Mays
ggcaaccactgccaccgtctgcactatatggtatgtcgaaactgagtatagccagacagtccgagtacaatctcagatcgtctgaccctctcacagaccgtctggttccatatgtcagactgtccagtgcagcgttaggccctccacatggcacacaggtggtgccaaacactatccgatattccagatataacctcggactgtccagtcccatagcagatcgccccgacaccttacgccatacggtccgatgtcgcactcgactgtatggccacccagactagaccgtccaagtacatctacacaatacaatgtgctgcacaaaatacacagtttttctacccatcgcaacaacactactccatcttcgacgcaccaaagctaaagcattcctatgcctagggctgagcaccgctcaatgcataggcaattagaggggctcacaccaccacacatggattatccttatacggataatcggcatgacactacccagccaccagagctccatgtctcagaatccagtactataccactagctactatggataaaat

SEQ ID NO: 53481 - DNA, 945 bp, Zea Mays
tcgcactcttttcctcacaagtggtgaggtttttaatgaagcggtgccatgtaataaaataaacagaaaaatccccccccccacaaaagaaggaagtgtcgctcgaacatgtcgaaaaaggtcgtgaggtcggccttcgctattcgacggcaagacaatcaccacaacggcaagtcttaagtcagccgtcgtgtgcgataatcacatctaaccaagcaaaaagtcgcctaagggtgcagccggattatcaaaaaacgtgtgcaaaaacacctaagggtgcgagtcgttcgatagacgcaacatctatacaagcaaaaagtcgcctaaaggtgcagccggattagtacaaaaagtacacaaaaacacctaagggtgcaaagtcgtctgatagacgcaacatctatccaagcaaaaagtcgtctaagggtgcaaccggattagcacagaaagtgtgcaaagacacctaagggtgtgaagtcatctaacagacgcaacatctatccgagcaacaaatcgctaagggtgcagccggatatgcacagcgacacacgaagcaaaccaccacgcatagaaaaaggaaaaagcctcagtacatttaagaactaaagacatgcatagtcgtccctcggtgaagggggtgagggctgcatttcactcaaatcgttgagccacaactatacagatcttccaaatattacaaaggctctgccttcgagattagaccagcctccaagaaattaaacaacataagcctaagctcttcgcaatcgaaaagtgccctaaggtcttgttcttcgaaaccccatttgattgttggtgcaagaacaatccggcaaggcccctcttctgaccgcaccctccccattcttgaggacgcaggggtgacatgcgaagcacctcacgaagcgacccacgagcaaggcaccccagtcccatatgatgacg

SEQ ID NO: 53482 - DNA, 428 bp, Zea Mays
aaaaagctgaaacaaataggggcaataactatccaagccacaaagcccatgctgtcaccatgaggtcaatgggtgatgtcagcgagctagctttcaaacctcatcacctagaaccaaatcgagtcacgcgggtgagctgtcagtggcaagcaggccccttcacacagaagcttctcccatccagcaatcgtagcggacccggcttcgcgtaaaacaatcaaaccgtaaccaaggacaccggatccgtaacaaactgatacacgatcgcaacgaactccaaaaccgccgtgattctctccctaccagacgagcaccctggtcgtagtttttatgcatgcccacagcccacagcccacacaccctaaaggccgtcaagtagagctagcagctagcgcaagccattgccaagaggaggagagagaaccgtg

SEQ ID NO: 53483 - DNA, 434 bp, Zea Mays
cccttggtgttctcgtattgagggctgtgctctgaacccttggtgcaggctgtcgtccggagcccgcgtcgtgatccactgcaccatcgcttgcaacgacagcgacgaaggctctgaacgctcagggtcaggggagtcacgatggctgcagggagatcatgctgctgctttggaaaattagtgagagtttacattgcttgaaacgtgtattcagctagatgatccttttcactttcttaatttctttccttagaaattttatttaggtccccttatcattgtatcagctatgcgtttcgccaaaaaaaaaagatgtgtcgtttatatactgtctccgccgtggtttcataaaatttacttgtattggtcaacgatacaagtgcggtgagttggcaattattattcgataaaaaaactgataaaatttactgcaa

SEQ ID NO: 53484 - DNA, 402 bp, Zea Mays
tgaagagatgcctccagaacaccaagtgaagtatgataaaatcaaagctctttttgaagccgacctcatcgactctttcgagaggactcacaaccatagcatccggtggaaggggttctcgcctaagggcgctcttgatgaggttgacctctcgttaccttcgtaagagcgcactagggcgttacgtcaagaagtcaactacatagtggctcattcactccatcgtcactccgagattctgatgaatgcattcaaacgcgcggccattctcattgtccaatagatcatgaagcatcagtactctccaatgggtttggtgataggaagtcacaaaggggagattcctttctagactaggccacctctaccgtattcagtggctgccccagaagcacaattggc

SEQ ID NO: 53485 - DNA, 870 bp, Zea Mays
cacacccagtggcgttgaagacactcctaacaaagcctctaacttggtcatgccttcgaccctgctcacaccacaaagttccgcaaccagtgtgcaagataaggtgtgcatcccataaacttccaaatttatgctgcaaacagtacaccgtctgttactgaccccttctatgcagacttttggtattggcagcagcactgtggttccaggtgctactcccgctataacaaaagaactgacatccacgcctaggaagaggtaaattccgcttcatcgcaccccaacacagctttattacaggccttcatggttcatacaaacaaaaaatgtaactgataatgattagtgtgcatatactcaatttgctcgtatctgaaatatgtgattcacatacatccgattcgcaaggatgaatcaacttctgtctttagaatgatttagttactgctatgatttgttacccaaattacagagattctaaacttgttgttagagtttggtcatttttcagcttaccggctggggaccgaagttatggtggcctggtataaccgtgtgttgggaggggggacaaacaaatcctagacataatccgaggccatgttgggttcattattagctacctaattttagctggggctaataggtgtgctaatgttttgagccaactccccaaccaactgttagctagccatgcctaatttgagattatttttagccaaactagcaactagccatgtgcatccaaccatgtcctgatttgatttggacatggtgctgccatttatagtttgaatacttcaatacactatgcaagtagtgctgccatttatagtttgaataaatccactgccagtccacgtgtttagg

SEQ ID NO: 53486 - DNA, 1317 bp, Zea Mays
ctgggccatagtttgcgctacccattcgagtcggatcgtctctggcaacacccttgggggctgggttgcagcttgcgctacccatccgagccgaatcatccccggcaacaccctcgggggctgggtgagcgccaacaccatccttgagggccaagctctctgcagcagccacctctaaggctgaaggtccctcagtcacttccatgggagcggggcaatccaagtcagcttcctgaccctcaagaccacgctccaaggtcgatgaggcgcgggacgctgcccgggatgaccccaacctggcgtcgagcacatcaacacaaacatccatcgcgtcaccatctgccggttctgataacagatcctctggaaccatatcttcaagagtttgatcaaagttcgccagagataattcttgtagaccaatgagggcagacaaagcaggagaaggaacgccactgctttccccaccggctatgtaacgtcgactgttcttccgaatcagagggatttcatcttcttcctcctcatcatcttcatcagcaacacggacagcacacccattggggtcagcgtcagatgggtcacacccattgggatcagcttcagtaaattcaggcacgggcacttcctcagcagcaggagccgaaggaccagcatcccgatccaagcaagacactcgccgaagacgtctcttcttctttttctgcccatcagcaggagaagcaggttgattggctcggcaagggcgtttcgggcaaacactatcaggcctctgaatatccaaggctttaccagcttctggaggcgccaacgccaatgttccagcatgagcgacatcagaagaatcctcggctaacatatcaagcataacacttatctctgcatcactgggatccaaaggcacctcaaagtgaacccgccgttcatcatcaggaatttcttcaagcaaagcaaccaaagcgctaacttcttcggcagagggtcgcactctgaggcccaaaccgccatcaccagcaggaggatttgacacaaaatgggtaaagggtttggaaggaggcaagttccaggccgagtaggcaacaggggcaccaacatttgataccttgcctctgagtatcatttcgagccggctcactaagtccacagcaggaattcttttattggtgacccgggtggagtcagctaggccttggtacagataggccgggtatgccctgtccttcaatggctgaatattcttgaagacaaagtcagcaaccacagcctctgcagtcagacccctctccttcaacaatccaacttcagctagcagaactc

SEQ ID NO: 53487 - DNA, 365 bp, Zea Mays
gcaggaagcagtagcaataatggctccaattcggtccaacagcagcagtggccaataatccctatcctggatacaagtagactggtgttcggctaccctttctactaccctgcagccactgcaaaccaagctcctcccgctacagctactgccatgccaactactggaacaaataatggagaaggcgcatcaacaagcagcaataggtaagcagacaactcaaactaaccaaacttctctctgttcttcgtctgcgtgtgtaacactgtttctttcatgctattgttatagggctccatcaacggcggcagaaagagggagaggatggaattcatggctctcacttcgccgcaattagtcaaaac

SEQ ID NO: 53488 - DNA, 472 bp, Zea Mays
gtcatgggcagatattaattgcaatcgtagatatggttgcagacacacatttacaatatcacatcgaagtccgatttgttgacatccctatccgggtgcttatataagcaagcacacactagtgtttcggtgtccttttcacttttcagcatgcatgcaccgctgggcaccagtacttattatgaaatgcatcgaggaaaagcatgtattgcgtcacccatattcgtcagtgggggattcatgggcttgcattcagattccactaatgctgtaatgcagcacctagcttggccgatcggtggcaaatccccccaaaaaaatcactttattgagcgagccgacgggacaattatttgtgcgtaacgtcaaatagctcattggttgacgtcgatgaacatttattcggatgtttgttgctaaggctgcatccctttcatttttctcctacgggttgtttagatctatttatttt

SEQ ID NO: 53489 - DNA, 730 bp, Zea Mays
acaacttcgtacggggcgatcccgaggggccaattgaatggatcagcagcgaggccgaagcctttgaggagattttaaatgaccgtggggacgtctgtgccttctcagatgcgaggggaattgcggctattttggagaagtcaggttgtgatcatgtgaaagctttggcccaagccgaagctactttatctattgatgacacgaaagacccctcggccgaagcgagcttagttggcggaaaattctttactgacatctgggaaaatggcggccgagggatggcccacgagataataaaaaagagcgaaaaggatactgacgatgcaagggaagcaacgaaggcagctgaaaaagctgcggaactcgaaaggcggataggtattgcttaatagcttttaactttatttttcatttttgtgacttcgtacttatttacattttctaccgcagtcgaactatctcctcccccggagcccttcgagtcattgatcgagccagaggcaaaggaaccagcagaaattattaaaatggccgaaagcattttggacgaagtcgttactcaactgctgaccgaagctgcagacaaagttttgaaggaagaataatggatattgtaaaaacattgctagaatattaatgtaacatttgctggactatgcttgtaatatttggtgctcatgtaatgtataaatggttttgtaattcatttctttgcgatgcatgaaacttt

SEQ ID NO: 53490 - DNA, 361 bp, Zea Mays
gtacaaagggggcgtagggtaaccagcggagttaagcacttcccacaagatggaaggaaagccatcgcgagaaaggaagtcagaactgaaacgagagtctcctccactggcgggggtgggtgaattcatctgcgaaagggaatcaaagataaagattatggtggaaggaaaaagaaaaagagagcccggatggttttagagaaagtgggttagctcaaaattttaattcctctttatgttttataatgcatgcatgctggaagaaacgttgcctcacaaagagaaaatagggtgcctttttagggcatccttaaaatataagtactggcccacggggcctaattagttagccacctatttc

SEQ ID NO: 53491 - DNA, 630 bp, Zea Mays
taaggtaggggtgttttctccttaggattattttcttatgacttttcaaagttttctctgtttttcatgaataattgtgaatgcaatttcctttcactggattatggttcaacagatttttcttgtgaactacataacttaggcatgctaggacaaatatggttgccccctggtttcacttttcaatcccttttcttaattttcctaagtttgagcataaacaagctttaatgaataaatcttccttaaccttgtatactggggtgtttattaattttaaacagtgtaattactaggttagtgtctccactatttttcttaaccctggtttaacaacatttctatttttccctttaatattaagttttgggcagttttcttatttaaatcaaaactctagaaaatattacaggaactatggggtttatcatttttgcctgatagtttatatttcacaaagtctagcaaaattggtttgactaattttagatgattattcttcaagttattcatttattaagttctctgcaatatttaaaggaaaagtaaattcgaaatggaaaagaaatacagatttgcgttgaagtccctgggttttctcccccttttctctcacaaaacagccctcgg

SEQ ID NO: 53492 - DNA, 447 bp, Zea Mays
cctaacgtgactattgttaggcgtatcctacactatctttggggcactattgattatggccttctccttcgacactctactattagtgagctagttgtctactccgccactgattgggcagattgtctcgacactcgcaagtccatggcgagctatgtgatgttcctcgatgatgatatcgtctcttggtcgtctaagcgccagcccaaaatctcccggtctagtgctaaggttgagtacaaagtcattgccaataatgttgcacaagtttgttagctcgccaacccctccaggaactccataatccattgaccaagagcaccctggtctattgcgacaatgtgagtgtggtctgcctttccaccaaaccagatcaacattagtgcatgaagcatgatctccctttcgtccgcaagcgagttgccaacagcgacattcaagtttttt

SEQ ID NO: 53493 - DNA, 408 bp, Zea Mays
ctttcagttcatgaggaatttgtctagggtcaacacatcaaacttgtagagctactgtaggagtacaactttgcttaagtgattaagccgtggtgtcatgtaagatttggagataatgaggtctaaagtcaagctgacagtcagccaatgaactgaataaggggtaacagtgaagttgggtaagttttgagattagattcggccaggatccagtcattgcttaactatggttgctatagaaagattgtagctaaatcatagggctacaactttgatacagagagatggtcgagtcactacatgaatttgggaacaaatctccctacaaactgctctatcacgctgactgaataagaatctgatggtacagtaaacaaaaatcttctgttcagccccctcgccgccggt

SEQ ID NO: 53494 - DNA, 418 bp, Zea Mays
gttgttgtcctcctcactttcattattacttccgccttcggccactgtctgctcagcttcggcagtagcaccttcgacagtagtttcttccgacacaaccagacctgatcgtctcatcacttctgatatcggtgttgtttcagtcacttcggcctagcagtggatcttactcgggccatttcagtgtttagactacttaagatgaagctaatttcaagtgacgaagagcttgttcggatgcgcaatccagaaagcttcggcttcagttaaaatttttaacagcacaacagtgcgatggcaatgaatgctatggtaacttctcaccaacctgtctgcttatatagtgttgcaggagaagaagacgaaccgccagaccgtctacactggttgaacggtgtaccgcatagcgcccggaagg

SEQ ID NO: 53495 - DNA, 634 bp, Zea Mays
ccttaggaggttccatgatagctggtattggagcgaagcccgtctcttcagacattacgtagtacttcaaaagaattttaaaacacttaccttgaaaattctttcgttcttatcttaccactttctggtagtaacttaccttttaaaagttgggtaacagagtgctaaataaaggtatatgtaggaaataggggatcaatgaaaagttgatcccatgattattaagttatgcatgcatcatgattaaactacactaaataaatttttcccctcttatggagatatggcgtgaaccaagaccactcagcgcaaatcaaccggaccacatggtgtaccccggcatcagctggcctctagacctgaaggaagcagcagtggaagcaatgaccccataggggatttggaggccagagtggagcgactcaggtctgaactacgccacaggtgttggtagcgtgtgtgcgatagccgccgcattgctgaactatcagaagaagttactcgcctgcagcaggaaattacagaacgcgatacgaccattaactgggccataaacttgcgctcttttgcctgggattgtgaagccaaagctctagctcaagtagcagaacttagcgcatccctagaaaacctg

SEQ ID NO: 53496 - DNA, 361 bp, Zea Mays
ggtcaatggcagacattgtcaacccctgaagactaactagtcccgacaaagcctgcatgggaatgtcactgctgctatagctgcggctgttcttgcgaatcaaagggacatattcctcttcatcctcattgagcacacgatcaccaactctgacaccatcacaatctctaatgtcatcctcgaggttggtgctcgctgggccaccgctaaggactgaggccgtaggatcagcatccagttccaagcctgatgaccgccgaagtcttttctttcttttcttcccctcggcaggcgcgactacatggctcatccgacgcggtcgtttgcgacgaacactttcaggactctgaactccttcatc

SEQ ID NO: 53497 - DNA, 573 bp, Zea Mays
gatcagagcatacagtggcgttgctatacagcagacaatcagggaaaaactcctcccaactagtagtgcaaaaaacatgatcaagcttcacaagcatgggttcctatctctggttcgaccaagtaaattttctgccaatcaaaggaatttctttcagctccatggagttaattaggctcctgaaattacccatcaaagtcctattgatgttggagttattcttatcctcaggcttgaagatcagattaaaatcaccacataatagccatggtccaatacaaacatctctgatctcccgtaattcctgtaggaaagatagcttgagactgtcctgatgaggcccatacactcctgtgaaccaccaagcagcaccggactcatcctggaattgcattgagaccgaaattttttttataacagacgcaaccgaggagaaagatccatcacgccaagcaagcaacactccccctggatccctgagctggtttgaatacgaagtttctgaaaccagccccaaggattgagaggatatcaaaatctgaaatgttacttaatttggtttcctgcaaacaa

SEQ ID NO: 53498 - DNA, 315 bp, Zea Mays
tcttagagcatctatcgtttttcatgcatggacaccgcctgttgtaatcaccgcacggaccatgtatcatgaattcatcaaccagagcatagcccaaggggatcaagggcaacgtcaggtatctcagcacatataaaagcatcgatggcacatgcgtcggtctccgaacgaccaccaagtaaccatagaaggcagtgtatgtgcggtaggcccctttttttggaattctacggtgtaaatcactgcataggtcagactatagatgagagcatgcaaaaaaatattaaggaaccactcaatgtgacaagttaagat

SEQ ID NO: 53499 - DNA, 666 bp, Zea Mays
aatggcttctgcgtagtctcgttagttttcatccgatgaccttagagtccggtgtgaaatggatgtgcaacaccgaacgataatagtggtaatatggctgagctacggcttttgataagggctcaatagacgtgtctagtgcgacatcgaatacgcaccgaataggagatatttaacagaccagacactcgagtgtaagaatcatgcactagacatgtccggtggatgagcactagacatgaatagtgcttaatagctagtttctagagccatttggattcgaccgttggacatccattgcacccgcaacagctgcctcaagtgggtaatagttggaatgtttgtgggggttataaaaaccccttgtggttatccatggccacactcttagacccccaaaatatgtgtacattctttgaaagataagacacacactccactcgcttgcatcctttgatccatcaattaggtgagtttggagagcctttattgcatttgcgtcgtcattgttgcattttattccattggttgggtgagttggtcggttgttctcttgttattcttagtgattgtcgttagctagcaggtcgggtgaatgaagggatcattgggtggctttggtgattgttgttgtctccaatcgatcaattgtaaggggttattatg

SEQ ID NO: 53500 - DNA, 747 bp, Zea Mays
ctcgtacacgagggtgcacgacgcatggcagacgccgaccagcctcacgatgtgcgggtgctccaacttgctcagtaccattacctgtgtcatggagttccaaacattaattgcacatatgacttcaaatactagatagaaagaatggttgcatttagagcacgcgttacgttacctcatgctgatactctgagaaaccttgtttgccgtcaggcctcaatgacttgatagccacaggaatgccctccaagtctcctttgtacactggcccgtatccgccttctccaatgatattttctgagcggaagtcactggtcgctttctgaatttgtgaagctgagaactggacaatgtgctctggaattttcagctctggatatcttggttcagccaaacacttctttggcgaaacggcggcagtttgagctggtaacgagctgcattcttcatgattgtgcacctctccttgcagctccttcagcttcttttcgagtctgtcaatttcctcctgtccaaaggcaacacgaagtcaggggcgaagccagccaataagtgttttcattagaggataggatcatctacacggtaaagctgtacattatgctgtttcttcattgattttctaaaatctatcggtgtcacataacaccaacaaatgcacgtaagaaaacgaaccattttagtcagatgaaatgtaatcatcgtttggatcttaaactattgagcaattcttctcctctccatctc

SEQ ID NO: 53501 - DNA, 281 bp, Zea Mays
gttgaagtctgaatttcagactgacagtgtaattacagagactttgggcacgaattcaagcttgatttagtaggaatttgcccatagctgccatgacaaaaatgtagctggttggtagctctacaactttgctgcagaactttgggcaagttgctatagaaatatgagagaaatttggccctaaactgtgactgtcaggcacactgaatcgggaatcccatggtacagtgtgttgatcagactgccagctcaaccctcgccgccgtcgaggcgcgcgtaga

SEQ ID NO: 53502 - DNA, 900 bp, Zea Mays
aaaagatcttatgattcagtgtatctcgccgccggtgaccttacgccacgattgacgccggtcatcgcgattcatgtgccctggtttgtggataacggctggtggtgaaagatctcaacgcagggaaggattggagccttatcactggactattcactgtgccacttgtcgcgcgattgactgaggtgtcctcgccagagttcgtcgtgtttcgtagccgcgccacgtacttagaagagctactgtgttgcagtagatagccgtaggtagtctatccatcgcctgagacgttgccccagtgaacaccacggtagttcgcgtcggtgactcacccctctcttcgaccaccggtctccccctttcaaaattcggagccaccgcccttagacactataaattgatggtgctgctagctccgcaaggttgtcaccaagccagagcatccacccctgccctcgattagccaccatagttggagaattttgttcttcccccaaatctgttgtccgcgccaccgtgagacgtcgcgccgtggccagccgtctccatgtctgccctcgctctccttggccatgttttagcacccacacatgcttgtgatactcatcggctcaacccattatgcttgaccacactcaatcgaccggaacaccttgatttgtatgcagtgttcgctgtcaccgtggtcgagtgaatccagggcaggattagttcaattgaggcttgttctacgttcgcctcgggtcagtaacgcctacccatcagttaatttaggcaccaacgccggtcatggctggtctaagcaacaagatggccggcggcgagcgcgacgttgccagggttcgttttggagaagaaaaagtaaatagagggccttagtgtaaatgtcagagacacgcg

SEQ ID NO: 53503 - DNA, 394 bp, Zea Mays
gccgggaagagcgagggacgctcccgtggtcgagggttgggataccgatgactctgtgtgtgtgcgcgcgcgcgccccaagtccagtccaaacatccatcggtagggatgggactgcctagtcgaggagaagcttcgctggcgccgcgccgccccgcattcgtcgacgaggtccgttcctgctcaggtttatcccactccgcgttcatctcttccgtgtaacaatagagggatcgaacaaaatgcaagtgacgggaaaccgagcaaaccagtgattctcctggagggaagcatgcaacggggccgccaggccggatgctgcgtttttgtttgtagctcgcagacttcgatctgcttgatttcactgacgtgctcatcgcagaggcattttcgac

SEQ ID NO: 53504 - DNA, 567 bp, Zea Mays
cagctttatactccgaagtcgcgagtccaaggaggatgggatctgggaaatcgcgcggagcctgcggagtttgttgcggtggaaatctgttacgaggatagcggtgagccggtgagcgtgggcctgcggagtttaatttgttgcggtggaaatctgttggcgaggaaggtgatgatcctgacgacctgggcccacgggtcattggcgatcggtggcgcagtgcatccacgcacaggaggcggagggggtgccaggtgaagtgggcttttgggccgcgatgaggaggaattggcccatgcgcatgtgagtcatctcttccctttttcttttatgttttctagtttcacttcatattatttataaatttaaatctagtttcaaaatttcaatcttaaagtgattatacaaaccaaaataattcagaatgaaatgcatatttatttatttatttatttgtttgtttgttatttgcataattgaatgccattagttgagtatgcaaagagaaataaaaaggaattcaaggaatccccaaaacatccacatataaatttacttatttatttt

SEQ ID NO: 53505 - DNA, 473 bp, Zea Mays
catgaacggacctgagatacgcgggccacgacgaggtcacaccgcacggtgttcttggttgatttgggggaaatcccaaattggagctttctggtggaggatctgaggtacaggtgggtgcgctagatgcctgaatagatagcgaagccgatggcacactcaatttatagtctccaggggcggtggtgcgtgaatttgagttagcgcggtggcggccggagagtgaggagagtacttttgcaagagctcagtggcatctaccgtggcggcctcaccagcgacgaacctatgctatgaagcggtttatagtgactcatcgtgacatggtaaagcgtcgaggcacgtagccaagctggataacggcggacgccggtgatgccagcgggactaaccacggcgggacacgaagaccggagtgaatagggttggaggttatctatggcgcgatatttcttaccgagaaacattatcag

SEQ ID NO: 53506 - DNA, 376 bp, Zea Mays
gatttattggagttgctcttaggctatgaaaggaacacagatgcctaaaagacagtgggtgaattaagacttctaaaaatctcacaaatctaggccataaataaatctcctatacaaataattaatcaaaaatgtgcaaactaggttgtgcctacgtgtagctatctctaccgcaaaagagttatgcaacctaagttccaagtctaaatattctaaactagaaatagagagattgaaacttaagtacttaatgtaaatgggaagctaaagggcaaatgtcaagattgcaaactcatgtggacgcgccgatatttttacagaggtatccagaaccacgcaaggtttttactaatcctcgcacaacctttacccaaag

SEQ ID NO: 53507 - DNA, 743 bp, Zea Mays
aaagactaatactaggtttagattactccaactcctaatgcatggaaagaacataacaaataagataaatgtgataaattggtttgattggatcgatggaaggtgtttcaatcggttgtaccccttatttatgggaaggtctggacctgttacaagtcggttcccaagtcaatcatgcgaagtttgctaacaaatcccacaagaaattagaatccctagctgattctgtttccacgtgaaccgttcggactgcggaccatacgagccctggggccggaccgtgcgttgcctattttggtgctcaacaatacagagaggaggagaaatattggggggtgcttggagatggccttaagcgatctaggtgaccattatgtgaacactgaacaatacgttatacgttccattgcaatgtgcagatatgtttgctattgaatatgaaaacccaacacataaatgagtcagcaaacaaagagatatgaaagagccacacatgaacccaagaggttcaatacaaaagtaaatatcatgaataatatgatgtgtgctacacatgtgtcgtctgaatcctaataacaaaagaaaatgattaatgctttgtgtcctccagcacgtcgaccataaattgcatcaccgccacctgtgcctgcagcctcgctatgtagctggcggcgtgcaggaggagcccatcgacctcgtcatcgcagctgccggtcgggacgaggcgcctcaggacttccatc

SEQ ID NO: 53508 - DNA, 841 bp, Zea Mays
gtgggatttagtgaagtaatgttttggtttctctgcagatacttcaattccttgcagagtgagtgcttccatgtatgtttcttctcggatgtgaacatggttatctcggcacctacggggagtgggaagaccgtactatttgaactctgcattctgaggctcctctcaaggttcctttcaccagattggaggttcaatttaaataaaggaactctgaaaacagtatgtaccgattctgaatgccatttctgaaaaataataaggcgcttataatgcaattgcgagtttaggatttgtgtattttatttttatcttgtggttcactggatttatatggcagatctacattgcaccgtcgaaggcgctggtacaggaaaagctgcgggactggaacatgaagctgggcccattagggatcaattgcttggagatgactggtgacggtgaattttgcaacactaaagccatccatgatgctgatttaatactcaccactcctgaggtccatgtcactacttactttgacctgtagaagttaagattagcctgctaacccacttcttgctttctcactggaattgtaatacatgcagaagttcgattctatgagtcgacatggtataaaaagtggtagattgggtttcttctgtgacattgctcttgtccttattgatgaagttcaccttctaaatgatccacgtggagctgcgttagaagcagttgtcagtaggataaaaatgctatcgcgacatgataacatgaaatcttttcctctggctaatgttcgattaatcgctgtttctgctactatccctaatattgaggacataggtttgtaact

SEQ ID NO: 53509 - DNA, 882 bp, Zea Mays
gaaatgaagtgtgggcttttgtgatgctcgaagcaatacaggaggaaggtgctgaaaaggaacaggagccgctgaggcagatacttaaggagtttgaagatgtgtttgttgtgcccactggactgcctccggttagaatgtatgaccatcatataccattgcttccagggtctattccggtgaattccaggccttataggtattcacctttccacaagacagaaattgaaaggcaagtgacagagttattaactgcagggctgatagtacccaatgccagtccatttgcatctcctgtattactggttcagaagaaagatggcagctggaggttttgtatcgattatagaaggttgaactccatgaccatcaagaaccgatttcccatgcccttggtggatgagattctggatgagttggcaggaactcagtttttcacaagtttagacatgactgcggggtatcatcagattcggatggcagaggaggatgagggtaaaactgcgttcaaaactcatcatggtcattaccaattccgagttatgctttttggcttgacaaatgcaccagcgacattccaatgtgccatgaacacagtgctagaaccgtttctacggaagtttgttatggtattcttggatgatatattgatctacagtccgagtctggaggagcactacaaacatatcaggagggtattgtccaagctcagagaacaaaagtttttcttgaagcataagaagtgtgtatttgcgaagaaagagctgaaatatcttggacatattatatccagtgaaggggtcgcgacggaccctgcaaagacagctgctatgctggcatggcctagaccacagaatatcactgagttaagaggatttctgg

SEQ ID NO: 53510 - DNA, 419 bp, Zea Mays
ctttagcacaataaggacacgtcaatctaccatgcacgctccatccagagaaataccatacaccataaaatcatgaaccaagaacagatatgcaacacgaagattgaatttctacttcttgaagcagtcataggcttccactccttgccatagcttctttaactcttcaatcagtggttgaagcatcacgttgaggcatacgccaggatgcatagcccaggtataacaagacataggaacataaactcatatttcatgcaaagagcaggtggaaggttgtactatatggcaatgacatgccaacatgaatacgacgcaacggtcatattgaaaggcgtgaaatcatcagttgccaagccgatacaaacgtttcttgcatcactggcaaactctggattaaagttgtcaagagccttcca

SEQ ID NO: 53511 - DNA, 358 bp, Zea Mays
accatccttcttctccacaaacaacactcgggcgacccaaggcgaggtgttgggtctgatgtaacccttctccaacaactcgtctacaccaattctagtccggacacttgataggctcttttagaaataggggcggtgccagggataagctctatggaaaattcaacctttctctcatgtgtcatgcctggtaactcctcggggaacacatcggggaattctgacactactgtgatgacctcgagcggactgacttcctcactatggatagatatctggtgacagcttcctttccttggttcaaacaagaacaactccaccaatacttcttctcctaacaaatacatcaacctcaaag

SEQ ID NO: 53512 - DNA, 463 bp, Zea Mays
tgttagaccaaaggacataacattgaactcatacaacccatacttggtaatgaatgccgtcttcggaatgtctgaaggccgaatcctgagctagtgataacctgacctcagatctatctttgagaacacgctggctcctctcaactggtcgaatagatcttctattctaggcaaggggtacttgttcttgattgtgacctcattcagagctcgataatcgatgcacatcctcctagtgccatctttcttctccatgaacaggacaggggcggcccaaggtgaagtgcttggtctgatgtaacctttctatgacagctcatcaatctgcttcttaagttcaaccaactctggtccatataccctataagcttttttagaaatgggggcggtgccaggaagaagctctatggcaaactcaactttccgctcaggtggcatacctggtaaatcttccaggaacaca

SEQ ID NO: 53513 - DNA, 430 bp, Zea Mays
gtggctcatcagaggaagcaggacctccagaccctgagggagcccgctttgtacgagcagctgggttggtggaatcaacccagtagggtacatagcgggagtgtttgacaggtttctcgaagtaagtctgagtgaccactttgatcatcttcataataaaggctgcatgaagacaccccttgagaggagaccaggaagcacgaaggatctcttcccagatcatgtcaaacacattgatgcaggtgagactattgagagcaaggaggagaaggaagacccgactctccccaaggacgttcatttgattcccgccctttgggagaacgatcatcctggacaaagagttaaggtacctgtagtacctatgcatgttggcggtggtccagaactcccgatccatagagacatgaataaattcagtctcttcccg

SEQ ID NO: 53514 - DNA, 523 bp, Zea Mays
gtgctctaaagatcagatccgctggtaatattgcctcagatccatataccatgaagaatggggtgtttctatgcaaggcctagcttggctaggttcacaggctccagaccacatatggtagttctctgatccattttcctgcaagcttttcgctcttgtcgaacacctttttcctgagtgcatcaagtatcattccgttggctctttccacctgcccattagctcttgggtgtgccactgatgcatacttgatctggatgctcctttgctcatagaaatcaaagaaccctgtgctagtgaagttagatcctaggtctgtgataatgctgttaggtatcccggacctaaacattatttctagaatgaattccaccgcttttgttgaggtcaaagaggcgatggtcttatactctatccatgaacttatcaatggcgaccagtatgtgagtatattccccttgttttttgaatggcccaatcatgtccagcccttagcatgcgaaaggccaccttacaggaatag

SEQ ID NO: 53515 - DNA, 626 bp, Zea Mays
aagtcattgactttctcaaccaaaaactagaaccaccaatagcggcagtgagggatttgctagtggactcatggtggcaccgagagattgttggggaagtcagggtcgcactgtcggtaaatcaaagtgatgagggagtcgctgggtaggcatgattgcctcctatatgggaaaggaggcggctccctcgctgccactccctcatgctggatctagactatccatcaaaattgggaggggaaagaggtgggtgttgcatatggctagtcatagaggtaggtgggtgctagggcttggagcgtgtgggtttcgtgtcaagcatggagtactaatgctaggtgtcattcggtgatttccacagggcacacagacaaggaggggcaagcaggagagaaggcgcatagaaaaagaaatgcaaacaaactttgtggttgaaggaactgtgacacataagaggggcaatgaactacacaacttaaaaattcacatcttaaacaagaaagctaatttccacataatcaaaactgatgcaagaaactaatgtatctagagtttaactatagtttttctaggtgtgttgctatctttatcgcaaaagagttatgcaaccttggtttataatcata

SEQ ID NO: 53516 - DNA, 392 bp, Zea Mays
ccaactgccgaagacactatagctaccgaagctgcccccgccgaagctgcaactgccgaagctgcaactgtcgaggatacaaatctggagggcacattttctgatattgataaaatgcttttgaatatggccgcggaagaagctgctatagctgccgaagagaccctggccacagtgccaggaaaagagaaggagatcatcgaagatacttcggaggaaaaggatttcaattttcaaaacataattggtcaaaagctgtctaaggctgagaaagaagagctgagagattatgcaatatcatgcggctatcaaccaggagcattgctcttcgacaatattgacgacaaaagcttaggatgcctccgagaccgaactggagcgaatgttatcag

SEQ ID NO: 53517 - DNA, 460 bp, Zea Mays
atctcgatgagtgctgtagggaatctcgacatcatcacacgctaggacgatgactcaccccgtaagcagcctttgacccataccctgggcgctgttacaaccactatggcatgggcggcctctcccttgggggctcgggcatacgaacaacccctcgagcttggcctcgactctatacaggaagtcagcaggcacaaatctactacacagtacgttgtcacgtagatgccatgcagctcttcttcgaatacaagacccggcttccctaaagacgctccctttggtgtataaatagggtcgtggtccctccatggatgggggatcgatcgacatcgacgacatcaacatgcacacgacactcatagacgaacactcgctctcccattctgtcttagatattggcacttgcctcaatcatctctagggacttgaggacttcccctctcctattgtgcttgta

SEQ ID NO: 53518 - DNA, 802 bp, Zea Mays
atcggatacatggtctactcttttcattctgatatgtagtttccgatgaactgcaatgcagattgtctactcttttcattccgatatgtagttttcggtgaattgtagtgcagatcaagaacaagaaaaggatggccacacgtatatatgcatatttttttcagcataacatgtaagaaaattagttgaatatttgagtggtgcacgacaagtcgacaagactagctcatggctatggactagctgtttgaaaacgatttggccgacaagtttcacaaagtcatagtcattcttaaatttgaataggataatgtgagatcaatgagcgaaagggatggtaaagctggtcgtttcagtgaagatttcagtcttttagacaaaggcaggcattgaatttccaaatctcagttaagctacgtagaagagtacttttggggattagattacaattggagccacactctgcctcatctctgctacaaaagatgcaaatagtcagacagatcccaactggacgaaaggtgatgcgcaacaacgcatcggattttggcacagatggcatgaacatggctagtattctggtaacggcatcaagcggtcacagtcgagtgcaacatagggccagcaagatgacacccaagcaccaaagatgccttacaatcagggtcgaataagcaaaccatgttattgttaggccttgtgccgttattctcgttccatgtgattgaatgtgataggaagaaattaagaatattttttacatgctagggatttaaacctactcgatctcatccaatttacg

SEQ ID NO: 53519 - DNA, 591 bp, Zea Mays
ccgggtagctctgcgctaggagaattgggggaggatcgcggcgtactcgtaatcgcgtctgtggcatcagccgtgggagtaattccccctgcgctagcagaatacctcaccggaatctaaattccgcggtgaagttgggagctcgacgctagggatttgtgccacgccaaaacaaggtatgtgctcaccttctgttctgccatcgccgtagctcggtattgcgattggtgtgttgatgttcggcggggcggggaccaaccgacccagccacctgaacagctcgcaccataggaaccgaggccatgcgcatactctagcagcagggtctccaagacaggctcggcagcttcaccttgacttcgggagggcgtccggggactcgctaggcgcgtatggtgcacggggcggctggcgatgtctcgccggtgttggggaaccctgccatgtcgtgacagaggctacaattgcccgatggctggtaaggcatccctggtgaactcatcctttcctctgcttcgcgtagcatgtttcaggagtatgaattggggcctgatggaccggcgggctattctctggcatgctctgccgccg

SEQ ID NO: 53520 - DNA, 431 bp, Zea Mays
gctgactaggcctacactgcacagttaatgactatttgttaagggaatctaccgttctggttaatgactattcgttaaggtaatctacagttctgatcggtagtagttatctaggatgaattcatcataaccccttgtgtaaaacacattaaaaggtaatcaaaattaggtcggttctggaaatagatagcgcatgagacaagttcgaacttggttgaccatacaatcttcaaatagtgacttttcccttgctatcgtaaaattgttccttataatgttttaacaattttgtggttgtaaacaatttttattcgtgataaccatttccgacaagagagtcgaaaggaacatatagtatgtctaaccttcggtctacgattagtttgttgaacttctagattcatcgttaagatataggttgggactatgaa

SEQ ID NO: 53521 - DNA, 288 bp, Zea Mays
attggagcaaggaggttgttgggctggatggtttcagatatgtaggctgcaatgacctaaaggatgttgcactgaatagcttgcacacgttcttcaagactgcagttgatatgttatcctgtgaagggaacaccgaggatgctgttgtaaatgctgttgtgcactctgcactctgttatcagtttgatggacctataactaagatcgctgaacatgcacgcacattgctacagagtggcaatcatttggttgatcattcctacagtgaaaatgttgacacagttctgc

SEQ ID NO: 53522 - DNA, 654 bp, Zea Mays
aaaagggaaaaacttatgagcatggtaatgagtcctctgaaattaagcttcggcatgacgagaccattgtgtaacatgcagctcggctccccatgccaattagccgaagtagaattcagagttgtggcagagcacattagtactcgagatttgatgcaaaaatatctagctaacaaaacatttccaacatctggtgggtggggaatgccggagaagaaggaagaagggaaaaatttgagcttgttcggttgccataccggtttaagtttcaggactcattcctcgacccttgtgtcgaatggttggaaatgatagagacaatgtgcaatgagatccttgggaactagacgaagaaagaggatcaattgatgatagctgccttcggcactcgaaaaaaatggaggctgaactgggtgatggatgcccttaacttggagtatccagaatacgaaaggcttgacgcagaagctgggggagcaaagaaaatgggaattgtaagcattttgaaaaggcgagcaatgtgatccattgaagaagacaaaaagagagctacttccaagaagcaaaaaaattcagtggagccgaagctttcggctcccaaaaaacgaaagtcctcaactttggcccctatcaagacgaaggtacaagatccac

SEQ ID NO: 53523 - DNA, 677 bp, Zea Mays
agaaaatgctcctcgacgacaagaagggcaaatgggctgacctgctacctgaagcagtctgggcactgaacacgaccgagtgtcgggcgaccggattcactccctttcgccttctatacggatcggaggccatgacccccacaggaaatcaaacatgggtccccacggacaagcgctttagcagtacccgacgtcgacgagccaacttccaaagacctcattgacggagaccgtgtcttcgccctgcaggccctcgccaagtaccaagcccaaacgaaggcctggcgcgaccacgcagtcgtcccaagagaattcaacgaaggggacctcgtacttatccgcacaacccggacagagtcacggggtaagctggaaccaaagtgggaaggaccgtttatcgtcaagacgaagtcgtctcccagcgcgtacagattaataactcaatctcgcgaagacctggaacattcctggaatatagataatcttcgcaaattttttgttaaatcctcaaggccatcacgcccttgtaattcaccaaacattatcattccagcccacactcttttcctcccagggggtgaggtttttaatgaggcggcgccatgtaatatacaagcaaaaatccctcgcaaaaaactaagccaatgtcgaaaaagaccgcatcaacggtcttcggc

SEQ ID NO: 53524 - DNA, 1000 bp, Zea Mays
tacaacactcgaggagtggaaagaagcccccgcccccctcaacacatcaccaaaaggttacaaaagcgtcacgcactaaacctaaaagaagaggtcgtgttttcgaccaaacaccagagctcactctcctctgctactacctgacaaaccaaacaaacactaggactaagaccctaaaaatgtacgcgttcctatgtttccaaattgtccaagcaacaagaatgacgagagaattaaatccttttctcttctcctttggcactctgttgactacacatccccaccagtgagcaaaaaatctctcagtttgcggggtagcggcctgcagcccaacaaaagagaggattttggtccaagtctcccgggagaagacgcaagacactagaatgtgttgagttgactcatcttcctggtcacaaaggaggcagacactaggatgtggcagccaatgtttcagcaagcgatccgccgtccaaactctgttcttgattgccagccatatgaagaatttgcactgaagatgtgcccaagttttcaaagtctttttccaaggtgcaaatataacatataacaagaaaaaggcgttataagcagatttattagtatactgtcttgaacttgtgaacttccaaaagtgatgatcaggaagagctggttgcaaggtaaaaccttccaccaacatccaaagcttcaggtattcgacaatcaccaggactatgagggctccctagatgtcagtaacccatcgcctattagatagggcttgagaaacaaagcattgtcttcttgctctcttaggaattaattgtaaaagattcggggccaattctcccacagtgctaccgagtagccaccggtcagtccagaatttggcatcaacgccatttccaacctttgtttccaccgtcatatgaaagagagcttgggccttatagggtacctgaatgggcaacccttaccaaggtatagaagaatctgttttttgtagccaaagccatcg

SEQ ID NO: 53525 - DNA, 423 bp, Zea Mays
tacaagcgtgccaagctgcttataacatagtatgcacttacataggcaccagggacttagtccaggaacacattgccttcaaggtgtggccactcgggagtgggtgggaaatgccgaaggagactacttctgggtctagccaaggtggcttggtttacttgaagtatacattcaaatactggagccaatttgatgagcccaacgtcgactggttagatgccattgacgcaaccagcaatgagtttcttggcgcctactcaagggtcgaagatgatgccatgacagcggtcttcggaggccgaggcaagaaaaggttgaatagggtttttgaagttattggattcgtgtacctagattacagctatccttcgcgaaagtaaggaaagaaaagaagacctaccgctttggcgatttctactacgc

SEQ ID NO: 53526 - DNA, 440 bp, Zea Mays
gctctcgccatcgtcactctcgcaagaggcgaaacccccacccctcttagagatgatgggagcagggattatgtgcaacctcgtctgccttctctagtatctgaatttgaagcggcatccctgctctcaccaagattggaaatcactgaagactcccttgttctccgttgtctatccccgaatagtttcctgctagttctcccgtctgaagatttggctcaaaggctttatacgaggtggtccattcagcgggctgcgactttcacagtgggctgcaagcgttggtctagatttttcaactcttttagcaaaactcttcttcagctggttgacttggaattagaaggcatcccagtgcacatgtgggagacggtcacgctggaacatttgataaacccatttgcttggctgttcaaggtgcattcagatacctctggcct

SEQ ID NO: 53527 - DNA, 791 bp, Zea Mays
gcccgggagagcaagttccaacaatatcaacaaaacttctatggaaaagtaagtgcatacctttgatggttcagaaatcaatactgaacttcattgttgaccatatggattcaaatgacgttgtaccatgagtcatcccgtaaggaggcaagcaataacagttttctccctataatccagtggtttctacatgacaccataatggtgaaatacagaagaattcacatcagccagctttaccaacacataagtaccaaccacagatccaagtatatgttgtagaatgtgtatgttgggtgggagacaatgtctttttcccaaataattgtgacagtaaggaaacagatctataagcaggttcctcccttgcatgtgtagcagcgagaaaacgaatttgtaactgtctgcataatagatatgatatgacagctatacaaatagatcaagttagaaaacacgggggtagaagggaaatggaaagcaaatataatgttgcaccttcttaattttgcagaagtacattcatcccaattcatataaaaagctctgcatagagaaaatatttgaaacattatagagcctagcaagggaaattctattttattccaaggaggaagaagccatgtagtaatgtgtaaataaagtgaatatgtatgccttataaactcatgacggaactcctagacagcaacacaaataaactgatgaagtgctaaattatcaagatgagatatggaccatgggaagagacaaccaagataaaagttgccccaatgctacattggaatgtg

SEQ ID NO: 53528 - DNA, 948 bp, Zea Mays
cctttgaaaccagttctggtactctagcacacttcatggtgtcaccaaacccaccagcaagatgctgcttaaacctcttgattccagatagcacaatcttcttacagaagacacactgaacaaaatccttctttattgtgtctggccaccacccaaactgccatcctgggtcatgtgaccttgcctttctcttggggtcattttcttgtgcactaagctcaggagggagtgctataattgccttttcaacaagagttttacaatctgtagcagctgataaagcagacacaggaccagtgctatctgcatttaaggccacagggggaacagaagcacttccacttgcactgccgaccacatttgactcagggaataagacctcaacattattagcaagtccacagccaccattaaactctgaacagacaacacaaacacagacagagatgcagttactactgggtactggcactgtcgcactgatgaactcatggtgactgctcactgctattagggagcaggtctgcaggtgcaccttcaggtggtaccagtggtaatagagggaagggagactaggagagaatcaaagaagggagagcaggtgctaccttcagatgacgagctcatcttgaattcttgactcggtggcagacgccggagcactgacgccggtggtagacaccggatcacttggagcaagagcagccatcagtgaatggagcactggacgctggtggctagaggcctggagctagacgtcggtagagaggacagaggagtagggtttactattggcggctgggaggttttgtgttaggcaagatagggttttggctagccaggggcagggcaacatatatgttgctactgtagatgggccaaaaattagagttaagaccagaaccaaacttgtgacgacaagaaacgaccaggacgctttcgaccaga

SEQ ID NO: 53529 - DNA, 586 bp, Zea Mays
tacatcctaaaaagtttaaaataaatttaaagatttacaacatgcatgtagtacacgtcgcgagcagtaatttccctctttctctttcgatatgataccaccgttattcgtggactggggaaaagataaatccagcagagctagcgagaagacgagttgttgcgtctgcgtcatggatcgtctcggtcctgctcctgcactaggcaacaggtgtctttatttcgcggccagtcgaagaaatggatatccggccatgcatggattggacttggaccaccactagaagctttatgtgcatggcgccaaagaagggcaccgatatacaagtgacggatcgtcggcgcgcgctgcccggccatttgcatgcctgcgtcatgcgtcgtatgcatgcataggtagatcagatggccccagatttggccaaactgtggatggctacatatgtccaagccacgagaagctgtcccgtcgtcgatggcgtacgtagctacagtatagcaggagcagccaagccgatcgagcagacgaggcctctctgtctgtctctctctctctctctgcctcctcgcaccgcacgccaccgtcc

SEQ ID NO: 53530 - DNA, 555 bp, Zea Mays
ccgcgcacacagccggacggtctgcgtatctaaccggatggtccggcacagagtttttcgatgagcatttttacccaaatccgcatccgtctcaactaaacttcgcatcacactatacattgcaccagcaccatagtatagcatcccagaccaatgggggcgagtactttctggccccacctagaaggccggaaaggaatggccagtcctatgatccacataaggtaaggaatgcaccacaaatcccaaatcaatggggggaagacaacaaactaatattcaaacaacctcacccatgttggaccagaaagccattggtctcccaccggctgcaatcgatatagtaagggaagaaatagccggggcgttccgagataagctcggagttagcatggtccctgggggcaatcatatcggagaccttatgatagctgatttgacaatcacccatacccatagggaactaggatacccgaattcgcaaaattttcgggtgaccaaggaaagagcacacgcaaacacataggccagtttttagcgcaattaggagaattg

SEQ ID NO: 53531 - DNA, 911 bp, Zea Mays
aaagcatgtaggctcctagttaggattcatttattaatggcaacactaaattattgagactaatatgtgttttgtggaggcaaatttaggtcaccttaatggttattgattgggcatttgtatgcccctattaatggtattcgattacaactttcaaaggataagcgcgaaggttaaagattgactagctctaagcatcaataaagttgatgggcatatagattaaggataggacctttatttttcctttggtcatactataaagggggcatgaatatgtagcttgagctaggtaagcctagtgatggatggtggtgcaaacttgtgaaatctagtactaggttagccctatggaagtccaagtgaagtttgagatcaagccaactcaaagactatttgaaacagtcaagttagcgatgatccagttgcaccaaacatgttcgatgtgcactggacaggatatgtgcactagacatgaacatgcctggttttgggacagagagaacatcgatgtgtctggtgtgcacagacatggcaaccagagagcgtcgcaaacgagtgtgagaggttatacacttactagacatgttcagtgaggcactgaatagggcaccaaaaggggttgcatatgaagtgagagacggattactcatggaacgtgttcaatgaggcaccagatacgacactgcacaaggcactcaaagaggtctgtaactatgcacctcgagcggttcaccagatgtgtccgatgagacgccgatcataacaccggataccggtacagtaaatggctagtttctgagctacccgttggagcatgtacctgacatgtctgatgcatgaggtagtgtgcatcagatatgtctggtacacaatgtaagatgaatagaggagcaacattagtttttttg

SEQ ID NO: 53532 - DNA, 293 bp, Zea Mays
ttaggagtcagctgatgaagatagatctcgaagttctccaaaacttctccaatcatttcgttcaaaggaaacctcaatcctgctctaaagaagctcctgaaaactaccacctcatctttttccggtgtcggagtggtttcttctccgccaaaacgaattagcttcttctcagcttctccgaagtagcctagctttatcatcatagacatatcagcctcagaaacggtggattttccaaagtccaagtgactgggtttggatggcatgagagtgttgtaatcttcttcttcttc

SEQ ID NO: 53533 - DNA, 613 bp, Zea Mays
atccggcacaaacaaacaaggcctcactcgttcacggaccatccttctatttcaatgttcgttcatacagatcacatcaattcaatactttataactttgcattagaaaaggaaaggaacacccggcgttccaaaatcgtatcagtaacttaggtctttcagaactagtttggaaaaactcaaatctctactatattaaaacatcaatttcaacgatcgctctgtgtcatctttttacaaagaaccacttgtatttcttcaaaatcaacccgcggtaccaaatcatatctcatatttatcctatttgtttgcacaacagcgttctcgtagctgtcgctctagcaacaaaccccgttcatttcgtaacaacctctgcccgctccttccaccgttgcaccgccaccagcgaggagaattagggcgctcgccttcggataaggatgatcactaggtgataaaagttgtatcgagtccagctaactctgaacctcctcgtcgccaaaatggaccgagagcccatctcccacctcactcatcttccactcggacgagagctctgctccgctcctcccatcccatgggcgacacggtatcaatggtagatctacctagc

SEQ ID NO: 53534 - DNA, 711 bp, Zea Mays
gtcagtacgccagcgaatatgtggcgacacagcctgtaacgcacccactgggccagtccgcccaaagcccaccatcgccagcgtcgggcgttcatgcgctcgtgggcaacctatttagacggccacctcgatctcaaaacctaggctgagagaggagggaggcctgccattataagtgcaccacgacccccttgactaggcgaggtggtactaacccagggcatgcataccggtctctcacatcccacccctaagcggcacaaagttctctcagacagcagcggcaatgtgggctccgataccaactgttagacaagagtatttcgttggtaagaggagaacttctccctcacctcctgtattggctactgccagttccaacgcgtattcagtcagattaggactgtaaaccaacacatcatccaagaaaactaccacacatttactgagtaaaggtgccaaaatatgattcatgaaatcctgaaatgttgctggtgcccttgtgagaccaaaaggcattaccctatactcataatgaccttgatgtgtttggaaagcagttttatactcatcaccctctttaattataatttggtggtacccagctttgtgatccaacgtagtaaagacagtagccccacacaactcatctgtgatttcatcaaatatgggcattgggtacctgttctttacagtagaggcattcaggcg

SEQ ID NO: 53535 - DNA, 665 bp, Zea Mays
ctccaatctcgatagtagaaagaattcgtcctgtcagtgtagccatattacctcttagctaagatttgcatatctcataatgttcatgtaagctttgcattattttagtgtcattaacatagctgatcgataggagtagacgtgcacgattgcgaacacataacagtatgctcggacaccggagagacgacatcgacatgtagcttgagtactcaatccaccggcactcactaactgccgttgcacattagttgaggacgctcattttttgatagtctgatttcctacggatgcgtgcgcgcaaccgagagctgcgagactgatcttttagatgactagtgtgagactgatcctgcatagtacagtacagagtccctcatccgccgatggcagctgcagctaggaaacatgacacgttttttgagagggcgatgcggataccgctttgtgtacaaaataaaaaaaagatgaccaaaccccttggacttacacggtagacaacgagtctaaaaagatctggtaatttattctaaatgataagtaaacaacatgtctaaaaagatccgacgatttattccatataacaaagcttatgggacttgtgttgtaaacagcggctcattaagattcgatgatttattttatatgacttgcgttgtaaacaa

SEQ ID NO: 53536 - DNA, 502 bp, Zea Mays
tctagccacatctagccaccatcttaccatctgatctgcatatgagaaacaaagaatcaacttctgcgtcccaaatcataaaccatgagtttacaatgaatcgaagggccaacacttcttttaatagatggtcccaaacggaaacttgaaagcaagataacttgtgatctattatgttatatatagtgcaaaatatgttctctaatcaaatcaagactaaccagctggtatctgacatgattgaaccgaccaattatcacacaaataaccagaacatttcatcttatcctctaaatgagcatctcatccttataaagactaccatattcctagctgtctcgaacaagtattcttataggttcaccgaatatgttgaggttccatgttcttgtttttagatatattttggtgactagctgaacaaataaggcctatcagattcaacaacctgaatatatgataggtttttgttagaaatacatctagacaagtacaattaaag

SEQ ID NO: 53537 - DNA, 340 bp, Zea Mays
aattgaagagttatgattaaaacaagtgactgctgtattgctgtccaaaaattctgctagtgcgcttttgattgtttagttcacccttctcgctaaaaatgtttggtttgctcttaagtaatgtagacttaccatagttaagctagagatgacatgtgtgtcttgttttatatgttcctttctctagtgattgcgatataggagttccatagatattgacgcttatgtcctctattgaatttgtgttgtcggtaatgcttgtgtgcgatcaataggagaactaatgaaaagccgtatccaaacaaacaaaatgcgcatacttgtaatgtcgtagttgtgt

SEQ ID NO: 53538 - DNA, 330 bp, Zea Mays
tatcgattggagcatggtaaaaaggtctcattgtttgattgtcatcgacggtttcttccatccaatcacatgtttcgaaatgatacaaagtcatttagaagaggcataaaagttaaacacggtccaccaaaacgtttaatgggggaagatatcatgatacaacatcgtgcccttcaaagggctgcagaaggtcatgagtttgaaggctacggtcaagatcacagttgtactcatatttcttttctctgggaacttccgtatgcgaaggtattgattttaccacacaacatagatttgatgcaccaagagcgcaatgttgctgaaagcatc

SEQ ID NO: 53539 - DNA, 429 bp, Zea Mays
ctttcagtctgtccatcagtctgagggtgataagttgtactaaagttcaactttgtattcatattctcatggaagcttctccaaaatcttgaggtaaactatgaacctcgatcagacacgatcttctttggtactccatgtaaacacacaatccgagccatatataactctgccagttgagaacctttataagtagtcttgacaggaatgaagtgagctactttagtcaatctatccacaatcacccatatagcatcatatcctttctaggtgcgaggcaatccagtaatgaaatccataccaatatcttcccacttccactcgggtatcttcagtgggtgtagtagtccagctggcctctggtgttcagccttaactctttgacacacatcgcacatcgccacatgtgcagccacatctctcttcaat

SEQ ID NO: 53540 - DNA, 337 bp, Zea Mays
aatagtcagggcacagattgaagacaagggtgttcaggtcattaaggaaatgatcaagcagaaagcagaaaaatacaaatgcttccggcaggacagcaaaggaatcctatggtttggagatcgattggttgttcccaaggaccctgagctcagaaagaagatattgggtgaagctcacctttcaaaattctccatgcaccccggtagtaacaagatgtatcctgatctcagatccttatactggtggactagaatgaagagggaaattgccgagtacatatccgaatgtgacacctgccagagaatcaaagccagtcatttgaaggtagcaggccct

SEQ ID NO: 53541 - DNA, 429 bp, Zea Mays
aagtgagaaattgtcaatgtttatcgaacgacgaatatttgccacccttcttcaaccaaatgaacctaagagattcctttcaaactgggaatgggaacttaccgtgaacacaccaagcatagaatagcccatacgtcagtaagtcatgcatggagtactggtaccaaacatgcattttgaagtttgtcttcatagctcggtcatacgtccataccccttcctcccaagcacataccaattcatcaatcaaaggctccatgtacacacccattttattccccgggtgtccgggaattatcaacgacgcgaatatgttctgcctgtgaaagcataaactggggggaaattgattgggataacaaacaagggccaatatgtgtacggggcagcactcattccatagggattgaacacatctatggccagcgc

SEQ ID NO: 53542 - DNA, 310 bp, Zea Mays
gctcataacatggttgttttatgccatgttctaaacctctagagctaactgttaactagttttagctaggttggggcatctaacaactaatacttatttaagggctatagctaacaattagttgatccattctaaacctttcgactaattttagtaactagctattagttttagagatttagaaagactttaaactatttaaaactttgatttttttctacacttaatactaaataatcattatacataaaagggtgtacaaaattgagagagggccatgacccactttgccccctatggatccgcctct

SEQ ID NO: 53543 - DNA, 649 bp, Zea Mays
gttgtgcccgccgtacccacttgaaccgtggctggctggaatcatcctcaccggcgttagccgcttaacgatcgtgcgccacacgtcttggaagtctagcacgtcgcaatgaactggtgttgcaagcgtgtccatcgcctgagaacttgccacggtgaaagccatgaattccttgcgccagtaacctcccctctccccggtcgccagcgcttctcctccaaattgagctccaccgccgttgagtgctataaattgaagcctcagggaactccgctaggtaattacgcgtccaacgcaccagcacttgcctccaattgtccacaagagtcgcctaattgcccattcccccaaatcggtctaaataccgccgcgtgagcacctcgccatggccagcgtgctacaggttcgttcatgtcctctgctctcttgtttcagtacccttatgtgcccttgatgcttctcgacccgaccgattaagctagaacccattagatcaccgggaacactttgaattgtccccggattgcacggtcaccgtgagcagagaggttgggagctcgaaccgtgcaattgatcgaggggaaacgattgttagatgttgaattaggtatcaaccaagttagagcaccggcctttgcgtgtcttggcc

SEQ ID NO: 53544 - DNA, 391 bp, Zea Mays
gggggcctactatatagaagaggtgcaggaggagtcctcatgaagtgtattcactaggctatagggaagcagctgttggacgagcaatgtggcgtgcatgcagcgtcacagactctagtagggaaagctttcaggttcgggttctactggccaacagcgaagaatgatgcagcagagttagtccaaaagtgcgaggcatgccaattcttatcaaagcaacaacatctacccgtgcaacagttgcagactattactgtaacctggttgtttgcatgctgggggctggacatgattgggcccttcaagaaagctcaagggggtatacgcatatactagtcgccattgataaattcacaaagtggatagaatacaaactcatcgcctctttgac

SEQ ID NO: 53545 - DNA, 363 bp, Zea Mays
gtcaaattactactcaaggacagtttgctaaatgctcggcgtaccaaaatgtccctcggtcacacccattgggggggacgtccaagaattttcaatagattttcccaagcagtcacatccgtacagtatacgcaatgaatgtatcaagacagaagaaagatatcgatggagatcagaggaaagccaaatatagctgctgaagtacaagtctaatcaacagaagcatgaagcgcaaagcgaaatgaagaccagccaagagccatctactagacgtccaatctgtcgccgatcaaataaatttcaaacctaacaagacatgggaagatcacgctgctggtttctaaagcatgaaatgaagacaac

SEQ ID NO: 53546 - DNA, 496 bp, Zea Mays
ttgatataacattagcttcaaagacatgacagagaaaatatttgtggaactttatgctcacattcttctattttttgcagccttgacaaacatgctttctgaacaagtgagagatgatggcttaccttttgtggatatacatcttagtcgcctctgcagatgaacatctttatcgcttctgtgggtagattgttcggctggcttttgtggatggaatggctctgcacttgtagttatgtaatgtttatgtacctagctgcctggattgtgtcggccaagagaccgctaccagtacattatatatacatcttgtttagttgtctgccccccgctgtgtcgggtagacatagacttggactatgtagtcttcttctggatcagtttccagctagaacaagcctcaacgtcgtgctatggtgcgtgttttagtgtggtgctgcaactttaatgtggattattttcaggctatctatgttctgttaagtaccttctttct

SEQ ID NO: 53547 - DNA, 1086 bp, Zea Mays
ctttttttcatccctgcttgtttcgttggcacgttgtcagccttattgattcgaacgctttggggcgtcagatctggttatcaaaaaaaggaaggaaagaaacaacaaaggacataaaaaaggcaagatacaaaaaaatataaaaaagaagaagaaagaaggcaaccaaaattagcgcacctcatttccataatcagcattgttctatttggcaagccgaacctgcaatcaaatttgggcgcctaccatctttgtttttggcaagaagcccactttcccttacacgcccctcctttccttgttcagggatctgggtgcgcccatttccttgtccaacactttttgtttttggccagcggcacctccatatttggtgcgcctaagttttctaattctggctatttgattttggaaaccaaaccttgtttcctcatttagggatttggtccgcccaggcatttttggaagctatcttgggtgccaccatttccagctggtgttttggtacgacttctccaccttttgcacacctcccttacactccccctccttgcctagttctgttcggttttacttggttccagcagcattagctacgtgtttgcacccttattcaactttacatttgctgattgattgtgctaatccttgctctaaagtgcagccttcctacagctccacaaatatctacagcgtgcaggttgtgtcctctagcaatcgctctatccaagcttagtggttgcactgctggttgcacgtcacccctgtggatgtggtaagaacgagtaagaccttgataatggtttttagttgagcgccaagttccacaacccattcaactagttgtaggacatattattttgttccttgttctcttgtctttgcacaaactatggcaggaccctcgggggttaaagaggatgagaacaccatgccacagtcccctcgttccaagggcatcatacaacattttgagccacaaatgcacatgcaacttgatggcctcgctgaagacatccacatcaccaacgcgcgccttggcccacttgaaacagcacaaatcaaagctggtacaacgctccagga

SEQ ID NO: 53548 - DNA, 539 bp, Zea Mays
agtccaccatgcacaacggaactgccgaagccatcgagtatccccgcaacaactccaaggaaaagaagaatggccagcgtgttagatgctattatggaatctatgaagatatcaactcctgcttctaccaaaggacctagcactatttctaagactggaccctcgaaagtccccgctgaagctagaccttcggaaagcgcaccgatgatcctagaaaaagagagcgcttctgaaaaatccaaatctcttgctcctgaagcacccgctaaagagttggaattcattgtgagacatgcttcagggaagcagttatcagaggagcagattgccgaagcaaaacaatatgccaaggatctgaagtacccctgaggatccttggtgtacggtgccgatgacgaagatgatttcctttattgtttgccagacaataaagagataaatgtctaccgagaaatggcaagcaatataggctacccgaagcttgaagtcgggttatctgtgatgtcgaaggatcaacttgcggacagcctcgcttacaa

SEQ ID NO: 53549 - DNA, 444 bp, Zea Mays
gtcagccatgtgctacttttcttgatgggcgaagtaggatgccctgtaagctgataatgggttaatttgagtgatggctcggttccccgtcgaagggatctgatggatcaactagtgatgagtctcaaaaaaaatttgtcttccgttcccatatagtttctttgaggaaataaccatgggtcggaagcccagactcgaacatgggtcgaggttcccttagcgcttgggtgcctaagtattgatcgttggggtccatcctttctgcccccactctggttgcgcccaagtgtggccgtcgaacccttgatgggtctgacttcgaactatttggcttttaatgggccatagagacgtcttttagccttatatccctttatacctggacgatttatggttcgtgaaggcgacttgtcctttgaggatcgactgattgtcgcgtgggtg

SEQ ID NO: 53550 - DNA, 624 bp, Zea Mays
gcagctttttcaggcaaaatttgttttatagcttcttcctccgctgccttttctccaatttccgaggatttctctttggtgggctctgaaggcccagcttcggcgtcggcccggctcattgtagcttcggcttcggtcagctttgtctcggtttcaacctgtgtttttgaagccttagcaatttttcctagagtagagcttgaagtttttatcgtctccagcacatctaacacgctagccatccttttttctcttgggggttgctgccagatctttttgtgtcttcggcgcctccactcctaccgaagggcttagaacttctgatgttttcgtttcttcggttctcggttcttcaattttgtcagcctttggcattgtagccggcttttcaatcctctgcgtaagagcaggtcctttggcttcagtagccaaagaggtctcaccgccaaattaaggcactgtggctggttcaatgtagcgcggtcggtgagtaagaactttcacctttatcctcttcggcacgggcttgcttggagcagctgaagcaacatccttcctagaagttgcaccctttcttttttgcccccgcggcgggtatcgatagtcagggtacacaaatccaat

SEQ ID NO: 53551 - DNA, 549 bp, Zea Mays
gagtcgtctcgtgcccccttgatgattgaggttatagcaagcctcctttttgcgaggcgagcccctaagtcccccattccttatgaaggatccatctgggggtacgtcccgtctttctatagttcctttccccatgcattccgttcgtccagaggggaagggtgagctgtaccatgctccccttggtggttgagatcatggtgctcggtgcgcctcgatcggctaatccgaatgagcccttctttctgtggagcgaggcatcgagtccactgttcgctacaagggatctatctaggggcacgccctatctttttaatactccttcatgtgcattctgtttgctagaaggggatgggtgagtcataccatgcttccctcgatggtcgagattatggtgcttagtgagcttcaaacgggtgatccaagtgaggccctggttcccttcgtaggatctaggcactgggtccgctggtgaccgtcctcatactcctagtttctgactcatatagttgttggccccgtccgaccgcgtccgatgactcgttgccg

SEQ ID NO: 53552 - DNA, 348 bp, Zea Mays
ggaatatcctatatgagtcagactgctggtcacagtctatgggacttgggtaatccctaaatactcatgaaaggcactgaagtttgacttatatgcttctaaacagcggggatgcccttttgcagcctagtatcagcaaaggatttgagtgaatctcacttcgcacaaaactgtcaattcaaggcttagtccattgttcagttgtgaatgagtgaaactcttattctagatggatgttcaacttaacagtctccaaacactggtatatcaaaggattgtgattatgatacttcatcattacaaaccctagagtttggtggggattgttggatcttttatgagcttggg

SEQ ID NO: 53553 - DNA, 728 bp, Zea Mays
cagctgtcttccttcctcagccgaaccagcacggcggcacgacacggaccgtggcggcgacgacggccattgccggcgatcacataccccacgatttcgcccacgcaaatcctaactgtctagcgcatctcaatgctaggattcaatttgagtcgagggcgaggaattaccagagaagtagatgagtgcggtgctatccacgtggacgtgatggagaagaactccggtgaggaatcaaggtctcaccgcccgacgatcccaccagctagcttttcggacaacttcgctacttctcggtgcaggtccccgactagctcccgagaccaaaacgacgagcaccgaggcgaatcgtagtggcggcgttggtcaactcgaggaaaggtcgctactcccttcaccctctcggtttgagttccggttgtcaatgcgattgaattggtcacaggaacgcgacgcgagcgggtttttatatgcacgacgaggccagggcggtcatggccgaggatctcgcgtcgagcgctggccacccgcgcgatgcggacgattctgttgaagaagggaagtctgaccgcatgggcccgcacggcagtgaagtgggacgcgaggcgcgggggagaattagcggacggggctgacagatttgcccgcgaacgcagtgaattgcagagcgcgagtgcgagcgagagaccgccaggtgggtcccacgcgacagtgcgcgcggcgcgggg

SEQ ID NO: 53554 - DNA, 449 bp, Zea Mays
taccagttgtgagtgggttaagagaacttcccgcctattactttctaactcataaagaccttcaacttcaagattagaattctccaatgcgttggcattaatttgcagcttataagtaggaatgtactcattggcccaaagcactaactcaggacccccaatcttcaccaaactttcatgatgtggaggtggccaccatccattctttgtttcacgtacttcatgagaagacttcattaaactaacgatctccagacacctcttagcatttttcactacttctgcctcagaagttttgtgtatacaaactgaggaatccattgagcagttgagctgtcgcttctgaaaaaaactgcctatgctcccaaaatgattttttctgacatcctcaatgacacaggagaaaatggcctcagcaagagaagacagaagttttccatctgatgagc

SEQ ID NO: 53555 - DNA, 777 bp, Zea Mays
tatcataataattttggatgttataccttcatgtaccgatcagatgctacacatcccgtgctaaccttttgaaaatggccggattcatggatgaagtagtggttttatgtgaagaatgacctaagccaaagaaatgataataaggatgtaatccagtggcctatccgatcctgcttcagattgaggaggcctgctatcgtgaacacggaaaaatctcaaggctgcctggcggcgtttaaagttgtgtgcaactacatcagcaccagggacttggtgcaggagcacatagccttcaaggtttggcccttggccactgaatgggaaatgttgaaggatgttgaagctgatgccaatgccgggaaaagtagtctggttcaactgaagtatacttatcgatacagaaaccggtttggtgagccagacgatgattgtcttgatgccattgaagcaacaagtgattaattgttaggaacctatacaaaggctgaggatgaagccatgtacgttgccttcagtgcccgaggaaaacaaagattgaataggatttttgatgctattagattcgtataccctgattactgcttcactgctcaaaagagagggtcaaaacgaaaagtgcaccaaaagcttcttctgttgtgccgaggccaaagaaatcaaaaattataacccaccgaccaaagtcgtactttttagaaagggctgcaaaattgcctgctatagggacttaaaaaacagagacttctgtaacagccgagggggccctctgggcttcgg

SEQ ID NO: 53556 - DNA, 928 bp, Zea Mays
cacctcttctatacagcaggccccctataatggtatagtggaccgactgtcttgcaatgcgttccaccgcagctttgttatctgtttcttcctcgttttttatgtatctgatgattggctctctccagtcattgggatctgcctctgcctgactcagaacatggcattcttccatctgatctatggcaacactcggttgctgtatttcttggacgaaaaccctaggtggaacttgagcccgaccgaaccccagctttgacagtgcgtcagctgctgcattgcgatccctttccacatggtggaattctaatccttcgaacttgtcctctagcttccgcaccgctgcacaatatttgttcatttagtcggtcgagcagtcccaatctttgtttacttaacttatgaccaccagtgagtcatcatacactattaatttcttgatgccgagtgaaacaacgatgcttagcccgtggaccagtgctttgtattctgttgcattatttgatgctggaaacaagagctggagtgcatacttgagttgttcacctccgggagcgataaagagaattcatgtccctgctccttgcagtctcagcgagctatcgaagtacatcctccatatttcagtgacctctaggctctccgggacctggtgctcagtccattctgatacgaagtcgaccagtgcctgagtttttatcgtcgtgtggggtcgaaactctatatcatgagcttctagcccgcacgcccacttggccattctcccaatagcttccttgttgtgaagaatgtcgtctattggaaatctcgtgactactatgactttgtggtcgtcaaagtagtgccggagcttgcgagcggttagaagtaccacgtataacagtttctgaacttagggataccttatctttgagggtccaaggacttc

SEQ ID NO: 53557 - DNA, 1052 bp, Zea Mays
atttagacacggttggtttgtcaacagcatttgcctgcttgagtgaagaatcggcaggaaggggatacaatccacgacgacatggccccctaagaatcgttctcctcgtatcctgatccttgatgagcaaaaaatcaggatgaaactcaataaatgcagagttatctttggtaagatgatgaagggagactagatttttagcagctttagggacatgaaggacattgtttagatgtaagctacgtgattgagttggaacagtagtatgaccaacgtgtttaattttcatacctgaaccagagacggtgtggatctgatcattcccatgatacttctccctcatcgtcagtttgtttagttaacttgtgacatgatctgttgctcccgtgtcggtgtaccagttggtgtcgacattgtaggcgttcatggcgatggcagcattaacgtggcgctcttctgggacgtagttttcatcgaaccgatgccagcaccgggacgccctgtggcctgacttgaagcagatctcacagagtggtaggtcatcagacccactcgctgtatcagatcgtggtggtcgccctccattgcgttgcttcggtgggtcgtttcctcggccacgcacctggacgcgcccacgctgaccacagccacaggaatttcccgagccacggctgccattgccacacccacggttcgccatgtgggcataggagccaccatcttgcagctccagtctggtctcgaaactgagcaattgcgaataaatctcagggatcgagatgggatccgatctagctgtgaccgaggtcacaactggattgtaatcagcgtcaaggccattgcacatatgcgccaccagttcttcatcatctagggccttgccgacagcaaccatttcatctacaaaacctttcatcttagcaacataatctgtgatcgacatggtacctttcttcgtagtggcgagggcaagcctcacattcattgtcttggcgcgagtctgcgcagagtacattttctccacggtcgaccatgcttgtgccaccgtctgg

SEQ ID NO: 53558 - DNA, 431 bp, Zea Mays
ctcagaagttggtacgcctgagtcatcacatcgcatgacccactcaagtgcaatgaaatatcttagacaaaatgatattaaaggcgattctgatcagtatgctatagctaatgaagtacataaagacgaggcaaatttggatgcattcgcctggctgccagacattaaggaaaggatggttttcgtgcttcgaacctggaacgtaaaggtaagccagacatctaatgtcttcatgttttaattttttagctatatttgttcaaacttactgttctcaaagcaggtgcatggtagcctgaacgcaggggacatgaactcttcagcgcctgcctgctggtaagccaatgtcttgctagcatattttcccctgctgatcctttgctagtatttaggttctgcagttgcagcccttccatactgcatcgcatcat

SEQ ID NO: 53559 - DNA, 430 bp, Zea Mays
caattttttcatttgaaataggacccggcttgtttagaggatgagcatcatacttttatttgcatgccgagcaacctacttcaatgttttgtttggtaggtgtctatgcctgtccatagtaaagtacgcttgcttacttgagaaactcacatgagcacccctgatgttaactattaacctaataacagtggtcaagaatacgttgcttcttaacacatttgccactttgtttcagctctaatgcagtgtatttactgctcaagtatttacctgctttgattgatttttcatgcaggcagaaaataccctcctctgatgttgttcacttgttacaagatggcatttggtgttctaccattttactacatcattaatcaaactctaacattagtaccttatttgattctgcagattgatctccgtgacaagg

SEQ ID NO: 53560 - DNA, 339 bp, Zea Mays
gtcagcccagattgctctgcgagcgcaccggctattggatctcccagcgtttctgctagccgccggtgcagactctgaggtgcatctctcatatttgcctggacttcttactcttctgactaccagcgatagatatgttgaggagtgggtccgagtgttctatgcgtcagtatggatcaaccctgatcaccagtggatgaggttccgctttgagcgagaggatgctacacttcatgttagccagattcgccagctatttggattcaccgagtcatcgactcgccttcacagcttgtgctacggtacctctgatcctcctcgtcgccctcacggcggagt

SEQ ID NO: 53561 - DNA, 558 bp, Zea Mays
gcagaaggctggccacgacgaggtgttcacacggcggtgtttcgactgatttgggggaacttcgaaattggcgcgctctggtggacaatctaaggcacaggcggttgagttggatgcgtgactacctagtggagctcactgggacaacaatttataagtttcatcggcggtgacgtccaattttgaggtggcgtgctggcggccggagagaaggacgagtcaccggagccgcataacgtggcatttaccagggcagtgtctcaggcgatgaacaaactatctaaagcggtctactacgacgtgataaggctttgaggcacgcaaccgggccggataacggcgaacttcggtgatgccagtgtaatcaaccgcggcgggacacgacggccggtgagaacagtggccagaggttatctacaatgcgatatttcttacccattctttgttatccatcagcgcctgacacgaatcaccgcggcggcacgaatccgaacgcacggtcgccggcggtgaggcatctgatgcagacattctgatccggacactgtaccatcacgc

SEQ ID NO: 53562 - DNA, 491 bp, Zea Mays
gagagctaaccgaacaagtccttagtttgtgggagggggtgtcttaatgggaagacggcagcttaaagtgacgaaggtgtcattccatctcaccttgccagtaatctctaacgtacgtagtggttcggctaaagctaaaacccattcttttgcccgttcctcgtatttcacagagagagagagactcatccactgaaccaggaattgggggttataggaaaataaaagaatggaacgcacacgcctcctgacggggaaagctagaaaggaaaccgagcctgctgacagggaaagcaaaactgtgaacggaggcatgtcgtgtgcggcgggccccacacgcaaacagcgaggggcaaaagatgtagcagtaccactactagctcgatcgttcgtgagtcgtgactgcacacaggtgaccggcacctatactctgctgacgctccttccactcgcccgctctcgattcccttggcggcggcggctgcttcgcc

SEQ ID NO: 53563 - DNA, 836 bp, Zea Mays
gggatttagtggatctttgcgcaagacctttgtaacaaagttatagttggatcattggacaacaactttgctgcagatgaatgagtgagttgtcgcacaaagatttgagaacaaagccctgcaagttgagccatcagacagcctgaagaagatagcaatggtacagtgactgaatcagaggccagattcagtaaacctcgctgacggtgacctccgcgccgcgattcacgtcggtgccacaattcgtgccagtaaagagtggataaccgtggtggttaaaagatcttgggggaggagggcttggccagagttgagtcaccgccgtacccacttgcccgcgcggtcggtaaaatatcgccgccggtgctcgccgtgatcgcagcaagggacacgtagtcgcctgattcactgcattgtcgtgatcgtggcatcccctagatagtgacttgtcgcacggtgaacgcgtgcgctccacggcgagcctcgttgattgcctcaccagggagatgagttccactctcatcccaaattcggagttgccgcttaaagcttctataaattgatgccccaatcagcttcgccaagttgttacgaaccaaagacaccaactctcatctctgattagccaccatagccggagaatttgggttttcccccaaattggttgtttgtgccgccgtgagtcaccccgtcgtggtcagccacctccaggtccgctctcgcgctccttacccttgtttcagcacccttgcatgctagggatgcttgccgactcaaccaattgagctagatcacgcttaatcgtcgggaatgcctcggtttgtcctcaatgttcg

SEQ ID NO: 53564 - DNA, 694 bp, Zea Mays
ggcacttatcccactctttgccatagtgtaacacacatgctctcaacatgtcctcaagaatctgatttactctttctgtttggtcgtcagtttgaggatggtatgctgagcttcttatcacatgggtttcaagtcactcttgcagctgctcccagaaacgtgctacgaacggtgctcctctgtctgacacgatcgtccttggtattccatgcaaacacactatttggtcaatatagatttcttcatacttttctgccctgtgggtggtatgcactggcaagaaatgagcggtcttggttagcctatccacaatgacccaaatagaatcatggtgccgggatgtgttgggcaatctcacaatgaaatccatgctgaggtcctcccatttccaagatggtatggggagaggttgtaaggtacctgctaccttcaaatgactacctttgattctttggcaagtgtcgcactcagatacatacttagctatttccctcttcatcctggtccaccaatacaaggatctgaggtcatgatacatcttgttacttttggggtgcatggaaaacttggaaagatgagcttcgtccaagattttcttcctgagttctggatttttgggaacaaccagtctgtcctcaaaccataggacacccttgcggtcctaacaaaagcatttatacttatccactttttg

SEQ ID NO: 53565 - DNA, 800 bp, Zea Mays
gctcccggacgcaaaggccggatcgaaattctcgaaagagtgctgtcgaaagccctttagtcatgatgtcggcgaactggtgagaggagggcacatggagaacccgaatctcaccaagggccaccttttcgcggacgaagtgaatgttgatctcgatgtgcttcgttcgcttgtggtggacggggttggccgtcatgtagactgcactgacgttgtcgcagaagacaacagtggcggaggttagctggatgtggagctcctggagtaactgtcgaagccagcagcactcgaccacaacgtgagccacaacccgatattctgcctcggcgcgggagcgggacaccgtggtctggcgcttggaggatcaggaaaccagattgttgccgagatgtacgcagaagctggaggtggatcgtcgagagtttggatagcctgcccagtcagcgtcagagtagacagtcagcgtgtcgatagagccggtgccaatgtgaagacccgaggagagagtcccctggacgaagcgtaggatgcgcttgataagtgcacagtgaggctcacgtggggcgtgcatgaagaggcacacctgctgaacaacataggccagatcaggacgagtcagcgtcaggtactagagagcccctgccaggctcctgtactcagatgcgtccttctctgacagtagaaccccgtcggtcgcggatagtttggcgtgagtgtcaacaggtgtcggtgtcggatgacactcagccatgcccgcgcgctgaagaagctcgacagcttactgtcgctgggagaggaag

SEQ ID NO: 53566 - DNA, 476 bp, Zea Mays
acaccaaagtttgataacccctataaagtgataaagacccgtacaaacccaaaaagaaataagatgaggtgtaaaaggacttgaagttcaccgaataagcacatgtgcattccataagttttacttatggtattttccactagatgtgaaattacggtatcctctaaatccctgatggcagaaacctataaggtttaggtgttactggcaaatatccctactgtaccagaatgacagactataacgatgtatctgatcgatgaagaatctctgatggactacgatctttgatggacttatgttacaccatcatataagttgtaatgaatgaacacctggagcgatgagtcatatctagaatatgtactatcacaactataatatcccctaagtcctgtggaaggacaagttatttgctttgcacaactatgtatatattgtggcatatgatagaatgaaaggtgtagctccctagc

SEQ ID NO: 53567 - DNA, 475 bp, Zea Mays
cacattttagaagtcacacctatatgcgtggacactctaatctaaagtttgtgtttcatgtagtttcgtgttgtttgataatgttgaagtaattggcttaccaatactaaagagtgttgtagcgagaattgttgttaagttccctagacgtcatgacagccaacaatacattttacaggacatcaccgtgagtaacttcatcaacattaaaataaaatcaacatataaccttgtaatcctttgactcctatgacctgcattctgaaatgtctagggataaaaaatcgaagcaatttcataccacgataatgtccaacgctttgacgccttactccaacaaggatctacatatacattgtatgaagtggtgttctgtgtaaactggggggcatggcaatttcggaatattgaacatattctagaattgacattggcaacacatactgttgtcaaaccattcaacctatcaattcag

SEQ ID NO: 53568 - DNA, 398 bp, Zea Mays
ccccagatcgactcccacgaaggggtaagtctcaatctaatcctagccctgcaatccaaatcggacagcacagatcccatcttctaccccgaggccggtgacgacggtggccgtgaccccacggtggcgccttctccagtgtgcaattgtcgctgccccgacgccccatcaagactctagttcgacccaacacattgagaggaaacctatgaacacgtgtgcggaatctttaccggagtcgaagcgcaacgacgttttcccacacatcgaagcggatccacgacggcgcacagcttcgatgagcaattcaaccagcgcagcaatgccaatggcggaattagttgtcgccgaagcttctaggagacacgacgcgactctggtatgccctacgggtgccc

SEQ ID NO: 53569 - DNA, 480 bp, Zea Mays
tttaattatccccagatcaaggcccaactgtacgatgtgagatcaacggctcggatcgaaacgaagtgaaacggtatcgctattctaatccgggccgtcgatcgctcatccaacggctgaaatcctttttccccaactccggtcagacaacggcggtgccctgggttgccagcgatggagccatcgccggagcaaggccgacaaccgttctggtgcgctaaactcaaaaggaataggtgctatacaaaggtgaggcaatgcgaacaagcatggggaacatttcaccttcaatcccggtgcagaaatcccatgcgacgacggggcgcggcttcacggtggagggactataccggtgagcaattcacaccgtgatacgggtctcccccccaatcgccgatgtggacaccctcctcagacgcaggcgttcctcctcggacacacctcgaagacgaaaacccgccgttgagggaatccaccggc

SEQ ID NO: 53570 - DNA, 429 bp, Zea Mays
gtagcattggcgtaagtggcggtggagcttcttgcacgtcgtaaccggatgtggacggagccgaaggggcgcacagttgtggtgcagttggatgcttgtcgcatagcagtccaccctttcgaccaccggtttctgtgaagatgggagagtgcttgtaaccacgggacggttacatgccttgcgtgcggcggttcgccttcttcgtgcttcggttcggctcgtatgacgtgtgggtcccagcccccatgtcgtggggggagaaccctggaggttgttagtggggacttcgcccgtgacactaaggggtgcaagcgaggaggtctgcctataaaagggggacttcgatcccctgggcaatggccatgcctttgtcctcccctcatgccttgtgagcccccggatggggtgccccagcgtcgccttgctctt

SEQ ID NO: 53571 - DNA, 433 bp, Zea Mays
atggaaggggatgtgattttgggtgtgggagatgaagtaaatgcacttgtttgagtgttggtcagccaagaattcgtggatggatagaagtgaatgaagagagaggggccaaggggtatataaaggagcccccaaaagctggccgaccatttggcttttctgctcaaaaaccggctgagccggtattgaaaaccggctgagatggttttcagtagactagatttcggtccagtgaccggctgagtaggaaggtggaccagggccaaaccgattgagctggttttcaaaaaactgaacccaaacttgggtctagctgagtagggaactcagccagctttaccaagagcatccatgatcaaaattcaaggttttcttataggattttgaagggaaatagactgagcttatcacaacaacttactcatttgtgtga

SEQ ID NO: 53572 - DNA, 456 bp, Zea Mays
ctgaaaaagaaagttgttgaagctgctgaaaaatttgaagtcgaggcagtgaagcatgaaatttgcgagatcaaaaagtctagagctcaaaagaactgtgatgagctacgtgcttcaaaagagaaatgttatgaaatatccttggaatgcgccaagaaattgaaggacaactttgctagagttggggcatattcttctgagcaaaaattcattcatggtgaccctgatggagtcgtcgagtggatcagcggagaagtcgaagcctttgacgaaattataagtgaccgaggatacttctgcgcattcgccggcgcacgggggggcacgtcgatcttagagaaagctggctgcgaacatgctaaggctgtagttcaaccaggatttgttttctcggtggatgacatcaaagaccctttggctaaagcttctgcgctaggcaggagattttactccgag

SEQ ID NO: 53573 - DNA, 806 bp, Zea Mays
cacctctcttccttgtaacagctcctttatgcctcctcgcctggtgatctgtaaaaaaggcgtccctgcggcctcgttatggtgctcaacagcgtatctatgggtcgtcgttcctagcgctttcaatcttctggattatgtttctgaacctcgtcaagcagggtctcaggacctgcccctcgactaggataaggcctaagcctttacgggcaagccctaggttctggaacaaccattcttggatggcggagtgtgcgggcttagggtgctggaccaggctaagcggttacacgactctggatcaccattgagaatgtgttcttctcccctcggacctagcccttcacgactcgggccttacccgttacaagggaggatctcgaaacagggtgacaaagttgaaacataatccatgtttcatgaatgcgattagaaatcggatcccgcctcgggtgctacttataattaatccttcaatagtagtgcttattctagccgatcctagtttggagcatctcctgagtttggatgaggtccggacctctgagtattcattccgaagtactcggtaagctgttctagggtggtggggtgtgttggcttagggtgcaggaccaggctaagcggcgtatgggtcattgtagagaccccaatgctgaggtctctatggctgggattgtccgaccccactggtcagcggggacacatatctggcgtcgtgcttgatagacccttcgataccgcttccacggtctagacgtggctcaataatgtcccatcgtgccgacgtggcttgatagtaccgg

SEQ ID NO: 53574 - DNA, 297 bp, Zea Mays
gcaattatcagttgtgataagaggataattaagttggtgtccccactaggagaagaagtggtagctgagttagtctcacctgagccaaggaaaggaggttgtcatcatatggctattgatagcaatgaggcagattcactcgagactatcaaggttgtgtcagagtttccagatgtgttcccggaagacttatcgggcatgacacctgagcagaaagttgagtttgccatagagcttcttcctggcactgcccccatttctaaaagagcctatatggtatttggaccagagttggtt

SEQ ID NO: 53575 - DNA, 632 bp, Zea Mays
gttttttgcccctgttgtataatgcaattgtgattatacccctacttttctaactgtgattttactctcgcgatcatgtttttgaagctttcgtttgcccctagtttgtactggcacttggtactgccgcattaaacgaaaaaattagaaatcgaaattagggccacacaaaaagaccaaagtaccttatatcctttgacccatgccttctctcctgtacccgttcacctagtattgatgcaaaatcctcaccctaacaagaagcggtgatgcgtcatgcgtagggatgcaagcaaaaaggttgacaccgcagaacaaggttggtttcaacgggaggtgttaccgaacgcgttagtggtgtgcgggacgaccaatatcgattgctgcgttggacggttcggtcgttatcgacttgaaccggtcggtaacggttgtctttagtgacgtcgagccttttgatttgtccatgcgcgtgccacgtcaggtagatgttttttaatcgtttgaagttcgaaaatttcaggaaaaaatctaaaaattcaaaaaaaatccctagaatttggcctacaaattagattttatttacgtatcatgtaattttttatatttatgaagtatgtatttttttttgt

SEQ ID NO: 53576 - DNA, 348 bp, Zea Mays
ctcgtactcacaggggtccggtgtccctctcgggggtacggacccaacggtgcttcctgggacgtattatccttcctcgtcacgtggtgcccttaggcctgcccatgtggtggggtcgggtgtcgctctctgtgtgacctagaggtgtcgtacgggtgcagcgccttcatactgtagaagagggtacccctgatttagggtaccgacagtggcccccgggcccgcctcagaggaggatgtgagtctgcaggtggggccagagtctgattggtggttggcctgctgctcctgcccgcctgttgatgtaattactgccggcccgcctatggtcatgtcgtctgccacgcc

SEQ ID NO: 53577 - DNA, 515 bp, Zea Mays
gttttgagtctaacggtgagtccgggagttcatttccttggatggaggagtacttggatgaaggcttagattattttgttgcgttggatgtggctgcggcggaggctttgccacatgtggagggtgccgaggatcttcctggtacgagtactgggtgtaggcggtgaagggtggtgggaaaatagtgtgagggtgaattttcacgtagtggcaggcgctgtcgcatggggatggagcgtggccgacttcgagtagacgtggttggtaggcgagaattgttgtcttcgccgaatggggcgagcataagcgaaggggatcttcgggagctttttgagggtgaggaattgaggataatggtgtttaattacaaggagatgagtatcattccgaaggttgagccgatgtgataggcgatgccctcgccgtgtgtgtgtaataggcgatgccctcgccgtgtgtatgtaattgtaatggtgatgtggcctgttggccgtattcgtacacttgtattgttc

SEQ ID NO: 53578 - DNA, 647 bp, Zea Mays
caaatgaaattcaagtatctgccaaatgtgcaaggtaacttcggtatagtcaaaggcatgcattccttctattcacatctctcaattgaatgtttataaggacactcacaccaaaagatagagataatgagaacatcaatttttatacaaagaatttgttcgtcagtatgacacccacaacaactcctttaggtgtgttccattttctttaagaagagataaagtcaattactgagttttgattatagaattatggctatgcaccgtatgccatgttgatgattaaaatattacaaataagacttgaaggatgttgagtataaaccactaaggactacttgtctaaagaatcctattgtgccaagcgcactaggagcatctacttatgcaactccactttcaactgggactactagtgtagcttccacatagcagttgggtacttagaggcagaggtcttctaggcacagtgacaattcaccgtctcctatcagaaagatgtataacattgtgttcaggttgtgcaggagagttagtgacataaatgagatggcaccaagcgagagtgagagctagataggccaccaggatacatgatctgatgcttagagatatgaatgctcatattatgcttgatgttctagctc

SEQ ID NO: 53579 - DNA, 297 bp, Zea Mays
gcgagatatggtgcataaggatcaaattggatcgaggtaagcaaaaatcaagaattagaactagatggatgacgattggtaggtcgttattttgtctaaaaagtattttgttttctactaccaatgatggactctatctaggtttccttttaaactctaaatcgaataacttgcctccctcagctctcaaaactaattaagttacctttgcacccctattagaagtggattttaaggtgaatttgtcctttttagattggaaacaaatctagtaagcacctgctaagatttgtaatc

SEQ ID NO: 53580 - DNA, 671 bp, Zea Mays
acgtaagcggcatcattggtatggtaaattgaggcacatatgtcgtttaggccccgattaaattggccatttaaacaataagaagtggtgtacacgatctaaacgaaacagacataagaaagattggaccgggcaaccaaacaattcattcataatttaaccaataggaggatcccatccaccatactccggctggcaaccaactaattggcatctcagtatattaaaggggataggatgatttagtttcatttgcccgctttttttaaaaaaaatacacttacatacatatcattgggctatctgaggagcttcagcttctcggaagaaaatctcatcaaaggcttttataatgtcatctcattcatgctacaattaggagagtttctctatttgcgctaagagctggagctaaaaatgtgcttcatttatattctagtgaagataatagagaatcgattttcaccagctcttcactctgctttctcctagaaatcaaatgtaacgtagctctcctcaacgggcccatatgtctttgctagcatattcgattttctttaacatggataagttataagtatatatgcatattttagcgatactttacaataacagtactagctactattattgacgagagtttgaacataattataggcaagagagttgac

SEQ ID NO: 53581 - DNA, 522 bp, Zea Mays
gtcagatgggcgaagggcagagaccgatggctgcgagtggagaccggaagctgatgttcggtgggtgggcggtggaggctagagctttgttggacttaggtctgcgtgatgcggtcgaggctgattggcggaagagggcggggatcgagaggacaacaggatgtggctgggattatcgaactggccagccatgggcgaatggcgaagctgaactgctgaaggtttattgtcacaacgacgggtgacgccatggcgacgtgtgagagactggctactgagggatgtcggctgcttggggtggactggtggagacgtggagttgtggtcttgtgagaattgggctacgtattgattaattttgttttcaaagagggtatggctcaggctataataagccataataggccattcgcctctgctatgaattcctttatctccctccatacgtaattttcacgatactcagattctcctcacagccagattgccacatcctcagaaaagcttcttagaaaaaagccg

SEQ ID NO: 53582 - DNA, 1425 bp, Zea Mays
caattatagtagtgattcatgtatgtatatcaaaacaacaaatgagaggaccattttgaatatttacatgggatgtggctcaataacaggcacaagatccttgcaaactggatgttgctctcaagtatcaacacctgatagcatgccagagagcgtgatggtagccagtagtagcgtaagcttcaacgcagattcttgttagtaatacttgaaacatgatggtgcaatttagtcagactcaatgcataataaatttgatggcatgcacatcatcttggaagtgcaaaattcagatcctatatgctgtaatcatagtaggcaggcggaacatgccagcaatgcaatcccacataaagaaccatgaactctgaagtcaagtgctcctgctactagcatgcatcaaccaaaaaatgcactccggcatgaagaatcatgcggagcttactcacctatcaagcaatctggatctaacattaaagtacacactcatgcagatgagtttgtttcctctgtttgagacatgatacgtggataataagctccaatgcagctcaaaatgcctctcaagtggaataaactaaaagaaaaggcattagcttgtcatggagaattggagatagctggcttgtttgcaacagcacacacctcattgtcttattcgattcttgctgtctagcaggtcagcgatgccacttcatcagttcatttcgttatatatagaggcaaaccacaaccgagaagacaccattgaaggtttctcctcttctgattgtcttccttttttgagaaaaaacgaagcactacagttccactacaaccatggcttgccacctcagatctgctagtgtgccttccagccctcgctcgaatggcattggtgttgaggaacagatgcagagattgaagagaaccgtctctttgtcttctgtgaccattggaaccatgtgccatggtttgagaaagcttggagaagtatacaacaccatcggcgagcttgtgtgcttacccagcaaccaagttagacagcagaggaaagcagtggagcaagagctcgaccaatcccttgtccttctcaatctctgcaacactatgcaagagagattctctgagctcaaagaaaccatcctcgacatgcaattggcactcaagaaaggagatcatacagctgtacaagccaagatccagtcctacatacgcgttgccaagaaggcacagaaacagttcaagaaaatcagcaaaaagcgcaccacagcagatcaagaaagttgcagggtggtcaagatgctgtctgaagccagagagattgttgcctcaatgctggaatcctcatcgtatctgctgtcaagaaaaatcatgatgagttccagcaagtggtctcttttctccaagacattccagaagaaaagttttgtttgcgaggaggag

SEQ ID NO: 53583 - DNA, 303 bp, Zea Mays
cattttacaagtagtatgaatatggctatgtaccaataagaacgatgattatatattcaaatcattgtgatcaggaaaaacacactatagatagcagatagatagcagtttaatgaacaccaaagttataaggtcaagttgattaaactttcatgcaataaatattttgttgattgcagatagataacaacattgtaaatttgaacccatttaaactcaagaataactgaaagatcaagcatccgaatgtctaataaaaccactcattaaagttcagatccataaatacgagtgaacgttaac

SEQ ID NO: 53584 - DNA, 548 bp, Zea Mays
gcgcgggctaacaagcgagggattgttaggttgatggaaccgatcggtgggagctgaggtttggtgtgggaaattaaacttggagtagtgttggatgaatgagagggagcgaaggaagaaggataggatatgcaactcttccagacccagagtgcagtgcagtgccccaagtcaagtcaactcatcttgtccctaacgcgtttgcaacttgtgatagtacacggcggcgcgattttgtgagttgaatcgttcagcgtatgcattacctcaggtaatgccacacccattcaggtaatgccacacccatgtagtacccccaagaacaacagttaccccggtccgttaagatggaggccatatcctgtgcaatcgtcggtgcacgcatgcaatcaatcaatccaaatcatccattgcacatccaacgttccctgctatatttgcgtttacaccctcccgcctcatcctttatctcccccaacctggtgcttgctttttgccagatgccccctgctctcctggatagggtaacgcgagctccagtattgtcg

SEQ ID NO: 53585 - DNA, 678 bp, Zea Mays
agctccaaatttggcactaagcactgaattttcggtttcaattatttgaaacagcacaccttggaacagatttttctcccggatttatgtagaaccaagtccacctcaatatataaaacttgtgcactatactctggtcttcaacttttctgcagaaactttggttcaaaaccacctagaacaggcactgcacagctccaaaactgcactaaaaatgctgatttcagactttcagttctgaataaactaagtcatcagaaatctgataatccaactttgggaaagtttttctccacattttgtataggatcatgtccatcctcctttaagaaagttgttcaacatcatatagtattcctttcctctacaaacatcacagcccaaaaccttatagaatagccacaaatagtcttcaaaactgctatcaaaacactgaaattcagtttcagttactgtttccaatctgaaaattcagaaatatagcagcaccacttggaaccactctttttcctgggttccaaatatttctaggggcaaactgcttaatagagtttatgctcctatagttcctctacaagtttgatacagtgaccattaaccaaaacctcttggattccaaactacaatagcccgaaatttgctccaattgctgaaattcagactctgaatttcactaag

SEQ ID NO: 53586 - DNA, 953 bp, Zea Mays
ctttcgaccaaagatacaaagtcttgtcttttgcgagagcttcatttctcaaggttataacctccgattggaggtttccaagtgctatccgacagctctcgtcctctgcatccttttgagccttcagagccatactgaggattagaccctgccaaacaaaagagcgaacaaacaataaaagtaagaattaccaaaaatagcttgaaaactaccaaatacgaagctaaaatatgcaaaccttcaagctattgtaggcgagactgtctgcaagttggtcctttgtcatagcggacaaaccaagcttgagcttcgtaaatcccatgttgttcatcatttcgcggcaaacattaacctccttactgtcgggcagacagtagaggaagtcgtcttcatcatgccctctgtataccaaggaccctcgagggtatttcaagtccttggcatagtgttctacttcggcaaattgttccaatgataactgctttcccgaagtgtgtcgtacaatgtattctaagtcaccatgggaaggtgcttcaggagcaggagatttggatttctcaggaacactttcttccaccagccctattggtgcagcttttgaaggtctggcttcagcaagaacattagctgtgcttgcagtaatcgcttctcttgcaacttcagatttttcaccagttgcttcggcagaagcaggaactggcgccttcacggattctaaaacaacatctaagacgctagccattcttctcttccttggagtcgctattgtaatactcgatggattcgacaaccctattacaactggagggcttagcaccttcggctgttctgttaccttttctgatttcggctcctttattgggcctgtactagcttcgatcgacattgctgaagctgtttccatggctgagggggcaccctctgcactttcaataagcttcggcacctcggcc

SEQ ID NO: 53587 - DNA, 780 bp, Zea Mays
gagtgcatcacacatagctctcatcatgtcctggagctctagatgaaatgttcctgttattgttagtacaaaacaaaaacaaagcaacaagctaaaggtgtgaatcatacaactactctcaaggatggtggtggaacacaagttatgaagcgtcttacctcgctcttacaaggttcttaccagcactgcaggtggcaaatggtggctggtgtgacagcccaaagagcgtgggtgtgattgcaaaggagtacctattctgctcgagagaaaggtggagctttgggaaggctcactattatatatttgtggcacacaaatcagcaacagatagcaatgttgaataagtgtccaaagtactcgtcctatctgttggcatagagaatgttgtccggggtaataattaaggatacctgaattaaagctgaggcatctacccgagagtccctcacctcggatagaactctgccttgcccgaggtcaccgccgctccgtctgtctcacccgagccattctcgggcagatgagatagcagcacacaaaaacagggagggaacacccgcatttaatgcgcgtacctaccccacgccgcggcagcagcgcacagtagcggacaagacagccatcacgtctggcgcaacaatatgattacgtctacgctacagtgtgcgcatgccgcctgccaccctccgatgggacacctaatatgataggcagagtagacctaccctcgggcgcaatctctccgcctctcccgaagcagggttcagaccacgggtgcaa

SEQ ID NO: 53588 - DNA, 668 bp, Zea Mays
tgaatttcctcactctcttcactttcaatttcatcatcaaatcttggaccctcatcctcaagatcactttcagattcccattcaccatgttcattaacaatcatggtcttgtggcactcaattgctctactgcgtgtagaggatgtagcagctgaattagcgcttggggctactgtacttgcagtaggccgctgccgatttgctagagatgatgctgaagaaaccaccatctttgaagtagcattggatgaagagggcctagctgcagcaccatgagaccgtcctccaccaaaagaagtactggactgctgcttacgccatggggcagcaatagaatgactggaataagatttcccatgagcctcgtgctgaatttttctctccgtgcgcttggcttgatcaacaagatcttgcaacgaatgatatggaaacatctcaacaaatccagcaatttcttcattgagaccactcaagaattttgccatttttgactccggatcttctctaatttcagcacgcactagcagcagttccatctccttataatattcatcaaccgttctttttccttgcatcaacacttgtaacctattgcgaaggtcacactggtagcttgagggaacaaaccgcctcctcatcactctcttcagctccgcccatgtgttgat

SEQ ID NO: 53589 - DNA, 713 bp, Zea Mays
ttcggcttgtcagtcttcataacatcaccctgaaaataatgagacaaaggtattatgaagcataatgtgagaaaactcgaagaagtgtgaaagtaagaaaatcttcataccgtgttaattaatgcccgtgtttcgtctccagcaatttctcggccacccttagtccagatccgagtaataaatctattgcccatgcttctggcttcggccaggatgtcgactaaatctaatgatgaaaggccgaaggttggtttgttaacagtcttgaggtggttgcatccagccttggcaaaagtaggagttgttccacgggcagccactagtccgcaaaattcgctgtggccgactatgacttcgtcatgatcatcaatctctttctcaatccatccgattgcccctgggatatcttcgacagaatggttggcttcctcagatgtcgctccgatagaattgaaaatatctttcagccgagcagagcattgcgttgcaaagtcgaagcatctatcccgaagagctttaagtgtttcactaagcttaaaacttttatcagatttggccttgattttcatatttaaggtttcagactcatgactaaatcgacttgtattttcttccaaaattgtttttgtttccttcaattctttactcaacttttcaattcatatatcctgatttgaaatcagaattccttgcttctcattttgaagttgagc

SEQ ID NO: 53590 - DNA, 692 bp, Zea Mays
cacttgctcttaccccatctaatagccaaagtaacccatataatgtgaaataaggagaaattgcatagtaatggacgtaagagtcaagtttgctagaatcacagcctcattagtgcaaacaagagtaatgcgtatgtacttattgttctcactggtcatgagagagtcaagtgagagtttgtgctttttacacttggtgattggcatcacctagatggtttggtggtgattggagtgtagtgatcacctagagaggttgtgggtgaccaagctcaagatgtgtacatgatagagcagcgaagaaccaacttatagagaacacttgatccttgcacagaccaagggagagtgatacccttatggatgttccaatgaggattagtgggtagtgccgactctgttagacctcaggaaacttggggagtcttctaaacccttgcttaagtttgtgcaattgcattagtagactcaaagccccttaatcatggctttgtacttgttcttgtactctttcctctctcgcatcgcaagcccaagcaacttttcctaactagctaacatatctgtcatcttgtatacttcaacaacgatttcatcaatgaaaagtgatacctcagatgtagggttgtcattgatgtcttattattgttgcccaccgcatcctcaccaagtgcaatggcatagaatcctcc

SEQ ID NO: 53591 - DNA, 471 bp, Zea Mays
gtgaatgaaaatttgtctggtacgtaaactgggttttggtcatctgatgggggtgagtttgggagcctgttcttgtggacggaggagtcttaggctgaggatttggattattttgctgcattggatgtggccgcggcggagtctatgccgtggatggaagcgcgtggagcgtttgagtccctggctgaggcgaggaccggtgagtctcgcagatgaagggtggtggcgaagcatagtgttagtggtacgtcgtgaagtagtaggcatcatcggatggggatggaacggactcaccctcagctagatcgggatggccaacgagatttgttttcttcgaccgggacatgcatgggggagggggatctgtggagtctgtttgagggtgaggagttgaggatgatgctgtttaattttcgtgaagcagaccttatcccggaggctgagccgatgtagtgtttatgctgccctcgc

SEQ ID NO: 53592 - DNA, 311 bp, Zea Mays
cctgcattttgttagcgacttattagcaggtaataaaggttcaagcttatatagaagcccccccacaatctcgaagccagcctgtccaccccagcccaccccagcccatgaataacaggcctattttcgaagaccccccttactccgccaaccgctcaggctcaaccctagctcccggcagcaacgaccagctcccctcctcccgccaaaggttccgccgttttcccgccaaatccctcctctgacctctattacgcccttcccaccacacttgacccatcgccgtcatcccagtccacgcccacgcccac

SEQ ID NO: 53593 - DNA, 489 bp, Zea Mays
tgcgagcgcgcctcgtcgtcttcatcattcatctcttctgtccaatacgtgctcagactaggaaccaggctagacattcttctcaccattcatgctccagctagaaaataggttcacattcttcccctctttcttattcgtactcaactcacttaatactgagcatattaggctgatcccaacaattccccctctccatattaggccttatctaattttctaatttaaagggccccttttcgtcacaaatgttgtctcacaacgtgctcaaccacagaatcacatttactgtctgactgccacataatttatatttcttatgctgagaacgtataactgatgcacaaaaaaatacatatggattatatatacatataccgcgtaacaattatgcatactccaaactgctccctcggccctaggatggatctacagagcagtgttgaggcaagcgatttgaagtcagaccaaatctgcatggagtataag

SEQ ID NO: 53594 - DNA, 411 bp, Zea Mays
ccttagaactcaacattatatcatcagcttatgctttagagatcaacaagttgtctttatttcatgctttagaaaccagcagcgtgatctgcccatgtcttgttaggtttgaaatttatttgatcggtgacagattggacgtctagtagatggctcttggctggtcttcatttcgctttgtgcttcaatgcttctgttgattagacttgtacttcagcagctatatttggctttcctctgatctccatcgatatctttcttctgtcttgatacattcattgcgtatactgtacggatgtgactacttgggaaaatctattgaaaattcttggccgtcccccccaatgggtgtgaccgagggacgtcttggtatgccgagcgtttagcaaactgtccttgagtagtaacttg

SEQ ID NO: 53595 - DNA, 784 bp, Zea Mays
agatttttggaggataatccaacgactatgggaggccttggggatataaataggccctccctcgacctcaaccagtacaccaaggcaacaaacaagtatagaacaagtgcatactcattcattttccctcttgtgtaaatctatgtagatcaagtgttggtgtgtgtgctagtcaaaagagggaggcgtagtgctgttgcaagagctagtggtgatcttgagcaagttgttactctggccggagagctatcaagagttgtgaacaaccttggttctgtgtaaccaatgtgatatagtggaagactatgtttatcaccatggttataatccggaggaatgagttgaaatatactccatgccaggttggctatctccaacgtggacgactggacgtaagcaagaatttcaggcttggccaaaccactggaaaaaaactttgtgtctcttgtttagctttcttatttgcacttctctacttatctttggtagaagctgtttgtgaagtgcatgatcttttgagataagggtttcatttccgctacgacctacttgacttgactttattccgctgtgatcaatgcttcgagtagagtaagaaaagttcattttagatttaaagtttttattcgcctatttacccctctctagacgacatccaggtcatcagtatctccaaagggtactttcaaaatcatacacaaaaactaaaatgttacaaaaatgggtgaatgtcgtcctttcactgggtggaagggacctgttgtaatttttaaaactatatcgc

SEQ ID NO: 53596 - DNA, 380 bp, Zea Mays
gtgaaatcacgtgtaatgaaacattaatttagattgaaaatgactttgcaaagtgattaacattatatagggtattgtacatgtgtgctaatgtatggtttcgatattgatataacacactcataggggtggtgttggatagtttaattttgagttaagtcatggatttgtgctcgtacacaataacgtgtgttgttcatgtgctggtgttgcttgagatagaacgtggtcggtaacgaactaaagctaggtccaagagaaactcagtatttagaactaagttcagtaaggaattgaggttttattgctcaaggatgtcatacgaaggttacaaaagttgaagacgtgcatgtaatagctagatatcgtcccaggcgtgc

SEQ ID NO: 53597 - DNA, 467 bp, Zea Mays
gttctcaagaaacaacttcaactttgctttctcttgaaaataagtcctaacagtgtcccttgtgcatgtcctgcgagatggtgggttccaacgtgggacaactaccttcataaattttttgaatcctgtcttctcaccttgaacaaaaggcatctcatcttctatgaccatttcaacaaaagcttgcctaatcgcttcagggtcatacttccaagtggtaatgccttctccttgaattgcttgcaatctgccttgcttcggatccttattattcttatgtggattacgcttgcaaatattgaagtgcctatgcaatgcagttgtaccattgacatacgaatctgccttaatgggacgactacaatacttacactttcccttcttcaacacaccttggtcatccttaatcttgatgaagtgctgccacatttcagacctcggagccatttctttccttcctgtttcag

SEQ ID NO: 53598 - DNA, 387 bp, Zea Mays
aaagtggaccaaaaggacttcatacttgagttggttgccttttgttacattctacatgtttgttgttcaatttctcattctatatttttgcacaattaagtatcataccactatgcttcattaaaaaaataaacaacacagtttcattattgcctcatcggtaccaaaattactcaacagatgtaaatgttgccaccattcaaattactctacgcatacggttgcaacgcatggtaaacgttgtcgtgattgtagttactctatggatgcagtttgcaacgcatgttaaacgttgctagtaccattattattaacgaatgtggcttgcaacatgtaacaagcgttgcaacctaatcacttccaacacatataactatacgttgctag

SEQ ID NO: 53599 - DNA, 1377 bp, Zea Mays
tacactaagtatgcaataggggtggattacaaatgagttaagagagcgcttggtgcccaagtctctgttgaatgagaagtggggcaaggtggagtgctctgtgtgttacaagtgtgttcactacttttgctggctagctgcccatgttcttttgtcactaccttctgttccttttatagaccaaggaaagggatggcctaggtacatggatgcgtcgttcagaccattcgtatgaggcttccattttgtcgtattgccccttcgttccatggagtgtctattgtttggtggttgacatcgttgctccttactgtattcctattctagggtgtgtcttgtcttatcctagcacatacaactagttgtcctttgggttgtggcttagttggacattggttagctttcatactgacagtgacgcgtgtgtcttctctaaagtaatcattcaggctattcggtcgtcaaagcatgagtgtctagttcttaactctcagtttgttattcgagcgtcggtctggtacctttgtactgtctttgcgatgggccccaatatgattttccgattgcatgtggccctcgaggggtcgagcatagctcccgacttctaggttgagcgagatggtcctccctgggtatggcattgtgtcctaacccctaggttgggtgattcggtccccataggggtggcttcacatcccgacttcttagatgggcggggattggaggagtcaaagtcctatggtggtgggtcggctgaatcaagatcattcacaaggttcgggaaatagatttggatgttttcttagtgctctatgtcgtatttgggttattcatccctgacacttagattattctgttttgtatagtttcatcatttcatcgatttgtagaatcccacattcaaggccttcattatagatctgcagctgccactttaattgagttgtgtactatcaagttcttacttgtgttcttcaatttgcatgtagggactagccttcttaacgaggtcaactagattgtgacatggttgataaccaaagaagaagtggtactaaggttgtagggttggggtctttgtgatatgaagtcggatcggtgtatcgcatctccaacaaattgatagttattgtgaacctgccggatgatcaggaatccctgccccatcaaggtaagtagaaaagtgtgccatgtatactaatattatcagcctttaactccacatgttgttggcattctaagtccatatccaatctaagctaaaactcaactaaacataatttacggtggataaagcgattaaagaatgaatttgagctttcagatctcgatgtagttcttaggactcttgcaacagatatatcgataaagaaagct

SEQ ID NO: 53600 - DNA, 899 bp, Zea Mays
ctttgtatgctcgactttggtcaaactcgacacctgtaaaactgaaataaaaattgttcaccttctaacctccaacgacaactctgaagctcgaggacagcgtttgtaccttcatctgaaaccataattttttgcgagattcgtaccttcgaagcatgcggcttcgctcggagatttgatctcggataaagacagttcatgatgtttttataggatggctgtggagcagctgtctagccagcagacgaacaacttcttgttggatacccacttttcatccctatccgctttaggcttcaggactgtctccattctgtttgcaatgtggcctcgggagtcgggaggatagccttacgaaacatttgtccatcagaccatatcaaggtataactgccgccaatttgcagtcccttcattctctaaccctatcgttttaggaacccagggctatagatgatcaatcaccctgctcatggtctcattccttcctcgtcggtacccggcgtctgatttgattccttccccatggccatggtggcgctttgctcaccatttcggtgaacctcagaggaacatgactgcgacctgaacctgaacctgaacgatcaggtctccgatgaaaagtccgagcagcctcgacgatgattcgtgcaccaaatttcacccacggtgctggtgtttggcaacgcccagttggagttggagcaactgtttggagacagaaatatatagggacacaggatcggtcattggtcaaccgccaaacaaagctgttttttgttaataattgccggcctaaaattattggcgcagaagattcgttctcctactcccagaatctctacagcggtcccatactgctgctacccgcggagaggaatcgtgtgtctaaaaacatt

SEQ ID NO: 53601 - DNA, 709 bp, Zea Mays
ccaaagcacatgcaacaaataagccgagtgtataagatcacaaacaacgctctatttaaggcaggcgtctacacgccatcctagacccgcccttaattttaattggcttatataaaagaggtaggaaaaaataaataaaggtttagtgcattggcacatggtgctttgggatgatgattatgccaatacaataaacatatggagaaaaaactaataatagaaattgctaaaaagtgtgtggcttcccttgggctccaaccacacaccctttcctcgctccattcccgtaggatgcatgcatgtttcctcgtgcgtctgcatcgtcagtttcctcattcctcttgcagactagtagctagtgttcttctcgaatttgggacgtctcccaaatcccaatgatttccgctttttttccctacagcgaattctcgatgtaggcatgtatcggggaagaggaaggtgtgaatccttgttgcccagtttctctttcccacatctcgatttctttgttgttcctgctgcgctcgtgtttttatatgtatctatctacaaagaagaatcgaagagattcagtacgtagatcttgattgatttctgaaagaagccacaagagaaaggaggcgccaaaaaacaagtggaagcgaattggaatctgccagaatataattacattagatttgagggtatggggaagacaccgaagaagaag

SEQ ID NO: 53602 - DNA, 550 bp, Zea Mays
gcatgtaatgtttgaaataggtgaaggaccaagttccccatcgatatcatttagagttctgtttgtagttattcaagacaatatatcatctgtggcaagggagctaatctttcatcattatgaagagctaaaggtaatatcagcttgaaaatttatgcagtagttgtaggtaaggtaagtatttttcgtggtttgtatgatgtgtgttgaacattgtttcatccttttcacctgacaggaaagtataattactcgtgaagaaatggtgaagaaaatgacaatagtggttggagagaaagtacttttggaggccttaaagaagcttcattactgtaagtttgcatttgcatgcattttcttgttttatgtcaaatccgaggactactttcaaggcttgtgttggttcttctccttgcaagctctataggaaggacttcacaccatatattgcttcccaatttcactgtaataacttgttaaggggtttttgtattaaatatgaattgcatgtagaacataaaatccattctgtcataatctggtaggtaag

SEQ ID NO: 53603 - DNA, 362 bp, Zea Mays
aatcagcgagccatagctcgggctttgtttctcctgagtacttggtgagggtagtcggtgcacgaaaccaatccgagaatgacgccttgtgtatatcttgactgaagacttatgggcctaaaggtatcgtagtcgttccttctcttcaccgagcttggcttgaatctcacagatgtgctcgagttgttttccctgactccccacgggggtctagaccacatcccgttccctcgggccctcgatgtgtggtgctggtgctggggtgttatcattcctgggcatgccaagctggttctctccttcatgctcctcatgcttagcgtagaagcattctcgagttgggtcataaccctcgtcgtcga

SEQ ID NO: 53604 - DNA, 370 bp, Zea Mays
cagataccattcccaaaagcgcccagtcagcacccggcagttgcttccaaaacgccagcgtgccacgtcgtcactcggcggttacttctaaaaccccggtgtgccacatcatcactcggctgttgccctcaaaatggccgacacagcccgttctaactcggctgttatttctaaaacaccgatgttgtcaccagtcgctcggcatttacctctaaagtgccgatgatgtcctcagtcgctcggcatttacctctaaagtgtcgatgatgccctcagtcgctcgacgtttatctctaaagcgccgatgatgtccccagttgctcggcggctatctctaaagcaccgacgttgtcatccgtcactcggcggc

SEQ ID NO: 53605 - DNA, 521 bp, Zea Mays
tccttctgtgccgtgttcgtcttgggatataaggtgccgtttgattcataaatagttagtgacaatgataatgatctacacttgattactagcgttaattttttttgaatagtacagtattagtttctagtgtgatatctgattaccgttaaatttagacaaacatggttgtttaacgttattggttaccgttcacgttacatatacgtaaacaaaacatcacctagtagtataccctatatagtacggaacgttcaagcatgtagcttatcatttgggcgcatatcaaacattgtccgtctactagctaaatagaagtgttgagcactagttttgatcggacaatccgcggtccagactgttcgtcgtagtgtcacagaccatccacgcgcgttcacaaaatcagttagagttacatattttttgcgggatttattagctaaaactgcgggatttactcgagaaccgtcctgtagcgggtctagacctacccctttatatagacgaaggttacgaccgat

SEQ ID NO: 53606 - DNA, 508 bp, Zea Mays
gggacaccaattttggtatagaaaatttagatttctttgatggtcgtggatccattgatggctatggataaggtggatcccttgttggtggcatagacagtgggtcaccaagatgatgatgaggagaaggtggtggagtcctaaatagcaatgcttgtggcgaagacggtgggtcagaaagaggatgaggtaaagcatgtgaagtttgaggaggcgatgatggatgcacaataggaactgtagtttgaggaggcagagacggttgggcgggggacgacgacgacggtggtggatcatccaattcgacctcccttcgagaccaaaggatgaaattgttgatggcttgtccaggtgtctcaataccttcggatccaagtgccgagtgttcagcgtggcggtacttggcacacattgtcctaccggcagcatatgaggaaaatatctatttttcttttgccttgtgtcagttcaggaactaggcaaagagactctttgccttgtgtcagtt

SEQ ID NO: 53607 - DNA, 497 bp, Zea Mays
gcggagtagaggcagaaggaatgtgaaggatgcggctgttgtgaggagatgtcgccttgcaggtgcaggccaggcagtggacgaggtccttacatgctgcggtctggtgtcaacggcaaaggcagcgaaagcacttaccatggatggagacattgaagacggggcgaggagtgcgcctggtggttggcgaattaatccacgcccggagggtctcccgcttcctgcgcttgtaagatacggagatccagccggcatcgtcttccttcaagcgagtagtcttgtcgccgtcttgggaaggagctccgccataagtgctctagggggattgaagacctggatccgtccgcagagacgaaggacgacccccccccccctgtagcccatgccctatcgctgcgtcgggagggatggtcatcatttgagtggcccccaagcttcaatgctcggatctggtcgcagcaccgccggatctcgacgaacagagggaaggaggtggg

SEQ ID NO: 53608 - DNA, 283 bp, Zea Mays
ggaaaggtgcttcgagaaatccttggattgcgtgagaaaattgaaaaccagctttgccaaggtgggtgcatattcttctgaaaacaatttcattcgaggcgatcccgagggtgttattgattggataagcggagaagctgaagcttttgaagagatcctcagtgatcgcggggacatttgtgcttttgccggtgcttgagggaatgcttcaattctggagaaggctggttgtgatcatgttaaggctgcagcccagaccaaagccgccttctccacagacgac

SEQ ID NO: 53609 - DNA, 534 bp, Zea Mays
cacgaatttaaagaactgaggtcggttcgggtccgtccgatcgcatccaacgacccacgataaaatccgaagaggtatcccccatgttctatcctggccgcctgatgattatcggacgataaaccaaggctcttccacctcctggtatcgcgagacgacagagcacgcgaccatggcgttggtcccgccggtgcatggccccctggtgaccctcgtccactatctccgccctgaagaccgctagacgcaacttaagtagaatcgagtggtccgagggagtacctagagtcagccgtgaagcgcagagtgctggccacgaagtcttgcggtccacggtggcgcgcagactacgacgagcaattctggcactccaagcaccacgctcaccccccgcgacgcactggaacggttccccgggaccaggataaggcttccgacccaaaacagacggttcaacagcggtgaattggagcttcccacggcggcgggcaactccagcggctggcctcccctggtttgcggcagagacgagcg

SEQ ID NO: 53610 - DNA, 443 bp, Zea Mays
attttagcaaaaaacatggttacacgtgtgaccatcgtgtagatgcgtcaattaaaaccatggagtatctgaacggtccagataacggttgtatgggtccacaaaatgtcaccttgaattcgttcaaggaacttgagtggttcagcgtgaatcttaagaggggatggtattaagattagatttcctgttgcgcatgatgtacatatgaaatcgaatgatttagggaatttagcaggccttaaatcatgaacaatgcaattacctgtgattttccacatcatccctatcctgggtgaccaaggcgtgcatgccaagtcttgaatgcatcgacattctgaaaaaaacactttgtatgtagcatgaggtattggttttatatacgtgtagtataatccacacggaagtgaaggtattctttccagaatgttagagccatatgagaa

SEQ ID NO: 53611 - DNA, 736 bp, Zea Mays
ggaaaaaaggaaattacatggttattatacatagtatctttgaagctcatctgcattctaggatcttggaatatcattgccttccatgtctctttgtctatacgatcctggccttgatgaagatactacaagaaggggccctcccacttgagctgtagctttcctatagtttctgggttagctattctttgaatcaccaaatgccctggcttaatgttttttagtctaacttttcagtctggccattttgctgtttcgacttgatatttattaatatgatcaattggctgaagcctaaccccttctattgagtcttttgatactttgtaagtatcttcatcttctaccgaagctagagcccttattgatcctgtcttcgcttcttccagagtttaaacagagtaaaacccattgatcttgaaactgcagtgttataattccacaccacctttactaattcatctggccactttccctttgggagattaaagattgacctcattatccctgtgatgattattccatttgcgcgctccactaagccgttggattctgggtgcctcaccgatgcaaaatgtatttttattccaatctgaccacagaaggttttaaatgcttcggagtcaaactgtgctccattatcaactgtaatggccttcggcaccccaaaaccggcagatgatattttgctagaaattttttggattgtggttgatgttattgtagctagtggttt

SEQ ID NO: 53612 - DNA, 710 bp, Zea Mays
tgaagccgcagtagtcgttccttacatccacctccgctcggagtccgtggaggggtcagggaaggccgccagtgtgtgtggattgtgttcgggcaagaccttgggcgcggaagccattagtgtccagtgaatcgctcacccgagatcctaatcgccacagtccgcctcgtgccgtggcctgcatcacctacgcaacagttgatggtaagaagcattccaccgggttcactttcgccttcgctacgcgtagcaaacaacccatgttcgatttggtgcgcagaggcctcaaatcgcctgcgctccggcgaggctccgtcgtgcctagcgcgtgccaccacgcctagctgcctgtggggggatgacgtcagaaccgttggatccacacagtccaccacgattaaatcaaaaggcaactcttcgcggccttaaaccatagccgtagatctgggatcctatgaccatgagtgcgtatcatttcaaccgaggatctgggcacttggaccatgatctgatggccgaagatgtacccttgcgtgatctaatctgcaccacaagatgtggatcggacgacctagataatgagatacccctttggtcgacacaataacaaaagagcccctgtgttttttatgactcaacccgcagtccatcaatgtgggaagagtattacgaatcagtctagtttctttcacttaagaccctgtcttttc

SEQ ID NO: 53613 - DNA, 998 bp, Zea Mays
gcgtgatacaatcagaagtgggcaaaggagaagggagttggaaacattgaagaacaatttctatatccatttctttcagcaacctaaggttgccgatcttcaatgtgaggtattgatgtttcgacaaaggagaggggaatcattgggagcaacatgggcatgctttttgtgtatggtcttctcaggaccatatttggctattccaaatgtcatgcagatgtagcattttattcgagacatctcacctggtgatgctttgtgtctgcaattagccgtgggtggatcgttttcccatctgactgtatcagaaggcaagaaaatcttcaacaaaatcctcgagaaggcatttgatatcagcacaacggaggaaccactttaagatttaaaagatccatccgagaccaatagttcgaggagggatcttgttcatcacaaaccaccatcaccaccaaatactcctaggattgaagaagtcctagaccatctacgtcactagcaactaagagagttagtcatgtcgtggcatttccatcgtcggtcccaccattctcatttgaggatgagctcttcatgactttaggtgactcctctcgattggctagagtctatcgatgcttcatcgagacctcgaaactaggcttcaccttcttaggtgaagcactacagataaaggaggatctgctttggctttcaacagtgatcaattgggaatggctagaggagagaaggttgaacacaaaggcaatgaagctttacctgcaacctagactcatccctgattgagtatcaaatttgccatcgtaagatatcttgtatgacccaagagtaggggtgaatattatccctcaacacttagtggatcaccacttcacgactgtccctctatccaagaccaacatctgtctatgatggatagataaaacgtttttggagagcaagggagttattcgagtggtactagttattctgcaagatactgagatgtacctagacttcca

SEQ ID NO: 53614 - DNA, 446 bp, Zea Mays
gaaggacttggtcacccactgcaaattccaaatcccgcctcattatatcagcataactcttctgatggctctgagtggccaaaatattctgacgaatttctcgaaccttctcagaagtctgctgaacccaatcaggaccaaccagagatctctctcccaaagtctcccagcacagaggggagatacaccgcctgccatataaagcctcaaatggtgacatcttgatgctagcctggtagctgttgttaaaagcaaactctgccaatgcaagatgatcctcctagctacccttccatgacagaacacaagcacacaacatatcttctaaggtttggatcgttcgctttgactgaccataagtctgagggtggaaagcgacactaagtgaaagcttggtacccaatgcactatgaagactctcccagaatttggatacaaatttggag

SEQ ID NO: 53615 - DNA, 726 bp, Zea Mays
gtgaaaaaccctgacgacgtttattaaacagatttctgctagtacaaatttcctgaaagaatttaaatcatttgccttttctcttgaggaaacacgaaaaaatgggcaattgtaggacgagcgccgcacgacgggtcccaccaacgctctcaggtctcggggctcgccaaaccaccaaacaccggtgcgttcgggcgagctcaatccttcttgaacaagtcctcgccgagagtccgagtagcgaccggagcaatcaggaccccgagctgtagcgcgatggcatccagttcacgaacgcagccagagattagcgccatccgaggagatcgtgcggacatctcccccgactttgaaaccctgagatgacaacatatgaggttgatggccggagacaaactggagcactcagcgttaagagcccgaaggcgctcctcctcacgcgaaacctccttcagcaccattagtgacaaaaacaagaaaccctgtgagacaaatgttggggccctaagggctataagtcaaggataaaagagcacgagcctcaccttatgttggaaacccagacgaaggtccctccacatcaaaacctagtggtcgcactttggaaaggtacgcctaggaccttagagagacctcccttgacttggtcgcatgatgctcggtccctgctgtcctactaagctcggaccccgctgtcatggctccccagcgttacgagcttcacac

SEQ ID NO: 53616 - DNA, 551 bp, Zea Mays
cccccgacgcgtagaccgacaagctagggcaccaatccaaaatcccacatgtgctattcattgtagagatcaaggcaaatactgtgggaagcgtctcaccgacgattgaggtgacagtggcgttgttcactactctaggtgactccacaaggtgagaggcactccgacgacgaattgtccttggacggtcgattttgcgcccgcagttgcccacatataccttctacgtgtcctacccttcttctcaaaccggtagccgaggccaaccccgcgatctaggccggatccgaacgtggtggcggatctccatcacacacgttcttggcggcactgctgcgaggtggaggatggcaaggcttttatggtgagcaggtgcgtatggcaacacagccccagattccgaagggcggagtccgtgccccgagagaatcggtcggcacccaacccccacgaacgcaacggccggtacggaggtccgttatagccctctgtaggacgaaggagaacctggcaaggtggcccacgagccagtgagtggtcgtgagtccgcg

SEQ ID NO: 53617 - DNA, 512 bp, Zea Mays
gtcgcgtctgtacgtacgcgcgcacgtacgtacgtgtgtgatacgttacataattagcttgcttgtcgtacgtatgctgcacgtacgacgatacacagatagatgcaaaaaaaaaatggtccaacactccaaaacatggtctctggctgaccctcgacgacgatcgacgcagtgctctacgtactaccactacactactgtgtccattgctgtacggacgacggaaacttgtggccttaatttgataacacgactacatgtacatcagctagacggacctagctagacgatgcccatcgtcacatgcatgctttggaagctatacctttgcttgtttctgcgtggggtagtagtgtacggcgtacatgccaggccatctcgatcgctgtcacgtgaaatatgaatgcgccaagatagagtttgtgcatatgggagagaatcgtgtatcaatgtcagtcaggtgctagctagcggctaagatagcatgcatatacattatatacattctagtt

SEQ ID NO: 53618 - DNA, 1098 bp, Zea Mays
gaaagagtgacggcggtgctacttgtttcaaggagcatttagcacatcgagagaaggatgacaagaattgtccatccattcctcctaaaataaagaaattctttgttggtgagctagacaagacaaaggaaaagaagagacagaggattcggtagaggcaacgcgaagatgaagcaggaaaaacttattatgatgaagaacaaggtgatgattatgatgttgaacttcaggctgcactacaccagtctcgagaggaacatgaattcagaaaacgagctggtgcacggtatgataggggtggtggatcttatgacagatcttcgaaagggtgtgaagagcatgtttgattccaacacagctgcaattgctctctaggagtatgagttctttgggaggaaaagaggatatttctcgagtgacctagcaaggagaatgacaaatgatcacaatatgtttccatccagttgttgggcagtgtttgggtcagagacacagactctacaatgtgttgtgaagcggcttcttgcacagtgtgtttcatcaaatgagcgtgaacgcaattggagtatattcgttttcattcgtacaaagctccgcaacatactaggatacgagaagctacatgaactggtgttcgtgaattacaacatacgtctacgaattcaatgtgcatcatgtatgcctgggcctagtgaatttgatcccgccttagccctcatggatctctcgttacataggcataacagagccattcatgattggatggaaagagggagatccaatgtggatccaacattggatgaggactcatcttacagtgacacacccgttcctatcaagctgtttacatcaattgcccaaaaatatggagacatagaggatatacatggatgggctgatacaacagttggtgacgcccacctcggaaaaagaaaaagaaaacttggtccctcagaaagcaaagtaaaaaagttaaatttgatgacgaggaagaaaagattgacactgaagaaagcagtagcgaagatgatggtgacaacgattcccatggagacgaaggagatgacagtgatggtagccacggggatggtggaggtg

SEQ ID NO: 53619 - DNA, 481 bp, Zea Mays
gaaactggcaaagccaaacctctgatgaggaaaggcacgaaaataaccgtctcgtgagtgtcctctatcgggacggtaattccccgccagatctgccaggagcataactctttggatggaagaacatcgacctcgacgaggtgaagaaggtcagtttaagagataacgaaagcgtagttaccacagaaaagaagttgactgttgggatcaatcggagggatatcaggcatggcagcaccctgcttcctcttcctgtgcgccatcacgatcccgcaggcaaaaggctcaaaaatagcgcaagaaagagggagagttcgagaggctagaatgcaacggaggagaagcaaagttagggttctcgcaccaagaaaccgttgacaaagatataaataaacacgttaagtcaggcacaacgtgataggctggtagctcagaccagtttttggcagaacagagcaaaatgggtcggatgatacatccg

SEQ ID NO: 53620 - DNA, 421 bp, Zea Mays
tgataacggcacaagtccgcttccagcttcggcaagccaatgcttttggaaagggttctgacaattttggcctcggtgcgattccgaaggcaccttagtttcccttcgttcaccccaccaaatagcatagcccctgatttatatccgcaagatatgacatattttttcaactcctctttttcggcgtctgttaattcttgtccaagcaaatcttgaaagttaaaatctccttcttctgaaatttcattaatctgctctttccccttttcagttgccgtattcactgcagccacagtagcttcttcttcagccattttaaggagtatattgtcgataacctcaagtgtggtttccaggttcgattcttcggtggccccggtagcttcggcttcgccggtttcagcttcagtagtttgcatcc

SEQ ID NO: 53621 - DNA, 293 bp, Zea Mays
gcccagtgcaattgtatgagcatggatgcaagagttaccaccctgtgtgatgagttgtgcaagctaaacctggaagttgtttcttcaggtgcttcgaactatatctcggtggagtccacattacaagagcaagtagtcagggcacggattgaagacaagggtgttcaggttatcaaggaaatgatcaagcagaaggcagagaaatacaagtgcttctgtcaggacaacaagggaattctatggtttggagatcgattggttgttcccaaggaccctgagctcagaaagaagat

SEQ ID NO: 53622 - DNA, 388 bp, Zea Mays
cggcgactgcgctggccgtggcgatggtgctggccacagtggggtcgaggatggtcggaggagtccatcgcggggaggaggccggtgacaaggctggggagtgaagacggaggctggggtcaggcgggcctgtgacggtggcggtggatgaggcccgcgaccaggcggctcccgacggctgaggtccgagaaggggatggagagggcggtcgaatctggccagggaaggttgggcggtgggaaccgacgggatccggtggcgtggacagatggcgcgactcgcgagcagagagcaggtcggcgacgtggttcggtgcgaccaggggagcgcggcaaaggacaggcgacgatggcagggagaagagatgtcggcgacggctgggggagg

SEQ ID NO: 53623 - DNA, 537 bp, Zea Mays
attggtagtgtatatggtcgtctagaaaaagttagggttgatttgagcttgaaaatgttattaagacatttgaccgaacacctagtgtgcataatgaagagagaaagaaaatggcatttaggagcagatagaccccaaagggatgtgacacatgcaagggagggtatcaccatggcacagattcacaatagtttgcaccaaaatacacagtttttctttgaattcacagattttgaattgaaacacaagaacttcacttagtgacagcagagggagagaacggattcgagatctcactagagaacatagagcattggagagaggatgccagggacgaccaggagacctcggctgcgctgggagtgaacctcagcgagaaggcgtggcggcgcaggagaagcagggcggcgacgatggtggacagagctccaacagagaacaggagcgtgcgagagggagaaaggcaagtgagcggcacaagaaaggctaacgagcggtcccaaacaagagagagactttaaaacagcaattatgggc

SEQ ID NO: 53624 - DNA, 474 bp, Zea Mays
ggggccaggatatcacaactccaaagttgcatttagatttcttgacaaataaattgttggtgcgaagcaaagtcatcactgctctgacatgttgaaggtgggttgaccaggacagactgtatatcaagatgtcatcaaagaaaacaaacacgcagcgttgcaacgggggctatagtaaggaattcatcaagctctaaaacgtcgttgatgcattggtaagaccgaacggcatcaccaaaaactcataatgtccatggtgtgtacgaaaggttgtcttctcaatgtcatccttgtgcatacggacatgatgataccttgaacggaggtccaacttagtgtagaatcaagccccatggagttcttctagcaactcgtcaaccactggtttaggatttttatccttgatagtgtgttcattgaggtctctgtaatcaatgcaaaatgccatgtattgtctagcttcttcactaagag

SEQ ID NO: 53625 - DNA, 442 bp, Zea Mays
tgtaaacggatcgaatacacatagatacaaataatatagatagttttttctctcaaattcagattcaaatacagatatggaagttgtgtcggataagatagggaatggttatcgacatcatgcatatgtaactttgagtattctgatacatttaggatattgaatatcaaaattcaaatctggacatatttcgccccttctaaatggatttggatttggatatggtcgaaaaatatctacataatttgccccttctaatcagggttgcctcgcgttggcacatcttactatcatggtctccttttggaagaaaaccccacaccgcgatcttccaagtcatcaaccttcttcatgacccctgacaagtgcttcacaccgaggtccacctactcaaccaacaatgtgattgaaaacaacaagaatacagtttggacactgccac

SEQ ID NO: 53626 - DNA, 1051 bp, Zea Mays
tccaatcacatcaaaaaccctatttagtctccttttgcctcgggcaccaaaggcagtgctcatggcttcgtcctttgccttcatataagtccccagcagctcatcattggtcgcctcaatgacttcaagccaatcatcattcggctcgtccaactgacttctgtagcgataggtgtgtctcagataaaccaggccacctttgctggagccagcagcggtctccttcggcatttccagtcattaacaagtggccatatcttataagcgatgtgctcttgaaccaaatctctggtggcaatgtaagtacacactgtgttgaaggccatcaagcatgcttgtacttcatttccacttgcgatcgaaggcctcctgataccgaagcgtgatcgtatagggcgctggattatgcccctcacatcctccctcttactcagatcattcttgacataaaaccattgcttcatccaagagcccggccatttttccaaaatgttggcacaagacacctcacatcagaccgatacacaaagatgtagcatccaaagttgttatgatattgctctttcccaactgccttcatctagtaggacaattcatgaatgttgcagaagcagttggcatctggctctagcccttggctcctcatagcccaaatgaaaaatccaactttaatcaaagcttcgggagtaagctgatgaaggtatatctcaaatgtattcagtacttcgattaacatcttatgcaagggaaaccgaagcccagccttcataaaacttttgaataccactactccgtctgcttcaagaagaggaacagtactctctcccccagccctcactatggatatatcatggaaatatttgccattcatcgcttcaatctgcccttgcttaacagtggattttccgaaaactacatgacttggcctccatggccgatctttggcatcttcattctcactctcaacatcaaaactctcgctgtcgttggaatcccagacagcccatctaacatttcatcaatgattttctcaatgttggtcctctccgtg

SEQ ID NO: 53627 - DNA, 493 bp, Zea Mays
tcaaacggcttgttgttgtcgggctgcgctaacacaagtgttgtggtcagatgttgcctcaaggtgtgaaaggcatcttcacacttctgaccccattcaaattttggtcctttcttcaacaattctgcgatgggcttcgcaattcgagagaaatctagaataaatcgttgataatacccggctaatcctagaaaacttcgaatctgacgaacagtcgtggtggcttccaattcatcacctcttgcaccttttctggatcaacagctatgcctccctcagagatagtgtgacccaagaatttgatttccttcagccaaaaatcacacttggataatttggcataaaggaggtgttctctcagacgttcgagcactacatgcaaatgaccgacatgctcttcttcattccttgagtacaccaagatatcatagatgaaaaccaccacgaaatcttccagttcgggcatgaagactgaatttatcagatacatgaa

SEQ ID NO: 53628 - DNA, 973 bp, Zea Mays
gactattcgaataactggttaagaatccctatgcactattcatctgtctaactgacgttcacacttaagcccctgcacttctatttcttcatagacccaggaccccgacgatgaaaggcggtgagcgtgccctccggcgaacttgtactatctgggatgcacaatgaccggtgtcctaacttggtcaacacctaatcctacccctggcgaccttaatccccccatcaattgcacgaatctggcccagagttcttctggacacgacggcggcaaacaccgaggacaacccaaggcgttcccagcgactaagcgtggtctagttcaattggttgggccgacaagtatcccaagcatgcaagggtgctgaaacgagggtgaggagggcgagagcggacctggagacggtggtccacgacgcggtgactcacggcggcacggagaaccgatttggggggaattgcgattgctcgggctatggtgagtaatcggggcgaggagtggtgctcggggttcataacaagctaacagagcaagttagggcatcaatttatagtgatcaatagcggtggcgcccaattcggggaagacatgctggcagccggagcaaggtgagtcaccggagttcgcataacgtggcattcactgggcaaaatgttacggccgtcacttggttatcctccccaacccgcgacgacgtggtagaataccttacgacgtgtcgtgatcgaggtaaatggcggcatgacgacggcggtcatgcggacacgtcgccggtgcaagtgggtacggtgaagccggcttaatccattcccccgctgatcttttcactcccgcggtgatatcctctactcactgaacacgaattgcggcgtcgacgcgaatctaggtgcggggtcaccggcggtgaggtgcactgaacctgatcttgttcaggtattgtaccatcacaaacactcttcagtgcgcctaacag

SEQ ID NO: 53629 - DNA, 1952 bp, Zea Mays
caggattcctccattggctccagcagagggggaggaacacaaaaccagagaactccactcccaacatagataaaatgtctcctctactaatatattatatatttgtctcctgacagcatacaacatccacctgaaaggtgtcctccatttctctgacaacatccttcctaacagaagaaatgagccctctaacattccaaataagaatctttgaaggattcgtaggaagaacaaaaacaacaaacaaccacagggggaatgctcctacagatctactggtattgaccagccaaacaaggcagcgagggcctccacctagatctggttaagagggtggttaaaaagaacaccatatttctgcaaggcttccttattcatatcttcactttctgtgatgatttgcaagaccctcatagcttttctggaagtcctgcttctgcaatcatacatttcaaattccacactaatgccggcaactcttctgctgcgcctgggagcattaatcacctgagatgatgcagtcttcagggaaggcttgggagctgggagaagccctgccgtcttcctgctgatcttgcagataaaagcatcaatgccactatcgatgcagcagtctgaagcttggtcctgattggtatgagtttgagaatccagggcaaagtccacgctaagattcttgcccaagtcattgcatcttcctcctgtcaagccaacatccacatcttgatcctgaagggggttctgttttcttcttgtatagactttggttatggaggtgtgtgtctgcatgacagggagtgggggggtggaggctctccactcttctcactgtcgcatgcgacttagcagcaggtcaaggcgagacaggagggaggggcacaagtgtcaactggggcgagacatgccccaactcatgcatttctagcgacccagcaggctgaggtgagacgacatgagggcgggccgtctccggcggcccaggaaggtggtccaacagtaaagcatcagagggctggggcgattcccgccagctggatccagcgacccagttgccgggtattaggcatatatctatagccggctgtcttaccttgtaggcatatatctatagccgtctgtcttaccttgtataggtgacagccttcctagtttagccttaccttgtataggtgacagccttcctagtttaggagattgtatccttgtacaccaggccacttggctatatatatgagaagtcacccacctgattgggtgtgcggtgctttcccctaaaccaactctctacatggtatcggaggaccaggatcaattcgatccaggccttccttccgctgccctctgcttcctctcctctcctccatgtctgagccgaccttaggcgccagcgccgaccttgacgccatccagcagctcatggtgccctcgtatgcacggttttcggttcaatctcatgtaccgaccaagctggagatgaaggcctccaactacccccggtgggcatccttcttcaaatcgatgtgtggcaagttcctccttcgccaccacatcgacggctctgctcccccacgcccgcaagacccgatctgggatcaagcggactgctgcgttcgcagctggatcttcggctccgtcgacgactccatcctcagcctcgccgtcgacggtgacaaccagaccgcccgcaacctttgggtcgccatcgagggtctgttccgcgccaacaaggccccgcgggcaattctccacctccacgacttccattccatgacccaaggcgactcctccatcgacgagtacgcaatgatcatgaagcggaaggccgtcgatcttcgggacgtcggccatcccgtcgaggactcgcagctcgtcctcaatcttctccgcggcgtcaatccccgcttcagcaacaccgcagacgacatcgccaactccaccgtcctccccgactt

SEQ ID NO: 53630 - DNA, 416 bp, Zea Mays
atagtttagtattttatgcttttccacaaatgactttgttacgaaggagtgagatgctccagaatcaaataaaactgatgcaggtatggagttaataagaaacatagcatacaccacgtcggcatcctcagaaactgattctactgtcacgtgattaactctccccctactctggttctgtggagtcttgttctgtgcagatccacgagcaggtgtgttctggtcagtcctctagttgctgtttctctggggtgtctgttgattgcgcctcgggtagttgttagcatactggccaagttcgccacaattgaaacagccattgggttggactagggtgtttgtgttgttgtttttggccagtgtgttcacggcgcttccttgacgattctgttgttgaccactagacctttgaccgg

SEQ ID NO: 53631 - DNA, 442 bp, Zea Mays
attttttcctttgcctttatcgtccgaatatggctgaaccaagactttcttgtccactggtcctaatgtgtcgacagggatagattgtctgtcaatcttcattttttgaaatctcaatcggccttcatctacagccgattgtatttgtcgacgaaagatattacaatcattggtgttatgaagaaaggaaccatgccatttacaatatacacactttttcaattcctctagcggaggaaatgtgtgcgacaatttaatgttgccattcttaaaaagttcatcaaatattttatcacacttagcaacattaaatgtgaacttagctttccctttttgtgtcgaatgcagggagagcgagcagcagatttggccttagcaggccaaacaagctcagcgacctgtattttttctcgctttgcaggggtcgaatggtatttggcct

SEQ ID NO: 53632 - DNA, 1576 bp, Zea Mays
atttagacaatgaacttaccacaccgtggacatccaatatcgtagttgtagtatctatatgccttttggcagaaattgagcatgcagggaatttctcccggaaaactctctcaaactcttgtacatgatacttaatatagcgctcaactgtcgtaatttgcataagtttgttgggttcaactttcccaagcaactcaatgtacacaggccttccttccttgtcaaccccatggtaaccatgagggtaatactgcaggacctcctctagctcatgaaattcaaaatccttcaatgagtgaagttagctactgttagtatgcatgacatagttttgcagaagcatatgatgaataatcttatcgtatacgtcaatatatcagcagagtttcataagattttgagatcaactttttagaatagacaacatcctacttcaaaaattgtgtctgtaccaaactcctttctccaccgcagcatgtctgcccacatctgtgcagcttttccaaaatcgaacttcctcgctttcaaaaatctacatcacataactgaaatcaccaacttgcattgtatagctgaaaataacaatatgagcatatttcctcaggttccaacctaagcatcatatggtaaccatcatgcttgattggtaacaagcccctagcaaacaaaacctcccgaaacgagctcacagcctgctcttcttcagcatccctgacatcctctatagctattcttggcactctgcagtccacttttctcttccctctcttcttcagcgagtgtgtcagccttgacgatgcatgcagggctttcttcctcagcgaccgcatcctggtgtgcctcggctcgtcctccgagatatcggcatctgtcctattcctcctctcatcattactgacagatatttcgatgttatccatatattaccctctgcaacagagcatggcaaaccctcgaacattagctgcattgcatgactgactcattaaaactgcatacatatagctacgacaacgagcacctggccatacctgacattgtcaacaaaagcagctcaaatgatcaggccctccctctttgcgttactctgcccgatcactgattcattgcatacggcagcccgaacactgacataaaacggttcgtaaatactaaatacatgtaagaattcagaggttgtgttcgcatctaattagcagtgcactccattccaaagcggcgggcggataaaacgagggtcatggggctcagttgaacacccaaataaaatcggaaaactagaccaaaccacctatgtcggtacgaactccaccacgcaacaaacaagccgacaactggatggattgggggaaacagcgcgtattcaacttttagggctcagaacagactaaggggggagacattctgcggagaaaacgaggaaccggatcggattgtcactccacgccggtgacgtctcaggggacgcgacacgcggacacagccgagaaagagcagcgcaggggcggtccaagaaggggtacctggatcttctggatcgccgcgctctcggctcacggctcgggtaagaaagagc

SEQ ID NO: 53633 - DNA, 1188 bp, Zea Mays
cagagttactagttggtagacaatattaatacaaaataaatgtcactagaatggatcaaaaaggattaaatatgaaagtttttacgatttatacaagttctgtaattattttatacttaaaagtcaatttctaaatcttcttcctattttctttatttcctggactgcgcgccaattactaaaaagatctggagccattctataaaaattccttagactcagttttccacccagacggaccgcgagttgatttataatttttcagggggtttctttataaaactacgtggcgaagcggtgtcgttgaatctgagtcgcgcgaatataaatccgcggttaagattagacctatccgagtaatgaatcggtaagcagtaatgaccgtccgattgccaatcagcggtccggatttaaaaaaggcgcgatcaatccaggtccatacgattgccgatcaacagtcaaggcgagtaccacagaagcggtacgccccgatctaatctacaccgtccattgctagatcaccgatccacgaagcgtcttcttcctccgtcaccagagtggtggtgcagacgcgaccagggcatctccctcgccggagtttgaagacttacctaggagtactcgattgaagacttacctaggagtactatcgtctgcagctcctggttcacgaagcggtgcggatctacggccacgacggaaattcgtcgaggaattgtggtgacgatgcgcgcccaaaaagccgagtgacgccgcggccggcctccacttgtacggacgataccctacccttgaccgccaggatcgggacgacggtggcccccgattacaggtacgacggatttcctctttcctctcaccagctccgttatgtgtgtcttcgtgaagcatccaggcgattttttttatctgacacataattcatgaaccatcctccctggcttcatccttatgtgtgtgatgtctgtaaaaagaaaacaaaagggaaaatatcatcccagctcatcctcgcacccctcgatatctctcgttctctcttatcctctccaccacctaaagtttcaaccgtcctcatcctctcacagccgacgccaagcctcttcctatcttcgatcccaagccgcctcgtctctagccgtcccgtggagcaccagatgagtccctccccacgtccaagctccagctctc

SEQ ID NO: 53634 - DNA, 701 bp, Zea Mays
ggagcccccgccctttagatccgcccctgactccactagcacacctacaagctaagaaagtaattaataaatgtccttttgattcggctttctaagacatatttactatcaaaatctgaaatttcaacaaaaagaggtgaatgcattcaagaaagtttacagatttgtatgttcaatccagaatcttttcttaccctagattttttggattcctaccatccaatttttctaaaatattacctatttgccactgtttaatggatcgaatcgttatcttttcaattcgaaggccctcaacccactcatcactcgattcccacccgacaacaccatccaacaacatatagggtcgccatcacctccctgcacacgactccagcgatcagcgatgcgactcggtcatccctaaactatagcacctttttactaatgatccttcaacactgctcatcgccctacatctacaatttctatcctcatctgacgttgtccctatagcaccttcctagcccttactttgatgttcgatgactgtgagactatgtccccatgaaatatgacaacataaaacctatacctttagctacaatgctattgtaagtgttgctcatgtagagcaccttgcacacgctagagtgaacgtgactacaaccacaatgcttggttctagcgttgtgggtgtagggcccacttgatatggc

SEQ ID NO: 53635 - DNA, 422 bp, Zea Mays
agcgtgtaagaatcccaatgactcaatgcactgctcccgtggaccgtgggttctaatttaactaatatcaggggctcctttgcaatttccacacggcgaaggggtatcaaggatttcagaccgttggatcagggtttagcgcgtaggattagatctacactttgattgaatcggtacgcgatgccctccgccagatcggagatcgacaaccaagatttaatgaaacagggagctaatcctatccatccatcgccgatccaacgttgcaagcgaagcggtaagccacttttaatctcgctcgtacacgcacgatccaatggaccagggattatctccttcaactcactgagctggtcacggcggcgcgcccagatcgcgacggcgctccatcggagcggcgccggagccgactcaataccaac

SEQ ID NO: 53636 - DNA, 461 bp, Zea Mays
atggcgggttaaatacgaaaaagagcaggggttctttaacaaaaggtcatggccgaaggggtattgagcgaccacagtcgcacgatcaagatccaatgcatcggattaaaccttgaatcagtacgcagcgcccatcgttagatccagatctgacggccgtgatttaatgaaaccgcgatctaatcctatccctctgcaaccgatccaacggaccacactacattgcatgaacatctacgccagatcgaaccccaaccgcacatccgaggatcaacggtttagaattggtcgcgcgaaggggaaagagataacctgatcccgaccgcaccttactagatctacggtcagggcacttcctcttccccaacggtgtagcacggtgcgccagtactccccacgacggaatacgccggcgagccctcccccaaaccgcgccagtaagcgattctcggctctaatcg

SEQ ID NO: 53637 - DNA, 618 bp, Zea Mays
ggaataacggccactcctcccccacgtcgtctgctgagttcaaataactctggatgggacgtgcgtatgggcgtatggtagagcacgacctcaccctagtgagggaactccgcctcgcccgaagttgccctcagcctcgaagaaaactccacctcgcccgagctcagcatcggccaactgccctagcaacaactccccatgaatcacgcaggatgccactccttcaattgttccctacacgactgcatgccctagagcaggctcagccgtagccttgggagggcttccgtctcgcccgagcgtggcttcggccttgatagcattgacaaaaggacgctcgacgtcaccagaagctacatagtcggcattaagatactttacggattaccaaacgctttttgccatacttatcactgtttcaaccactacgactaggacaacacgttcaccaaacaagctcgcttatgcgtccgagccctagatcctggcctcggctctctactcggtaaaagatgaaaatatagggatcggacatcctcctcccggctcaactcaacagcaggtacaaaggccataccgatgaccataccagctacaggggcttggacacgtctcctc

SEQ ID NO: 53638 - DNA, 815 bp, Zea Mays
cggaggtgatctgtagtgaactcttctcaggacagttacggaagtaatgaccttcacgtccacattgataacaagcttttcttgaagttatttcttgactttttccatgtttccctttttgtttgttggacctgatgcgacgacgaggctgaaactgtgtgcaagtaatattccatccatcaatgtaacaatcctgtgtttcttcttggggctgggcatctttgtgatgtttcctttttggaatactttgcaattcatcaactgacagtatattaggtatgagagaatctgctattagttgttcttggggagacatttgtctgtttatgccagaaaataaaatttggttcttctgttttgtggtttcactttcatttgtactgatctggcgacaaggaattctatagtattcacaacaacaacatgttccagggtcacttgtcggttagtttggatgggcatccttttgtgtcttgaatgtctgttcgtcagctgttttacttatattgttgttttgacttgccaacacaccacattctttgcatttagtgacaccacttgtagttgacattctaaggtctgacatctatatgggtatggaagaatggaagggatgaaagggttgagcaaagacagattatagagagcagagaaaacccatctatctaaggttttacctagctaactgatgccattgtggacaaaagtcacacaatacaccaacaatcatttcaaagaagcaaatcaaacatagtcacaaagataactaacatgaactcaaacatatcagcacaacataactcgatgttattcat

SEQ ID NO: 53639 - DNA, 911 bp, Zea Mays
cttcagcgcgagcagcgggtggggcgccgaggctcgctgtagttgtactcccggcaatgcggcagctgaaggtgctcctcctgctgcagtagtagacggtctagagagatgcgatgccatggcggaccgggaggaggaggaggacaagaagcacaagcacctgcacggagggtgtttcccgtttaagcagggataccttgctattgcgacactgcgcgtcggatgggagggcttccatatgacagtcgacgggaaacacgtcacttcatttgcgtatcgagcggtcggtaactaaccttcttcacgtcaccaaacggatcgataatttaatagtataaatggcctaactatcatttaatagggcttggagccatggtatgtgacccaagtaagaatctctggtgacttcaagcttgcaagtgcgattctaagcggcttgcccacgtcagaagacctggagaaccctaacctcgaatcgctcaaggcgccacctgtcccaaacgacagagacgtcgaccttctgatcggcgtcttctcaacggcgaacaacttcaagcgtaggatggccattcgaagaacatggatgcaatatgacgctgtgcgccaaggggcggttgcagtacggtttttcgttggcctggtaaaacactcatcagtaattgctatgaagtattattagtaaacaacacactagcctcatggtaattgttattattatttttccttaaataaagcatacgaacctcatggtgaacgaggaactctggaacgaggcacgcacgtacggtgacatccaggtgttgcgcttcgttgattactacggcctgataacatggaagacgctagcgatctgcatctatggggtaagatcgataaaacatacatacactgtcatcatcaccaagctaagc

SEQ ID NO: 53640 - DNA, 276 bp, Zea Mays
ggtccggaagctgctgcacgctggcttcatcgaagaggtccatcacccagtatggctagccaatccagtcatcgttcccaaggcaaacgggaagttttggatgtgtatcgactataccaacctcaataaggcatgtcccaaggacccatatccacttccacgaatagatcaaatcgtggattctacctctgggtgcgacctcctgtccttcctagatgcatactctggtttccatcagatccagatgtctaggcaagataggaagcataccacttt

SEQ ID NO: 53641 - DNA, 628 bp, Zea Mays
ccattcacaagtactcttgttgaagaagagtacaacaatttggaaatgatgctgcaccaaacaggaccaaaacccaaatgcttgaaaatttcaaacaagaaggaccaagaaaccgaatcaaaagcttttccaatatccaatttcagcaggatacggggcaccttttgcctatgaatagcccttgcagagaaaagggtaaatgaggccaatagtcaataggagatgtgtaaacaatgcagagtatatgcacgcgtacagcaacaacaaaaaaaacgtcctttcttcctgtggtcaatgtaaagttcgccttaaagaattttgcaatctttggtcccccactggtggagcgtgatttatgtatggttcatcgcatccatcataggccacaaagcaacatggtacaaaagcatcaagcagaaatgcttcacaagctcagcaaattaagatcaccccactctatccgtagtttgatatgactgaattgcataacgaaatggccaggccacaaccacaactcataagcacctgaaagttcagattaaatttacattatctgggaactcggataacacaaataaacctgtagcatcaaagtgaagattctgctcaaatgaatatacaatacaat

SEQ ID NO: 53642 - DNA, 369 bp, Zea Mays
cgaaagatgctacacgaacgggtaacaacggcgaatctgaagaggagaatcacactggtgatcgcgcagcaccacggtctggccacgatcgcactgagttccgcggcagcgccacaagtccggcgataaattcacgatccatgggcgctcaaatgaatacaatgttcggtgctaagctatgaggggacagaggtgaaggcgtagaggaaaatctcacacgaggaaggcagtgcaagactccggtccacgcgatggcgcattctccgccatggttccaggaatccgatgagaaatcaacggcgctccaattgatcttgagctcgaagcttcccctgcgatacggtgagtcaccgcggcacgcaccctcgg

SEQ ID NO: 53643 - DNA, 834 bp, Zea Mays
caaacttatagagctatgttaggggtacaattttgattaagagactaagcactgattctatttgaaaatgggagataattgggtctaaggttgggctgtcagtcatcattgaagattgaattttgaccaacagtgaaatcggatgaactttgcgaccaaattgcgggggatttagtggatgtttgcacaagatccttgtaacaatgttgtagttggtacattggacaacaactttgatacaagcagggtgagtgagttgccacacaaaaattgaagaacaaggccctgcaagttgcttggacagagggactgatgaagatagccatggtacagtgaccggaaagatctccggtgccgtgagcctgatgtcggtcatcttccgccgtaattcacgctcgcttgggaaattcgtgctgcgggagtgatagataacgtcgggtcaaggtgaaaatatccggggaggggtgaaccttgtcactggccggaccggccatcgtgtcccgtcgcggtcagtcgcgttggcatcaccggagctcaccatttgtccgacggtgacacgcaacgatctttactccgcatcataagggtcttggcaagcgaccgattatcatccctggactaattccctcccgcacgccatggtgagtcagccaccataaaatatcctggctgcggtaaccttgatctcaatccaaaattcgtgataagcttggctagagtctataaattggaagcaccccctatttctcctaatcgttacgaactcagtgaacaactccttgcccccaatcgtccaccgtagcagcctaatttggaattccccccaaatctatt

SEQ ID NO: 53644 - DNA, 1068 bp, Zea Mays
gcatcaagtagagactcaaggggctcaccccgcacgagtgtggcagatgggtaaaatccacacagaaagcaccccctcttcgaaagaaccctggaatgaaccaggatctgggggacccgaaacccacacacgtcaacgaaccaaacgagccacgataatagggtgtccaaaccaaagagatcgcgaacaatgttatggtagatcatggattatctcctccatggacacctccccaagtacaatgttcacaacagcataaatattatccatcaaacggtccagatcctccaccgacaaaccttccgacaggtcgatggcgttatgaaggtcaccaccagtattcaactgcgtaatagccacaacaggagaaacatgttttaaccacgggatatgtggtcgttaaaagtccatatgtggtcgttaaaagtttgtaacgaccacaaaaatgtggtcgtcgatggtcgttaaaagtcccgtcgttaattgtaataacgaccacatgaggattccggtcgttacatgattaacgacgacatatgtgattgtcgtcaattatacagtattaacgaccacaattatcgtaataacgatgacatttttcatcgttaataattgtgtacaggctgccatgattcattaacgatcatatttgtaacctttagcgaccacatatgacgcattaacaaccaagtttttagttctaacatccatgtatggagcattaacgaccaaatttatttcttctaccagccatttttgaaacattaacaactacattcttctacctgacacccatgaaacattaataaacgacatctttctgcttccctgtattaaacaacaatgaccattcaatttcacattgagatgcaccaatgaaccatttgcagcttgtatatatatcggtggtaatctgattattacatataataaatccagtatcacgtatttatccaatggtataaaagttgtaaatattcatatcactcaaactctactcaaatcaagatttctatgctaactactacttatttgtttcttcaactctgcccactccttttccatttg

SEQ ID NO: 53645 - DNA, 410 bp, Zea Mays
tctcgctcgactgaactcttcttctttccgatgcaatgcaatcatggacctgccacctttcgacgttgcggttgttcaattccttcttgagtgtctctgatcctgcaacccgttcactcactcgcccgcgcaggttcttccggcggggtcggacgtgaatccgggctccggccagcacggggaggatgatggacggatcgaggcagcagcggcagaggaggggatcgccagcgccggggaggccgcgcaccgtgccgatcgccgtcacgccggagggcttctggtgctgcccgtcccccgccgcgctgcacaagagcctgctcaagaacccgcaccaccaccaccaccacaacgccaagcaggcgccgacgcctaaaaccccctcggcccctccgtccagagccccctcg

SEQ ID NO: 53646 - DNA, 910 bp, Zea Mays
tcctcaatgtatctgccactcgtagtcagtagtgaaagaagtcctcgtagataggagagatgcacctctgaatcggcaccggctgcgagcagaaaagcaggtagatccaatagtcggtgcgctcatagggcgatctgccctgacaactgtgcccaaaagaaggactcctgagtcatggtactgaatagagccaccgttgtagggtccctctgagcaggcaaccagaactccatgggtacgtgtctgaaccgacgtacccgggctgcagtggcacgctgaaggtcaagcagtcgaggatcagcagctaggggttgcacctctgtctcgtcacgctccttgaagtgaggtggaggaatgggcggagtggaaatgggagcgggaggaggaatagtggaagctggagtggtggatggctatagagcgagaggagctggtgaagtgggaggtggggtagaagatgtggtggagggtgtggagggagcagaggagtgagaccgagatgcgaggcgacgaactctataagcaatttgatcgcaggaaatctgcaactgtcctccccgctctgtctgctctgcagctgctgccgctgcaagtgctgcacgggtggctctgtctatacaccgcttcttccggccttcctgctgctctaggtacactgtctaccccttgacctgcctattgggttgaggagggtcctcgtcgtctcctcccctggcgctgagacattcttcgtccgcaccatcctgacatgagtgttgcataagtgagtgaaaggctaagcacgagcaggtagaagctgataagattggtaatgaaaggatagctacctggaaacctcacgagaaagagagaatccatgcaggacaagagacgggcgcacgggcaggcgagatcactgaaatgatagaag

SEQ ID NO: 53647 - DNA, 548 bp, Zea Mays
aagactcagggtcgtcaagaaacattttggtagagagcagcatcagattcctgagttggtgaatgatggagggaagatcttacgagacaatgctaaggccggctgtgactggttcttcaactcatccacccggttcacctaccataaacatatttataggcaaaagtatggtagagtacagggatttcattcttcttaatttttatccatttttttggatgaacatttgttacagtgataggtatatgggcctggcccattagggttgggtgtgcactatagcgcactgtagccatatgtgtgcactgttgctaggttttgggacgataaacactctcatggtatcaaagcctctcatgcgccagccgccgccgcctcaccgcgccctgcttcaccgccactccgcataagttagcgccacgttccactcgttgtgtcttccttgggtactcccccgaccataaggggtaccggtgcctcgacctcacctcacatagagtcctcatctctcgtcacgtcgtcttcgacgagctggattccaccttttc

SEQ ID NO: 53648 - DNA, 1251 bp, Zea Mays
ggtgtagcgagttttcgcgtcggtgaggacttcacttatgaagtagacatgatgctgaagtaggcacgcaccttcttcttccggcctctccacgacgagcactgagttgaccacctgggctgtcaccacgatgtagagtaggagtggctctttgtcctttggtgggaccagaatgggggctcgggtaaataggatttcaagactgttaaatgcctcctacaccttcgccgacctctcaaagcggtcgactttcctcagtagcttatagggtggtaacccgtgctccttgaggcgcgacacgaagcgattgagcgaagccaaacacccaatgacccgttgaacacctttgaggtcccgtatgggccacatgtttgtgatggcgaaaaccttttctgggttggctccaattcctcgctcggaaaccaagaaatctagaagcatgcctccaggaacgctgaagacacacttttctaggtttaacttgatactgttggtttttagtttgtagaatgtctctcttaggtcatggacaaggctcttagtcagtcgagtcttgaccataatgccattgaggtacacctccacagtccttccgatcaaatcatcgaaacatttgatcatacatcgctggtacgtagcccctgcattcttcagaccgaatggcatcgttatgtagcagtacgagccaaaaggggtgatgaaggacgttgtgggctggtaggattccttcatcacgatctgatggtagcttgagtaggcatcgaggaagctcaaagcctcacaaccagatgttgaatcgaccacctggtcgatacgtgggagggggaacgaatcctttggtcatgtcttgttcaagacggtgtaattgacacacatcctccatttcctatttttcttttggaccaatatagggttggccggccattcagggttgttgatttctcggatcaatccagcagcgaggagcttgccaatataatctccaatgaccttgaatttctcttagtcaaagcgatgcaaccgctgtttcaccgggtttgacccagggtttattggtaaagagtgctcggcaacttcccacgagatgcccttcatgtcagagggtttccaggcaaaaatgtcattttctatacaggaaagtcgacgagcgcgctttcttattttgaaggaaggctggagccgatgcgtaccgtctgcccatcgacgcactcagggtccaagggtatttcctttatatcgttcacgggtttg

SEQ ID NO: 53649 - DNA, 685 bp, Zea Mays
attgagtcacgttgttaacatgcacatctagaaaatcaaatttaatcaccaaaaatatatatgctgcactattgtgcgcatatccaagaaagacacacttaacagtttttgtcccagttttggtttcttgcatgctggtacattaactttggctaaacagccccgtgcacacagaaatcaaagagtgggctctctacctttctgtccttcataaggtattttatcacccttagctgatggaactcggtttagaacaatgcatctgactaaaatagcatcgccccaccatgacttaggtaaaccagaactattcaacatggtattaatcaagtctgtcaaagttcagtttttctattcagccaccctatttgattgaggcgagtagggaattgctgtagcatggatgattccatgttccacacaatattcaccaaattcattagaaagatactcccctgtatcggacttaatctgtttaattttcttttctagttggttttctacctctgccttatagatcttaaaacaattaagtgcatcatctttcgttttaataagatagagctgacaatatctagtagcatcatcaataaatttaatgaaatatttctttgctgctctcgtcaaaattccattcatttaacacaaatctaagtgaatgagatctaaaggtgcaagactcttc

SEQ ID NO: 53650 - DNA, 479 bp, Zea Mays
ctcgtgtcccctagcattattaagaatttgatttctattcgtcgttttaccattgataacaattgttctatcgagtttgatccctttggtctttctgtgaaagatcttcaaactcggaacgtgatcgccaggtgcaatagcacgggtgacctctacccgttcttcccgcccaccaccagcagcacacccgccattgctgtgacatctaccctgtggtgtcgtcgtctcggtcatatcggttttgatgctttgtccaagctcattagctcccaggccatcacttgtaataaacctaaacatgatcacctatgtcatgctttccagcttggccgtcatgtttgtcttccttttggtttatccaccacttgtgccgtcaataaatttgatttaatacattgtgatctttggacatctccagttgtcagcgtgtctggttacaaatattatctcgttattattgatgattattcgcattatac

SEQ ID NO: 53651 - DNA, 412 bp, Zea Mays
tggggtatatgatgaagtgatgttagcttaccttgttcgaggagtttaatatgtggaagagaggacgactatcagagttctatgcacctttcttcatgaaggggagagctttgtgcatcctttgttcataaagtagctgggataatatcccttaaactaaaaaaggaccataaccatcgccttggaagtcatagagtagtagagcttaggctcataaaaaatatgttctttcacagataagaactgacaaatatttgttgagtaaatttcattgaaccaccacatagatgatacaagtgggtacccaatgctattttagttcatctctccccaccaaaattagttattacatgtcatgctgttttagttcacttcagaaagttttgatcaccccagtgaacccagcaagtgg

SEQ ID NO: 53652 - DNA, 500 bp, Zea Mays
gtttggtgctgcctgagccacattgggagacggcatggggattgaaattgtggtttctcactcggcatatgaacacatttatacaggttacatggtagacgaattaagatcgggcacaacaaccagttcaaacaaagcacaaatcattgtaaaggtttagtactcgtttaaacaattatcccatttaaacaaggtctacctacgtgatatatagatatcccccgggtctttacgaggacggaaacattgttccgtctcgctcgaggccaaccttggaagggagacgttgtttcgcctcgctcgaggccaacctcggacgagagacgccgttccatcttgcctgaggccaacctcagacggaagatcccgttccagctcgcccgaggccagctttggatgggagaagtagttctgacttgcccgatgccaacctaggatgggagacgttgttccatctcgcccgaggccaaccttggatgggagacgcaacctcggatggg

SEQ ID NO: 53653 - DNA, 968 bp, Zea Mays
tgcttcatcaccttaacaaaagaaaccatcccaaaaatttggagagagagaaaacaatagcacatgccatagtaactactactcctacaagcagctcaataaccagaccactttaatcctctaaccttggatcccagaatcaaggagagttgcaaacattgtagaaggcgtttctccttcatgtggcacatacatatcgtcctccagtttgactggcttcagcgtctgcctcactgcttgcctgcccgaactgtaagctgcgcctgatgcagaaccgccatcgagagatgtccttttcggcgaaccgaacagtctcaatccatccaagctttctacgttggaataatcggcagcttcctgctttatgtcttcaaggagtaaaccggcattaggctgtcttgggatgctttctccatcatataacagccttggtccagaggtcttggagagtgatcttcccagcagaggagagacatttgaagaagacaacctcttcctgtaaattgcaaagcgaaacacataattagcaacagcagtgactaaggtgacaggacactagtgcagcatatgcctggggtatcgatgaactgacacatcttataaccaatgaacccatggaggctcgaattggcacgcgcaaacccagagcacatctggacgaggccagagaccatcgcaaatcaaccaatccccaaaaccccactccctcccacccacaacacatttgaacctcaaccatcccgaatcaaaactacaccgccacacccgcatcacctactcagcagcgcagcatttgggaacgcaaatggaggaagagaacacccgacctgtagcggcggtactcctcccgacggccggacgactccgggtcgaagtagctcggcatcgccgccagcggcggaggcggcggcctgggcgagcgcgacgacggcgaggggtccacctccatggacgcagttgctgcgcgg

SEQ ID NO: 53654 - DNA, 609 bp, Zea Mays
tttgagatccaaaaatgtgcatcacaacttttagtaacctagttgcctcccttttgtgtaactccaaagagccaccacgtctctccatacagcggcgacacaggaaaaacctgtgtcaccactataatcttctacccttttgctccaacctcgccgcttcccgagcacacgattgaaggaccgtaccgttgcaaggatgatggtagtaaggatcttgttcccctctgtgctccaactcttcgacatggatggtggcatccatggtgatggctaatgagctagatcaatgatgtagcgtctcttgtggtgccaacactgtcggtcgaatcatgatcgaatgccatcctcgtgtcaacgaggaatgtactgttggtcctattgcgtcgcttttgtagtgccactaagaaattgttcacctcaccatcagtcatcggtttgggttgcccaaggatggatcttgtgtctcggtcgcggatctaacgatgaatcttctttgatgggcctattgtgttggtgaaaggaaaatgtgccctttggcaatttctatgtgttttggtgattaaatgacaaacctgtcactttgaactaacatgctactgtgagtatgag

SEQ ID NO: 53655 - DNA, 308 bp, Zea Mays
tgccgatgtgtttggcgcaattgttttggcgcctaatttatgtgataaaaaactaggcatgtgagtttttcctaatgcatgcgccatcctttctatatcctctgtgatacttttaatccgattatcaaaagaaattttaatagatggaatatcatcgactgacctggcatcacctattgtggggagctgttgcagcacggatgacatgtaatcgacgtctatttccctttcttggacggtcttctggtggcaatccaccctgaagtgcgagaggaaccatttatccgccaccttgagcacctgatctt

SEQ ID NO: 53656 - DNA, 327 bp, Zea Mays
gccaagcgcctcaaacatcgaagccgggacttcgcactaattgaaggatagctttacaagaagggggtcagtcaacccatgcttaaatgtgtcaccaagatcgaaggcgtccaaattttgcgcgaagtccacagcagaacttgtggctctcacgcagggcccagggcactagccgcaaaggtaatccggcagggtttctactggcccaccatgatctgcgccgcaaatcgggtcacaaggttctgcgaagcctgccagaaattttctccacgatcgggaagcccttcgcagttcacgaagctaatcgcccacacatggcctcttcag

SEQ ID NO: 53657 - DNA, 610 bp, Zea Mays
ctagtactcggccgccagggagaactggatatttgcaatgtgcatttgaactgaccggcactgtcttctctctttctgtttttttttactgttgccaatagccaaaaccggctgccaggaagcaccggcggctggccactccattttttttcttcctatcgcccgtaggatcaggccactgttcggccgacggctctacactgttcttttggccgctcctgtgttcggcaaagtggaaccccgcgggcccctcgggagggcgcgtcgccgtctgtctaggtgccgacgtcggcggtacgaccggttaaaaaaacggatgttttctgtgaactgtattcgactggtttctatctttttcaactcaatcccaactctctgtgtaaatgcttgtcaggaatggatatgatgtaatacgtgggatcgagttgagacattttctatcgcgggtttatatgggcagtgttctgttcacttgaatccaagtcggatttgggggaaaaacagttagggttttctatccctaatctgttctgcgagttcctattctttataaacttcttggctgcggatacacagatccttagcccttaaacaatctatgtgattcgat

SEQ ID NO: 53658 - DNA, 1139 bp, Zea Mays
aaaatctatctcgagcatgacatttcatccatttcttcttgagcaggacacctaacaaagttgcttatcaacccatcaccttgcactggttgccacaacaaaccatcatgtgaattaaagtgttgcaagcactcttcatcccaaaccacattgttagacctttcatggagcacttgaccattagctaattgttgccgcaaatcatcaggtaaattgaagtaatgtatcatgttttcatcacaaatcacatcttcaggcaattcatcgaacacttcatctgcagctccatttgaccccactggattcaacctcaactgctcatcttgaaatggcatctcaactaacttgtccaacaaaacaccctgcaagccatgtccatccaacgaatctccataccaaatcatagcagcaggatgcacatcgtcccaggtagcaacctttgatggcataacgtcaacgacatggctcaggtaatacgatgaacaattgaaggacacatagatgtcgaagccactcggctccaaatcgataagaggctcctcatcgaacacatgcccctcatcaaagatggactgctcatcgaagatgtcgtcattcttatcaaagcttgtgtagtagtcgccacacttgcatccatggaccttgggggtaggttgaaggatgaagagatctctagacgatacgccacctgatccagtaatggctctagaagtaaggagttgcagtgttgatgaaggcacaacagtagccttggggaagctaccctcatcgtgcgtcatctctaaccgtctggaatcacccccgatagctgctccagtagcttggatgcatcaccgatttatgctgccacaagttgttgcgtggtgaccacggactccatgcgaaggcataaatgatccaaccgactctacagctgcgaccagcgatcctcggattgtgccactgacgtgacttgtccatggattggtgcagccaccgaatcggactcgaccaaacacactcccagaaacggtgcctctgataccatctgtgataaccccatggccgccgacgatgagaactccggcgacgtgaggaataccaggcgatgctcaccggaatcacaccaccttcaatgaggaagagtcgaccaatagtat

SEQ ID NO: 53659 - DNA, 1116 bp, Zea Mays
aagaagaggagagtgatgtatgccatcagcgagggcggagaagtggccacactatcaagttccttcttagcaacgcttccatatggttacaccggggccgatgtcctaggttcatttgacgtttttgagcggtccttttgtggatccggcgagggcaactaatgctctcccttttttctcttctttttctttttgaagcaagctcagtgtctgccttcattggcacggtggaggttgcggctccagggggacaacaccccttctttttcatggggagcctcgtaccgtgctgccgagctatggtggccaaccgggcatccagctcgctccaggctgctctatagacgacgatgaccccctagccctgtgcaaggagttgaatgaaaagaacaatgtgactaagaaggtgttgcggggtggcctcatttgtcttttgactgtgcaccaaaagctaatggtaagccacatagggatggcttggcgagggaaatgctcctcttgctaatcgactcgctgttggattttcgtgtttttagtcgcttgcagggacgatggcgggcaggtcccgccttcttctcaaccaaagggaggtgtgggagtgttccactagcaatctactagttgcaagaaacgaggacgccgtagcccgtgcccgcaccgtgtcgattcaaaatgcttatgatgccttggttagggtggcaaggagggatgtagaatcgacgtcccttgcatgtctcgagattgtaaagaaggtctatcgcctctacaccctagagtgagggaaggaggtcaccaatgcccgagtcatagccctggaagaggagctgggtggttgggccaagaaagagaagaaactcctggcctctctgcaaggtaatacctctcaatgattccccctagagctaggcatccgctgcccacccccttctcctggcctatattttgtctagttagcaattcaggggaaactcgatgtcatcgagggaactttgtcgaggtgcagagtcacctggaggagttggagatggagaagcatctccttttggaggtggtgagcgctatgtgtggccgcttcatagcacccccttcgcctaggtcagagtccctcgcttcacg

SEQ ID NO: 53660 - DNA, 443 bp, Zea Mays
catggaatatagagcatctcaggaagttttacccctagctagatttcaaaagctattgggacgacattgtattctgtaattgaaaaatacaccatcaataaaaagacttcattctcaaaggcactcgaaccatttattgtcaaactacatgctcactcgactcagggtgaccactataccctactaacggagcaatcgacttaagtcggtgatgacttaaggcgttgtgacatgctcacgcttacttaactcagggtgaccactataccctactaacggagcaatcgacttaagtcggtgatgacttaaggcagtgtgacatgctcacgcttacttaacccagggtgaccactataccctacgaacggagcaatcgacttaagtcggcgatgacttaaggcggtgtgacatgctcacgcttacttaactcagggtgaccacta

SEQ ID NO: 53661 - DNA, 492 bp, Zea Mays
gatagaaggaggtcggttcaggcaaactctaaagatccagtgcactgatatatctgaagaacacagggaaaagatctatggcactgttgaagcaaatgagctcgagtgatccagtgggggggatcgatccgggggaggataactttggacgtggcatcacccccgcgagctcagtcgtgcgtgccggagatattcaccggcggtcgccgtgactcagtgcttttcgccacggtgtcatccatgccttgctcctcccttactgtacctcttctatacgtggttaccatgcgtaagcaaagccttccacaatcgctgatcgttagccggaccaccgtggctataaagggcgccatgaaccacggcgaagtactcacatctccactagtgagtttgattgtagcccaaaattcgcactgcccctgccacctcttcccaaattgagtgtgcacagtgaaactatagttccttacggtcgtgtagccccaatctcac

SEQ ID NO: 53662 - DNA, 640 bp, Zea Mays
gcataaaagcatcacaaattgggattctattagtaagcaaaaagaccttactaaataaattaaggctagaaatctcagtcatatagtgctcgacccgaagttgtcacatttctctctatcgcggaacaacatgaagcaaagtctaagataaagggacatataatccctcgcaacacgaagttgcgagtatatcgatggttattctaagaaacttttcactatgttggtgtgaaaaactattgtgtgttcccattgaaccacttcgtttgtcctatctaggacctatatgcctgtgttgcataaatatatcagaattgtaaatactcatagtcgctgaatctactcgggatagtactttgacgagtatggtatacattgcaagccaactggtaaatgttagtcacgaatggatatatatctggggtttatgtagtagaactacattggattccaccgccttggtatgcttaccgtactctagatctgatctaccagaaagagtagacaaataactatgaaatcccacatcaccatagagcttgaagctaaaatggacattaatatgtccttggtcctcggcgccagaagagacatatgacttgaccactaggctattagtgatggtaatttgtgatagaaa

SEQ ID NO: 53663 - DNA, 363 bp, Zea Mays
gggcgcggttcggaagagaagcgccggggatgagatcgatctgatgctcaatgccacggaggggaggaagacccagtggtaagtccataggaaaaacatcagcatactcctgcaaaaggttaacaacagcagggggtatatccaaagatggtgcatcatcaagcggaacaagcatgcgcgagcatacaagtgcataacagggcatatgagcttcatggagatcatcaaaatcagcacgagtagcaagtaaaacaggagagtgcaacttgatttcagatttgataggtgtgactgatgtcgatttgacttgttgtgcagttttagcagccctagtaaggtcatctttcaaaatttggtcagggg

SEQ ID NO: 53664 - DNA, 495 bp, Zea Mays
tcaaggtaagatatagaggtgtcaaaggctaaggtgataataacaaaaggcataacaaaggatagagttaaggcaagactcgaaaaatgatgaagtggagaaaacaatcaaggtaagataggtgatgtttcaatagaatggttgaagtaagaattcattacagaaggaagttacaaggaattaacgagatcaccaaggatgtgcgaaataaaatgaatgttcatggatcatcgggaaacaagggtggtcaagggcatgttaactgaaatgtttataaacaaaaattagggtataaagataagcaaatataaaaagataagagtatgcaataccccaaggatacgggcataccaaaacaagggaataaaaaaaacaaaggataacaacttaacaacagaataagaagggatttcagaggacaaggaattcatggacatgtaaactgaagtttataagtaggccgtagaaattcagatgtaagtatttgaaacaaga

SEQ ID NO: 53665 - DNA, 618 bp, Zea Mays
gtgatactcatctttaggagttgctctatttaaattgcgaaaatcaatgcatgctctaagcttacctgactctttcttctccaccggcacaatattggagacccactctgcgtatctgcaaggtctaataaaattagcttctagcagccggtggatttcgtccttgattcgtgggagaagatctggacgtaatgttctagctctctgcttgaaaggtctgaaactggacttaatgggcagccgatgctctacgatctctcggcttaatcctggcatctcagtgtaattccaagcaaagcaatccgaatattccttcaatagaccgatcatttcatttctaggatcggtctccagggtcttgtctacaaaagtcgaccttggagttttatcatttcctatgtcgatctcctccaaaggatcgaccgatataaacccatgtcctagtttatcgagatctctgaattcctctatcatgttccccacagaggaatcagatgatctttgtgtgatggcggactctccggtttcgagggtcggattatccgtaatactgtttttatgctatggtagatgttcggtcttaaagaccgaactattttatgaaagaccagactattc

SEQ ID NO: 53666 - DNA, 522 bp, Zea Mays
cccataccttgtcgattacgtgcgaggcgttgccgcagcagtgcataaacatcgtcgtcatcgtcgtcgtcgtccacaggagagtgagctgggctggagttggtggtgggggacgagcctccagtatgtccatgcgtgtaacaagttcagcaactcgtcgatcaagctgctcataggatgtcgaggcagagtcctggtatttttaaaagcttcagtcatcgcgcgcatcatctccttcaattccatttgagagacacagtcatcgtcgttaagtttaggccccttgtccttgtccatttgattctttggtcctgtcattgttagcacaaaacagagacaaaaaggcaacaaacagtgtgaaccctacaactatctctcagggtggtggtggaggtggtggaatacaaattatgaagcgtcttaccccgctcttacaacgttcttaccagcactgcaggtggcaaacggtgaccggtgtgactgtccaacgagcgtgggtgtgattgcaaaagagtacctgtt

SEQ ID NO: 53667 - DNA, 1021 bp, Zea Mays
aggaagatgatttcttatactgtctcccagacaacaaagaattatctgtctgtcgggagatggccagaagtatggggtttccgaaactcgaagctggcctttgtgccatgacaaaggacgatcttgcagatagtctcgcatataacagtctgaaggtacaagaattgcacatttggaattttttgaactttgaattatttttctgctcttatactaattcttttcatatagggtttaatactgagcaacgccttaagggcgtaaaggaatgccgaagatgagagctgcactattgctctcagcaaccttcgaacagaggttatcaagctgaggaacaaagctttggagaaagataaaattttgcttacattggtagacaagatgaagggggatgaagctaactacaagacgcaatctgaaatccaaaagaacgggattgaaaacctccaaaaggaactggccgaagctaaattgaaatgtgctattgccgaagctgatcgtgatgccagtaacaactagaaaaattattgggagaaaacagttgtagatcttcgttcctcaaaagaaagatgttatgaaaaatctatagaatgtgtgaagaagataaaaactagtttcgccaatgttggcgcatattctagtgaagacaactttgtatggggtgatcccgaaggcctaattgaatggatcagcagcgaggccgaagcgtttgaagagattttaagtggtcgtggggacatctgcgccttctcgggtgcgaagggaattgcggtgatcttggaaaatcaggttgcgaacatgtgaaaaatctggcccaagccgaagctactctatctattgacgacacgaaggacccctcggccgaagcaagcttagttggtggaaaattctttactgacatctgggaaaacggcggccgagggatggcccacgatataattaaaaagagcgaaaaagatactcatgatgctagggaagcaacgaaggcagctgaaagagcagcggaagttgaaaagcgaat

SEQ ID NO: 53668 - DNA, 425 bp, Zea Mays
tacccgtacaagtacccatacgctccttctcctatggcttgtatagtgttcctcctccatatccccctctttatcatgctcctcatgtgttccagcccacatatgatgctcctccaaaatatggtgctaccgctccttctcatgctccctcaggcacagtagtgccatcaagaagccacaacgatgcgaccttcaaccagtctatgtactatgctgcattgcagttccaaaaatgacaagactagaataagacataggacaaaaggtttataagtacatgtataaatttatgcattccacttttttgtaagtagagaatattttgcgagtttgtatatctgtaggtgcacgcgtgggtaatgcactcattgacccactgagggcaacaacaacaaaaaaggttaccttttgggggggaaataaca

SEQ ID NO: 53669 - DNA, 312 bp, Zea Mays
atcaataccactacttggtacatgcatcaatcatgtaggaaagcatgctcatgtccatgtatcatgaagtattatcaagtatagaaggctacactagctaccaactatattgtacccaacggcatgggcttcaatgcttgtggaagtgacataacatacatgcccctatagcaggtatgtcagctgcagaaggacatcatcgatattgtgccttgaccgcaagcatggctctgtgtatggcttcacaactagaataagtcagagtagttgggtcttagctgaagggaccaaagtccaactgatgtaacctct

SEQ ID NO: 53670 - DNA, 453 bp, Zea Mays
ttctggtgtaagtttaccgagactcagagaatagggtccatggactgcgggttctattctctaaaactgtaagggttctttaataaaaatgtgtcgcgaatggggtatccgtagatgtgggccgttggattagaacccaagggctaggattagatctcccataaaatgaatcggtatgcaactagggccattggatctaacttcaatagtctggattttatttgaccgagatcggcacgaatccatctgatctcacttcaacggctgggattcaaacatgaagggggtagctaccacttaatcagagccatccgtttacgatcctatggccaacgatcctttccctgcttttccccctcccagcttggccagacggcggcgccgcccaccaaatcacgacggccatcgccggagtagtgcccgcactaatcccgtcgccatccagcaattcac

SEQ ID NO: 53671 - DNA, 910 bp, Zea Mays
caatggttcaactcattccattaatgtcattctgttcttgttagcaacaaacatatgtaaacttttcgatttatctttttcctagaccctactcatgtgggagcctctagcactgtctgccctggattatatgtgataatatttcatttggcattttctcatgcactagcaagtgtatcatcatatctgcacatttcatgcaaaacgtcttgtaatagtacatgctctatcttttacccacttctctttacactgaattatcaggcacatacaataatgttttgccaaagatcaattcctttctctatgatatacacatgtttgctgggttgcatcacctcgaacaagttccgttttgggagttgttattaacagtttggagtatgggaagcagattcaaggtttatctatcaagtattggttggcccgcaattcttacataggttctcgctcgatgacatttatgtgcagggtattggtgggcagtggtacatctgcggcgggcacaccctaaactgcagcaagctctgtcgcatcctggacagactcttcctacagtaccccataacgacaaggtatggaaattggcagcttccgtcgtaccttattttcaagtctgaaacacgactggtgctaacttgcttcaatcaagatccacaacgcaataatattctaaagaaattgaaggattcgctagaatgatttaggaatatttaaagactttgattggtctacttgaccatttactttggcagcagtatattggattacttgcagtcttcatgtcctacctttttgcaggtgcaaggatcaggtgattactttagcagcagtatattctctagccttgctttgctattttcataaaaacaacttgtgtttttgttattattaggcacatatagtaatg

SEQ ID NO: 53672 - DNA, 464 bp, Zea Mays
ctggaggggcttcttccttctgcttagtccggcatccttggcttctggttttctttcgaattttcttcgcgggggcgagcttctttagcttcttgtcgtaatccatcttcagggttcggtaggcttcacgggtgttggtttcctcgccttccgctatctcgagactctcttggagggacgccttttcccttgtaagttccttgacttgttgctccaggctttccacccgggagtttaggtgagtgcagtgggaggcaaggtcatcatattggttatcgagagtgtggaggtatccagccatgtagacgatggtggggtcatcctcggtaggatctcttcctgacagggcctgaagtattttcctccaggcgggggtatttttgttgctgggtggaaagtagcggaggggggtttcaaagaccactctactgtagttctggcatagttgtcggagggcttttcgg

SEQ ID NO: 53673 - DNA, 381 bp, Zea Mays
gcaaattttgtgagccagggtcagcctgctatcaccaggaattgggagaaagtgttgctccaagtcaggatgtcagtctaggaaattctgaactcgattcagtccctaaagctatgttccagtattttctgttagtattggagctgtttggtgtctgatccaaggagtttaaggctgaagtctttatgaagaattggtagagggttgtttaatagaccagttttagtaagtgtgctccccatgttacttcgggaaattgtgtgattgaagggggtgaaaagggagagatcagggttcaacaggtactaggagttgctacaaaaatctgaagaaagatcttcacatccctgctgtcctccgcccatgtgcacaaactgagtt

SEQ ID NO: 53674 - DNA, 615 bp, Zea Mays
gcaagggaagacattaaaaaaatcatccagcgccccatctggtctcgcttcggcctccaaaggccgaaggtggaaattgatgacgctgtcgaagcgtgtcagagggctttcaacactgtttgctccttcattggcacaagagatttgattcaagaacatatagccttcagggtatggccgcttgtggaaagctgggaactgccgaaggagaccaccgccgactctggtgagggtggtctggtccgactgaagtataccttcagatttagggagaaatttgatgagccgaacgacgactggctgaagtgcatcgaagctaccagtgatgagctgcttggagcatactccaaggctgaagataatgctctgtccgcagcctttggtggtcggggcaagaaaagattaaaagggtatttgatgttattggcttcgtataccctaattactgctactcgctgcgaggacaagagaaaaagaggaagattgctgctttggtcaccccagctgagcctgtgccaaagagcaaaaaggtgaaggttctgacccaccggccgcgttacattgaaccgatcgtggtgcctgaatttggcgtagggtccacttcagcagtcgaag

SEQ ID NO: 53675 - DNA, 353 bp, Zea Mays
acactctgttttcccatcacccttcgccgcctacacccagtactcacaccgggaagatcctcagcaccctccacacgcggcgaagtctccgccgcagccacatccaacacaataaaataatctaagccttcatccgaggactcctccgtccaaggaaacaaactcccagactcaccgtcggactcaaaacattcagacatagagccaggcacattatcatcggcgggaactacaattgaagtcttcgccgcaaaatcagtattgtcagtagtggttgcttgcgcaggcccaaacgtcggaacctgcgcagcaaccgaggttcagtatgacacagacaaaagttgacatgcaat

SEQ ID NO: 53676 - DNA, 273 bp, Zea Mays
cacaggcggaatcactatggcctacatgatgcccataagagtccgctcggcctcaaatttaacttttactctaccatggatattacccaatgactttaccccaatcaagcataagtaaccacctatatctcgtaggtgaccgaaaatcaactgacttctaccatctaagcaggcctaagcatttttaagcgtacttactttaattaggtgacaaggatagggtaaacaaggtaatcaagggtaaaatgcaacaattggtttcaatcaactcct

SEQ ID NO: 53677 - DNA, 618 bp, Zea Mays
gggggagtgggtcgatgtgagtgcgctcttggaagtgttccacggtggcgaggtgatgttcttgatgccctattgcggtagtgttcaatcggttgagccgacgagctacgttaacattcaaggatgctaaaacatggcacagagggtatgaacagacctaggaacgactgatcacgacaaggtgtctcacggcggcgggagtgacccgatttggaggaaatccattgattggaggctacggtgcacgtgagaggataactgagggtggtatgagcgcgtaacaaaaaggcggagcgagggtagtgctcaatttaaaggagccgactatgtgctttgctaatttgagacgaagacgatcacaacggtggtgggatattccactggacgagttcgtcgtggtgcctgccagtacaacggctcaagggtcgtaattcctggcttgccatagttataactacgtggtaaaatagtcacggtgtggcgcaaccgtgaaggatggcggccaccatggcgatgatcttttacccgagcgcaaatcacggcgtggagcaaccgtgaagtaacaggacccgagcgcatctcttcgccaagatcttttacctccaggagttatccgcg

SEQ ID NO: 53678 - DNA, 418 bp, Zea Mays
cttgttgctttgttttccttgctcattttgtgaattttgcctatgatgaaatatgtttgactgatgaccattcatgggaggttgacttactgcttttgttttccttgctcttggttttattttgggtcagacaaccaaacataatctatcctttaatctgatttctccatctgccctatgttttcccatgtatggtcaaatgaggtgtttattcatacaaatctgaggcaattgattgtatttactctcatgggttgatcaagtgattgtaattgataataatttctgaggcaaattacttcatgagtttctgtttatgtttgttggtctgcatactctcatgatttttgaggcaattttgtttctgtcacaaactggatatgcatgagaaagtggatctggatatggaatcacaaat

SEQ ID NO: 53679 - DNA, 324 bp, Zea Mays
ggaggttctgccacagtagacgtttcttagtttatgtcaatgacaactttggggatcagctaacctctaaactggaatattgtaccaaatgtgtttgatagtaatgtgtgtttcttgcatttgattctgccagattcctgtacaatattgttctgtcaataacctcgaagtatgcatgtttctgtccgaagtttacgatataattattgcgggtcttatgcatgtttgcccatacacttatgatacaatagtcatcattctatgcccatacattattatagttttgtctcaagtgtatgatacaattatcagcgttatatactg

SEQ ID NO: 53680 - DNA, 364 bp, Zea Mays
ttattgacatggtttttgcactttagtccaaaagtggactaattttgcacttaaccccctagggtttggatttagggttttccagggtcctttttagggtttttggtatctcaggggtgttaatgtaacttagatccattcttagtaatattttatgactattttatttaaactttagggttttctccatttgggtgttgttttacccctcagaaccatatttagggttaagtatcctacactagggtcttatttgcaaaatgccataaccatacaacttgtttgaaatttttacctagtgaatgcatcctaggtgtatcaaacatatgaaatgccaatgcttatgatgttatgctcaagtttt

SEQ ID NO: 53681 - DNA, 362 bp, Zea Mays
aagaagtgatgttccctgatgggtatgcaactaacttgagtaggggggtgaacttagctactatgcgagtcttagggatgaagagtctatgaactcaattgagtgtcttttaacttgtgaatacttgcagggccaaagagatccatctatgagtgccgagttgagacaagtagccaacaactttgcttatagggtcaagaaatattctgggtatgacgtcaatggatattgttttcgcacaacaagctacgaccaaagttggcccaatcaaaaaacaacgtgttatggagtctttacgcccggccttgacgaggtcgattattttggatgaatcgaagaaatatatgaactcaattttcatg

SEQ ID NO: 53682 - DNA, 934 bp, Zea Mays
gttacctggaacctagcattgatagaaaacaaagtttcagatcatgctcaacaataaacatagaaactcacatgcttcgagaagctgcataaaaaaaagtatatattgtaaatgtaaatggtcatcttctcaataattgtagatgtatggcattctagcaattgcttatagaaaatctatccttacctccacatggttaaggtagtatggaatatcatattgttgcatatatctaacaccttccgtagcagcacgccagcacgtcgacatcgtgcctcgcctagcagtggatgtacaatgagactgaagaatccccagcacggcagttcagccagatctccatacaagcaccccggatccctctcgtccatggtccaccgtatcccaaccggtagcgcctcggggccaaagccggtgcagaggtgcatcaccaacgcaccgaacactggaatcaactcttgatctgtaccgctgcaacagttaaccaaaacaatccaagtgcccaatcgtctctagctctctacctggtctggcacctaggtgacaggtgttgtataaaaactcaagagcagtagagcctatttggttcgttggttcgtggctcaaaagcaacatacctcataagcagcaagtgtagctcatcgccaccggaggatatggcacgacgataaaggaagaaacaaatcaggtggcagcgcccgactagggaggctacaccggtgacatttgctgtgtcgtcagggacgacatggttgggcgggctctccatcgagggtgatagaggtcccgacgcggaacggcagcgcagattagccaatggccgggtcgcacctaatctggaggccacacatgatcccaaactataaatacaagtggttatattacagtcatcatcaaaataaaaagatgagtacaagaactttttaagctatat

SEQ ID NO: 53683 - DNA, 334 bp, Zea Mays
ccggaatttgtcatcggagcacggtcttcaccacgggcgcgcctaccatcgtggccggagttcgtctgcgcagcaaagacctggtgagctaccctattttgtctgcccttctctgagcatcgcgtagcacctttccgattgggaattaacgcactgcatcgcgggtgaggggtgggactccggctgtgggccgccgcgctcctggcggcgccgtcatagaccgacaggttggggaagaagaccctccggccgctgatacggtagtggacggccaggattagccccgtgtaccctttcgcatggattcaatctggtccattgacgttagttttga

SEQ ID NO: 53684 - DNA, 545 bp, Zea Mays
cttcgcccctcgctctcctgatgtacctctccaccctcctcctccagatgtcaacgagtggtaccagcaggcatatggggtacctttttcaacagctgatgacgtcgaagaagaagaaacttattttgatgatccggagcagtttgtcccgcccccatatcacggggatccgggccaatcgtcctcttatcctccgccctaggacccgtctggcagtgctcctcctccggcccagtctggagaggaacactttgcctccgacctggcgcaacatctcttcgctcctcatcatcctcctcctcactggtgatcattgaattggcgattctctctctctttttggttcttgtgccaaaaagggggagaaagtttattatgcagtacccctttatttttgtaatgaacacttggtctgtaataactatttgttgcatgcatggcttgaatgccataaacacttttatgatgtgatgagacgagctctcattattgtaatagctgtagaactttttttcagatcatatgctatgcaataatgacctcga

SEQ ID NO: 53685 - DNA, 374 bp, Zea Mays
gggaaagactactgtagagctcaagacgacgcatgaattcttgcaagaagtaactagctaggagactgaccacaggtgctgcagcgagcaggccgatgctgggttcattactaccacagtgaagcgtcaaaacggcaaggatggatggatccactgaacctgtgccgcgcaagcatgctgcaatgcgagacgaccagcagtgagcatcgcaggccgcagacggctgctcgcttcagttcgagcgctgggtgcaagtcggagtcgaaagacatggacggatcgatgggtggactggaactggaatggcactacactgcactacacctcacggtaggcttgcggcacgggcagctcggccatcacctccctcccgg

SEQ ID NO: 53686 - DNA, 605 bp, Zea Mays
gaagaagagcgattaaatacagtaattcagtcagctagataccagcagaccctgaggcgctatcatgataaggctatgcgacattgatccttcgtagtgggagacttggtccttcgtcgaattctaacgggagaaggacggcacaaattgttgccactatgggaaaggccattcatggtgtcggaggtcactcggccaggatcatatcggcttactcaaatggatggcacggaagtggggaactcatggaatatagagcacctcaggaagttttatccttagcaagactcaaaaagctatcagagcaatgttgtactctataattggaaaatacgtcaccaataaaagatttccttctcaaaggcattcacactattggttatcaattgacttcgactaaacttggaatcaacacacttactcgacttagggtgaccactataccctactaacagagcaattggcttaagtcggcaatgacttaagacggtgcaacatgctcgtacttactcgacctagggtgaccactataccctactaacggagcaatcgacttaagtcgacaatggcttaagacggtgcaacatgctcgcgcttactcgact

SEQ ID NO: 53687 - DNA, 434 bp, Zea Mays
cgacaatgtgcgccgagtgccgccacactgcacactcggtaaaagttttaaaaacttggagcttgttttgacaagtggggtcacgtgcaccaaaagcaagtgactagttggccaagcacaccgcctccatttcgcatccagtgacaagtggggtcatgaagcttggacttgggtcttggagccttggaccggtccaaccctagcgtggcggcgacggcttcagatccagcctatgcgctagccgccagcgatcttctggcggcatgctcagctcccaccttcggttctcctgctccgtacagtacctgagtgagtccctgcactcctagtatccttcgtcgttcctgctctccctggcttctcctcctcctctggccgaccggcgtgctctccccaggcccttctatcctatgcgagttgcccgaccggtcgac

SEQ ID NO: 53688 - DNA, 772 bp, Zea Mays
aagagagtcggtttctctttatctactcactgcaccaaaagcattcttgattatattcattctgatctttggggtcagactcctcattcttctatttgaggttgtgattatatgatcacttttattaatgatttctactgcaaagtctgggtttcttttctgaaacataaaatgatgctctgactgcattcaagcaatggaaggatttagtggaaaatcacactagcagaaaaatcaagaaactaagaaccgacaatggattagaattttgcaatagtgagtttaattctctttgtgctgatcatggtattgctagacacaagactgtttcaggtacgccccagcagaatggtgttgctgaaagaatgaatcatactattctggagcatgttcgttgcatgctttctaatgctggtttatgggataagcatgatttgtgggcagaagctgctaatgccccttgctagttgatcaatcgctttcccaattcagctattgattttaaaattctagaagaggtatggacaggtaaaccagttgattattctaatctcagaatctttggttgcactggttatgctcatgttaataatgggaagttagtgcctagagctcaaaaatgcacttttattggctatggttctgatgtcaaaggatatcgtttattgtgtgttgattttaagaaggtcattgtcagtcgtgatgttacttttgatgaaagtacattttcttcctctagaggtgtttctgatagtggttcctcatccacatc

SEQ ID NO: 53689 - DNA, 791 bp, Zea Mays
gaaaattctgcatttgcacttgcaccacgcctagtaccgatgatcggcgaggatgcatgcacacagttttttgtgtgctgccaccaataatgctagctagctaggtccagtgcaggacaggactccagctgatgcatgagcatacatgtggtgttgtcaaatttgttcccttgcggtggagtgcatcagtacgtcgccatcggccacacgcgcgcgcgagcgccaaagagcgaggaccacacagccacccacacacccatattgtcaaaatcaccaaccgcggcagcaacaacaaatcgcatatatatggaatcctgtcacagtccctcagagctcactgttggcgtaacgcgtagcagcctgcaatgagaggatctgctggtgcagctcagctagggtttaatttgttggtttgccagtgggatccgatccggcgagctgcaggccctgaccgatcgagcatgccaacactgctcgaatggatgggtcacatcaccgacctagcttataggatggatggatgatcgtcacctatatatattgtgacgaatagcgcatctcatgctggacgtacggatgagcgcgctatcgatctgaagcaacctgaaatggggagtcgtcgtcactgcatgtaccggcgggccgaatgaattgtgtaaacaattgcttttcaaaaagcctgctgattcttaattaaaaactgaagaagatcgaaaaaaaactggaggaatccaaacatatcattaataccatgctgtgtcgccggtgctgctagttgttacctttattta

SEQ ID NO: 53690 - DNA, 499 bp, Zea Mays
attattaaaattggaatacactaactaagctacaataaagattataaaagtttggccaaaatagtttgttaaaaacctcaagcaagccattcaagtggaggtttcatagggaaatctgaaattcagatttctgaattttcagcctctaagccaaaaccgagcgcgttcaccttaatctccatctcaaaaccctaagctcctgacaaaaatgtgcttaactaacccctctacctcatacctgaagatggcattgggatgcgtgccctagacatgtcaaactcgtgaccttctctcggtgttcggcagtgagacaaacctaacttcacccctccatatctcttgatccagtcagcgaaatccataagcctccacacacaaacgacaaaggaatgtcaggagaagagatctctcaacgggatcatggccataatctcagagatttggagcccatccgtgcttgaacatgacctctctttgcgctgcctcgtgctcgacgccg

SEQ ID NO: 53691 - DNA, 529 bp, Zea Mays
aacagagtatccagatcaagtacgcatcagtaacacacccaagagccaatggtcaggtggaaagggccaatggaatgatacaggaagcactcaggaagaaagtgttcgacaaaaatgaaaagtttgtaggaaagtggatcagagagctgtcgtatgtggtttggagcttgagaactcaacccagtcaagctctgcatggaaataccccgttcttcatggtctatggttcggaggcagtgctacccgccgacctcaggttcgaggcaccaaggctagtattcgaaagcatagctgaagcagaagccaccaggctagaggatattgatgtgctagagaaagagcgattcaacacagtaattcagtcagccagataccagcaggccttgaggcgctatcatgataaagccatacgacaccgatcctttgtagtgggagatttggtcctttgccgaattctaacgggggaaggacgacacaagttgtcaccactttgggaagggccattcattatgtcagaggtcactcggcc

SEQ ID NO: 53692 - DNA, 622 bp, Zea Mays
gatgttgtccaagcgcttttcgatgctcggccgccatccttcgatctgggcttgatccatctcgagggagatgaatcgcgcctcggacttctgctcgacgtccgtgatgcgtcgcgtgaggtcgtcgtagcggcaggacatcgcttcagtcaggcgcgcctccattggggcgagttgatccaacgcccgctgcatcggagcgagctgatccagcacccgctgcagcgctgcatccatcgctgccgacgctgtcgagcgaggacgacgaccgggtattggtggtagatcctccagatcgaactcgtccgataccaaatgttaacggagtgctaggctagaagctctcggagaggaattggagaaggagaggaagacgagagaaggatacgaacgtgctttctgttgcttgcttccgccagccaacacggcggcgcctttaccagcgtctggaacacactccctcacgcgtccgattaccgctcattcacaagtttggtccatgccattacagagcccactgcggcccaacaaactttgagttaggacgacgctgccgcgcacgccgttgcgtcgtgccgagttcgctgccgatgtcttgttcctcctctggcttggacctgac

SEQ ID NO: 53693 - DNA, 325 bp, Zea Mays
ctaagagccctaggcctatggctcactcataacctacgagtcctaggcatgagtcccctaatgccctttggagcccacaacatgtcaaggggtgccagggtcaggctacgaagactagggatcggcatgggacaaagagaaaaattatgacgctcgaactccctaccgcccatacacgttttcctagcagtcttaaaggagcgcaatcagagggcgaagacaaaggatgagtaccgacgaacggtaagacttctactaagggtaaaatacctctctttaccccgacacaatgatcccttctggggaaagctacctataacaaccc

SEQ ID NO: 53694 - DNA, 311 bp, Zea Mays
gtggcggacacagaacaaaattgtaggtgaggccatacagtaagatataaatcattagattagactattagataaaaatagtttcataataataatatttacggtgattaagtgataatacgagaagtgttctaaaatgacatgaatataaaaaacctttttgtcatcctaaatgagagttggagagggcaaagaggtaggccggcggtggcggtgtgctggggcagagtggccgcttcggtgcgtcagtgtggcgtgtcacgtgtcaatgaatccaacgtgaaacggtgacagtgaggtgacaacagacg

SEQ ID NO: 53695 - DNA, 1131 bp, Zea Mays
gccccaaaaccctagccgccagctccagtttcttctattgcgcggggtccgcatcgtcatccactcaaagccactgacatgtgggccatatttgacagctctatcttctaccgtgaccgagctcgatcgggtattgcggtaggttgttgcgatcggatcatggtggttaggatttgtgggcctcaatcctatctccttgcgcctttaaataccggctgaggtgctctgcgattcaacaatcccgtatggcatcgaggctgggagatcgtagcatagagctgagcatcaaaaccaaaggaagaggacggagagagatcgagagagagaatggccgccaccgacgaaccgtggtctggctgccgtgatgactccatggtggttcccggggacctcgcaaggcttcgggagtccgctcggcgcccaatcaaactggaagcatgggcatggcgcgtaccttgctagacgacacattccatggcggatctgtactgcgctgctgtcgactccaccggccggtgagtctttacacccataaaattcgcctccatatattctcatcgtgggggccgttgcatgggagaattgggggctgtgggcgagcggggctcaactaaattctcgccggagcgctgtcgcttccgtggaactgccctcttcgtagacatcaccccctacgtctgcattgccggtaagaagaagtacctcctggagttcgcttaactcccctcgtggatccgtgcgtgtccactctagagctggggcaccttggcgccgggtcgatggacgccggtgtgttcaccgccgctgggcactcggtaccgcctcatgcggccactgggaggaagaagagtccctggtcgtttgtcttattttgaacggctacgattaaatcatgtcttcactgaaccctgaccgtagatccgtgatcgaaggaacgttatcgcgggtcggttcgatagggttgaatctaatctgatccgctcgatcgtgatccaacggtccacagacgaagataccctttcgaccgtcaatgttgcatatgagccctcgtccttttagtgaatgaacccgcggtccagcgcggatggctctgtgtcttagagatttttgccccgagacccctgtgttacc

SEQ ID NO: 53696 - DNA, 924 bp, Zea Mays
ctagaccacctttgctggagccggcagtagtttccttcggcatttcccagtcattcacaagtggccacactttgtaagcaatatgctattgtaccaaatccctggtaccaatgtaggtgcacacagtgttaaaagccatcaaacatgcttgcacttcgttcctaattgcaatggacgaccttctgatgctgaagcatgatcgtatgggacgttggataatgctctccacatcttccctctcactcagataattcttcacatagaaccattgtttcatccaagagcctggccacttctttcgaaatgtcggcacagggtacctcgcatcagagcggggcacaaagctgtagcacctgaagttattgtgatactgttccttcccagttgcttttgtctggtaggataattcattaatgttgcagaaacatttagcatctggctccaacccttggcttctcatggcccaaataaaaaccccctctttcatcaaagattcgggagtaagctcatgaaggtatatctcaaatgtcttcagtacctcaaccagcatcttgtgcaatggaaaacgaagtccagccttcataaaacttttaaatactaccacttcatcttcttcaggaagttgaatggtgtttcctcctccaacccacactatggatatgtcgtggaaatattttcccttcatcgcttcaatttgtccttgcttaacagttgatttcctgaaaacaacatggcttgatctccaaggccgatcttcggcatcttcattaccactctcaacattgaaactgtcactatcactggaatccccagacagcccagccaacattttgtcagtgatcttttcgacgttggttctttccatagcttcataaaaaccaacaagtgtggggtctacagtcttcttatcttccgccatttcga

SEQ ID NO: 53697 - DNA, 312 bp, Zea Mays
ggaaggagtgcgaacccacaaagtcaggaggaaaccctaacctcgactcgggagacgcaaaaccatgagacgcgaccggaggaagaaaccccaccgaatggtctagggttgaggcgagcggtgcgacccccgggctccaacccgaccaagaaaccaaattcccaagagcagcaggcgagcacttaccatgggcctcaaggcgagcagcaggcaccggcccagcggaaacaccatgagacgccacatgaacagggacgcgcggggaagacggagacacggcccagatggttttacgccttttctttttcgcca

SEQ ID NO: 53698 - DNA, 475 bp, Zea Mays
gtgaacatcagtactacaacacatatatctaatgcatgtagcctatctcgattgcatttatgtaacatgtctcggttgcatttgcaacctcgctaagtaccctatccaatatagaatccggtatatcaccagacatattcgatgtgctgtaatattccacgtacatgttgtagacctctctgggtgacatacccggtgtgacgtctggtgcacacttccatgtatagtgtactctgaaatccaccgttttcttcagttcaacactgtccataaccggtgctttatacaatgaatgcatcgacaaacatgtttagtttattgtggcccctcattatccatgactacgagcatgtttagtttgacatcaacaaatcatgtttttgattgtctcaccttatcagccccttcacgggaaatatgcaaatgtgtcccatatatgattggtcacctccaagcctattagacaaactccaac

SEQ ID NO: 53699 - DNA, 945 bp, Zea Mays
cctaggggcttggtccccaacctagtcgacctggaggcttggaaaacctcaaagggctgaaggccctagggtttgccccccccccaacctggcctggagggccttggacttggccagaactagacattgccccctcggggtctagctcctcaaggggtgcaaggctaccaccacttgagaacgttgtatgttttcttatgttgataggatcttataaggcatgtttacaatattcgaggtctcccttccctgcatgctgatagtggccttaggcccatcataggcctagaaaggcatgaaggtgggttcgatcttattgcaagatgccggacaaagcaaatccattatgtgtgggggtcattgcgagcttccatggtagtaggtgcaaagaaggtgacatgataaacaataggcctaggctaaagcaggggtgcaaggggaggacatacgagactaggagttgtgatccaccatgatagagctagtgtataccatggcttatccactcccaaggtactacctctaaactttgttgccatgcttggtgtagcggccagttgatagccattgcctctacctgcctaaaagtcaaagcattgggcagcaatgatgccacatgtctctagaatttcaaagagtcatatgttgagcttagggatggcaattctgctcgcgggcacggatatccgcgggtttcgtacccgatgggcatggatacgggtaagaaatctcgcccacgggtaaggatacgggcaacacttctcacccgcgggtaattgacggatataaaattttgcccgcgggtattacccgttacccgcttaatttactagcccatcaaaatattgcccatgtgttcattttatcctaaaacattatgttgtaataattaattatcttaagagattgagacttatgtttgtggatgatcgatcatgtttgtgg

SEQ ID NO: 53700 - DNA, 982 bp, Zea Mays
gtggtgctgctgtattctgaattttcagattggaaacagtaactaaaactgaatttcagtgttttgatagcagttttgaagtctatttgtggctattctatagggttttaggctatggtgtttgtagatgaaataaagaccatatgatagtgaataattttcagtaagtgggtataacatgattctacacgaaaagtggagtaaaactggctcaaagttggattgtcaggtgactgaaactgagttatattcagtgtactgaagactgaatttcagtgttgggttatctgtttggagctctgtggtaattaatccatggagtatgagccctactatatgtagcaaagttaaagatcatctgaagtatagcaagtttcatgtagagagttggcttgatatggtgtaggatttagagaaaaaggggtggcaaaaccctctgtcagactcagtgtagtgttgttcaaacttctcaaactgaattttcagtgaatttgctcctttttggtgcttcataaatattgttctgagtatattcagccaaggagtgttatactaaatagggagagctataattggagagtaattttggttaagaaaggtgggcttgttgttgaaaggaattgtgagatactagtgactgaaccgagaagagtgggatggaacagcaggactgatgaagttggattcagtgcctgggttggtaactgaaggagaatctcactgctgtggttgcacttgtgtgtatagttggagatatggatggagtacaatgataaggcctagaggcctcacttccaacagaaattatttactttggatctctttgagcctatccacaaccacaagtggagtccacatttgttttattcgctatccgcagaattagaccgcacaggtttttgtggtctcactccttcaaaaatatcatgttttggactatctatcggcagtaagtccttatctgccctttctcctgtttaag

SEQ ID NO: 53701 - DNA, 278 bp, Zea Mays
gaccgttcgatccacaacggacgatagagattagaagataacgtttcgatacatcgccaagctaatatgggtcgtgcgacgtggatccaacgactctgggtgcttcataccccttcgcgcatgtcaagttgcaaaagaacccctggaacctttataaatcaacccgccgttcgtagggttgttcgcctgagtctaggaaagttatagtttgacccctgtactttacagaaaatagcgcgcggtccagatattcagaaaataataaggaaataggtttt

SEQ ID NO: 53702 - DNA, 1143 bp, Zea Mays
gtgatgcaccataagatgcaacattgaaaagaaccgcttctaagttatgtcttcctgtgggccagtttagatgcatatgcatcaatgcacaccctcttatgcaaatacatgtttctgtgtgattactgctgtctttaccgatcctgattgaaactagtgcgttccaattactatatttgcctttcacagaattattaagatctctgaaagatacccatgctcacgctctgtaaattgtatgtgcaggaaatttatagcctaatgttaggtcctgattgcatatctattggatttggttctgtgacagagtaatttttttatatagtgatggcaaggtatgttgcttaatctgttttgttgaagttgaccacagttcaaaaaatgttttcttccatttctttatcctgtttcctttgtgcattattactgccttatatgcatgtaaaaccaaattgctctaacaactcaaatcacagttcgtatatggctaaattaaggtgttgcatttgaaacaaatttggtcgtgcaatttttctacgaattatcagtgttcttacatattttctgtatatggctagatacattcatgaaaacgtttggtgcctacttgagatcttgtggggtacagaaagtccatgtgtaatagttgttctttagcttgacctgttatgtatgatgtgctaattcattttgttaaatgccctgttgattctctgcacgtgatatggatcatgggagtcataaccttgcatgggtgctcaaatgaggatcgggggagagtactgactctttgatacctcgggaaaaaaactaaaggagtctagaaaactttagctttactttctgttattgtatatgttcaatttattttgagtatttatattcttagaaatgttatgttagcatagggttgaaattatggtgcaaaatgtttatatacacattaggcactcaggtgaggttgggctaattattaggatttaattattgcaagaattcttagagaagccaattcaccctcgtttgcgtactgttgatctgtcagtgtccttgtttgtgttctgttcactggttcgctgcaagaattctgttcactccaaagattgacaccgtaaatttaacccccacaagattgacacattg

SEQ ID NO: 53703 - DNA, 580 bp, Zea Mays
aatggggccccgggggcccggttctcctgcaaacgtgggttgcgccaaggtgacccactgtccccctacattttcattctcgtagctaatttactgcaagctataatcagtcgtgacgcttgcatcaggcaccccctctttgccaaccaaacttgtgcggtcctgcaatacgtggacgacactctcatcctcctcaaaggtcacctagataatgcctctcacctaatatttgcccttgaactattcaacaatgtaaaaggcatcattatcaacttcaacaaaagggttgttgtccccatgcatataaggacgatcacatccaacaaatcacctcctccgtcggctgctggctgggagatttcccacaaacctaccttggcctccctctttcccctaccaaacttcacctccatcttttctcccccaccattgcaaaaacaaataaataccttgttgggtggcaagtgtcccttctaaacccaatgggccaccaaatactcatcaactcagtccttggacgtcacctgaactacatcatgagcgttgtccaactccccaaatggggtgtccgtaaactcga

SEQ ID NO: 53704 - DNA, 389 bp, Zea Mays
cttgaattattctaacactttgacaactgttagagttaaaataaccaagtgagaactaacaagtagacttactaatttttatacaagttatttcgtgctctagaactaccatacacaattaatcaacgcattcaccacaatcatcaaatccggcatatatgtatatcgaagcgcttttcacccactaattcgcattttagcttagacaccacatgagcactactaatttttacccgcgatcataaccatgcgcaattgggctacaacaagcaaatcatcgtgactacgagcttaaccaaagttatctaacaagttggttaactagagcaacgacatagcccgcaatacaacatacacgtcggctggcctattattatcgcagacagaga

SEQ ID NO: 53705 - DNA, 407 bp, Zea Mays
gtcaccatcaagctctaggcatgtctatagatgtcgacaggggagccaaggctaacaatgatgacattgctagtgcattttatgtcaggttaccatggaagtatgtttctatcttctcactcaaacaattacaatcttgaatcgaacctaactaatcctaaaatttctaattcgaaaaaccatatacctcatccgatgatctaacaacgctgctatgttaacacctggtagctccgcctacgtgggccatcctcttgcttgtgctgctgctcgcctacacatacgggtatatatgtccaaatggtctaggtctattggacaacccatggcccagcatagtttaacctaacccaagcacgaccaagcccgttgtccaccagatccatgtcgatctaatccgatcactg

SEQ ID NO: 53706 - DNA, 492 bp, Zea Mays
gaatgagctactgtgtcgtggtaaaacgaagcattttaccttagtaaagttgcgtttgtccgtatgtgtctcgatcgtctaggcttccctggtagcggtctttatggcgggcgatgtgggcggcgaagagctccggcaccatcattgtcgtctatgtgccacttcgaccgctggccaccgtagcttgggtctcggtgtggctcgtcatgttgcggggcctgtaggtggccagtgcactcaggcctagactcgataggtcatgagtgggccataggctagggacccgtaggtcatgagtggaaggtggatcgactctccctgtgtgggctcgatgacatgtgcagttaatgcgacatatcatttagggcggatctgtcctgggtctagggtgggcactttttcaccataaacagaaaaccgaatcgaatcgaaccgtaccgaaatttcggttttttggtagttcggtttcggtttttgtatctaagaagtacg

SEQ ID NO: 53707 - DNA, 584 bp, Zea Mays
cgatgctgggttccataaccacccctcgagtccagaattgtagttttacaggagactaaaggttgttttatgtaaagaatgatgtagtctagggaagacctttgtctaatgtatcgtttttatcccgacattcctccttgcatgaataaatacttactttgagtctttctttgggtggtggtggcatgacatatggcctagcacgctggtggaccaagcctgcttcctcgtctagcgagttttctccgtcgacgcaggacgacttttatttaacaacgctttcctccttgtcttgtccatattgcttttggttcctcggaccctcgtcctcttcgctcgggtcttccatcgctctccctatggcgtactagcgccgatccttgacgagttaagagaacctttaggctctcgtcggacgtggtttactagatgaaggcagggtggatgattctgggtgccgaggaggccccaaccccgctcctccttatgtggtttcgtttgttcagccccacaaacgaggtatcgctcttacccttcatccttttgtcgtgaccatcttcaagtacttgcatgtgcagctccat

SEQ ID NO: 53708 - DNA, 292 bp, Zea Mays
aaaaaggatgacggcgggatggttggcaacgaaaaacgtacccatcatcactggttctccttccggggtagtcgccacttgggtgtagtaaactcacccagttttccttgtatttttgcccgttggagtgttggccacatttctctttccttgagtcatgttcccagaagcctgttggaaatttgatttattctactttggatagggacagtccttgatgaaatgttcagacttcccacaattaaagcagccattagaggaactggttagggcggggaaacgagcaccagag

SEQ ID NO: 53709 - DNA, 571 bp, Zea Mays
cttcgatgcgcctgcacgatttgtatcaagccctgcgaaacaaaccaaaatgacaaaaaaagagaagaaaagaaaagtacatcaaaatcaacaaaatgaagtggccttacacgcaccacccgatgtctcctctggcagtacattaggacccgaattcaaattttagtccacaacacagtcccccgcggagacatccctgacctgtgtagcgtcttgagttcccatgacctcgacacgatgcatgtgcggagcatcgggggctgccagtgcgacagcctccaactcgaagggtaccacctcaccacgtgaagtctcagacgactttgcaaggtaagcagcatggctgacccttcgcttccacgagcgaatggggcctagagggttcacaatgcggaggcatactggcttgccatgcgaagtatcagccatctttgtagagtaagcagcagggtcagccctctgctgctcctccttcaagcaaatggcgttcaaaatgccgaccatgcgccgaaggatatcaaggctaacgcggggcacacccttcgatcgatatctactatcaagccctgca

SEQ ID NO: 53710 - DNA, 492 bp, Zea Mays
cgccacaacagcggaccatccaaacagttcaagccaatggccgccagagtatcagctacaacattacaaaatctgggtacataaaggttttaatctcctccatcagaactcatagcacagacctatcaacacttgagttagacagcgcttcggctagaacagctgcatcagtctccaaaataacatttctgattcccagaacagctgcatactacaagagaaaatgtagagctgacagcagagcatatgcagaacctgctcctgctgctacaactataccaatatgatttctgattacaaagccccatctggcatttttagaagtaggagtaaaagcaccgtcacagttaatcttgtacacatctttgggaggagccctccattttggctttctagatgatatagtaggaagcttgcacaagtgtgttgcctttgtccatgcctgaaaatggaagaaaacaccattaatcacttcttgcgccgattttctcc

SEQ ID NO: 53711 - DNA, 308 bp, Zea Mays
cgaattgtacaggttcaggttgccgacgtcctgtaagtttctggagatggtattgctctaagatctagtgttacaagcgattgctgagggtagaagatgaaggtcattttgtgatctagcaggatccaacctttttgtaggggttccctctcaaccttatatatatgaccaaggagatatccttgtacataacggagcacttacacacgtttttcctttactcgttgtgatcgtgccgattcttcaggtcacacgttggcctctcccgcaaagctcgcgcccaccttgcatgcacgggtcgagtcacg

SEQ ID NO: 53712 - DNA, 641 bp, Zea Mays
ggagcctatttctatatcttgattatattgagactaacactttatcttagtaatctcatatagtctcatgtatgagaacaattttctcatgaagtatgctactacatatcaatccatcttggtaaagtaatgtcacctttatcaaggattgtagctttcatcgttaaagtagcatatttactggattctcccgttttaagcttgtttaatgatctaatgcctatgttgttcttttgatcgcatctattgtttgtttgatcattgaataatttcaattaacacttatgtttcttagtgcctcatataatttcaatcaatatctctcttgatatacactaagttaaaaggagaattcatgatatatttatgcaatttgtgatctacttgatatataataacaatgacttagaaaggatcactagatgtagaaccatctcttgtgcaaaatatttccatacactgtcttgaatataggtcttaaataactaagactaaggacaaagcacaatgaagagagcgtctctatgtgaaggtacaaaagggtaaaactacttcctctcatttacacatgtacctaaatcttctatatattccctgcatatctcgtataaaaggaagagaaagcatgtctatgcatatcc

SEQ ID NO: 53713 - DNA, 762 bp, Zea Mays
gaaggtcacagataggttttataggaagaggcgggaggaggcatgcacgaccggcacaacagagccgtaacaatctgcacacaaatcgtaacaaacctacgacaggggcggatttggtggtcctagagattttgtgcgatttgaatctgggttacggctgatgaggcggatccatagtttagtagtgtagggccgcggcgtattcaagtctagcgctagatcctgtcgatcccgtgttctactccatgggcgaactggaggtagatgagatacctaacaatagagttcactagtcactgaaactccctgtgcgcgaggtgggagcacagcgagcctgtccatagggtcccgctggttggcgaccatgcagttacacgtgcgcgtgggtggatccatcgctacaggtttcgtccaagcacgacgcgcatgcaacggctgagaagctaccttcgtcaagcggtatcagcgaaggggatggagctgactccatggtcccacgtatcactgagacaggcaacgtttggctggcggaataaagaatgagaaaagagaaaaaacaaggagacgtgggctacatgaagggttaaaggtgattgggccaatgggaagatggatctgagcgcatgtggtttctattttttttaattcttttctaattcaatccaaattacaaatttaaattgtttttgaaatttacacaaaagttaactgaagccacgaatgaaccttagcatgatgcaaatttaatttagtcttaattat

SEQ ID NO: 53714 - DNA, 578 bp, Zea Mays
tatatatattaggcaactactgaacttattgcaagggatattttctctaaatctgcagttgctgaacctccccacgtatcacgtgaagaatgtgctcgccaactatttaagttcatttgttcaggacaactagatccgagcatgtatgtattcgttattcaaacttcaattaagtataattagatgatttgtaattcaagtttcatttttttctaggtctatcattgattttggaggatatggaggttctgtcctggatgttgtccaatcgtttggccctaataaatgccttgagaactttttcatgcagggatttatcgactgtattcgagatgatgatttattatacaatcaagataccataatcaacacactaatactaaatgtcaaggttggggtattttttttctcttcaactttgtatcatatttcaatccttagtgtataaatatataatacaaatcaatatattttttgtgtagactgttttgaatatcgaggagttcgaacaacacagtacaaatccgcagcccttctcaacatcagttcttaaagaacaactagaaccgacgcttcct

SEQ ID NO: 53715 - DNA, 546 bp, Zea Mays
ctagccctaaaatttcccaataccctttcccctcatctcagacggtcggccctacatattgccatcaagcccggagcccatgagcttggcacgatgcccactgtttgggccctatccgagcccagcacggcccatcactatgtggacctaggcccaacccggcacgaacgacatgtcaggttgtttggagttttcggcctgtcgggatagcttgggcacaacccgttcctaaacgggctagaactcggcctgttcctaaacgtggtagaactcgacccgtttagtaagacagatgttgcaaaaatatatctatcctttatttaagggtctttcatttatttattacatgtgtattatttgtaatatatgttattgtactaagttatatccttcaattgttatttgtaaatgtgttcaattttttatggtgatctaattttaaatttagtttatgcgctggcgggcttaggccggcacagtgaacattttcgggccgggcttaacggaccgagccggcacagttgggcacatcccatgtcgggctcg

SEQ ID NO: 53716 - DNA, 404 bp, Zea Mays
gactggcaccgttagatccaaatgcagtaattctgattttatgaagccgtattcatcctgaactgcccgatcaaatccgaccgctaagataactccgcgaagggggtacgcgcaatgtctaatcactgccttcggtcacggatctgacggtcgcggatccttcttccccatccacggcagagacgtgagcagggtggcggtgccatcccgaacggcggtgggttcggtggaaatggtgaacccgacaccgcatacttaaacttcgattcccatggtttggcgtgacgaccaggttctcctaaatccattaacctagattttgtggcagataaccacgttctcggctccgcccccggtgagcagtgacaagacccccatgttgacgccgaccaagtcccaaacgc

SEQ ID NO: 53717 - DNA, 943 bp, Zea Mays
ggcaacaatactatttttctgtgcctgtatagtgggttgccagcttcgtcaacaaacaatttcagatttaaatgacctagacctttttgaacactaaccatctatcatgcaagggctatttttctgcacctgttttgctgaacgtgcatgtcggctattcgatcaccacccagtcactggtgtactaaaatcaaagtctggttggtgcagaggcatgaggccaattaaaagcttctcaggttgtttgcaattctagagcagcacaaatattaggttgcttgcagctcataaacaggttgctggataatagtttccatctagtcacaattgtgatagtgcttggcatcaagttgcggcgctggagaaagaatcaggttgcgacattgctgctgaattgtgatagtgctttgcgtcctcactaaaacgtgagccgaacgctagagaaagtgtatggagcggtgccgaacgatgagaaattaaaccaggggcattacagggagtttagaagatgacaaaaaaatgaaaggaaaaggaaatgttaaaaaaaagttgggatactattttggagagtaatatcacttataaatactattatagagaagattattttaaaaataccataaaggagaagcctgttaaaacaggtactacaatagcaaaaaactcgccgccgtgagggaggagacaggagagagtgcgtgcgtgggagagaaaaggagaagagagagtgacggctagggaaaaatggaggggtgggagtggaaaatgaccaagtgagcacccctatttatagacatgggctagggttagggtttcttagtgggcctaatgggctggaatgggcttgacccaaaacgaaatcggactgggttaaattatttccggaataaaaatgcttctgcgaaatccgtttctacggagaacagagcgaattagaatttcg

SEQ ID NO: 53718 - DNA, 495 bp, Zea Mays
caaaaaattcctgtcgccactcccaaaaggaggaggatggctagcgtattagacgctgttatagagactacgaaggccttgagccctgctcctaagaaaattatcgaagctacgaaagtttaggccgaagccgaagctaggccttcagtgcccaccgagacggagcctgccgcgcttgaggacaaaacagcaaggcagattgtaccagagaagaccgaagctcctgctcccgaagcttcgaatgaagatgttgactacattattcggcatgcttcggggaagaaattatcccaggaagaaatcttggaggccagacactatgcccaaaggctgaaatatccaaaaggggccttagtgtacaatggtgccaatgaagatgatttcctgtactgtctcctagataacaaagaaatatccgtgtgccgggagatagctaggaatatgggatttccgaaactagaaggtctttcggttctatcaaaagatgaacttgtt

SEQ ID NO: 53719 - DNA, 322 bp, Zea Mays
tagaaagtggagaaaggtgtcggtgctggccaataggctttcgacctagtctgcgcctgcatgagccccactgatatgcaggacccacttgtagacgccccctcaatattaggtccaagccactaacatgtgagcccccacctgtcatttgaatccctcgcccctctctattcggtgacgtacacacaccaccgttgatctcgccatcctcagccaaagcgccgcccttgctcatgtcacccgacaccggccatgaagtgcattcaagctaattttttctcccctcttccctctcccgatgtcgtgtaatttaaccacacga

SEQ ID NO: 53720 - DNA, 459 bp, Zea Mays
agaaatatcaagaaaataaaggtggcagaggttctcaatgaacacctatggattttagatgcgtgaggagcttcatctattagagatcttgagagtaccttaattagtcttttcatctcatcatggatttcttgttgcaatatgatgtagatgtacacatatgcgcttataatcctctgctaaatggcggatcatctggcagctaggatatagccccatgacgcaacatgtgcgctatgtggatagactttacagtcggggttgcacctgttcatggaatgtcttttctccaagcttgtctggagagaggtagctcacggggcagtaatccaagggcttaggccaagcgtctagggccaccatgactcggtcctttagtggtggtcattcttagcaatgattccatcttgtagtaggaatggtttgcggtcccttctaatccttgttaattggtcccta

SEQ ID NO: 53721 - DNA, 1908 bp, Zea Mays
cacccatctaactcgatgaaccaacaatttggacgaatggtgtaggtctatgtagagtcgttgtgaggggaagagcagcaacatcaagcataggtacatcatttcccccctacccccccacccgatgaagcaccagacccaccaacattccattcttttctttgtttcttctttgcatgacctgggtttttgtcatcttggtcatctccattatcccctccaccttcgccatcccagcgtgggtcatctttgaagaccacaaggtctgcaggagtgaatttctcatcttccaaaacaaaagtgatctcatatcctttagtgccaaagacaatgtcaatggtaaggggaagaggatctctattcatcattccaacaagcactctaatcactcccatctttctatatgtatacatatccacatccaaggtcgctccaattaccgaacctagagcccaaaatcctaggtagtgtctccaagcatggggaacccccttgatatggacccatacctcatcaagctggtaactaggatcagcatcactagcatctttccattccgacatagtgagagtcacaccatgatttttaagagtgaagtccacatccaccattctctgtaattcctcaaccgaagggaaaaccaccaagaaggattcctcactatggggcaaagcctcccaagtccagtccttagtaatgaaacgagcccgttccgtctgcactgccgcaggcgtaagtttttccccggttactttgatgagggcagtcggggctggatccggtgtttctaacttataatcaaattctgggatgcgaaataaacccaaatcattatttccaaagccaaaaaggaagcatccgacctaggaaacttcagaagaggacacttggccaccacatgcgagttcttcttattacagaccacatagtctaaaattgctttgcattcctcattcatatggccactcaacttgcatcggaaacagaaaggattttttggtttcttggccttagaaattgtacctggatccaatgatgttgagagaggcttagccatggtcctatccacctctgcagtcccaacaggaagctcatccccgggcgacatcatatggctagccataggaccttccaccctcctctggtatcgaggctgtggagggaagcgtgcaccccgtccagctaagccacgaccaggcatcccttgattgccccggccatggaaggcaccccgcccagcgcctcgacgatgcaaaaacacgccatctccatgcccgtgccgcgggggtgcctgcccccgccatccacctcaatgcatgggtgccaccatagtcggatttctgttactcgaaagcacaggccggtggtcagagtcccctgcccgattaataggaggtggtggtctagcggccatctctgcatacaaaggagatcgcgtattgcacaagttccctgagctagaggtcggcttaagaagggagtacctcccgtcaaccttactctgactgcctcgtagcaaacaagatctcggccttccaaacgccttagccctcttaattagatcggcagtggaaggacccgagacggttttttgtaaatcacgctctaagtaaacttcacggccgcctcttggaaaaggcccgtgctccgtcgcggagggcgccacatccaacaaaggagcccccaccattactgcggtgttccctctcaaaattggtttatgggaccaatttgaataaggaggcatgaaagcttccaccttccagtgtcacatccctcgtcggtctctgctttggcaacggtccacgccaaggccgaatcgaaactgtccgacgcggaaagggcatgccaaaggccacacgctccacctgatgaccattagcctcagaccgtaatggtacattatga

SEQ ID NO: 53722 - DNA, 362 bp, Zea Mays
ttctatgcattttacaagtttctagatttgttttttttattaaaaacgaatttctataattatttctctgtttttaatcatctctggactgggcctcaatttctggataggtcagggggctctggcgtaagatttccgagacacagagaatagtgttctcaggatggcgggttgattagtgatttcctcgggggctctttaacaaaaagtgcggccaaaggggtaccgtgcgctcacagtcgtcagatctcaaacggagcgcccagattaaatcaaatcatacgtgaaacggtacgctacgacaagcgttggatgtgagatctacaactgagattgtatgcgcgaaagggtatgaataccag

SEQ ID NO: 53723 - DNA, 1082 bp, Zea Mays
gcctcatcttcaacgtggtgactctattgcactttgcacatttttattactttattccttgtaacccgaatcaaagtgtcaatgatcttaataggatactccgtgtaagttagatcagcttgcacactgagttcttccattggtaactgttactctggaacacgaagacacttcttgagttgagatacgtggaatacatcatgcacatcagatagatgatctggtagctcaatttggtaggccatctccccaactcgcctaaagcttctgaagggcccaataaagcgagggggtagcttgcctttgactttgaatcttctcatcccacgaattggtgacaccctgaggtacatgtgatcaccctcttcgaattctagtggtcttctttgattattagcatagctcttctgccgagtttgtgctaccctcaagttctctcaaatcatacggacttgttcttctgcctcttgaataatctcaggcccaaagaactgtctttctccagtctgatcccaatagagaggagttttgcactttctgccatataaagcttcaaatggtgacatcttcagactggcctggtaactattattataagagaactcaacatatggtagactcttgtcctagctgcctccatgcttaagagcacaatctcttaacatatcctcatgtacttggttaattctctcagtcttgccatcagtttggggtgataggtcaagctcaagttcaactttgtatccatgttctcatgaaggctcttccaaaatcttgaggtaaactgtgatcctctatcataaacaatattctttggtacaccgtgtaagcacacaattctgccaactgagaacctttattagtcttgaccggaatgaagtgagccactttggtcaatctatccacgatcacccatatggaatcataaccctacgcgatgcgaggcaacccggtaatgaaatccataccaatttcttcccacttccatttgggcacttttaacgggtgcagtagtccagctggtctttgatgttcagctttgactctttgacatacatcacacatagccacgtgtgcagcta

SEQ ID NO: 53724 - DNA, 1109 bp, Zea Mays
cggggttcggtgcgccaggcctctaaggccttctggatgcgcctctagtatagtggtccggtagcgcacctgagtggcccggtgcaccctagacagatgtacttgtctttttctcttgattttttccaaaatatttttacttaattcaagggtgttaccatgacttataagtcaagtatttaactttatttgcttctccgacttaatttctcatatacatgtattaaatatctgcatattcacaattaacaaacattttagttcattttgttgtgttgggcattaatcaccaaaacattttatagaaatggcacaaaggcacatttcctttttagctccgccttcacatgatgtgcctctttcttctgctctagatttggtcgcttgcaatcttgcttcaagtgactgtagataccacaattacgacatctttccttcggcctcggtgttccctcggatgtcaggttgacgacaggatcctccttgtcactgcacccgctgcccttcggtttggcctggttagatccaccttgtttcttgcctcctcctgtcaaggatgactcaagggtaagtctctggcagtactttgacagccactcctcctctaacagcatgaggtgccctatcttttcgttgatggagtcgatctcgaatcgatcttcaatggcatgctactcctcatttaggatgagacacccccatcttcttggtgatggagtcgatctcgaatcgatcttcagtggccttcaagcttccgaccaagtcttccaccgtcaatgtctttagattgagtagaatctcaatcgagaatgcgataagggagtagcgcttcgtgagcacgcgtaacatcttcataacacaggtgtcattgaccgtttccccgagcccgtgcaggtccttagctagcgtattgatacgtagcacgatgtcatctacacgctcgacattcttgaaagagatattcttgaactcatgccataggcactaggcatgggcttcctttacacaatcagcccccccacacacacacatgtttttcatcgcctcccacacctccttaaccgttttcttactccccagcgtcgcccgcatcttccttggcacagaac

SEQ ID NO: 53725 - DNA, 626 bp, Zea Mays
gttcggcttgtcgccgatttgagtcttcggggcacgacaaaccatctacggcggtcagcgcagcgcaccatctccggtgagtcactcgccctccacgctatctttgtttgcagctggtactcgggagcgggcgacgataacagggtggggagtagacctggggtcggagaacgggccggggtacctctgtcgggtcaagggcaagcgtcggatggccggtatctggcgggagaagtagggtagcggtcggctggactggtgtcgtgaggttgaagatgatgggatagccatggatcataggatggacggctgggatcggatcgcagtccggatggggctgctggatcatcatggtcgttggtaggaagagcaacggtcgagatcataacgtgtcataccccttcgccatgtttagtcagggccgtcgatctagatctgacggataaaatttaacctagggcaataaaatccccaccgttgaatctcaatcttgcggttctggtcgcataccgattcattcgtggcacaaccaaatctcggccgcatgtcttggatctaacgactatcacacgcgcgtaccccccttcactcagactttttgcttaagagcccctggggatctaaag

SEQ ID NO: 53726 - DNA, 432 bp, Zea Mays
tcagcaagatctcaacctccgtcagagaagatggctagaactgatcaaagattatgaccttgagatccattatcaccccgaaaaggccaacgtggtagcagacaccctcagccgaaaacctttcgggatgaaggggatcaactttttagaagactggaagaaggaatcagctcggctgaatgcatgtctgggaaacaacgacagcctagaagtcaaaccaatgttagaagacctcatatgcaaagctcaacgtctagacgcagaaacaacaagacttatggcaaaatctcgcaaagaacaacttccggacctcaagacagatgaacaaggagtcctttggttcaagaaccgtctatgtgtaccaaaaggagaggcacgagaagtcctgctcgatgaagctcacaactcagcctattccatccacccaagaac

SEQ ID NO: 53727 - DNA, 1108 bp, Zea Mays
tttactgctaaggatgggagtgtcacttgttttggtaaggttggtgagtgcagtggcctgaaacccttagagaaacctttagccacgccaagcttgtcaagctcactccacccaaaaatgccactcctgctgtgagagatgttgtgattgaggtgcatgtgagagccccccttagaacaagtgtggattcaaaaaactaaccctctcaggaacacacttgacaccattcctggcgtctctagtgacccccttcttagagctcctcaaccacccaaaaataaagccccctcccacaagcaaaaaacactcaagcgagaggtgaggttccattgtgagttttgtgagagggatgggcatctagattccttttgctttaggatgaagagagatgagcggcaggtttttaagtcgagtaggaagaacatgagccgccattctcatggtgttcatgctcggcctattcagagacatcctacgaggcttagaggtgctttgcctcttgctgctaagtttcaggaggagagaccacgtggtggtcatgcccgatggggtgttggtcgtgtcccatatggctagggaccccgtggcagtggctttggttcttacttccccagtggaccacaatttccttcttgtggtgatcgctaccctcccatgggaccagggatgactgatatttttcctaacactttacaggggcaaatgtcgtagtactggttttcttatcagtatcataaccctagtgttgtactattttctcgccccatgtcttaatattatgcaggacaaaggtctagagaatagatggctcatggattccggttgttcgtgctacatgatcggaagcaaaaaatggatctccagcctcagccccgtgattggtaagcaaaacatcacattcagggatacgtcgagagttaaggtaatctctcctggctccatttgagtgaacaagagttttgttctcaagtatgtttccttggtctcaaacttgcatttcaattttctttatgtttcgcaactccttgagcatgaatacgaagtgcgctttaaaaatggcttgtctcgggttttggatgcccgtggggatcttgtttgacagatttcc

SEQ ID NO: 53728 - DNA, 817 bp, Zea Mays
tcacatctcgtgattttaagtctcgatacatcttgttactcccaggatgaatggaataccgggaggtatgagattcatcaagtatctattgcctcaatgtcgggacctttgggactactaaccgattcttaaaccaaagaatacctttgttatcaaggtggaaacacgtagtaggatccattgccatatgctccttgatatgagttattctgacatctgtcttctgggcttccacaatttggttaattaaagttgattccaactgcagattgactagtagtgagggttgaaacatactcaaattgaaacgttccatttcttgacagatggtggtttcaaatgaactagtcgacagatagcataaatgttccttgggactgagcgcatccgcgaccacattgcttttcctggatgataatgtacttctaaatcataatccttgattagttcaagtcacctccgctgtctcatatttaattcagcttgagtgaagatgtacttgagacttttgtgatctatataaatatggaaagtattgccaagaagatagtggcgccagatcttcaaagcatgaaccactgcggcaagctctaaaccatgagtaggatagtgttcttcatgtctcttcaacagccgtgagacatatgctattacacggccttcttgcattaatacacatccaatgcctattcctgaagcatcacaataaacgtcgaaggacttctcaatgtcaggttgggccaacaccggtgccgtagttaacaatttctttagcttttcaaaagcttcattacattctggcgtccaattaaacctc

SEQ ID NO: 53729 - DNA, 540 bp, Zea Mays
gatcccgtgaaatggtgcggcccctggccggatctgggatcgctcgacctccatgagctccaaggtatccacatagatgacattgaggctactgcctccatccataagtaccttcgtgaggcgtgtgttgccgatgatggggtctatgatgagcgggtacctcctagggttgggcatgtagttcggatggtcgtctcggtcgaaggtgatggtgtggttcgaccaatctcgatagattggggtcgctacctcaaccgagaaaacctcccagcgctcctgcttttgctgtcatgaacaaaggttgatggcatcaaccccaaaaatcatgtattaattgtgtacgttggggaagccatcgtccttgtcgtcttctccgtcgtcgggagccttcttgttgccttcttctgccgaggtgccgggcttgttgtaaaatcatcagagcatgtcacattcactgcgggagtgtttaatcgggcccttgtggtaagtgcacaattccttcaacattttgttaaatacactcggccccccttgaggggc

SEQ ID NO: 53730 - DNA, 495 bp, Zea Mays
tatcagttgctaaggcgcagcgtctttggaaggctgtagtcgggccgtgaacgtcgtctcctccaccaatcgagttattccacaccctctcaccgaaagatcgggcattcacccaacgggtgcacatcaagctgcctccctagatcgcattgttgctgcaaggcgctccttcttctcagctcactccttctgaagctacttcttttctaccagtagctcaagaatatgaggtgcatcgaggcaccgctcattgaaggacatatttaaattttgctgcagctgctccacctgcgactgaggtgcacgacggccactgtctgcctccacctgcaacagaggtgtacgtctgctactgccggtctccactgcacaggaggccatctgatgcttgggcacgcctcatggtccaacccgcatatggggcatctgcctaggaggagccattctgaattttaaggaataaagataaaagaaaagatcaaagtattagtagat

SEQ ID NO: 53731 - DNA, 511 bp, Zea Mays
agcagatctcgctccagcggcggccgcccccaacggcggagaccatcaccggtgctcccgtccaatcgagtaccagagctccacttccccctacggtttgtgctatgcagagcggaccaacaagtgaaccaaagggtccagaatatcaccagggttcatgccaaggagaccttcaaccatggtgcaacggctcggtgatgaacactggattgaaggaattccgccgaggccctacccttcagcgcactacggtgaaccatccgaacaccgacgggatcaagcgctgcgaccctgtgtccctcgcagcttcactccgacgacgatggcacgctcgctgcagcaaggaagccctggattaggcaccccaaggttcccgtgctccaccaacgccgtctaccgaaggcttgcagcatccctggcaagttcttccatggcgggagatcccgcttctctccctctgtcaccgacgaccagagatttgggcaacccattggtcgagtcgcaaagtctg

SEQ ID NO: 53732 - DNA, 627 bp, Zea Mays
tgaatatccagttatggccaatatcaaccatagagacctcattctcaggttacaaaatagacaaatcatcaggggctacaaggttgctctttcggaataaggccagcctcccgatagttgtacaacatcagcacaagctcctcgccctcaaaaagtgctctaagctctgactccctagtacaacaaggatcaaggagccccctcgatgctcttgttagcaaaaccctacaatctacatctgacttcgccccctcgcaaagaagcaagggagtcaaacctaatacctcatgaagcgagatcctaaaactaggcccgcccaaacccatgtgtcaccgtttctgaccgccatcgcgaccacggttagacgcaccaacactatctaccctttgtttcgagacaccgacacgtctcctcttccccttcatcacaggcagcggggcccattccaaggccccttgattgcaatagttcctcccacgaatgcaatgtctaacacaataagaaagtacaagtcctcctcagaggaatcctcatccatcctcacgaagacgtccaaaccctcttcgttatctgatgactccgaattaaatagagatccctcatcactacacgaagatggacaacgac

SEQ ID NO: 53733 - DNA, 616 bp, Zea Mays
agatatttgaaactcaaaagagatttgatgagtaaaattgacattttagataaaaatgtgaagttatgggcattttggatgctgaaagaattgaaaaactcaatttggagtggaatttaaaaaaaattattgaagaagggtgcaaaaaaaatcaaactgcgagagagaaattcatcaatgagggtgatgagaatactaaattctttcaccttattgcgaaaggtcggaaacgacgtgttaaaattcctttttgattcttgacggtgcctctgtgaatgattctgaaagtatcaataagattgcgtcttcttattttaaagacctttttggcccttatgttcattctagtattaatgtttctaatctcaatatgaatcagttgtctgacactgacagaacacttttaacggctccttttaccattaacgaaattaaaaaagtggtgtttgagatgaagcataatagtgctcctggtccggatggttttcctgtggaattttttcaaaatttttgggagctgattcaaatggatgtttagaacttattcaaggacttttatgatggaaatcttgatattgaaagattgaattatgggatggttactcttttatcaaaa

SEQ ID NO: 53734 - DNA, 701 bp, Zea Mays
atggctcacggctaggatctaggagcctagaaggagtcatgtgttgtgcatagcgatggagcaaatatcttctagtttggtgggtcggaccaaggtacgacacaagctaaactatgccatatcggtccctctgcccctacgtgtagctaaagtcataggaacccttgtatccaaagaactagctatagttatcaaggagctagatattgtcgagctatagtctgcctcccatggagtactcatatagttcaagtttgtgaagaatatgatggaccaaagtgtcaataatatgagtaacgcaaggtacatcgatagttaagattgctgggacttgacacatgggctcgagcactcaagggcaggtgagacaaactatgcacgtcaaaacaaatgacaggggagctcaaacgtcttatcaagcatgtctcgtctagaagctagatggggtatttatagggtaaccaagggtctagagcctaaagtaaatacatacccttgattacctactacattcctggaatatactatacaacgagataattatgaaacaatgctaccatacgcctaattacatcatacattttacccatgggggagaatgataggtggactcgctcgggccaattggatgtggcctagcttgccacaacttatctgcacttggcccctcagctctaagtcctagacgctttcgctctaag

SEQ ID NO: 53735 - DNA, 498 bp, Zea Mays
gtacgctccactgctagggttacacgtgacagagaagaagccgaagctgctgaaaccgctccaatttccgaagtgatgaaacggtcggggctggtagcgccagaggatgtttctaacgaaggtgcacctgtcgctgaagctgagcaggttggtgctaaggaaggtgaatctgaagatgattatagtgccgtgccatctaaacccagccacctggagtttgggaggtccactgttatcgaagatgatatgcctaagttgatgaagttaggctatttcagtgaggcgaaaaagggactaattcgctttggcggagaggaaattactccaaagccagaaaaggatgaggtggtagtttttaaaagcttctttaaagcaggattaagattccctttgaatgagatgattgcggatgttttgggggagtttgggatttatcttcatcaactaactcccaacgccatcgttagacttagcgtttacatctgggctctccgaagc

SEQ ID NO: 53736 - DNA, 768 bp, Zea Mays
gcatgttgcctcgatagcttcaagccactcatcatcaggttcactaaaccgatttctgtatctatatgtatatttgaagttcactaagccaccttttcccagcactctggcttgatccgtcctcagtctccttcagcatttcccattcattgatgaggggccagactctaaaagctatatgctcctggaccaattctataatgcaaatgtaactacacacaacattaaatgccaccaatcaagcttgggccttctctgtctccacaatagctagtctttttatgccgaagcgagatatgataggccactgaattataccattgatgtcctccctcttgtcaaaattatttttatgtagaaccattgcttcatccacgagcctggccacttttctgaaaagtttggataggacacctgtcatctagccagtataagaaggtataacaaccaaaattattatggtactgctcttttccagtagcctttgtctgaaaatgaagctcacagatgttgcaaaaacaatcagcgtccgactctatgccctgactgctcactggccacttgaaaacctccactctaatcagagcctcgggggtaagctgattaagatatatttcaaaccttttaaggacttccacaaacattttatgaagaggaaacctaggaagtgcaaactcatcactcttgctgcccacgccatcttagcaaaaaccaaaaaaccactgaagctaaaaggatcgcaattgacagtaataaccttcggcttaa

SEQ ID NO: 53737 - DNA, 723 bp, Zea Mays
aggaatcatgtctagagattcatgatcagttagcaaagagctacgagtttttggttttcaactcatcatctcgttcccatgtagcctcttccttagtatggtgacccccacttaaccttacatattatgaccgccttctagttactctatctatagtttccaaggtctcggtcgacctctcaatagaggttaaatcctcttgcacatatacctcctccatcattaattgttccttcagtacccttaaacactttttagttatggcacatggaacattgtgtactgataacagactttgacaattcaagctagtggccacttcatcacgcttcgctagaatcttgtatggtctgatgtatctcggtgctaacttacccatgactccaaacctttaaatgccctaaatgggtgacaccttagatatgcaaaatctcccaccttgaaactcaactctctttgtcttatgtcaacataattccattgttgccactatggtatttttagattctcctaaacaaatctgatgggttcctcggcctcaagttatacatttggtccaaaaacttgtttcgctccatgttggtcctaatgtaatggagttatataattctttccatataacacttaaaaaggcgacatcttaaggctgacatgataattgtagttggtgcaagaatttcgtgtaaagctaccttttgtcccatctggctttgttctgcaagg

SEQ ID NO: 53738 - DNA, 573 bp, Zea Mays
agtactgcagcgtgtgggttcagttgcatacaaattggagctaccagctgagtcttcagtccatactgtattccacgtctccctggtcaagaaggctgtctcgcccatacatcagatcagcagcaccttgcctgattcatcaactacaacacagattcctgtccaggtgctcgacaccagaaccatctcccgtggcggtacatccattccccaggtgcgggtgcgctggtccggttgcgacgacgcgctagcgacatgggaagacctcgacaccattcgccaacagtatcccgatccacagcagcatcgcaagagggagggaatgtcagcaatgctctatcgctgggtcacaacacaaccattgacacgggtccggtgccttctccgcgtttggtgggccgtagagtaaaaaagccgaatgcgctcggtagtctagtccggagtggatagtgtaaacggatgagtattaaccttacgtaggaagtctgtaaggtgagggaaaaaacaaatgctaaactccagttaaaacttcctttctcgcctatcctcttcttcatcctcgatctgttcttc

SEQ ID NO: 53739 - DNA, 689 bp, Zea Mays
tctattttaaaatattagatttgtcgtaatagctcaggtacctgttttcatccccatttagtgtggctcgtgcccgacccgtgtataatttcgggtgagcatagatgtctccttttggtggtggtgggggtagctgtctggtgggggtataacatgtggtggtggaggggtggtaattctggttgagtgtggtagtgcagttgatattgtgggtattggagtggtaattcttgataatgttgatggtaccgagattgatatgtatgggttatggcttttggtgcctgctctggttgtatcgttgccttctttccttagcctccattctttctttggcctctattgtagtgtgacagtcgttggtggcatgactggcatcttcgccgtgaaaaacacaatgtggtttgcggtctcgcgggggagggggacgcgatcgcaccctctacgcctacctgtacataccctcggctagcttgatgttgctggttgggtacgcgatgggggtcttcatgttgctgctgttgttgttgctattgctttagtaatgttatgtactttctcaaggaacttttgccgttgttgtcctcgagactaggatttgatatttgtagtgtgcaaagactccgtgagcttgcgctgtgtctcgagcttgcgttaatgcatgtcctcataccttgtgtatgttcaaa

SEQ ID NO: 53740 - DNA, 395 bp, Zea Mays
gagaaaacagagctccaagttgatctgtcagatgagctcttcactgagtcaggcgcactgttcaccggttttcagaaaaatcgcgccgagcataaggatctagacctcgccggcgataaggatgccacggcggtcgggatgggctggtggctgcggtgaatatcctctgcgtcgtggcagtaagtcactaaggtgataggctccggttaaacggcgaccaccgtgctgtcaccggaatccgccgtgcggtatgctcgccagcgcgatccagggatccgcggtcctcatccggttacgaccggtagcctataaattgagtgcgggcgctgcttcttcaccatattccgcacctcagcgactaagcgcttgactcaagctcaccaaaaaacccatgt

SEQ ID NO: 53741 - DNA, 824 bp, Zea Mays
gaagcctcaattttgcatttatttctacatttctttcgaatagtctttagacatctctcgattggatagcaccaacgtccctgcacgccccccccattcgtgcctcatagggtagatgaagaatcaaatgctgcattggattgaagaagccgggtggaaatatcttctcaagcttacacagtaacacgtgtgccaatctttccaagtctgcaaccacggtccgagataactcttttgcacaaagctgacggaagaaatagctcaactctgaagcgctagccagacatgctcagggacatagcctcaaaccatcgcaggaagaatccattcaatccatatgtggaagtcatgactcttcatccctaagactcgcatagtagataagttcacccccctacttaggttagctgcatacccatcagtgaacatcaacatcttgatccattgaagtgcttccttcctctaggccctgcttaggacgaaatcagccttaggccttctccacgtctttccgccacttggcggcttcatctctaggtgtggtctatgacataacgctgccagatctactcttgccttcatgttatcctttgacttatcaggaatgtccataattgttgcccacagtgcctcggcaacattcttttcagtgtgcatcacgtcaatgttgtgtggaaggagcaggtcatcataataggggagccaagtcaagccagacttatgtgtcaacatatgttgctcaccatatcccacaaaaccaccttctatattggccacgagcccatctatctattgacgaatttcggcaccagtcatcgttgcag

SEQ ID NO: 53742 - DNA, 272 bp, Zea Mays
gccaaatggctcggggtccattttgcttacaatactcacaataaataccaagagtagaattagtgacacacggtatactcactagaaacatgttcaatttaaatagaaagctagtctgtgctactatagacaatttggtaaggagagttgagagacacatgtatgtactgttgtaatgagcagagccagtgtcattggttttgccttagcattggctacaaagttaatatcttcccctcctcaacccttataggtttatcccctagcttgca

SEQ ID NO: 53743 - DNA, 376 bp, Zea Mays
ttgcatccacgtcggattccaggattgggttgcaccaaatttgacgcccaaaatgcatatagactctgctttcgacgttttttatatgcaaggaaagatgagataaggttgtctccagcggagcgtgcatatgggttttacattgtatattgcactgtttacagagtggagtttgaaatagtgagtgatagggggtgggataggaagactgctagagataacataagctttccaacccagctggtcttacgtccaaattccttcaaaatcaataggaatcatcgaaacaagtcagcgtccaaaatttggtctggtgccacgtcaccaccttttgacccgttgggttatgtatcgtgttggagtccatcgaggacac

SEQ ID NO: 53744 - DNA, 761 bp, Zea Mays
tgcggcggacgcctcttcgcaaggcgcatcatcctcagacgcaacatgcttctacttaaggtgaggtttagaagagtgttttcccgtcattcctttcaaattttttgtctccaaatcctagcttcgaatggggtcggtcaagaggtcgtatgttggctcgtcatggctagatcagtggccccctctctcctcagcctcacgggatagatgtggagtctttcgtgctgcgccaagggctgccgaggtcaaggtggagatgctccggtcttagcttgtcaagtctaatgctcgtacgatgggtaagacgctttcctcttgaacccttggtgttgtcctagccctgattgctttttcttctaatagcctagaagattgagctcagggagctgcaatgccattagggtcgggctctggattttgtcggggcgagtggctcttctctagtggagcgcataaacgacgtcccacatcgtgttcgaggcgctgttctaggtgcttgctggggttccatcgcggcgcagctcgtcggggaactcaggatgagctgcgatcttcaaggggtcgttggtcttcccttggccttacgagacaaaggcctgatggagatgctagagcgttatgacgatgtggcgagtcgtaatgttcataggttgtctatggataatgtcgttcgcaacactcctgatcctgctttgtaaacacaccccgtcgtgaccttttttgaaataataggaaagttggcttatcattttccatttttt

SEQ ID NO: 53745 - DNA, 869 bp, Zea Mays
gaagaaggccggtgcattggttagaccaaaagacatcacagtgaactcatacaaccatacttggtaatgaatgccgtcttcggaatatctgaaggttggatcctgagctgatgataacctaacctcagatctatcttggagaacacattggctcctctcaactggtcgaacaagtcttctattctgggcaaggggtacttgttcttgatggtgacctcattcagagctcgataatcgatacacatccttctggtgccatctttcttttccacaaataggacaggggcggcccaaggcgaggtgcttggccggatgtaacctttctctgacagctcatcaatttgctttttgagttcaaccaactctggtccggatactctgtaagctctcttaaagatgggggcggtgcgaggaagaagctctatggcaaattcaactttccgctctggtggcatacctggtaagtcctttggaagcacatctggaaactcagacacaaccttgatactctcaattgggtctgcttcactgctatcaacagccatctgataacaacttcctttcttcggctcaggcgggactaattcggtcaccacttcctctcctagtagggacaccaacttgattgtcctcttttcacaactgataattgcctgatacttatctagccaattcatccctaggatgacatctattctctgagtacccattactatgagattagcgggaaacgctatcccccttatttccacacttacattcaaacaaatgctatcggctcgaattctaccaccggctgagtcaatttgaatgggggttgacatggtagttattggaagattatgtgcttttacccatgatgcagtaat

SEQ ID NO: 53746 - DNA, 286 bp, Zea Mays
actatggtcttcggaacaccatgcagactaagaatacgagcaatgtataattgggcatagaccataaccggggaatctgtcttgaccggcagaaagtgagcaatctttgtaagtcgatcaacaatcacccagatagagtcgtacccttttgcggtcctgggcaatcccataataaagtccatacttatgtcttcccatttccatgtcggtattggtagcgactgtaatggaccagcagctttcaaatgtatggccttgacacgcctgcaggtgtcacatctagcca

SEQ ID NO: 53747 - DNA, 383 bp, Zea Mays
tgaaacgcgccatttctcgttctactccagtggatgagttaccagtatcattggaagagttgcaggtacctgaacgtgatcttcagcgtcgcattgtttagctcgatgacactatccgacctcaagtgcttatcaaatggcctgacatgcatacttcattggcgacttgggaggatcttgaagccttacaacaacgttttccttgtactgttgctcggagacaaccgggttccaatcagggagacgttagcaccgcacctgtggaactgttgtggatcaggcgaaaagaaatgaccaggccgcaaggcatcacattgcaagagccaggaagcccaataccaaatttgtcggtccaaagtggttaaggcttgtgaagagtgcct

SEQ ID NO: 53748 - DNA, 510 bp, Zea Mays
cctatgaaggggaaggctaagcattagacaaatgtagtctagaatcaatttataggaataacatggaaccaaaccgatcatacacgctaaaaatccacgaggtacaactctgcaagcatgtcaactcaccaaattgatgaaaaggaacatgcgatgagtgtcatcttgcagaatcctccaatcgtcgcctagctagcaaggaaagagccagacattaaaacaagtagctcaactgtaattataaatggctcgctcaaatccaaagtgcacacaacaacaacaacataagcatcaattgaaagcaatctagacatcgacatatctttatttgggcccatctttatttgaccacgaagctaaagatagcagaagggaaaaaacagatgggacataatcaacaaaaaaaatacgtggcaaacaatactgtagataaaagccactcatgattcatagcacacatccatggcaaaacaaaactaatgtccattcgtccacagcaggtcctaaccc

SEQ ID NO: 53749 - DNA, 304 bp, Zea Mays
tgcaataggttagggaagtgccctgtctcgaacattgatgtataatgttcagtgacatgccataaccccacgtagtggtcctgctattcatcgttggcttcttcgttgatgttgtcctcctcctcttcttcttcttcatcgtcgtcaccagagtcgcccgggttgtcgcctccgggagcagggcttggactgctggtgctggcggtgcagaagatgacgatctagctacgaaggctagtgattctgccaacggggtgggcgtaggtagaaactcctccgaactgtccttcagaataactctttt

SEQ ID NO: 53750 - DNA, 319 bp, Zea Mays
ggggtagggggtcacggaggtggagtcaatttggccggtggacgcttgggatggccggtccacggtgggtggcgggctccacggcggtgggatcgccagcgaggccaacaggtgtaataggagaggggaaaaaggtgtgtcgtgctcgtggtgaagtggcggagctcaagagctacactaatttgactagaacccaacagagagaggagagcggagctcaccgaagatgagagggacgacggcgtcgagctcgattgggtccgagggaggaagatggagtggctaaggcctggtgcggtgaagtaggggctcagggccg

SEQ ID NO: 53751 - DNA, 693 bp, Zea Mays
cattttttcacaaaaccacgaaacataataagaagtttttccatgattatgtcatagtcatcactcttcaacctggaaaactaatcggccttcacattcacagatcttctaaagcccaccgcataaacataagggaaatttgagttttcaaccacctcatcaattctttgttccttttaggttttagactacaaggagcatgtggcttcttctccctttctcgtagctccagagttggtcgactacaaattaaggctaagtcttttctagccttagggttgacttttgttttgtcagtgatattcaagaaagtactaagacgcttgggtggttccgtcgtcacaatcgtgacttttctaaaagcatttctctagaacctaaacaggtgatcttgaggaaaaaccatctatggcaattgaagtaagagatctttccactaaacttaagctggaagcaaccaatatcctcatcacatatcggacatgtcaaaattccatgacaactctatctagaaaagataccataatccgaaaaatcgtgaatcgaccacaatatgcagctcttaggttgaatttatattccttataacaatcatgcacctcaactccttcccacaaaagtttcaaatcttcaaccagggtctcatcatcatattgatctttgttctaagatgatccgaagcaggtattaaaa

SEQ ID NO: 53752 - DNA, 1229 bp, Zea Mays
attggccctgtaccggttatcagattttcggtgttgtgaaatttccctcgctttatccgataacctgatgcatcttatgccaaattgttagctctgtgattctcaactctagagatgtgccgaatgctgaatttgtcaaaagaatgaattatgccccaacattcttcaaggtaactgtttaaagtaccatcaaaacattgatactcttctaatacctgttggacaactagctgagaatcaccaaatgccttcacatgttttactcccatataatttaaaagtgccaagccgaacaaaagggcctcatattcggcttgattgttagtgtaataagttttcaatcggctagagaagtcgaaggagacattacttggtgaaacaagcatgatgacaattccttgtccttcattgcaaaccgatccatcaaaatataaagtccagggagtaacagtgaggtatgatatgtctagtttatgagtatcatcgatccgatgttctacaataaaatctgctacgacctggcctttcatagatttcaatggttcataggccaagtcatattctataagtgcataagcccatttaccaattctaccactcataatcgggttttgcaacatgtatttgatcacatcggtttgaccggaaacggtgcaatgactagacagcaaataacatctacacttggtgcatgcataaaacaagcataagcataacttctcgatgaaagtgtacctcgttttagcatccaccagccactgacttaggtaggctaccacatgctccttttctttggtctcttgcgtcagaatagctccaataagttaatcttcagctgcaatgtataatctgaacggtactcctgcctgtggcgcttttaacatgggagccgaagacaaatactttctaatgagatcaaacgcttccagttgttctgccgcctaggtgaattcaacattatttttaagtcaaaggataagagtgaaggcatcaatcttcccggctaggttagaaataaaccttcataaataatttaccatgtcgaggaacttctacacttcaagcttacaggtcggaggtcccacattccgaatggatttaattcggtcagggtctatctctataccatgttcatgaatggtgaatcctaagaatttaccaggcgatactccaaaagcacatacatgggttcattttcagaccataccaacgcattttatcaaaggctt

SEQ ID NO: 53753 - DNA, 574 bp, Zea Mays
ttgatgacagctgccttcggcacccgtgaaaaacgaaggtttaaccgggtgatggatgctatcagctttgaatacccggattacgatagacttgacgaaggggttggggcgaaaagaaaaagggttgtgagtattttgaacaggtaggccatatggtccgtcaaggaagatcagagggttgtcaagaagcaaaaagttctagcggagccaaaggattcggttcccaagaaacgaaagcttgttagaatatcacctacagagacaaaggtacacaatgtgtcagaaaaaactgcaggcccttcttcgccttcctctgttgatgtttcagaaattctgaaggtaatgactgaacccttcccgttcgcaatgctaagtcctctagggtcagatctgactagcctattgcagtcaaaggagaccgcttcggctaccgggggaaatgtcgggggttagaagaagcggtgaatgatgaacgtaatgcaagccatcgaacagaccccgcccccggcttcggcagaaaagcttattgtgtctgttgatgctgaagatactgctggagccgaagctaataaag

SEQ ID NO: 53754 - DNA, 538 bp, Zea Mays
ataactaactttattaataactataccaagtggcaggggttcctacaccttggtgacaatcattacaaagatccaacttcattacgagttcatcacgacaagcatcaaaacatatgataagcaaactaagactaagatactaaattaagcattattacagactttgactgtgtcgatctatgacttcaaatctatctggttcctacagtcagggcgccgaacggttagggttattaggtagaagtatgctaaacccatatctagtgatttgttgattgtctgcctatctatgcaaattgcatgtagctaaattacatgtggttcaatataagtcataagttgaaaataaagcatggtgatgtagtgctagtgtttatactacattgcgccaatgtttttccagtttatccaatttatattagctgctaatgttttttcttatgcttacttgtagagttcttggtggaagtaatgcataatttgagaagaaaaatggagctacaatgcatgtgtgataagcttatgcaatgtatttttt

SEQ ID NO: 53755 - DNA, 631 bp, Zea Mays
ccactcgtcaatccattaccagagagtgggtgtcgggaacgatatgttccggtcacccactccggtcagaggtacgattccacccctcaaccgtgatccattccgattcgaaaccatggggagaaattcatttgggggttggtctcacggatcgaggatgggttctgcagttccgaatatggatttcccttcgtttgatggatccaacccaaaattgtggaaacgacgatgtgaaacttattttgaattctatgtcgtagagccgaagatgtggattaggctagccatcatgcatttcaagggcccagcagtattttggttacatgctgtagaaaatagattgagggagatgaattgggaagagttttgtttacacttgaatactcgttttggtagagatcagcataatttgttgattaggcagttttaccacatctaccagcaagcatctgtagcagaatacatagaggaatttgatattctcatgcatcatttacttgctcatggaacccaattaacttcatccatgatcactgctagatttgttgatgggctcacagatgagattaaatctatagtagtaattcaaaggccttcagacctagatactgcttgctcccttgctctttta

SEQ ID NO: 53756 - DNA, 827 bp, Zea Mays
cttagctccggggctacatataccatggatcacgcaccccctcgatcattaatcatccatggcatgcaccatcgctaagagccactaccgccgagcgaggggagcaggagagttcctatgggaaagccgccactgacgccccatgcttgcaatgcctctcaaagtctgtggtggggccggtggagttcgcctattggtgttgatgctcatcttggagtcttcaagcagggagaaggagcaaaccatgggtgattgctcgccgtttctctccgaccccgtggatctacgtcttaccgttggcgagagtctacaccgcgtgaaccctggtgagacatcttccctatgatgagccatggcctgagcatcatgtagagcgttacggctcgaggagtagagcaccagagccatggacagccgcacgccaacgagagctccaccatcgactgaagcgcaccgccgcgtggttgggatcaggaggaagaggatgcgccacagccgttgatcatgagataaacgcataggattagattagggttaccggttcgggaccatccgtgcgtgccatcggattgggatcttgcgtgtcggagtctatattgtcattttaaatcctgaccgttgagatatcatttgatggttgggggtttgccgggtcgctcagttcatcgaggtcgttgaatctaatttgagcggctcatatggcatgataccccttcgccgtggagaagttcatatagagcccatgacattttagtaaattaacctaccatcaattttcagtattaagataaataaaataaacctggactttgctgtttatcccctgg

SEQ ID NO: 53757 - DNA, 521 bp, Zea Mays
ggtgcaacatgctcacgcttacatgacttagggtgatcactataccctactaacggagcaatcggcttaagtcggaaacaccttaagtcagtgcgacatgctcacgcttacacgacatagggtgatcactataccctactaacggagcaatcgacttaagtcagaaatgccttaagtcggtgcgacatgctcacgcttacacgacttaggttgatcactataccctactaacagagcaatcgacttaagtcggaaacgccttaagtcggtgcgataagctcacgcttacatgacttagggtgatcacaataccctactaacggagcaattggcttaagtcggaaacactttaagtcagtgcgacatgctcacgcttacacgactcggggtgatcactatactctactaacggagcaatcggcttaagtcggatacgccttaagtcagtgcgacatgctcatgcttacatgatttaggttggttactataccctactaacgaagcagtcaactcaagtcgag

SEQ ID NO: 53758 - DNA, 763 bp, Zea Mays
ctgccttcggctcagggctcaattttctcttcttcaggttttcttcatcttcttttaccattctagcggcctgtctgcccacaacactaacaactctttttcttttttgcccttcgacaactttgttcaaacgctcataatcagactattcaaaattcagtgcatccattacccgattcaaccttcgcttcggacgagcgccgaaggctacagttagcaactgatcttctttttcgtataattgcctaaaatctcattgcacataacctcatttgtatccaaccattcttggtagggttctttgaagtgtttcttgaacttgaaatgatagggcagccgaacgagttctttcttctttttctccccttcaagcttcggcatgccccattcccttagtgttggaaatactctgttggctaagtattcctggactagatccctagttccaatatgttcagacacaattctaaactcatacacagcatctgggcatggtgtccctggcgtcatgttgcactgaggcctagtcagctcgaaggttagctccagcgggctctgaactagcttctcctttttctcatcaatcttaacataaaaccattcagatttccaaccggtcggccatttagtacgatagctaaccaccagtttcttcatatccttccaataagcaaaattatagcagccgaagttctcatgcagtccgtcttctctagccttcatctggtagtgaagttcatgtactcggcagaaggcttcggtg

SEQ ID NO: 53759 - DNA, 750 bp, Zea Mays
gtttatggcgtatggtcattcacactcaccctcaatgctaggagaaaaaaatacctaggttgtgagaatttgaaattgagctttgagcacaccaactgccctttccatgtcattctatacgccctcttagcatgcaacgaacatcagttggtttagagcttgtggaagcgaattggtcttcacgaatgccgaccttcgaggtaaatgccattggcgagatagtatccctggttacaatcgtggccattcatcgtgatttcacgtttgatgcttcacccttgagcatgctagtggacaaagatgactagttgagcacgttcacgttgttgtttgatcccgctacctaaaaaagcatactcgatccaatgtaccccttatgaattgtcctctccatccaatagggtagttcctccccttcaagtacatgcaatctatcataacaggaaatccattttctctcctttagctagaatacgtataaggtcatcaatcatggaacaacgattgtactccaccataaaacatgcaataacacctctacagaatagttcgagacactctaagggctagtttataaacttaaacccccttcagaattggagtaaattgaggaggaaattagtttgtttccccctcaaccacttacaactttgaagggggtttgagtttccaaactataggtggaactttttcccattttgatgtactcgtcgatggatccaacaacgctaccgtacgcaactcttctcc

SEQ ID NO: 53760 - DNA, 385 bp, Zea Mays
tgatcttaaactcctcgaccctttgacctttccaaatttgttttggactactcccatattcataacttaaaaacatcaccaaccataaagttagaaaattaattaattaaaagacatgaccaaccataaggttcaaaaaataattaactaaaaatatgtacacatggattcaattggtgtgcttgcgctcttgcagctagccattacaatatatctaagtcattctcgttaggtgttgaggtgcatgccgctgtagaggatggagacggaggggttggtggcgtgcacgagtgagggtgaggccaatgtctaacgctacctgcggtggaagtggaaggcaaacaagttgattgagtgagttcaaaacaagaatcccacgatcggc

SEQ ID NO: 53761 - DNA, 580 bp, Zea Mays
tgctacatgatctttgggggtgataccatcaaactttcttcgacaaggcgtaagcaagagcgtcgggaagttttctcagtcaaggtggagaccccaatctacctagattggtctggacgcgccatcaccttcgaccgagacgaccacctggactatatcccgaactccggaagacacccacttgttgtcgaccccattgtcggcaacacacgcctcacgaaggtactcatggatggaggcagcagcctcaatatcatccatgtagacaccttggaactcatggggtcgggcgagcctagatccgacctgacgcctcactattccacgagatcaccccggcaagaaggtgcatcccctcgggcagatcgacctgctcttctgcttcaggacccccgccaactttcggaaggaaatccttacgttcgaagtggtgggagtttgaggcacctatcacgacgtgctcgtgcgaccatgctaagccaagttcatggtcatcccgaactatacgtacctaaagctgaagatgtcggggccagcaggcgtgatcatcattggcccaacataccgacacgcctacgag

SEQ ID NO: 53762 - DNA, 1676 bp, Zea Mays
aggggcccgatccatgttctgttggtctgcagagtctcttttggatttcgatgtgactcgactttcctttggtggagctcctctgaatgggcatatttttcaaagagttgatacaattcctgaaggttggtcggaggatcccttgtgcagtgactgtataggacacctgcccgaaggccactaactgtataatggttggctatctagtcatcaaccgaggacaactatgatttcaacaggaggaactttttgtagtattcgtgaaggctttccttctcttattgcttgcaaagtgagagttcagctagtgcatttgtttccagtatgtaaccttggaacattagcaggattttgtcgcagagtgttttcgaggagtcaattgataatggtggtaaccttgagtaccatgttagagctaggcccttgagggatatgatgaatacttggatatggtggcgtcgtcccccctgatgatgtgattttgacctggtagctcatgatgtagtaggttggattctgtgttaccgttgtactttggataagtgtctgttatgtaactttgtggctaggggaggcttggagctgcggagcgagaggacttcacttgtcaaggtagttgagcccttggatggtagctggtgcgaaatggtgtaagttttggttggccacgccggccgactagtggtggcggggggtcttcgtggtgcatgtcaacagtttcttgctccatatccctagccttttgttcctcatctagtatcatttgtctgactctagccttaatattggttcactacctcttggatgcgagtatctccctttgtttttataggtgattgttttttatgcgaagtactcatagtttgagttggtctttgactgagacgcttatgcgaagtactcatagtttgagttggtctttgactgagatgcccatgactttgtcgtcttctatgatgtcttcggcttccagagggtaaagcttggtgaggggtctcgagggaggtctttagaattgtacgtgcaaacggtgcctttatgggtgagagtgggttttctgttcggggatgtttgttgtttattgctctgtcgttcttgggtgtggcctcaggggcatcattagtgagggttcctttgcatttcttctcggcgagggtcgccttcgtagcatcacccagtgatgtgctggctctgattgtctctttcttgggggccatcgtgggtttgttctttcgtagcacaaacggtggacgccaaatgttggttccttcctgacacgtggacaggtgggcccaacacttgagaggcaagaggattatggtgcacaacgaggcagtaggtagggactgtagcgtcttgttatgcgtgtcccatccgtgtacagggtaggggtatttataggtaaccaggaggggcagtgggtccccaagtactgttatgcccccggttacccgctacattcctagaatattccccttaacatggtcattacagtggacggagtacaataatccagacatactacgaaatctaccccgcaatgaggcttacaagtgggcccgaaggactacgaggtagagcctgggtctctacgtaatctgtcgtggcctccgcttgtgtgtcacacccttgattccacgaagtcacatcctagccttcgtgggactaggagttcg

SEQ ID NO: 53763 - DNA, 540 bp, Zea Mays
gagattggaccctcattgaggatggccggtgactagatggttgtaggaagacatcttgtgcgaaaattgtagaaaggaaagtaacaagcttcacacccaacaacataaaggaaaggaacaagcttcacatccaaccgcataagatcgatctctatgggaactcaaggcatctgcaactagattcgtctcaacaaggtgataatgaatctctaagtcataattcttgatgagttcaaaccaacgacgctgtctaatgtttaggtccttctggataaagatatactttaggattttgtggtctatatagatctggcatttggtcctcattacatagtgtctccaaatcttaagggcatgcccagctgtgacaagttctaggtcatgcgtggggcagttcaactcgtgcttcttcaactggcgggacgcttaggctatgacatgtccctcctgcatgaggacacatcccaacccttgacgagatgcaacacaatatacatcaaaacctttctacagatccggcatgactagcactggggtgat

SEQ ID NO: 53764 - DNA, 497 bp, Zea Mays
cttaccttggccatgtcatatctcaacagggagttgccaccgacccaaccaaagtggaggtcgtccgatcatggccggttccagccaactgcaaagagttgcggggcttcctaggacttgccggttactaccagaaattcgtaaggaattttggagtcatcgctaaacctctgaccaacctcttaaagaaaggtactctattcgtttggacctcggaacatgacacaacatttcagacgctcaagacttccctgtcttctgcgccagtgttggcattgcccgacttcagcaagccgttcgcattagaaactaacgcagcaggctcgggcattggtgcagtgctgatacaagatggtcacccactggcatttgtaagcaaggccctcagtcccaaaaactgtggcttgtcaacatatgaaaaagaatatcttgccatactgttggcggtggagcagtggcgccagtatctgcagcactctgagttcagcatatacact

SEQ ID NO: 53765 - DNA, 836 bp, Zea Mays
tgaaagcagtcaggcaagcctgagatttttctgtgttcacaatagttggcctctttattccaaagcagaatcaaatatgccactggattacatccctaatatcacttcttttatctaagtcattcttcacgcaaaaccaatgcttcatccatgagcccgaccattttcccgaaaagttggcaagggttgcctagcatctgatcggtatgcaaaggtataacaaccaaagttattgtgatactgctattttctagtagccttcgtatgataggacaactcatgaatattacaaaagcaatcagcatctggttttattccttggctccttattgcccagatgaagactccaactctaatcaaagcttcaggagtcagttgatgaagaaatatttcaaacttatttgggacttcaaccaacatcttgtgcaggggaagcatagtccagctttcataaagcttcggaaaacaaccagttcatctttctcaggaagaggaacagtgttttctcctccggctctcactatagatacatcatgaaaatacctacccttcatggcctcaatatgccctttcttcacggtagatttcccgaagttcacgtgactcagtctccacgaccgatattcggcatcttcattaccacttttaacatcaaaatcttcgctgtcttcagaatcatcagataacccgaccagaatctcatatgttattgtttcagtattggacctatccatagctttataaaacccagccagagcaagatcctcactgttcttacttttagccatctcagtaaggtagctcaatagcatgttaaaatattttatgatgacaat

SEQ ID NO: 53766 - DNA, 368 bp, Zea Mays
ttaaatctcaattataaatcctcggacgcgatttctcacctaacgagcggagatggaattattttgcaccaaaaactttagttgtcgagttctgcttaatttgtccgggacaagaatcacaagatcgagttgagatttccaaacttgtattcgtttcgtcgattaactttgaaccggcataagatccgacattgacgaaaaattattaaagtctgatcttcctaaaaaattgagatagcccagattgataaagacgaaaacgatgtcgaattcaggataagcagaaacaattaagaaatagagactattattatcaccgacaacccgtgcttaaatccatactcattgtcgcacgagaaataaacacc

SEQ ID NO: 53767 - DNA, 658 bp, Zea Mays
caaatttctgttctatcgtcatctcccaatcaagatatccctcaacatcataatgacccgaaaaagatggtgtagtaaatttaatcttagcataagggtcgtcaggagcacgattgttattaccttgttggcggtgtggcataccttctgtgttttgatgaagacggcgacgtaggcgcaaatctctggtggccgcttcatcatagttaccttctgcatcaaacaccgcatcatcgggacgacgtggacgaggaggtggtggtggcggtgcttgttgttgcgtctccaacatagcaagtctgtcgacgatctcggacaatcgtcgatccagcctctcgtaagtcttgccaaggtccatgtcaatgaaggcatcatgcactgacttgtggaccgtctcctccatttgctccttcaggagcttgttgtttgcctcaagatcttggcggctaacacattcattgaagtctgtagggatccttgcttcttcttcgtcgcctgccatcgaaacacaaaaacaggaaacaaacggtgaaggttatccctaataatttcactacacgctcctctcaggtggaacacaggaacacgctctattgtatcttaccaagctcttacaagtgtctgacgaaatacaaagcaaaggatggtacaatcggag

SEQ ID NO: 53768 - DNA, 332 bp, Zea Mays
gtgaaagaaaagtagaacaatcagtttgtttacgtgcacaagtgctgaaagtttcataaagttgttcaaccagtttgctattgtcatttggtgcaaaattttggttgggtctgatcgcaacagtttcattccaatcatactccttgtttgcatcaaatctgaaatttccttgcgcgtgtgttttatctacttacatcactcgtatcttgtggtcaacactaggtatggaacttcttgtcggattgttatttaactttacatcaactagaattcagattgcattctttgtttattattccccaccaagctccacatataagccatcataatcg

SEQ ID NO: 53769 - DNA, 318 bp, Zea Mays
caaccggccacattaaatatgtctggcgccgagccacgatagagaagtcgttcctccttccactcatgacctaggaactcagaccagagccccactcatgacctacgaggtcataggcctgcgacccacttatggcctaccgagtctagttctgagcccctgacaatctacaaggcccacaacacaatgagaacgccaaggctcaggctacgaaggccaggagtcgacgcgacacatgaagagtaatgatgacgcctaagttcctcgccgcccacacgtagtcgaacttaaagagcccgaccagagagctcaaacgac

SEQ ID NO: 53770 - DNA, 295 bp, Zea Mays
gaattagggtttttagggaaatggccatttgaggtatgaaaaccctcccgaaggagccaagaacctgcaaggatacacactagggacaattgaacacattacaccaactggattcgcaagatttgacaagaaattgagagatggacagtggggggtgaattgagtgccacactgcctttcaaaaccgagagcagggatgagagagggaaggagaggggaaaggactgctcaccggagttgaaaggatcacggagagcaccaggtcgccggagagacgccggtgatcggagaacgc

SEQ ID NO: 53771 - DNA, 429 bp, Zea Mays
tgtttgggttcattcacgcctttcattttccatttcactcctatcacttcctattttcgctcctctcactctcgtttcactccaccaagccacactcgtcatgtcttccttggactccattgttaagatgatcgaagacgaggtactcaatatgctacatcaaactataatagatgtggtggtgtcgtttacctttgggtcttcaacaagaggtggggtgaaggacgttgcaacaaagctacatcaatcaggatcatagagcctcgactgatgcaagaatactttaatgacctgtgtgtataccctcccctctactttcgtcgaaggtaccacatgtgagggggattgtttcttcaaaccttggggaggttgggtgagcattccctctatttcacttttagagtcgatgcactcaatcgtagtggtttc

SEQ ID NO: 53772 - DNA, 365 bp, Zea Mays
gattacctcggaccattgtttctgaccgaggagcccaatttgttgctagattttgggaacaattgcaagagtctttgggaaccaagctaatcaggagttcaacttaccacccacagactgatggtcagacggaaagggtaaaccaaatcctggaggatatgctgagagcttgtgcaatcgattgtggcaagaactgggataagcacctctccttggcagagtttgcttataacaatagttatcaatccagcctaaggatggcacctttcgaagctctctatggaagaaggtgcaggacaccactcaattggtctcaacctggagaaagaggagtttttggacctgacttagtgactgaagccgaa

SEQ ID NO: 53773 - DNA, 525 bp, Zea Mays
atagcagctgccataatatctcctttaataatatgccagcacgacttataaaacttcccagtaaaaccatccgggccaggagccctgtttgaaggtagagaaaggactgttttccagacttcatcttccgtgaaagggctgtccagcgaagagagatcatgggaaggaatttggagatgatccaaatcaatagtatgagctcgatcagacgaacaacccagcaacttgtggaaaaaatcacttatagtttcctccttgtcctcatgccttgactttattaaaccatcgtcggataacagattaccaataaaattcttgcccttgcggtatttagcgtggaggtggaagaaggcagtgttagcatccccctcagctaaccaggtaatcctagaacagcttcgagccatagaacgttgcaaggttgaaagggccacaacatgaccatcaagctgcttcaacagccaattttctagcactgacaagggtctgatatcttgagcagactgcagcttgtgcataatttct

SEQ ID NO: 53774 - DNA, 474 bp, Zea Mays
ctagtaatacagacatttctataaacaaaactaaaaagaaatcatacaaggtcggaatggcacgcatgacttattttgatggtggcctatgaggtaaatgcctggcaggtagctcatcctaacccgagaatagaaaatccaacacatgacattagtgttgggtcaagcaatattttgctatcaccatccaaatagacccgcagtgcctaagaatcaggtaagcacaaaaacagtgcctaacacgatttataggtcgtactgatccaggtgcgatgaactgtgggctgggccgagctattgtcggatttttttcggctgtgctttgggtcgtccaacggacatgactcatccgaccatttaggatgtgtttggtttgaggtcaaagtatggtccaatctattttttggaccaagctgccaccaaaaattgttctgatgtttacctcgcctcgcgtgactttcatccaaacaccat

SEQ ID NO: 53775 - DNA, 462 bp, Zea Mays
aatttatgaataatgtaaacttgttatttatgacctccgtctaagattcattatacccaagaggaaataatgcttcagaggacaaaggtctttaacatataacaaatgtgttgccttgctcttgattcacaacaattgagaacaagtgaacaacaccctccacaaccatctctagcggcttctggtgtgtaaaaaatatataaagcttgggattgggtagggggtcacttgagataaacttttctatcccaaggataagaatggggggtgaaatcaatcttatgattgtgctgcctgcttgcttgtttactgtccaaagggcattgacgcagctattgtcccctgtgtcttccccttacgtggtcgtcatgcagtagatatgtggaccatattagcctttgttttcctctgcggtaagcctagtaaagccacaacaatccaattacttatgccttcttgcca

SEQ ID NO: 53776 - DNA, 506 bp, Zea Mays
cacacttgtgggcatagagttattgatgtttcatgggaaaaatccaaatttccccctttttcaattttctatgaattaactgaattatcttgctcccggtgcaaaaaaagaaaaataccaaatggggcccgaaaggcatgaaacttgacatggtgtcataataccatgattgtagccctacaaaaatgttaacccaaggtttcgaggattttggatagaaagtgttcacaagtagcatacatcggagtagaggttcatgaactttgaagcacaacaactcacctccctggcatgttgaaacatttttgttgttttcgtgtgtcctttggcacacttgtgggcatagagttattattgatgtttcacgataaaatccaatttcccccctttttcctattttctatgagttacaacatcgcgtggacaaagtccaaatttcgacatggtcctcttttcttcatccttaggaatgcccgaaacctagctctgaggggcctctgcgggcg

SEQ ID NO: 53777 - DNA, 508 bp, Zea Mays
ttgccctctctgctccgcgctttgacttcatcgacaagctccggcaggcctagctggatcacccgacccttgtcgctctccatggtgagatcacaatgggcatccgactagctccctgggcgctggtgtacgacatggtgcaatttttagggcggttgtacatcccgaccgacttcccgctgctacaagagatcgtgggggccatacatgaggatggacatgaaggcatacaacgaacgctccaccggctgcaccatgacttccattttcctaacatgaagcaagttgtgcaggaacgggtgcgtacatgtgaagtctgccaacgctacaagtccaagcaccagcactcgacgggtctccttctttcgctgccagttccccagggcgtgtggactgatgtcgcgctagactttgtggcggtgcttccacgggtccgtggcaagtcggtaatcctcaccgtggtggataggttcagcaagtactgccatttcattccattggcacaccc

SEQ ID NO: 53778 - DNA, 687 bp, Zea Mays
tcatggactattctgtataaaactatctccaacaaactccatgtccactctctatctcactcatatttcaaactttactctgcaaacaatataatctacaatacaaaacaatactttaaactttaaagggacttttacgcagcttgctagagaagtgtcactccatttacccgtctgcctttttttatataaaaggcagtatgaatggcatcgatagctttgtcaaaagtctctcattcctaatcacaaaaactttcatgtcgttaacctgattgatagctgaatactgttgactgtgggggagatggagaaagcttacaggggaagtaaaaggtaggtagcccgaggctgtgtgacgtttcctttagaaacctccattgctggctccccatcctcttcctgcttcatggtttcacctgctgccttctccttcctcgattgccgcagctgctatgggaataccatctttctacaaatgggtcgtcagcaagtacccaagcatcatctcccctgtgaaggacgaaccagaggagtgccctgatggcatcatctacgacaacctctacctcgacatgaattgcatcatccattgctgcttccacccacaggaccagctaacgcatgcagacatagatgtatccacacacctcaatccatgcgaatctggacggtataaatgtatgtgtt

SEQ ID NO: 53779 - DNA, 625 bp, Zea Mays
tgaaagactgagggagtaattaaatgaaagagcgggcaagatagattctactacttgaatgcatactacaagggagtagaagagggaggggacaagatgggaggacacgttattgcgcagtactgcagtccctagctacctgcattgcattcatggagaacttgaatgcattcattctcttgaatttcttcttcaaacctctttcctttttactgtggacagaaccgtttcaatgtttgtctgcatagtacggcgatggtggtgagagagagagagagtgggggccggggaatgacacactcatatatgccctgtaacacaacccttgttgtgcccttgtagactgctgattaggcaccacatcataaggttatgatgagagggagagggaagaactaactaactatatatatacatcttccttctaagtacttcttgttctttttttctccaacgtataccatacttagtactagataggcaggagagagatcgatcgctagaccgagaattagtttcagtctaatttatctgagcgtgcatatgttcagtgtgtgtagggcagcgctattcgctaccctagttaaagcttcaccgagtcgtaaatctgaagttgcaaactttt

SEQ ID NO: 53780 - DNA, 475 bp, Zea Mays
cttggtgctttgcatatatgcgatatgtctagtagattggagctactttttctttagttgtagcatggattatggtggatgaggtagttgtcgatatagtcacacaacttgtttggcttcaccggctgtaatcaccatcgaagcataggatcagtttgttgtccctgctgatcactcacacaacttgcctctacagacagtatcaccaccgagactaataatgcatgtatctttcaggttgggaaagtcaacagatccctattaggtgtattgttatagttctacctcgtatgatagtcaatataattgactgtaaaaatagtcgtgtttggaatatcttgaaaatgacttgatttgattagtccgacagatttttataccggtttcattgatatgatcaaaaaattccaagagtttgcatacaatgtcatttgcatgcaacacatatgttgtctagacaacccctttttatacc

SEQ ID NO: 53781 - DNA, 464 bp, Zea Mays
ttcttatagatgtggttagaagctgaaaaaagccaaaacaaatgaggccttcgcgtctgcccaatcgccggctccgcaacacccgccaacaataaccaccatgggtggaggaccctatattgctcggtcttgctcaagcaataacttgattcaacccaataaaatactaatagtagaaatataaatctctatcccacaatctattgttcctagccgactaggactacctcctcttagttgcatacaggtcttatgggctatgcccaatttcactgggcaacctgtcgtgctggtaggcttgggcatggtatagaactctgtacagtttgggctcgcgagtctctgaaggtgatgggctatcagctggtccgagcttgaggttgaagagaaatacagagacgagagatgtggtatacatacaaagcatgtcatgtcacctacacgtggctccacgccgtcttttt

SEQ ID NO: 53782 - DNA, 451 bp, Zea Mays
gcgggatgctaattactccgtgaagggctcaggcccggtggtgatttttgaggaggtgggtcgagctgaggcgggacgaacgccgtggcacgtatcgtgacactggcggaagctccctccaggctttccgtgagggggaaatggtttcccgttgtgttggctatgaggcactcctgttgtggttgcaactcgcctcactgggcgaggaggcgagcccgtcctctgatcctaaccggaggatgtccagggatgagtcccagacagggtccaacacccctatgacctcggtacgagcgggtcgcggtgcgctttgcggcccacattcctcttgagggggcccgagccggaggtcaccgaaacctctgacaatgtttggtaggccactcgtcgaaggagctggggcttccggggccttgatcattgccccttccttgttgacgacaaaatcaag

SEQ ID NO: 53783 - DNA, 582 bp, Zea Mays
ggactctggcaaacttcaattggtcggctccgagagcaataggaagttataaacaagctacaataggaagcaatcggggagttactgacccgaggagtgctggccacggaggagttcttcacgacagtgcgaagagtagggcggaagggttttgtggattgtgggagttcttctggtgaaattgagtcgattgctcaagtgcttgtgtgcgtgatgtggtgaagaagcaggatccaagctcaatttatagaccgatggccggaattggatgagaatcgcggagctgtaaccgcgctggcaagcttacccgcgcgggcagagccacggcgatggttcggtgaccgccgattaaccaggcggtgccaccgcagcgttttaatgccacgtcgtggatgatctttaccgtggccacagacccatccccaaccgcggtggcgttcttatcaccggtgagatattttctgaagtccgatgaacagtgcgccagattcagttaaaatttgcctaacagcccatcttcggatcaaattatctccaaattcctcatggcaccaagacttaatacctgtagcaaagttgttc

SEQ ID NO: 53784 - DNA, 361 bp, Zea Mays
gaaattagccgtgagaggtactggtagtagctagagtgtgctgcaaaaagttggggtcaatttgagcttgtttgactggtttatgcatttcaccgaacacttggtgtgcgaggttttgaataggtggtggaaaggttgttttagggtttgaaacctcccaaagggagagggaaacctataggaaagctttaatatacatccagggacactcacattcacttggattcacaagatttcacaggatttggaattgacctcaaaaggtgggaaggaatttgaaagggaaatagggttaaccttttcctataattaattttggtggttgatcgtcaacacaaacacatggactaactagtttgtc

SEQ ID NO: 53785 - DNA, 769 bp, Zea Mays
ttgtgatcggtgaaaatgtcacaagcctcgccataaaggtaatgcctccacgactttagagcaaaaaccaccgtggccaattccagatcatgagttggataattcccctcatgcttcctcaactgccttgagccataagcaatcactctgccttcctgcatcagcacacagccaagaccaatacgcgaagcatccatataaaccgtgaaacgcttaccactctcaggcaaagctaggataggggcgtccaccaacttgctcttcaatgaccgataactgacctcacaatcgccggaccagacgaagggaacacccttctccaggagcctagtcaaaggcttagcaatgctggaaaaatttggtacgaagcgccgataatacccagcaagccccaagaaacttcggatttcagagacactagagggtctcttccactccaccacagccgcaacatttttaggatcaaccgcaataccctgctgattaatcacgtgccccaggaaagccacttcggatagccaaaaggcacacttcttcaacttgccatagaattgattcttccttaggcacccagaacgagacggagatgctgctcatgctcggcctcggtctttgaataaatcagaatatcatctaggaacacgaccacaaagtcgtccaggaattcatgcaacatcctattcattgcttccataaaggcagcaggggcattagttaagccaaaagacatgactatgaactcataatgcccatacctagtgtagaaggc

SEQ ID NO: 53786 - DNA, 670 bp, Zea Mays
caggtgttcattacataaattaaaagtgctgccaagatgagaatccttctccccctttttggcaactagcaccaaaaaggagagaaccaccagccataaatcaccactgaggaggatgatgcggaccaaagaattgatgcgccaggtgagttgcaaagtgttcttccctagactgagctgggggaggatagctgcccgaaggatcctagggcggaggatgagaagaggattgacccggatccccctagtggggaggcggggtaaactgcttacgatcatcaaagtattcttcatcttcttcttcatcttctggagacatgaaagacaccccatatgcttgctggtgccactcattgatttccggaggaggaggatgaagaggcacatcaggtgaatggggagcaaatggcatacccatagaggaagcttgacgacaaagattgtcgtcagtctcccgctgccgccgagctagctcatgcacatctgaagatatatttctgcacatggaaaacaatgctgcaataccatgggccaaacgagcacccatcccgcgaccacgaccacgtggtgtgggagatccgcgaccaggagatggatgcgagggtccggcagcagcaggttcacgagagttggagggcgcattcctcagacgccctgctggattgtttgg

SEQ ID NO: 53787 - DNA, 1273 bp, Zea Mays
cccctaatgggctaggctttaggtccataacacacacacaagtagtctaacaccgtccataatcaaaactttagccacaacagatgctgagactggaccgaaagtccgagaacgaggagggaagaccattagtgaaaatgttgacaaactgcgggctcgttgggacagatgaacacaaacatccccgatagccacgcgttgaaggacgaattaaagatcaatctcaacattctttgtgcattggtcctagatggggttgacagagaggtaaacgacgctgatgttgacaagcatactcgtggagagagggttgtgaagatcctggaggagctggcatagccaactcacctcagccaccccattagcaatagtccagcctcatcaatagagcgggagaccacgagctgacgcttggaggaccaatagatgaagttgtctccaaggaacattgcatagccggagtgtggtaggaagggaatgagacatatcgagtgaatgtccgaaggtgatcatagcattcgttaaggcctcgaataaggttgaggacaagcgtgccatcaaaaatgacctccctaaggtcacaaagggagttccccatgccctttatctggcggcagtacttggtgacagagaggtctttctggaggaaggtcttgaaggcgacgttgaggtggagagcatgaacctcgcggttgtcgaggaactactacttgatggcaacctaggcttggcgggaagtaccaccacacttgtgaatgatgtcctggagctcaatagtgaccatctcgaggatctacgagaggaccacactatccatccattgtcaggaggggatagtgagggacaccgtgttggtggggacgtggtcatcaaggacttagcgctgtagcgtgatgaggatgaggttgtgctagcaggtgtaggtggaggaagccaggttaaggaggactgggacgagggagtggatgttctaaacacctgtcgcttcgtacaccgaaggggagtcgaccattgagtactccagggggatcaaggcagggagagttaattaaatggcgctcaacctcgacaagttgctgggcgtgagcatttgctgtggtgtgtctgtgctcttaggcgagggttgtgacccgttcttgctcccgggtagttgccacagcggccttaacattcgtgagggccgcgaacatgactgagggctgcatccatggtggagtgggtagttgcgacatcggaatggggaggagcagttgacggaggcgcataaggcgag

SEQ ID NO: 53788 - DNA, 485 bp, Zea Mays
cttgcacctaaggttgaggtgggggtggctgctgctgcacctgctgcatcgctgctaaggtctgaccaattgctcggactacttgggtctgcatcaggaacatctgctcaatggtcatcggggctggcggtggcaactgctgctgttgagctacctcttcttagggtgcctgctgttctagctgagcacgccttgcacctctgtgcctgttctcagacatcagtggaaagcacacgcacatcagatctgactctgcagtcttttagcataagaaaagatttagaaatgttcatggcactaaacaaatgagcatcttcactgtcagcttcttagataaagaggaaagtggaaataaatggattaccgaaataaataactgactttattaataactacaccaagttgcagaggatacccacaccttgatgacaatcattacaaagatccaacttacgataaccaaactaactctaactaatactgac

SEQ ID NO: 53789 - DNA, 933 bp, Zea Mays
gtcgcatcgccacccatcaggccgctacggccgagctccttctcccctctcactctgccttgggtgtctcaaggtagttgcaacgcctctcacatggcgcaagaggccgtcgaggtcgagctgcttcacatgtagctctctagagccaacgatcctgtcattagtaaggcagttgctctttgacctttccctggcttccttgtgtattttctcaccttgtttgtttctcctagcagccttagggcccgagctagagaagctgcaccatcgcctaggttagcttctggactacatcgaggcccacgtcacttccttggtcgagcgcctaaacaatgccccgtgccgcttacgggacatcaccaatttcggggttcgtcggggagccgtggtggcgctgattatgggggagtcgtgctttaccgcctctaggacatcgtgggtcatccttcatcccttgtggatgaagggttggaagacatgctagaaggttaggaccaggtggctagtagtttcgcgcttagggtgtcagctcatgacatcgtgtgtggcacgtgttgattgcaatgtatcgtgcctcagtgctgcttccctaaagtaataaagtaaacttcgttccttggcttttcatgtcataaggcccttgagtctcgcccccttttctatgtgagatttttcgtgtaccttccctctttaaaagtaagagaggggagtgtgagcgaccttgctcgcggacctccttattagtcgatgtctcctttcgcccatggattggggcagacttcctaggggaattgttcgatgaaatggtatgaccaacccgcccttatcttggggtctcctcttatccctcttctagttaatcctcggtatgctccttagggtggtggtcgcttattccgagctgcgaaggtgtcatggccccatgtcccagcc

SEQ ID NO: 53790 - DNA, 1197 bp, Zea Mays
tgataaccttgtagtacctcctgaatccacgttggagtacattgtgaaatgtggttcaattgagcggacgaggggtaccgagatagggcatcagcagctacgttatcgcatcctttcttgtacacaatgcgatattgaagtccaacaagcttagaatataacttttgttgcaacatcgtgtgtaaacattgctcattgaactgcaccaaactctaatgatcagtgaaaatctgaaactctacaagttgcaaataagatctctaatgggccactgctataatgattgctaggtactctttttcatatgtggacagcccttgatttttcggacccatagccttgctaaaaatgtcagcgatgatccttttgcatgagaatagccccgatacctattttgcacgcatccatatatatgcaaaaggggtatagagaaatcttggatcgccaaaactggtgctgaactcaaagcttgcttcagtaagtcaaatgcctgttgatggttggatgtccatataaacaacacattcttctttaacaactcagtcaatggtcacaatatcattccaaaacgacgaacgaatttgcgataaaatctggcaagtctcaaaaaacctctgagctcttttgcattgctcggtgttggccgttgttgaacaacttgaatcttagttgggttggttgccacaccttgcccactgaaaatatgaccgaggtatgctatagaggtttgggcaaaagcacactttgagagttttaccctacattgatctttttgtaacatctgcaataccacatctaaatggtctagatgagtgtcgaacgtgggactatagatcaaaatatcatcgaaaaagacaagtgcacacttgcgcaacactggtgctacggtacagttcattgcgtccaagaatgtgttaggggccctagtgagaccggatgccattactcgacattcgaactgccctatgtgggtttggaatgctgttttaggctcctttccgggcaataacctaatttggtggtaactagccttcaagtccatttggctgccattagttcatccatgagctggtcaaaaacgggaactaggtacttgctctttgttgtcattgcattcaagtaacgataatctacgcaaaatctccaggtatgatctttcttcttcaccagcaacaccggggaggcaaacgagctttg

SEQ ID NO: 53791 - DNA, 532 bp, Zea Mays
aactttctacaattaatttaatactaaaaatctattcctaaattcatttctctggtttttctgttctctggactgggcacctatttctggaaaacatagggaccgcggagtaattcttcctatgactcagagtgctgtacagggtgaactgcgggttggttctctaaacttataaggggttttctgcaaagtgtcatggtgaaggggtatgctcacatgagggccgttcagatcaaatccgagggccacgattagatcctgctctttacgaatcggtacgaaactatgcccatccgatcccgatttaacggtaagcctttaatgaatcctaaagttgttttccaccataggatcacacatccatgaccaccatttggccggtcaacgcgacacaaggcaactaatcccagccgcacacccaacgatcaatggctcatgcatcccctacctcctcagctatcgacgcgacgcagcggacgtggtcggggtggcgccctcgccggagttcggcaattccggccatctaccggca

SEQ ID NO: 53792 - DNA, 321 bp, Zea Mays
ctcctgaaaatggctgaagaagctgctgtggctgcagtaaacacggcaactgaaaagggaaaggagcagatcgatgacattttagaagaagaaaattttaactttcaagatttgcttggacaagagctaacaggtgctgaaaaagaagagttgaaaaaatatgtcatgtcttgcggatataagccaggggctacgctatttggtggggtcaacaaagggaggctaaggtgccttcggaaccgcaccgaggccaaagttgttagaaccctctccaaaagcgttggcctaccgaagctagaagcggacctgtgcaggtaccag

SEQ ID NO: 53793 - DNA, 315 bp, Zea Mays
gtggagtggcggaccgggatctgctggagcctggcgggcggcggctagggttaggactttaggaattaggaggactcgaggtctgctgactgctggtcactggtaggttacagcagggacgctgggtcacggtctcaactctcacggactcatggcccgcatgtcatatgcccaacgggagacggatatggatagtatatatccatacccgcgaaattattaaccatggatactatataggatccatactcgtacccgcagatatgaaaatccaccatacccgtaccgatgggttatttacccatatccgtaccc

SEQ ID NO: 53794 - DNA, 936 bp, Zea Mays
cctgcaggggtactatcacccaatcgacagcaatgaggccaagcgcctccaccaccgaagccgagacttcgcactggtcgagggccaactttacaaaaagggggtcagtcaactgatgcttaagtgcgtcaccgagaccgaaggcgtttaaatcctgcgcgaagtccacaaggggacctgtggctcccacgcggggcctagggccctagcggcaaaggtgattcgccaaggtttctactggcccgccattatttgcgccgcaaatcgggtcgtcagatcctacgaagcctattagaaattttccccacgctcggggcgcccctcgcagttcacgaagctgatcgcccacacgtggccccttcagcgctggggcctatacattgtcgggcccctgcccacggctcaagggaacctcaagttcaccttcgtcaccgttgaatacttcaccaaatggattgaagcgagggcagtatccaccatcacatcgaagacagcccagaaattcttctggcaaaatattgtttgccgcttcggtgtaccgtccgaactcacggtcgacaacggcaagcagttcgacaaccaagatttcaaagacttctgtttctccatcggcaccaagcttgccttcgcctccgtgtaccacccccagtccaacggagtcgtggagcgcgccaacggcaaaattttcacaaccgtcaagaaaatgctcctcgacgacaagaaaggcaagtggcccgacctgttacccgaagtggtctgggcactgaatacaactgagtgcagggcgactgggttcacccccttccacctattatacggatcggaggccatgactccgcaagaaataaagcatgggtcgcctcggacagccgcatcggccgtcccagacgtagacgagccgacttcgaaggacctcatcgacggagaccgtgtctt

SEQ ID NO: 53795 - DNA, 714 bp, Zea Mays
gacaacgacaaagacgatggcagcaggaagggtgacaatagcggaggcgggcaagggcggcagcggtggccgcaacaccggtgataaggcgccaccctcccaaaatagtatagtgtagtagtaataaatagtagtagtaggtgtagaagtagtatcatagtagtagtaagtgtagaagtagtttggtagtagtagtaagtgtagaagtagtagtaatcttttatggaaatagttcataatgaattgatcttctgtgtatgaatggtatatctatataatgaagtgatttgttcttgtctccaatgagtctcctctgagtgttttgattttttttgtgtttggttgtctgtgtgctagaaccaagaacaattgtgttccttatctgattgaactctctgattgaactccttgtaaccaactcttgtgaccaagtggtagtttcacaaaagttgacatcatctggatttagggagatatatgccttagttatccgtttccgccagaaaccttagccttgtcctgctattgttccaacctccaatttccaatctctcattgccgtttttcgaatatggtagctcttgatggctttgacgaggaagaagatgactagctagtatggaaagttggtaaattgtattcctccatttgatcctaaaaattagattctgttttgcgcttcttcgcttcttctatcactaaatctgatctttt

SEQ ID NO: 53796 - DNA, 893 bp, Zea Mays
tacgccagcccggtgaggtcctccctcataaacccggtctgttggtctacgctcatgaacatcaagttatgaggagaagattcacccccccccagatttgctttatggtggttttattctgcttaagcttgcaacccacccatacggattccctccattgctggtatattgacatccggattgtgtagccaggccatgtagcctgggggccagtccaagagaacggataatcgtccctggggaggtccgaagccgtgcagccgcttagcttggtccagtaccctaagcccacacgctccaccgctctgtgacgggtatcctagtacccggaactatagtcctgtgggtccgggaacctgaggtctggctctaaagaaaggacactcgtctcatggggaggtccggagctacgtggctgcttagcctggtcccgtaccgtaagcctacgcactccaccaccatgcacacgagtcggcttcccaatctcaatcctataggtcctgttgcgtaaatcaaaggatgaaggatgccagttaatgggtcctatcagtgcactactgaaactccctagttaaggctgtgtgaaggtccgggtcccagtcgagataacctcctaggcgccaggtcaccaattctttcttaggtatgctggcatccagcctcgacaagtcgagcccacatcccagggggccaagtaccagggaagaagttgacaacgacacacacaacaatgggaaagtagcatgcaaataagttgtaatgttgcttcacaagtagtacttaaaagtatcttacaaaaccaaaatataataagacgcttcccagcagaactcttgctttctctccgcagattccactactcatcatcagcgggatcccgctggaagcgcttg

SEQ ID NO: 53797 - DNA, 589 bp, Zea Mays
acacttgtgataattgcatacttcagcatgaagagacgacactccatttatttcttagatgcaactttgctagaagatgttggattatgaaaggcatcaccccgtcgagcacaacagatctagtaaatgccttattgaggatcagagtgagactgaaagtaccatggagaatggaaattatcatcatcatgtcctggtgtatttggataagtaggaacaactggatattcaacgagatcctgcctactgtggaagcgtgcagggagatgctcaagggtgaaatgagactcatgtgccacagaattaagccaggggtaggcgacagaattagaagttggattcaacactctgtaacgtagtggtccaatacacaccttgtaaattgttcatacttttcctagaagaaataaaaatactgtaggcacaccctacagtaacttaccataaaaaaactctccttgtgcagaaagcctgggagaaagacaccagtagaaaaagtaagatattctaacatacctcttgagtttttgcaattctagatgcatcaaattacatgttgtatataaatagagaatttgcaaatataatc

SEQ ID NO: 53798 - DNA, 1481 bp, Zea Mays
gaataaagggtttctaacctctatcccctccatgggttatttttgttttttaataaattattagtgttggcttgttgcatacactagtgatagaagctcattgtcacatttggtttatataatgagtcatcgatgatattcatttggggcactacccactagtgataaaagttcattgtcgcatttggtttgcactccacaaagggctctatgctggcttgctagaatacatttggattccaattcctgcaatgtaggcctatactggtgttagagtgcagtggatctggcccaatttgttgtacccatgagccagtgccctctcaggttgaagtccaatggagcccataacatagcaataccttggacctaagtcagcctaaaagaccatttgataggcaagatttttctaaacgcaaaaaggtaaacagttggtcacctatcatttagccatttttgggataaatggaccattgaacaggcgctacacaaccaattaaatagacaattgaataaaaacaacataccaatgtgtagcgtttacacgatgtttaaactgggctaaacgatcgtttagacgaacaatatgataggtgagtgctgctcttatgccacccaccatcaattacactattgtgggacataaacctaaaagtaagtgagtgcctaggtgtgtcctaggacctatgtctaggtggaatggtcagatgatatagcgcggccacaaaatattaaccattgctcgctgcaacagagactgatggcgtcttaattatctgtcaaaatttgagtttcccttccaagctagaaagggcccaaggttccacgcaactcttatctacctattgggacgggtgtgagggttgatgttagagtcgctgagcctagtagctaccttggaagtggcgaccatttttccctacctttgtgttgggctcgggcccctgcagcaagaatgcggcccgttctgggttaggcatagggtgcctgccataaggtgtatgttgctctccatcggccatcaacatataggcacagtataactttagcaagaagtatagttctaaactttatcaagaggaaacaaacagagccttattttagctcctaggatccaaacataccctatatattgctcaacacaaggttatttcccagctagataggctttagcctaggaacaaaactaatcattcccttccttcaataattaagaaaatgataaataatttagatagagtcataccataaaagaaagcaagcaatccactgcatcaaataatctttcttcttttatgggatcccccacaagattggaagagaactttgataacaacaacaatgcctatatagaaactgaacttattaggggttaatagaagaaaatctaagaagcactcattaacacatgacagtttatgcatatgtacggtcgttgcttagaaaatgccatgcaacaactcatggattctctacattta

SEQ ID NO: 53799 - DNA, 748 bp, Zea Mays
gttttttctcggcgagctctgaaggcccagcttcggcactagcctggcttactgcagcttcagtttcggccggctttgtttcagcttcggtttgcattttcgaagcctcggcgattttccctgaaggagtagagcttaaagcctttactgtttctaacacatctagtacatttgccatccttcttcttttgggagttgccgcaaaacttttttgtgccttcagcactgttacttctgccgaagggcttgaaatttctaacatttttgttccttcaatatttggctcttcagccttatctttatcagtcttcgactcagctagctcggctgagggtaccttcgacattatggccggatcttcagccttctgcgtaggagaaatgggctcctttggtttagcagctgaagaagtctcctcgccaaactcaggcaccacggccggttcaatataatgcgaccgatgggtaaggactttcaactttttgctcttcggctcaggctcatctggagtggccgaagcagcagtcttggccgaagcagcagttttcctcttctttccccgtccccgcagcgggtagcagtagtcagggtaaacaaaaccaatggcatcaaaaaccctattcaatctattttttccttggcccccgaaggatgtggataatgcattatcttctgctttggaatatggcccaagcagttcatcacttgtaacttcgatgcatttcaaccagtcatcgtttggttcgtc

SEQ ID NO: 53800 - DNA, 686 bp, Zea Mays
tgatatttgacaatctagatctggtcgtggacctcttggtcactctggcgcagttcatcttattgtggagtatattcttcatattcggaggaagggtgctcctgacgcctagtgtccgccatgaacacgaactaagccccccaacattcggagtctgagtccaaaaagtctaagtctaattagttgtcattgtgcatgctaggccactgtgcaaattggatctgattgttttgatgtttttaatcacaaaattgctagggcgtcaagtgttaatctaaggtgcctgagtatgtcactggtgaagtggaccatgccgaagaagatgtccatggtcgctggagtagtaggcatatacctaaggtttctcgacacgtcactgatgaacttgaggtcgctgaagaaaatctcctatcccggtgcaaatctcatagctgccatcaaacttgctatgatcaatgtgattattcctatctggcgcgccaactgtcgaggaatttttgcagtgaacttatgaagggtggatcatgagatcaagaactaaaaatgaatgcacaaagaacatgagacttatataggcttgggctctcaatatgagataataccttatgtcttgtaattatggtgtctattgcctacgcaactatgatcagatgatgtgtcctagattggcgctcctacccctttta

SEQ ID NO: 53801 - DNA, 886 bp, Zea Mays
caaaagtcaatctcttgctaatttcatggctgaatggacccgggttcacacaaccaccaaaccgatgtcagattcccacccaagctagacccgacctacttaacatcacaaggggttggctttatttgttccatgggccccaggatatgaggtttaataagtttgaagagcttagcatagaaaggtcccaaagtagttttgcctcaaactctaggggtcttatgggcctagtaactaagagtagggcaatgtaggttttgggccccctataatgccatggaccctgaattgatctttcccttggctcgatgttgttctagggccaagtggtggtatcatagtcataaacaatacccttggcgccataagggtcctaagcacattttgtcaaatcccccctcaagttctatcactattgggatatggggcccttgatagtgcaagaagctcgcataggactcgcatggcccttaggacaccgatagcatcaaggcccctaagagggcaatatgctgcataagtagaagtataggttattcctacatgcaatcttagagaaagcaataaaaattaccttatcatcggccacccttacactatacgtatctataagttttttatgctactcttagaacctctttaaggcccagctgatgacttagaatggtggtgtcacaagagcaagcccatgtgtgatggagcaaaggaagggcagaccgggccgagaagagtgacccaccatagtagagcaaatctatagcatgatttgactattgttggggtactgccttcaggcatatttatcattccatttagcacagggacatgctgctagaaaccaacccatcctagcttgtgcaaagatgcaatgactttgttatacaag

SEQ ID NO: 53802 - DNA, 494 bp, Zea Mays
gttgatgaggccagtgaggcacatggagaagtcctcaatggtttcaccatcgcggaacatgagtatctcatactcatgtctcagcttatgcgtcgtggatttcctgatgcgctcgttgtcaatgtgcatcatcttcacagactcccatgctacccacgccgaagccttggactaggtggtggacatcatcttgggtggcacaacactgcaaattgcatccaatgtcatactatccacgtgctcctcgatgtcgtgtagttcgatctttgcctagaaacaccttacctctagtttcgtcttcatcaagactgcccaatcattgtaattggaattggtgaggaccgagaagttggtcctcccactaccgtcatttgctcaatgatgtgctccaccatgaccccacgattgtcgtgatcccaacgacatgacctatgtgacggagatctccctcggtgtcgagggctcaatgagcacgaatgggagccccacgacgg

SEQ ID NO: 53803 - DNA, 502 bp, Zea Mays
ctcccccctcgtggtagctccacggtgtcgtgtcatcaacaacgtgcaacagaccaaccctggtacccaatcccagaccacatgcaaaggagatctgaaaatatgacgaggtggatgagggaggggttgctcacatataacaacgatgtaattggagttgaccatggcatgggtgactctgttgaaagatccaaactccatcaaagaatttgccctccaattaataaattgcatggtagattgcatgatccaagctccaaaaacacatccgaacattcactaaccacccggaggccatccacaaatttgccctccaatttatagattgcatgatcaattgttgaagatagggtggttatgaactcaagtctctctcccttagggctagtgagttctacagatcccttggcacaatttataaccgcatcccaatttttcagccatgccaaggatcaaatctttcccgcttgactccaataatataggtgtaaaccaaaacttc

SEQ ID NO: 53804 - DNA, 1517 bp, Zea Mays
agcccagcatctgccgccatctcaatcatcctctgcagagggtccattgctagaataaacaggaacgaggatagcgggtcaccctgacgaacgccacgcatgtgcttaattgcatttgtttgttgaccgttgatgatgatttttgaagaggaagaccctaatattgttgcgatccaatttctccatttctgggaaaaacctagagctctcagtacctctaacagatatgcccagttgatggaatcgaaagcttttgatatgtcaagtttgacaaaaagggttggctgattgttcctatgaagtttctgaataactttttggacatagagaaaattatcatgaattgaacgtttttgaatgaacgcgttttgggcagtggagacaatctcattcattcttggcgcaagtctgtttgctaaaatcttggtcaatatttttatgaagctattgatgagactgatcggcctaaacatgtcaatcctgtcagcaccctccctttttttgtaaaagcgcgatatttgcctcattaacgaggtttaggtttttgcatctatggtgatagaaatcatgaattgcacttgatagatcatccttaatcagctcaaaacaactcttatagaagatccctataaaaccatctcgacccggcgccttttcagagtgcatccctataaccacatttttaatctcatcctcgttgaacaagaaatccagatctgataagtcaaatggactatagcctaggttaccccaccgaacggccctctgtctctcaccccttctaccaatagcttcagtgaaatgatggtgggcctcatgcagtttgtcttcctgactggtgagcaacctgtcatcacgaaccagcgatctgatgaaaattttccttcttctattatttgccatcagatgaattttttttgtgtttgcatctctcagacgcatccagacaagtctggaatgttgtctagctcttgccttttggactgtcactagcccaaggattttcatttttagacttcttctgaactctagctcgtccccggaaagttgcctggattcctgtgctttctcaagaagagtaaggacggtctgaatgattgctaattgatctttaaaattgcctactgtctttcgtctccagatcaatagagctttagccgtgcggatcatcttcacatgcagcctaagaatggcatcggaagaacgaacactagatgtccaagcttgctgaaccacctcattgaacccatcaatttttgtccaaaaaacttcaaatctaaaccccctatagaaactaaaggtagataaaccttgcataagtaagggacaatgatctgaggtcacggacccaatggcctgcagatcagcatgggggaagatatcatgccacttcgtagtcgccaagaatctggccatcctagacatcgtacggtcatcctgttgccaatgagcatgtcgcatggttgacttaatgcccagtcttcactcatatattcttcttcttcttctttgtgacc

SEQ ID NO: 53805 - DNA, 549 bp, Zea Mays
agaaaacaataacataatgcgaatatatgccatgccaccctacacgccaacagacaacgcaaggctccagaatggatgagatccgttgcatgcatggggaatcaaacgacaacgaaatggtcagctggaaacgagacctacaaaattcaccgatcagagctctctctctctctctctcattcgtggacacgtttgcgttttgtttaattggcgaggagcatccgccctcacatgcatgggcacacagacgacggatgccgttacaatcctaatcatggataaagaaacgctcgttccctagacaagcaaaagatacccagcaataatacgccaattgactagcccgttcccagtacattactcagagagaaatttgtctcctccagtggaccccttttttgtatgaaagaagaaaacaaaaattcaagggcgcttaagttccctccttgcagtgatcagtgcctccattgacgctagcgacagtcaatcggacaaatcattaattatactcgcgtacctgcatcgcgattatgggaagcttgattcttg

SEQ ID NO: 53806 - DNA, 316 bp, Zea Mays
gggggaagccattagcaaggatctatatgctagagagaatcatttgattgtcgccaccacctctctcccaagggccatgggcatccaagacgtcgtcgtcgtcatcgtttctctcattgtgatggcatcacattgtttcatctccacccgcgtggatgtcgttgagacactattactgttacggcgttgatcgacaacaaacttgaagagcatgggtgaaatgatgttgttgcttgtgtgtgaggacgtacaactacttttactacatcgacacactctcccgttgcactatctgtctagtggtaacgattcatga

SEQ ID NO: 53807 - DNA, 318 bp, Zea Mays
atcgatgccagtaagacttaaaaactcttaggacaacgagagagatgaaaaagaaaagaactttcttcccttgctggctcaatcagcttcctccagctcgtggtttcatgttcagatgctatatggtcagctgaggggacgagagcgacgactcatctatacagtgcactacccgtaaaacttgtttaacgccaggccatgttcaggtcggctgcaacaattcaggtcgcctgaaactaacgtttgcatgtagcatcactaagcaaactatatgggagcagaaacagagcatcttttggacggggccatgcagttgac

SEQ ID NO: 53808 - DNA, 762 bp, Zea Mays
ctcaaagaaaatacataactaggtatttaattgtaacaatctttgtatagtaaaaaattaaagtttatgatatatttacgagtaaatatttttatgttttgaaaaaaaacctttaaagcagcatcttattcttctacagccataataagacattaccatgtcgttgtcaccgtactgtgaacatcaatggtcatcgtatgataaagtagtttttaaaattttatagaaaaaatataaatagtcatgcatcatttatgttgccatttaccatcaatattcaatggttctttggttacgttattctttatttgtcgtgttattgtttgctaactatgtttgaaatgtcacttctatgtctatagatctctacgcgtcgcaccaaacaacccatacacatttagaagttcacatgcacgcccctctttttgaatagcggtaaaaaaaatttgaatcaggtcacaccgtgatgaatgagcaacacagcactagacgcggcgtggtccaacgtcgtctctgcaccgggccaaaaaggtcccctgcaaatgaatgtagcatggcgccagggaacgagagagatctgacaaaacattcaagtgggcacagtaacatcacacagatgctacacagaacatacctttatttcattgtgctgttgccatcttttttgccccctccctctctctctcacacacatctgtgcacaagagaagagcggacaaagcaagagcgataggacgacatcaatgaggggacagacgcaga

SEQ ID NO: 53809 - DNA, 434 bp, Zea Mays
gctgaatctaacgctaaatctaactgtcggtgggttgtctttcacatgcaccgacgggagcctggtttgaaccggcccgtcctttcatatcccggcatctttcttgatttgttcccggttcagtgatgcgcgctgttcaaagctgcctcgcagtcctggagggcggcgcgctcctgtttgaaaagatgtctggtttaaaaatcaactttcataaaagtgaggtgtattgttttggtaatgctaattccaacaaagttgcttatgctgagatttttacttgccctatcaaaattcttcccatttgttatcttggtgttcctattgatcataaaactttgagcatctctcagtgggctaagactgaagagaaatttgaaaaaaaattaggagtttggcaaggtagatatctcagccttgggggaagattaactctc

SEQ ID NO: 53810 - DNA, 966 bp, Zea Mays
tcgtggttgattttcagatcgaggtattgactcattttccctatttttgactcgatctaataccgttcttgattatcttaagtatcttttcaaggatattgtgtagtttaggtgcttggcacacttaaactgttatcattgtctcgaacattgtttgagttaagtaggttgatattgttcattgtagttaaaccgctcacatgaacggttgaagtgcatgctcaatatcatatgtgtctttcctcaaacgtgttcgttaaaatacttgaacatcaaatatctctctcaccatatgttcttctttgtttaatcttaaggatggtgcgtcatagaaatccgtctgtagttgagtccgactcagatgacgacgctccagagattcgtgaagatactcctcctcggtccagatccaagcgcgggcgcggatctggcaatgtcctgccaggaagtgaggccttagggtctcatggggctcgcggtcgaacgaccctgaatcccttcggtcggtctcgacctgcggcaaatccacaagcctgggaggctaccagcgatgatgagggaggaaaagatgacgacattgatctccctcctgccaatgcacccattatccaggggttagttcttcacagagcgcaggcccgttgctctgccaatgagcaagtcattgatttcactgccagtggagggtctgcccttcttcaggacatgcgcttccaaaatcctacattccgagttcgtgatgtcaggatcgatggtaatcgcttctggaccctcctccatgttgatttctataactcagttatccttccgaaaaagcaccagcccatcctacatcatcgtttcattaactgggatggatgcgaagccattggtgatcccaagatgactcaggaattgagagcctgtgagagaaaaaggatgaagaccataatgacattccaatacgattggaatgatgaagtcatt

SEQ ID NO: 53811 - DNA, 498 bp, Zea Mays
gcaaacccgcgccgataggaagaaaaccccagtggtcgcgcagtctttcctttcgtctgaggcgactcgccaggcgatttccgctgctccaatccagcgccgctccaatccagcgccgctccaatccagcgccgctccaatccagctgacctccttcaatctccgagcattggagcccgattcaagaagttccaggtaatccaacatgaaatacatcgagtttgccgtcgattttttgaagcatttctgtcgattgaagtggatttgattgtaacccttattcttcagctaaatgtgtgatttgtatccgtttatacatctctctaatcgggtcattgcaacgcgcattgcatctctcttttgttcaggagccccgatattagagcatctgcatttcttctagatcccctgtattgctcgacattcatagatctagacaaaggctgtggattaggtatttattgatgagttagcagagagtacccttacacaacccaa

SEQ ID NO: 53812 - DNA, 845 bp, Zea Mays
gccatgtaatataaccgcaaaaatcccccgcaaaaactaagacacaatatgtcgaaaaagaccgcatcgacagtcttcggcattcgaccacatcgaagtcaccgcgaggggcagcgctaactaccctcgcgtgcgacactccgcgcaaaagtcacttaagggtgcggccggaatagcacaacaagtgcgcaaaatcgaagtctttcccaaaagactctccgcgcaaaattcgcctaagggtgcagccagaatagcacaacaagtgcgcaaaattgaagtctttcccaaaagactctccgtgcaaaagtcgcctaagggcacaaccggaataataggcgcgcaaaatcgaagtcttttccaaaagactctgtgcaagagtcgcccacgggcgcggccggatcaacaaaggcgcgcagccttaatatacaaatggtggttacatatacacatcgaaggcatcatatattacattggctcaaccttcggaataatacctagctcccagtagttgaacaacattatcctaaattcctcaccctcaaaaagatttcacagctccccctcacctacactcaccccaatcggcaaggacaacaattcttgcttaccagtcccgtccacgcgaagacgaccactctccatctcactacgataacgcctaccacttcgcgacaattcactcactcttcgtttcgccaccgccctttgccgccgatacccagtactcacgcctgggagctcctcgaaaccctccgcgcgcggcgaaggctccgctgcagccacatccaacgctgcaaaataatccaagtcctcatctgaagactcctccgtccacgcaatcgaac

SEQ ID NO: 53813 - DNA, 368 bp, Zea Mays
ctagtttccatttttaatccctttttccattttcctaagtttaagcataaacaagttttagtgaataaatcttccttaaccttgtatactggggtgtttattaattttaaacattgtaactactaggttagtgtctccactatttttctcaatcctggtctaacaacatttctatctttccctttattattatgttttgggtagttttcttatttaaatcaaaactctagaaaacattacaggaaccatggggtttactatttttgcttgacagtttatatttcacaaagtctagcaaaattggtttgactaaatttggatgagtattcttcaagttatgtatttatcaagttctctgcagtatttaa

SEQ ID NO: 53814 - DNA, 1097 bp, Zea Mays
tgcctacctcatatgctgaaatttcaactcagggtacatctggtcaagagtgatttccctttggatacaatgaaaactctacacctacaccaggcaaaatcaacgaaaccgtgtatgtcaacaacgagagggtgttagatgtatcttgactttggattcaccggagggagatcaccggcggttgcgctacacattagactcatgagcaggagagagagaagcgaacgagagacgatggtcttggcaaccatgtatgctagaaatgagagagtgttggatggaccttgacttcggagtcgtcagaggggagattgtcagtgaggcggcgctgcgtaggttactcgtgcgtaggacaaatagaaggagagaggtgaacaagagacgtctaggcgactgtccacttagatggataatacacataggggcagaactatccgtgacactgcctgatacgaggaaaagaaacacaacaacataaaaataacgagaaggggcaagaaatacctaaaaagaagaatttgtgagctatagtgtcaatttctagaaggacgatgaattggatctcttacattgagagagagcaaatctaggcccttatactaaaatcttgtgggtgtctagggttgaggctgagtcattcttttattagagatgagggtggggtggggctggctagatcgagggcgtttcctcaaatgtaacgtccggtcactgatgtataagacctggctctgaccgccccgtacatgtgactcatttgaagatgttacataagagatctggccataactagatcatacccatacctctataggtgtcaatggggacccgatattcgttaaccaatggggaattcctctattagggttagagatgggagtattttaatccctatgggtatagatttgggaggaattcttcccccattaggtaggtggggatgggaaagaagaatccgaacccgagtacctatgggtaaaaatcatccagtaaaattagtgtgtgtccaataggaaacaagcctaacaaccaaccctacatctccccacccttttaagcacccatccacccaacctaggcggtcagccaccaactac

SEQ ID NO: 53815 - DNA, 475 bp, Zea Mays
taacagggagccttgctacgaaattcaagccaggtgggctggaataccggcccagactgaaatacttaccctttttctttaccttttcacctcttctcctcatgacatatgcaaactcttgccaaaagcactaaaaatgtagcacttggatcagctttccataaatatatctctctctctaggttttctcaaacacctcaccacgtcactaagcacaatgcatatgcaaaagagactcatatttaatgggactagattatcccaagtcccaattaaaagatttcttctccttatagtatgtttatctatcctaaactcggtcgagcacttctctacacaccattcgaccatttagagacgaagccagccgacggatgcaccggtgtcagctctatactaggcataaatgttaattctatagttgaacagttcatatcaaacatttctagttgattttgtgaaaatcgacggtgtc

SEQ ID NO: 53816 - DNA, 555 bp, Zea Mays
gctgctggggaagacgatgggaactgggcgacgaccaccggataaggaccctgtgcgcataggagataaggaggacgagggaacggcggcctgatttttctttcttcagaagcagagcggcggcgggataaggctggagaagatgagctcgagtgctagaagaagcaagcagagaagaagcaagcagggacacgctgcgcaggaaaaatcttatataccaacggtgcggcatacagaggataaaggataagaaagccgtaaatggtggaagctaaagagaggacaagacatcggctaaaaatctggaatttggaagctggtggaagtgacgtgagcaagggaaaatgaaatttccttctcattttctaaaccaatttacacgaataaacacagtttcatgatttaatgtttaaaagatgtagaaactgtttgaaccaagacaagatcgatgataatatttagataatgttcgacttggtgaatattctcagggtcagataactactacccgttatctatattcaaaaacttggatttgagtgagtaacacatgga

SEQ ID NO: 53817 - DNA, 482 bp, Zea Mays
gtttacatggagtgccaaagaagatcgtgtctgatcgaggttcacagtttacctcaagattttggaaaagttttcacgagaatatggatacgaagttgaaatatagttcggcctaccatcctcagactgatggacagactgaaaggactaatcaagtacttgaggacatgttgagagcttatgccctttagcatggtagtagttgggacaagagtctaccttatactcagttctcatatgataatagttatgaggccagtctgaagatgtcaccgttcgagactctatatggcaggaaatgtaggactcctctattttggaccagactagaggaaggcagttctttggacctgaacttattcaagaggcagaagaacaagtctgtataatctgagagaatttgagggtagcacagaccagacaaaagagctatgctgataatagaagaccactggaatttgaggatggtgatcatgtgtacc

SEQ ID NO: 53818 - DNA, 816 bp, Zea Mays
cagaaagttgggctgtcagtcagctcagaatctgaaatcttactgacagtggcttgggatgaactttgggagctcttttgaagataatctagtgagtgtttgactttggctactatagcaagattgtagctggattatagggctaaaactttgttacagagagattaacaagttgttatatagaaatcagagatctaggccttacaaaacgctcggtcagacagactgaatgagatcctgatggtacagtgtctgcataaatatatcaggttcagcccccccctcgccgccggtgatcttgcactaggattcacgctggtgtcacaattcacgcccaattaaacgtagataacgatccccgggtgaaaagatcccgccgtggatgaacttggagcacagtagctgctctgtcgctcatccacttgccagcgacgtggtcgtgcgaccatcattgtcgtgctgccgtccctcgcgtttaagccacaccgtcagccatcttaccacgtcgcaattgatcacaatacacatcccttctattgcctaaggccttgccacggtaacagccacggtcaccgcgcctgtgactcagtccctctctccggccaccaccgtgtcatgccaaattcaagagccactgccctcgggtcctataaattgagcgtgccatcgactcctctacatagtcacgcacccaatacaccagcccgtgcctcggatcatccaccagagcgccccaatttgagatttcccccaaatcggtcaagaacaccgcgtgtgtgagctcgccacggttagcccttcacaggtccgatcacg

SEQ ID NO: 53819 - DNA, 300 bp, Zea Mays
agcgaagcctagcctacatgaagctcctgaagactatcacttcatcgctttctggcaagggaacagtgccctctcccccagccctcactatagatacatcatggaagtatttccccttcatcgattcaatctgaccttgcttgatggtggatttcccaaaaaaacaatgtggctaggtcttcacggcttatcttcgccattctcattctcaatctcaacatcgaagccttcgctatcgcttgagtcaccagatagtgtagcatcccaaaaattcaaatcttgaaaatttctcgaactcgc

SEQ ID NO: 53820 - DNA, 1090 bp, Zea Mays
caacgcgccgcgcacgcgcccgtgttggaggttttacacagaagacctcagcttttcgaataagcagtaaataacccaaagtactttttgtttgtctcactaacgtttgcaccaagacccccgaagttctattccttcgcaacaccaggtccgcgatggtggtcggcgacgagcacgtctccggtgagcttatactggccggaatatgccaagaccggacccctaacttagccggcaccgaaatctaccctcggcgacactaacccctcaatcaattgcactaatccggaccggagtacgcctgttcacgacgacggcaaaacccgaggagaagctacggtgttccgggcaattcggtacggtctagttcaatcaatcgagcctacaagcaataagagatcctagagatgctagaacattcaatagagggttatgaatcaacctgaagcaggctggccacggtgagctcacaccgcacggtgttcttggttgatttgggggaaatcccaaattggggctctctggtgggtaatcagaggcacgggtcggtgcattgagtgcttgactacatggcggagccgaatgtgtgctcaatttataggattcgggggcggtggctcatgatttggagttggcgcggtggcggccggagagaagagttgcactggatttcctattgtccttcccttttgcacttttgccagaaatattattgttctgattttgagaactgtttcctgctggtctctggaaattagagttattttggcggagatagggacaatctttaatgaaatgtcccgcctttccacagttgtagcaaggatcatatttagtgctagtgggagtaggcaaacggggaacttggctatttgtgggtagagattggcgttgcatattagtgggatggatgtagataggagttttagcagtgtaagcggttgagtgatagggagtgttggtagagccagctgttctgattattaccttttgacgctttgatgggtcctgggaagacccagctccagatcctttccacattcttttagcattttggtgcacccgccccttgtcttctactacaatcgcc

SEQ ID NO: 53821 - DNA, 1355 bp, Zea Mays
caaataggaccctggataggaagctttaccctaaatagggattaaaggggtaaaacttaacccaagttgagaaaacctaaaagctttagggtaaaagtcataaaatgaccctaagaataaacttgaatcacttttgtacccctgggataccagaaaccctagttggaaccctggaaaaccctaaaaccaaaccctagggacttatgtgcaaaaatgatgaacctttggactaaagtgtaaaaactactatgttttgacatataaagtcatttggttcacaaatatgtgaatttacaagccaaaccctgagttttggacttatttgcaaaagagtctcatttatacccttttgactaagtctaatttcagtgtattgtgctcatctttgtggccttgtaacttctaaacaaaggagattttgccctaggctaccacatcaagtttgtagctcaatcataggagagcaactttgcttaaggttgtaagctcacttgttaaggaaaaaccagagatatttaagcctgaagtcaggctgtcagactggcttggtgtgaattttcagactaataatgaactgacatcaacttcaagcctagattcaagcatgatccaatgagtttttgtggcagcatcatatggcaatattgtagagggtatgttgctttacaactttgatgcagattttgggttaagttgccattcaaaattaagagaaaactaagcttcaaaaggctctgtcaggcgtctgaactgaacttcaccatggtacagtgtctctggtggattagaacgccagtgcggctgtcttcaccgccggcgacctgtccgcgccgcgattcgtgccagggtcgggatgatcgggcggcaagcttctccgtgcgaagatcttttgctccgggtaagaccgccgcggtggagggcattaactccggttgccacgcggtcgtccctcctcccggccatgtccgatcatcagcgctggtgacctcgggtgtgccacgaccgaagcttgttactgcgggttagcaagcgtggcacccttaggagtattctccccgcaccgtttcaccggcgactgccacggttacagccaccgtgttcctctctgtctccggccgccaccgcgcttaacccaaattcccggccaccgctatcgccccctataaattgaagccaccatgagctctgcaaggtcatcacgcacccagccaccagatatcgtcctcaatcgttcgcctgagtgctcgaattttggattccccccaattcggtttccgccgccgcgatgaacacctccccgtggccagcccaactcaggttagtcccagtgtcccagttgcttgttctagcgtcct

SEQ ID NO: 53822 - DNA, 961 bp, Zea Mays
caagcgcgagcatgttgcaccgtcttaagtcatcgccgacttaagccgattgctccgttagcagggcatagtggtcaccccgagttaagtaagagtgagcatgttgcaccgtcttaagtcgttgccgacttaagccaattgctccgttgacagggcatagtggtcgccccgagttaagtaagcgtgagcatgttgcaccgtcttaagtcgttgccgacttaagctgattgctccgttagtagggtatagtggtcaccccgagttaagtaagcgcgaacatgttgcaccgtcttaagtcatcgtcgacttaaaccgattgctccgttagtagggtatagtggtcaccctgagttaagtaagaatgcaggtcgacaatcaataatttgagcgctcttgaagcctttctattgatgatatatttcccagtttacagagtacattgtcgtcccaatagcttttgaaatacagctaggggtaaaacttcctgaggtgttctatgttccatgagttcccaatttccgtgccgtccatcttagtgaggcgatatgatcccggccgagtgacttctgctactatgaatggtccttcccatagaggtgacaacttgtgtcatccctcccccgttagaattcggcggaggacgagatctcctactgcgaaggatcgatgtctcatggtcttatcgtgatagcgcctcagagtttgttggtaccgtgctgattgaattacagtgttcagccgttcttcttcgagtacatcaacatcctccagcctagtagcctcggcttctgctatgttttcaaagatcaaccttggcaccccaaacttgagatcagcaggtagtactgcctctgaaccgtagaccatgaagaaaggagtatttccatgcagagctcgactaggttgagttcttaggctccaaacgacgtagggcaactcccttatccactttcctgcaaac

SEQ ID NO: 53823 - DNA, 519 bp, Zea Mays
tcattttctactaagacctttggctcttggcacacaagtcaaactcatcactgatatcttgcacgatttatttgattttatttttgaaattgacctctgcacccacaaagatacatttgtttctatgattccatatccaccatgctaccaaatgatcaacaaattaaatcccctatgatattgttgagaccttggttcacctttcatacgagttagacacacacttcttgtattttttgtaagtttacaggtgctatgtagccttttgaacatttattataaaactatgttcatgatttgttgtgtgatcacaactctgggagtcagggactacgccactaccgagagctccgggagggagattgctggccaacggcggccaggtgatcgcctccatggcatggaagcttgaggggtcatgtccattagggagagcggaggagatccgatgagtccattctctagagtccagactccagaccaggatagaacaaggctgagacgtccggtttcatcaat

SEQ ID NO: 53824 - DNA, 498 bp, Zea Mays
tggatctgcaatttggggccgattatgctgaacttcgacgtgctctagatgcaattctagcatggcagccgcacggtcacgtggtccgggatgggcacccctggaccacaatgctcgatgatgaccacgacacgtgaccttttgcaggctctacgcgactcctacgacgacatctttgtggaaccccaaggtcttcctccatgatggcacgaccatcgcattcgactgctgccaagttccatgtcggtggctatctgcccatacctctatcctcagctgctcaaggacaatattgaacatcagtgtgagacgatgttgcagtagggccttatttgttagtgcactttggcattctcctctctagtcctcatggtgaagaaggcagacggtacatggtgattctgtgttcactaccgctagctcaacaacaagacggtgaaagataagtttcccattccggtagtggatgagctactcaacgagctctgtgacgcgagg

SEQ ID NO: 53825 - DNA, 720 bp, Zea Mays
aaacactaaggcccctttcgggtattttagttctcgagcatagtgtttagcttcaaaaatttcttcttcagataatctttttcccgaagcgtgtcgaataatataatcaaggacttcggaagacgcttcgggagcaggagcggcagctttttcaggcaaaatctgctctataccttcttctgctgctgccttttctccagtttccgaggatttctccttggcgggcactgaaggcccagcttcggcgtcagcctggctcagtatagcttcggcttcggtcagctttgtctcggtttcaatctgtgtttttgaagccttggcaatttttcctggagtggagcttgaagcttttatcgtctccaacacatctaatacactagccatcctttttctcttgggggttgttgttagacctttttgtgtcttcggcacctccattcctgccgaagggcttagaacttctaatgttttcgtccctttggttcccggttcttcaatttttcagtcttcggcattgcagccggctcttcaatcttctgcataagagcatgtcctttgacttcaatagctgaagaagtctcaccaccaaattcaggcactatggccggttcaatgtagcgcggacggtgagtaaggaccttcagttttttcctcttcggcgcaggctcgcttggagttgcgccctttcttttctgccccctcggcgggtaccgatagtca

SEQ ID NO: 53826 - DNA, 958 bp, Zea Mays
aagtggatgactcgcttctagttttgctgttcgaaaacggtatccattaatatcatagcgatcaaattttcttgtggtcaattgaccatgtgatatttgtagcaagtctttggagacactggcttcaagtttcttacaatataaaaatgtggaacggataaaaataaatactatgcaacatctgaacttaagttagaaaaaaagataggcatggaggaaattacatgctcgtggaaccactgcacgaaggatgggccaccgtgtaacactttcaagcataaatcatccaactacttttgagtaagttgtttgttgggtttatatatgctatcaaagatttggaaataaggatgaagttccgacatattgacatacaagtaaagcaaggtcttgttacgctgtatcgttcccacaagatgtgatgtgtaagctctgacacctttaccgtcccacttaaaagcacttagatcagtgattggagcttgctcaacaacatggtaccgtgtcgtttgcgcattcacgttgtttgtgtctgaaaatacttgcttgagaataatgtgatctctctagctgcgaacgcctctacaatacacccctcaacccttgccttattccccaccattcctctgagttttttcaattctatttcttgactatacctccacccgaactgtgtaggtcctcctaccaacgcttcccaaggtagatgcacaagcaaatgttgcatacaattaaaaaattcaggtgggaatactttttccatcttacatacaaggacaacgatttccttctcaaacctcagcatcaatttcattgagatttccttagcacacatctgcttataaaaataactgagttctacaaatatcttccacacattgggactgaagtatccacggaacattaccggcactagtctttcaatcaaagtgtgatagtcatgactcttcaacccaac

SEQ ID NO: 53827 - DNA, 441 bp, Zea Mays
catcgtcggcgctttagagatagccgccgagcgactgaagacatcgtcggcactttagagataaatgtcgagcgactggagacatcgtcggcgctttagagatagccgccgagcgactgaagacatcgtcggcactttagagataaatgtcgagcgactggtgataatgtcggtgttttagaaataacagccgagttagaacgggtcgtgttggccacttttgaggataatagccgaatgacgacgtggcacaccggggtttttagaagtagctgtcgagtgacaacgtggcacgccggtgttttagaagtatctgctgggtgctgactgggcgcttttggaaacggtatctgactcgggaatattccgcatatactgcgctttcagccgcctctgcttttcgtgccctagttcttgctttcccgcctccagatcctctct

SEQ ID NO: 53828 - DNA, 332 bp, Zea Mays
gccagggttcaacggccgatttgatcgacttagcgtgcagatcttagcaaaatccccgtgtacagtctcttctctacaccaaatcctacctttcgatgtgagttccaagcaaagatatggtcggggtagagagatatgggggtgagaagttggctctatccgagctgtccacaccgagacaaaagccatgccaagtcgtgtcaaatggcttagggttgggttcaaacttttccagggtgttctaggtgtctttgggcgccattttgtcaattgggccataaggttttgaggttgggaacaaggtgaacatgtttgatctttgaaagagggtc

SEQ ID NO: 53829 - DNA, 716 bp, Zea Mays
ctccgatcccgatatgatgccgtccagctgatatataaatgcaggaaacgacgtacgtgtcggtcactccatgcatgcatgtgtatgcccgcgcgtggaccgtgctagctacgtactggccaagtgatcgaccggccggactggccgtagtgatcgacgtcgatgcacgcagctgctctgccgcctatagcataccatgcataccaccacaagcaaggagagaggagctcacgtacgtcacaggctagtagcagctctcacggataacgcgtgcgcgcgtaaggggtgcatgccggtacccctgctttctggatgctatccctctgccgtttccggtttgcacggggtggctgtgtaactgtagtctgtaggcgaaagccatcaacgacgatcgacgacgccgttgcaatgcatgcaagtccgtccatgatggcatgcattgcatttgcattgtcatgtagtagtatgtatgagcgtcatcgagctagctagtctctggttaataagcttgcccacgggggcccgggtgggggcctaggctacagatggtacggcaaaggcaattaggaacagttgcgtgtgtgtgcccggaccccctggactggactggactggactggcctggaccctctgcaaagtcatgttcgatcgatccactgtccgcgcgggggcctccgcctccgtcgtcgttctgaaaaaagaaggcaatgctgcgg

SEQ ID NO: 53830 - DNA, 403 bp, Zea Mays
taatacagggactagggcataaagttctgggctcggttgcaatttactttggccagggtggtatggcgtgttaattcctgtaaaccctgagggttctggtgtaaagtggctggccgaaatggtattagaccctatgaaccgcatgatcaccattgaacggcctagattgcatctcgttccacccaattcggtaatccctcgcaacccttggatcagagaccgacgctgtggatttaaagtaacgtgaccccttcccgcacgtcggatctagatcgcatggtctacaacggatccacccaaactggtacgcatcgcctaatcgtaaccgtcgcctggaaaatcaatggtgcacgacgccccagccctagacttcgccgacgacgacgggcagtcccaaatcgcg

SEQ ID NO: 53831 - DNA, 822 bp, Zea Mays
tgggacacatggaacaccgggtggatggaagaagaagctggcaatgccagtttataagcaacggagcccactctagcagcggcggtgaaaggaccaaaatacttgaaggaaagtttctgacaggagcgacgagacaaggatgtttgtatatacggttgcagcttgacaaaaactgaatcaccaactgaaaacacacgttctgatctgcccttgtttgcctgtttcttcatgtgatgcttggcactggatagatgcatcttgaccacatcagtcataagggcatgatcagttaaccattgatgaagatcaggaacaacacatgtatccactactgtcaaaccaaaatgatgaggagaccggccatagagaacttcaaaaggcgaatgactaagggatgaatgcaaactggtattgtaccaatattcagcaagggataaccattgaagccacttggcagggcaagaattgacaaatcagcgaaggaaagtctccaaacattggttgtcgcgctcagtctggccatcggactgtgggtggtatgatgtactcatacgcagctgaactccagccaacgaaaacagctctttccagaaccttgcagtaaacaccggatctcgatcagaaactatagcaacaggaagaccatgcagcttataaatgttgtcaagaaaaagacgggcaacagaacagctgtgtaggggtgatgtagtggtagaaaatggccatatttagaaaatgtgtcaataaccacgagtatgcaatcagcatgtccagatttaggaagaccagtgacaaaatccatggagacaatttgccaagctg

SEQ ID NO: 53832 - DNA, 745 bp, Zea Mays
taaattagtagagtagcataatgtagtgtaatgtaatgaccagggatggaagaggtcgactcataatgagtcgacttcaagtttgtgatgaacacccctttagtaaataaaaaatgcagttccactgttgcatgcttttttgtttgtgcgcttgaaggatcgctggcattttagaggtaatgccgagtgatgtttgtgatccttgcctttccgagttatgatctggcactctttgcgcccgacttatcgagccaatttatacttatgctgacgtgtcttcttgagtttcgaaccctaattcttgcttttctcctccaccgcttctctgctttctgagttcttgagccttcccacttctctcgagagattgtgatggcccccaagaggaagagacagagcattgttgccccaatcattccacccattgaccctaatatccagcttccatttgtcggcaaccatatgtccattatttctgagtctgatctcttgcatcttgtggagactggggttttgccgcagagggagttgtgttcttggcgaatctggcgtggggtgaccgtttcgacagaggacactcgcgaagccgtcgtctttgtgcctttcctcatccgagggcttgccctgcctatttctccatttttctgtggcctccttgatttttacgatctgaatcttacacatctaaaccccaactctattcttcaaattgccattttctttcatctttgcaaggcgttccttg

SEQ ID NO: 53833 - DNA, 1343 bp, Zea Mays
catggtcggactcatggtttctcggcgacgacgacccttccttgaggcaacaagcactcggacaccaagcgtgagcctacccgagcatatgccctcacttaattggactggtccaaccctaattgatgcttgttcatggctacggcgacgctagagctccggtgagcgtgttccgaacaaccaaatgcggtagcgtttaaattggagctagggagagtttcactgattcaccagaggtcaggtacacgcgtgaatttggacggagcgggtgtgggaaagtgggtcgacgggagtgccctctcagtcgtgttctacggcggcgaggtaatgttctcgatgccctatcatggtattattcaatcagttgggccgatgagctatgttaacattcaaggatgctaaaacatggcacagaggggaatgaacggacctgggaatggtcggtcacggccgggtgcctcatgacggcgtaaatgaccaagatgggggaaaactagaatttgtgagctctggtgtataattggaagtgataaagggtgcactaggtgcataaacagaaggtggagcagggagggcctttaatttatagtagctacgtgagtgattcacgaatttgggataagatgatctcacggccggaaggcggtgagtcactggagtgcaactgtcgtggcgctcggtgaggtaaggcccctagcgataaatgggctgtccacaacgacatattgcaatgtggtaatgtctccaagcacgtggcatcctcgtggtgagcggcgaacgccgacgaggacatcccggccggtcgtgaagcaagtgggtacggtggccggctcacaatcttatccgcggtcacgatcctttcacttgaccggtaatatccgcggtcacaatcttatccgtgcacgaatcttcacgtcgagctcgaatcaccacgcctgatcaccgacggcgaggtacactgcaccaaagatcttcttcggtgcactgtaccatagcgatgttcattcagcacgcctcacagagcgatttgaggagttcctttctcaaatttttatgtgacaacctatttatccgactacatcagagttgttttccatcatgccaacttcaattttgttataaggttctttctcatacctccactcgatcaagcacaattcggttctaaagttgatctaatgccactgtcagtctaacttttagaccaatacacgactgacaacccaagttccatgccattttgctccattttttgtacagctctagggctcaatcacttaatcaaacttggactactttaatagatctacaaatttgttgtagtgacccatggcaaaatctcc

SEQ ID NO: 53834 - DNA, 693 bp, Zea Mays
aaaaatctgattatatccggcattaccatcaagaaagctaataattctattccctgatgcattattgattaatgtgtcagctatgggcatgggatactcatctttaggagttgctctatttaaattgcgaaaatcaatgcatactctaagcttacctgactccttctccactggcacaatattggagacccattctgcgtatctgcaaggtctaataaaattagcttctagcagccggtggatttcgtccttgattcgtgggagaagatctagacgaaatgttctagctttctgcttgaaaaggtctgaaaccggacttaataggcagctgatgctctacgatctctcggcttaatccaggcatctcagtgtaattccaagcaaagcaatctgaatattccttcaatagatcgatcatctcatttctaggatcggtctccagggtcttgtttacaaaagtcggccttggagttttaccatctcctatgtcaatctcctccaaaggatcagccgatgtaaacccctgtcctagtttatcaagatctctgaattcctctatcatatcccccacagaggaatcagatgatctttgtgtgatggcgggctttccggtctggggaccggatcatccgtaacactgtctttacgctgcggtagatgttcggtcttaaagtccgaactgttttgtgaaag

SEQ ID NO: 53835 - DNA, 780 bp, Zea Mays
gcaggctaagcccgacagagctgcttaccccggcaagttgcagcccctaccagtaccgtcttctgcgtggcacaccgtgtcaatggactttgttgaaggccttcctcggtctggatcctccgactgtattttagtggtcgtggacaagtttacaaagtttggtcacttcattccactttcacacccttacactgccagttcagttgccaagctgtttatgaatcatgtctacagactccatgggcttccagtggcaatcatttcagatcgggacccggtgtttacaagcacattttggcaacacctattcaagtctgttggtgctgagctgaaattgagttcttcgtatcacccacaaaccgacgggcaaactgaacgggtaaaccaatgcttagagacatttcttcgttgttttgtcaacgcttgcccaaagaaatggattgattggctaccagcggctgaatattggtacaatacaagcctccactcttccttaggctgttcaccttttgaggttctctatggccgtcaaccaaggtccttgggcatttcttcagacagtgccatcccagcgtctgtttcggactggctccaggagcgctcccacatgcaggaactcatccatcaacacctcctgcgtgctcaggctcgcatgcagcgccaagcggacaaacacaggtctgaacgctcctttgctattgatgactgggtctacatgaaactccaaccatatgtgcaatcttctgtgctgccccgtgcccatcacaagctcagttttaa

SEQ ID NO: 53836 - DNA, 904 bp, Zea Mays
ataaataggggcacagggtacccaacatgaaaagaaatattattaatttattatttattatcctatttaagccaaggatttcaagtatgccactcatacaaaaatatccattttaaagatataattccttagtggatagaatcctttagagagatattttaaatacatgatttaacaagggaataattaagttcacatatagacccttttaattcttttttaggtagcatattttcttttaggagatgtgttctcaaggtaagggaattcttattgaaagatattctaatccaaaacctttttagtgaattttttatacaatccctaaatagatttttgggtgttacaaattctaccccccttagaaataatctcatcctcgagattagttagaaaagggacacaaaaggattggtttataattcagcttttagtttataattgatccataaaatcaggagtctcactcttttttttaatagtcaatagtgggtgattaggagagcataggtatttagctacctattatgtaggatataagctggacaggttgaggtaagaaagattatggcaaggacaagatttcattcgaaatgtttaagtcttgattcatctcgagattcgctttgactgttatatccttccttgtcgaggtcgtgttctcttccttcttggatcttggtgtcggtgtccaagttagggttatgtagttaaggtagattataggtagcaacagatagtcaataggtaggtagcataggttgagtgtgttatgtcaaattctggtttggtggctttgtgttaggtcgggctagaaaaattatgtagatcgttagaaacatgtaggtcaggctggtagattagaatcgttttttaatagatagattaggcaatctatcaagaa

SEQ ID NO: 53837 - DNA, 586 bp, Zea Mays
caaaactgtaacagccaaaattttcatgaaggccatctgccctggcctttgtctggtaatgcagctcgtgcactcgacagaaagcttcagcatctggactcatcccttggcttcggagggcccagatatagacactgagtctaacaatagcgttgggaatcaactgatgaagatatatctcaaagttctttaaaactacccctatcatttcattcagggggaatcgcagcgctgctctgaagaagctcttaaaaacgacaacttcatcctttctcggttctgggattacctcttccccagcaaatcgaataagtttgctctcagcctctctaaaatagcccaatttcatcatcatacgcatgtcatcttccgttacagtagatttttcaaactcaagatgactaggctttgttgggatcagaatgctatagtcttcttcactctcatcaacattttcaccctcaaccagagcttgtttagcttcggcattagaagcaccttcgtcagcaacctcctctaccacaaccagacctgatcgcttcattactttcgaaatcggcgctgtttcggtggcctaggttttgtc

SEQ ID NO: 53838 - DNA, 913 bp, Zea Mays
agcgactccctggcccaaagcttgggctaccaccatgcaaccagagtgtggaggagatcccgcgtgaacatccatggaagtacaagagggagaccccgctcggacaccctcgggggctgggccatagtttgcgctacccacttgagccggatcatctccggcagtaccctcgggggctgggcagtggcttgcgcttcccacccgagccgaatcatccccggcaacaccctcgggggctgggtaagtgtcaacaccatccttgaggaccaagttctctgcagtagctgcctctaaggctgagggtccctcagttacttccatgggaacaagacgatccaagtcaatttcatgaccctcaagaccgcgctctaaggtcgatgaggcgcgggacgctgcccgggatgacccaaacccgggcgtcgagcacatcagcacaaacatccgtcgcaccatcatccgctggctctgataacagatcctctagaaccatatcttcaagagtctgatcaaagtttgccagggacaattcttgtagaccactgagggcagacagagcaggagaaggaactccactactttccccactggcgacatactgccgactgttcttccgagtcaaagggacctcatcttcttcctccccgtcgttttcatcagcaacacaaacaacacacccattgggatcagcagcagatggagcaccctcattgggatcagcagcagatggagcacacccattggggtcagggtcagtaaattcaggcacaggcacttcctcagcagtaggaaccgaaggaccaacgtcccgatccaaactagatactcgccgaagatgtctctttttctttttctgcttgtcagcaggagaatcaagttgattggctcggcaagggcgtctcgggcgaacactaac

SEQ ID NO: 53839 - DNA, 741 bp, Zea Mays
ccggatccatactctttgacggggttgacgatgagattttgggatgcattcgcgaccgtgctggggcgaaaatcataagaattttatccaagagtgttggatttccaaagctggaaatgaacatcagttgctataggcagcaacacattattggcagcttgttctactcaaacttcaaattaagacttctctacagctccctattggtaccttcgtggtgatttggaaattctaactttgatttgttttttagagtctgctactgagcaaggccttgaagatgcagcaggatgtcgaggacagaaaacaaaaatcattgttgaaggctttgaagataaaataaaaaaacttgaaggttctttgaaagcaaaagacagcctactgcactcagccgaaggctcactcgccgaagctcgttctcagaatgaaaatttgagcagagagctggacgaagctcgaataaatttcgaaaagaactcagatcactttgatcgcgagttcaaagcattgaatgcaagagttgaagcggaaactgaaaagaacattaatttgagcaagacaatcacaaatcttcaggatggatgcttcggctttgctactcaatgcattgctcggttgaaggggatattcaattctatcggaactgcatctgaagaagttaccccttcttcggaaaatattcctggggctctcgaacatattgaaaaagaagttgatgtcctcgacgaggtcataaccggc

SEQ ID NO: 53840 - DNA, 316 bp, Zea Mays
cgcaaccgtaagctccatgtggatctcaccacagctcaagcccatgtagctgccttggaaagtcgtgaagtcattgctgttgaagccctgaagcaagccaaggatgagcttgtccagaagttgatgggggcctacttggtaacccataaccaacgtagagccctgcggatccaagagcccgctccatccaaccctgttcaacccatcaaagctaaagacccccagattcttgaaggtcacccggtctctaccagaggagaaaagaaggcttgggaactaccagaaggagccatagtcttggaaggaattccagtct

SEQ ID NO: 53841 - DNA, 476 bp, Zea Mays
attttttgtacgtccatgttgtttccttgacttttccatttaacattttttggaaggctgagctagagaaggtcgcgtgtgggtcgtcatattcagaattaccccacttgacttttttctgaatcgtggtagattgagcttttgcttttgttggatctatttgtttgagcaaattccaatacatacttctgttcatttgatgttgatgttcatgtttttgttccagacacgagtgtgcatcgtcgctgccgcggtgggatgggattgcaacatggttggattttctaaatcatggtagatcgggcgtttgcttttgttggatctatttgtttgagaaaattccaatacatacttctgttcgtttgatgttgatgttcagtggtagagccaggttaaaaccaatgcccggtcaccactgtgatagcagataaaagctcgtcggcgtctattgactcccctctgcaggattctcctcc

SEQ ID NO: 53842 - DNA, 509 bp, Zea Mays
ctctcattttatagcttggctaagcctagtgatgaaaggtcacacaccctttgctcctgttggccatgctggggccatcgttgtttaaggaaaattagaaattgaatttgtttagcagaggttgagatagaattaaggatgtgtttggcttgctagatatctatagatgggagatgatggtccattgacgtgaggtgtttggttcgctaacgatatggatagggcggccaccaaagaggaatattcctaaatatgtttgatgagcgtgctctagaaattggctgcatgagcttgtccatggcatgctgctcatgctggttgtccatgcattaattactttaccttttctgttagcaatcttcaaatgattttatctcacaaactgcttatctaatttgtaatctgattgtatcattatatttgttgcaattaaaatcgacaaaacaacatttcaccatagttattaaggcgtcactaaagcgacgcctaagcggtaaggcaaccgggag

SEQ ID NO: 53843 - DNA, 912 bp, Zea Mays
gccagagcagggtcaatagctggtggggcagcaggagcagcgctggaactacccgcctcgtgatcatgtgagcgaggaggcacgggaggcggtggcgggatcccaggccctcatcatcatctgaagaagtgtcagcaacgacaccttaggtatcgaactgtctgaaggtctcatcctctgcctagatatctgacactggatctggcactaggactaggtcctcaggggctggacgataggaaccgaactaaaggcgagaggcctcgagggtgccttggaactgaggaggatcagctgcgcaaagatgtgacagaggtaatgagcatatggtagctgacggcgagcatggagaccatccaatattgtgtcctggatctcacaaattaggaagtcaaccacgtcgaactctaaatgtgagaccaaggcaccaagtagccattgctgaatgtgagtggtggcctctctgtatcccatcctgggtagtagtgtacgtctcatcagctcatattggaacttcgttgcagtagtgaagtcagcaggagatcgtcgcgacccatctgtgaaaggaggtctgaacagggctgcgacgtgagctgtagcgggtgcaactctgccgtgagggcgacgaggaggatccgaagtgccgtagcacagactgtgaagcctagtcgacgactctggaaatccaaaaagctaacggatctgactggcatgcaaagtgacatcctctcgctcgaaacggaatcacatccactgatggtcagggtcaatccatacggtagcatagaacactctgacccactcctcacctgccactcgcggtcaacagtgaaagcagtcctggaagataggtaagatgaccctctgaatcggaaccaacggctagcagaaaagcaggtaaatccagaagcc

SEQ ID NO: 53844 - DNA, 413 bp, Zea Mays
ttgataacggcacaagtcagtttccagcttcggcaagccaatgcttttggagagggttctaacaattttggcctcggtatggttccgaaggcatcttagtttcccttcattcaccccaccaaatagcatagcccctgatttatatccgcaagatatggcatatttttcaactcctctttctcagcgtctgttaactcttgtccaagtagatcttgaaagttaaaatcttcttcttccgaaatttcatcaatttgctctttccccttttcaattgccgtgctcaccgcagctgcagtagtttcttcttcagccattttcaggagtatattgtcaataacctcaagtgtggtttccaggtttgactcttcggtggtcctggcttcggccccggtagctttggcttcgccggtctc

SEQ ID NO: 53845 - DNA, 1206 bp, Zea Mays
cccaacaaatattcttacatttccatgtttaagaaacaaaatagcagacggagacggcagaccgattcaaagtcagtacatagatactactataatgttaagagacagatttgtttatgtgataccttcacccgagcgtactccgatctcctgcaagtctgaaagaggggcaggggtttaaattaaccatcagtttccgtggcgatcgcgttctagacaaccacctggacattaattatataataatctcgtcatttcatcgattgaggatgctaaatttcaacggattgaacttgatacgcacagactttcttacactccgtcatccttattactaacactcgagttcgacatcgacgtacgagacgctagctatctcgcgacgtagcgtgtcttgctgcttatcagagtctccgaataattaagaccggaatgcgaccgtctgcaaatgatgatgaattaatgataaaaaaatacctccgtgtcaacaaaagagaaaaccaggaacaactggatatttaacgagattctgcctactgtgaatgcgtgccggaagatattcaaaagagaaatgagtctcgtttggcaccgagttaagctagagataggtgatagaattagaagttagattcaacaccatgtatcgtagtggctctgttcctaccctgtgaagtaataaaaataatgtaagtacatctacagtaacttatcataaaaaaacaaacaaaccctgcacgcgctactagtcgccagccgatgctccggggacgacaccacttcgtcaaaggatccggcaacttgttccttgttttgctgcaccatgccttgatcgatacttctagctagcacgtactcctcgtagcaggcggctacgtacgcgtgcgttgtcaaaggctgcaggctgcgagcactcgtcgatcacgggaggacgacaagcatcgcatgcagcaaacacaactagaagatgttttttcaacagaactgccgattatattgctactagtacaatatccagggctttacgacggcagatcattcatatttgatggtacagtgcgacaattatacaacatgcggggtacaatagcgaaccagtgtgatacagtctctccataaaaaaataatttaaaatcaaactggacccttctcacaaaaaggataaatttaaaattaaagtggacatatggtccacatattagatattaa

SEQ ID NO: 53846 - DNA, 915 bp, Zea Mays
gcgaagtcgtccaagagacacatgtttctatccatgcaaaagtcgcccaagggtgtagctggattagcacaacaagtgcgtaacaacacccaagggtgcgaagtcgtccaagagacgcacgtttctatcccaacaaaagtcgcccaagggtgcagctggattagcacaacaagtgcataacaacacccaagggtgcaaagtcatccgatagacggacgttcatatcctagcagaagccgcataagggtgcagctggatcagtacaagcgttttgcaacacctaagaacgtgaagtcgtccgatagacaagctctccatccaagcaagtcatccaagggtgcagctaagtccccataatcgtcctttgacaaagggggtgagggcaaagtttaagcttggattcaccaaagaacggtaatggcaacacacatcttacataggttctgccttcaggataaggctggcctcacgaaaattgaacaacatcagttttagctcctcgccgtcaaaaagagcccgcaaatctccctcctcaaaacatggcccgatcgtcggagcaaggataattcgacgagtcccctcctccaaccatattccattccgaggacgggacctctccattcccattcggcggcatctccgggggaccccatttctttgcaaagactcacccagcattcccacaacagccaaatctagcgccataaaataattcgagatgtacacttcgcttcgacactttgatccttctcttaccctgcaactcaaccagggcaaccctaggcgaagactctgcaacagccaaatctagcgccataaaataatctaggtcatcctccaaggactcgtcgtccatcctagcaaacgggctcaagaaccctttgccttccaaagaccatgactcaacatcagatt

SEQ ID NO: 53847 - DNA, 369 bp, Zea Mays
atggcactttgggcaataattatggacattcctgataagtcaaaggataatgtaaaggcaagagtggatctgacagcattatgtgatagaccaaaccaagagatgaagccgccgagtggtggaaagacatggagaaggcctaaggccgattttgtcctaagcagggcctagaggaaggaagtacttcagtggatcaagatgttgatgttccctaatggggatgcagctaacctaactaggggtgaacttatctactctgtgagtcttagggatgaagagtcatgacttccacatatggattgaacatattcttcctgcgatggttcgaggctatgtccctgagcatgtctggctagcgctttcaaagct

SEQ ID NO: 53848 - DNA, 390 bp, Zea Mays
aagcgacgttctagagcaaagcctaagggtgatctcgttccttcatccttggaacgccaggattgcatggaggcccatgatgcagtagttgccccaatacaccatgtaccgccttgcatcttggggtggatccacccaatgatgagagcggaggatgatcttcaaaatgcgattatggtgacagtgacaattattagtgactgggctttggtactagcctcgagatcgttgagttgttggccacgagactggaggttgaagagagctctttggtgttgcgacacgcctgaatgtcaaattatctccttttcctccctacccgagctttggtagaggaattgactggtagatggtctattctcatagtagggtcgttcactgtggtttgca

SEQ ID NO: 53849 - DNA, 428 bp, Zea Mays
gataaaaataacttgaaagtgggggtcgagttggtcatatttatatatatggtgggctaaattagaacaagtaagattggatcacaaacgcgtcgtgatgtgtcatgcttggtttcataggttatacgtgcctagcatcgtgctaaatggaccaatagtaaatgggacgtgctcgtgtcgcccgatgggcttgtacctaagcccaagcacggctcatgataggcctcgtgccaggccaagcattgctactatcatgtcgtgccaaaatggtgcctcacgctggaccatatagtctgatccatctgatcacctgcatatccgagtgtgtgttcctgagacttccaaaaaagtcagtacacatacacaacatggcatcggagctagttctagttggagtcgccactgaaaagttgtgctggacagggccg

SEQ ID NO: 53850 - DNA, 948 bp, Zea Mays
ggaaggttgctggtaaaaatctatgttttcctccacataccctatcgcaaatggtctagtgtaatacccgaacagtctggtgatgtgctcagatggtccgtgtgtatagcaagacggtccaagcatatatgttgtccctggtacgggcttcggtggatcatcacaggggatagagtcgaccgccgctgggccggaccgttcggccgtgtgcaggggcatggattgttcccatagaggtggtggaggatgtggttgtccggtgtaagagttcatcggtatcccattaagtggctagcattgggcatgcccattttcagccaatggatcttgtggggttttttagtttcaacatcgtgcgatcgaaaattagtaatggcagcaaacgcacgtgctagcctcctataatcctcttgcacaccccctagtatttgttgcatctattcccgttgttcatctacgtaagattgaagagcttggatgtcgttcatgttacatacatcaggatagttgcagcaagtcggagtgacgtcaggttagtctctcatatacggacgactttttgattcttgtccgccttgaaattggtcaggtacttcggcttggcctccttgatcaactgctccatgtactcctcaaattcctgttgttcttcggccgacagagtctccatagttggcacgatgatattgttgggggaaacatcggagtggtccttggaaccggccattaggggctgatttaatggatccaaacgcctttccccctagcggagtcactaaaaagtgtgttcgcgccaatctggacgtcaatcactaaagaggtgttcggcttggcgggctctctacggctgcacggatggcccgtggcctaggactggacggtctacgatctagcgggaagagcgagtcttctctgtgttgagtcgaacggtttgcacgtgcatagggg

SEQ ID NO: 53851 - DNA, 602 bp, Zea Mays
agaacatctactggaaggagctgggtctccttgcgttcgtgtggatagcattccttgggcttcagctcacaagggtacgctggccggccttatagcttatcataacgatgctgtgtattgcactacttcttttatttgattttaataacagcttattaattaatagtacgtcttgttgttttcagacgaactacgccgcttcctgctccgtttggtactgggtgctgaattctctgcaggtatatatatctaaaaacaaataataataatattctgtatatatagctaggattttgaataggcatatatatatagtccagagcattgggggtaagtagtaataatagatctttcctcttgcatattaattgctggtcacgtttatgcgtgcaggtcccggtggcagtgggagtgacagtgtacgaagcctgtgggctaagaacagggagaagggcgctgtcgtctaataagggaggaagccagcagcagcaaagcgccctaaggattcgccagctgctggtgtactgcctgttcggcgtcctggcaggactcgtgggcggcctgctaggcatgggcggtggcttcattatggggccactctt

SEQ ID NO: 53852 - DNA, 438 bp, Zea Mays
ttacatcctctgtagaatcttcctcttgtccaaatgctccgggtgctgtcatcaccgatggcgaagtatatacatgttgtgggccataacccccgatccctacaaaatcaagaataaccaaattataagattcaaagcaagttaagtcaagattcaaatggttagttagaaacgacaaatctaaactaaattgaacttcaacgacgcaccagagctggttcataccaagttctagttcttaacaaattgaagtatatttagatacttatcgatgcacctgagatggaggaggtgttggagcatgcatttcccactgaggcatcgacgaccgaaatcgggggaaaatgaaaggttgatgttgtgcctgctctagaaactatgtatatgttgtaaatatggtatattagttataggacaaatatacgaccgtgttgagaa

SEQ ID NO: 53853 - DNA, 547 bp, Zea Mays
cgagactgccgaagccgaagacgccgcagccgaagctaccagagtggagaccactgaagctgaaatcggcgaagccgaagctaccggggccaaagccgaagctaccggggccgaagccagagctaccgaggagtcgaacctggaaaccacacttgaggttattgacaatatactcctgaaaatggatgaagaagaagctgttatggctgcggtgaacacggcaactgaaaaggggaaaaagcagattgatgaaatttcggaagaaggagattttaactttcaagatttgcttggacaagagttaacagacgccgaaaaagaagagttgaaaaaatatgccatatcttgcggatataaatcaggggctatgctatttggtggggtcaacgaagggaagctaagatgccttcggaaccgcaccgaggccaaaattgttagaaccctctccaaaagcgttggcttgccgaagatagaagcagacctctgcaggtaccagcgacatcatgtcgctggcagcctgctctacgcgaattttaaggtaaaaata

SEQ ID NO: 53854 - DNA, 669 bp, Zea Mays
atgtactgtagtgcagtgctaagcataagataagttgaattccatcttgtcttacaatctagagctatcctcttttcatacttaatgttcatttgggctgctgtgcgttcaaagcgttcatgtctttttggtgtggcacaccaaaaaccaacactatcatgtaccctttgaataccctcatccataacagacatcccatctttcacaattagatttatgatgtgtgctgcacaatgcatatgtaacaatttaccacctagcatgagaaaggaaagagacagcttatcttgcatagcacccattaaattgtcatttgtgctgcagttatcaagagtcaccgttgacaccttcttttcaatttgctaatcttgtagtacatcatgaagaacatcacttataacttcaccagtatgtggagcaggtacatatatgaacctacaaatagttaagaacaacaaaaaagttcagttatgtgtaaatagttaagaacaaaagaacatttcagttatgtgtaaatagttaagaacaaaaagaacatttcggttattattattacctcagtaaaaaacttttcagcttccaatcatcatcaataaaatgtaccgttacagacatataacctttcttttgatgatttgctgtccacatatccgtagttatagctatacg

SEQ ID NO: 53855 - DNA, 572 bp, Zea Mays
gggactccaccctgtagcttctaagctccacttccaccccgataaagagacttgacaacctcgcctccctctctcgattgcttataacctctactacgagtttgatcttcaacaggaggaggagcgagatacgaaacaccaatagtactcattgacaatcactcatcatcaactcgaaccacaagggacaaatcaaacttatgttcgagagcttccataacaagtccaatgaaaccgactttaaactagagcgcatgtggtgcgctcttcgccatcagcccaagttgtgcgtgagggacgatgtcaatgactctagtgatgggatgaaaaaattagtctcaacttggacaacaattatggctcaacaccaaaaagtgtgggggcaccacgtcctattggtcgcgataggacaaaagctcaacataaggggaaggggccaacaagaagtagtagtgagtctccaatcatagagaagaggatatcgaacaagatatataaggatagctagaggatgactcaatcaaaattatttgattattttaataagttgttggatatcgaagacacgaaaa

SEQ ID NO: 53856 - DNA, 367 bp, Zea Mays
cagtgctacacgcagctaggactagggcgaactcactcggaacggttgcaccgaccacaacacggtctaacacgcctgcccacgatactgacggcgctagaacgaaaacctgacccttgagaccaaatttgtgcccgactagcacgccattagcaccggcacgatattaaccaaggagagggataaggcgagggtaaggaagaggggtctcaccgcgagcggaggtaggattggcgcaggacacccgcggtggagttgtgtacctgccatgctccaacgaggaattgggtagtcgccggccaattacacgcgtgaccacccacaccaatacgatccttggccccaagggaaaccaccacaaacccag

SEQ ID NO: 53857 - DNA, 1074 bp, Zea Mays
ggaaggaattcctttctattttctattctatgttttcatttgaaattttgaggtcaagtttaaactatgattctttattccaataaaatgtatcacaacaatttcttcagtgtgatatgtatttttctttatttatttattggttatttgactattattatctgatttatgaaaagaaaaggaaactaataaatcttcaaaggtttcaaaagaaaaattcccaaaacactaacctgaatgtatttatttatttatatcattatttttttccaatgtaaaattttgggcattacaatatttttaattatcgttcgtatcgtaggtataacagtttctcaactctccggttagagctccatgctttgtcgtgccgaagccatgtcctatattagcttagctattccatgccttactcatcaatgttttaaatgtgcggctaagacccttgcaaggttaataatatagccgactgttggccgaaaccatataaagacctttgcagcctttcttcttagtacgtgtggttagctcttcattgttaatgtaggaccccatatgtctcactcacaaagtgtctgtgttttgaccaagaatcctaccgactagtgaattagtgctgcgtgtccaggcccagatgggtgatgcaaggtaacacaagtctttatcctggttcgggcaaggaaggccctactttcagtaaaaggggatgggacttatattacttgcacctaagtgcttgtaatagggaatacaagctggtcgggagaaggaaaggatcccaagtccctgggattgaatgaggcaagtgtcgatatccacgtggaggtgaaaaccatgaagtcttctcccctacacgaagccccatactactctatttatatagcctaagggccactaggggcgccggggtttgtcgtatacaagagaggaggcgtgttcgagcccctgtagccggtatggcctttgtacttgttgttgacttgagcagggaagggttggttggttcctgtatttgcatctttgaccgtacagagagctgagggcagtgcctagggttaggatacgtatccgagc

SEQ ID NO: 53858 - DNA, 321 bp, Zea Mays
gtttgatgtcctattctcggtgctagtctcaccattttcatgctcaataaataggtggcacatcagcaaatatgataacatgaggagaattcaattcttacatcagcaaatacggtaacatgaggagaattcaattcttaccactaggttgatctaagtaatgccattaatcttaatagaggtccaagatatatcactcttaaatcactccatcttcatataatatcatgatagctactatttcatctttttatccactcttaccaagttttaacattaaattttacatgctttgactgatctgccccttactgtacgaac

SEQ ID NO: 53859 - DNA, 566 bp, Zea Mays
gagatggctagaattgatcaaggactacgacttggaagtagactaccacctggggaaagccaatgtggtagctgatgccttgagtcggaagtcacaatgcaattgtatgatgatggattctcgcatcaataccctatgtgacgagttgagcaagatgaagatcgaagtaattccttctggtaccttgtctcacatttcctttgagccaaccttgcaagatcagattattatggcctaactcagcgacaagggaatgcaaatcattaaggagaatcttcattagaaagcggagaagtataagtgttttcgccaagacaacaaagggatactatggtttgaagacagattggtggttcctaaaaataaagaccttaagaagaaaaacttggatgaggctcatctctccaaattctccatgcacccaggaagcaccaagatgtaccataatttgaagcccctatattggtggaccagaatgaagagggaaatagcccaatatgtatcggaatgtgacacatgttagaggataaaggcaagccacttaaaatcggctggtgccttgcaac

SEQ ID NO: 53860 - DNA, 482 bp, Zea Mays
acttttgtgatatctcgatcatgagagtcggaggggagaataatgttcctcttaccgaagctgatgaagtggtagtttacagaagctttatgaaagccgggcttcggttccccctagacaatttgttggtctaggttctgaaaacgtttgagatttaccttcatcaacttactcccgaagccatcattaaagtggggatctttatatgggccatgaggaaccaagagctggaactagatgcaagatgcttctgcaacatccatgagttgtcttatgagacgaaggctaccggaaaggagcagtatcataacaactttggttgttacagtttcttgcctcggtctgagaagagctacccaattcccacattttagaagaggtggccgggctcctggatgcaggaatggttttacgtgaagaatgacctaagtcaaagggaggatatgaaagggattattcaatgccctatatggtctcacttt

SEQ ID NO: 53861 - DNA, 412 bp, Zea Mays
atcagatcagaatcaggccctaagatattccgaagaccacattttccaccagatatgggctatataagtatttagtcctgtcatttggcttgaccaatgctcctgcctactttatgtatttgatgaactcggtctttatggcagagctggactgatttgttgtggtattcatcgacgacatactggtctagtctgagtgcaaaaggagcatgaagagcatttgagaatcgtgctaactagactcagggagcacaagttgtatgccaagtttagtaagtgcgaattctggcttaaggaagtgcaatttctggggcacatcttgtcagaaaatgggatatcagtggacccaggtaaagttcaacaagtaatggaatgaaaggcacctaccttagtcttagaaatcaggagtttc

SEQ ID NO: 53862 - DNA, 437 bp, Zea Mays
tgaggcaagaacgccaggagatgcgtcaggaacggctggagatgcgtcaagatatgagacaagaaaggatggaaagacaacaacaaccacccctacctccaccaccaccagcagctccacctagggatatgcaccgtgagtttttgagccacaaaccaccgacattctccaactccgcggacccactacaagcatatgactggctaaagtctgtggacaagatgctcaatatagctcagtgctctgacagagagaaggtgctatatgcatcgggttgcattatcagccctgctgcagattggtgggatgcatactgcactgcccacgctgctgtcaacaccatcacctgggcagaattctccactcaattcaggaattaccatattcctgctggacttatgaagattaaatggaaggagtttccatcccttaagcta

SEQ ID NO: 53863 - DNA, 376 bp, Zea Mays
gcccaaccagaatttattctttcagccgacaatactaaagacccttcggttgaggcttctacattgggtggtaaattctactccgatgtgtggatgaagggtggtcgtgagatggctgatgaagccattaaaaagaatgagaaagaatctcacgatgtccgtgagaaagctaagcaagctaaagaagttgtcgaatgtgctatgattataggtactttttatttgaaactttttgccttgttgttcatttttaccttcgaaattcaccatcatatatttattacagccggcctctctcccccaccggagccatacaaccccgaagctgatccggttatgaaagaagatttagatgttatgcaaattgctaacgaag

SEQ ID NO: 53864 - DNA, 503 bp, Zea Mays
tgactctctgcttggtcaagatgcaaaaatagggtccggacgtcctcctctcggctcaagtcaacaagcaagtacgaaggccataccggcgaccatactgactacaggggctctgacatgcctcctctcccatacgcgacaaaccatggcgctcctggaagccctccttgaggctataaatagaggagcccaaggcttcattcggggaggagaacacttcactttttcacctccacaactgatattggcactcgccttaatcaccaccagagacttgggaacttctccctctccctatcagcttgtataccctattacaagcactcaggcgcaagtaatataaatctcatcccccctctactggaagtagggcttttttttgcccgagccaggataaaggcttgtgtctccttgcatcaccatctgagtctgggtatgcagcactaattcaattgttggtaggatcctcgggtcaaaacaccgacaatatgtatatacgtaat

SEQ ID NO: 53865 - DNA, 527 bp, Zea Mays
aaagatacgaaggctccagtgattggttatcgcaccaagtggcctaccggttggacaaatgaatggttttatgtaaaagctgatgagaagaaaagggagaaacttgtgagcatggtgatgagtcctttgaagctaagcttcggcatgacgaggccattgtgcaacatgcaactcggctccccatgccaattagtcgaagtagaattcagagtagtggtaaagcacatcagtactcgagacatggtgcaagaatatttggctaataaaacttttccatcatctggtgggtagggaatgccaaagaggaaggatgaagggaaaattttgaacttgtccagttgccataccagttcaaatttcagaatactttcagtgggccctgtgttgaatggttggaaatgatagagacaatgtgcaatgagatccttggtaactatacaaagaaagaggatcaattgatgatagtcgcctttggtacttggaagaaacgaaggctgaactaggtaatggatgcccttggcttcgaa

SEQ ID NO: 53866 - DNA, 629 bp, Zea Mays
gtgtgccgcttctggggctagaagtcatctcattcaaagagccatagattcattaagtaccgcattcctctcatcgtcatcagtatctgagatgtgaaccgtagattaagatttgtagccaaccttcggttctctgtatccttcatgcggcaagtgatcagagtcgtgatttgaagaatgcacaacactaggcatggttatgcttctttgttttaatttgctcatatcatcatctggaaacctcaggtagcatgtgtcatgtgtgaatcccatttctcctagaaccacactgaacaacaacggcagagttgtttgtatctagatctcgaccgatccttcaccttatccctggcattgatgtttgttaggttacaggttttaccacccgaggtagtgcaagaaaccaggcacctatcacacataccatcagagcgctcaagcttgttgtgactagcaatacgacaaacgcgatatttcctatctgtgtgcagtacaaactacttcgaaccaggcctacaatctgatccaatctcgagcacatcatacattatgaccggaggcaagtattatgatcaatgtaacacactaaaatcctatttttaggattcaaaaaaattatctaaaaattt

SEQ ID NO: 53867 - DNA, 701 bp, Zea Mays
gacaaacgaacgggccctgagtatatctcaagctccagccgtgtactcaatcatccctgagccaccgttccagtcagaagtttctttgaaccatatcatgtcgcggacagtattggatcagtagttggggcacccagctacatccgccattcttccattatgtctcgcagttgaaggtgcaggcaggctctacgggagcagtggactgaacacgtccagcctgccgaggccgtccgtcttcctattttttttctccatcgcctcgaaggaagccggcaagccgcacgcttgcggcggaatacttcggcagccacagcgtcatgctacagctcctgctcacgggcttccgtcccatccgtcacctctggatccttccttccctcctcgctcctcggggagacgaggtccctccctgtcgctcacggctcacctctggattcggtgagctgggcgtctcggtgcgggtgcgtccgtcacacacgctagtagcctactcctagtacagtactactagtacttggaaaggggttcgttgggcagctctggtcgtcttcccggtggacaacaaacccgcgttttcccacggccaccgtccccaacattcgcggattccagccccgcctcctctcccccttccttgttcaatggtcaaaacccacacacctcccccgcacgcagtcgtcttttcctccctgacccgc

SEQ ID NO: 53868 - DNA, 413 bp, Zea Mays
agatagtccatgaacacactgttcatcaagtacatgaaataagttggcgcattcgtcaaaccgaatgacatgaccgtgaactcatacagtccatacttggtgataaatgctgtcttcggtatatccgagggtcggatcctgagttgatggtaacctaaccttagatctatctttgagaacacactggctcctctcaactgatcgaatagatattcaattcttggcagatggtacttgttcttgatagtgacttcattcaaagatctgtcctcttctcacaattgacagtggtggggcttcggctgcacggggaggacgccggtgagcgcggaccgggcgaaccagagaggttagggcaaaccaaggtgtgtcccgtgctactgacgaagaggcggaactcaccgaggcaacga

SEQ ID NO: 53869 - DNA, 306 bp, Zea Mays
catcatttactaaatccgtgaacacaacaagatttgagggaaactaaattttattcctcgatctgcctcgttaaaaaccttacaccctagtgaggggctccctctataaggaaaagagtacagatcgacataagtattaatgttcacaagtcttaatgtccagtccatattacaataacagtcaaccatgaattagataaaagaaaaggtaacactaatgactaatcattgctaaaatcagcaaaagcttgttcaatctcaggatcttccagttgatgttgctttcgatcatcagctctcttccaa

SEQ ID NO: 53870 - DNA, 443 bp, Zea Mays
cggtggaagagtgccgctctcacaaggtcgcatacctccaacaaaggaaaaacaagaccggtagcatcggcccgctagggaggacaaaaggcacaaactctctagtggcaagctcatcggaatggataatgtcggcgcaaatcctttcgctgagcgccggcgcattccatccaagcaagtggtataccattccgagcactcactcagtttggatgtgctcggggtgaagtcacaaggccatggcaaactacggcaacacaaagcagaaaccttgaaggcaaaggggaacatagagctcgaagatgaaagggcaccgcgagtgggagagaagcaagacttggctgctacccgaggggtgaacccctttttaaaggcagatttccctgctcgcgccccgaagcgtcacgggcaaggtctcccccgatgcgcaccagggttcccat

SEQ ID NO: 53871 - DNA, 396 bp, Zea Mays
ctcaagggttagatgtcatcctagggataaattagctacacagaaaccaagcaattgttagttgtgacaagaggacaataaagttagtgtccccatctgggaaggaagtaataactgaaatgttcatgcctgaataagaagaaagagcctatcaccatttgtctgtagatggcaaggaggccaacctgattgaggatattagaattgtgtcggagttccccgacgtgttccctgaggagttactaggcatgccacccgagcttaaggttgagtttgccatagagcttatcccaggcatcgcccctaattccaagagagtctatctagtgtccgaaccaaaattggtggaactcaagaagcagattgatgagctattagagaaaggctacatcagac

SEQ ID NO: 53872 - DNA, 367 bp, Zea Mays
atttgagggtagctcagactaggtaaaagagctacgctgataatagaagaagaccactggaatttgaggagggtgatcatgtgtacctcaaggcgtcaccactccggggtatgagaaggttcaaagtcaaaggaaagttgtcccctcgctttattggacccttcttaatcttaaagcgagtgggtgaggttgcataccaattggagttatcggatcatcttgcggatgttcatgatgtctttcatgtatctcagctgaagaaatgtctcagggtgcctgaggagcaactaccaatggaagaccttagtgtttaagaagatttgacttatgctgagtaccccatcaagattattgatacactgactcg

SEQ ID NO: 53873 - DNA, 346 bp, Zea Mays
atgaacaatcgtgttttaagacttatgtgttgtgtgttaaaatttaagagtggacatgtatgagtgtatgaccaattatatgtagacaagattgtgtttgtgtacttttgtgaatgagacttgtatgtggatgtgaatgaacatatgtgtggttaggatttgtttattgtgagcttttccgattacagttaccgtttcccgatcaatttcgagctattttgcttggatttatccgttttcgatataccggaatttaccgaacggtctctgtttccgactttcccgtttaccgattccgaccgaacaaaaatttatgcgggtgaaaacggtgagaggttttttccga

SEQ ID NO: 53874 - DNA, 908 bp, Zea Mays
ggcctttaaaggttttaagctaggtaactctgtggaatatcactaactaaccacagaacatgagatgggtcatggaattttttaatgtgtgcagagcaattataggggctgagaagttatggatgagtttggtcatgcaattttaaacagttctaattcttctctgaatcacattgttgaacaaatttatttgagtatgtcccatgaaatgctgccaatatgaataatcatccagggttgaccagtgaccaggaagcaaccagcaacaatggctaagcatccagaacagttctaggaacacccatcatcagtttgacagtgccgaataagcataaacttaaattagtataaaattatgcggttagtaccttcaccctcatccacattgcacagtttccttcgatcccattccacggagtacgttgaatacttctacggtgaggcgcgttcactgtggtctggaaaaataaaagctgcatcggcaagccgaacacaaacctatgatgaagagagcagctcacctgcagaggagaaatgggaaacagacggcgtgcgttgaggccgtaagggcataatcggcagaaggattcgcgggtccacctgccaggtgccccaaaattacccgtgacctcttttggcgagcgcgcagactcaagcgaccctttttgacgactccggcttgaagcggtgtattatgaagagcggcaagatagagcgacccattttgccaaatttctcattaaaagatatgagagaagaagagagagaaagaggggagaaggggaaaaactgcccagtctgtgtaatcctggttcaaccggtaattgaatttttggttcaactgggaacaccatagagaggagaaaaacaaatcccagttcaacggcactaggcccggttgaaccggc

SEQ ID NO: 53875 - DNA, 331 bp, Zea Mays
gtggttatctatttgatgtttcttgtgttttttattcccttgactattcgagacaccaatgattacatgcttcaggtttctttcgttaagaatatcgcaatagaattctaactactgagttttggattattttttggcttactctggggcacatattgtagtcgccggtgcctactctcggcagaaacatgattgatcacgcatatttgggccaggcttatccatgttagcgtccaagaaataacacacacagggattcactactgcgacactgacactgacatccctctgtgcattatttataataatatttgggtcatcgtatttatat

SEQ ID NO: 53876 - DNA, 301 bp, Zea Mays
gaagatactgagacacctcaagcgcatcttcctccagttaaaataagtcatcttcaacctagttctttcgttccagctgtaatagataaagttgttaaggtcgattctgggatatcattttcttccggagaccttcaaacatcagacatactatacctccagtgtgatgatataatcgcaaaaggcctagatgcgggcaataacgatgacacactgactattggaagttcttttgaggataagatcacactaagagaactagaaactagagacagagatactgagaaaaatgattcaggta

SEQ ID NO: 53877 - DNA, 410 bp, Zea Mays
cgcctgtgcgctacgtgcctaggagctttaacacgtcgcagtgaaccgtagtagtaagtccgtccatcgccggaggctttgccacggtgaaagccacgatcacccgcgccagtgcacttcccctctctccggccgccagcacgccttctcaaaattagacgccgccgccgtaggactctataaattgatgccccagtgagttccgctaggtaattacgcatgcaatgcaccagcccttgcctctgatcatccaccagggcctcccaatttcgcatttcacccaaatctattttccgcgccaccgtgaacacttcgcctggctagccctctgtaggtcagttcaagcttctttgattggtgttctagcctccctcaagcctcctgttgctcgtagacccattcgattaagc

SEQ ID NO: 53878 - DNA, 511 bp, Zea Mays
cctaagcttgaggtgggggttgctgctactgcacctgctacattgctgctagagtctgaccaattgcttggactgcttgggtttacatcaggaacatctgctcaataatcatcgggggtggcggtggcaactactactgagttgcttcctcctggggtgtctgctgctcctgttgagcacgctttccacctatgtgcctgttctcagacatctgtagagagcacacacatatcagatctgactttgcagtctttcagcataagaaaagatatatggaaatctccataacactgagcaattgatcatcttcactaactctcaacaaagcttctcagataacgacgaaagtggaaataaagggattacccaactaaataactgactttattaataactacatcaagttgcaagggatgcccacaccttgatgacaatcattacaaagatccaacttcattacaagttcatcacgacaagcatcaaaacatatgataagcaaactaactctaac

SEQ ID NO: 53879 - DNA, 558 bp, Zea Mays
cagagtattggtataacactagttatcatacctcactgaaatggacaccgtttgaagtgttatacagatatcctcccaatcatctgggtctgcatttcagtgaccagggtaccattccgtccttgcaaacatggctgaccgaacgcaagttgatgattcagttgatacaacagcagttgacacgagctcaacaatgccagaaaaaacaagctgatctccatagaactccaagaacatttgaggtcggtgatttggtctgtttaaaactgcaaccctacgttcagtcgtcactggtgaaacaggccaatcacaaacttgccttcaagttttttggaccataccgtgtgttggccaaagtcggagaggtggcttacaaattagatcttcctccacaatcgacaatacatccagtattccatgtttccctcctcaagaaagttctgggttctaatgttcaggtgagtgcagccttacctcctgtacctgcttcttcacaacaacccgagaaaattttgcagcgcaaggaggtcgctactcagaaaggacatgtcactcaag

SEQ ID NO: 53880 - DNA, 608 bp, Zea Mays
ctttggataagtccatcctgtgatgtcaatcggattgtcaaaatgagcatgcggaacatcttctgtgtccatagagacactacccccagctgaagattgggcctctgagtctgtggttggattatagtctgcatcgtctgcacgagggcgctttgatttgaaacggccggcaagcttcttccgaagaccacccagaccactgcaatatatgtgagaaataatcataggtgaattgttgataatgccacaacatagagaaagcaagtggaactttctgtcaggggccggactgtccgcgctagagggccggactgtccacgccagtggtccggactgtccgtgccaacctggaggacggtccacgaccgtccaggggcgattttctagaaccctagtcgatcattcaatcaacgattcggcagaaagtaaccatccaaactcgttcaaatttttgcacaacattcacaatgattagcactagcaattccaccaatcagatttatgaatccactgctcaattttagatcagagagaaaatgcgaacaatccccaaatttgaagaaatcagatgaaatccatgagattatgaaataccaggatgaagacat

SEQ ID NO: 53881 - DNA, 462 bp, Zea Mays
tgaaaatgaacccacgtaaatgtgcttttggagtgtcggctggtaagttcttaggattcatcattcatgaacatggtatagagatagaccctaatcaaattaaatccattcgaaatatgggacctccgacctgtaagcttgaagtgcagaagttcctcggcaaggtaaattatttacggaggtttatttctaacctagccgggaagattgatgtcttcactcctatccttcggcttacaaatgatgtcgaattcacctgggggtagaatagcaggaagcgtttgatctcattagaaagtatttgtcttcggctcccgtgttaaaagtgccataggtaggagtaccgttcagattatatattgcagctgaagataaagttattggagctattctgacgcaagagaccgaaggaaaggagcatgtggtaacctatctaagtcggaggctggtggatgctgaaac

SEQ ID NO: 53882 - DNA, 435 bp, Zea Mays
cgcttggtggtggctggtgtggatgatgctgattattattgagttaggcctacatgttggctattgcaatggccatctgctatagtaactgtgtctgggcggtgaagaatgctttccccccaggaggtggagggtttgggggattcatctgtgattctgaattaaatacaactcttttttgatgtatgcatgcaggtagatcaacacctactcttgtcctagtattgaccatccgagttagaggcataggtaaggtagatatgctaataagacatatagctagttatggaacacatggttgtttcggtcaaaatagcttaatagattagagtgccacctacctatcatcactatactaaatctatgttggtacattctagaatgtatccactatactaggttttattgtggatataatccccacaaatatttcac

SEQ ID NO: 53883 - DNA, 319 bp, Zea Mays
gttcagcttaccacccacagactgatggtcagaccgaaagggtaaatcaaattcttgaagatatgctaagggcttgtgcgatcaattgcggcaagaactaggataagtacatctctttggcagagtttgcttataacaacagttatcaatccagcctaaggatggcacctttcgaagccttatatggaagaaggtgtcgaacaccccttaattgatctcagcctggagaaagagaaatatttggacctgacttagtgactgaagccaaaaggaaagtcaagctaattaggaagaatctcgaagctgctcaagccaggca

SEQ ID NO: 53884 - DNA, 936 bp, Zea Mays
ggtcgaggtggattggatggcgatgtttgccacctcttcctcttcttccgagctagaactctcctcgtcggagttccattcttcactgatgtgagcttggtcatacttcttcttcttgaagtatcccttgcttttgcctcccttcttgaacttgtcctttttgtggttcttcttagctccttgttccttcttatttggacaatccgctatgaaatgatcggtttggccacattcataacatgccctatttcttcctttcctttgatatttatcattctttcttacaaatttcttgaaagtcttgataaacattgaggtgtcttcttcgcttgagctttcatcatcactaaaactttcaacaattttcttggatttgtgatctttgcccatcaaactctttttggaagattcttgttcatttgcaaccaaggcatgagactcccttgtcttggttggagcatcctcagattcatgttgttggatcttagcaaataatttatgaggagtcatcttctcatagtcatctcgatctcttatcattcttgctaagctcttgtccttctctttgtaggctctcatgaaaagcctagtgactttagagtcactccaatcctaacttcctaagactcttatcttgttaacaagaaccatcaatcgatcaaagagaaattagagggactcacccttaatccaatcatatctagcaagctcactttccaaggcttcaatattatgtctcttcgctttaggatctccttcatgtgacattttgagaatgttccaaatatcacgagcatcctctcttccttggactttccaatattcttctggacacaagcttcctttgatgatgctaaccgcttgtgcattgtgatgcacctcttgcatcattttcggcgtcatcccttctccttgggcgggcttgttcatacctat

SEQ ID NO: 53885 - DNA, 919 bp, Zea Mays
gaaggaaaagttcatcaagacaactgttgcatttaggaagcagaaataatttatttgctagtaaactccagtaattgatattgatagcaaactccaaaaatctacaacgctcattatgcataatctctctgcatagagatagaatgcacgattactaccaagtgcacaagtaaagtaacatatgtggtaaaattttagatggatttaccttgtctaatgaatcggacatgaatggatcaaacaaagacagagaaccattggacatgaaagacaaacataaatctccgtgtttggagactgacgcaaagcatcagcgatgctaatcatggattcctcctgtgaccccaatcagacacaaacacaagtagccacgttcctaccctaaacacccagtttcatgcctttagctgctagcttgaaggatgaacagaaggccacatcgctgcatctgaaggggaatgaaaatggatttgcgatggctcttgcgcgtcctggcactgatgggtggagaggtccttgcaaggcgcctccaccatcacagtttatttctccatctccgaccatctgcatatgagaaactctgcctcggatggattccactggcgctttcggagcagtgccgcgaccaggcttcatctccctctatcgacaccgcctccgcttcctccaccgctgttgtaccctccaccatcattgtaccctctcccgtctcctctaccgctgctgctgaaacctcccgtggccactaacgcttcgcgccttccaagaccaatgatactgggtgcgcgtgcgctcgggcgattggggaggattcggcgacgccaatatatgcgagagagagacgagcgaatttagaatgcgaatgttttgggggagaggatgaagatactgttggacggctcaataacgtgtttttcac

SEQ ID NO: 53886 - DNA, 809 bp, Zea Mays
gcctggtggaccctctccacacgctcgccctccttaccccgaggtgcttgagcgattcgaccttcccttctcctttgcgcgttgtctccttgatcaattgggtttcggccctgttttgctttcagatgctaagttgcctatactgttgctatgcagggtggtgccgaaccggcgggagcagccggaggcgtacatgctctacctcgagcttctcggtcggtacgcggtggctcctgtttacccggagcgcatggagaataaggatatgtaaggaccttactcggttactccacactggcgtccttcacttttggtttggtgtactctattcatgatgcaacttgcacacttgagaattgacaaattgcttattggatatcccggtttaaatctgcgctgtatttgactatttgctgatgcttttgggtgcgtgggcccagcttgatccggctgctgggaggttgcctggtcatttcgattagatgtatctgcgcaggtggaaactaggtagggtggaaacgactgcaaaattcttggtcttggtcttagaaagaaaaggtgcaccatttctaaccttgtgctgtgggccaaagactcaaaggcttcacaagtgtcatttaagctcctttcacattgggtggcttttcaaaagcaacccctacttttttggtataagccactgaataaatatttaaaacatacggttcaattgaccaaactatcttcaactataaattgttccatcaatctgcagctttctgataatggatttttaatctttaaagttctcatactgtggtcaatcacct

SEQ ID NO: 53887 - DNA, 563 bp, Zea Mays
aaagaaaataagaaattccttaactaaacatttagccccctaactaaaaccccaaatgctcattagcttccccaactcaaatctatgagctccaattgacaaaagggcgccaaaacatccaaggcacaccctagaaaattttgaactcaaacaaaaatcggttgacatgatttggcctaagatttctctcgggctaggtaagtaagacaagtcggtgttgacacttcaatttctccacaacctgtacacatctccacttaggacttgtacaaagaagataggatttggcacagtgaagaaacaatacatgggatcttggccaagatatgcatgttttggctaaccaatagacgcttgaacatgaacgaaagtaaacgtccacttgctcgacctcggctggcaagccggtgcatgcccagtccacgcccacacgtgccccaacatgttgtcgaccacctccatgcccgagccgtgccccgcgcttataaagcccgccatggacttagtaataatcattgagcatccctgaaccaatccttgggcatgccttactagttgccaag

SEQ ID NO: 53888 - DNA, 609 bp, Zea Mays
gaaccagtggatcaatgtcagcttcatcagggcaacttcgtaatagtacacgaatatgttgttgccttaacagtaattcatgtacctatgtgtctgtcaactgcgtctcatgctgggatgctggagtagacatatccggtacagtttgagtggccggactcatacatccttctttacgtatcatttaagcaaaaaaatacatcgatttaataatggcatcataacgatatcgaaaaatgtttgtataactttttagattgacataaagaccataaaactgactaacctatcgaatggggaagaatatcatctgattttttagttggtttctgcacatcataaccatcttcattgtcctctgactcaacacggaggacctcatcaattaactcgcaaaaaacatcagatagattgtattgtttctcaacaatctgctgaagagtctgtttaataactgaacaagccttgccaacctccgtatcatgatgtgacaacttctctatgaatcccaggcggtggcgggatggaagctggttcagcttgcttgatatcaaatccctgatgagcgggagttcgatgtgaatggtgtgctgtccacatgggccagga

SEQ ID NO: 53889 - DNA, 916 bp, Zea Mays
taattcttcaccgcgccaggaccacgacgtcgcacggcggagctttaaacaccggtgagattagactagccggatggcgcaaatattggtgctcccgagcggcagacaccagattgaactcctcccacgcatttcccctaaattaattttactaatggcgcacggaaacgtcctgcccacggtgaccgcatgggcaacagaagaacacgggctttcacggcaatctagggcgatctaattcaatcaaaggggtcgaggagcttgaggaggacctaagggcgctagaacaaacaatcaaggcactggaactgacctggagcaagctgtccacgacgagggtaatcgcgcggtgtttttgagcagattggaggaagtgtgaaattggagctctcgggtacaccattggaggcaatactttgtggctgggtgtgtgattatcctacggacctaacggcgcggtcaatttataggaagcaagagcggcggccgggaatttggatgacgacgcgcgacgaccggagaaggagaggagcactggtgcaagcgcttagtggttttcactgtggcgctccctccggcgatcactggatcccttaacgtgactaatcgtgacgtggtaaagtgtctggacacgcagcgcacggcagtgatcgatcaacgacggtgaggtcttatcccgatccaccgatgagcaagggggtacgacgggcttagccgtgaccgagctcgggctgatcccacgcccagatatttactttaccatagttatcccctcgctagtgaacacgaatcacggtgtgaagatcgtcggcggtgaggggggatgaatcgggcatcttcttcagttactgtaccatggcatacatctccggttgactgacaaagcaccttgaagctagattttctcctaaattcg

SEQ ID NO: 53890 - DNA, 900 bp, Zea Mays
gtttgaagcagctttccgggagcaccatgtgccccaaggactggtacagcttaaggaggacgagttccgagaattgactcaagacggaaggtctgtcagcgaatatgtgcacaagttcacggagttagcccgctatgcgctagatgatgtcaatactgagagcaaaaagatggcccgtttcctgaagggactcaggccagaactcaaaacaattctggctagccaagacttcctcaacttctctcacctttccaacaaggccatgcaagttgaaagagctaaggaggaagaaaaaggacatctcaaaaggaagttccaggttctccgggcacagcagcaggactgtcaccagaagactcgatcatttgggtttccacccaaggggcccaacttcagtagaccagctggacccactccatcacgattcagccagcagagtcagagctctttccattctccctcagtggcaagcaaccaacctccggcgaatgcatgttggcactgcggtgatccaagtcacttcaagaacaactgtccgcagctgaagccaccaggacccgcctactccaactcggtgaatggccccaagaatacctcggcatccgcccccaaggcgccctccaccgtcagccagcagaacaagactccgtaccaagggagggcacgtgtaaatcacgtcgatgcccaggaagctcagcaggctccgggagtagtactcggtgagtttcttgttgaatttactcccgctaccgtacttttcgattcgggagcatcccactacttcatagccactagctttgtggaaaaatatggcattcccactactcctctagagattcctttggtcacccgaaccccagggtccgacctcctatgccagctaaaaagctcccaagtcag

SEQ ID NO: 53891 - DNA, 691 bp, Zea Mays
gttgtgggcttcattgagcaaggtttcccgtgcctctcccactagtacacacaggcggttcttgaaccagaggactccttgttcatctgtcctaaggttcggaagttgctccttgcgagctccttccataagtctggctgtttctgcgtccaggtgttgagccttgcatatgagatcttctagattaggcttgacttccaggctaccgttgtctcccagacatgcatttagccgagctgattctttcttccaatcttctagaaagttggttcctttaatcccgaaaggttttcggctgagggcgtctgctaccacattggccttcctggggtggtagtggatttcgaggtcataatccttgatcaattcaagccatcttctttgacggaggttgaggtccggttgcgtgaagatgtattttagactcttgtgatcagtgaagatgtggcatttgttcccgatcagataatgcctccatatttttagggcgtgcactatggctgccaattccaggtcgtgggtagggtagttctgctcgtgtggcttgagtaagcgggatgcataagcaataactttctcattttgcatcaagacacaccctaagccttgcttggaagcatcacagaagatgacaaaatcctggtgtatatctagcaatgtcaaaactggtgcggttgtaagcttttccttg

SEQ ID NO: 53892 - DNA, 336 bp, Zea Mays
gacagattgaccaagacggctcatttcttgccagtacacatcacctacaggacagagaagtatgcagagatctacattgaccagatagttcgtctgcatgggataccaaggactatagtctcaaacagaggagcaccatttgtggcacgattttgggaacaattgcaggaatcacttgggacccatgtcatacgaagctcagcataccatcctcaaacagatggccagacagaaagggtaaaccagattttggaagatatgttaagggcatgtgtactgcactacggaaaggattgggacaagtgtctttccttgatagagttttcttataataac

SEQ ID NO: 53893 - DNA, 806 bp, Zea Mays
ctgagtcaggcagaggtagatcccaatgactggagagagccaatcatcagatacataagaaatgaggaagaaccagatgacaaggctgcggcggagtgcatcgcgagacagtcggcccactacaccattatagggggcttactatacagaagacgtacagggggagtactcatgaagtgtattcactcggctactaggaaacaattgttggacgagatccatgctgggcaatgtggcgtgcatgcagcgtcacgaactttggtaggaaaagctttgaggtctgggttctactggccaacaacaaagaatgatgcagccgagttagttcagaagtgcgaggcgggccaattcttatcgaagcagcagcatctacccgtgcaacagttgtagactattcttgtgacctggccatttgcatgttgggggctggacatgattgggcctttcaagaaagctcaagggggatatacacacatactggttaccattgataaattcacaaagtggatagaatacaaacccatcgcctctttgacctcagcaaaggcagtggaattcattcaaggaataatgttcaggtttggaatacctaacagcatcattacagacctaggatctaacttcactagctcaaagttcattgacttctatgagcagaggagcatctagaccaagtatgcatcagtggcacacccaagagctaatgggcaggtggaaagagccaacgggatgatactcgatgcactcaggaaaaaggtgtttgacaagagcgagaagctcgcaggaaaatggatcagggaactacc

SEQ ID NO: 53894 - DNA, 634 bp, Zea Mays
cgcagaacttatctgctaagggagaggggtagcttgccgctgtcgtgtctgtgcagtgggaatcgccactcggcgagctgccgagagtgctcgtccaggatcgccgcatgtgttggatcgtgttctacgtcggattagcaagcccaacgtcgacgatttctcgccgttgatcgtgtttcgccaggaatccacgggccaccgtggactactctcctacgcgtataattcctggtatgaatccctcaccagtacccgtcttcattgccatagtgagtagagtcggtcgaattagagtttgatgcactcgccggcaatggacctcaccgtgtcggctttgtggccgccgtggtgggctgtctaagtaagaagaagaccctagcgccgaccgatcctcctcggatggctaggattagaagtgaatttaccccttcgcttgattaaatcgtatccattgatgttcgatctggcggtcgggatgcgattggcgcacattgaatcgagacctttagattgggatccgagggtcctcttcgaatgccgattgatgtgtggatagatctaatcttcgcccttcaatttttatccaacggccgcgtgtccgccttaccccttcggttgcgcgatttgcaaaaga

SEQ ID NO: 53895 - DNA, 882 bp, Zea Mays
gacagaacacaagcgcgcaacatatcttccaaggtttggatcgttcgctctgactgaccatcagtctgaggatgaaaagcgacactaagagaaatcttggtgcccaatgcactgtgaagactctcccagaatttggatacaaatttggagcctcgatcagaaacaatggacttaggtaccccatgaagcctgattacttccttcatatacaaggggaccaaatctgaagctgaatttgtggtcttcatgggaataaaatgcacagacttagtcaagcgatccactaccacccaaatagcatctctgtcccgaggagaacgaggtaaacccaccacaaaatccatggtgatatgctcccatttccactccggaatttccaatagcttcagtaaacctgcaggccgcttatgctcggccttcacgcactgacatacttcacatgcggccacatacttagaaacatcaaccttcatccgcttccaccagaagttttgcttcagatctcagtacatcttggtttcgccagggtgaatggtgtaaggcgttttatgagcttctctcaatatatccatcttcacctctgatttctgaggcacacaaaggcgacccctgaaacgaaccaaatcattctcatcgatggagaactctcagggtttaccatcgccaaccctctttcgagcttcctgcaataaatgatcctactgctgagccgcacgcactttctccatgagggaagattgaataagcatacaagtctcctcactagcggtgccaacatagcacaagacgatccccaaacagtccagatcagcaatcaactacaaggccacttttggaaccccggacctgctaaggccatcagccaccacatttgccttctcg

SEQ ID NO: 53896 - DNA, 458 bp, Zea Mays
gggggactgaggttccacatgggagtcctgactaggagggggtaggcacttggagggaatcttgatcgagatagtttccatgctgggctcaacgaaggcagagataacactggacaataaaaatttcttggcccattcaaaagaatccggccgcaatagtaggcccatgaagaaagcagcccacacctttggaacaggaactaattctgagttggtggggaacaagtcagcccaagaagaaaggcgttttctagccaagtaatcttcatatgcaggatcatggttgggctgctccaagtgttgcatgaagcccacattgatgttttcttccacttgcatgttctcctctccctggtcgttgtttccctccaaaagcatacccgctgggggaaaggctcgcaaagcaagaactgcatccacaggttttggagcttccacctgagggaagtggacctctt

SEQ ID NO: 53897 - DNA, 780 bp, Zea Mays
cagatttccaaagtttcactgaaaaagaaaaaggaaaagcttaaacagtgctgggccgattctagcccaggcggcccaaacccaggcagaaacgtgtgtgcatccgcacccacactgcagactttgcagaaaggcccctgtcattctaaaattctttaaagaatcccttgcactgttccacagtctcactaaaagtttacaaatacatcactgtgttttcttttcttcaccagactcggcccacgactgtgaccggcggggagctgagctccggtgagctattactggctggattacactaagactagtgctaatctttggtttaaacctaattctagccctgaggagtgtttcccctcaactaatttctggattggagccctacagtgctctgcccacggtgacagcggcaacaacggaccactaagcgcgttcccgatgatctaaggcagctcggttcaattgggcaggttgatgagcatcacggttacataaggacactcaaacgagggagcagaaggtttgaactgacctcaattgcactggccacggcgagggtgttcttgcggtgggatgaattgatttggggaaaactcgcaattcgtgagctctggcaaacgattgagggtgggagtgggtgctttggtttcgtgatgacatagtgcagctgacccggccttcaatttatagagggcttaagtggtggtgctcaatttggccgagccgtgctggtggccggagagaggggagattacttgtgaagtggattcgtgtcttccg

SEQ ID NO: 53898 - DNA, 520 bp, Zea Mays
gtgagatccgaccacccctcggtagggtttagtcttggcgagtggtcccactaggggctcgacccgctgaggcatctcattgagtctttccttattcgaccttatatcagggcctcgttgtcacccccttcagctaggtaaccatagaggaatgtgtggtacgaccttggacgtgggtacgagcaaataacctttatgatggtcacctagcttgaggcccactaggggcttgctcggtccacccctcgctctacgtgagaagttggggtgactttcattttttacctggttggtgtgagacaatttcgggtactatggtggtggcgtagtaaaataggatcatgacgctgcttggcgtgggcggcttgaaaggacgtgaaacgtcctatcctctgtatcatgtgtgggtggcgtgacggggtggataaccatctcgcccgttgctggcacatcccgtgcggcatgccctcctggcactctgcctgcagtagtgtgaaacctgtaggacgcacagtttccc

SEQ ID NO: 53899 - DNA, 558 bp, Zea Mays
gaagcttgatgaagtaactgaaaatttcaatgtagaacaaacaaaacgtgagatatctgatatggagcgattgagggtgcagaataatgttgaggagcttcgttaggctaaagagaaatgctacaaggttgctatggaatgttgtaataatttgaaaaataattttgctaaggttggcgcattctcttcgaagcagaactttatccgtggtgatcctgacggggttatccagtggattagcggcgaagccgaagcttttgaagagatcctcagtgatagaggagacttctacgcctttgtcgacgcccacggagctatatcggtccttgagaaggttggctgcgaacatgccaaggttgtggttcagccaggattctcgatctcagccaacgacattaagaacccttcggccgaagccgctgcactaagtggaaagttttattccaaagtctggctgaggggtgaccgacagatagctgacgaagctatccgaaaaaacgagaaagagtctcatgatgccttagaagaggccaaaaaactgaagaagttgcagaacgt

SEQ ID NO: 53900 - DNA, 474 bp, Zea Mays
gatcattccactttagttgcccctagaggttctgtgtactaggatctcacattgcaaagcttcatatagggctcgttgtctagggttacatgtagacagatcaatcgccatgatgcgctcatactcgttcaaagactccatgtcaagttgttaacttgcttcttccttagttcttttacctcttcttgcatggttactaccttgtcgatcttcgatgaaatgacaccttcaatttctttccaaaaatcaaacttttttatgtgcgtctctaacacatactagtgtactctgcacttgactagcttcccgatccatttgatgtagttcactttgcagctttgctagcctccctacccataggcctcttcaaaagtcgggtttgagattgacttccttcctcaggtgtcctcgattatgtgaggtcgatggccaacaacatactagtgtactctgcacttgactagcttcccgatc

SEQ ID NO: 53901 - DNA, 770 bp, Zea Mays
gccgccatgtgggtcccgcagccagaggcagggcgtggtgggctggcgagaaaagggaatgagggagtgggccaagaagtgaggcccggtttggttccttattcacccttttttctatttttatttcatattttcatttcccatttcaatcctaagtttgattctgaattttcaaacatatatttgatgtaccaaatagaattctcagcatgaccatgcaagtataaattatatgtttatttatatttatcctttgcccatgccacaaaaattataatgaagtatgatttatgtaaaacatctcatcatattatttagttaagaaaatagttcaaatccatagcaaaatttatattaaccttttagttaactttgggaaaatacttcaatggataagcttattagaaagacgctttaaattgtaaatctttagcaaattttttctcaaatactaaaataggattttagggtgttacagctagcaacctggcttttggggcttggggtagctcactccgttgctcgggcgaatacaacaaagggggagggatattaggggtggggtccttggtgagctagcttagggtgtgccacagcccacctagacccattgggtccgccactacccatgatcatcgggaactgtcatgcttcggacgcttgaacgaaagtaggttgtcgagggataaattatttttcatttcctgtggtcacgcacggtgcccctgctttaacggcccacaccatcgattttttatttcatttttttg

SEQ ID NO: 53902 - DNA, 989 bp, Zea Mays
actgtccaaaatttatttatgtcataaatcatagttaatacgaagcaagaactcatagaaccaaatagtgtaccactgagtttttccaactgcaaagcttcttcggcctttttagtagcttcagtggcctggtgaacctgtaaaacaaaaatactactacacaaaaatcgaaggacaagattcaacattcaaaacaaacctctccctcactttctctaacaacttcatctgtcatttgtcttccgccaagaagccagatgtcagaataaaatttccctcgcagttcaacatctccggctaaagggtctttaatatcattagctaaaaccttaaactccggtcgaatcacagacttcgcgtgctcacagccagctttttaaagcaacgagactgctccccgtgcacccatacaagcacaaaaatctcctcaaccaataagaacttcgtcaaaggcttcaacttcaccttcaatccattttattgctcttcggtatcgtcgcgaacaaactttttgtcgctagaaaaaacatcgacgctagcaaacatactcttcaacttctcgcagcattgtgcggcaatggagaagcattgttcctttgactcccaaagctcatcaacattattttgaaccctgttacgtttaacttcagttatttcacgcttcgctttctcaacttcaaaatgtttgctcatgtcatcaaattttccttgcagttttggcatctcagatttatgtgaatcaattccaggatagcctcgagatcggcgatgcgttttgcattatcctttttctcatcttctagtttcaaaattttcttattctcctcttcagatttttttcatttcagcacaactctcttttagttcactaaccagagtgatcagaattttatctttctcttcggcttgatgccgaagatcgagaaccactaaccttaagtttctgaaggctacccaagtactttcgtcctcgacgtccttctgggcct

SEQ ID NO: 53903 - DNA, 302 bp, Zea Mays
aaaaggcaccccgtaggcctgctggtgccactcattgatctccgggggaggcggatggagaggcacgtcaggcgagcgaggggcaaaaggcatacccatagaggaagcttgacgacgaagattgtcgtcagtctccctctgacgccttgccagctcatgcacatctgcagaaatattccagcacataaaaaagaatcccgcaatcccatgggccaagcgggcacccatccctcggccacgacctcgaccacgaccacgtggtgtgggaaatccgcggccaggggagggatgcgaggcaccgg

SEQ ID NO: 53904 - DNA, 279 bp, Zea Mays
aataatcttgtgcaaccgacgccgacgccgacgccgacgcgaccgtcttaaaattcgggcccagcagggcagcagcgcgcaggcacactagtggtcctgccaaaattttcccacatgcatgcacgtacaccgtccaggatgtgatcggggcctagctactagctaggagtagtaaacaccattaactaataagtataatgcgtgtgcggtgcttattaattattaatgtcgtcaggtataatgtggtgtcagacgacgacgacacaccttcgtcgccag

SEQ ID NO: 53905 - DNA, 859 bp, Zea Mays
gcgcgtggtgcctcgacgctgctctgcacgttaagataactattgggtcgatggtgtatgtccccctttggatgagctagaggaagaagatgattttcctcttacctaaggatttgccggtaggcgtttccatccaatgagttagggaggtcgttgtcgatttgagccagcacacctccgacttaacttggtgtttgcatgaattgagagaagtcgggtagcaactaacacggaaggaataattggccacatggttgaaggtcgtcacactcgacatgctcgtgccggtgctcatgctcatgcatgaaatcttgaacatcatgtcatctcttccgtctagcattcatcttttcaatgaatccttgctcgtctggggtcggatcacgttcgctggcgttatgatgacaccggatgttctagcgtcggttctggtcacagtgcctgttgtactactatgagtcttcccctgccatggtggatttgttgtcagagacaacatcatcttccactcccctgttgatgacaagctcatcacggaagtagaggggtcgttctggcaccatagccatggtgaccacatcagtagacttggtgatcacgatagcttcataaagcttggagatcttgggtaggcatgatccgcatgagcgtgaatccacgcgggatgcgacgctctgggctccgacagaatgtcactagcccaccaaacgtcctttgagggtaatgatgatgacgagccctaattggaatctggcaggggaggtcttccctttgtcgacttatagtggttgtcgtggtggtggtgttggtgtatgagaccatggcccccaacgtatttcggggtgactattaggggccc

SEQ ID NO: 53906 - DNA, 646 bp, Zea Mays
tagctagtttagtaggtgtctatgagttaaatgagattagtcagaatctggttgggttgttttgcttctaaatggtttggataggttatataatctattatgtaggtcaagttgttgggtatggccaagttaatcgtagtcaccaatttaggcttaagttagttaggagtatggccttattctttgtaccagcattaagtaactcacactagattagataatattagattagataggatctagattagattggttataactagattagtctagtttaggttagatagatctaccagggtaggatatatattattaggatttgctagaatcttttgagatagtatggaccatatggtgtaggtaggtcagaatctctgttaggttagaacagagggattatgcagctatcgggtggttaaggtagttgcatatggccaggttggactaagactccaatttagattaaaacatatttataagagtaggatccaatcttattttaccagtattatctaacatgtttgttcattagattagatctgatcagattagatgggatcagaattaaattggtgtaatcagattagactagataagatctacttaatttattttggaatagatcatgtttgttacactattatta

SEQ ID NO: 53907 - DNA, 831 bp, Zea Mays
agcgtttgatatggctttacagttaagagaagaagaaacaaaaaacggcggttcgtcgtcgttacatttgtagcggcagtgctcgatggattcccatccccatgacacctacgccgtacctgaacacgccaataaaagctagggctcaacaactccaataacgtggtgcgggggaaggagaacacgcactactactagctgctagtgctactactattcgcggcaggcggccgggcggatggcgtgtcaattcttcagcgaactcggcacccgtgtagttgcgtgcagtgcagtccgttgctactgttatccagaggagagagagaggaagagaagtgcgttttaactgtaaaccagattaacggattgtcatatcaagcacatatcgatcgcgtcagacgactgtttgattcagaatctaattagtcatctgcagatcagactgtttgtttcggaatcttggatggatggatggatcaaccacaaagaataattaataaggtaggtaaatgaagagcatcagtgtactcagagatttcagctgtgcagctagctagattagatatttctagcaaataaaacagaataaaatcaccaactttgggaaggaaggaagggaagggacggaaggaagtacattttaacaagattatctgcatgcatggcttgatggctagccgctagctcatcgtcgtcgtccatggcccagtcgttggccgcgtgatcgagggagtagagtatagtaatatatctgagactgagaccgacgtcaaacaaacataatttaaaaaaaaagctcatcttttgacgatcgacccctgcaggttccgc

SEQ ID NO: 53908 - DNA, 700 bp, Zea Mays
aaacaattcgacaatcaagatttttgggatttttgtgccttcttaggaacaaaggttgtcttcgcatcagtgtatcaccgtcactccaacggagtcgtggaacgcgcaaatagacaatgctttggggacaagataaggctcctggaggacaagaagggcaagtggggaggccaactaatagaagtgctttggggacttaacacaaccgaatctaggacaacatgcttcaccccatttagactgatgtacggagccgaagccatgacgtcgcaagagctacatctcggttctccgagattagaccccagcaccatccggacatcgaagagtcaacttcaaaagatttcctcgatggagaccgggccagtgccctaagtacagtgaaaaaatcaagtagcgatgaagacttggagagacaaggctgtcactccaaaagaatttgaagaaggggacttcatcctcattagaactccaagaacagagtcctgagggaaactcgaaccgaagttggaaagacccttcattgttaagaagatgacgtccccaaattcatacagactcgtagatcaggcatgcacatacctcgaacactcttgcaatgttgataatatgagaaagtacttcctgtaacatagcacactgtcagggccttcacacctgtaactccctgaattttgtggtataaaatttcttctctaat

SEQ ID NO: 53909 - DNA, 778 bp, Zea Mays
caaactgttaaaaacaggacccaactgtaatacttttagaactataagggacggtgggttagttttaataaaacaaagggtctcttttgaaagaagtgcacgacgaaggggtatggatgaatatctgccgtccgatcagattcaacggcacagattagaagttactcataccgaacctgtatgcaatccgagccacccaacgagcgattgacgtcccagatttaaaacaacccagaaacgatctcgctcgtccgtccacgatcagtggcccagatcagatcaaagtcccgtgaaccggtactcgatttccaccgttggatggagatcaaatggcccgagttttatcgcccagatccaatccgaaccacccattaagatccaacggtctcaaagctcacggtcgaaccggtacgtgtggcttaatctggggcgttcatcgctgaaccaagggccaccgcatcgcccccaactacaccccggcagccaggcacctcctagagatggtggtgctgccgcgcgacgaggtacgccggtgaacggccgaatcaaagccgtggcgcaaaattggtcacggttgggcgcaacataccgaggagggtcatccgaattgattaaatagtttctcaccggtaatggaggcagcaacagggtcccccacggcgtcacgtggattcgcggcggtgttctttcttcggtgcgcagtcccagttatgcacgccatggctcccagattcgacgacccaacgcctgattcgctcaatttcacgaagctctcgat

SEQ ID NO: 53910 - DNA, 380 bp, Zea Mays
ggctgaccgacctgcttaccattgatggagccgtcgcggtagaggtcctttgctaccgcgtgctcagtgcagggaggaagatgattctgggagcgtggatttgggatcgtgcggcttatattagatcaagggatgcgttgggtcttggccgtaggatcgcgatcgggcgtccgctatttggtaccggtttgggaaagattagatctaatctagaccaccagtttcgaatccaacggccacgagcatgccataccccttcgacctagcatatttactcatggaaccctctggttctaagaaaataacccgccatccattggtgttgtactctgagtctacagatttttaccccgagacccctgtactttgcagaaattgag

SEQ ID NO: 53911 - DNA, 375 bp, Zea Mays
gtctgctagttgcgccttgggcagttgttagcatagtggcctagctcaccgcacttgaaacaaccattgggttgaactggtgcgttgttgcttctggcctgcgtgttactggtgccaccttgatgattctgtgaactcccaccagacctctggttggtctgagagttgctcctttgttggttctgattttgattatttctctggccttgctgtccagagcgttgcacttgataattgttttcaccctgatttccagagcggaactgtgtaccttgagcgttgttcgggcgagtgttcctgctggactgaccttgaaacttccttttatggtcagataattcccttcttttactttcaaggccaattgccttgttt

SEQ ID NO: 53912 - DNA, 348 bp, Zea Mays
ttgtactacacatagaggttttcttacaaccacacacatttcagggtccaattacttcaatgcatacaataccaacacaacaagaacacactaccaacagaatcaacatcttcactgctctgagcaggacatctactgttcttgccaaaccattaatgtctacattgtattgatgttacattgttactagcaaggttgtttcttctatgctgagcggctgcaagtagcatctgctcctcgaaatgaagtgtagctagcaaggatatatggctggcttagcatgattatcccatcttatcttaggtagcacgtagcagagtagcgcttcagcagcggcgttagtgttca

SEQ ID NO: 53913 - DNA, 708 bp, Zea Mays
cctaccaatgggtttcaggaagccataatgatgaaggctacgcattcatcaacatgacctccccgatatctattggtagggccccatgggccaggaacaggggctagcacagtccattgtgctggtctatatcctggtccctcggcatgtgcggtggtcatcgttggccgccatacaaactcatggcgtgcttagtctccaccgtcacccacactcgagagggttaagtccaaaatccatcatcgtgctggtggagactagccagcaagccattaatgggttgcatctttagcaatctcatcacgcatgaggtggccaaccgcggtgaggagggcccatgaaagctctccacgcaagccagtgttccccagacttgacccgtcggacacaatctccatggtgtttggggtagcaccgacaacctccaccaagtgctgcctacccctcgagccatatgcacaatggagctcaaacggtttaggttggcctcgaaccttatgccctgaaggtagcatgagaacaaactcttcccacgtaacggggttatatttgtccatgtcctagtctggtaaggtcggcctccacagacatggtatctggcggcatccaaggcccagcttggtcagggccgcccttatgaacacggacttaggtgttacatgtatcccattgcaaaggaagagtcagtcctcatccatcggtttgttt

SEQ ID NO: 53914 - DNA, 466 bp, Zea Mays
ccggaacgaagaatcgagaattcgagggatcggtggtggttcggcggaaagaaagggctgggtgctgctgggtccgggcacggagacgtggaggtcgtgggaaatggagcgccttccttgtcaggtcgcgatggttgtggcgtcacgttggcacgtcacagaaaaatatactagagagttggaaagcaagcaagcaagcgccgtcagtaaagcaagctgtgggtacaaatgtttgccacccaaatgtaaaaagatgctggcaaactttctatagcaattagcaaatacatcgctgatggaaaatacgtgcgtctgtgcggcctttggtccttgctttgggctttattgggcctgacgctatcttgtgagttgtgaggagttgctaccacttctccagtgcttcttcaaacgtaatccaaaccacaaagtagtactgtagtacatacacatgctacgtagcacacaa

SEQ ID NO: 53915 - DNA, 589 bp, Zea Mays
agcctggtgatggatcctggttctccatagcggatcctcttgtggggaggggacaacaccatggcagggacttgagcttcagggggatcccttctttctagttgagcttccagggatgcaatccttgcgtgtgcatcctccagctccaaatgtgccctagagaggtccagggtagcactgtccaggtcggtgttaagacctgccaccacaacccaactagggtgttgagatgatcttcttcagctctacctagaacaatgctggtctggctttctccacgaagtcgcacaggaagatgtctgtactttgtgttgtgcagctgctgccggtaagtgtggctgagggaccatagagtttgcctagcagcatcgctgaccgaagcagtgtaggtggatagcgacgttagagattcatgagctgacagagacctaaaccctctatcacctgcatcccatcgccctaacatgaatgtgagtgatgcagtagcaagcccgagggggctcgcacactcgcctggtctcatacagggtttcgggacgttggttcccaacgcatgcagaacatcctgcagcaggttagggaagtgccc

SEQ ID NO: 53916 - DNA, 365 bp, Zea Mays
taggggtgtaggagtcgtcgaagaggttggtgaagagttgcgaggtcgaagtggattgaatggcgacattagccacttcttcttcttcctccgagcttgaactctcttcgtcggagttccattcttcacctatgtgggcttggccatacttcttcttcttcttgaagtatcccttacccttgcatcccttcttcatcttgtcctttttgtaatctttcttggcatcttgttccttcttgtttggacaatccacaatgaagtgaccggtctggccacattcatagcatgtcctcttctttccttttctttgatatttgtcattcttccatacaaacttcttgaaagtcttgatgaacatagttgtg

SEQ ID NO: 53917 - DNA, 677 bp, Zea Mays
gttgcgacctgctcctccaaacggggagctatcttcgtgttctgaccctaacaagaggaggtcgtggaatgaatccctgatggggtccactattcctacgaacttagcacaagcgggttctatcgtgcaccgtcgtacgtcacttcccttgacggacctgagccagaggcctccgagccccctagcaacatcggtcaagtcctttgtcgaggggatagggattttgagaccctgatcattgttccctcgttgttgatgacgaagtcaaggcttccgaaacaaatggtcattccggggccccaaactacaccgtggttggccattcgaagcctggagaagtcgttgggaacgcgcaaggccgctaccttgcgcgccaactctcgatgtttcgaactagctccgttaagtacatttattagtgtgtgttctatggtctggatggtgtgctcagtgggcgcaagatttatacttagaacgtccctacatctagtcttcggtggctcgcgctactggcaccttgttgctcaaagctcgtagtaggagttacaagtggagagtgagggaggagctcacaagtctcttatgcgtggctagacctaaatactacgggttggatgctctctaccaagccttgggcgtcatggtggttcgctccttggcttcgacctccatggtcc

SEQ ID NO: 53918 - DNA, 969 bp, Zea Mays
atttatgaaactacattttcatatatctatccatctatatatatggaattggcaatatgggaaaaaacgcctaaggaacagtagcacggataatcatagtctatttttaaagataatgaataaaagcatcttaaacattacggataggcatacctatagtattctaaaggaagcatgatgaaggtgggcataaaatgaggtgtgaggaaagtggaccgaaacccatttacttatagattttggtatttgatgattaacagaaccatttaaactaatattatatacaagtgtttatgaatatagtttcaaggatacaacgtggactcggacgaaagcaaagtggtgatcaagaagatcaactcctcaagcaagactttaaatgactcacttaagacatataaagatcatgcaagaattaaagttatgtaatcaaagaagcccagacatagacgtgaagaaacgaagaaaaacatgcatcggacaggagtagcgttgtgttgaagaaagggctactgaactagagaatacactacgcaagcaggtgaataccatattcagagtggtatgcaacatgcttggggacatccataaggtatcgaatatgtttgatatgccaccgaatactcccaccaaatagagtactcaaagaggttacaaagcaatctgagagggactacaacgcaccagatatgtttggtgttacatcagtcattgcaccagatgcccatattcaaacggttggcaaaaactagtttcaacaactagctaatacagacactcatgtctatatccggtgcaagcacgtagagattctgcattggttccaaccgctagttttaaacttggaggctatatgtaccaccccaaccagtcatttgagacgtgtgagagatgataaacattactagagtgttgaagctccatttctatagctctagacacataggtactcaaagatcactcgatgat

SEQ ID NO: 53919 - DNA, 662 bp, Zea Mays
tttatctcacatagtttttttagggaggaggttatgtctaaatcgactgtaagtttatagccagtttctgctctctctctctctcttctctcctccattccaatattctacttttatacttgctatacttgctctaataagaacaagcctatcggatatccatgaaaggtagcggtactcatgttccgcttagttgcgtggcaactaggggtgaaaacgggacgggattacccggcgggtaccggatacgggtacttaaaatacctggtttttcgggtaccggatacaggtaattttgtatacgggtcggatacggatactacccggatatacatcagtcggatacgggtaggatataggatgactactatccggcaaatacccgagacgtacggataggatacgggtacccggttagcgggtacccgcttcagttcgtgcgtgcgtcagtgcgtggaatggaacgtctccagtgcaagccggcctgctagcgcgtttcaattttcaagtccaaatgtcaaatcgaccagcccatgctgccatgcacatggcacatgcaaacaatgaaacgagtccagtcggccagcccatccggccataacggagcgccgcacgaccagcccatcctgctagtcacttctctagttctctgaatctttgtt

SEQ ID NO: 53920 - DNA, 540 bp, Zea Mays
tagtgatgtgattagtaaaataataatcccacatttagggcctcattagtgcaagatagagccttctagagcagacactactcacattagacttatcttaatcaagtgaaagtctatagcttgttactcttggtgatcgacaccacctagacagcttattggtgattggagcatgatgatgaccctggaggatttttggggacccagcatggagttgaacacggttgtgaccgattcacaatgctagaggggcgaagaatcagctcgtagtgagcacttagttcttgcaaggactaaaggggagctatacccttgcatgtgtgctccaactaggattagtggagactaccgactcgtcgatacctcgagaaaaaatcgtaggagtcttctaacccttgctttactttatgcacttactttgatcatttacatttcaagcaattgccatggtagcatagggttgttctagagcgcctagcttgtcattatatagatagatagtttggtgaagttgggctttaaattaggacttaatctctt

SEQ ID NO: 53921 - DNA, 765 bp, Zea Mays
acaaaaaagtgtaacaaaatattaaaggggaaaactaaaatgaagggaagattaaatcaatagggagctatataacctttcaataggcatacttggtgatatttctcaatgaccagttctgtacttcagcacatgctcaatacaagaggcgggatatgcggaggaaaatataaaaaaaatcaatccctttagctgttatggatttgcgtcccacactgcatttactaagggatatcagcgtgcacatgagtaagttagtatgaattatgcgcatgtgaaatagaatcccacgaactatttctcacaaacatgtgacgtggtagaggaacaaacaaacatgtggcacacctgtagatatgtataaggcatgccacatatattttagatctaggaactaccacagtagaccttacgggaataaatgtgagatgagtacctctggaagcgggatcagccttcgcgtgtgactgcgctagggacggctcgtggaggcaaactcacccatgctgggacttccaagccactggagacctcgcatgctcgagctgcacaacgaggagggacgtcgtgacagcggatgcgaggagcggggagggacgtcgcgacagccgcgtcaaggaacgggtggtggtgggattgctgtcgctagtcgctgtcggaattggacgatggtctgtggacatgaagagcacggcggccgacatggaactggacggtggcaaacgcggcgccgaccgtgcgggatacatttcgacggcggcaatc

SEQ ID NO: 53922 - DNA, 365 bp, Zea Mays
gcacggctgggtacttggcgaagtgtgccctcgccagatgcctaccttgggcgagcagttggtgcgaagtcctaccttcgccttggatttgcgcggccggaacccgtccgcgtttgtgcgtgaagtagaggatgaagcagtgagaattgtggggcgatatgtgccgaggacagagactttgcagagttgggatattcgtggttctaatgttcgtttgaaccgtgttttcgagttgaaccgtctgccatatggcggttacccgggagacactgctgttgctactgtcgatcgccgggggaaaaaggcggcggctgcggttgaggaaggcccttcgcggggagcggtgccggctgtggccacaaaaa

SEQ ID NO: 53923 - DNA, 514 bp, Zea Mays
gaaggaaccatttgaagctttgtccgccgccaccaacgaatctcattcataggaagctattcaggagccaaggtatgacattgggactatgctcgggcgtgctgcactcgtgcataggataaccaaaccgaggcatcgacccaggtgtgggcaactgctcaccagcatggtgtcgccgccgcgtatccgctatccgtcgtggatcgactcctccgttgtctccgaaccttggtacgcccctttatcgaactcaccatcccctaggcatcgtgtagcaggctttaattgggttttcatgctctgaatcaccaaatcaaactgcgccggtgaggttgccaccgcggggagggacctctgtcgcgctgggtggacgcaaggtaggcgatgacctctgggtcgttcgatcggatactggcggtcgagatttaatctgagtagctattcgtatcgaccgtagatcttctagcgagcaaacgagatttaaaaggaagaaaatgattcaggtgaataaatc

SEQ ID NO: 53924 - DNA, 315 bp, Zea Mays
tgattccgttggaagcaggatgatcgttccttcatcgtttactggtggtagaaggtatcatgtgatgaactaccaagatgctatggcaatatgtagagtctttggccctcctgacttgtttgtgaccttcacgtgcaacactaagtggaaagaaattacggatggcattcgctttgaaaccggacagcagccatgtgatcgctccgacgtaattgttcgtgtcttccacatgaaagtcgatgagttcgtagctgatatcagggagggaaagacgtttggccctgtacttgcaggtatgctgacgtttgtggcctt

SEQ ID NO: 53925 - DNA, 325 bp, Zea Mays
aaggccgtagcctaggcagaatctattctcttagttgacgacactagggacccttcgattgaggcctctacattgggcagtaaattctactccggtgtgtggatgaagggtagtcgtgagatagctgatgaagcaattaaaaagaatgaaagaatctcacgacgcccgagaggaggctaagcgagctgaagaagctgctgaatgcgccatgattataggtatttttattttaaaccttttgcttctttgttcgtttctagcttcgaaatttaccatcatacactttattacagtcggcctttctccaccaccagagccatacaac

SEQ ID NO: 53926 - DNA, 396 bp, Zea Mays
atcggaactgcactggtcctactaccaatgcttcataaggtaagtgcactagcaaatgttgcatcacattcataaatccaggcggaaatactttttccatcttgcatacaagcaccacgatttgtttctcaaattgaatcatcaatttctttgagatatgcttagcacatatatgtctatatatgtaactaagttcagcaatcatcttccacagaggaggcttcaaatagccacggaacattaacggtataagtctttccatcaaaatatgataatcgtgagccttcaaaccatttaatttattagtgtcgaggttaacagtacgttttatgttagctgcatagcggtctggaaacttcaacatttttagccatcgaaatacttcttttcgctctt

SEQ ID NO: 53927 - DNA, 366 bp, Zea Mays
ctcggatggtccgcaatggtgcagagcgtcttttgatggtgtagaaccctagatcttaaggggtgttccaggttcggtaggccacccggggtgtccctaggcattgtaaagtcgcctagagatgaaataataggtcgatgaagattaatattaggctaattactgttactcatagggcaggaaagtagagaaaatgatatgtagattgattggttcgattgttggtgtgtgcaatcggtcgtacccttcatatctacatagtaaaatgtatgtgtgttgcaacaacacatcaattatatttagggctcaatcggaagacaggatcatggactcactcaaaaaaaattaacatgaactcttccctta

SEQ ID NO: 53928 - DNA, 617 bp, Zea Mays
gcaatagttaagctagttcaaatgatcctcctttgtcatcataggtggagaataaaaggaatgacgttgtcccataccccatcatcccgtaggtaaaatcctaaggtatggatctcacataatgaggatgtctggtggctccccacagtgggtagtcatgagagaacggtgacctactgcaccttgaggtcgatcaacttctagatgacctcgaagaaggcatttatttatatcatcaagggtggatggtggcactccctatggtgtcgatggcataagctactatgccaacgaagaagacgtcttaccaaccatcacagtagtagcttccaaaccaaagatctttgatacaagatattatggcggtgactagtgttgagggagcacaagggagctggaggattatggggaggctatactagcgcaaaacaaaattttgaccacataaaccaagatctattgttgttataggtcatggaattaccactaaacgtgcagggcagcggaagcatctcgacgtagacaaacacatcgagcagtgtcatgcaatcgtcgacgtccttcacatcctcacatggttcatcctagtgctccaaatgcagcacctttgaggtatc

SEQ ID NO: 53929 - DNA, 497 bp, Zea Mays
gatgatgttggctccgacacgaacgagaccggtgagaacgctgcggcgccggcgccgaagtggccgtactacgcgcggagggtgccgcacgatgagggcttcttgctcgggctaatgcgggatggccgggtggactaccgttcgtcgccgcggcctgctgggaggctgctcgtggacatgctgagcacgctgctcacgctttgggtctcgctggtgcccgtgatgtggttcatacagcgtcagatgtctggtgcgggcggtgctgacaagcgacgcaaaccgaggaagcagagggtgggctttgatgatgttcagggcatagatgaagccaaggaggagcttgttgaggtatacgtggtttccattgtttactcattgaccgtactttgtgacgcttgatgaatgtgggaagacaaaaacgattaggcgagaaacatttcatcttaaaaggaaggcaattaaacatatatggtgtttggtttgaggaatgaggtagt

SEQ ID NO: 53930 - DNA, 509 bp, Zea Mays
agttgaagattaaaacctgtttgggtcgatgattgaggagcacaaaaaatcacggagcgaccgagcacagtccatctctgttaaccgtggcagtgagtgcacatgtgtagtgtgcaaggtgtgtgtttcctctccagatgcaacctgaaaacaatgcaggtagagaatatactagtttatgaccgagttatgtgaagttatgtggtcataaatgtatatttggagtacttacatgaccactaggtgtctgatcaaaaagggggcccgtgtcagtttgagtgtcatgagatgcatcaatgtcacctccctgccccaaaaatcaatgatactatgtttaaaccctcagtcaggtgtcaattacatttaatcgataattgagattacaaaggataaaacaaagatgaaacatatacatgtttttgtggtgtggcgtcaaacatcggcaagtgggaagacgtatatgagctcataatgttgcagtctggtatatgttgaggtgggatgttttc

SEQ ID NO: 53931 - DNA, 585 bp, Zea Mays
gccatatatatgtacaggcaatcccgtccatttcacccgcaccaatgcgacgacgctgcaagattgtatctagcaccaacaccctgaaaggatcagcgcagactgaagaaaggtcatcagtaacctcatgcgaaggagggatttatttctttagtagcgatacatggactagggaatgaatcttagatccttctggcagatccaacttgtaagcaacaagtcccactttctgaactatagtgaagggtccatagtatcggaatgcaagcttttgatttgatcgaaaagccactgatgattgtacatgtggttgaagcttcaaatacactctatctccaacttcgaagcttctctcatattgatgtgtatccgcttgatgcttcattcggtgttgagcacgcaacaactgctgcttaataagctccgacaacaattccctctcttgtatccatgtttccagatcaggtacagtgcaaagtcgtagattatgatcgaatccccaaagtgcgaggaacatagccatacaatacctcaaaaggagattggcctaatgaagaatgaatggtagtactataccagtattct

SEQ ID NO: 53932 - DNA, 567 bp, Zea Mays
agaaagaggagtacaggatgcgtttagttgctaacttgctagcaccgcttgttatccaactattgcttgtttgttgtacccatataaataggccaaatgtttgttttgtacaagcactgttttcgtgattctaaagtcaaaaaaaataaattttactcatgttaagctatctctagcagtttactcatctttatatctatattcaaacttcactctgtaaacatgtgcaaaatagtgttttatgtgaccacatggataaactaggggacacactcttaagaagacatcatgtgttccattaaatcaacaccccaaacttctatctagttacaacatatgaaaaaaagtaatctatctcgatgtgtaactacggttctaatagtgtgttgttatctctacagcaaaagagttatacaacctaagtttcaatcctataactaaactagcaagctaaactatggaagtaagcacatagcctaggtaagcaataaataaaaatgtggaaacttagttaagataaagatgtaaactgttgtcaatgggactcatgttttcgcctacacctcg

SEQ ID NO: 53933 - DNA, 309 bp, Zea Mays
gtgattgagagagcatgggcatccagctacttattatgtaggatataagttggataggtggaggtaagaaagattatggcaaggaaaagacttcatccgaaatgtttaagtcttgattcatctcgagattcgctttgactgttatatccttccttgttgatgttgatcttttcttcttcggtcctgatatcattaattcgaggttattgtatatccgcagagttggggcatatggttggaatagttatgggtgagatgaactacatgatgtagatcaaaatcttgtttgatgccgggtggagatagata

SEQ ID NO: 53934 - DNA, 617 bp, Zea Mays
caagaagtggagaagtggcaaagaagaagagagcaaatgatcaggggcgagtgaaggaaacagtcagggcaagcgggctatttaaagaggttgaggggtgaccgtccactttctaccccgctcaccgaacatttgcaagatttcaataagcaattcaagccacctaaaaatgagccaggcggacccaagtcatctgctcaggcaaatgattacacccctccgtcacatcaaattactacttcaggacaacatgataaacactctacgcagggcagacaccccttgggcacacccattaggtgtatagcccgaaaatttcaagattttctgatgaggtgatacccataaaatatacgcaatgaatgtaccgcgacaaaaagaggagatcggctgaaacaggaggaagccccaatgtggttactgaagcgcaagtccaatcaaccgaagcattaaagtacagggcagagtggtgtccagctaaaggccctctgtctcaaccagtcagatgtccaacttgtcaccgatcaaattgattatagacctaacaaggcatggacagatggcatcacttggttattctaaaaatgatttcaaaagcatagagatgaagacctttg

SEQ ID NO: 53935 - DNA, 354 bp, Zea Mays
gaatgttagcgtgccaagtgacatcctccactccgtttgctcaatcttcaaggttcatcagcagcaagaccttcacacctagaagccacatcacgtttggctctctcgacttcctcaccaccgcttccgacgaactctgcctcgccgaccccgacacgcatgtcattataggtacaagacatgcatgcttcgtaactatcaggagcaaggcgaagaggcgatgccttaagaggtgtgtcactgccctcaagtggcgccttaaccagctcgctgctgccatcaagcaaaacgcagaggaagcctcaccttcaacattcgtggctgtcatcggccatcaaccaatatctgtcctcg

SEQ ID NO: 53936 - DNA, 510 bp, Zea Mays
ccttaacagaaatctcgtcctcgagatttgtaagaaagacaaattataccaagattagtttgtaattgagattgtagtttctaattgattcaaaaattaaaagtctctcttttttactatttagcatgtaattagaaatgcatgggtatctcctatgtttagacgcacagttaggtcagaagagagatggtcagatgaggttagctgatggtaagaagaacttggtaagggaagactccatccaaggtggtaaatcttgaatcatctcgagatctgatttgactcctatttctccatgtcgaggttgatcttttccttttccagtcttggtctcattgagtcggggtcagggtatatcattagagttggggcatatggttgaaatagttatgagtgagatggactacatgatgtaggtcaaaagtttgtttgatgttaggtaggaacagatatgttgtacaacccatcctgactctattgttgggttagctcttatgctcggtgttgaga

SEQ ID NO: 53937 - DNA, 299 bp, Zea Mays
ctctatctcacctcctatcacgttccctattttatctacactctataaacagtggcaaaacagtgttttgcacgctcttatacacagtttgcttaagggttgataggtgcatacagatagatagttggtaacgaggacatcaatactatacatacaatatatggaccaataacgtgagcacgtatacgatagttgtgggtaaagttgggcccagcagcactctatcgttcaccctagcctccatacaccatgcaatgcatcatgtcaataggctatctccagcaatctctctatctcac

SEQ ID NO: 53938 - DNA, 408 bp, Zea Mays
ggacctcctcggccccaggagcgcaccccacatcatctccaaaataccctaaaacgttgtatttcttacacgtggccatagtagatcctggatgtatcaaactccactgtatgccccatcaacagatctgcagccgtcgtcgaattgctaactgtcttctccgatgacaacgcacttggcgacgtggtcacgacggacgacgacgagaaagaagacgacattacataccgtctgtggcgacgaccagtctgcttcgcacgtgccaattcaccgtcggcaagcattttcgcggcgtgaacgacactggaagatgcatgcagcgttcacaaacaatatgcaggagtgtttctgcttgcatgagaaagtcttaccccacgggcggcgccgacatttataagcccaaaaaac

SEQ ID NO: 53939 - DNA, 745 bp, Zea Mays
tttgggggatcagatggtgcgtagccctgccttcgctattgatttgcaaggatgggacgtggtcgccttcgtgtgggaggtggagctagaggaaattaagattgttggaaaatatgtgccaaagacggagatattgagaagctgggatattcacggttccaacgttaagttgaaccgtgtttttgaattgaatagcttgcgctatggttcttaccaggaggggactctgctgatgccggggacgaccgaggaaaacatgtgaaaacctggtctgaagagggtacctcaaagggaaaggttgtggtcgcagcaactcaaaaaaggaaaatagattcatcatgcacgtgcaaggtacaaaggggaaaagatggggtccaaggcctctaggctttttgttgaggagttgtcggggacgtgcgttgggcttggggaggttatgacttcgcccaagctctgggaaacatcttcgcgcatgctgaaggttacccggggtccatggcataggaaggaccctattcctcgggccgctggcgattactattttacatctcgtttggctcgtgagttgaaaatctttccttacgggagaaatattggtgctattgtgtcaacaatgatggagaaagatcgtcaggagatccaacggaacaaacagaaagcctcacttcggctggtggacctgcgtcacgacactaagatgttgcgcctagcgcgaggggggctgctccggctacgacgattcccc

SEQ ID NO: 53940 - DNA, 584 bp, Zea Mays
ggcgcataatgcacgtaaaaaaatatatatgggccgaactaaaaaggtattagcaatgtaaaagatgaaagacagtaacatttacgtaggtagtaacaatgaacacaatatttacatatatgattttgcggctgacacttcgcagcaagaggctaagtcggagcattaagaaaagagcataaaaagtaaaatacgaccacataaatagagacggtaatggaagagtaatattaagctaaaatatgcagatttgaagcaatattcccatgtataacataattcttacaactaatgaatgcaattgtaaataggctttgggtggtatacatattgaagacctataaaaggcaattggttgtatcatgtaaagcgtgagtaaagaaattttaagaagacaatacaataagatgaactaaaatattccatgaatacaccccaaaataacatatactgtagaaaaggtccaaaaaaataagaaaggttagattgaagtctacatttgtatgttggacccctgaccatgccttatattagcacagagcgaatcaccttttattttagggaaatgcaataccctaatcttg

SEQ ID NO: 53941 - DNA, 634 bp, Zea Mays
cctgccgcatgacgccgtggtcgggcctctgagcttcatcccctcggtaagaaaactatcgctggtgatcgctttgtctcccgcaccgcttagctcggtctaatttagtgcttagtactcgggggtgatcgatcgactacctcaccggcgtgtgccaccgtccgtgctcggtgttgccgcgcagcggatttgggggaggaagaagaaccgtgggccgtaggatctcaggttgacggctctgattagaagcaggcgataccccttcgcgacattaaatcggggacgttgatctttgatcggacgacgcaggattgatctgcgggctcggttgatgcgggccatggatcgctgatccaaccgccctggttgcgtatcgcatccctgctggggggttttaaatctgggccactaggcagagatcagacggctaggatccaaagataccccttcggccgcaagatttgcagaagagcccttcagttattagataagtaacccgcggtccactcaggtgttcccctgagtctgtggaatatttacgcttgagcccctgcgctttctaggatttgaggcccagtcccgagatcagataaaatagggaaactaatttaaaaatagatttttagtacaaatt

SEQ ID NO: 53942 - DNA, 735 bp, Zea Mays
cgcggatggatctccaactaccttgtgtcgcttcttccactcggaccttgcccatggtgggctatataactcgaattgcatcaccatggaccctccccgcaagctgtgcaacaccaccgagctccagactgcgcgtcttctccctgtctaacgagacccgccgcacttctgcctgtcgccgtggccagcgctctgtaggctactatctccagtaagttactcccatgatgttcgcccttctctcgtcgtattgcgcctcgtggacagaaaaacggtgctctggtgtgccatcgggggatggctccgacgagtcgctgccgcgttcgctggggcacctcgcctgtgtgtcggtcggagggaaggagaaccttgcgagccattggatccgggatggagggtagagattagatgggcgacaactgttcgattatggcatgcgtggatcgctggatcgtgggtcgacggccatgatcggatccttagtgtttaaaataggcactgttggatcttgatccgacgacgggtggcgcgtaccggttcgtcgtagctgacttttaatctgaagcgtccggttcctatcctgcggccagggtcgttggataacccttcggccgggtctttttgctaaagagtcctcgaggaagcttgaaaataacccgccatccctcgcttgttgaaaattattacagtctggctcggaaatcttgtgtagagcaccctggactttgtcaaaat

SEQ ID NO: 53943 - DNA, 1492 bp, Zea Mays
aacttctcggcccaattgccttctgaccggcccacctccacaagccagcgcgcgctcacaattcccttcgctgacatgtgaaccccacgcgccagcacttggatttcttctctgactggtggggccccctgtcagctgttccttctccccggtaacagaccgtgcgactcgctcgccgtgatcccctccgcgcaaatcgggagctcgttcgcaagaatcgctcggactcgttcccagcccgcgataaatgcctggccgccgcccttaccgaatcgtgctaccggtcggccgctcccggcggaacagaaaacaccgaagtccaccgaaagccatggtcttcaccgcgccgcgaagcccgcgtcccgggatcctctccaggcacgaccggccgcccataaaggctcttcccgagacccgttcttccccctgctaccctctcgcgcctgcgccgacccaaaccctccaccatcccgccgccagtgaaacccggtcctgggtgaagtttccgccgcatgctctgatcgccgcgccaccgtagccactgcgcgtgcgcatctgcgttcgactgggacggaggggtctgcgaggaccaccagtatacacctcttcgggattggaacctaccgtggcggatcgtgggcggggcgctgtacaatttcgtaccggcactcctgctccgccgcagaaccttgcgtcaccgtggccaggcaccatcttggtacaattgccggtgagtaccctcaaaccgtgttcgcaatagcatgatcatcgcgtagtcctatccgatttggttttgtcgctcggggttggccgttcgccgtcgcactcacgtgctccgctgtgtgagcctggcggcggtgactctgctcggagttggtaggaagaagggcttctagccgttcattctttgatggtcggctagaattaggggtcttgggtgtattaaaccagagccgtcgaattggatgtgtgcggcccagatcagaaagcttatataccgtttagtcggaggagtgtaatccgtagatcttggatcctacgaacgagagcgagcacaggttcataagggctcggatctaatctgagcactcgaactatgatccaacggccagatttgatgcataccccttcggtctgagagtctttctaaagagccccttcgtttttagcttatcaacccgcagtccagggtgactgtgctctgagtctagggaatctttcgctgtggcccctagcgttcggtttaatcttgtgcgcagcctagagttcagtaaaaatgaataaataataaaggaaattgatttttagtatgaaattaattgcaacaacttgtataaataatagaaaattcatatgagctccaaattagtccattccagtttctataattccttattaatattttctataactatgtaatactattttaacatgaaaattatattaagtttgatctcttaattaatcttaggacagatacataaaaccttca

SEQ ID NO: 53944 - DNA, 630 bp, Zea Mays
aacctctttaggacctcaaccaacattttatgaaggggaaagcatggtccggccttccaaaagcttcagaagacaatcactttgtccttttcggggagaggaactgtgttttctcccccaggtctcactatgaatatatcgtggaaatacttatcattcatggcctcaatatgcccctttttatagtagatttctcgaagttaacatgactctgcctccacggccgatctttggtatcgtcaacaccattgtcaaagtcaaaaccttcattgtcaaagtcaacaacccgcctagaatctcatcaactatcttcgcagcactactcttttccatggcttcgtaaaaaccagctagtgcaagatcttcacttttcttaccctcggccatctcagttcaagaaaaaaacaaccgaagctaaaaacaaatgcaatccaatggctaaaaagcagcaagacagctcaacagcacgacaaatatattacgatgaccttcatatttatatgcaaaataccattagaaaatgtcccccacatttcagaagtttcgctatttagcaacgagaaggtatttttttggaccttcggcataaggcctccgttcattttgcagtctgagttcgttacaaggaaa

SEQ ID NO: 53945 - DNA, 1002 bp, Zea Mays
ctttggggatcgagtctgctctcaatgttgttcctgctagtacctcgccgttcaacggcgcgtaaatgcctccggctttggggtttcctttgttcctttctatccttcaggtgagctaacctttgccctgctttacttgtgttgatagatagattactttgctaattcttgtatttgcagaatgttctaagctctatgtcggctcagttgaagtattgcggtgtccatgttcccgatcaggttttgtctttgctgcagtggaatccttttttgctctagaagcaaatagatgatctaaaagcttcgaacgctggttagtgggttgataggtttcttcgctgctcgttgcttccctcattttaccctctgtgctcttttcttttttgcctttccagctttgacttggcagttctccgatgctgaagagaggtatgctcagagtcaagctaacttgaaccaggtttctgcattcttggatggtgcccgaaccctgaactcttccttgaatgctcagcttgattcgaagaagagagcccatgaggtagatttttctaactgttcctgatgcctttgtttcgcgcctttgtttcgatgttcagtacccctcttgcccgtaggaggagatgcgatgacttcttgattctcgtgacagtctggataaactgtaccgtgacgctagtagttcccttaccattttgttgaggagccatcgcttcaccatgtcagagcttgaccatcatagagatgagttgagggcctcccagactgaagtgtcacggcttactatgttactatcttcaaaagattctatcatcaaggagttgcatgcttcgaagaaacttgtttcgcaggagttggacattgcttgtcgcgacattaaggccttagaggatgaccatggcatcatgaaagcaatgtgtgacaaagcgatggataaagccatttgagctgggcgaatcctgatgaaaagacctagtgttgtggtgcttgaggacattgttg

SEQ ID NO: 53946 - DNA, 480 bp, Zea Mays
cacaaatacgccgtctgatggtgatcctccgcagcatagaaagaggggtgttgcagctgctgctaaaaacattgctatgcctaatgtggatgatgatgatgactttgagccacccaaaaataagtgcaatatctcaatggatgccccaaataagacgcaggtgagtttacaacattgcagaaattaatcgtttccaatattttaatcatgcatctaatctcaatacataccttatgtgctgaaagctatagctttctacattaccttagctcattaatacaaaacatagtacaaggaactttgtataaataagaaagcataaatgtgatatttaagtattcacatatttatccatctatctaccttttcatttcagaagctcaacatcagatgcaacccaggagatgttcttgcgtccattcagatattgaatgaaaggcaacgtcaagctatagtcagaaaaggattttctagtattct

SEQ ID NO: 53947 - DNA, 740 bp, Zea Mays
gtcccgctatttctacacgtaatcgcctctccttcccttgtgacctcctaacatagttgtttctgaaagatatcataggaaccacaagccccctccatatcagcatatctccattgcattcctttgtgcctccaatatctcacaggaccgtgcacgagtgacggcggtgaaacctgggcagacccagtggaggggcaggtgtggaagtgtgacacgtaggtgtgctgatgtccagctgtggcagcagcgacgagaaacccacgtcacctcacccgcagcacttgacctgtagtgttatacgaatattccagcacttgtgaacaagagcccaagcaggaaaacacaccataatgagtgacatgatccagattgtccaatgggtagggggttatggggaggtgtgtagactggacatttcagaaatggggttgggcatgggtgcggcctggtgtgttcataccctcaccatagacaggtctaggagtctttatatgaccaattcatgttttgtgctctgttgttcataatcaacatacgggtaatgactaacgaattatgtagtctataatcagccaggggctgattttgtgtaagctactgggaaatgccttggatgagctatgcaagagcaatcacagtgtattcatgtgaagggcataagctacaaataccataaagcattgccagcctagataaagatggcataattgtaaatgaacataagagtgctactgggaatt

SEQ ID NO: 53948 - DNA, 968 bp, Zea Mays
gtcagtttttgcagtctgtgctgtcagactgccagaattttcgcgcagtcaacaccgttttctgcgcgcttttactgcgcagtttgaccagaaaccggttgaaccggttttctgtttttctggcggccgactttcccccttttatttctctccctctctcctcttcccttctcagtctcatattccagccgccgccgcccactcttcctcctctctctccttcacactccactccaaaaaaactctcttgtgccctcacacttttggaagagttgttggagatccgttcatcccggcgttctccatcatcttcctccatctcgttgggacttcttgacccaatctccggatcgaggtattgccctatttcatttccgtgtactcgatcctacgcgttcttgattatctaatgtatcattcgttgggtacattttagtttaagtgattgccacacttagattatcttcatttgtcacaaacattgttagagattagcgatttgatattgttcgttgtagttgaaccgctcatatgaacggttgaagtgcatgctcaatatcttatgtgtttctactcaaacgtgtttgatccttgctcatcacaggttctatttcttatttcttagaatggtgcgtcgaaggaacccgtctgtggttgaatccgactcctcggatgaccaggaaatccacggagatactcccccacgctctcgatccaagcgagggcgcggaagcggcaatgtcatgccgggtgctgaggcctccgggtctcaaagtgctcgcggttggacatcccggaatccttccggtcggtctcgacctgcgacgaatccgcaggcgtgggagcctgcaagtgatgatgaaggggggaaggatgatgaagttgatcttcccccggcccacgctcctgtgattcgtggcttggtcctccaccgggcagaggctcggcgtgctggcaatgagccagtc

SEQ ID NO: 53949 - DNA, 1053 bp, Zea Mays
gctggtgtcgggttgtccactccttttcgccgagtgatctgagtccacacccgggcgggagaggtggacagaggagtccgccgcaacaagagcgtagccacggtcggtcaggccacaggtgttgccatggtcctaggtctggccgacacgggcgcaatcctgtgcggggtgaaggttggttgaggtcttcacaccttggagttcattagagtggttctcgctgatgtcgggtgggacgagcctgcctccgtggtcgatgccctcggagaaagcctcttctcggaaggatctgtgatgtggtgtaggacaccttctcgatccacgatgcaggagagggatccaaagcggaaaacctccccgacgttgaagatgctcggagtgttcaagacgatagccatagagtcgtcgggaatcaacatcacaccccctacctggcgcgccacctgccggtgtttatgacccaactgcgcaccacgaggttccccacatgatgcttttgggtaggatggtgtcgttgattgcaactcgatggtacgtgaggatgcacgtcggatcacacgtagaggtttatacatgttcgagccgctagaatgcgtaacaccccacttcctatcggagatgagtctttgagtatcactggtgtacaaaggttgcagacaagccgtgagtggaggagagtgagttcttgtcgatctagtggtggtgtggttgctatgagagagctaatgagctatgaggtggtgatgagctaagatgtgatgtgagccgagctgagagatcagagatgaaataggtgttcgtaggcgtacccccttggccttatatagatgaccagagggttatccctttacaagccatgatcactctcttattgaatcctccttttaacgtggcacaccttccagcttatccggaattcagtttcccttcatctgagtcatctccgggtatctagcacttctggtacgctcaacctccttgcctgaggtagcagcacatgactcggtcgtccggccttcagcttcccgggttgagcgctcaacctccctgccc

SEQ ID NO: 53950 - DNA, 885 bp, Zea Mays
caccagtcgccaccgccttcctcgccactccgtctcccaaactctggcaccatcgccttggtgatcttggttccgaagctctctctcagctcgctagcaacgcttccatctcttgtattaaaaatattaatacttctgacctctgccatgcatgttagttaggtcgccatgtgcgtctccctttttcctcttcatagtctcgtgccatgcacaactttgacctcaaccattgtgacctttggacctccctagtccccagtgtgtctggttttaagtattacctcaccattcttgatgattgctagcaccacctatggtcgtttcctcttcgtcttaaatccgacacgtttccactattgctcatttcttctcctatgttgctacatagtttggcacaaccattaagagcgtacaatgcgacaacggtcgtgaatttgacaatttgtcttcacgtgccttctttctctcccatggcgccacccttcgcatgtccttacacgtcttagcaaaatggcaaggctgagcgtgtcctccggtccgtgaacaacattattcgctcccttctctttcattaccatgcccctcatcctttctgggttgaggcctttcacaccaccgccacttatcttttcaacgccaccccgccaaaaccctctctttctccaccccataccaggccttgcatggtacaaccccaaactgcaatcaccttcacgtctttagctgtcgatgttatccaaacctctccgccaccacgccacacaagattgctccccggtcttccctctgtgtgtttcttggctactctagtgaccacaaaggatacctttgtcttgacctttccaccaaccgcatcatctctcgtcatgtcaccttcgacaagtc

SEQ ID NO: 53951 - DNA, 955 bp, Zea Mays
ccactacactcgcagagtcgcaggcagtcactttgcggcgagacgcttgtgtcgctcctttccaccctcagtctcagtcctctcatgatctcattccccaatcggcgacatttccagcaatttggtagtttcccacgcaggctgcgcgcaagcaaccatcccacccctcttccgcggcagtccactgcctcccggaaaatcccacctcgctccgatccaacccgtccccgcaaccagcgcagccgccgcgacggggtccgactcccggccgatctcccgcctccaccagcgccacggtgagtggccgcccctcccgatcggttccttcgatcgggccgcatcttccctacccttccctcactctctccattcatcctggaatccgttagtgatgcattcgggttcagagctgctgcggtcgcagagattatatggtgctaggatacactgattacgctgtagggtttgtttcgtgagtagctctgatctcacggaatggtttgaccggaaatgaatgcagcgaaatcagttgctaggcctcgtagggtatctgaaatctgaacatgatggttttagatgtcaggctttcatatacacttatatgaacacttacatgacgagttctatttagaattggtgatgtagatgaattgtcccgcaaccttgttgaatcttctaaagcatctactatgtatttttctatacagacacgtttgaagtgttgttgatgagacagaatgcatattctagatgcagtttgttttttatagttggcgtttttagatgaaatgttaatttactttacatacttgaaataggtctttttactgtattaacaagcaagaaccagattaggtgcagggggctgcatttccctctggccattccctaaaaaggaacaagcgaggttgttccttgttcgcaatccagacatctggatttcagatggggcaac

SEQ ID NO: 53952 - DNA, 622 bp, Zea Mays
gaagaagaggcgctgcgagcaagggagggagcagaagatgagcgatggtgctgtgaagatgatgaagaggtgttgcgagtaaaatgatagatgaagatgggagcagaaacgggaggtgactgtgtgccttcgctcgacgtgatgctccacgcgctgactgtaccggtggcgaaagagtctttgctacaccgttcaagttgaatcgaacggttgttgcctttttcgctgatgtggatagatcgagagtccatctttgcttccggcactattatataagaatgacataaatatactctctcaattataaaagctaatatgtggtgactataactaaagctataatttcatatgaaggtgtataccggcgaagagtaccactgttatagaaagtggtcatctgtaacctcacgtcttttggtattcgtgtgcatgaaaagcttccgaaggtcttaatgtaccaaaactttagtattatgtacatgattgtttcatgcatcatgctcattcatattctctcatgttaatacgagttaaacttggggcctttggagttatattgaatcaaatggcattggatttttgattgacaaccttgtatcattggagtgaccggattgttttt

SEQ ID NO: 53953 - DNA, 313 bp, Zea Mays
gctcggtgtcaggcgtatttaatgaggccaatcatttatggcggggtagtccccgaccgggtgtggaatccactggagtggcttcctcttggttcgctcgattcccttatggctccaccttgcttgacccccacgctcggtgccttgggattacttgggggtgggtccttctagggtagactttcctccattctcattctaatctgcaggccccaggggcctagggatctgatccctgatagtagccctcgaggggagtttgttctcccctgggtggcttttttgagtcagacgacgctcgcctcatttttcg

SEQ ID NO: 53954 - DNA, 441 bp, Zea Mays
gtggggtctcggtggtgggccagggagttcaaacgggtacccaagttggtgtccgtagcctcgtcgtgcgtgattggtgcacggggagttggcgattgctcaccagagcacttcatcgccgccaagccgcccttttgtcgtggtccagattctccacgttgccattgaaggtaatgacctcctctgcctccgccaaacccttaatttggatttgcacctgtcctgcgatgtgtagggtcgcggtatgccggggatttccgctggtgtgctttttcgccgcagttggtgcgttgtcgtgggcaggctctggccatggctgatttgtgggattagtggcaccagcgaattcgccctcgcaccctcttcacgtagtacctagctaggcttgagttagtgcgcctgggcctcggactgctgcacgccggtaagctcgccgccatg

SEQ ID NO: 53955 - DNA, 1029 bp, Zea Mays
gaattattctcgtacctaaaaatcatttccagatttgttttatatataataaaattcctagtggacggtggcttcaatttctggaaaggctagggtgctctgtgcaatatttaggacctaaattaaattttcttactgctagataggacggcgggtttattctacagaactgcaagggtttatttgcaaacaacgcacggtgaaggggtatcgtgaagtctcaaccgcccgatctaacccagacggtccagattagatcgcgttttaatcgaaccggtatacgattcaagcccactgatcaagatccaaaggccaggattttattaaggcgcgatccgatccctgccctccaaccaggatctaacgcccccaaagcgtcccagccgaatgggtatacacgctctaatcctagccgcacgctaccggatcaacggatcccggttgtcttcttcaccccggccgacggacgcaagggatgagagcgcccagggcagcggtgccattgccggccaaccccgcccggcggccggatgcgtatttccaatcgtagactagcgcaggattaagcggaaactaaaacgaactcgagaggggtgcctcaccgagggttgggatgaagacggggccgatcgatggtgccctatgcgcacgacggcgccccaaatgctccggctagcaattatctatcaacgagacccacaacgggccccaggaagctccgcccagattcctcgtgcgccgatgatcctccagggtcgcccaccgaggcctgaccgacgatatggacggaggtagactacggcgggatctgccttgctccaccatctgcccgcatggatctcacggaggcgaaattcgatggaatcccacgacaacttgttggatgggcaacgacgtaggcgttctgtatttatcccaagcgaggaagatccagaacccgacgatcacggcgctcccccgcggattccgcacacgattgcaacagttcgatccgaacctcacggacctgagcgctcgtgggggaagaag

SEQ ID NO: 53956 - DNA, 362 bp, Zea Mays
cagaatttttttggttcataagattgtatttatacgttttatatgtatatgtgttgtttgttttggcaggaaaatcatacatgaagaacgtagaccgaccttcgtctaatccaaagcgcattataattcagtctactcaagagtgctttagtgtcgacataccccgtgttccggcgaatactgtaagtcacaaaccaatgcatgctggtgacgaggacgatgactttatgccattatcgaagaagcgtaactttgatgacagtcctccaaaaatcttgaagaagatagttacagagcggatgaaagcagtggatccccccgacaggttagaattgatggtcaatgccaatatatcattttct

SEQ ID NO: 53957 - DNA, 893 bp, Zea Mays
agtgaagcagcccccgaacaaagcgatgtagaggcaggccgaatccgcactcgtaaaaggatgcaagcacaaccacctctttgttcctcgtctgtgatgcttcaccctcatcttccaaccgccatcctgagactttcgttggtggatgaaccccttcttcaacccaagcaggcgtctctagcaaatcgagcaaatcaggaatgatgccatggatgtgggaaggaagtagttcgggcgcagaagcagacaaggagccataggggcaggaaggctttagagcagaagtgaaagtaggagtgcagggagacaataagcataattgacctcacaaactcctcctctgtttttatagacaaagcacaaagaagcagagcggtgctgagtgaacaggccaccatgacctcaacaagggaggatccgccactctggcccaccatgaccgaggcgtgaacggggccaccacttcaactcctaggcgtcgtgggcctcaggcaaggacccttcgcctaaatggcaacaccccttgggcagagcaaacagtcagggcaggaagcttggaaaaccacatccacgacatataggtcattccacgtcacctcaagtcgcccacgccaagcgatgtcatgatgagttcctcttttctcatgctaccacaatacctaaatccgcctcaagccaaccaggtaaaccgcaaagtctctccactccttacgtagaacgaggggtgaaccgagcaagcccccagcgtgcctcaagctaggtgaccgacacataagtcatttgctcatattcacatccaaggtcatacctcacattttcatgttgtaacccagctaacggggtggccattgacccctctttgattggccaatccaacagaagggacgatacag

SEQ ID NO: 53958 - DNA, 505 bp, Zea Mays
gatgaaaggacgattctgtctaggagggtggaggagaatgggaaggccttagcgaagatgagattggaagccatggcccgggagatggagaattttggggagaggccagaatcatcagagttggggaaggggcttgatggccaaactcacaggcaacgcagagaaagaggggagtcatcaggaggtgaaaatggaaactatgaatcaggagctggtggaagggagttgcaatcacaccttcccaagtttctgtttccaaagtttggtggggaggatcccgcgctatgggtgatcaggtgtgaggactattttcgtatgtaccaggtgcctaagtgcatgagggttctttcagcttccatgcacatggaaggaaatgctgctagatggatgcaaattcaaaggctaaaaggggatttgggaaattggacgcacttctcgaagactgtgattgacaagtttgggatagatgagtttccccgagtcatgaacagattattgtatttac

SEQ ID NO: 53959 - DNA, 680 bp, Zea Mays
cgactggccatcggttaaacagtcaatctgaccgttctaactgtgcaatgcgtcagaacctttatcttttgtcaggacaaccttttcttttggtaggattccgtctctttctgttagatctatcattcggtcaggttttcttcttctagcaggcaccggttgaactggtttcggtccgccgggtccaacctctatttaaaccctcctcactcttctcctctcctcacttctaagccttcagccactctttcaccacttgagcaccaaaagtttctcactcccccacatatttcaaacttagatctactcaaatccgaccgttaaattttgttcaaactttctctccttcaccatccggagtttggtgcgtgtccttcaggcagatcccaagatcaatgtatatccttatctacgattttgaactcttcaaaaatcttagtattattcttcatttgttgtggtagaatgtattgggtgtgcatggacagttgaaccgttcgcatgaacagttgtactgctcacctcatacacacactctcctagcacttgatttctatttccttgcgtgttaccatctcattgtatctattacattcttcaagatggtgcgacataggaacccatctgtggtggatttcaatagcgactctaacgagattcatgatgaatctctgattccc

SEQ ID NO: 53960 - DNA, 693 bp, Zea Mays
ggcgtcgtgttgggggtggccacatcgatgtgcaggcaggcagggaggaggcggcagcgtcatgtcaggggtggctgcagcctgcagccatggctacgttggccagcaccaaagccatggatggcgaccggaggtgggcgccgatcaggaagtctggatgccaactcagtggctaatgaagaagaagatggtctaggaggataaaatctagggccaacctaactatttgtctaacagatctaaaacggtcctacatcctctccctccctgtcaggcataccaaacgcaaaacatggacatctccatccctcaaccaaaatgcagagatgcaaccatcgcgtcctgaatggatacatcccatccctcctatcccaaaaacaaacacaccccgagtatagtggtattagtggcctcgatactaaagttctagcaatatatagtatcatataaaacaacttaaaaggtacgacctgaactcaactgttcagttttgtgatttctaataattcaaactgcacttatatgtaaattttattaccgataaatatcacttttgcttatgtgtactacattaactagtttctgctaattacatcagtgatgtaaagtaggacataaaatattataatgacagcttcattttctgcccaaataacttttgagatgatatatactgttacatggatgatttag

SEQ ID NO: 53961 - DNA, 631 bp, Zea Mays
tgctgagagtttccaactaatagagtcacaaatacccggttgcaaggatattctttgcaatattgaccaaagcctacagtacttcacaatgtgttgctctgtcacctcagcagaaaacaggttgaggtctctaatccaagtatgatttaacagcgcttcactcaaagatctgttctttcttcgggacacattgaaaatgagaggcgcaatgtccttctatgctaggttgggatgtaggggaacgaggaaggcgaactggctctagctgcatctgcagcggaggttggagatgcagcaggattgtggaaattcaggttcattcttactcttcttgtgctttctttatttttgttcatttctgaatttaaaatttatcacagagatttgatgggcaactagttcttgctttctttctttctaattccccgtgtaaagaacttccatggttctatgaaattgtactgcgctggagcctggaatagagtgttcttatctgttgggtgaataagtgaatgtgtatactttgttgttatctttggtgttacgataatattatgaatgttttagtaattccttgatgaatgtgtttactttgctgtcatctttttgtgatgattgtgttattaatgac

SEQ ID NO: 53962 - DNA, 426 bp, Zea Mays
gccttgagaactgaagctcactcataatgtctaccaaattgcaatacagtgttcagtttgtgcatagtacctgggatttgatatgaatacttcaggttacttcattttagtcagtgtcagcttgtggtcaatttcagtgtatattttctgaaattgaccatttggttttcagttagtgttagtttcagtcagtgccagcttgtggtcaatttcagttttgtttagtagggatgtagcctgtagggatgacagcgatgcacaggagctatgaacaacgatgacacctgcagcacatacgagcccatgacgcaaacgagctggcccaaataggcaagccatgtcctacgggatctgtttcaaaattattagggattagttattagcagtctgatgtagatttaaattgtttttagcgagaatattttt

SEQ ID NO: 53963 - DNA, 687 bp, Zea Mays
agataatccatgaatacactgttcatcaagttcatgaagaaggccggtgcatttattagaccgaaagacatcacaatgaactcatacaacccatacttggtaatgaatgccttcttcgggatgtctgaaggtcagatcctgagctgatgataacctgacctcagatctatcttggagaacacactggctcctctcaactagtcgaacagatcctctattctgggcaaggggtacttgttcttgatggtgacctcattcagagcttgataatcgatacacatccttttggtgccatctttcttctccacaaataggacaggggcagcccaaggtgaggtgcttggccagatgtaacctttctctgacaactcatcaatctgcttcttaagctcaaccaactctggtccagatactctgtaagctctcttaaagatgggggtggtgccaggaagaagctctatggcaaattcaactttccgctctggtggcatacctggcaagtcctttggaaacacatctgggaactcggacacaaccttgatactctcgattgggtctgcttcactgctatcgacagccatctgataataacttcctttcttcggctcaggcgggactaactctatcaccactttctctcctagtggggacaccaacttgattgtcctcttatcacaactgataact

SEQ ID NO: 53964 - DNA, 341 bp, Zea Mays
ggggagctcgccgtcgagctccgccgtgatggcgagttctgtcgcaccaccggtcggctgtgcggtgttgggggatgtcctcgtgtcgtcagatgggaattgggcggcttagattagatgaggaatagcgcttggataggttagatcctggcgcttgtttttggatcagacggtcttgatttaaagcatacctcgtcaaatcgtgaccgtaggtcttggatccgagagccacgagagagtaccggttcgctgggttgcggatccaatctgagccatccgcgcaggatcgtgcagctaaaaacacaggataccccttcgctaggcataatatctaaagagac

SEQ ID NO: 53965 - DNA, 752 bp, Zea Mays
gccttgttttagcctttcctgtacagccacagtagatccacgatcgtatccgtgtgttcttggtggcggttaacggcggcggaagggacaacaccagacgcgttttggcatcggttaacggcggcggaagggacagcaccggacataccgtctgtgcatcgatcaataggtacgtctactggcatgtacatcgaacctgtaccgtctgtgatcaccagatacacagacggtgtatctgttactcccccaacggcgttgagggcacctggacatattgaagacaacacaagatcagcaaacatggtaggagcaaataaacgcatccacatgggacatattggggcgcatgaacagggcacacctcacattcttcaaagccatgtaagttctctctaatatgataatatcagttacgtacatactttttttaatgttgtagcaatatttcgttaaatttggtcgtcattgattcgttaaatttctgtgcatagccggacaatattgatataaggttgatacctaaagtcggtatgacatttagtaacgtggacgaggcgtataatttttatagtcaatatgcatatgaggttggatttccattgaagaaatattcggagcagaagaattgtaaatggttgaattgttcaatggaaggaaagaatgctgaaaggggagctggaaatccaaggatgcgtaacacatgttcgaaacgaacacagtgcaagggtgggatgaaacttaaaaaaatctac

SEQ ID NO: 53966 - DNA, 458 bp, Zea Mays
aagcgatatgcttcctatcttgcctagacatctggatctgatggaaaccagagtaagcatctaggaaggatagaaggtcgcacccagaggtagaatccacgatttgatctattcgtgggagtggatatgggtccttgggacaggccttattgaggttggagtagtcgatgcacatccgaagcttcccattagccttgggaacgatgactggattggccagccatactgggtgatggacctcttcgatgaagccagcacgcagcagtttacggacctcctcacggatgaaatcctgccgctcaatggactatctccgaggcttctgactcaccagtttggcgtcagggtagatcttcagatggtgctcgatcacctccctggggatcccaggcatctgcgacggttcccatgcgaatacgtcggcatttgcctggaggaaggcgacgagtgcgatttcc

SEQ ID NO: 53967 - DNA, 721 bp, Zea Mays
ataagttatggacttataagcagattatttttttgtgtctcttattcttgtgttgatcctttgtctccccttttttgtagggcttaattctgagcaacgctttgagagcacagaagaatgctgagaatgaaagctgccagatagcccttggtaaccttcggtcaaaggttatcaaaccgaggaatgaagctacagagaaggataaaattctgctttccttagtagacagattcaaggctagtgaagccaatcttgtcgcgcagtccgaagctcataaggttgaaattgaaaacttaaagaaaaaacttgccgagaagaacgaggattttgaagtggctaaagcaaaacaggaaataagcgagtggactagcgcaagattgcaaaagaatgtagatgagcttcaggaattgaaagaatgatattacaaaaaatccttggattgtgccaagaagctgaaagatagttttgcaagggtgggtgcttactcatctgagcaaaaatttattaaaggcaatcccgaaggaatcatcgaatggatcggtgaagaagctaaagcttttgaagagatccttagtgaccatggtgatttctgcgcctttgccggtgccagaggggttgcaacaattttggaaaaatctggctgcgaacatattaaagctgcagcccagacggaggctatcttcactgtggagaacacgaaggatccttcggctgaggcgac

SEQ ID NO: 53968 - DNA, 1001 bp, Zea Mays
attggatcttgggcaggtggctgagccttacacgaaactgactttccatagtggttagtgagaagaatggtcttatctgtgcaacttatgacgccattatgcttggttaaccaatccattcctaagatcagatcaattccgtgggatggcagtacggctaagtctgccaagaatactaccccacttaaaataatcctgacttgggagcatttgaggcggcatagaaggtctaaccctggggttcgggtgaccaaaggaatttctagagatgcagtgggaatgccatgattttccacaaaactagtggctatgaatgaatgggatgctcctgaatcaaaaagtacagcagcgggggtaaattcaactaggaactcaccgagcactactcccagggcttgctgagcttcttgggcgtcgacatggttcactcgtgccctgccatgaaactgggtcttgcttagctgactgttggaggagggtgccttggaggcgggtgctggagcattcttgaggccattcaccaagttggagtaggtaggcacggatgtcttcaactgaggacaattattcttgtagtgactggggtctccgcagtgccaacaagcattggctggaggttggttgcttgcaacagatggggtatggagggaactttgaccctgctggacgaaacgtgacggagcggaccctgctgtcttgttgaagcttggtcctttgggaggaaacccaaaagatcaaattctctggtgcctgtcctgctgctgagctcggagaacttgaaactccctcttgaggtgacccttttcttcttctctagccctttccacttgtatggccttgtttgagaggtgcgagaagctgagaaaatcttggctagcgaggatagtcttgagttctggtctcagcccctagaagaaacaggacatcttcttggcttctgtgctgacatcatcaggcgcatagcgagccaattctgtgaacttgtggacgtattcactgac

SEQ ID NO: 53969 - DNA, 451 bp, Zea Mays
gagtagttcaattatgtccaagactggatagaatttacgtttagcattgtatcatgtagaactttggcatacctttccaacgagtatttatgcgctcaatttggagttataaattaaaagttatcaccgttttggtaggttgctgtccaaaaaaaccgattttcaggggcatgaacagcagcagtattagcagtttctggggatttttcgggagtaattagtgttaatcagtatgagaatcatgtagggatttatgttatctttccaacaagtatttatgcgctcgattcggagttataatttaggagatatcgttgtttgaatccggttatgttgctgtccaaaaaaacagattttttaggtgggtgaacagcagtggtattagcagtttctaggaatttttcgtgggtaattagtgttaaccagtatgataatcatgtagggatttgtc

SEQ ID NO: 53970 - DNA, 449 bp, Zea Mays
gctaaggaaagagcgctaacgccaaagggttctgccgagtacatgagcttcattaccagacaaaggcaaggactgacggtctgcacaaaaacttcggatgctacaactttgcataccaaaaggatacaaaggcccccgtgataggctaccacaccaagtggtccactggttggacgaatgaatggttttatgttaaggtagatgagaagaaaagggaaaagcttatgagtatggtgatgagtccactgcgattaaacttcggcatgacttggcccttgtgcaacatgcagttggggtctccttgccagcaagctgaagtggaattcagggttgtggctgagcatatcagtacgagagatttggtacaagaatatctggcaaaccggacattcccaacttctggcggctggggaatgccgaagaagaaagaagaggggaagaattatgag

SEQ ID NO: 53971 - DNA, 319 bp, Zea Mays
atagggagcgcacatagagcgatgggttatggatggcaaagaacttagctatgaggaagcagatggaagatcacatgcacatgatgtattgaaagcagcctatgtgtgggtgtggtggtgcttgatagtgtgatgaggagcgtgtggcaacatggagcaggggcatggtatgttggtgtgttggcatggttgagcgattatgaggggcgcacaacatggagagaacaaagcgatgaacatgcaatgaaggagctagctcaacgggtgaggtggttgaggagaaagatacacatattgtcgtgaattgaaagaaataagc

SEQ ID NO: 53972 - DNA, 1132 bp, Zea Mays
cagatgatcaattcacttaatgaaccagtacctaccctggccatccgatctaggatcaacgacccgaaaccttccacgccaaattctcttccctggccctcgatctctcgatcaacgcttcagattctaagtgctgaaagggtatcctcacgttctaatctgagccgtttgctatggaatcaacggccctcggcccgtcatctacctcatgcctacaaccgagctccccacgtcggcgctccatccaagcacggccagtaggggcctcggtaccctaatccaacccaagttcggtacatacactggtgaggacaaggagcatggcatggaagcattaccgatgtcaggatttgaggaggtgctcgaccacgtactggaggaggtccgccacgcccaacgacgacaatgcaagcatcgaagctcccgtcgacaaacgaaccgaggccaaccatcacgcgctcgttaaagatccacacatgcgcatgatctctctctctccctaaccttctctctgccccgctcgactcaccactttccccgacgttcgtgtagaccggaggagaggaaaaaaaagggggtcgcggccttggatttatacccagggcggaaggagaaaatgtccgagcagggaagggcacatgcttcggtgatctcggtgatccgtttgccacaatcttcgaaccgagcggagccaggaaacgtccgccgagatctccgctgcatttgtttttctgctgcgttggcttcggggtgagcgtaagagggaaggtgtggattctgttatagggctatcgctgccatctcggccccgcatggaagtggcaggagcacaagagcgcagagtggctggtcgtggtgactgaggggagaagctagcgccaatggcccacctgtaagcgccataacaaaagaaaaggagaggagaaggagatgggctgcacggtgagggttaatgggctagccagttagaagcaacccaattagggttttgtttcctttattctttttcctgctttcttattccaaatttctatttctatttccaaatttaaacttggttttggatttctagtttaattaaatgcacaatcataaggaccagcatgagaggtcaatatatttatacatacac

SEQ ID NO: 53973 - DNA, 410 bp, Zea Mays
cacgaatatgatgttgccttaacagtaattcatgtacctgtgtgtctgtcaactgcgtctcatgctgggatgctggagtagacatatccggtacagtttgagtgtccggacccgtacatccttctttacgtaacatttaagcaaaaaatacatcgatttaataatggcatcataacgatattgaaagtgtttgtataactgtttagattaacgtaaagaccataaaactgactagcctgccgaatggggaagaatatcatctgattttttagttggttgctgcacatcataaccatcgtcattgtcctctgactcagcacggaggacctcatcaattaactcgccaaaaacatcagatagattgtattgtttctcaacaatctgctgaagagtctgtttgatcactgaac

SEQ ID NO: 53974 - DNA, 286 bp, Zea Mays
ttcttgtcacacattgttgaagatgttatccgtgcaagtgcaaggtgcaacacaagatgattgagtgatctttctgtgaacctgagtagatttggtatgcctatcaactgcaatgtttatagatgatctagaagacaaaaatatccatgtaaatagaacttatggttggtttcgctttcgataaattttgggtgcaacgatatattttccagtgttatgaaatgatttttgaaacttgattaccatgtttatttagtgcttgatttgctaaagtttattctaattc

SEQ ID NO: 53975 - DNA, 475 bp, Zea Mays
tctcctttcagggcccctagcggtcgcctctgttgcaaggactcggggccgggcctgttcacagaaataacggtgaaaagggtacaccaaaaatagtagtataacgtgaaaactgaaaacatgcgacctacctaaggtaagcatatttgaaaaatatgattatgacattgttcatttatttatagggataagcaagtatacttcttcgttcgaaattataattttgcctttgttattacaccatagtcctatgttgtcaagggagtacaattacgtcatttaactcattttaaagttcttatgtgtcgttcacaccttttcttctccttagtgaacttctctgtcttctttctttgaagcctcttttgaagacgtcgaagcctcactttcccttgcctttagctccatgcaagcttcggctttgcacaagttcaacttttgtccacccttcggctttgggtaaccttcggctttt

SEQ ID NO: 53976 - DNA, 817 bp, Zea Mays
cctcggccaccaaaaatatcgccgccgacaccaccgggagccaccgccgttgccgcgtacctacaccgccattccggggtctgcgtgtggtctgggcgactctcctggctacgtgggtcgtgactgtggaggatttaggcgggaggagcagtggtggtcggtgaaattcctcgtcggagtttcacgtccacggcggagccgtgtctcgtcgtggccagcgacaccgacgtgccgataggtggtaagacctcgttcatagtattccctgcgatgttaccttcattttaggctagtatgttgtataggggttggctctggtaccactttggttactcgccagccagccaccatcgctagtgcgggcgtcgccgccgtggtctagcgagctaaggctctcggtcaaagttagggtagcgtacaccgttgattcgggcgcggacggctgcgatggcgcccagcgtaccgattcgggttgggtgatccgcgactgcgggatcggatacggatgggcgagattagatcaagaaataccctttcaccggtggcatttgtgtcgttggatcgcgggtatgcggtcgtgatcggatctggtcttcgtaagttttgcgccgttggatctaatctaggtggctcgtagcaaaggataccccttcggcctggcataatcgctaaagagtccctgtcattttaacaaatcaacccgcagtctcaagcagttgaaagaaccttacgctgaggccctggattttatagatagcatcctgcagatctttgtattattgcgcgcagtccagataacaaataaaatcatagaaat

SEQ ID NO: 53977 - DNA, 545 bp, Zea Mays
atggcgttgcgtggttgagtttggcgcccacagagggagttgatggtggcgacgagtttatatgctccaagaaggcagagtccgcggaggttgcaaatcctgaccatagcgtgatttgggagagaatctgttgctgccagtagaggcgagaggaaaacccggcgaaaggtgcggcctccatggatttggccgtaacagactggggatacggatgggacttaccaatgggtcccacacgacagaagcacaacaggagtgtggcgcggccgtgattcagctagtgagtgggccccgtgcgtaagtgtcaccaggaaaaaggaaaaggggaagtagcgtgggccgagcgaggtgtgtattccgcccaacaagctagggcaaaggggcaaggctgggccgagtagcttgagaatcggcccaggaaaagttttcctttatttttattttccctttttcaattcctttttcatttcccatttcaatcctaagtttgattctgaatttcaagcatatatcagatgcatcaaacagaaatctcaacatgacaa

SEQ ID NO: 53978 - DNA, 597 bp, Zea Mays
ccaccacaccaaaaaaaacatctctgtagtgtttatttgttgcgtattctaaatttctaatccgtttcgtttcgtttgcattctgcgtaggatgcggcaggagcaagcttgaaagctgatggtcggctgacaaggcagatgaaggctagacacacggctcagccggagcatcaggcgggtgcaacggcgaaggaggggatgaaaatggcagcagcatctgccggtgcagttcgtgctgcgcctacgccgtctgccgttacagtttcgcaccggctttctcgaccggaggacaccgggtttcatctggattatgccgggcctagaacacataccccttctcacaactaatgcgcgcgcgggatcagaatcagatcagttcctgaccaagctactcttcctcctaatcttacttttcgtatttgcaagcgacccgtgtacatgacattcccagtcctaaaaaacgtcacattctcacgtacatacctgattgagtacatatctgatctgtctcatcatcctggcccaacaaaatttatagctttttcctcaaaaaaaaaatctagctagcaggccggctagcgagagagagtactttac

SEQ ID NO: 53979 - DNA, 391 bp, Zea Mays
cgcacacccagattgcccagtactgctgggttccatccacggctacggtcgctcccggctactatggtggcgctgccaaccaacggttcacgctggcgtctatctcctcggtggtggcgtgcactagctcctatgtgtggttatggccgaagggaaaccgtcggctgaattatatacccgttggagaggggtgtccgaggtgcttggtcaagcaaacctcatgctgatccggtattcacggagcggtcagcgacaaacgcgacgaggaagacggctccgaaagtggctcaatcgtacccgtatgcgaaaatatttgttgatgcaagcacatgcataccatgcaaaagaatacgtgatcaagtcttaatactgtcggcagggtgaggaaaac

SEQ ID NO: 53980 - DNA, 403 bp, Zea Mays
ttttcatcatcatctatgattgagcaaagggtgggacactttataaagcatcaaataagcagaagtcaaaagatagcactaaaagtgtgtaggtaggtcacaatttagtcctacatcaccactttttgcaaagatcaagatctaaggaacatgaatgtgtttcctaaaggcatatttgattgttgacccaaaaataaacaacatgctgtcatttatttaggctaatgtggagacaaaaagaattgcaaacgaaagttatgacagtcaatgtgttgtagatatttgggaggacaactgggtctgtatatgggtttgcatatgaaacaaattcaagctccacgaattcaaatctgctaggagaagtatcttcaaaacaactaagatactgagattaaaatcaaag

SEQ ID NO: 53981 - DNA, 882 bp, Zea Mays
tctcatcactagtagtactatcgtacaaccagcccagcagcagcagactctcatcattattgtaccactaccagcccagcagcagcactgcctaccggctacgctgctgctgcattcccgcatgcttgagcaagttgtagctgtagggagggggaatcacatcacaggagagctaaggtggagcgccgagacgagaggatacgcaacatctccatttcatctgcgctgatttaattagtatgtgcgcggttgtaataataattaattaattcagaaattgaggggtagacctgctggatgctacctcacgctttgggcgctggactacaaaaccaggagtagtagacacaccatccgaggaagcctgcaatggccacacatgctacgactgcgatggcggctatggcaccagatctgagcccgccgggagttggcggtggaggttgggacacacccttcttatccagctatcgggagcatggatctcttggagtatgcatgtagtataataataataatatgatggaatggagtaagtagtgattaattaaggaatgtccgagacttaccattgcagtctgtagggcgagggatgatggcattccactgcagcacattacttgagtctttacccccgcatgagacgtaagaagtaggcaggtcaaaggtagtgttccttgaaaccatgtacacacataggcagacaaagatcgttttccagttcatgaattggacagatgtcgatggaatagaggagggcgtcgtagcatgaggcagtagggttttgtggtgccgtctcatggcaggagagcagcgccaccctggtgaagtcaagctcgcaactcagcgaggagcaagcaggtgatggcggcaacagcagca

SEQ ID NO: 53982 - DNA, 543 bp, Zea Mays
tttctcctagtagtttctttgatacccgtatcttcgcagaagggactggaagatgggttttggagctacatcggacacatactgggggcccgtatccagtgaatccatctttttccttcaaagtacctttttcgatagtccttttttaaagacttctcgtttatcccctttcattttcaccattttattcgtaatcttgatttgtttatccctatagacacaaaactccaccatcacaatcttatgttgagagacaatatactcacatttatcaccttacagtccaaaaatgctcgtttatcctcttcttgtgaggaatgaggttgaagtcaatctgactagagtgatggccgatactataagttactaaatgagagtctctctttgtaaagaaagtgttagctatcaataagtcaaaagttatcgtgaagttcaagacttcctctccctcctgattcttactaccatacataaaacctccatgaagtgccttaaaacctgcacttattgtacctacatgcccattaaaatctcctatgaaat

SEQ ID NO: 53983 - DNA, 885 bp, Zea Mays
cacaaaactatatgagttagtacttgtgaaccattggtggagaacactcatgatgcagatagcaaagagcctcagcaacccctgttgcaatcttcaaccttttaatccagtccaaagattgcaagccttcattttcctcccttgactttctgtgcagtgcagttgacaagtcaccatttcggacaaacctatacacaagaaccttttcttcttctttatcaaggcagtgccccaacaaaggaaccagcgtttcatgcactccttttgcaaacaaatataactctgccagataagcatccttccgaggcacacgcgaagtgatcctcttcaccaccacgacagtcccgtcttggagcacaccatggtatagatcacctgagtgaccgtgcttgatgagcctatcttccccaaatcccgaggtgccaccagtagctgcagttgtgccggtagctgacactcccaatggtgcacttggtgatgccccactttctctctgatcattcctcctccctgtactcccagaacacacaaagcagaacacaatggctgcaacaatggctatcagcaggaggcctccaccaatggccccgatcagtacgtacttcaaattcttgtgcgtcttcctgaccggtgaaggtgtaggctgtggtgcgggtgggataactggaccatcataaggcaagccacgactgacaaaagtaggggtgttattttgctccagtttggttcaaaaggggaaataatattaggctataaaaaggtggccacgacatcaaccggctaagatagttaaaattgttaaatcatctttagtacctagtctttatgtcccagagtagaaatcattatgaaacatcaatctttataatgaagtcccaacaaaaa

SEQ ID NO: 53984 - DNA, 331 bp, Zea Mays
attcgcttccaacctacaaaactgaccctatccataaaatagatcctatccctaaaaccgaccctatccacaaaacagatcctatctctaaaaccgaccctatccacaaaacagatcatgtatctaaaccgaccatatccacaaaacaaatcctatctctaaaaccgaccctatccacaaaatagatcctatctctacaaccgaccctatccataaaatagatcctatatctaaaaccgactctatccacaaaaccgaacccctcactcttccaacacctcgccagaaaccctgattcggagtccaaacttaaaacgaccgtaactttcac

SEQ ID NO: 53985 - DNA, 730 bp, Zea Mays
gctgaacctgacctcgattagtctgtgcaggctggaactaaccatgtttgagtgcagaatcccgcatggtaaaggactttaccaaacccacgccactgaaggggcctttggtggtttccttaggcaacaactacacaaatgcctctgtaacagggggctcatcggcgacggcactttattaagcacatacatccttgagtgaggccgcaccacggagtgaaggccccgcttcaacccttgattgaaagtaacacgcctttgactgccaccgaggaaggaacaacatgcatgaagacgtagtccttgaggtcgcccccatcgggcccagttctcgccaggtgctggcggtcccacttgtaagcttattaaggggtagaatgttcgatgcagttgggtaagaggatttattgtattgtaataatcctattgtatggaatattcgaggaatgtagtaggtatctaggggcagaaatgtacttgagcctatacctacccgtagtgccctataaaatacccaagttttgtagccggatgggacacgtataacaagacgctacattttactaaccaacgttttgttgtgcaactcacctcccacctactccctagtgtttgggcccacctgactaactgtcattatgtccgaaatttggcgcccaccgtttgtgctttgaataccaacacccgtgatggctcccaagaaagtgaacactagagtcaactcctcccc

SEQ ID NO: 53986 - DNA, 314 bp, Zea Mays
ctgattcatagcacgataaaaatataatcgcagccgcaagccttaaatcggacggccgatatcacctcgtaccctttcgccgtgcgcattttgcggaatagcccctcggttatccaggaaccaacccgcagtcccctcgggagcgcctatgtgtcttgtgcactttttcgctctagcccccagattcctctgttatcatcgcccagtctagggatcagtaaaatggtgggaaagaattagaaaaaaagatttttagtacaaaattaatgccaagaacttgtgtaattcctagaatttccacataggaaccctac

SEQ ID NO: 53987 - DNA, 681 bp, Zea Mays
aataaaaaactccagaagcatttacataaaatttcccacaagttttatattcaaatgataattaaattccaacccctatttagcccaaaacagtccacaagataaaccctgcaatctgtttttggacagcagcatacccggattcaaacagcgacatatcctaaaatataactccgaatcaagcgcataagtactcgttggaaaggtatgacaaaactctacattattatcatactgattatcactaattacacacgaaaaatcctcagaaactgctaatactactgctgttcgcccacctgcaaatctgtttttttggacagcaacatacccggattcaaacagcgatatctcctaaaatataactccgaatcgagcgcataagtactcgttggaaaggtatgataaaactctacatgattctcccacttattcccactaattacccacgaaaaattctcagaaactgctagaactactgctgttcgcccacccacaaaatttctggatagcacctctaccaattcgcatatgtaaacatctaatcgattgaattgcagcacaaataaacaagagttaatcacaaaatcaccttgacttctccccctttcctccctccttccttccaccaaattccaattggagatttgcacccatgcgacgtagatcaagcgggagggc

SEQ ID NO: 53988 - DNA, 619 bp, Zea Mays
ctggatcgctggtcactcctgatgcagcccagctgttccatccggtaagaaaaaaacaatcaaaaattgttgctccaccgtcgtttgttcaatattggttgcaattaatgattgcaactgcgtggtttgttgattgcaactagttgtatcctctaattgcaaacttcagtctctgtttttactcattgattaccatggtgtgtttgtgctccagttgcaacgtttgttgtttgttgattgcaactaggtgtatcctctaattgcaaacttcagtctctgtttttactcattgattacccatggtgtatttgtgctccagttgcaacgtttgttgcttgttgattgcaactaggtgtatcctctaattgaaacttgagtctctgtttttactcattgattaccattgcatggtgtgtttgtgctccagttgcaacgtttgctgcttgttgattgcaactaggtgtatcctctaattgaaacttgagtctctgtttttactcattgattaccattgcatggtgtgtttgtgctccagttgcaacgtttgttgcttgttgattgcaactaggtgtatcctctaattgaaacttgagtctctgtttttactcattgattacca

SEQ ID NO: 53989 - DNA, 451 bp, Zea Mays
cattgtgcaacatgcatcgtagaggtagcacactgcataacaaggcgcaagtgtaggcgagtggtgtgaggcatcaaggaaatgtatcttgacaagtgagagcatagtgcaacgaggcaggtggtgtgcgagaaggatctcttgagggaggaaagaacgatgtatcgcatttttcgaaggagctgacaagcggaatttgttagcatgacccacatgtttgagaacttaatgtgcactacacccaaacaacgaatatgtctaaaggaccattagacacaacaccacatatatgaatagtacgcaccattcaggaaaccctaggcaccaaacacatctagtgaaaacactagtcatgtctggtgcacaccatgtgcaactgtggttttaggatgaaataagtacccaaccttcaattaacatgtctagtgaggcatatggtgatttgttcggt

SEQ ID NO: 53990 - DNA, 496 bp, Zea Mays
atgaggtaatggggcaagtctccctgagggatgactgcgcatgatgtcgcaatctgtgtttgcggcaaagacatggtgtactggggtccccccatagccatggtgtatgatggaataggggaaggcgaaggtggcatgggcaatagattaatgggcaggcatgatgccgccggggcgctggtacatgacatggcataatatgtcggcggcagtggatgctgctgcggaggaagaagggtggctaccaatgttgtctgtatggttgccacggatcgcgtgagctcatggacgactgctgccaaggactcgagcgtgaggggaggtggaggtgttgtggatgaggatgtggcgggtctgggcaccgacggtgtggagattggcagcgcggcggaggaggctgagggctggatggtggtggatggagggcctgacatatccgatatcagattgttagggatcgtcgtggtgctacagtactgtgggtgcgttcacaagg

SEQ ID NO: 53991 - DNA, 630 bp, Zea Mays
atatgttacaacaaccaagtgcataacatcatcaaagtcattattacatgtcttacaaatagcgcaattatggactaggggtctcctcctttggtataagaccagcctccctattgttatgcaacataatctcaaactccccttccctccaaagaaatcaaggacaaaatcgctaatgcgatctaacttgtggtcaccactgagggcctccatcaagatagcatgatgcgagccaatatctacctcaccgagtttcctggcatccatacacattgctctaacaaaaatgggatcaactaactccaagagttccgggcgtcgggcaccccctcgcttgcacttcgaaggaccgacaccatcaacttgtgaagccccttcgctttggcatgctagcacaagcgcatcgttgaccctcattcactacacctgcagaaggcccctgcctactccgggagcacctaaagccgcaatatccaacacaacaaaaagtccaagtcctcctcaaaggactcgtcatccatttccacaaaaaaccctaagtcgttctcatcaatcgacgattgagaattaaaataattgttgacactatcggagtttgacggactctggcaagctagaggtgtgatgcac

SEQ ID NO: 53992 - DNA, 494 bp, Zea Mays
attgaatatagcgtaccagttcagagagttgatccaggccgttgatctggggtaacgaacgggtctggttagatccccgttcactgcatcgtggctgttggatctgggtccggggggggggggggtgagggcgtaataaaacctgggtcgtcggattggtatctgaggtacccagatcgcgtaccggttttactatgcgcgatctgatcggagccgtccatcggtaatcggatggatcaggtctacccataccctttcgtggtgcatgtttcacataaaagacctcggccaacaggatatttaacctgccgtccatgacagggagaagtaattgaagttaggtcataaatttttttaagttagcccctgtacttcctaataattgtgtgcgcaatccagaggaatgagaaattaggaaattaatataggaaatacttttctagcacaaaaataattacagaaactcatttaattcatagaaaattcatttttaa

SEQ ID NO: 53993 - DNA, 724 bp, Zea Mays
gcaggctgcagcccaccgtcgatccccaattttgttaagggagctcgggtgggtgtggcagcaggtactagagcccggaagttgctgcgcccctttttggtgggtgagctctttatgcgtcctacgatgatgttaagggagcaggacgcagggactactaattctgggggcaaagggccgtattctcccttcttttgtacgaagctttgctgtggcttttgcgccttttcggcgtgctgcgtccataatcagctagcagcggttcagttgtcttgggcttttccggccatataaaccctagctgccctgcctgttagctgctcccgtgaagttcgtgacaaagctggtgctgtagtgtcttgtttcggacaccacttctgatgcatttccttacttatccaaggatttttgtttttcttgtttcatccgttttcgttgttagattgctatcacgagcttctaaccctcgctagtttactgtctgatatatatttaccgaacgctgaacattctgtcattacacatccaaaaaagaaaaatagtagaaaaaaacttttacatatttgctgtactcaagattaaagttttaccatgtctgtttgtggctgttgcttgcctttcgtgccagttgttatttgtcaccgatgcattattcatgatctacattcctcccaaatttacctttcagtccagtacaattcactgttaagatttttaccctttt

SEQ ID NO: 53994 - DNA, 899 bp, Zea Mays
atagcagattcctcgccctcctctatgttacaacgcaacatacccatttgtaattcctaataatattcttctacacttttagtaccctgtctcaattgttgcaacttgtttaacatatcacgtgcataataagaaagaacaaatctagcccgcattacccgtttcaacgcatcccaagtttgtggcatattattaagattcttcttaccatgttctatccaccaaacagaagcaaatttagtaaactcactagtagcagctctaactcgcgcattctcaggaaactcatgacatgcaaacttttgatcaaccgcaatctcccaagtaatgtaagcatcagggtcatatttaccatcaaaaggaggtatcttaaatttaaccttactaaaagcatcatcattaccatgtacctcacgttggcaaaaaccaccgatatctctacggttagtacatagtcaccggcgattaggtgcttcttggtcatcttgttcagtatcagcaacatagtcatcccagttacctttggcaccctcatcacgcccaccattggtattagcatgcatctcatcaaatcgcctcaagagtgcgacaaggctcttgtcaatatgagcaactgtcacttccacatttgcaagtttggtgtttgtgtcgatttgtgtggcctccaattgccccatcttttcattcgtcacctgcaagtcattatcaagatcttccgtgtgcgtcttcaccagccttacaaagtgttgtatgatgcccttggtgcgaggagagtgtgacatattacgagaagcatcatcaacctccaatcctgccatggttagacgaacagaggcaacaaaataaaagtgaaggaataaaaactctacaactattaggatgtagctactgcaaggcgc

SEQ ID NO: 53995 - DNA, 471 bp, Zea Mays
tacccaacatggaatatgagtacgaacacaaatagcagaaatataatcaagaataaccaacactattttacttgccttcaccgggaaacttggacaaagccctaagtgcgatcctgaagtccaccatctgtttttgacacaccacttagtgcacaaaattcacataaccaacgctcataaatgacaccgcacctacgcacgattccaaacccatcgcaagcgacttatcacccccatcacccaccaactgtagcggcgctgcttgtcaatttcatatctttaaaattatgacagcagtggtaacaaaaaaaactccagaagcatctgcgtaaaattccccaaaaattttgtatacaaatgataattaaattccaacccctaattagcccaaaacagtccacaagatgaaccctgcaatctgtttttggacagcaacatacccggattcaaacagtgatatctcctaaatta

SEQ ID NO: 53996 - DNA, 336 bp, Zea Mays
agtcaatggtaagtgttgtgtccccaccttggggaccttggactcctccttttatagccgcaagggggaagcctaggagtacaagggttgttgtgctgctgttatgtttagaggagatgaatctgagcccctgtagcagtatggtcgacaggatggcccttatcctggatgttgcttttgaccaagagaaggatgtctgatccctgtaacctgcgctttgaccgggtagagagccgaggccagcatcgggggctcggacgcttacccaagcctgtcctgtgaggggcgtggatgaaacgttaagaagtatatcgagtcatagtggttgaaatagcg

SEQ ID NO: 53997 - DNA, 643 bp, Zea Mays
cgtcgctatgctatgacggggaaactcgtgtcaattccgctgcggtgcttgccggggctggtcgtcctcatcagacgttgccagcggccatcatcccgccaccatctcgatctccagcacgtcacctacatatgagtcttgtaccgtgtagcctgtgcctttagtaccgcggtggttggtcacatgcgcaccgtgggcactggtcgctggtgtactcatcgccgtggggtgggctatcgacgtcagccatgaagagagagaaaggatagtagcttggggtcgtaaggaagaagacaacacgtccaccgttgatcctctaaccaacggctaggattagtcgggttaccgcttcatccggatgtgatcggtgccgtcgatctcgagggagattggaccttctattccaacccacggattgactgcgggtcatcggattttgatccaaggctccatgttgcgtaccgttttggtcaaagtcagatttaatctgcactgtgcgcctctgatcgtgcggctgtattcgctccatacccctttgctgaagccattttgcaaaagtgtccctgtggtttcccaaaaataatctgctgatcatccagtgttgttgcattaacagttgcgccctcggatttcacaaataatc

SEQ ID NO: 53998 - DNA, 419 bp, Zea Mays
atcgccaaactcatgatcccatcgtgcacccggtgattccattgcggcaagagagagaaagaaccgagctcgtcggtggcttgcgggttcgttgttggtccggtcatatttggtggacgggggggcatcactggcgcaccacgctgatgtgcgtggcctgccagggggaagaggacctggtgtctaggaaattcctcgtcggaggaggaactctactgcgggtccgcggtggcgcgtgggcaacaccatcggcgccctcatctctggtaagtagacctctccattggtcggcaatcatcagtacctggcgtggagtgtgctgggttggacttggggtagacgcttcgggttggtgacatcgccggggagccatggcgcagctcctagccgcaccgccatgaccatgtgttatggggtgg

SEQ ID NO: 53999 - DNA, 323 bp, Zea Mays
atttgtaacttcagtttactacaatgttttatgaagctaacacttaatatgtttcaggcaaggggataggggctgctgtagatgttgtgtacccaggagtggaacacagagagtgtatgagacatctatggaagaatatgaagaagaagtattttggccctttgttttctcagaatatgtgggcagctgctaaggcttgtacaagtgacaagttcgactaccacatgagaaagatagaggagaagagtcctaatgcgatagcctggctagatgaaaatcatccatatgtgtggtccagaagcaaatttggagatggttgcaag

SEQ ID NO: 54000 - DNA, 506 bp, Zea Mays
taaacactaaagggtccatagtgtgatattttgcaggggtgaggccactataatgtttgttgtccagttcattcttatctcaatcccagcacacaagtatcacctttgttcccctactgtagacaacaaacaaaactaataattactcactgttcactgcttcacaacagtccaaactagatatttttagaggagaaaagctcctagcgcacgaactatgcacttcctccgtatctccatctctatctcaatccctaccaccagatgaaactcagcatggagagaagatattttatgcaccttagtctgttccagattcagttatctgaaccatttacaccactacctctaaaacagtacaaccttgatattttctgtagggagttgaggtctctaaaaccttggttatgtaattcatccatgtattcatcccaacgcacaagcaaagcacagggagagaggtgatcttctttaatgatcacattaaacactgaatccaacttcat

SEQ ID NO: 54001 - DNA, 590 bp, Zea Mays
agcagggaaagaaaagaaaagttgatgcgtcagccatctctgttacactgaagggtaaaaagatcatggttttgacacaccggcctagtacattgaaacggccacggtgtcaaagcttgctgaggggacttcttccgccgctgagccggaataccccgctcctgccggtgccaagggagaatcggctgaaatgccgaaagtaatgggacaggagaaaacctagtcggccatagcgccgaagcgtcctgtcgaagccaaggaaagaacggtcgaagagtcggtgctagaggagtcggcaggactgccaaaaatcctaagcccgccaccagagccagagttgccgaaaattcgtgcaataactcccaaaaggaggagaatggccagagttttggacgttgtcatggagtcgacgaggctatcaactcctgcctctaccaaagagaaaaatataaaggaggccaccgaagctattacaactcgtgttgaagccgaagttgggccctcaattcctgccgaaatagggcctgttgaaattgttgaaaaggatatggaagaaggaccttcggatgccgctctaattttggaaaaag

SEQ ID NO: 54002 - DNA, 473 bp, Zea Mays
aacaagattgcagatacatcgtatctcgccgccggtgacccgcatgctcggattcgcgccggcgctgcgattcgtgcccagtaatgcgtggataatgacccctggttaaaagatctagccgtggatgaactcggagcactgtgtccgctctgtcgcccatccacttgtcggcgacgtggccgagcggccgtcgccgggatgtacaccattcactatgattgcgccatgccatgaccctttcaccacatcattaccaactgtaatagctcaccagtgaccgtcgtagctccttagcctgtgactgccatggtagttcacgtcagggaccttctccttccttcggtcgccagcgcaccttctccaaattggacaacaccgccattgagctctataaattcaagccccagtgagctccgctaggttgtcacgaagccagagcaccagcccttgcatccaattagccaccatagcgc

SEQ ID NO: 54003 - DNA, 567 bp, Zea Mays
ttaaggtaaagagggagatgatcagaaatggtcctactcaaacccgagacagtaacactattatagtgcaaatcacaatcagggctgacaaggaatctgtcaagtttctcgaatgtgggatcacttctgttattggaccaagtgaaacgtctattgaccaattctaactcaataagactatgtaagtctatgatagagttaaaaagagaactccatttcgtgacacctccaggtttatttttctcattttccttcctgagaatattaaagtcgccacccaccaacacaggatatttacatttactacagaacagagaaagctcactaaggaagcggttctcgtgctcatcttgagcagcaccatacacattgataaaattccaaataaaaccactatctttatgaaccacaagcactctgatcatgaaatcacctatttcttgctctctaacatcaaaaatctcagcattgaaaccagataaaaggcccccagatctacctttggggggataccaacaccagacaaagttcttattaccaccaaccctgttaagccatgcatcacag

SEQ ID NO: 54004 - DNA, 753 bp, Zea Mays
ggataattggttattaggaaaactagcatgcacacacagaaactccgtaattgatttaagcttagcgtgcatgattggtatatatataattgcactggaagttggcacaggacaaacattatggtcagttgatcgctctgagtttatgttgtgaacccatctcagttgatcagtccgagacttctttgcttctaaacagaagagacaacgaacgaatacgaagcttatctgcgctgctggtggcgtgttgttattgcaggacgcatgaatgcatgcatgtcggtcgcaatgcatgaatgcatacactgatacccatatataataacaaaacttgacgtctccgtgaccaacaactcatgttaattagcaacatagacgacaagcaggacaggtctgagtatgaaagaaacctccctgagcttgattgacctccttgtctcgagccccccggttctggcaggcacacacacacacacgcaccagacggatctaatcaggaaccaataatactccttcaagctaaacatgcctcaaaccacatgctgccaagtgcatgccgagcgttacaacgattctgcaagcccccctttggaggttgtcacggcgagcacgaaagaaccctgaggcatggggtggggtgggtgtcacggcgaggcctttgcccatcccatcaggccggtaaacggtagtgcagacgacagacaacattgatccgttcactcaaccgatggagctgcttgccttgccttgcct

SEQ ID NO: 54005 - DNA, 1328 bp, Zea Mays
tttcattgaattaattccactcttaaaatcatttcagaattattaatatatatgagtcagttatatggaatggtgcgcactaatttcaggaagcttggggtgtgttttgtatataaacgtattgaatttaaacaattctatattgcatgtggaccgtgggttagtttccaagaagatgagggtctctagaaagatggccctgaccgaaggggtatcagtcaatttgagtcgtttgatctaaagcctacggctagatccgacctcctcatattatgaaatggtacgaattcttagtcactagatctaggatccacggtagggattttagatatgcgcgatttaatcctatacatccatagccgatccaacgaacactgcatctccatatgcctctctctctctcccatctatcttgtcatctacccttggcaatccgagcacggcggcgaacacgccttcgcagcggcgccctggccggggcttggctccgttcatctttgcgacctattccttaggtgaaaatcgagctacatgttgttgagatcaaggcgaactggtctagtgctgtcttaccgggagttatggtgtcatggtgctctgcccacgtcgaagggtgaatctgtgatggccgacagagcccggtgagcaattccttgctcaaagcacaatcatgccccccatcgaccaccacaccatgtacgtctcctgtcgaacattataaccaaatctctgggcaaagtgcattggaagggtcgagaatcgatcgcggcgacggtctcttagttttcttcacgcgacgacgctcttcggccctccttcctcggtgatgacttcaagatggttaatgatggggaaaaaagcagcttcatatttacacaagtggaagggaccgactctatgtgcttggtgtgtgtgccccatcgtgatccttgacgagtttgttatgcctgagttgagctccgtgtcgctccgtgggagatgagcccaatgggcgggactcacaagatcagagaaacaaacttacgtacaggtgtgtggaagaatgtcgctaacgcgacaaacccacgcgccagtgaccgactacgtgcccgcgcggggtgagaacccatggtgcatcaactccttcggggagtggagggtgtgccaaaagttgggccgggtgggggaagaaattgggagatgggctgactagagatgtgaagcagggttcagactgtcaagggtgcggtgatttgtttttttttctttttcttttctattttctgttttcctctttttattttaatttatttttcaaatcctatttcagatttggttctcatcgttaa

SEQ ID NO: 54006 - DNA, 357 bp, Zea Mays
gatgaacgcacatgtgatattcggcaatgttctgtttctgatggctatctatgcagatacattgattcagtgcgcgcttgcaaatgcatattgacgttcatacgactcgtgaattttgtctgcttggatcttgaatccagagatagtggaaatgtggaattatccacaatgtagcacttcccttccatgcatgggaacaactaagtctctttttgtgtgattcaagcacataggggtttgcatacataatttttgcagcgagacagggattcaataagaatgtacagtcgaatcatgttgtgagatctatggatcctctaacttgtaaaatacgctccttttttatttgaattgcag

SEQ ID NO: 54007 - DNA, 642 bp, Zea Mays
acctaacaagaggaagaaaaatcgcagtcggccaaaatggagggaagcctctagccgaggaggccactaacaacttcgaaaaattgctcgaggtcccatgcccaaaccattgctacccggtttgacatgcaaggattacaggtttcttaggaattcctaagcaaagttacaccacccagaaaaggcccgaaccccgtaaggacggtgagcaggagagaaggggtcccactttccctaacaaaaccggatgcctactgatctttagtgggtccgactactacgcaaggcactgaaagcttgagcgacgtgagacatttagcgttcggccaccgatcccagcgttcctcgaatggtctgaccatgctattaccttcaactgtttcgaccaccccgagcatgtccctcggccggggcgatatccgatgttgatacgactgccaaaagttctcatgtatgggggcagtgggattaatatcatctactcagccacgttcgacgccatgggcctcgactaggattggctcaggccgatggggggctcatttcatggtgtcatacccaggaggcaggcgaccccgctcggatgaatcgacctgccagtgacctttgggacaccagccaacttcaggaccgagactctgc

SEQ ID NO: 54008 - DNA, 393 bp, Zea Mays
gggggctcgggtacatgaccgagcccttagccctggccttggctctggccttggctctcaccagaaatcaagcaggcacaagtcaacagcaagtacaagaccatgatctgggccataccatctatagggggacgacaacacctcctcatcacatgtggccaactccaatgctccaaacaaccctcctttaggttataaataggacaccctatggcttcagggggcaggcgaacacttcacatttttctcctccaccacgatattggcacttgcctcaatcaactctagggacttgggatcctttcctctcccgctcagcttgtatttcctactacaagcacttaggtgcaaataatataagtatcatccccctcagctggaagtagacccttc

SEQ ID NO: 54009 - DNA, 311 bp, Zea Mays
cccgacgtcgacgagctaacctctaaagatctcatcgacagagaccgtgtcttcgccctgcaggccctcaacaaataccaagcccaaacgaaggcctggcgcgatcacgcagtcgtcccaacagaattcaacaaaggggacctcgtacttgtccacacaacccggacagagtcacggggtaagctgaagccaaagtgggaaggatcatttatcgtcaagacgaagtcgtctcccagcgcgtacagactaacaacgcaatctggcgaagacctggaacatttttggaatatagataatctccgcaaattttt

SEQ ID NO: 54010 - DNA, 657 bp, Zea Mays
gttaatgaattgattcactttgctggagaagaaataattccagagctgaaggaagatgaagttgtggtgttcaatagctaattcagggcggggcttcggttccccctttacgagatggtaggggaagttttgaagaagtttgaaatttacctaacatcaattgacccccaatgccattgttatacttagcgtgtatatttgggctcttcgaagccaaggaaaaagtgccaatgccaaagggttctatcgagtgcacgaacttcattatcagacgaaggctagagccgatggtctgcacaagaacttcgggtgctacaattttgcataccgaaaagataccaaggcccccgtgattggctatcgcactaaatggccgaccgggtggacgaatgagtggttttacatgaaggctaatgagaagaagagggagaagctcatgagcatggtaatgagtcccttaaggctgaacttcggcatgactcgacccttgtgcaatatgcagctagggtctccttgccaactggccgaagtggaatttagggtcgtggctgagcacattagcactagggacttagtgcaagaatatttagtaaacagaacattcccaacttctagcgggtggggaatgccgaagaggaaggaagaggggaaaaagta

SEQ ID NO: 54011 - DNA, 769 bp, Zea Mays
ccttaagactgtcccatcgtcgccggggagattgccacgccgttagccacggatttacttgcgccagtgttcttctttccctccggtcgtcgcgcgtcttgctcaaaattcgcggccaccgcccgctggcactataaattgacctcgcccgtagctgcgccatgtcgtcgtgaagctgtagcacccgctcccaccctcgatcatccaccagcacgcgcgaatttctaattccccccaaatccattctccgccaccgtgaaacgagcttcaccgtcgccagccgtactccggtcagtccccgtcctctgctcccttgtttaagcattctgatgcggctgtgatactcgccaacccatccaattgaattaggagcccactagtcgccaggaacacgactaacttgccgcgatggtcacggccaccgtggccagagagttttagtgcgcgattggtgaaattaagttaggggaaacatcgattaaggtatgaattaggtgttagtcgacggagagcgccagtcatagccccaatcggccagcgtaagtgctcgccggagctcctccgtgcgctgccgtcgtcgaggacgtgtcgggtaaagaaatagaaaaccgaggactatactgcaaactgtcagtgacacggtgaaacagtaataggacttatctccagttagccaagaacgcgggggtctctgtgcaacgtcgccagggcgcgggcgcgcgcgggcgcctttctccctctgagctgggccactgggctgaaatcagcc

SEQ ID NO: 54012 - DNA, 594 bp, Zea Mays
agcgttgtgctttctcctcttacaaacttaataattttagcatatatagcttcatacatacaacaattggaggaacatcatcaattcatgtaatagtagtacgtccaagagtattatttccttatgtaatcttttctacaagtaaccatgtagaccgcgctgcagaaagccattaactaaaacacatgagtgaggttttgatcgttgagctagttgatataagccggcttagacacaataactaaggagctttgtgagagagacaagtgatgtcttacactaataatgaagagctaactactatatagatatgctaaatagtataaactgcaaagattcttgaagccaacagtcgattgtattattaaatctgctctaacgatacctaccacctatctacgcacaagtgctatgaaattaattcttgttgtggacctttaagccaaatgtgtggcgcataaacatattcttattttactcatccattctattcatgcatactcttttctccctttttattcgttagactattttcaacagtttctctatcctatctcttattttattctatattttaaatttctcatggcaaac

SEQ ID NO: 54013 - DNA, 978 bp, Zea Mays
catagtgttcgtgctctatttaagtgggccatcatccgaaataaacataagctagactacatcaactgattttagtggtcagtaccaggattgaagggctacttatatgggctggatggggtcgataacaaaagatgacaaaatgtagacaagagctaaatcccaattagttttatgtggttccatatatcattcttggtggtctttttggtgcgtggaatctttgattttgagtggtccttgtttgatcctattaaataaatggtaggattttaataatctcgccattcatgacgtaatgaagtacaaatattgtcttcaaaaaaaaggccagcatggttgcatacacaaagattaaatttattgaaattcatccacctgacactctgacagtttcatgttggcctattcatggttcatgggatgatttaacagtccaaaggtcagcagcctagtattctaccagtagtaaggaaaaagttatagtaatctaacctctagtgccctattgagtctgataagaacattccaagaacagtgttgttttgaaattcttgttgtgcatgtatgaacagtgtatcatcacataggtaattggtggaaaaaacaacataaagtgaggtagctgagaaaatggaggatccagagtaattagtaatccagttatgaagtgtcaaggcatgacctgtgccacagtatggttgcacaagaaggagctccaaaataatttcaaagaatgaacactaaattcccagagataccatatgccaatcatccctcaggccaagccatctcttttatgggattatataagctctgtttcagagtgaacttagcaacatcactaagttagagtgtttaataacaaaacaacggacttggtggaagtacgatatgaattttggcaagagtctgaaagaataaactcttgcaagctcagaagctatatttcactgtcaaaaggtagaacatagtttc

SEQ ID NO: 54014 - DNA, 528 bp, Zea Mays
acacaatgagtcaccattataatttgatcaacaaaaagtaattaaccaaatcatcatggcaacacatatatcaaaagtaagtacaatgtggatcatgttgtggctctatgtaaagatttaaccaagaaagagtaatcataaactaaagcaactgctactttggttcccctttgatacttgaaaaggtagccaattaattttacatgtggagaaacgatttttgtcacttgatagtgagttgttaaaaccatatggtaaagcgttccacaattttattgctggcaacggaggcaacaatgttttacttgatatagacgacaattatggatatgctacactgctagttgctcgcccacacacctagaggctagaatagattagtactagaaacacataggactacagaacactcaaattcgtgttgagtacactgctctaggtcgcgtagccctgaaatcgagaaatctaaagttttggacggtaactattggagatttcactgcaggtaaacacgtctctccataattc

SEQ ID NO: 54015 - DNA, 386 bp, Zea Mays
tataggaggagtcgtataggacgtagagagagagagagatggagagtcgtaggcagccgcttgatgtgcggcccacatgctgtgtgaagggaaggggtgccaactaggatcgcccgctactctccgtgtgtcctccttattacccgtccgcatctctttacttagtcttttttccgcgtctcactaaaaaaccatatcagagttcatgtgctaattctaatcacaattgtcattcatgtctctcttgcgattatgaccacggtaacacggtaactatggcagaggaaatggcgttgtatgcatgcttctcatttgtgcgagtggcaactaagtaaacaaattgaggaaatgatgttcggtgtaaagtaatactttccctctctccc

SEQ ID NO: 54016 - DNA, 316 bp, Zea Mays
gcaggctacaggagagccacgcccgaccgacctgcacggtagccggtagggacacggtgaggggttgcaggaaggggcttggctacggccatggtgaggttgcggggagacttcaggcagcacgcggaggggctgctgccgtgcctaggcgtgcgtgcgagggactttagtgatgggcgctggtaggatcaacgaaggaggaggggagaagaagaggactcaccccggtcatgacgatcggtaaccgaaggggcgcctgctttgtctgagagaagtggaggagtgggcgggacatgggcgggcagttggagaagag

SEQ ID NO: 54017 - DNA, 1171 bp, Zea Mays
gacaaagctaaagtgatgtatcattcagaagtcggaactgagggactagcaactaaaaagcccatgattcatttactaaaacatgcatgataaaactgtggctgcaagctgaatggttaattggtctttcatataacgcgacaattgtttttatgaactttatctggaattggagctgttccttttgtggattttcagtaggactacacagatgaagcattatttgttgatgttatttttaatgtgtattttcacatcgactgaacagacacagtggatttactacttttactcttatttaaagtgtcccaccattcattctaacacttcgataacttgctgtgctatattgttctttgattatatttcaagctgcaaagttatcttattgttgtcttccttgtataaattattctaacaaatgtgatatgagtttctttaaattggtggatttcctctgatgctagaacagtaccatccataacaatcttgaatctaatattcagcttgtcgatactttttattttaccctgttcttgtgttctgtttggaaaagagatttacttttccttttactactgactgtttttcctttcatgccacaaggtttcttccttcagtaaatttctttgcaagaatgtcctaataggatgcaaggctcatgatttgtgtggtctccactattttgaggcaactgagtatcttgtattagtgtcacttggtctgcactttctcaacaatgaaaggctagattagaagctggatgatcttgcaggctgaaaattgaattgtttctgcctggtggtattcattcaaactttctaatagagggaaaagctctataatggtaaaatgtgatgtttgatggcctaggatttggttcaacaactttcttgtccaccacttcagtcactacctacctcctttgtcctgacaccaattggtccgctatagacttgttgagcatataaattaaaaccagtcatctgtttccttagctaaggacctgtttggatccaccagctaaactttatgactaaattaagctgtagtggatccaaacagcctagctaaaatatcagccaaatgcttcttagctaataagaaccccattatctcattatatgttccaacccagctaaaagtgctcaatgaccaaattaccctcctg

SEQ ID NO: 54018 - DNA, 537 bp, Zea Mays
gcgagctggcttgatctcttcttcttcctcttcttcgtcatcatcaccctcatcatcatctgaaatatcactttaggctggaggaggatgaggagcagggatgggagaaagacctacatgcttccgaagctcacggatctcaagacaagcctcatatgcagcattagctgcataagagcacgtaccaaaaatcttgtgaaaccaccatgtgagcttccctggcttcttcccataagaagacgaaggacgagaaggacatggcctgtcactagaaaaggagtgcatggctacctctccaccaaaggatgaccttggacgctcactagcagaggcacgagcctgagcagccagagttgaggatcgggacctatcaactctaaatggctcatgaagaccatcacaggagaaaatgtaactgatcactctctcgatgatgaacataatgtaagcaacatatgggagagccctcctggaatcctcagaggccatctgaatatctgtccaaacaaagtgtgacactgagtagggatcaccatc

SEQ ID NO: 54019 - DNA, 679 bp, Zea Mays
gtcaaaggcgataacgaacaagggtataagagaaaagatgaaggcatagaagagccagtggtatgagtgcaacaaagaatggagttaagataaaactcacacccagcaaagatgaggttctgaccaagggcgggataaataaagcacttctcccaaatcaatatgggagaggggattttaaacaacagacataagatagtcatcaaggtaagatggagagacgacgaaggtaaaggtaataacaaacaacaaaggatggagttaaaaactcgcatgcgacaaggaaggggatacgaccaaggggaaatagataaagtgcaacgctcagattgagatgaaaagaggagattttaaagggtcggtataagataaacatcaaggtaattaagatatataggtgataaggataaaagtgatgatgatgaaaagcataatccatggacaaagttaaggcaagactcgcaaagtatcgaagtggggataacaatcaaggataaaataagtgaggttatgacagatgagttgaggtaaaaaaatcattaccgaatgaagttacaaggaattaacgagatcaccaaggatgtgcaaaataaaatgactgctcatggatcatcgagacacaagggtggtcaagggcatgtaaaatgaaatatcttaaacggaccttgagatataaagg

SEQ ID NO: 54020 - DNA, 811 bp, Zea Mays
attttccaaaaaaaataaactaattttttcttgagaaaatgaaaatcccgtgataaattggggttgcatgcgagaccacagaagattgtcaacggagcaaacgacgacgtgcactgaaagcgagtactgctgcagtgaggtgactcacagtgtgtgggcttgaattcctgcggcagctgcaggagaaatacttcagatctgacctttttattcaccactaccatccaagattagtctttatgcacactcaagtcgatcgcactgatcgtccgcatgccaataacaccagtacagcgaggcacgtacggccggccgggagccgaaatatcctggacacacggaacgtgcatgtcaccaaattttgactaaatgatggggttattatttacctttttttgtgtgaggtgtcccaaagtcaactaggatttcgatgtgcaaatacactagctaggtcgagtacgtccatccaggtgatgagaggatgcatgcatgtgtggtgttgtcaaatttgctcccccttgtgtggtggagtgcatcaggcatcgccatcggccacacgtacgtacgcccccacacccgcgctccaaatgcaagcaaggtgtgcaaggaggaccacagcacccagcgccacccagagcctgcagtgtccgcagcaacaaatcgcatgggatcttgttgtcaccacagtccctcactgttggcgtaacgcgtagcagcagcagcctccacgtactcacgagaccacacgtgtggaggcagaagaatgtccggccggcgtgcgtgtggagggcaaaatcgtctagcacgatgc

SEQ ID NO: 54021 - DNA, 580 bp, Zea Mays
gacgtattcgtctaagtgttcaccatttggcaccggatgttgcagatgctgacattgttggtcctaccgggcgtgctagaatgtgttgccactcaaaacccactggcgagagacggtaggcaacacgaggagccaggaggccttcaggatggctggtgggcctcggtcccatggtcaacgacctggatcctggcgtatggcctagcttcgaggttcgcgtggcatgccacttgatctatacccgaccaggagggtgtcgacgtgcttcgagttggtttcctacatacacaaacacatgtaaacgtcagttagagccatgtgcggctccccgggtcatattggctataagaagctggtcgttccccaggcttgcatcggatccgtgcgtcagtgacgcgtagagccgatggctcttgagacctcgctccgttcgcacgaggcggatccaaaccactaccattaaaggctcactacacagtcgaaacattctgcacgtagccagccctagcaagcatgatggacaacagagcgccggccagatcagaggcctaaaaaccagcatgagtcaattcccaaaaca

SEQ ID NO: 54022 - DNA, 490 bp, Zea Mays
aacacgctggctcctctcaactggtcgaacagatcttctattctgggcaaagggtacttgttcttgatcgtgacctcatttagagctcgataatcgatacacatccttttggtgccatctttcttttccacaaataggacaggggcggcccaaggcgaggtgcttggccaaatgtaacctttctctgacagctcatcaatctgcttcttaagttcaaccaactctggtccagatattctgtaagctctcttaaagatgggggcggttccaggaagaagctctatggcaaattcaacttttcactctggtggcatacccggtaagtccttgggaaacacatctggaaactccgacacaatcttgatactctcaattgggtctgcttcactgctatcgacagccatctgataacaacttcctttcttcggctcaggcgggactaactcggtcaccacttcctctcctagtggggacatcaacttgattgtcc

SEQ ID NO: 54023 - DNA, 645 bp, Zea Mays
ccgccggtccggcaaggaaaaggtcgatgacggcgaggtggccgtggctgaacgggacctcgggtatcagtcgcctgaggggggcctgaaggatatcttcgccggagctcctaatccggtgaatacaactagacggacctcgggggaactccgtgtcccccggtctatgaagctgaaagacgccttcctccggaggcccttctggacctcccacgggtccagctgcagtcaggtacatgcagaagtgatcacagctagagacaagggttcccgtgtaaaatgcagataggaaccctgggtcggggcttagccccgcggcaagtgccataccaagaggtgctcagcaactctcccccagctgggaaggaccctccaaggtaacgggagtgcaccgacccaggggcaaccatctagctacgactggaggagtaccttacctcgatgccaaatatctctgtaagttctatccatagagcaagactaaggggtcgagtctgtttcctttttttgtaactaaatgacacatacatgtatgataacccggtggggtctgcccccataaacccggactattggtctgcacacatgcacaacaagttatgaagaagaaactacccccctcagccgtgctcttgtgatagttcc

SEQ ID NO: 54024 - DNA, 536 bp, Zea Mays
tgaagatggactacaaccaatatagttgttgtgccctgatcaggatgcgaaggtctagctcggacccctgaccgagtctagatgagatcaacccaacaatctccctatcaaagattcttcgatagtgaattaatgtggtaggtcacgcaatcgagaattgaaggtaaagacatgggaggcacaaagatttataaaggtttagactttgattgagataataccctacgtcctatttatggcgatgtttatttcctatgcaatgtgatataatgttctgcgctcttagggcttcgtaaccctcctttttagtctaagtagggatgatgtttacaaaaaatgcatctaggtcggttacaagatatggatagcaatcgtgccaaaactgagtctatctagaattatcgtgtagctaaactctatcgatacatatgtttcatctctttgatctaataagatcgttgtcatctttatctttctagagttttcctgcagataggttcttcctctattgtgtttagccgagtccctaggctcac

SEQ ID NO: 54025 - DNA, 476 bp, Zea Mays
agtaaaaattgccaacagcagcttggaaagttcccacttgatagttgtgcacgacatatatcattcttgtttgctaagaccctgtagtatctatttgtggaatctaaccttcatcccagtgcctaatgctccaattgactgttggagtttctgtgtatgtaagtgtatctttgcgtgaggacaattacagatagcgttgtttgaagttgaaataatttgagtaatttatagtttcacaaccccctccggccctccctcttgtaaaatgttggttgttttagttatgttctaggccaaactttatgaactttgaccaagtatatagatatgcactatctacaacatcaaatttagtttagctttgttaaatccatcatgagaatgccttgatagtgtatttatttggtattgtacgtgttgatagatttttgtgtaaactttgtcaaaaatagagaagtttggctttggacaaaact

SEQ ID NO: 54026 - DNA, 283 bp, Zea Mays
taaaagattgtcgcagacactgctactcctgactctacgaccaccgctctgtacacctctactacagctttgtcgactacctcatcaccttctcgtcctcctgcccagggaactcgaccacctacccagggaagggtgccgggttcaagtgctggtcgtcgcaacaagaatcgtcgtcacgacaatgtcgtggtggtggctctccttggcattccgtctacaatccctggacaagtacaatccacatgtggcctagatccatgtctacaggttcctctcctcg

SEQ ID NO: 54027 - DNA, 455 bp, Zea Mays
gtgggggcatggttgtgccaagtctacactatcgtcttaaggaatagtagagattgaggcataatttgacttaattttttttttggaaggcggaggcaaattttgattgaatctatataatcattgggacaagattatagtatcttatttaatgtgaattatggatttgagtgatctaggaggtttaatccgcgacgtgtcatagtattacattatgtccaaaaacaaatgatggcgattggtatgttattagtgttccctctcagtcaaaatgtttttttaaatgggcacatgaagtgttgttttattctgtattactatataatccactagtttaacctttataaaacttacccaaccaaatctctccagactcataaactgcactaaatccaacaaataaattacacctaaacttaacacaccatcaaaaccagtggtttagatcgctaaat

SEQ ID NO: 54028 - DNA, 2388 bp, Zea Mays
aagtaattgccttgcttaatacaagtttgacacctgccattttgaagaggccatgccacatgtggctagtgagattcggtcgcgatcgctggcgatggaggtaggaaagctgtgaagacggatgacaccctcgaagaaggcgcgagcgatcgagcatctgagtacaggtagttgagggcgatgaagtgtgcgtacttggagaagcggtcgacaacggtaagtatgatagacttcttgtggaccttgtggaggccctcaatgaagtccatcgagatattgactcacctaggacgacacgtcgaggggttgtaggaggctagctggctatagggtctctgccttgttgcactcagcactagcatgtgaggcaagtgggcatgtagtcctgaatgagcgtccggtcgtgggaatgtagaagtttgctcgtagccgcttgagtgtcctcatggtcggttgtatgggccaatgcaagtacctggtggtgtaggtcctcttgtgtcggcataatgatggcaagccatgaaagaggacgtcggtcacgtgccacaactcccaaagggttgcatcctagaactgctaacagagctggcctacctccgtgtcgtctgttgttgttgtgcaaatctcatcgaggaggtggaacaagggcctcaagatggcgtgtatagcctggcgatgtcggcgtcgtggtgcgagagggtgtttgttgtcttattgaggcgaccggggtgatactccatggtgaagtcaaagtcgaacaacttgttactaaactgatgctgggggactatggataatcgctgatccagaaggaagttgaggtttttgtgtttggtgtggatgaggaagcgacaaccctataagtacgaccgctagtatcggatggcctgcttgaggtggcgggcgacgaatggcttcctaaagaactccagggggtggttccctagttaaggattggatcgaagctgacacccgacgcgtcgcagttgacgatgatttgtcgatcgaagtctagcatccacgggactagtccaatgggcagggagtgcttcagtgcttggtcgccaccatgacctcaagtgtataggcaaatgaatcttcacataggagctgtgtcaggggcaccacgatcatctcgaagtcttggatgaacttccggtagtagccgatgagtcccaggaagccacacacgccctaggccgagcgtggcttgggccaggaggagactacatccaccttgttgttcatggtgacaccgttggttgagatgatgttgtcgaggtaggcgaccgatggctccccgaaggagcatttggaccacttcaattgaggtcgtggatgcacaatgcgtcaaggatgtggtgtatgagttgtaggtgcttggaccacaacaagctagagataaggatgttgtggaacaatacgagcacagacctacgtaggaaggacataggatgtcgttcatgaggccctagaatgttgttggtgtgttggagaggtcgatggacatgacgaggaacttgaagtggtcgtggtgggtgtgaaacaccgtattatcaatattccttgagtgcatccgtgcctaggggtagctagactgtatgtcaagtttgttgaagtatcgtgtgccatggagctcgaagtggccgtggtgggtgtggaacaccatcctcaatatcttttaggtgtatccctgcctaggggtagccagaccgtaggtcaagtttgttgaagtaccgtgcacgatggagcttgtccaggcgctcgtcaaccaataggatcgagaacatgtctttagacggcaacgtcatacagaggcccttgaagtccaaagtatggccccagagtccggaggaagtcaacgccgaggacgagatcgaagccatggcaacagacggagaagtcctcaaggctggtgcacagacaacattgtgggtcatgccttcataggggacctggccgccatttggcgctgtacgatatcgctagtctaatgcgacgcatgaccctgcactgatgaagttgtgggtcgtgttactatctaggagcgccaagatgcgatggccgtggatgtagatgtggaggtgcacggtgtcctttgggtggacgttggcgatcgcgtggagggagacaatcggtgcgtcgagcacctcctcgacagccaccccaacacctatgttgttggtgacctcattgtccaggtaatcaacggccttgaggaagaacaagtgttgacactggtgtcgctggacgtgtggctcatcgcagttataggaaagcccttgccgtggcgctcgaccatctcggtcggggtgggctaaggggtgcaggcagtgttggggtaggcgctgccagcgcgcgtgggactcctgagttcgcgtggtggag

SEQ ID NO: 54029 - DNA, 654 bp, Zea Mays
ctactgaacacaatactaaatgctcggacatcatcaatgtacaggtggaattaccatgggcgtcctccaggtgcagacgtgtcgtatatatctgatgctggaaatctgcggccagggaccctgttcacagtaaggtacgttgaacatgtgttcttgaggactagagggtgtttcagtctacgttaaaaaacacacacagttctagaatgtcccagattgcccagcccctgtcctgatcaaaggctgaaccacttcctacttagcatgttttttctactactcctgaaatgtgggcacaacaatcataaaacaataatacactggtgcattaaacgacacaaatgataaacctgcttagatagttgtggctatactcatttatgttatttatccaacataagtggcatagttatcaatagtctaatttgcacaccctataaggtatatttgttcaagttgttggtccaatgttaagattggatatgcagtgcagttccactggagacctctatgagtttgacaaagaaacaaagccatcatggaaaaagcatatatggagtgaagaactggcgaaaaatatctcattaaaatcatcggctggctttgctttgcatggtttgtcagggtctaactcagtgtctcttttcctgataa

SEQ ID NO: 54030 - DNA, 541 bp, Zea Mays
gtggcgcccgcgtcctcggtttctgccgtggaaacagaagagcaaactgcaacgggtacttcttctcctgttgggtctcctgcgacggtcaccccaccgccgactgcttctatgcctcgcacgagattacagaataatatccgcaagcctaaaattcgtactgatggaacagtcacatattcagtggtccgtacagcctcttctgagcctacatcttatattgaggctatgaaacagccaccttggaaggaagcaatgattgatgagtttcgagccttattggtcaacaaaacatggcatctcattcctcctcgcagtgatttgaatattattgattgcaaatgggtttttaaattgaagcaaaaggcagatggtactattgatcgtcacaaggcccgattggttgccaaaggatttactcaggaatatggtattgattatgaagagacgtttagtccggttgtcaaaccatccaccattcgcctgttattatctcttgctgttacttgtgattggtctattcgccagatcgatatacaga

SEQ ID NO: 54031 - DNA, 547 bp, Zea Mays
tgacgatgcttggaagtggcattagcatgaaagaatttagtgccagcatcccccatcgtggcccatttgatttggcctctctgcttccagtaggtacgctgattggaaagaagaccctgcaggtggtggagtagagcattcttaaagttccattcttgaattgttagatctctgctttcctcaataaaatccatcaattgaatgatcaattccgtcttaacaatcaacttagctagattgggtaaagatttctgccacccatggatcacctttcttgctcttttgaatttggccataagtcgttttgcaggatcaggctggaatagatcttgctcccaataggcttggaatctggaatggaagtcctcaagctgaagccagtagttttcaaatatgaaaatgggcggtttaggaacgttagaatgaatgttgaccacccaggggacatgatccgaggagctcctggccagggaaaaggcagaagtggctgggaagttggaagaccaggcaggcgaaacaaagcactagtccagcttttcaagcaaag

SEQ ID NO: 54032 - DNA, 551 bp, Zea Mays
aataatattccataggatttcatcctctatgtgttgattgcatttggatttgtaacatgcactcattgctcttagaaactttcaacaaatgaagtacgaggagtggaatgctattgctagcaactaatggtccattatggcttgttctacccaatctcaaagagaggaaacacacacgtttggtgttgtttttattaattcttgataatcctgcaaaatgaacccttcatttttatcctttgaccataccttcttcacacattcaaatagatatgtcatgtgcacagatagtttgattatttatttttgtccacaaaaaatatgaaaatatgtatagatagtagcggcaaattagggataattatagctttgaattaggtgaatgagccacatcgaacaaaatattgcttcaacacaacttgagataccaaactgaacatatctttcgatacttgggattgatctaactagtgggcagttgatggagttcggctcccccggtgacggagaaaaggcgaagcggtgtttgtaccaggtcaactaactaatca

SEQ ID NO: 54033 - DNA, 516 bp, Zea Mays
aaaactttaaaaaccatatcttaacaaggtgattatcatgatggaagggataccctagcttttcatgtatcttcacctttgaaaaagattctaaaaccctagcaccccctcttgagccattaaacccccaagcattggattagtgagaaggagaagcaaaagaccatttcatgacttgaactctataccaaagttgaagtacacttatatgtctacaagaaatagtaaggaaattgttccaaaaaggtcccacaaaacccccaaaatcagcccccaagtggaaaccctatagagaactcacattttctctaagtcaaaaatcagcccacttccaatgatttgagatgttcacttagttgctggtgtaaaaaccataagatccaaataacaaaaaggagccaaattacccaaggcacacccctaaaaagtttgaaaccaaaccagaaccgtttgacatggtttggcatcagttttgtcgtgggatgaacagtgccgacaccactgacttggcgccac

SEQ ID NO: 54034 - DNA, 853 bp, Zea Mays
ggtgattaagcattgttgacatacaaaaattggagataactagccctaaagtctggctgtcagaccaccctaaaactggatactaactaacagtgagttatgaggaactttgggctcgattcttgtgcaagggaataagcaaatgggaaagatccctatagcaaaattgtagctggtatatagagctacaagtttgttacagatggattagcaagttctcacacaaaattccgagatctgggcactgcaattctgtctgtcaggcgctctgaataaggattccgatggtatagtgctacacaaatatcacaggttcagagaatctcgccgccggtgagccgtgcgtcggattcacgcccaccgtcgcgattcgtgccttggatgtatggattacgctcaggggtaaaaagatcttcacctcggatgaacttggagcattgttctgtcctatgtcgtgcccacttgcgtcggcgacgtggccaagtggccatcactggagtttgtgcccttcatcatggtcgcgccatgccttaggctagttaccacgtcgcactaagtcactttagttagccaggccatcgccggtggccttgccacggtaacatccacgaattgcttgcgccagtagctccttccctctccggccgccaccgcgccatctcaaattcacaggccaccgctcagggatcctataaattgagcatgttgtcggctccgctaagtagtcaagcacccaatccatcaactcgtgcctcaaatcgtccaccagagctcgccaatttgaaactttccccaaatcggtacaaagcatcgcgcggagtgacctcaccatggccaacgcgttacaggttcg

SEQ ID NO: 54035 - DNA, 496 bp, Zea Mays
attcaaactcttgattgacaactgacttagattgggctcgactcgaaatcagcatgacataacttagggtgatcactatgccctaacaacggagcaatcggcttatgttagaaacgccttaagtcggtgcgacatgctcacgcttacatgacttagggtgatcactatgccctactaacaaagcaatcgacttaagtcggaaacaccttaagtcggtgcgacatactcatgcttacatgacttatggtgatcattatgccctactaacggagcaatcggcttaagtcggaaatgccttaagtcggtacaacatgctcacgcttacatgacttagggtgatcactattccctactaacggagcaatcaacttaagtcagaaatgccttaagtcggtgcgacatgctcacgcttacatgacttagggtgatcactatgccctactaacagagcaatcggcttaagtcggaaacgcctgaagtcggtgcgacatgctca

SEQ ID NO: 54036 - DNA, 414 bp, Zea Mays
actagagatagtcgcacgagcaccgtgtattcatactgtagtaaggggtacccctgattcagggtaccgacagtggccctcgggcccgcctcaggggaggatacgagcctacaggtggggccaaagctttgatcggcaattggcgcgctgcttccatgcgcttgctgcaagtctgacttcagtcacgccaacttccatgcctgtccccacggctgactgacccgtggtctccgcacttgatggctttgctgggccacgcgtggggtgcttcgataccgctgcattggttttgaaaagtcaccttctctgtcttctgcggcggccccgaggaggcgcggtactggcgcgagcggtggttcgacttctctgcacctaggaactggcgcctaatgaagatgactcgtgggcctgagc

SEQ ID NO: 54037 - DNA, 330 bp, Zea Mays
ctgagagctccgttcctatggctgggccccacctctcttgggcccttgtgtagatacgcagaggtagtgtcccctaatttgtttgttagagctacttgaggatatcaatgaggtatggctccgctggttcatcagtattcagtatttacaaggcattatgagttagcatgctccctcccgctaagctacctgaatgtggttatcaggtctcaataagtatccatttttaaaagtataaattgttatagccatacatgcaagtctttattttggaaataaccaaaggttctgaacctgcattgtgctaactcgtcaatcattcctaaaatg

SEQ ID NO: 54038 - DNA, 337 bp, Zea Mays
gaagtggatacgggtccttgggacaggccttgttcaggcttgtgtagtcgatgcacatccgaagcttcccatttgctttggggacgatgactgggttggccagccacactaggtgatgaacctcttcaataaagccggcgtttagcagcttccagacctcctttcggatgaagtcctgccgctcgacggactatctgcgaggcttctaactcaccggcctggcatcagggttgatcttcagatggtgctcggtcacctccctggggatcccaggcatctgcgacggctcccatgcgaacacgtcggcatttgcctagaggaaggcgacgagcgcgag

SEQ ID NO: 54039 - DNA, 408 bp, Zea Mays
gtgcttctcatttttcttcctgagaaagtccctttcccgaagcatggcggatgatgtaatcaatgctctcttttaaagcttcgggagcaggagttgcaacattttcaaacgaaatttgctctgtggccttttcttctgttgctttttcttcaattccggcaggctttatctcagtgggctctgaaggcccaacttcggtttcagtttgaattattatagcttcgacttctgactgtttcgtttcagcttcgggttgcgccttggaagtttcggcaatttttctggtaggagtaggattcaaggttcttgttgtttctagtacaacatctagcacgttcgccatccttctccttttaggagttgcggtggagcctttttgcatcttcggcactattgcctctgttgaag

SEQ ID NO: 54040 - DNA, 297 bp, Zea Mays
tagcattgtcttttgaccctttccccttctctttcgacgctgagcaagccttccgagcctccttcacgggtcctttggcacatacatgcagacgaagccacctcctttggcacatgtcgtcacagcgcatacatgcagacgaagctctatagcttcttcttctgattcgtgagttacttttgacaaaggatagcttcatgggtccttcacattgtacctaaaacgtaccttttctatttgataataaggagttttgaggatctttgacaatataggccccaacagtagacccttgca

SEQ ID NO: 54041 - DNA, 406 bp, Zea Mays
ggaggtcccacattcggtcatggtctatctctataccatgttcatgaatgataaatcctaagaacttaccagccgacactcaaaagcacatttacgtgggttcatctttaaaccgtaccgacacattttatcaaatgctatgcacaaatcagctatatgacaactaaacccagccgatttgactacaatatcatcgatgtagacttccacagtgtttcccaacagctcgtgaaagatcaaatccatagccctctaataagtagcaccagcatttttcaaaccaaatgtcatgacaaaccactcaaataaaccaatgaagcctggacatataaaggatgttttagacgcatcttcttcagccatagaaatatgattatatccggcattaccatcaagaaagctaaca

SEQ ID NO: 54042 - DNA, 634 bp, Zea Mays
tcttggatctttgttcctaggtggtaaagtgtcactggtaagcaccctagggtgtgtaggctactacgacaattttgtaagaagggctagattttctgttgaaagaggaaagaagactccttagtggattagtagagggggtgctattttgggtatggccaagagtagacatttttgggtcattcaccagcttccataatggagacatggggcactttatggtggcccaaactttggtcaatcaaatcctcgtatctttcgattggtttgtctcatgcttgttcatattgcttatatatttgtgttttcgcttatgctactggggtgtggttgcttgcgcttgtaagaagtgtgtgaatgtatcatatacacacaatcaagtgacacatgaagttgcattgacatagatgaagaggaagggaaaaaggacctttagggtgctctctagctaaagtggtcaagctaatttgtcaccttagctaggctaggatttgcaaggaggttgttattaattattttgtgtactaatatttttataaaaaaaattgtgcaggatattcatcctctcaatagtcgtcgaagaggtcttctcgtaaaccaccagacctagctagaaaagcatatatactatatc

SEQ ID NO: 54043 - DNA, 591 bp, Zea Mays
acacatggttttttgattggactgactttggtcgtagcttgttgtgcaaaaatggtatccattaacatcatacccagaaaatgtcatgaccctacagacaaagccactaactactttgtctcaactcgacactcataaagagatccctttggccctgcaagttcaaacacgttagatagttatattattcgcacgtaagagcaacttcaaatgacaaactaagtacgataccttctgtttgaaccaggaaacgaaatcaggcaacccatttcccgcaccctttttaagaagggtatcatattcctgtggagttggatcctttgatcgatgccataattcatcaagaaattgctctgtgtatggcgtcacctcgtcaaggttggtccactaatatagcatgatatggcgccactcttcatgtctcagggtcttggtggtcgaaccacttgcgcttccgagttgcccttgaaaaatgctaaggttcgattcatttttgccatcattgtaatgcgggggtggattatacacgctcgggagtttgtcaccatattaagttattgtgaagtttgacacctcctcaagtatgtatgc

SEQ ID NO: 54044 - DNA, 728 bp, Zea Mays
aaaaagggcgtacatcactgaagtcatatgactagctttccttggcattttagcactgtcactttaaagtcttttcttggcacctagcttcggcttaggcctcattcggtcaaagggatctcatcttcgttgggcatctctccatcacttcatcttcaatgtcatttttcctaaccaaagatacaaagttaattagtttcgaacccaaagagttttaactctacaaaaggtatgagtttagtggttacctccattatacgtgaactatgcatgcttgtggtcgaaggattggccatctcctcaatcttgtttggtagtcatcttcgttttcctctgcttcacaaattcttgttgtggcctgctgacctctttcgatagaaggattttcttcaacaatcttcaccttcttcttgtcgcctcaatctcggaccctaaaactgtccttctgtgtttggtagtcatctttgttttcctctgcttcacagcttcttgttgtggcttactaacctcttttttctttcttcccctaaaatcctaagccaggtgggggtaatctgggcacaaaaaacctattgctttgaagacctaattcaatctttattctaccgctgaaggcaacagtaagagctcgatcttcctttgcaatgaaattaccaaacacttcattgattttcaactcaattgtccccaaccattcatcacagggttcactaaattcttcttcaaat

SEQ ID NO: 54045 - DNA, 687 bp, Zea Mays
attggtggagaggtagattgccctgaagttatcacagtagatgagggtggcgcgctggagggggctatggagctcctagagaagctagcgcagccagaaagcctcaaccacgccattggccataacgcggtactcgacctcagctttggagtgagagacaacagactgtctcttggcggcctaggagacgaggttggtgcccaagaacacgacgtaaccagaagtggaccggcgtgtatcaaggaagtctgccatatcggtgttaagtaccagcaacacactatggggttggccgcgtaacacttttaagaggaaggcaacgatgatcacaactcgatggtacatgtagagcatgtcgaggacacaagcgattgctcaggttcgtgtcgctcggtggcgtaataccctacgtcctatggtttctgtctgtatgcggttgagttccctctgggttacatgcaatgtctcgaggaagaagagttctatgagtctatcgtttttgtagggtcccctcttcagccttattgccgactaaatcagggttacatagaaactaccatgagtccacgatctccacgttccgcttgttctgccttgtgtcacactgggccgcggtcaaacgagtcgtccatcaatttcccgcgcgctgcacgcacgagacacaactgcctccccacgtacccgcac

SEQ ID NO: 54046 - DNA, 495 bp, Zea Mays
ttgcaattaaacaataactgaatagtgataagcaaatattataagcatgtccattccatgaataaatatggtcgaagaaaattgtaccaatactcattactaccaacaactgaaatacttcggcttcatgtatgaagtagcatatcgcaactatccatgtgcataataattcggtgcacttctccataatataaagacgcatatggagcaaaatgatgccatgaaggataaccgagcataccttgggacgatgtatacggcgtaactgaaaaatatggacgatgcggtgaccaatagattttgttgagctgggacaaacctttcacccaaacgtcttgtacttgctttcttccttttgtttgcctttatcccacttcttccaaaagcaccatccttacctggcttgagaactcccattaggggcccatgtcatgcctctcctcttcagctcttgcgcaccgatttgtctagcctcttgtgccaaattgataatcc

SEQ ID NO: 54047 - DNA, 290 bp, Zea Mays
tatcttttcgtaacgaccaaaataggaaacctaaatgcaaatatggagatatataattatttattggcgatgatgggtgactaggaaacaaattatattcaaaggttttgttgtaaacgattattagtatagtatattcagtgtagcttagttggttgagctttttctcgtggaattcactaccctaaaacctatggcgaattgaaaccgaattttgctattgggatttcaaccaaccaactctggatgttcgatagtaacaaccctaactttccattgttgcctcctca

SEQ ID NO: 54048 - DNA, 727 bp, Zea Mays
gaagaagcacgcgtgggagggaagaatccagggcgcgcgtggagataaagttgtagctggcggcgggatattttttcaccagagctgagcggcgcgcgcaggaaatatcgagaggagagagagaaggagcggtggggatagggacggatgtagaatttttttattcttcttttttttacaaagaattacagatatttcgatcacgatttttagcgatgcatactgggtcgatacgctacacggatacgcatttcattctccaaatttagtgaaccaatatatttaccaattactcgcttttagttctagttacacgtctggtttgtttcggactgaaaactatttacgcgaattccaattaatttggagtcgaacgaaaatttatctcctactacaaacagggaaacaaattaattctaaatattgggtgtcagctctaactatctcaactcgatttaattttaaataggggcaagtctcgatacgttccgaattcgcattctctgtataacttttaaatggacacacgactcgacatatcgcgaaataaatgtgcgatattgatgcggcattgagagtgcgatcctttcgaaacgacgtcacgcattgtttacgtgggcgagagtctgtgcgctgtcaagacacggattttgcactaaaagctttagttgtcgagttcggcttcggtattcaaaactgtatttagtcccgtcaaattttacgattc

SEQ ID NO: 54049 - DNA, 454 bp, Zea Mays
aaaattttcagctccacctgactgtattcgagggcttttgcgagagcctggagaagagaacgcaaacgcatggctgcaaagctagcaagcgcctggagaagtggagactggagagcatcggaaaatgtagccgtgcttggcatcaaaagctgactgaatccaaggccgggaaatgtagcccctggaggagtagcagctagcagtagtgtagtagtactatgcagtctctgaaaaaaagtgagccagacttccgtactgtttgaacaccagcttgtgcttgtcctaggaatcgtagctttggaaaatggtcgcactgctcgtaccgtgctcgtgttgtgttgctccgcctcagctgaaaaaaagctactaggtacaaaaaaaaacttgtgtgcactgttctaaaagccgcgttggatcagccatcctgaaatccggctttgccctaatgggaatc

SEQ ID NO: 54050 - DNA, 1113 bp, Zea Mays
acccgaggctaacattggacgggatatgcagttccatcttgcccaaggccagctctgggcgagagacacagttccgtcttgcccatggccaacctcggatgagagacgctgtcccgtctcacccgaggccagctctaggtgggagacgcaattctatcttgctcgagggcaaccttggacaggagacgttgttccgtctcgttcgaggccaacctcaggcgggagatgcagtcatgactcgcctgaagccaactttaggcaggagaagcagtcacgactcgcctgaggctgaccttgggcaggagtgcataaacgctatatgggcctctcgatgacttgcctctcaaggcatgccctcgggccgcaaccaggctagataagctcgaactgggaggcaaagatcggatgaccgagtcatgcgctgatacctcgggcagggagtttgagcataccgaaagtgctagatactcagagttcactcggatagagggccactgaactccggataagctggaaggcgtctcgtgttaaaaggagaattcagttagagagtgatcatgacttcatagcatctatataaggccgagggggtacccctatgaacccatctctgatctctcagctcatcacatctcagcttgtcaccacctcatagcccattagccctctcacagcaaccacgccactgctagatcaatacaagaactcactctccaccgtacacaactcatctgtgacccttgtaaactagtgatactctaatactcagcctcaacacgaagtagggtgttacacattctagcagcctgaatctatataaacatctatgtgtgatccaacgtgcattcgcacataccatcaagttgccatcaactacgccgtcctacccaaaagcatcacgcggggaacctgtggtgcacagtcgggtcataaaaatcgactgctggcgcaccaagtagggggtgcgacattgattcatgacaattctatggctatcgccttcaacaccctgatggcactgatcatggatgcaggctcgccccacctcacctcagcgtgaactacttcgacgaactctaagacatgaagacctcaaccaacctccacccctcg

SEQ ID NO: 54051 - DNA, 683 bp, Zea Mays
cagagtttgaaattcgaaatgaggcatgaaatgacttggaattgagccgatacttcacggataggtatatatgagtgaatatgagtgaagtgggtgcttggtttgaagtttagcagagaaaaaaaatatttttggcacttggctcaaaaaggattgctataaatgtaaagaggcggcgtaacaggtctctaggatatcggatagccgtgaaattgtgtgagagttactggaagtagccggagggtgctggaaaaagtaggagtcgatttgagctattttgaatagtttggtcatttcaccgaacacgtggtgtgcgggtttttgaaacggcggtgaaatgactattttagtggatgaaaccctccctagggagctcaaaacctgaaggggagcacaatagaggactaggcatacacacatgcacttggattcacagatttcacaagattttgaggattttaaaaagggtgggactcatcactgcacagagcatcacaaagagagagagagataagggagaggcctcaccagagaaaggagagaggagcacgagctcctggcagaggtgcttgctggagatggaggacggcgatcaccagcggcgagcccctaggtggcggtgagggggacagcagagaggaacaatgaaagatagagaatgcgaggagggaaatgatcttggg

SEQ ID NO: 54052 - DNA, 365 bp, Zea Mays
gttatacacaatatacacactatacataccccaacagtttcataatgttatatttattcaattattatgtatgctatagtattcttacctgatgttctttttcatttacttagggtgttctaccccaaaaaatgaagtccgtggatcgtcctcccgctaatcctaaacgtataaccatcgagtcaagccaagaattctttagtgttgagataccacgtccggcctctattgggagttcctccaaacacaaagcattctgatcatcgtcctgcacctgtcgagaaaccatctgttattcatgaagccaatgaacaaactggatctggcgatgacgacgatgactttatgacacctacaaagaagcg

SEQ ID NO: 54053 - DNA, 290 bp, Zea Mays
aacctgaagacctatcccgatgaataatacgtctacctggaaccgatcctctatgcacatgtggcttttcttcctcgtctgcaacggcagatgcatgaagcatgtgtagcacttgttgatcctcgtacatgcatttaaaacgtcagtgccacggattagatgaagaagccatcttgtcagtaggatagctgcaacctaaaaacctcacctctacaaaccgcttgtgttcaattaccaaatccgcgaaatttcttgtccacggttgttggaagagttgacccacaaatcga

SEQ ID NO: 54054 - DNA, 679 bp, Zea Mays
agaatacgagaactttgtccagttaataggacagcccatagacactatgttttcttggttccagttgattgtgaacaagatgcgtgccagcaaggcgtagctaccctatgatgatcataagagagcgctcaagttacttcaagctctagatcgaaaggtttgggaggtgaaagtttcggcgattatcgagtcgtccaactatgagtctctcactatatggacgagatttttagcaagcccaagtccactgagattgaccaccagacccgggccaagattaagaacctaggtgcaccccaccatggccctattctatggaggtggttcttcctctaacccctcaccttctatgttttctttgtcttctttgttgactatcatagaggagctggtggagagcctcaaggatgaggagctagcacttgttactaatctgttaacgcggttccacaacaatcactagaaccggcacgatggtgggtccaaggatggatgctacaactacgactaccctaaccacttcattgccagctgccccaaaaagggcaagcaggaggctggcccacgtgaccatcactttggtcggtgcaagggcaagcgaaagcacacctctggccagcacaagtctagggtaggttcaaaaaggaggcgctcaaaaagaagtacctctagaaggcga

SEQ ID NO: 54055 - DNA, 335 bp, Zea Mays
ggactacgggagcttggaacttggaagaaagcaggcatagaatccgggacaacgtaccctgttgccgtcgtcgcatgtgtgttgccttgtaaatacaattcaagcggagtagataccgtattataaggctgtgtccaacaaggacccctaaatggttctgtccgctaaatttagcggatgactatctcctctctccgtccaacaaggagcgctaaatcttccggtaaatttagaggacgtacttgcacaccccaaaggtagcggctctctggcatccgctaaacgctagttctctctccatgccatgccgaggtggtcccacactcccactagcg

SEQ ID NO: 54056 - DNA, 663 bp, Zea Mays
gcagtgcaacctagaccagcttcctgaccctcaagaccgcgctccaaggtcgatgaggcgcgggaagctgcccgggatgaccccaacccggcgtcgagcacaccagcacaaacatccatcgcgccaccatctgtcggttctgacaacagatcttctggaaccatgtcttcaagagtttaatcaaagttcgccagagataattcttgcagaccaatgagggcagacaaggcaggagaaggaacaccactactttccccactagctatgtaacgtcggctgttcttccgaattagagggatttcgtcctcttcttcatcactctcatcaacaacacggacaacacacccattgggggtcagcatcagatgggtcacacattggggtcagtttcagtaaattcaggcacttgcacttcctcagcaacaggagcagaaggaccagcaccctgatccaagctggacacccaacgaagacgtctcttcttctttttctccccctcagcaggaaaagaggcttgatcggctcggcgagaacgttcagggcgaacattgacagacctctgagcgtccaaaactttgtcagcctcagggatgggcgccaccaccaatgtttcagtaggagcggcatcagaagaatccttagctaacatatccagcatggcac

SEQ ID NO: 54057 - DNA, 968 bp, Zea Mays
ctataaagttcgggggctctttagcaaaaccgttagaccaaacaggtatcagggaatcctgaccgcccaatcctcacccgatggctcttattaggtcactactttaactgaagcggtacacaactgtggccactggatttcagatccacggttcagattatataggattagaaacgtgtttcctcccttgaatcaaaactctacggtctagattctgattgcgcgaaagggtacgcgcgcaccaatctaggtcgtccgtgagccaatcaatggctccagacccgtctccatccctctggcgagaccaagcacagcggcgaacgctgtcgcggccacacgcctcaccggagatggctacccggtgattcgtgtcccaatcctaactccgatctagtgtagagtgtacaggagatcacgtcaaactgagtggggcaactcttaccttggatcgttgctcgggttgtggtggccacagtggaatgctagcccggcggaaaatgctactccgacgagcaatcctgtgatcgccacaggtcctttctccctaccatccttgcgagcacttccatcgcaccccgatgtgacctcccacactttgatattagtcgacaacgatgtgggggtgagatccaccgaagggctcgcggatctcttccttcctctcctctctgtggcagtggcacaatctctgggctagggttcttcacgtcaggattttgtgagtgctacttaagcgcagagggctagcgggcaaggaaacagggggccgttgagccaactggccggcccgggcaggtcgctgaggatggttatgtggaggggaggaagagaaacagtgtggcatgcgcatgcgagagagcgactggcaagtgggcccggtctaccagtgagagatgagacgcggtgcattggtgaggctgcctagtggggttaggctgtcagcgcggagctatagctgctgggcttgc

SEQ ID NO: 54058 - DNA, 458 bp, Zea Mays
gctgaaatcccacacgattgggccgagcatggcgagccaccgggtgccgaggacgacatcgtatcgccaaaggcatgacatagagatcagcggggaacaaggtgccaccgattgtaagcggaatgtcacggatgacgctaacgcacatgacgcgttcgccgttggcgaccataaccgtgaggcaggttggtgctgtagaggcagtctggtccgaagggtagcggcctctaagatgaagttgtaggtgctacccgagtccagcaaggcgacgagggatgcgaatccgagctcgacccccagttgcatcgtgtcgttgatgcgaccctggctagggcctggcgtcctcaggcccacgtcctcgacggtctccgtggccgcgccgtcttcctcctcaaaaccatcgaggaggaacaaccgcttgcacacacgattgtggtccctggtgaatttttcatcgc

SEQ ID NO: 54059 - DNA, 565 bp, Zea Mays
tggtggagtcacatagttgttacgcatgtgagatgggacacacgtaacccacaacatgtgtcacactaattgtattggtgtgccactatggattcacgcacgagcgatgtgtgctacgactgacggcggccttaaccggccacgacaagcagacaaccttgaccatccacgatgtacatgcgatgtcgctacagggtcaaggaatgacaactacaacttctatagtagaatagatagggtcaaactgctaggctggctccacgcatcttgtaaccccctctcccttggtctataaaagagagagggcgaccccttcaggggaggacttttttcggactctcttcttgcacacactagcacacttagccattccaacatccaagcaatacctggcctactaaacttacgatagcttcaagtgtaaagggattggagtcatctatggaagttgcctccattcttttcccgccaatgtcctcattgacataagcctcctatcccctgccacagccttattagggctactcaccatggcatgctagacttgtagggaacaacatacgcc

SEQ ID NO: 54060 - DNA, 2456 bp, Zea Mays
ctgcaatcatatgcacgaccaatcgagtaacccaatcatgcaaagcgtgccagaaattctcgcctcgaacaggcgctccttcgcaattcaccaagctcatcgcccatacctgtccacttcagcggtgggggcttgatattgtcggaccactgcccataactcaaggcaacctcaaattcaccttcgtcgctaacgaatacttcaccaagtggatcgaggctagggccgtatccacaataacatccaaaacggcacaaaaaaatttttggcagaatatcgtatgtcggttcagagtcccatccgaattaaaagtcgataacaccaagcagttcgacaaccaagacttccgggaattttgcaactccattggcacgaaggcagtgttcgcctccgttaaccacccgcaatccaacggagtagtcgagcacgccaacgacaagattttcagcgcaatcaagaaaaggctacttgatgacaaaaatggcaaatgggcagaccaactaaacgaagtcatatgggcattaaacataacataatccagagtgactgggttcacaccttttcgcttgatgtacggatccgaagcaatgacgtcgcaagagctaaagcacggatccccatgagcaagccccacagccacccctgacgtcgacgaacctacctctaaaaaatcattgacggagaccgtgtccttgctttagaggcattgagcaaataccaagcacagactaaggcatggcgcgacaacaccgtcatcccaacagagttcaaagaaggagacttagtactcaccagaaccatcagaacagagtctcggggcaagcttgaacccaagtgggaggggctctacattgtcaagaccaaaacatccccgaatgcttacaggctcacctcaccatccggcgaagacttagaacactcgtggaacgtggataacctacgcaaattctttgtctagtcccaaggcctgagcacctttgtaattcttataaacaatgtcaatcaggcctgcactctttgcgtcccagggggtgaggtttttaacgacgcggagccgtgtaataaactgccacaaaagccccccccccaaagaaaacaaggtcaaactggcaccatggttgcaggtgtcgaaaaagaccgcgacaccggtcttaggcattcgacgcataaacagtcaccgcaacaggtagcctagacagcctttgtgtgcgacaccgttcgagcaaaattcgcttgagggtgcagccagaaaaagcacaataagtgtgcgacaccacccatagggtgcgaagtcttccacgaagacatcgtccgagcaaaagtcgcctaagggtgcagccaaaaaaaagcacaataagtgtgcaacacaaccgacaaggtgcgaagtcttccacaaagacaccgtccgagcaaaagtcgcctaagggtgcagccggaaaaagcacaataagtgcgcgacaccacccacagggtgcgaagtcttccacaaagacactgtccgagcaaaagtcaccaaagggtgcagccagaaaaagaacaataagtgcgcgacaccacccacagggtgcgaagtcttccataaagacaccgtccgagcaaaagtttcccaagggtgcagccagaaaaaccaaagtacgtaacaacactcgcagcgtgcgatctcccctacataagccaccatccgagcagaagtcgcctaagggtgcagctcgataagtacaacacatgtgtagtcacctatcaagcgcggagtcacctacgaaatgtacacgtccatccacaccaaaatcgcctaaacttgcagcaaactcgcaataggcacaacaaattacatagcgcaatagcaaatgaacaaacaagcgacgggctcaaaggcaccatcgcacagcacaatagtacacactatacaacttttaccccacaaacatggacatcacagttctattgcgaagagggggagggcagcgttttcacagaatatcgcaacagaatagcgaaggaaacaaattgtcacataggctcctcctttgaaataagacatgcctctcgaaaattgaacaacatcaacctcaactcttccccctcaaactggtcctgcaggtccccttctccgatgcaccacccagacgtcgatgaaagtagctcgcgctgagtaccccgatccggtcgtggaccacttcgaagacgggtcctctccatacccattcggtgatctcttcttccacttcacgaagactcatcgatgccttgtttcgacacgtccatcctttttcgtcgcgagtctcctactctcgcatcaatcgaggtcgccagcacctcgtgagggacggatcacagagactccgacgcagccagatccaacgctgcaaaataatctaagttgtcctcaaaagattcgtcaacccacgagaaagggctccccaattccccttcctctgaagaccacgacccaaaac

SEQ ID NO: 54061 - DNA, 909 bp, Zea Mays
gaaatgccaaaaacgcatttgtctgggttcagcttcgtgcgggttgcccacagcttgtcgaagaccagggtcaggtattccactagggtcgaccctttcttagtcttgaccacgatgtcatcgacgtagacttctactttgtccctaatcaggtccccgaaagtcttactcatcgcccgcacaaatgtaggcaaggcgtttttcagaccgtacgacataacaacatagcagtaaagcccatccactgttacaaaagcagtatgcttcctatcttccctagacatctagatttgatggaaactagagtaagcgtctaggaatgataacagatagcacccggaggtagaatccacgatttggcctatacgtggcagtggatacgggtccttgggacaggccttattcaggatggtgtagtcgatgcacatccgaagcttcccattcgctttggggacgatgactgggttggccagccatattgggtgatgaacctcttcgatgaagctagcgtctagcagtttctggacctcctttcggatgaagtcctgccgctcaacagactatctgcgaggcttctggctcaccggcctggcgtcggggttaatcttcaggcagtgctcaatcacctccctagggatcccaggcatctgcgacggctcccatgtgaacacgtcggcattttcctggaaaaaagcgatgagcacgagttcctatttctcgtccagatcacccgcaatgcgagtggtttgggtggaatccgcagcgagccggatggctttgatggggacaccatccgctccggatggtcgtacctttggtgccttgggggcgccttggtaccggaggttgagggattcctctctctgtcgtctgggcgagcagtctctgccgccagggcgtgcagcttct

SEQ ID NO: 54062 - DNA, 324 bp, Zea Mays
tgaggattgtctttcgggcaaggaaggtgtaatagacttatatgtgtagaatgattaagctagtaatacaaaatgacatggataaaaattagtgagtctacttgttagtcctcatttgattattttaactctaacaaatggtaaagtgttagaataattcaagtctctagatcaaggcaattcttgaattatatagaagctgaaatttattgattgtagttttcgactgcacgcactgttttagttgtgctatatgtttgatgaactaaattgtattttctgtagatatgtgctatagaaaagtggtagataactttattatct

SEQ ID NO: 54063 - DNA, 546 bp, Zea Mays
aagatcgccacggtggagagcaataattccggctgccacgcgaccactcctcattccggccatatccagtcatcggcgccgctcccctccgttcatccacaccgcaccggtgtgaccgcgttactgtcacggcggggatgtggcaagcccgtaagaatggatatcgtttgacgtcgccgttgatcgccagcaaagaccggcgatggttaccaccatagccatggtagcggctcggtgcatctataaattcactgcgtccccacccccttcgttcaaatcaactgagctctgtccttcgtctctaaattgcaaagctgtagcacccgctcccaccctcgattagccaccctagccggagaatcaccaatttcccctaattcggtcagccgcgtcaccaagaacaacccgcccatggccagcctgctctggtaagacactgtccaaatcgagtattgttttcatgactctgcatgcttgtgaagctcactgtggcacccatttactcaattcggccatggtttggcgggaacgcgtgttcatgaactc

SEQ ID NO: 54064 - DNA, 419 bp, Zea Mays
tcttaggaaccgaaccataggaaacaaatctctcgtgttcattgcattgatcctttctttgtgatttggttcttcctctcccctctctcttgttctcttgcttgtgattgatctcatatcaaattgagttgcacccaagtaatctcgcaatcattagtacaactctaagcaagaagaacatctctcccgcactctgattgtctttattttcattctaatgctaacctaaggtttgaagttgcgcttaaagttgttaattcagatttctcctactcacccgtctctaggtgactttcaattggtattagagcacgacacttcattagagtataacatctcgaggtcatgacgagagagtcaccaagaatgggaagtcatcctcgggaggaaggtgtgagccttctaggataaagtccaaa

SEQ ID NO: 54065 - DNA, 497 bp, Zea Mays
aggggtcaagctatgggaatctacaagttgtgtatgtgtaaattcaagtgtaaaacacacaagggctagaaacatcaaaacaagcacatgataatttttttaaaaggtttcacttgctaagctcaaggttgtttggggggggggggcaaaaagggttgaacaactaaaacatttcctagatagcaagacaagagaagcacataacacaacctagtcaagactatcatgacacacaggataagaaattttttaaaatagttcctaacctagtagtgcagcacattattcacaagttcttattattggaataaaggcgagagaagcatgttgatgcacaagagaccattttaatgcgataatcatgatgcatgctcattctagtcgtcttctcagacctaactaatttttcggatgcttctacagcatccttattaatagtactagtagcctttatggcctatataaatagcaacctagctacccatctatttcctaag

SEQ ID NO: 54066 - DNA, 533 bp, Zea Mays
aaggttggccatgcaaaaacaaaagatgaagatttttggcgtactttgaatgattgcttgtggggttcagaaaaatttgatgaatttgagactcgatggaatgctttcataacaaagtatggtctagagagaaacgactggatggctaatatgtataacatttgcgagtcatggattccagcatactttatgaatgtaccccttgcgagactacttaggaccacctcaagatctaaaagcacaaattcattcttcaattgttttatccaccgacgttatattttgtcgagttttggctaagatttgacacaactttggaatgccaacgacacgaagagttaaaggaagatcacataagcttgcatagctcacctcatttgagtacatcatggcctatggagagtcaaggtagcatattgtacacacgtaacttttcaaaaaaaacaaatagaattgtaggcttctagagaccactgctccgttataaacattgaacagtttgagagtatgaagatggtggtaattaaagacag

SEQ ID NO: 54067 - DNA, 286 bp, Zea Mays
gatgcgggtacttcccgtggtcgggaagatactccaaatccaccgcatgtaccaccaacgctggccgaggctatcgctgccttggtcaacacgactgccgataatacctgctttttaagcgagatggcgggtaaccaattccagcagcaaggcagaagggctcctccccaaggaccgcgtgaaacttcatacccggacttcactgaaacgcgtcccccactctttgttaaagctgaagatcctcttgaagccaatgagtggatcagggtaatagagcagaagttct

SEQ ID NO: 54068 - DNA, 840 bp, Zea Mays
aaaagaatctcgtcccgagatttaagatcctagggtgagtaatggaaaaggaaacacgtcacatttttatttccttaattgtcttacatggcagggggaggtatggggtctattccacctttacagactaatgtacatatcttacaagttacatgaagctaaaaacctagaaaaattcttttctaagaagtcttgagtctcccaggtagcttcatcttcagtattttggttccattgtaccttatagaatttaagagttctttttcgggtgatcctgtccttctgatccaagattcgaataggatgatctagataggtcaagtctggttctaaggtaacatccaccacatcaatggttcgatcaggaacccgaaggcacttcttcaattgagatacatggaacacgttgtgcactgcagacaatgtttcgggtagttggagtcagtatgccactggtccacattgttcaggaataggaaccagaccaatgtatcggggtgcaagctttccttttataccaaaacgggtcacacacttcattggcgatactttcatgtacacataatctttgacttgaaagtacaagggtcggcgtcgtttgtctgcataactcttttgtcgagcttgtgcctctttcaagttatgtatgattcgttgaaccttttttccatctctttaaccatgtcaggcctgaaaacccacctttctctaggttcttaccaatttaagggtgtctgacaccgtcgtccatacaaggcttcaaatggtgccatcttgatgctctcttgatagatgttattgtacgaaaattctaccaagggtagacagtcatcccatttc

SEQ ID NO: 54069 - DNA, 845 bp, Zea Mays
catcctcatcagagcaaggagagaggaagcagtcggatgccagagagagattgagggagagtatcgtgtcgccgccatgaattttcatcggcgtggccgttttgggcgcattagaaggctacgggtgttcgcttgggatcactgattgttgctcgctgcttggctaggcatgtggatcctatggcgaggcggaatttctcgccaaagggtgccaccaccatggtgaccgcgtcgtaccatggccaggagcccataaccgatgacacgacaatccgcaataagtttgcatctcctaggttctatccatttccattctcgtattgcatcattccgttgagtagatggtggccaaagctcagtgtgtggatgctccggcgagatgcaccgccgtgggggcgtctgctccattctggcgacgacggaggaaggagacacgcctggtccgttgatcagtgaaccgacaaccatgatttgggtaaaggataacgtttcgcccaattaatcatgaaccgttgatccgcagatgaacgcaggatgttagatcgaggcactttaagatctgaaccatcagattctcaaccgagggctgagattaggctggcaccatatcatttcggggcattcaatcctaaccggtgattgatgatcaaagggttcatattagggtagggcatggtcatcggtcgaccgtagattcaaaatcaaagggttgtgggcgcataccggtttgatacgagatgaatataatctggaccgttcggctatgatccgatggatgaaatccgaggatacccctccagccacggattcttacaagagcccctgtggttatctataaataaccc

SEQ ID NO: 54070 - DNA, 324 bp, Zea Mays
cctctctcgttcttcctcaaagtttgcggctattactgagaagagaatctccattgccatgatatctctattgccacaactctgcacgcacagacctagtagagcatgcctctaaaatcttgtttgctgaagatcctacttaggatagtagccaataaggttttggtggagcatctatactatgggactgcttacaaaataactactatgtctacttcccgatgactgttcgatgggctacgcaacatcatttttcaccgctttgatctatacaactgcatcaactaatatcaactaagtacagtggcggacccagaaaataac

SEQ ID NO: 54071 - DNA, 1091 bp, Zea Mays
atgttggtgccccagtggcatattcagcctggaacttgcctcctcccaaagccttcactctttttgtgtcgaatccacctgtcactgatggcagtttgggccttagagtgcgatcctctactgaagaagttagcgccttggttgcctcactcggggagattcctgatgatgaacggcaggtccattttgaggtgcccctgaatcctagtgatgcagagataagtgctatgcttgatttgctggctgaggactcttctgatgctgctcctgctgggacattggtggtggcgcccctcccagaggctgatacgacattggatattcagaagcctgccagtactcgcccgaggcgcccttgccgagccaatcaacctaatccttctgctgatgagcagaaaaagaaaaagagacgcctccggcgagtatccagtttggatcgggatgttggtacttcggttcctgctgcagaagaagtgcctgtgactgaatttattgacgctaatcccaatgggtgtgcctgatctgctgctgatcccgatgtgggtgctccatctgttactgatcccaatgtgggtgctccatctgttgctgatctcaatggggtgctgcctgtgctgctaatgaagacgacggggaggaagaggatgaagttcctttgactcggaaaaacaatcggcagttcatcgctagtggtgaaagtagtggagttctttcccctgctttgtctgctctcattggtctgcaagaattgtccctggcgaattttgatcagactcttgaggatatggttccagaggatttgttatcggagccagtagatgatggtgtgatggaggtttgtgctgatgtgcttgatgctgggttgaggtcatcccgtgcctcgtcgaccttagagcgcaatctagagggtcaggagactgacttggatcgtcctggtcccatggaagtaactgagggcccatcagccttagaggtggctaccgcagagaacttggaccctaaggatggcgttgacacatgcccagcccccgaggatgttgccggggatgacttggttcgggtgggaagtgcaagccactgcccagcccccg

SEQ ID NO: 54072 - DNA, 647 bp, Zea Mays
gaagcaacggttgtacccatacgagcatgaaccttctgtgaaacatcttctctagttgcaacgcaaacttcgccaaacaatgagcccgaaggaaagagtagacttaggctccataacaccgcatctgtatgtccgcctttccacctacaaagtaatctctccaccccctataatctaaactaatttcttcctatgaagtcactctggacacttgaccttcgtcacgagaacattcatcctagcctcgaatattaacattctcatctacacccaaatgcctagctcccatcgaagatgccaagtactaaaccaaagcatcaggggcagtaaatattgacgaagctccaccaccaccaccaaatgcgctttcaataaaactcacctctataacacgagcaacctcactttcaacttcaacatcgccaccaagttcttcatcctcctctttcgatcggtttcttcttcaacacatgaatcaacatcaacaatttcaaccctcctctttttagctattgtttttgttgattgcctagtgttaccccttttcttcacagtcacccaaaacatatgtgttttcaggcctcgagtcgaaggtggactccttttgccataagaaatgttctcaacatagaaaatgcatttgaaat

SEQ ID NO: 54073 - DNA, 584 bp, Zea Mays
attttggccggagggaagacgatgtgtggtggtcggtcaatcaatggatcaacggtccagatcatgtcgcattgtaggagggttctgtgtccactggatgtcaatcggacggtccaggatgaatctagagcattttaaatcagcgccgcagatcgtgaatccaaggggcctcgtgtgcgtaccggttcgggataaaatcaatctaatccacaccgttcgcgtctgatccaatggccgagatctgactgtaccccttcgcgggtacactttacaaaagaaaccttatgtttttaggatttagaacccgcagtccatggaccctattctctgagtctcggtaaacttacgccaaaacccctgacgtttccaaaaattgacgcccagtccagaggataataaaaaccgagaaatgactatagaatttagtttttaatacaaaaacaattctagaaacttgtaaaatgcatagaaaatttattttagctccaaattgaaccattataatttctaaaattttgtaatattattatctatcatttagtgtctctgttttgacttgaaaacagttagaaaattaatttatc

SEQ ID NO: 54074 - DNA, 467 bp, Zea Mays
aacgcgtctgctgctgcgttgcggtctctttccacgtgatggaattccaaaccttcaaacttgtcttccaattttcatacggtcgtacagtatttgcccatggagtcagtcgggcaatcccaatctttatttatctggcttatgaccactagtgaatctccgtataccatcaacctcttaatgctcagtgatatggcaatgttcaacccatgtatcagtgcttcatattctgctgcattattcgatgtcgggaataacaactgaaacacgtacttgagttgttcacctctaggggcaatgaagaggattcctgcacctgctccctgcagtttcagcgagccatcgaaatacatccgccatacttcagtagcttctgggttgttaggaacttgttgctcggtccactctgatacgaagtcaactagtgctttagtcttcactgctgtgcgctgccgaaattctatgtc

SEQ ID NO: 54075 - DNA, 437 bp, Zea Mays
ctcttccccacctttgattccctatatcaaatctgtgaattttctatgaatctaagtgttggatgtggttcctttgtgtcccattgaattccctgcaggttcctagctccttcgggagggtttccctacctccaatagccatttcattcaaaacctaaatccccgcacatcacatgttcgatgaaatgcccaaaccagtcaaaaatgctccaatcgatcccaaatttttcaggcaccttcacaacacctttagtaacatattcgcgcaatttcacgccaatccgatataccaggcttcaatttcacacatttccgtgtttcgagcgatcgtttccgagccgagtgcccaaattccattttctacgcctcaaatcaaaccaagcgcacacttcactcatatttacccacgtaaacctattcgtgaaatatcggctcaa

SEQ ID NO: 54076 - DNA, 510 bp, Zea Mays
ggcaaagggaaagaaatgcaaatgatatgtcgaagctgttatctttttttttcattatgcaagaaagataatccacaattttttcagactttcaactggacaaagaagggaagattttaagcatattttggtcccatgctagacagcaagccgagtacattgattttggtgatgcagttacctttgatactacacataagactaatatgtatgataagccattaggcatgtttgttggctcgaaccaccacctacaatgcacaatatttgggtttgctttattaggagacgagacagttgatacattcgagtgggtcttcaatacgttcaaaacatgcatgggatgtgacggaccacgagtgatgttgacaggtatgttgtaataaatggctcgtatttattatggcacatactatatcctatcatattggcttgcataatgttatgtaaatttatctatttcagatcaagaccctgctatgccaatcgcactaggcagagtattcccaa

SEQ ID NO: 54077 - DNA, 444 bp, Zea Mays
gagtgcgaccctctgctgaagaagttagtgccttggttgcctcgcttggggagattcctgatgatgaacggcaggtccactttgaggtgcccctgaatcctagcgatgcggagataagtgttatgcttgatttgttggctgaggactcttctgatgctgctcctgctgggacatcggtggtgacgcccctcccagaggctgatacaactttggatactcagaagcctgccagtactcgcccgaggcgcccttgccgagccagtcaacctgatccttctgctgatgagcagaaaaagaaaaagagacgcctccggcgagtatccagtttggatcgggatgttggtacctcggttcctgctgctgaagaaatgcctgtgactgaatttactgatgctgatcccaatgggtgtacccaatccgctgctgatctcaatgtgggtgctc

SEQ ID NO: 54078 - DNA, 325 bp, Zea Mays
ccgagctccagcgagctcgtactggctggaataggcaactactagggctctagcttggttgacacttaatttaacccctaacaattgtttcccctcgatcaattgcaaggttctagcccccaaactctctgctcacggtgaccgcgcaattccggggacaattcaaagtgttcccgtcgatctactccggttcagtgcaattgttgggccaacgagcttcaagggcacacaggaatgctataaccagagcgaggagaacatgatcggacctatggaacgctgaccgcgacgagctcacacatgtggtgttcttagccgatttggg

SEQ ID NO: 54079 - DNA, 278 bp, Zea Mays
ttggaatggcattttaaatactactccctacatcaatatatcttctgcgcgtgagagaataccaagtttccacgtcgtcgtcgagcgctttggaaacataaatggcattttcatctcttcattctcggtgcgacatgcagtattggtatgctatatttggcggcagggaattagctttgagtgcacgcaacaaagaattagatttggcgccatgcagtacttgcatgcatgcaggcgggcccaatgacgcaaggtcccgtgcccgtgcaacaacaaaa

SEQ ID NO: 54080 - DNA, 655 bp, Zea Mays
accaaattgcagggttaatatgagtttaaatttgcacttaattttgaattctaactttggattcaaaatagttgagaataaaggaaaaacagaaaataaaattaaaaagaaaaagataaaactgccgcatgggcttatctagaccaattcggcccactaccaccatttcccctccgcgtgacccatcaggctgggatcagcgccgacatgtggacccgggggatcagccttccgtgcatcgcgcagctcactgcctgggcgcgcctggtgacttacgtgtggggccaccgtgtaagacccatcacccacctccattcatcgcacagattccgcgtaacgaggaccgggcgccgtgagcttcgggaatctctcaacagaaacctggttcgcccgagatttccgtcatggctcgtccgaatctctcgcggctgcgtacttaccctccccacgcgctcgtatctccgcatggctcgccgctcatcttggaacccgtcgtgatctagtcaatgggatgtacccttgatccgaaacccgtgccgagatctcgggttgcgtttgccacccccatggccttgcccaggtgcatataagtaggccatgttcctccttgcccgactaacggccgttagcccagccaccgacaccaccgggagcc

SEQ ID NO: 54081 - DNA, 479 bp, Zea Mays
gcagaatatgtctgcaggccatctcccagctgacttaatgagatcaaattggggccagattgagcatcaggaacagttgacacgtcatcgatatcacgatcaaagtcttcagggggacggtgtactacaatcggacgcaccacaacctccatgagttacaaatgggtcttcatagccgaagtaacataattatcccaatccagttgagaatcaattgggatgactcgtcttatgacatttggtggatgaccaatgttaagcactccgtcaaccgcaatgtcatcatcttcatggtaacctagcttttgtttagcctttgtaaacacatcactcaaggagggtctaccaacgaatagtaccagcacgtgtcgcatgtcaatgaacttggcatttccatacggatcttcttccacattgcctccatgatataagctcaaaaaaattgtccatctatttgaaacacgaattaaacattcaat

SEQ ID NO: 54082 - DNA, 606 bp, Zea Mays
gaaatttggttgagttccttagatagttcatgtatgtcgtgagcatgttctagtaccgaacgatgaccaactatacataactgaatttcataataattttgttggtaccgtaattagggatatccagatcacaaacctaaactgtctagatgtttgagtaaaaaaagggtcataagcacacacgctcccaacctttatcaaggcgcgtggaaccaaagtcacgactcgaccgtgctcaacctttgggcaggaaacacattcccgactcgcccgagaccagtctcaggtgacgctccgccttgtcaaccactctaatcccagaacgtgtgtccgtatgtttgcttaccaagctgaaggtgccaaagtaaacaaaagccaacacgactacggtctaatctacctttaccgcccacgacgatagtcatgccacgaatggctctgtcccccactccgaccactgtttcaaccacccagagcatggctacatgtaacgtctaatcccagcctcggcctcaggagaaatatttacctcgcccgagcccgacctccgccaactgccccagcaagggagaacgcacattaaatggtacatgatctcccacaaac

SEQ ID NO: 54083 - DNA, 408 bp, Zea Mays
aaaagagaagtaatcgtactattgagccacaacgatgcgtgctactgatgctaacctctattcaaacaaccactaagctagctcggtatcaaatcaaaacagcacgaaatgacgagctacctagctagctctgcctcatcatttgatgaatcaactcggattaaaaaacagaaacttttcgggagcaaattgggggtcttgtatgaaacacgcgcacggttcttgaatcgcgcaccagggattaacaagtgactggagcaaattaactaatggaggcgaagtacgcttgggtagaataaacaaagagccaggatcccggggagggagcaagcagccaagcacccggaccggacgcagtacaggaaggagatggcgtctggcagggcgccgagaggagagggagggaaa

SEQ ID NO: 54084 - DNA, 1726 bp, Zea Mays
actcagcaaaccaaggtcactcatgttgaaagtgtgcatcatatgcctcttgaattcttctattcttactactgatggtccacatattatgagatcatcaacatatactcccaccaccaaaagtgattcaccagctccctttctgtaaacaacatgttccacactgcattttttaaaacccaaagagatcagttcagcgtccaattttgtattccaagctccgggtgcctatttcaaaccatatagggccttgtgtaatttcaggaccttcttaaccttccctggatcttggaagcctggtggctgggacacatatacttcctctctcaaatcaccattcaagaaagctgtttttacatccatgtgacgaatctgccagttaccatgtgctgctagagcaagtaggactcttactgtttccaatctggcaacaggagcaaacacttcatcaaagtctatcccttctctctgggaatatccctttgcaacaagtctagccttatgttttaccacttctcttgctgcattcttcttgagtttgaaaactcacttcagtcctatggctttctgtccatttggcagttctgaccagctccatgtcttgttagcttctatggcttgcaattttgagttcatagctactctccaattcggatctgagcactttcaacagacactggttcatcagcaacaagcaaacacatcagactatattcgaagtcatgaatctcttctgtagcatcaaacaagtctgataaatttctatatctcagtggaaccatgcctgaacttttagtatcaacaagattttgaaggttgtttgcagctgaacctaaagatgatgttgaaggctgcacctgtggagttagtggtgagggaggtggtagatgacccccccgaattctcaccaacttggtcatatgcagttgggccttggattgctccatcagaagcattaaaatgaaactgaaagactgtagtttttgaattttcatcaggcaactgagtattttgagtatcctccagttctccccaattccagcccattccctcttcaaacttaacatctctgctaatcacaagtttgttagtagagggatcatacatcatgtacccttttgatcctggctcatacctcaccattaccattctagcagatctgtctgataatttgtcagggccaaccttctttacatgtcccacacagccaaaagtcttcaggtgactaacataaggcttcttcccataccaagcttcataggggtcatccatgtgacactttttgttggagacctgtttagaagatataaagctgtagtgactgcttcaccccagaatctaggtggcacattcctgcttttagtagacatctagccatctcaacaactgactgatttcttcgttcaacaaccccattttgttgaggagtatagggtgttgtggtgaagtgttttatgccttattcagtacaaaatttagtgaacatccttgaactgaactctcctcctctatctgtcctcaaggctttcaacttgctttctagctctacttctgctctctgcttgatcttgatctgacatgatagagcttcaccttttgtcttcaggagttcaatccacataaacctgctgaagtcatcaactactaataggaaatagaggtttacacctactgtctgtggtctaatctggccacatagatcagcatgaaacaattctagacccct

SEQ ID NO: 54085 - DNA, 553 bp, Zea Mays
ccacagatcccagatcgacggctggggattcacgcagcgtgattcgcgactggccctaggattaaatctcaacggcccacaccacaacaccctactaacctaatctcctccactcaatccaaatcggacggtgagcgcgccatcttccacctcttcacgcgcgccagccacactttctctctcatctctcacgcacaacccggttctcgatgtgttcacggtggccgccaaggaagaggagcaggggcacccgctccccagacgacggcaatcccacgccatcggttgctaagcgagtcagagagagtaggttcttactaaaatcgactgccagcgtagacagtcaatggagaatggcggcgcaggggtagttcttcaacatcagcgagaaattgcccaagtattgacgccagacttcttgaattgatggtcgccgtgtcttccatgcgctctggcgaggctacccggccacaattgaagacctggcgctggcgtggatgggaaatcatcccacgacggcagtcccttttctctcccctccgcctacggttca

SEQ ID NO: 54086 - DNA, 341 bp, Zea Mays
cgccatatatccctgagtatgtgggcaaccagcaacccacaacatcagttgcttcggcaagtcactctcaagctgcatggcctcagctaccaccaccaccacctatggcaccaaccttgattcacaatcagcagccagaagggcatcgccaagcgcagcaacagcgcgacacatgggaggagtccgaagctcgcacagttaacaacattgtgcccgaatcgggacatatttactaaagcaatacaggggctcgaccagaaagtttccaagttcaatgtattttttacttttctgtctttatatttcccctccgaagacaatataagaaggttcaaccttcg

SEQ ID NO: 54087 - DNA, 409 bp, Zea Mays
tccatacttggtgatgaatgctatcttcggtatatccgaaggtcggattctaagctgatggtaacctgacctcagatctatctttgagaacacactggctcctctcaactgatcaaaataggtcctcgattcaaggcagtgggtacttgttcttgatagtgacttcattcaaagctctataattaatgcacaacatcttcgtaccatccttcttctccacaaatagcactggggttgcccaaggtgaggtacttggtctgatgtagcctttctccaacaactcatcaatttgcttcttgagttccaccaactctggtccagatactcgataggctctcttggatataggggcggtgcctgggataaactctatggcaaattcaacctttctttcaggtggcatacctag

SEQ ID NO: 54088 - DNA, 564 bp, Zea Mays
cgtattcgcctctggtatggccttaaccatgttcgcggagctcacaagaacatgtagctccattcaaatagaaagctagggtcgtgtgtcgcgtgttccaatgtctccggcgggtttcgctgccgcggcacggggcggcgctgttgtgcgcgatcagagcgaggaacaagctacgccggccgttacatgcagagcgtatggctcagattaggtcggggtaattgtttgactagatccaatacccaccgttgatccctgtgtaggcggtcaggatctgatcttggcataccttttcgcgatattgaatcggggccgtagatccgcgatccggtggccgaggtcagttatgggttaagatgtgatctggtgcgtccatctcgaatcgggtggccgggatcaagtaccgtttctttaaacctagatctaatctcgcgcgcccaagttggatcatgcggctcagatgccgtcataccccttcggtcgtggctttttgctgaagagaccctagacttgtgttaaaacaacccgtagtcctgcctgactgtgctctgtgtctcgggaatt

SEQ ID NO: 54089 - DNA, 1053 bp, Zea Mays
ttgattgttagtgcaataagttttcaatcggctagagaagtcgaaggagacatcacttggtgaaacaagtactatgtcaattccttgcccttcaatgcaaaccgatccatcaaaatataaagttcaagaagtaatagtgaggtatgacatgtctagtttatgagtatcattaatccgatgttctacaataaaatccgctatgacctggcctctcatagatttcaatgattcataggccaagtcatattctatgagtgcataagcccacttaccaattcttacactcataattgggttatgcaacatgtacttgatcacatcggcttaaccaaaaacaattcaatgactagacagtaaataacatctacacatggtgcatgcataaaacaagcataagcataacttctcaataaaagtgtaccttgtctcagcatccaccaacctccgacttagatatgtcaccacatgctcctttccttcagtttcctgtgtcagaacagcaccaatgaccttatcttcagttgcaatgtataatcggaatggtactcctgcttgtggtgcttttaatacgggagccgaagacagatattttttaatgagatcaaatgcttcctgctgctctacccccaagcaaattcggcatcatttttaagccgaaggataggggtgaaggcatcaatctttccggctaggttagaaataaaccttcgtaaataattcaccttaccgagaaacttctgcacttcgaccttacaggtcggaggtcccacattccgaatagacttgattcggtcagggtctatctctataccatgttcatggatgacaaatcctaaaaacttaccagccgacactccaaaagcacatttacgtgggttcattttcaaaccataccgacgcatattatcaaaggctttgcgcaaatcagctaaatgagaactaaactcaaccgattttactacaatatcatcaatgtagacttccatagtgtttcccaacagttcgtgaaagatcaaattcatagccctctgataagtagcaccggcattttta

SEQ ID NO: 54090 - DNA, 332 bp, Zea Mays
tgaggaagagtcgaccaatagtattccaaatatttcctgtctgcctttcccatccttctcagttgccttgtatagctgatacttaactgggccatatgttgggctcaattttagtggtgtcatggcccatggaagaggcatatgatcaggtgttagattaccgcctcgatgaaatgttgcttgtccccaagcaacactgtgtataagcactcttctgaataagatcatattcgatgttgtatacataatagagctgacaatacctagatcccattgttttcttttcactttgagcatcgcaagttgctgagcaggtagtcctagaccaaaat

SEQ ID NO: 54091 - DNA, 553 bp, Zea Mays
gtagaggccgatggaagcagctatgctgccactgtcgtcctcgacagcatcatcacctcctgctagtgatacagtcaaggagacgtcgcaagcagcaacaaagacgtgcccaagatttcccccattttttaatacaacgaggttaaaatccttatagaatcacaacaactgcagtgaggctccacgtagtccaataaaacatgaaacatgtaaaaggcaagcaaaaatcctgaactcctgaagcatgcattttaccagatgaaacacgaaaccgtaataagctcaaatcggggcaaatctgcttatccctaatccaacagcaaggccgatcatccaactctaacgaaaccctaataagctcaaatcagggcaaatctgcttatccctaatccaatagcaaggccgatcatccaactctaaatgtgcgtgcaattcaaggttataatcgcgcggccgaagccgccaaacccatggagtcgtctagcgatgaactaagaggagggaggagcaggaaggaggcacgtacccgttttgttctatggcttcaacctct

SEQ ID NO: 54092 - DNA, 720 bp, Zea Mays
caatgttggacacttgtacacttcaaacaacctaggaagggggtgtatatatagccccaaagcctaactagtcgttaccaagattctacactttatggtcgcctcagacctctcattgtagctaggtccagtgcaccgaacctctgactactttggtgaccgttggtaaagttgtcagctatcaagattcaccagactagtccaagggcacatcgggcctttgatgtcagcaccacgttagcaaatcgttggtctgtttgaatccaatcgttgggtttactattggtccgatggctcactggattaatctactgccccgtttgccaaagccaaaaaactatctctcttcatgcccggtctggtggctggtctggtgcaaactaaacccggcctagcgtgccaagcactaaagacccgagaacaggatctttgtgtgccaagttcggtgcataggtctggtgcacatcggacctactattgtgcatccagtgcactcaacaactgcttaaactatcgaaactcgagcacaacttctttggcttctcttggcttgtaccttgggcacttctatgacttagccaaatgtgtattgagttcatccaaacattcttagtgacctctttttgttgtaacccaaccttcacattggattgcacttttcatcaagccttcgctacaactaactcctataactctaaactctgattcttagcaaatctg

SEQ ID NO: 54093 - DNA, 651 bp, Zea Mays
aaacaacatgcagtccaaacatcatgcagtcagactaggaaatgagcaaactaggcaaagtagaatgagcaaagtaggaaatatttcaccgtgcaacttaccttgattatttgaggaaataacaaactctggaaagtggagtattggacggaatcgcagaagagcacggcgtgctggcagtacggcaccacgaccaggtgctagagtattggatagttggatggcagtgctggagtattggacggatctggccaggtgctacgggctacggcagtacggcaccacagcgtgctggcacattggagtattggacggaatcagggaagagcaagagctagtgtacgcaccacagtagcacagttgcacgcctgctttgctgaatcgctgaaggccggaactcggaagccggatgctctagacggccacgggcgacaccgcgacagtgagctgtgatgtgagccagccagcgactccttcctggcggcttgcgtggatagattggagagtggagactagggtttgctactttctaattctagttgggatgggccgtatgtatgtcgtctatgtggtaatgtttgtacagttcgggtatttgggtatttcgggtaccgagtgttgctacccgattaagcccgaaataatatcgag

SEQ ID NO: 54094 - DNA, 564 bp, Zea Mays
gacggaagcgaggtgagcgattctcggggccaagcctatgggggatagatatcccctaggcccgtgcaaccaggattcagtttgtgggccattaaaggtcctccatggtacagatagaataaaccacgcaggatgaccagttgtacgtggccagagagagacgcgggaatccaaacacgtggacctgaagcatcgcaaccaacccccatgcatgcagggataagataaaccccacagaggatcacacactaccatgtgagtcggagtcggtttcacgcatctaggcattacgacagtagtcagtttagtctcttgtaaccctaacctcgtcggataaataagacgagttagggaccccttacaaaatgattgtatcctctaataggctagctagagcatagacctcatacattatgtaacctttaactcaagagcaattcaaccatagtaacgcacatgacgtagggtattacacatctctgcgacccgaacctatataaatatatgtgttccgtcgtgctaaggcacgaaccatcgagctacccatcgatctcgccatcctac

SEQ ID NO: 54095 - DNA, 281 bp, Zea Mays
gccacttatagacagctaggaaatgccaaaagaaaccattgttagccctagcgaaggtggcctagttcgattaaagtacaccttcaagtttggggataagtttgtcgaaccaaatgatgactggctgaagtgcattgaaaatactagcgatgaattacttggaacatattccaagaccgaggacaatgcactatttgcggccttcgggagtcgaaaaaagaaaagattaaatagggtttttgatgctattggatttgtataccctgactatagctacccgc

SEQ ID NO: 54096 - DNA, 288 bp, Zea Mays
gtctgacttccatacccaaatagtaactgagcaagcctaggtcactaatgctgaaagtatgcttcatctactgcttaaaaatgtgatttcagtcacagaaggctcacagataataaggtcatcaacataaactcctaccaccaacagagaatggtcaattccttacctgtacatagcatgttccaccttacacttctcaaaacccagaagggttagcttagagtcaagtctggcattccaagcttttggaacttgtttcaaaccatatagagccttcatcaatctcag

SEQ ID NO: 54097 - DNA, 288 bp, Zea Mays
ggaatttctcacttgtatattacatgactccgcctcgttaaaaacctcaccctccgggaggaaaagagtgcgggccagaataaaattgtttttgcgaattacaagggcgagctgaccctgatgagtcaaacaaaaaatttgcggaggctatcgatgttccaggaatgttccaagtcttcgccgtttggcgttgcgagcctgtatgcgctgggggaggccttcttcttgacaatgaaagggccctcccacctgggttccagcttgcccctggactctgtccgagctgtt

SEQ ID NO: 54098 - DNA, 536 bp, Zea Mays
gcggagaggggggacagaaagaaaaatttaggggttaatatagacatttgtggtggttgcatggttggttgcgcctgcaagaggtaagtcttatcttatctggttgctaggctatatatgagggcagtggttacctgattgttacacatgtaaaagagataaggcttattcatttaggccagagatgagacatggggacaaaaatagatctacgcacttgctgagtgacgcacgacaacgcacaatgcatgaaactcgtggtttaaggagtagagacatatcttccacacaattgctccttcaatccttccacacagttgaagtactacctcgttggaatgattgtaatggaaagaaggtagaagataatttttacaaaacatatcttccacacaattgaagcagtagcaagaactagtgacccatcacgagttacaaaattatcattaatttttgaggaaaactatacaaacttaaaactatggtcccgtttggtttccacttcctaaagattagtgacaatagtttagtcattt

SEQ ID NO: 54099 - DNA, 436 bp, Zea Mays
aacgcagccgtcacaaaaggtaatgacattatgtgacagtactctgaaaagtcgtcacaaggtacataatgtgacggtcgttatatgacgacccttatgacgcagcattttcgtcataagatgctttttatgaccaattttgtactaaacatgacactttacttttgtcatacaaaaccatttttttgtagtgggccaacacgcccttgtaattcaccaaacattttcgtcccggcccgcactcttttcctcccgaggggtgaggtttttaatgaggcggagccatgcaatatacccgcaaaaatcctccgcaaaaactaagacacaatatgtcgaaaaagaccgcatcgacggtcttcggcattcgaccacaccaaagtcaccgcgaggggcagcgctgactaccctcgcgtgcgacactccgcgcaaaagtcgc

SEQ ID NO: 54100 - DNA, 472 bp, Zea Mays
tagcaggggagtggctgtcggcgagcagagggatcctgacggctaggggagggaaggggaatagctggctggaaggtgttacctagagactggggtgtgctaacctaattttgatgggctgcctgggctagtaaccttttccttttttcttttctgtatatttttcctcttcattgatatttttgtcctaaacactttctcaaatatcaatattattctattttaaatatatttaaggcatcaacttacactttaccacttgaaaggtaaaaaggggattcttcgtcttaccttgccttaatgccttaaaaactatggccattactatatatatttatgtaccgtagtcgttggaaaacatactagcccttgcatgccaatataactaatgttgtgacagctttcttctttattcagcttgaatgttcattctagcatcattaatttatttttatatttatatatactgtag

SEQ ID NO: 54101 - DNA, 489 bp, Zea Mays
attaaacctccctatactgtttatggaccgcgggttcatttcgtaactcaacaggggctcattagaaaagtgcgcggtgaaggggtatcgtgtattcacagccgtcagattagatccaacagccccgagcacgccagtacttaaaggtaacggcgatcaacagcgtccctatcatggatcagcggcccacacacgaccacgccacgatccaatcctgcccatccattccaatacctacgactcagatctaatacgacgaaagggtatttggcattctaatctacaccattcatccagatccaacggtgcagagtgcttcttctaccccgcgtccaaggccgagcaaggcacccgcgcccacgccggagagtacgccggagcacaccatcgcagcgatcccggcccgaatagtcttgcgaaagtgtgctacgtgtcgcggagacaaagacaagcacgttggaaggcctcttaccggtgattaagctccag

SEQ ID NO: 54102 - DNA, 338 bp, Zea Mays
ttttgttgttggctcgtcgatatctggatggccttgggttttgtccagggcgagccatgcttgagctcgtgcggagtcattgcctttgttccataaatcggtctgaatggggtgaacccggtgggatgggacttagttgtgttgagtgcccacacggcttcaggtaattgctccgcccactttcctttttatcttctagtagtctttttttattgtggtgaagactttacaatttgcacgctccacaacccattggattgtgggtggtagactgacgtgaagactacctgcgtaccgatgaaagcacagaattccctgaaatcttgattgtcaaattg

SEQ ID NO: 54103 - DNA, 494 bp, Zea Mays
aaattgttcctcataatgtcgacgcggacatcaaaaaggaagcaaaggttgacaccaatgttgaagggccaactaattcaaagaaaaattcatcagcaaatcgccactaacaatgtcaagaaaccgttagaagcagtgacacgctacctacaaaaattgaagagagttatgacagatcaatcaaaagcggaatcagcatctcgtggagtacgtacatggtcccaagtagacaattttgaagtatgggaagaagatggaatgattcatactcgagaatcattacgtcttaaaatcaatatcccgatatacaagaaggaggatgttcctcctaaatttgtgaatgggaggccgttcttgacgaaggtgcaactttctaagttgtcgactccggagattagaatgcatgagtggtacatggtggctagcaacaaatacaaactcaaggacttcacatttgttgtgccaaaagatgtattttggagcaaagataatat

SEQ ID NO: 54104 - DNA, 724 bp, Zea Mays
catttatcatcacagggttattcgtactgtgacaccccagtgtcacctagggtttcttccttgagctaacccaaactattatcacatgtaaaactaatgaagggatgaacatcaaagattaagaacaaagcttcataatgagtcttctcaaactctccttaatcttgtcgtgaaccttaaggaaggaaaactctcaaaccctaataaatcctaagtgaacaaattaagcataaagggtaattgggagaaatcttgggggggggaatacaaattttggtaaataccaaattacaaagttttagttcaccaaataaccaacaaatcatagtaagaaagtttggccatttggtttttccaaaatccccaaatcagcccttgaaccaaggtcccatggggaatttcagaattcagaattctgaatttcaaacccctttccaaagatcaattgcgctctctgtttttcaaaactcaaagccaagaagtccaaatatcaaagttgtgccaaattctcttgaacacgctctggaaaaatttgaactcaaaccaaattcatttggcacggttttggcacagtttgacctcgggaccatgcattttgacactggcaccttggtgatgctacaactccctatccctagcctaaaaccgcgcgacgtccatacacaaaagacaaagcaatgtcaggggaacaaatccttcacagtgatcttgcccaaattcacga

SEQ ID NO: 54105 - DNA, 494 bp, Zea Mays
gtctgtcgatcgtgctgctgactggctggctgcgaagactggaagaggttggttgccgtcgatacgagatgacagggcgacgatgcaaaacatgagctgaagaggttggcgtggccttggctacaaacatgtacttacttgtcttggagtttctgcgctgcgtgtagctgatgagcagctgtgcgtggaagaagaaaccgagctatggagtgcatcatggttcatggatgaagcagcacagggcgtcagaccagcacggctgggacggagcaatccgcaccgcacgcctgatgtcggaactctccaggacatggaccggacatgtaatatctctgcatacgcacagccataaaggctttcgctagctagaacgatcgatggagcctctttcccttctcttcttaattaaatccggcgaagcaaagtgccatcaaatggccgggcggcgggcgtgcgtgcgtgcacggccgtcatcattcctcggcgctaaacta

SEQ ID NO: 54106 - DNA, 419 bp, Zea Mays
agacgaacgagattacgtagaacctcgttcagttgcctatagtatcctatgcatgtgaacgatttgtcgatccaagtcatgcaagcataaaacaatttataaataaatctataagttgcaataacaatgaaacaaatactatgtcacttactttccacttggttttatcaaaatctaggattttgatggaagctctaaaggagggctcacaaaatgcagttttcttgttctccttgcttgagatgatccagacccacctcctgaatctccactagccctagagtcaacctcctgactctccactagccctagagttcacacctcttgactctcctccatcatcatctccccctatggcaccacctccttactctctttcctcccctctttgtccaacctccacacccacggcttcctct

SEQ ID NO: 54107 - DNA, 552 bp, Zea Mays
caaattcataaaaggctaggggcttctgcgcatacttttctaagactcagaatactacgcagtggacggcgggttataatctataattccagaggggctcttttgtaagttttgcacagcgaaagggtatggctagatctggaccaccggatccaaattgaacagctaggattagatcgcgcacagtaaataaatgatacactgcgtagaccatcggatctaggatctacggttaggatctattcaagagaagggttatttgctggcttctaatccgagacgttgcctgataaatcaacggatcacgtcctatctccttcctccgaccaacctagacggcggcaccgccccgattctcacctagtcgagctccggtgaggtagaatcggtgttccccgggcgctaagcatcaaattgagtcgagatttactatgcggaagtcaagacgaacacgagggacggatttcttaccgagggaatggagcacaggggtacgaccacgacagcggatgtgcccacggcggtgtaacgccttcgacgaagaattcgcga

SEQ ID NO: 54108 - DNA, 756 bp, Zea Mays
taataaatcatcatcacgaatacagtcaataaatccctgcatgaaaaagttctcaaggcatttattagggccaaacaattggacaacatccaggacagaacctccatatcctccaaaatcaatgatagacctgaaaaaaatgaaactcgaattacaaatcatctaattatacttaattgaagtttgaataacgaatacatacatgctcggatctagttgtcctgaacaaatgaacttaaatagttggcgagcacattcttcacgtgatatgtggggaggttcagcaactgcagatttagaggaaatatcccttgcaacaagttcagtagttgcctaatatatatatttgttagtaatcaatggcataaataattatgtattgtagtgtacacatataaaaatataagaagatgacacgacatgactaacttttgtcaatggggttctatcaaattgtggtgcaccagatgcgggagtatcatgtttaacaatattttgtccttcctgaaaaacaataaaattattaatatatacgaaatcaaacataggttataactaatattaacataatatgatgaaggaataaatactgacagtatttatgggtggtgttaattcagaaacaacaagattgtctgttgtggaagcctaatgaataaaataaataaaaacatgcatctatattattgttactatcataaattgtaattgaaagtataataattgggaataaagtaaaacaaacatttgattttg

SEQ ID NO: 54109 - DNA, 381 bp, Zea Mays
aaaaattcaaagcacttacaaagagttcgctcgggtggagataggggatggaaggacaactttattgtggcatgacaactgggacgacatatgtgaatctgaaagctacccagaactttggtcatttgcttccaacaaaggcatcactatacaccaggcgagaacaacgggcttacatgatatgtttcacactcctttgtcagtggaagctttccagcatctccatagcctacaagacttgattgcaaatcttccacaggaagaccagagggatagatggatctgcactggtacctcaagccttttttattcacataaggcaaatgttcatatgactggtaatgagtagacccaccccatcttttcctggttatggaaaac

SEQ ID NO: 54110 - DNA, 294 bp, Zea Mays
gagatatgggggtgggaagtcggctgtgtcagacatgtccaaaccgagacaaaaatggtgccaagtcgtgtcaaacgccctagggtaggtgtcacctctttccaaggcattctagggttaatttggcgccactttgtcaattgggtcgaagtgttttgaattttggattaaggtgaacatgtgggatctttgttcaatggttagtttttttgacttaggcaaattctgaatttcctcttgtgctcaaccttgggtgaactttttggggcttttctaaattctttttggggttac

SEQ ID NO: 54111 - DNA, 790 bp, Zea Mays
acccggaaagtggaaaagtataagtgtttccgccaggatagcaagggtatattatggttcgaggaccaacttgttgttcccaaggatcaaaacctaaggaagaatttggatgaggctcatctctccaaattcttcatgcaccccggaagcaacaagatgtatcacggtcttcgatcccaatattggtggactaggatgaagagggaaattgctaagtacgtgtatgaatgcgacacctgccaaaggatcaaggcaagtcacttgaagacaccaggcaccttgcaaccactccctataccatcttggaaatgggaagatatcagcatgtattttatttgggattacccaatacctctcgacaccatgattctatgtgggcaattgtggactggctaaccaagacaactcatttcatgccagtacatacaacctaccagacccaaaaatatgtggaggcgtacatcgattgtatcacctttacacatggagtgctgaagactaccctctcagactgaggcacccaattcgtggcgtgtttttggtagcagctacaagaagcacttggtaccaagctactctggagttcagcataccatcgtcagactgatggccaaacaaagagggtaaaccggactcttgaggatatgttaagggcatgtgtgattcactatgacaagaactgggacaaatgcctttcacaggccaagttctcttacaacaacaactaccaagcgagtttgaagatggcaccctttgaagctttgtttgggagaagatgctgaacacccct

SEQ ID NO: 54112 - DNA, 304 bp, Zea Mays
ggtagtataacttaagcttgcataaagcgaggacgggagcaaggaagaggtgcacgggtagagatttggcccccaacccaccctcatccacagggtcggttttgtcttctatgatgacacttgttggtagcctttaagttgttcatgagtgagcttgcaaagaactgaaccgagtgactttagcctccctccttgattaaaccctcggtattccatccgtattattagtgcacttccttctttgctttattagtggaggtcatgatatatagttgctacaatagcagtactgggaataaatatt

SEQ ID NO: 54113 - DNA, 1382 bp, Zea Mays
atttcattttacctagaaaattcatgcatgtatttatgagggcttagcaaaagttactctcttggtgtatgacgtcgatgttgtgcatcagaatcaatgacttaacataaggaagctcccacaggccacatatatgagtctagttatgctcctcaccaaaaccttgaaacctttttcccattctcgtctatgataagtttgctaagatcttatgcaatttctatcctactatatatgtcgcttgggcggtcccttcgtgacgatggtgcccttcctaactcctttctccactttctaaagtggtgattcaagggtagaaaacatctggcaatcaaagtaacatatcttcccaccggcactaagacaagaacaatatgtatctttagcacaaataggacatgtcaatattccatgcacactccacctagaaaattatcgtacactggaaaatcatgaactgagaacaaatacgtaacccagagattgaatttctgcttcttgaagcagtcataggcttccactccttcccataacttctttaactcttcaatcaatggttgaagcatcacattgaggtgtatgccaggatgctcaggcttaggtataacaagacataggaacataaactcatatttaatgcaagtagcaggggaaggttgtatgggatagcaaagacatgccgacatgagtaggacacaccgatcacattgaaaggcgtgaagttgttagttgtcaagctgatatgaacatttcttgcatcgctggcgaactttggatcacagttctcaagatacttccatgcatcaccatctaatgggtgcaccattaacccatcttttttgtttgtacaatctttatgtcacctcatgtgcatagcggtcttcctcaagagaaacaaatgtttcactcaaggagtgagaggcatgtaccgaagttttttacgtgcaacctttgtcaccaccttctccccatcttcatttacaagctccacataccttgacttgccacattttaagcacttctcttccttgccatgttccttccaaaagagcatgtagttgtcttggcaaacatcaatcttcttgatatggcccagccgcatagagtttattttaggaaacactgagttgattggttgtgattatttggtagcaaatagtccctttttgtaatggtagcattagttaccttattgagcattatacggctctatagtttctatgtttaggaaagagattgtggggaaataaaagggagaaaggcagaagagaaaagggacattcttgttccacaaattccagtctcaggcatcgccgacgataaacggccggtggttccgtcaaccgctaccataggtcgccggcgagctatcccggtgccgc

SEQ ID NO: 54114 - DNA, 461 bp, Zea Mays
aatattctattaaacgcacaaaagctaaactgaatatgtcgttcggtgtgtactcctatgtatatggagtttgccagaaatcgttgaggagtaaccatattggtctgaatgcttctacctgatgtagatgtggatatacccgggattaatatcatatccacatttgacttattggcatttgatctattctcggggacgcctgcgaatatgatccatcagccttagtcaaagcatatgttctgattgcagattcacgtggtctgtgataactctcctctgattaattcaccctgatggtgatttgcctcacgaagaggttcatcttgatgatgaaattcctagcaatgcgcgcaatataattatgctgggaatacggaacaatgaatctttcgttttgggaaatgacggagatcgttattaaatgtgggagacaaatgtgtcgacacctatcttgcctctct

SEQ ID NO: 54115 - DNA, 840 bp, Zea Mays
caatcttacacatgtacttgaatttgaagttgaattgaaaagagattagagaggaaaataagaaaaacagatcagtaagtcctgtaacattgactaaatatcaatattatgtgtcgaagtgcttgtgtccctcaccgactccattatcaccatcacccaaatatcatgtcccctgacccacttcttgatcctgatctgaagttactgattgtcctgtaacctccttgattgctgaaacttccttcacaccgtccccattccccacataaagttactgacggtcctgcatcctgaaattgcagcactttgtgcacccagtcacatttcatggggttgtgttgcattaaccagtcataccccaaaatagcatcaaaagcagcactctcatgtatgtacaataaaaatggccatgagaccaccactccaagttcttgaccatagaattgcaaaccatagcatgcccactggccactctcaccttcactggttggcactcttccaccccaggtctaactgatgcaccatgtgttccctaataaaagttaaggagctgtctgaatccaccagcatcaacataatattcttccccacaatagatctcaccttcataatgtggttacggtcagaaccagatacaacctggaatcacaggtgacaacacacctctcctttttcatcctattgctccaattgccgcaacacctcatcagatagcaccatctatccatcatcagcaacaacatcatttaactaaacctgccccctcttggcacacttaacaaatggccaggctcaaatttctcacaacaggcgtagcaaagcccatttaaccttcgaaac

SEQ ID NO: 54116 - DNA, 286 bp, Zea Mays
catttcatcgccctttctggttcgttcactgccttaaaggttgcacaagtatttttggactctgtctatcatccccacgagctacctgatgctatcgtgtctgacaacgactgcattttcacaagcaccctctagcaagaactgttcaagttgttattaggcaccgctttgcatatgagcatgtcgtaccacccacatttggacggacaaaccgaacgattcaatcaatgtctcgaaacattcttgatatgttttgtcaattcccatccttgtcactggatcaagt

SEQ ID NO: 54117 - DNA, 500 bp, Zea Mays
cgtagagtgagtggggtggatggtggtcggcttcgtgtgggcagggatggcaggcgggaattgttgtcctcgccggttggggtgagtgtaggtgagggggagttgcgaagtctttttgagggtgaggagctgaggatgatgctatttaactatagggagatgggtatcattctgaaggttgaaccaatgtaaggtgtgatgccctcgctatacgtatgtaactgtaatttgtgtgaagaggctgagtgccttcgctgatctggtcgtgcccgtagtcggttgttgcacgtttattatgccctcgctgtacgaggtctagcgcgtttattaggttggtccggcggcacctgtagtcggttgttgcacgggtagtcttttgagagagacttcggtttttgcgcacttgttgtgctagtccggctgcacccttaggcgtcttttgcacggatagtcttttggggaagacttcggtttttgcgcacttgttgtgctagtccggc

SEQ ID NO: 54118 - DNA, 777 bp, Zea Mays
gaacaatgactggtgaggtaaaagtggtgtgggtaattattcgaacctgaatttcaaggatatataaaaactaatatccatgtgggtaggcaaaatcaaagtccaattatgtgtaggcaggcacaggtaggatatgaagttgacaagacctggtggatatagattgtccgcaaatttatatgtgttatccgatgcatgattagaatagtcaatttgataatttctctccctaggctaaaaaacaaattaagaggaaccattgtttactgactacttccctctatgtatgtggtggttttgctccaccttctaccctcattgggaaccacatagaggaaggtcgaggatgtcccatagttaagaggaaaagtggacgttaaccggaaccaaatgtatattaacaaaggtagacaccttaaacaagtgcctctattaattgtttaacaaaggtagtgttgctttgacgtccgcctccgtcaatagactactactggaggtggtcatccttaggatgctcgcctcaagcaattagtatctacaaaggtagcccaaccaccccatcttatttctccatggctcccctctcatttcaatggggtgggatctctaggactctaaaaaaatctccatttttgtgggaggagtcctgatcttggattccttgaaagagaacatagtagatttttgctatgcactctcacatccttattctgctctattttttaagttttcgatgatctacatctggatctagaacttgggcacgatggatggctc

SEQ ID NO: 54119 - DNA, 297 bp, Zea Mays
cactttagtcaatctatccacaatcacccatatagcatcatatcctttttgggtgcgaggcaatccagtaatgaaatccataccaatctcttcccatttccactcgggtatcttcagtggatgcaatagtccagcgggtctttgatgttcggccttgactctttgacacacatcacacttagccacatgggcagcaacatctcttttcagtccataccaccaatacttttgcttcaaatcctgatacatcttagtgctaccagggtggatggagtaatcagaatcatgagcttcttt

SEQ ID NO: 54120 - DNA, 492 bp, Zea Mays
tcaggctttcgggtgtccactgttttgttaagctcttgtacaaccgtaacagccattggttcaacacgagccgagtcagaagattctccaaccaacatattgagtacaacatctatttcttcatcatctggacttgccggcactgaaaagtgaacttgcctctcatcattgggaagatcacaaagagaagcaaccagagccccaatgtcttcaggagagggtcgcactctaagacccagaccactatcaccagcaggagggttggacatgaaattgaaaaaggacttaggaggtggtagattccaagcagagtaggcaactggagcaccaacatttgatactttgccccttaagatcatgtctagatggctcaccagatcctcagtaggaattttcttgttggtaacccgagtcaagtcagtaatgccactgtacaagtaagctaggtatgccctgtcctttaaaggttgaatgttcttaaaaataaagtca

SEQ ID NO: 54121 - DNA, 946 bp, Zea Mays
gctctgtcagacagactgatgaaggtcctgatggtacagtagtctgacaaagatagtcaaatacatcgcacctcgccgccggtgatccttgcgcgtggattcgcatcggccgtcacgattcgtgctcggtgcaaagtggataaccacgagggagtaaaagatctggcagggagatggattgggtcgcgagcagtagtttatcagaggggcttggggcagtgcgacgtggccgaacgaccgtggttgtcagaggtcgccggtgagctcgactgcgccacgccgtggtcctttaccacgtagtcgtaaccgttgcatgctcagaattactctcctcgcatctgtaggccgtcgagcgccgcggcatgcttgccagtgcaatgtcttgtcaccaccgccctccaaatcccttccaaattcggagtaaccgtggccaacctcccttgcttcgccccctcataacgaacccagtgcaactctaacctcggccggtcatctaccatagcccgagcaattccgtttccccccaaatcggttcttcgcgccaccgttagcatctcgccatggccagccatccacaggttggtgttctagcatcccttgagtctcttgttgttcgtaggcccgattgattgaactagaccgcgctgaatcatcgtgaacacctcagttttccctcgggtctcaccgtcgtcgtgggcagaagaactccgagccagactcgtgcaattgagggatggatttggattgccaggggtggaattaggtgtagactgacttagggcgtgaatggttaggtgttgcagctggtgcaagttcgctggagagcgcgcacgccgccgttcaccgtcggggacttggagttgtgaagagaaagaagtgtgaggagttttgtgcgaatgtcagagagacacgtgaatagtgtcgtggcttttttataggttttcaa

SEQ ID NO: 54122 - DNA, 858 bp, Zea Mays
tcagcctgcaccaaaaaaagagtcgtgtgctacaccaaaatatgagggagggatgagctagatacggggcacgaatattttgggagaaggaagagggagttgttggagcgaggaaaaatacttgctactctaatattgattttcgggttgatttacgatttctctcggagttgctctaaatagtgtaatctatagtgcaaaccccccattttacacaatctgctgcagatagccttaacatatgttgtttgggatggcttttcctttccagttcacctcgctacaacaataataggacaaccatcagggacagtctcaacttcgacgacaacgacagtggagatcactcaaactactcgtatagtcttagctactcgcaccttgtcaattacctctgacaagctcactatacgctgactccaactcttcttgttctagtagcttccacagtacatattaagaggcttccttcatttgtgcaggtcgtgccagcaattttcggggccctataccaaactctaaaatgagacctatctcactaagaaaaaactacaataattttgagttataatgtattatatagcaatggaatatataaagaaccatatctatcgcaatgtcccctatttgctagaattctattatagaataatatagaaaaccatctagaatatttctccctaggacctttctaaattactaatctcttctagaacgcttttatgtcatagaattaggaaggatgtgtgtgagacatacaagattgactcaagagaccaattctttaccgtaatggattttcaataatataattgtaagggataacaaattattatttaggggggttgtgcagctgaa

SEQ ID NO: 54123 - DNA, 567 bp, Zea Mays
aaacctttgagccatttcctatctgtagttcgaactagtttactcagcatgacatcaatttttggcttgcttaaactctttagtgtcccccttttgtggcaatagtttttttcctgaatgtgttcctcttcctattaaagacgtgattgttgggtaggaaacatttatgacagtcaaagtaacatatcttcccactaaattctaagaaaaaacaatctattcttcaccttaaatcagacatattaaagtgccacggtagctccatgcagaaaagatattgtatgccatgaaatcatacatcgaccataaacaagttacatgaagggtgaatttctcctttgaactatcatacgctttgattccttccaataacttcttcagctctttgattaatggttgcatcatcacatggagattttttctaggatgttctaggtcaggtatgatgaggcataggaacacgagctcatacttcatacaaagaggagatgaaagatcgtatggaatatcaaagacagactagaatacaaagttgcaataacattaaaggcatgaaaccatctgtcg

SEQ ID NO: 54124 - DNA, 429 bp, Zea Mays
gacgggtgttggttgggttcgtcaagaaccgcaggcgcaccggaagttgccgcgccaatatctgcaaaaagggcgatcgaggaattattggcgccactagcaacccaacaagcaacctgcactatgttatgcaccaaattatggtgcgttgcttgcatcagctgctagtagctagtgtctgtctgcgtcaacagccaccataaaattatgctgtcgaccacgtacgcacccttctgaatgatgtcccatgcatatagatgatatgcgttacctgaaccatatatacggacatacagaggggagacaaacaggattcgtaaatctcttttacatacggtgtgcgctcatggtggaaatagagcagatgagcgaggtatttttcattttttgatacatatagaaatacgtacaactcctattattataaaa

SEQ ID NO: 54125 - DNA, 351 bp, Zea Mays
ccaacttcttcctacactagcttttttctacaaccagcttcttagaaaagctcatcagaaaaaagtcgaaccaaagatgccagcttcattgctcttgcctacccgtatttctaaccttcggaatagaattgcacgtgcatggtctactagctctttgatttttttcctcgtctatatataaaagagcctagtagcacctgcgtttctatgttctactatttgttatagaggcgaatattttagaatttgctgtatactttcgatagcgagcgaggcgtcttcatcaatatcgtctcgatgatttgttgtcctaatcttttaatggtgctcgtatgggtagggtcaggtttg

SEQ ID NO: 54126 - DNA, 1075 bp, Zea Mays
gaaaggttcttctacatatggacttcactatacaactgagatcgaggccacaagcggatatatattcactattggtggggttgcagtttcttggaggtctcataagcagactatcttaacgaagtctacaatgaagataaaacttgtaggacttgtgtcagccactaggcaaagtggctgaaagagctcttgatgaacttgacaatggttgataaaccagtagcaaccattcttttgcattgtgataatcaaagagtgatcataattgtaggtaatgcaaagaaaaatgcaaagttctctagacatgtgaaacgacgaatcaaatcgataagtcatttgagaaatactagagagattgtcgtagattatattaatactgctcaaaacttggcggactcttttacaaagggattaacacgtgtcgtgattgatgaagcatcaaggaaaatgggattaaagcccgcgtgatgttatcatatggtggcaacccaatctatgtgatcgaagatctcgtgaattagttatcgagaagaacaaattgttttgtataataagggactacatcaatttactcttttcccgctagctgatgcatactctcggtactgcaagggagttcgacttttttcttaatatattctgaggcctataacaggcaaggtactgtcctgcagggtacacttgtaagaatacacctatgtgagtttgactgtgaggtcatggtctatcagatgtggtaacctaaaataaactaactaaaagagacatgagcatgattgtagcgctccaatcagaagcatggccttaggtggcctagtatcagtgatgcttataagtgaaacctacttacacaagactagcaattcaaggttttatccattgcaaagtcgtgaggaggtgaatcctgttatgcaaggtgtagctctacccgtatctggtctgcactgtaaagctgtaatatgaaagcgtagatattgagtcaattggtgaccttggctttcatagggattgttggaatttggcccacttatgtgtgcccaattcaataaggaagacaaggtggtgtgtagagatg

SEQ ID NO: 54127 - DNA, 288 bp, Zea Mays
gatgaaagcaatgaatgtgggtccttggaggttcatcttcacttgaagattttttgtcaaatatgcatgagggctgtgtaccatttcatcaatagaagaagatagccaaacagagtacaaataaaggaccacactgacacatacacaccttacaaccagatctagctacaaaaacacttgattttggaaagaggaggaaaaaggatcaaacaacctaaaaggacatcatgactcaaacaaggtcagaagtagcctccaggagctggatgtccttagctcctgccctac

SEQ ID NO: 54128 - DNA, 964 bp, Zea Mays
aattgttgagtagcagggtgggatcggcacaaggtactcgtcgaaaacggtagttaggccgacttcattttcttacatgccttcgatcgcatgggcataagccacaacctattcaagctagaagataaccctctctttggcttcggaggaaaaggaaccttcccaattagcaacatcgagctaccactaccattcggcactgcaccgaatcgcgaagtgagcaggtcaccttcgacatagatgacatgatctatccctacaatgccatcatggggggcgaggatccatcaataaattcaaggcagcaatacacgcgttgtacccatgcataaaaatcctagggccccaggcgcaatcaccatatatggaaatcaacatgtagctaggaacatagaaagagacttcatccccggccagcgcaatgtgcattgtcttacaacagaatgtgaagaccccaacatccctcgcacaaagaaaggcaaaaagatcaatgcacagttacagagtaattagggagtcaaaacagtccccctggactccgccacccccaaccatacagttctagtcagcgaaaaccttctgccagcagaagaagaaaggcttctctcttgtctaaaccacaacaaggatgtcttcacgttgtcaccctagacctcgtcggcgtcagccgcaccatcattgaacacatcttgggcattggtcccaccgtgttccccaagaaacaaaatctacacaaaatgtccgatgaaaaaaccgaagcgacgaaggcagaagtccaccgcttactggaagcaaaattcatcgaaccaaccgctaatcccacctggctcgctaatgttgtaatggtgcaaaagaaaaatggaaaaaggaaaatatgcaacgacttcaccaatctcaacaaagcctatccaaaggacaacttccctttaccaagaatcgacaaaatcgttgattccgcaacagg

SEQ ID NO: 54129 - DNA, 365 bp, Zea Mays
atcaccatggattttgtggttggcttacctcggtctcctcgaggcaaggatgctatatgggttgtagtggatcgcttcactaagtctgcgcactttattcccatgaagaccacaaattcagtttcagagttggttcccttgtatatgaaagaagtaatcaggcttcacggggtgcctaagtctattgtttcagatcaagactctaaatttgtatccaaattctgggagagtcttcacagcgctttgggtaccaagctttctcttagtgttgcttttcaccctcagactgatggtcagtcggagcgaactatccaaaccttggaagacatgttgcgtgcttgtgttctatcttggaagggtagctg

SEQ ID NO: 54130 - DNA, 509 bp, Zea Mays
tgaagttttaggcaccggagccatagtggagcctctctggtaatggcgcggccatgggggagactgttcgcgccgccgcgggttggccgggggtagaagataggtgggcaacgtcagatccttgggcaacggtccagattaggatccacatacccttcgcgctagattagatcctggcgcttgattttggattgggtggagcagagcgactccagaataattaaatatgcgccatagatcgcggattggacggtctgtgccgcataccactttgctggtgacttagtctaatccgcgtcgttcgtgcgtaatccaatggcccaccttggccgatacccgttcggctggttgttttgctaaagagtcctcggattttctataaaccaacccgcagtcctaccacagtgtagaatgggccttaggaatatttaccctgagacccctggactttacagaaattgaggctcaatcccgaatagtgttaaaccagaggacttaaattttaaatg

SEQ ID NO: 54131 - DNA, 770 bp, Zea Mays
caacaatgtaatatgaatatggagagtaatgcaagcataaacctagagaggaagggcaaatcaaatcacaaaagaaaacacaaagagacacgtcgatttgtttatcagacttcgatttcataaagaaacctatgtctccattgaggagtccactaaggatcgagtctatttcaaccctttccccactatagtgaccacaaagatcaaacttgagttccctttcatttcgctcaatggtgagacagagtctccgcaaggctctccacaatttggaggctcttgcctgctttacaatttcaatggaagcttaactctgagattcaattatcacaacacactccacacttcagctcaaaacaagtgttcaaccccttttctcacaaagcatggctatcactaagctcactacttattttgaggcacttgggacacttagatcacctagatgtgttgctctagcttatatgctttgtttctcaactcttggatgttgtatgaactggttgaatttgtatttataggctcccaaaatccatatagccatttgaaacccactacaaaaactgctcaaaaataagtcacaccgaacctctatctgatgcaccagacctccctctagcactatcccgtagtgaccattgtgtaaagttgttagcttgttaatatgaactagactggtgtggtggcacatcgtacctgccatgtctactccacgtcatctaaccattggatcttctacttccaaccattgggtgtattgtgcatccagt

SEQ ID NO: 54132 - DNA, 1064 bp, Zea Mays
ctcagggtacttatctagtttggatttgactgctggatatcactagataaggatggggcaagaggatgagtatgaaacaacttttaaaactctcatgtgtcacatcagtttagagtgatgccttttggtttcatcaatgcaccatccactttccaatgtgctatgaactcagtgttggccccattcttaaggaagtttgctatggttttcattgatggcattattatttatagccccacttggtttgatcatttgtctcgaattaggacagtatttgagaacctctaggaacatagtttctttctaaacaaaagcaagtgtgtgtttggaaaaactgagctgacatatcttggacatagtatatctcagcaaggagtggcaactgatccagccaagacctcagctatggagaagtggcctacaccaacttctgttatagagttaaggggatttctagggttaactggttattatcgaagatttgtcaaacattatggaagtatagccagacccctcacttgtttgtcgcaacacaagtgttttcagtggtctgaacaggctggaactgctttctagaatctgaagcaagctatgatcactactcatgtgctagctcttccacagtttgatgagatttttgtagtagagacaaatgcctatgaagatggcattgggggcagtcttgatgcaaaagaataggcctattgcttatttgagcaaagttctaagtgttaagaaccatgggctatctatatatgataaggagtctctagcactcatgttggcagtggagaggtggcacccttatttacaaagggctaggtttctcattagaacagatcacaaggctttgtgtttcttggaaaatcaagtgttgcattctaatatgtagagaaaagctatgttcggacttatgggattgcactttaagattgtatacaagaaaggataagacaatttagctattgatgctctctcaagggtggaacattgcatggcattgcaggcggtttctgaagtgaaaccactatgaattcagtaggtgatcaactcctatgtgactg

SEQ ID NO: 54133 - DNA, 282 bp, Zea Mays
ctcattttcagttttacatgcaagcaaaaacaagtgagaaatacgtttgtatgcttcatgcatgactatagtctgaattttagaattgagtcctttcaagaacctagtcattacatcttccatgcattcatctaaaccagcaaacatggtacaaattttaaaatcatgataataatctttcacagtcctattaccctactttaaggtgtctaatttagaaagcaagtgaccagcatagtatgcaggaatgaatgcatctctaaaataaagtttgaattcttc

SEQ ID NO: 54134 - DNA, 347 bp, Zea Mays
ctagagcccagagttctaagtctgtgtcctaggttgagtcggttgttggtttagatttgttttgattcagtttgatcctttccatccactgccatcccacaaaatgaatctccaaaacagatactatatactaaagcatctcatctaaaaaatggatcgtatccacaaaaccgaacccattcacccttcatgtgcctcgccaacaaccctaattcgtttgctggtttagattagtttggttcagtcggacccattcaatctactgtcatcccacaaaatcaatccatacaaaagataccatctccaaaaccgatcctatctacaaaacaatttccattcaccattcg

SEQ ID NO: 54135 - DNA, 842 bp, Zea Mays
tagtgtaggtagccttgttaggatagttgttggcataatgtctgacctgcccccatttaaagcatctcgtgttggttgaagtgttaggagcgactggtcccactagaatgcttgcttggggtgtagtagcttgaacctgttgagactattgtctagaactgccacaagttggggtaccttgtgatgaagcataatagggacgagtactacttctagccttcccctggttagtagccttcctcttcatctcacctagctccgcatgcttgtgttctagagctatggccttgtccaaaagtctctgaaaagatggaaatgtgtgggacatcagctgatactagagtagcctagcaagtccttctaggaataacttctgctttttctcatcattagcgacttcagcgagtgtatatcaagacagttggatgaacttgtctctgtactcattcaaagtcatccctcccactttgagtgaaaggaactccttaatcttcatcagaccggtagaaatatgatagtttctgaatttggttgagaattcttcctaggtgatggtgtcggcggtagcatgtgctgcacagtacgcatccccctaatctacagcggggccggtgaggtgacccgatgcatgtagtacttttgactagtcagtgtattaggcaatgttgagcatcttttcaacggatttcagctgtcaatagcttgcactgaatacggggagctagaaaaagtgggaggtttgtggctcatgaatttatgatgtttgtctctgggtggcaatggtgggtgagtgttgttgattattgtagagctgggcttgcatgttagccatggcatgggac

SEQ ID NO: 54136 - DNA, 673 bp, Zea Mays
ttcaaacgatgattccgcagaaaatatccatccaaactcgttcaaatttttgcacagtatccatagtgagtagcactaataatcccaccaatcagatttgtgaatctattgctcaattctagatcagagagaaaatccgaataatccccaaatttgaagaaagttgataaaatccatgagattatgaaataccgggatgaagacatgtttgttgaactttccacaagcttttggactgtcagtgcgcaacttctcttctccgtccgcgcacaatcgacgaaagtgactttttagcgagtggagagcgtgagatgagaggcaatgagtagaaatgacaagttgactgcctctgcccgtcttatctgcctgtcgcggacggtccgcgccctgataacttcagacggtctgcgcttctgaccgaattgtccagatcctgttactgcagacggtccgcggcctaatactcaatttttcaaattctgtccactttctgatgttgaatttcaaatctgatttgatgctcatatatggacatttcgaccaatccaagggttaatatgcatgcatataaacattatgtatttgaggaatgcaaattttcatatcaaactacttagatcaatctaaaatgaaaaatccatcaaaaatacccaataaatagcgtagagagcat

SEQ ID NO: 54137 - DNA, 421 bp, Zea Mays
ctcaaagaaagaaatcattgtgctaaaactggatttcgaaaaagcatttgacactttagaacatggactgattctgcaggtcatgactcataaaggttttggttcaaagtggattaactgggttcggaacattctacactctggcacttcttcggtgttactcaatggagtccctaggaaatcctttcactgcaagcgaggagttagacaaggagatcctctttcgccactgttgtttgtcttggcggctgaccttcttcagagcattataaataaggccagacatatgaatctgcttaagcttcctctacctgatattcgtgaacaagattttcctattgtgcaatatgccgatgatactcttttgatattggaggcctgcccgaagcaattattctttcttaaggcaattctaaattcc

SEQ ID NO: 54138 - DNA, 297 bp, Zea Mays
ggtgagtacccagtgaccatcatagctcattagccagtgaccgccacggtagctcgcgtcagcgacttccccctctctccggccccccggcgtgtcttcttcgaattgggtgccaatgtcgttgatcgttataaaatagatgcccagtgagctccgctaggttgttacgcgcccagtgcaccagcccttccctccgattagccaccgtagcgccacaattcctttcttcccccaattcggttctccacgccgtcgtgagccaccgtgtcatggaccaccgtctccaggtcctctctc

SEQ ID NO: 54139 - DNA, 532 bp, Zea Mays
tacttcggctgattctgccttgcctcagcttcggcaatttccttcagcttttgaattgtgacttagcagggtcttgttgtataccccttatcttctccatagaataaacaaaacaatattcttggctgagagttgtatctcccccaaagcttcttcctccccttccacctcttggagctggcggtctgaaggaactctactgagtccttgttgattgagagtgatttttttgcccttgggtatggttgtttttgtcttcactttggcttgggttgtgaattgttctgacatgccttggattgaatcttccatcaaagccccttgtcatctcggagtatctaaaggattattctcgcctttgtcaaaaatcactgtcagccctgatgcattcatccattttttggaggagcttctctagagtctgaggaggtttcctagcagaatactatgccactaatcacaaatgtctccaaactggcatggaccctacagaatcgatcaggccctacccaggatgcatatatgcttgagg

SEQ ID NO: 54140 - DNA, 413 bp, Zea Mays
gtatgatcctagtcttgactaagatgctaccaagaagggcccctcccacttgagctgtagcttccccacaatttctaggttagctattcttcgaagtaccaaatgtactggcttaatgttctttaatctaacttttctatcttatcactttgttgtttcagcttggtatttattaatatgatctattgcctgaagcctgaccccttctatagagtcttttgacactttgcaagtatcttcatcctctgccgaagctagagtccttattgatcatgtctttgcttcttccggagttattgcttcatcgctgaacagaagtttaaaaggggtgaaacccatcgaacttcaaatgacagtattatgattccacaccaccttcactaattcatctggccactttccctttgacaggt

SEQ ID NO: 54141 - DNA, 883 bp, Zea Mays
ataattcaatacaatagatcaccttttaaaccacaaatgacgtttccctgaagtcaagggcattgtattagcacgagagggtattacaaccttaatctatgtttggaaatttctctcacgcaacttggctaaatttcccatggtctttattttattttgagaacgatgtggcataatgatgtatggtgttttacttgagtggacataaacaccatctaggtatgccttgaatagaggggattataggaaacctggtatcacaaaaagttattagctagcccaataaagtcttcatcctctagttgtactataataccctctcgtgcgaatacagtgccctcaatatcacaaaaacgtcatttgtggtttatattccaactttttagcaacgatatggtggaaaaaatgtgccttacaaccttaacctatgcttcgacatctcaatttagctaaattttccatggtcattgttttattttgagaaacgatgtggcatattgatgtgtgttgtttttcttgagtggacataaacaccgtctaggtatgcattgaatagaggagattataggaaatctggtatcacaaaaggtcattagctagcccaataacgtcttcatccactagttgtactctaataccctatcgtgcgaatacaatgcccttgacatcagggaaacatcatttttagtttaaaaggtgatctattgttttgaattcttgatattcctactttttagcaactatatggttgaaaaggtgccttacaaccttaacacttgtttggaaagttctctcacgaaatttggctaaatttcccattgtctttattttattttgagaaatgatgtggcatattgatgtgcggtgttttacttgagtggac

SEQ ID NO: 54142 - DNA, 561 bp, Zea Mays
catatgggtagtttgaagccgacacaaaatgattttgctggatccatgaattacattaccagacaaaagcgtacgagaaagaaggtttgcataacaactttggcaattacaatttctaatatcgaaaggatattattgccacagtccttgcttatagaagcaagtggccaaacaattggactatggagtggttttacttaaaagttgatttggaaaatggaaagacatcaaaggacttatcatgaggcccatcaaaaaaactttagcatcaagtagactctctgcaacatgagtggtgccacataaatggggatggtttccttcaacacagtgtgcaactacataggcacatgagatcttgtgcaagaacactttgcttatagagtgtttcttgtcaaggatggttagtctatgttgaggccaaagggtgacggagacacgaagcatgaggttgcggccgatagtttaatgaggttgttgtatgtgtttaaggattttggcttgttcaaaagccttgccccgaatgactagagactatcaaaactatttgcaaagtctagg

SEQ ID NO: 54143 - DNA, 682 bp, Zea Mays
gatattaccgcgggacgtaaaaagatcggagggggaaaggatcgggccggcctcaccgtacccacttgcccagcgacgtggtcgtgcaaccatcaccgtggttgccgccgctcacttcggttgcgccatgctattagttgcgtatcacctcaccgttggtcatgtgagatagtcgcataccctccccggctttaccctctttgagcgccacgtctggcaaactccagtgaatcaccacgacgtcgtcgtaacctccctctcatccaaaattcagagccaccgctctcggaggctataaattcagtgcatcattcgctctgctaggttgttacgaagctagagcaccagccctcgcctccgattagccaccgtagcgccccaattccgttcttcccccaaatcagtcaaaatcgccgccgttagcatcccatcgtggtcaaccacctccaggtccgttctcgccctcctggtttgtggcactgttgtgtgcatgtgatacttgtcggcttggacaaattggctatatcacgctagaacatcgagaacacgtcgggaaggtcgctagctccgcggtgtacgtggaccaaactctagaatggtgtttaggttaaattagtggctcccagtggatcgccgaggttagaattaggtgtagaccgagttaggacattgattgttgcgt

SEQ ID NO: 54144 - DNA, 1413 bp, Zea Mays
tggtgcaatttgtttgatagattagtataggttatgagtgtatgggtgatttagttgggtgtattttgaaaagtttaaactggtgtattgtatagtggtacatataaaaatattgtgactaatgtgtattgctgaaataaggaagtcagattactgaaaaggatgatcgagaaggttaaggatcaaatagttttaaatggtaatagagttattagacacttagagtattgatatgaccttattttttgtttgctttgaccataatataaagtgagacatgaaacatatagcttgatctaggccacattataggaggattgtatctgactgttggaaaccaactgacacgtggacaggtaggcccatacactcggaaaatggggaaatgggagagctcaggtgcacaatgagacaacaggaagggaactgtagcgtcttgttatgcgtgtcctatccatgtatagaatagaggtatttattggtaaccgagtgggtaggtgggccctcaagtaccgttataccccagttatctgctacattcccataatattcagtaaagtacaataagctaaacacactctagaatctacccaccgaaggggttacaggtgggctcgagccaccgtaggatggaacctgggtcccacggtaatctttcgaggcctttgctccctagtcggacccatgatttcgtcgaggcttggattctgttgtcgagggagaagttaagccttcgggacacatggtgggggttgctgcgagccccctcttcttgcgtggccctttggtctgcttcctctaaaggccgtggtcggagacttcgacgctagtacgggtcgaagtatgccttcgctgctgaccctgcgatgaaacatggttaattgtagccggaaaaatccgatcgaggtcatgtttgaccttcgccccaacactagccccatgagggatcagttcaacttggtgagctagtcccgaagtctgttttcgggagatggtcgaacactgccctcaatcacaggttgaagtgacatggggggttgttttgtaatgtgaccgttgggatgtgagttgtgaaattgagatatctgacattttactatgcgacttttggtttcttgaggcgcttttgtgggctataaaactagggccgggcatgggagaaacttttctctcgcttgcttaaacactcccacgccttgccgtcgacaccaccacataacttcccatgcgaccttgcactgccaaattgttcgccgccagtgatctggcctgggtgaagcaaaccgcccaccgccgcaaaacgatacataacgtcatcctcttcgtcatcatcgtccaccgcgactgcgtcgtcgagcgcgccatcattggaaaagatgattagcgatccgacgtcgtttgcgtagtttctat

SEQ ID NO: 54145 - DNA, 404 bp, Zea Mays
ttcaaattcatgaggagttaatggatgatgtataatagactggaatgttgttttaaaatccttaagagcaaaccttgcatatatctcatttaggaatggcataaatctgttctgtacatgccataaacacagtctgtgaactgtttttggaaatacagttcttagagcaattggcattgcaggatcttgatctgcaattgctcacaaattattaatttattttcacaataaattaattcactgttttgcataacaaattgacatatcacatacctgtaagcataactcttggaccctcgcatcccatacatgttttgaatgaattgaaagcccattcaaaaatctgtactgtttcatctcccaacaaaacaaattcaaacactgtacactgcagatggctgtta

SEQ ID NO: 54146 - DNA, 433 bp, Zea Mays
gcatttggatgacactttcaaggaagggaacaatacccaaagtgtcaccaccattagctccacctaatgccatccagggctttcgccaaacgttcctcctcataaagaagccacacaccaaacatcggacggtcctacaagcaccaagatgcatggttataaaccgatgtgtgcggccaacacaacaactccctcaaagctatgtgaacttgccaaccattcacactgcatgtagctcaccacatgagctccataaaccactgcatatgtaggccatgccataacaaagactctatgaccaagagccaggaagttaacttctctcatggatatagattataataataagttgatagatactataactctcctttttaaactatacaataaaaatgatgtagtatatggttttgtcaggttgaaaaaggttgtc

SEQ ID NO: 54147 - DNA, 730 bp, Zea Mays
catcaaccgaactaatgtagccgtgaccacaatcaaatgggaaagggaacatcactacaaagaggacatacctttcctagttgtggcttgctctcacacttcacaaactcctggctatagttgttatgcttcgaccttttacatctaagcgtcactaatgactccaacttggacacttaggatagcgggtgagtggcactgacatgcacgtacctaggccatccaacgctaaagttgaaagagctactcacacatgacattaccatggaggagtgccagtggatggaggagcatggaggggatgccagttgtgcgaaattccaaagcgggaaaccatgatgaccggagttgtagcctgtcatctcgaccagttccaaagtgagtatcaccatcgtggggaggagacatcagttgtggggagagggaaagccaacgagggtagtagaaccactgtcaccatcgctagaaactccagagcgacgagcgctagtgcgggaacgtgtgtggagggggtgtagctgtggtaaaggtcatcacggggagaagggaagccataaatgaagattggagccgtggtctactgtcgtgactagatccaaagcttctacctccatttgtggggagatgcagggaggggatggctattgcagaagcgtggaaatcgatgatttagagcgaggccatagctaaccattgagatcaatgttggagcgacataggcgacacgaga

SEQ ID NO: 54148 - DNA, 510 bp, Zea Mays
atgaccaagcgatgccatggcgagtgcggtggcgcgggcgtggagcagagaagcatgaaggcaaaggggcgcaaccgattgggatagaatgcgaaaaggtaactactgcacgtggggtgaatcctttttcaatgaaacctgaatccttgttcagggaaacccttctgtgtgcccctgaattgctgcaggaaatcctgtttgacgggcaccatggaccaaggcaacccagtctgtgacacgggggcccgggtccaaaggtcatacggtttgtgtgccgggttacaggtgcgaaaagagggaaccgccgccttggggccgctacagaacacaaaatgttatcttttaaaccaaggcatcgacaacgagacaccccgtgcgtggcccgacaaaaccaccaggcgtgggggccgtgagtcagtcagcagcagggacaaatatggcagttgatgtgactgaaggtggattgacagcgggcgcgtcagcagacgcactaaaacaacgcgccaatta

SEQ ID NO: 54149 - DNA, 328 bp, Zea Mays
ttagtaggtaagagatccaatgggcataggtggaaatgggacttgataccctctgttatggtgtcctccatctttgagatgatctgagggtggtcccactacaagtcatagctaagtggaaatcctgatgtagcaaagtttagaagctaccaaacaatctagggaagctcctatactctcaggaactacttctctagaagctaatgtacttgttggtcacttgcttttgattactgtgaatcaagaagaaggcaacacatttgttatacgttaaagaccttcgtccttcgaagcattattccccttcgggtataaaaaatctaggact

SEQ ID NO: 54150 - DNA, 687 bp, Zea Mays
attaaattgtgcactggttgggaggatttaattttgaaagtagaatagtggttggatttgaatttggaaattagaacactgtgagatcatcacctttatgccaaattctccaaatgtgatttttggctgaaggagattaaattcttgggtcacactatctctcaagaagggattgcagttgatcctgacgaagtgcaagaagtgatggattggaaacctcctaccattgttcgtcagatctggagttttctaggattagctagatattgtcaccgattcattccagacatctccaaaatttctaagcctatgaccgagttgttgaagaaaggagtcaagttcgagtggagctagaagtgcgaagacgccttttgtaccataaggcaacatctgataatggcacccgtgccagtacaatcctacaatgccaagtcttttgacgtatattgtgatgcttctggcactagacttggttatgtcctaatgtaagacaaccgagttattgcctacgcatcacgagcatgatgacctcatgagaagaattatccaacacatgatttggagatagaaatcgtagttcatggcttgaaaatctagaggcactacttgattctcattgtaacatctacactgatcacaagagtctcgagtacattttcacccatgatgatctcaacatgagataga

SEQ ID NO: 54151 - DNA, 623 bp, Zea Mays
tgggtgactcgaacggccagagttgctcgtcggagcaaggatttcgccgccaagccgtagatcatgtgggcggggcacttcgacgtcctaactccaggtaatatggcatttatatatattcgccttggtcttcgcatcgtgtagcgtgattttagttgagagtggaggcttatgaccgggctccagctatggcgtcgtcgcgggcgtgtgggcaccgccgtccggtggcatttggaggaggaaggaggaatgtgagtcattgatccatgatcaaacagacctcaatagatcggtagataccgtttcgacatattaaattgtcgtcgcgaatcggtgatccaagggttcgaattagatggtgacatggcggatctgtggtcactgatctgaaatctaaaagtggggagtgcaaaccgatttgttttacaatagatttaatccgggccgcggaggttagatcggatggctctggtggaaggataccccttcggccagagacttttgcatatgagacctcgggtttctaggaaataaaccggcattctcacgctattaaaagatccttaccattaactcctggcgtttacagattataccctgaaatctctgtaaatgtaacccac

SEQ ID NO: 54152 - DNA, 523 bp, Zea Mays
gtttgccttcttgatcgttggtcgcggtgaagatgaaggggtgcactaccgtgggacggtggcatgctccttgtgcgacagttcgccttcttcgcactcgaagaccagcgcgccagctgtttgacttgtgggtcgggcccccgtgtcataggatggataccccggtgtgcatcgggggagacttctcgtgatgtttcgaggcgggagcgggggagtctgcctttaaagaggggttcatcccttgagtagcagccatgccttgcttctctcccactcgcggtgccctttcgccttcgagctctctacgcccctttgccttcaaggtttctgctttgtgtcgccatagtttaccatggccttgtaagttcatctcgagcatgcccagactgagtgggtgctcaacatggtgtgccgcctacttggatgggatgctctggcgttcggcggaaggatttgcgccggtgccatcctccctggcgaacttgccgccagagagttcgtgctctttttgtcttcaacctcc

SEQ ID NO: 54153 - DNA, 483 bp, Zea Mays
ggggtatcgcgtacctaggcggccggggccttcttctccggcgtgcctgtgcggtgcataggggcggcgccgccggtcagagtttggtgacggggaacgggatcgcggtggccgttgatcaagggatgaacgacacggattagatctcgcataacctttcggctaggaaaggtctgggccgtagatcatcaatcggagggcccatgctaaatctgttatgtggatgatttcgggccattgatctttgatcctagggcagtgaacgcatatcggattataaccttccccgatctaatcgtggctcttgatgcgggatcgggcggccagaattgatctataccccttcgcgactgcagtttaacatatgagccccagcctttacgtaaatagaacccgccgtccatgggcgatgttcactgagtcttagaaaatttacgtgttagcccctcggcttctctgaatttgacgtgccgaccagttagc

SEQ ID NO: 54154 - DNA, 493 bp, Zea Mays
caagacgaaggcatcccccagcgcatacaggctcgcaacgccatccggcgaggacttggagcattcctggaacattgataatctgcgcaaattttttgtttgactcatcagggctagctcgcccttgtaattcgcaaaaacaatcttattctggcccgcactcttttcctcccggggggtgaggtttttaacgaggcggagtcatgtaatatacaagtgaaaaatcccccgcaaaaatccacgtcgaaaaaagaccgcgtcgacggtcttcgacattcgaccaatacaaagtcaccgcgaggggcagcgctagctaccctccgcgtgcgacaatccgtgcaaaagtcgcctaagggtgcagccggactaagcacaacaagtgcgaaaaatcgaagtcttcctcaaaaaagactatccgtgcaaaagtcgcctaagggtgcagccggactaagcacaacaagtgcgaaaaatcaaagtcttcctcaaaaagact

SEQ ID NO: 54155 - DNA, 1305 bp, Zea Mays
tctctctctctctctctctgacagttacacagaggtcccttgacctttgtttcttctccaaatagatccctggccacggtgcgctcgccgtcgatcaccgacgtggcatgtacaggccatggctggcgacggctacctagtctagctacaggggaagcataactgaccaagggtgacctaggaacactcgtcaatttggcttaaacactttgagaacggtctgcccacgtgcacggcggaaaccgtgacatcgagctcgcgttcccgctcaatcatggccgaattgaccaaacagttgccacgataagcttcatgagcataccgagctactaaaacaacactcgagacgtacagaaccttaccagagtggtctggccacggagcacagaggacctgggctcgtcggtgacagagaaatgggggaaatgatgtcgcggtggttctgggtgaaattagggttggagattggggctctacgaccgtaaggaactatagtttcaccatgcacattcaatttgggaggagggggcagaggcaatgcgaattttggattgcggtcaactcactgggtggaggtgtgcataccccgccgtggttcatagcgctatttatagccacagcggtccggctagcgttctccgaccatggataacttcgttagcgcatgcttaccacgtagggaagagacacagtgagggagatcgaggcatgggtgacaccgcggcgaaagttatttgagtcacggtggccgccggtgattaactccggccacgctcggctcagcacgcggaatggtgccacgtcccgagttactcccttgcgatcaaatccccaccgattcatccgagctcatgcaatccaacagtgctgcagatcttttcttggtgttcttcagatttttcagtgtattggatcttcagaacttgtctgaactgaccatcttccaccccccgatctctggatttttgttaagaatagagcaacttcccttaataaaatttgtttactaaacatcagtctacaaacttactataggattcttgggtcaaaactgaacgaattcaaagatatgtcatgctcaaattggtcccatatcactgtgaccatttttgtcttcaggttcagtttcagttacttgatacaagtctgacagagcaactttgggctacaatttctttgatttttatataacaactagagtgactgtctgcatcaatttattctcccataatagctctaccaaattgatgtggtgacatagaacaaaatcctcataatttgggagatatagggcttcaaagtggg

SEQ ID NO: 54156 - DNA, 278 bp, Zea Mays
gaagattgctgcgcacaatggagcgggagctgcacaccgccaaatgcaatgacaaagagaaggtttcgtattgtcctcgtctactaaggggagaagctcagtcttggtgggagtcctatcttgccagccatgccgaccctgaagctatgacttgggaggagttcagagaacttctgccaatatcattgtcggtaccctgaaactagggtaccccttactactgtgtaaagacatagtgcccacgcggctgtccattagtcgcatggtaaaggtgctgt

SEQ ID NO: 54157 - DNA, 274 bp, Zea Mays
ttcagaagtaatgaagcgatcaggtctggttgtggctgacgaaggtgcttctaatgccgaagctgaacagactgtggttgagggtgaagatgttgttgagagtgtagaagactacaacattctgatcccaacgaagcctagtcatctagattttgaaaaatctactgtgactgaagatgacatgcctatgatgatgaaattgggctattttggagaggctgagagtaagcttattcgatttgctggagaagagactatcccagagccaaagaag

SEQ ID NO: 54158 - DNA, 367 bp, Zea Mays
ttgtagaaaatgcttcatcttgatccttcaaacatgatatccgtgatgaagcatccctacttcgacagtcttgacaagtcctagttctagcccttctaccatgcgatttagattcccaatagagatattcattggttactctacgatctaccacagtggagaaaccagaaacactcataaaaatataacagagtatcatgcaatgagaccttcaaatatcccgaacaccagaaatagagcaatgtaacgaccttaatgattgacacgagtaaaaccaaagcagacacttactaatggatcctgacaaactcgataccttgtccttggcgcaagtgccctcgtcgccggcaacatgcccctcaatgac

SEQ ID NO: 54159 - DNA, 412 bp, Zea Mays
agttgtagtagtagtagcagtagggaagttatcaactcataatgagttgatttgtaagtatgaaaactcccttaatgaagaacagtttcgtcccttctgtgcagattttgagtccttaatcaactaaattgtcaatcatgatcaacgccgagtttttgagtccttcctccgcctgctttatttacgaagttgactcctttgggatagtaactaaataactcgggcatcacgccgacgttttgtgatggccgagctattatcgtcaccctttgcgcttttaagatagcgtccgagtgattacgaaactgtgtcagcgacggaatgactgaaggctgcgtcggcgttttagaggtaactgccgagcgaatgaagacatcatcggcgctttagagatagctgccgagtgactgaa

SEQ ID NO: 54160 - DNA, 292 bp, Zea Mays
ggcgtgaatcacggcgagggtcgccggcggtgaagatttctttgctgcggccgatcctatccgatcagttactgtaccatggcgacaactcatttagacagcctgtcagccaaacttggagcatcattttctcttaatttctaacgacaacactagtcaagctctacagcaaaagtgtagagcaatactccatctacaactttgtaacatgatgatgccacaaaaacccattggatcatgcttgaatttaagcttgaagttgatggcatcaatctgttagtctgattttcag

SEQ ID NO: 54161 - DNA, 966 bp, Zea Mays
tggatgctcctttgctcgcagaaatcaaagaactcagagctggtgaagttggatcctaggtcagtgatgttgttgttcggtatcctgaacctgaatattatatcctggataaactccactgcttttgctgaggtcaaataggcaattggcttgtactctatccattttgtgaatttgtcaatggataccagtatatgagtatagcctatctgagccttcttgaaaggtccgatatgtccagcccccagcatgcaaatgaccaggttacatgaatggtttgcagctgctgcgcgggcaagtgttgttgctttgacaggaattggcacgcttcacacttttggactaacttggcagcatcactcttcacagttggccagtagaaaccagatcttaaagccttcctgaccagagtccttgatgcagcttgcaacccacactgcccggcatggatttcatctaacaattgtctcccagtggccgagtgaatgcatttcatgaagactcctcctgcacctctcctgtacagtaagccccctatgatgatgtagtgggctgactgccttgcgatgcattctgccacagccttgtcatccgactcttcttcatttttatgtacctgatgataggctctctccagtcgttgggatctgcctctggctgactcaaagcgttgcactcctccacctgatccatgaggatgctcggttgtgatatttcttggacgaagatcccaggcgaagcctaggcccgactagatcctagctttgacaacgcatcagctactgcattgcgatctctttccacgtgatggaacttcaatccctcaaatttgccttccagttttcgcacagctgtgcagtactttccaattgaatcggtcgagcagtcataatccttatttatctagcttatgaccaccaacgagtcaccatataccatgagcttcttgatgccgagtgatactgc

SEQ ID NO: 54162 - DNA, 712 bp, Zea Mays
gtaaaaatcaagaagaccacgaaaaagggagaaactggcaaggccagtccccggatgagaaaagacacaaaaataaccacctcgtaggtatcctctgtcgggacagtaactctttgctagatccgccaggaacatacttccttagcgcgacaggacaccgatttcaacaagatgcaaaaggtcatctttagaaacgacaaaaacgtggttaccagcaaaagggagttggctattaggatcaatcggagggatgaccggcgtagctgcactctaatttctcttcccggggccatcacgatttttcaaacatcgtggttcaagaacaaaacacgaaaagacgtgggaactcagaaagctagaaagcggcggaggaaaaacaggaactagggttcaggggccaagaggacgtcgacaaaagtacaggttggcacactgagtcgggcatagaaggacaagctggtggctcgggagagttttggtcgcagcagagtaacgagacttggtcagtacctctagaaagctaaggctcgacaggaaggttacttgggatcagaccgttagacaaaagaacagaatacacataagtgaagtggcatgaaacaagcttcattcatccttccataagtcgggatcattacaaaaggaagactgactcattatgagtcgtccaattgcccctctatccaacactacattacattacatattaaac

SEQ ID NO: 54163 - DNA, 368 bp, Zea Mays
gtgattcttggggaagcgggttgagctgaggccgggcgaacgctctggcccataccatgatactggcaggggttccgcctgggcttcccgcttgggggaaatagtcccccgtcgtgttggctgcaagacaccctagccagggttgcaacttgcctcgttgggcggggaagtgagtctgtcctccggggctcttgtcatctctccttccttgttgatgatgaaatttagactcctaaaacgaatggccgtctcggggattcagactacgccgctatcatcgctaggcgctagccattcggagcttggagaacttcatcacggaacgcacaaatcccctgtcgggcgtgccaacagtaacaccctgaatt

SEQ ID NO: 54164 - DNA, 455 bp, Zea Mays
ccttgggtgaagctctagaccactgcaaacaccaggtttgagcagtttgtggtcgtgatctgagatccatctgttttgagttcgtttgagaaaaccccagcaaaactccaatcaaatggagatttcgaatctgtatgtgttgttttgatctattcttgatcaaacttctcaaatcatcttttctccctctagttaactccctataaaattgagtggattctgtgcaggttttgtggtgaggcactacctctgacatgtgtggcactgtcgaccatcagagcagcactgtcgctcacccttcgttatagttttgtttctagttttgtatagacacttgagttgattcttctctagcttttttggtgcagtcaatcgatagatcgacattggattgatctgtatagtgctatgtcgcttttggagtcctgtggggttggattatagttaggaacaag

SEQ ID NO: 54165 - DNA, 1230 bp, Zea Mays
cgtagcaaccgaaattgactacacacagagaggttttatagccagatagatagattagctgcttactgcatttatcccaaaaagaatgcaactatagcatgggtgcttcactgttcttctgtgcggctgtgcctagggtccagtttaatactttaaaattttgaccaaatttatagaaaattatgcaacgatgaatctattgatgcttactatttggtggtataattatttgtcgtttttataggaatttgacaaagatgagatagtttaacttaggtctatgccagagttgcacttgggcagcaaaggtagtgtcagtatttcacaacatgggtgcttcactgttcttctttgcggctgtgcctagggtccagtttaatactttaatgtcatgtagaggtattgctgatttaagtcttaggataaccacagttggtgaaggaatcaaaccaagaccagtgtggccattgaaagagacctcccaaccaaagtgaggtttggtcttgtacattccaacgccaatgacaagtacgaatacagaattctccttactgagctggacaaaatgtcacgtagaggtttgttctttattgtgctcttgggcaatgggggcagtagtggaacgcctgacaatcatagctcgattctcttttggcatactgttcgggtggatcatacaatatgttcaaggaagaaacagacatgctggtttcattgactaatgggtgatgctagcaggtgaccatttatgatcagtgccaagcctgccttgctggatttactattgttttctgcctgcttggagggggggaggggatcttttatgcttgatatcatttaactgttacttcagtcataagatccggagtcatttcttctatgtacgcacctgcctactgatggcctctacctaaaatcattcaatatcaagatccacaatcattgtcggtctgtacaggctccagttaacagatatttgaacacactgttaatctacttgggtgctatttcctaacctgattaacagatggctattatagagtagatatctgaaaatgaattggtctacagtcgctttgcccactagcgcttttgtgttctttaatggatcttgtagtcttttttttttacaaacaatggtccttggtgccatatttcgtactgtctctgcctttgattgaccatgagagcatattgtagagtggacatagtaccctgacgttgataaat

SEQ ID NO: 54166 - DNA, 641 bp, Zea Mays
gatttaatataagacgaatttaaatctcttatattttagcaccgagtccgagtaaaccaaaacccaaattaccggcaattttcactcggtgcatgcccctcgtcagcacgatggaattctggccaacttgacaggtggaattttgtcaaatgagcgtcacacgccgttttttcaggtagtggcgtaatgccagtgctctcgatcgagccctaccgaacagcaggcagcaggtgtacaggctacaagataacaagatttcattattttcacgggaccagtagcttcagcaagcgtggagtggaatggattaatcatctggttcgcttgcttgctcggtgatcgatttgaattattttgctaggcgacggaaatcaaagggtggtctcagtctgtctcaatattaagtaattgttcaccaaatttttggcttgcaattaaatagctcgtttgaagaaggacaatctagcaagtttttgagagaggcttgatgtatactcggtgatgtgatcatcgattgactctatccaattcaagcatgtgtgtgcgcaaataaagccaacctttctgttctgcatgttagaatgacgtgaataatcatacaatcaaaataactcagtagttaaattagaatgaaaaaaatc

SEQ ID NO: 54167 - DNA, 658 bp, Zea Mays
cctatgttccttgtatttcaaaattgagtccttgattccggccggcggtgcggacaaacctccctgccacgccacaccggtggagagcccgagcacacattagatacttgccagacctaattctaacctaaaccgagcagccatgggcatggatgtagcttataaaccccaagaacgacctaaccgcgcctacgacgggtcccgtttccacgacgtctgcccagacgatacaagcaccggaggattcgaattaagggcacgtggagcactagcaggatacaaacaacgcgatgcttacatgaattggcatctgaccgactgagttttggtgggttgacaccggagcagttcaagtgacgtcgagcccgtgttgcaactaaactatgaccgcaaagactaaatgtatacctcggtgagcttcaccagtctataaggacactagaacatggatgcatatatgtcgaaccataacgtagtcgcctggccacgtgaggctgaagcgtcggcgacgtggtcactagacacgttgagtcactttaccaaggaagttgggcgcatctagggtaaagtttggggaaaggaaggcaacagaactacgttgaagctacacaccatggttgacaacagaggtatggatctctcctttgctcttgcttct

SEQ ID NO: 54168 - DNA, 541 bp, Zea Mays
ctccgtggtagatgtacaaggcaacactagactgtattcgagaaggccatgaaaccaatgaagtccccaaaaactgacaagtcccagaagtatacttgcgctccaaaaggcaacccgcaaaaccagcatcaaagtaaccacacaaagatagaacggacgatgaggaatacgacaaaccaaactcaggagggaaacataggtacctcataatccacttcacagccttttgtgagatgtgcgtggggaagcctagaaatgagcgcacaaacacactgcgaaatgtatgttcgatctcgtcgcagtcaggtacatgagagagccaatcaggctcatgtactccttctagtccatgggttcgccgtcctcatcagtgtcaagcgtcgatgtggtggacataggcgtcaaaataggcttgccctcacccatgtcaaacttcttcaggacgtccattgtatatttgccttgatgcacaaaggtctcgtcttgggtctgcttgatttgcagcccaagaaagaagttcagctcacccatcatgctcatc

SEQ ID NO: 54169 - DNA, 867 bp, Zea Mays
tgccatccggagcttggataatctcatcgcgcaacatgcaagtcccctacctggcatgccaactattggtgttttgtacctcgctccgacaagtaaatttattgtgcgcgtttcgggcttcggaggatgtgtgcggaaggcgcaacatttatattggttcgggcagaatgtccctactttcattcatcagtggcttgcactatcggcaccattgatgaccaaactcatagtagaagttacaagcagtcgagagagggaggagaggctcccagatctcttatcggggtgtaagtggagcttagaagctacaaggtagaatcctagctaagtcatggcttggcgaggcttcagcctcctagtcctcgtcgacgctcgtccctgttcgtccttgtgggctcgtctccatttaaaggtcggggaggggttggccagtggtggcttctctaggaaggagctgtaaggcagaggttggctagtggtggcttttaagtgaggccacgcgtacttgtggggcctaggctatctcgttgtcgtgtatttatcatggtggatgcgtgggggtggtgatggtctaggcgccaccattcgggacaatgtcaacccctggcatccgtagcctaggggtcggtgtggcccatcgtgtagtgctccacaggaggtcagtgcactcaggcgtagtctaataggccataagtgcactgcaggccgaggggcatggggtcattaattccctgcagtctgggagctcataggtcatgagcgctatgcggcttgaggggtccgtaggtcatgagtgggaagtggacctgcacacacattatggctcgggtgccaagcgtggttaatgcgactagtcatttatggcgg

SEQ ID NO: 54170 - DNA, 397 bp, Zea Mays
gccatcacggactcacacacatgatggtgcgaggacttcccgtggtcgggaagatactcccaacccgccaccagtaccaccaactttggccgaggctatcgctgccttggtcaatgccaccgcagataatacacgcttcttgcgtgagatggcgggcaatcagttccaacaacatggaggcagagctcctccgcaaggacctcatgaaactacataccaggaattctctgagacccgacccccgctctttattaaagctgaagaacctttagaagcggatgagtgggtaagaatcatggaacaaaagtttggattgattcactgcacagagaaacagaagtcattatttgctgcccaacaactaagaaggcctaccagtacttggtgggcaaatttt

SEQ ID NO: 54171 - DNA, 403 bp, Zea Mays
cacaaacaaaggagagcgtggccaaggggaggagctcgagcaccagtagccacagcgagcgtagcagcatgcgagcgtcagcgcagggacaagtgacgatggagcagggcctgtgcggtgccgaagcgaagcaaagaacgtgtgtgaggggagataaatgccacacccggaagatgcttccagggattgctcatctcagaataaagaaaggagcagcaacgtggatggaccagagaaaatgtacgtggaatagatgaagatgacatgcatagggaagagatgagcttcctgcgttggcttgatatggatcagggagaaggatacgtggctgagataagaacgatggaaaacaccagaaatgggacaacatacgtactcaggaaaaataacggcagagatagaa

SEQ ID NO: 54172 - DNA, 511 bp, Zea Mays
ttggcaaccaatgtatctaccatcgtgtgctatatcgataaattatgataattcgttcaatttttttgcatcaaactactattatgcctttttaaaaaagtgtacaatatcaaactactatgcatttgctggtacataggcaaaaagtcaggagatgtttgagcattttcttttgtcatcttcttagaggttggatcaatccaagttgagataaacatcggcatttagggccaaaagtgtaggcaaccttgatgcaccaaatggactttcatttattcatggagaaataaataactgctatcattctcccttgatatgcataagttatgacttgcatccatggcatccctatctttttgcttgattttgacctattgtaatcttaaataaataactcctagggagtctggttacagttgtacaactaattaggtttagttactatttttgtgcaacatgtgtgacatctgtttaccgacaattggacaaaaaggacatatcacaatcgaat

SEQ ID NO: 54173 - DNA, 499 bp, Zea Mays
atcataccaaggtaataagcccaccaacggattcgccttgacctcctctacacgtagcgctagggaatcgagaatttaacgtctgggcgtgtagttggggagctccggtcatggcgctccaccgcggtgagcgcgccgtcgggatttgggggtgctcgaggaaggaggcacttgtgccgttggatcggtttccagcggatgagtttagatcgtgaccgattcgttctgagccgtcgatctccgatgtgagggcttggattaaatctggtttgtgctggccttcaaccgttgatcatacgatgattggcccagatcaaatcctggcgcatcccttcaatcattaaatcggatccgtcgatctcggatctggtggccaccaatgcataccggttcataaaacgattgggtctaatctaggccgccagatggtgatcggtcggctattgtgtggcgataccccttcgctgtgacgcttagctcaagagtctctgtctttttc

SEQ ID NO: 54174 - DNA, 899 bp, Zea Mays
gcaaaatctctttgtgtgatcttctcccatcacttccctctgatgaaaggtgcagaatccaaagggttccatgtcagggactctaagttatctttggtccaaatcgggtttgtcaaagaaggtcgaaccgaggcaaactcatgttttgttttatcgaggcgtggagtcccaatgccatcttttgacagggattaggctagttaatttgacacaacattgtcaattggagtgattggatttgaggttgatttcgtgatgaacacggggaagctctaactcgggtctgaaatttcagaaaaatagtgtgttgaacttgttctttgtttctccccttttgtggtttgtttagggaaacttcaaccattatttttggtgatgatttatagtctatcttgcaggaaacaatttggtgtgttgccttatcaagtcactggtccatgtcatgatagtagggctcatttagttttcctcatttgattttcttttgctcaaggtatgacattttagggtttttggttcaccttaccttgctgatgatcataggaagatttttggtgacaactcatgaaaacttagcatttacttaaggtcctagttcctgagtatggcttcacttattgttgtctcaccctacttgtgagggtaaagctagtgaaggtgccaagcagaaaccctagtaacacctggggtgttacagtcttcgacaagatgctgaaggagtcgtgcccttaccacaagggcccagacaaacactccctcggctagtgcgacatgctacgtcgcttctacaacaagcccggtccatcggcaggaggggaaaataagaaggctcctgatagcggagaagacgatagagcaatggcttccccgatgtgcataattgttacatgatcttcggg

SEQ ID NO: 54175 - DNA, 380 bp, Zea Mays
tgcattcaaatatcattttagtttacctctacttctttgttattgttgtggtaatctaggaacactttaactcaaggcttatgattgtgttagtctgttgccattcatatcttgtctatcttggaagtatagtttggttctcttacttctcattgtcgtccctagcaactttacctagctactgaccttagggttcttcctcatacacctagctttcctatctttggattgcatttaccctcatctaattactaatgtgtacatttatcaagtttacaatttaatttcaagtttgagttggttagtttaactgtagtcttccgcttccgtgtggggaacatgatacctagaatactcacagtgaagggctacatcagtct

SEQ ID NO: 54176 - DNA, 510 bp, Zea Mays
tgatgttgttcataatcatgtgccttcatattgaggaagcatgtaacccgatacgaaagcatagatgatgggtaagagtgtttgtgcttatgctcaaatgttagatatgcatttttcaaatatcgacagccatatggacacatatgttaatggctgccaaaaaaactttaaagtccacatgttaactataattttagacagtcgtggtaggacatttatcattttagatagctgcaaacgtaacttaactttcaactacctatgtacaagacccatcacatgtctatattatcattttattcagatcgttcatgatttatagttaacatgttgcagtggctcaacattccatttggtccaattatggaaggtccatttgattcatgtgtgctcctggattatcatttgcacctaacagtaatatgtgtctgtactacaatgatcatcttctattgccagtctagcgcatgttatgcttcttgatgttatgacttcacatcaatatgtcca

SEQ ID NO: 54177 - DNA, 285 bp, Zea Mays
cgaagacgggcctcacgcggcgagattagcggggggagcaacgcgggaggagggcggagccgcgtggtggtggacgccctccttaccttcttaagggatagtagagattgactgccagcgcaacggagatcgtcgtcgtcgtgtttctctcctgttctgcggggccccggcacgcgcgcggatcggagctagctgcacggacgtgttaagctggaaccgccggggcaaccggccgatagcagcgtcgtccaagtgtccaactaccttgttcagttcgacgatctc

SEQ ID NO: 54178 - DNA, 709 bp, Zea Mays
caacaacttggagaggatattacaccagtgcccaaaaccaatgttgcaaaacctctagaaggaaggatcaggaaacagtatcgaaggctttactaatatcaagctaaggcaacactcttgggcccttttgagcatgtaaggctttagcagtttgctacaccaaaattaaattatcatgtatgcatctgcccttcacaaatgtactttggttggtggatacaaatacatgcaagcagagggctagcctattagcgagcaactttgtgacaatcttcatgaaactatgagcttataggacagaaatatttcacctccaaggcaacatccttctttggaaggagggtaacataaacaaagttttgggtccatcgttctaaaggcaagcttctcatataggtccatcgtgtgctgcctaccgctaattgtcatgctcggtggtgtcactagtttctcctgttgctggatcctcgccatcagagacgtgggggagagaaacagaaatgtgatcgtcaagagagatgtaatataacatattactctagacaggatgctaaagcgttgaaggattcaaatcaacaatgagcacatcgtcacacataaaaatggattagaacaactctcagagtggcggttggcaaacctggcttccatattccacattgcaacgaaccgtcgtggtcgcaactaggcagttcgagcttgttcagag

SEQ ID NO: 54179 - DNA, 413 bp, Zea Mays
ttggggtacacccattggggtcggcgtcagtaagtccagtcacaggcacttctttagtggcaggaactgaggtaccagcgtcctcatcaaaactggatactcgccggaggcgtcttcttttcttcttttgctcatcagcagaaggctcaggctgattggttcggctaaggcgtctcgggcgagtactgacaggtttctggacatccaaagttgcatcaacctctggaaggggcaccaccgccaacgtaccagcaggagcagcgtcggaagaatcctcagctagcagatcaagcatgtcatttatgtccgcatcactagggttcaggggcacctcaaaatggacctgccgttcgtcatcaggaatctccccaagcgaagcaaccaaagtactgacttcttcagcagagggtcgc

SEQ ID NO: 54180 - DNA, 377 bp, Zea Mays
gacggtggtggctcctcacaaggcactgtccgtgccatatttttgtagaacacctattaggaaggagaaactggtacacaaagagccaaggatcacgtacaggcaccatctaaaacaagcgtacataggtcggacaccatgatctacaacaaagtatcggaccctcgattctatgaaagacaatgttcattttcacaatatgtgaattattcagttggtgaagtggcctgcatgcggtggatgtgctaatgagtgacctgcacgaggtggatgtgccaatgagaggagtacaaccaaatgtttgacttgttaaaagtacaaggcggatttggaatatagactttgtctatgtaaaaggtgtagttgacgcataagca

SEQ ID NO: 54181 - DNA, 475 bp, Zea Mays
aatctgctcctttggggccattcgatacggggccttatgaataggctgcgtacccgggatcagcttaatctcaaaagctgcatcgcgctccggaggaatgcctggaagctctgccggaaacacgtcagcaaagtcacacaccacccggatgtcctgcacccgcaaggcagcctcaccctccaccaccatggagaaaaagatcctcgacttccttgaccagcgatcaggaagcaattgcgccaacaaggataacgtgagcttcggggaacttcccaagaataccacctccttacccgacggcgcctgcaataacactgtcttccagaaacaggatatataaccgcgcgatactgggataaccaatccatacccaagataacatcgaatgcccccaaggaaatcaccatcagattggccgaaaagatctcatcagcaagaacgacagaacacccctgacaaactgaacaactactaa

SEQ ID NO: 54182 - DNA, 629 bp, Zea Mays
cagaaggggatgtaggtaaaccactagggatctccaggttcaaggatcccgtccctcccccggtcccaccccacccaacccaacaaaaatattgcggtaggaagatagcttaggagagctttttgaggctggtcaagtgggaagtgggatagtgtgtctggccgaaaacaagaagcaacaggcaggtgaatggtgccttgaactagaggtagccacctggttgttgtccatgtgtgagcctgctttctcgaatgttgccttgaccctcgaactagagacaaccaggttgtatccatgtgtgcacaagaacacaatctgaatgagcatttgttgttatgtctaacaaagtttaaatttcaccccaacacatatgaacgagtgaatgcaaatgtgagctttgagagatttcaaggagcccttaattttggtcacagaagctctgttcgacaccccttcatccttcctcaatttgagttttcaggcttcgaccagacaacaccgagccaagtaaaaagaatttgattgccaggataagatagctcccgccccccgaacatttaagaagaagaagatcttctcatatcgagaaaaccatcaaaccctccacgagaaatcaaacttaagacaac

SEQ ID NO: 54183 - DNA, 557 bp, Zea Mays
ccacacctctcttcacaaacattaatatgatatgcagtatgctatccagagttttgtctaaaaatgtatctacctgacctcaaaattaatgacttccatttatatgaaactgtagttcctgttagatcacaacatttatatgaaactatagacttatccaaattttttgatggttaaaactatgtcctatataccagtttaatctgttcaacgtgttgcagttcttgtcagatcatgaagattaacctgttcaaggtgatccaatccccgtagccctatcctttgtcttattagtccatacttctatacactttgttgttttagtttgttgtctttatcctgaacttttgtgtctgtggtaaatctctactactctataaggacctaacgtagaccgcggtgcacggttctgcctcctcacggcgcataaggcccacatgttagtgtctcccttcttccccgtgcgcgccctctcctctctacccctgcatccacatggtcctcaatcccctcactagtcaatgtctcagctatggaaggaaaaatcacgtcactgc

SEQ ID NO: 54184 - DNA, 376 bp, Zea Mays
gtaggtctaactcctatggtgggcataaacttcaaattttctgtgttgtatatgtacttcgaccgtccatagtcatgactataaattttccagcagttgctttaggtccctattggtttttgttatggccactatggacagtgtggtcccaagtggcagactatctgcagtactcctctggagtatatatagggatctatgtgattgtgtcgctttgtgctacgtgggctgcctaacacctgagtgtggaccgtccacaatactaattatttaaccaaagctaggtctatagagctactatgtgcctcaccttatgcattgtggaccttccaggccttgtgaggtagaatgtctgctattcactttctgatagctc

SEQ ID NO: 54185 - DNA, 706 bp, Zea Mays
ggagaagagagctaaaccttgcgtaggcccaaaccctctctcgccccagtaccactccaccccgcaccgacccaacaatcacagcgttcctctctttctctcactattaagctaggcctgcaatacagttgccaacaccagcgcgcgtgccctaggctttctctactccgtgagcccgcgttgtcagctgtttcctcatcctctctccgagccagccgcaaccgaagtcgaggttggcgccgacccgcgcggattgctgccaaagcaaatcccgcctcgcctggggtgttgggttataaaagcttgcacaatcccgccactccctggacccagccacactctaagcgaagtcacgcgccatagccaagctaagcgaaactaaggaaacaaagttcctccgccgtggtggaatcacgagttcaccaccattcggggcctaggatttggtttgggagcttcggcccactccaccccatgtgtattatgcagaattgagcactgaggtgtgacacccagtgtcacctagggtttctctcaagtgctaacccaagaaccataatcttatgtgaatcaaaattgagcatgaacatcaagttgatttaaggataaataacccactaagcttatacttaaaagtatcatgatcaaaacaaatgggtttttcaaaaaggcaaaatgtgcaaccccaacaaaaaccctaattgag

SEQ ID NO: 54186 - DNA, 513 bp, Zea Mays
tatccgagcaaaaagtcgtttaagggtgcagccggattagcacaagtgcgcaaaaacacctaagggtgtgaaatcgtccacgaatccatccgagcaacaagtcgcctaaaggtgcaactgaatatgcacaacgacacatgaagcaaacaatcacgcacagaaataagaaaaaagcctcagtacatttaagaaccgaagacatgcatagtcgtccctcggcgaaggcgggcgagggcagcgtttcactcaaatcaccgagtgacgactatacaaatcttccaaatattacaaaggctcaacctttgggattagaccagccttccggaagttaaacaacgtaagcctaagttcttcgccatcgaaaagcgccctaaggtttttgttcttcgaaaccccgttcggttgttggcgcaagaacaatccggtgaggctcctcttccgaccacgccctctcccgttcttgagtacacagtggtgacatacgaaacacctcacgaagcgagacccgcgggc

SEQ ID NO: 54187 - DNA, 539 bp, Zea Mays
taggggtggtggcgctggtgctgagacttgcccctcttgtgggctggacctccagtgttgcccctccttgcgtcttggccacgaggctgatcaacacccgaagacttctgtgactccatggtgtactagtgttgcatctccacacccaatgcctgctccattgtagtacggaaatccaccaacggaaaggatccagggcatgcctcatagaaggtttcaggccctaacagaactagctagctcgccttctccatctcattgtaagccacatgaggaacaaagtggaccatcttgttaaagcccacttcatactctgtgcagacttcttctcttgcttgtaggattgcaaatcaatcttcattttctccatgaggtgaccagctagaatctcctctcaaactgcctgatgaaaacatcctaggacatgactcctggtgaagaagagtgagctgcctgcacgcctctccaccaaatttgagcctctcccttcagcagctgtgtgccaaagcgaacacgatcaccatacacaatctcaaaga

SEQ ID NO: 54188 - DNA, 1399 bp, Zea Mays
cagtcgagtggcggatagcacccatcgaaatctaagatgaggagaggggcttgaggttagcctgttgagacgggtggacgcacaagaacacaaagatttagagtggttcgggacgccgaagcgtaataccctacttcacttggtgttgtgttgcgtgaacaagtgtgtctagtctgtgagttggaactgactcccctagtatcgagtgtgtcgtcccttttatagtccaaggggcacgtacaagggtgttgagccccgatagatgggcccaagaatatagtgagatcagagtaagagcagagctgaaatcttctctatcacatcttgtcctctgcccggtcttgatggcgtgtggacaaaggctacgtcgtagaatgcggcttaggcgaacagacagtgttgtcgtgtctcctttgcttgttcccttcatctcggtaacgcacgtggagcagtagtagtcgtaatgaggggcgcccatgtggcgcattgggtcaatggtcttgcctcggtaacacgcgggttacagtgcaacctgtgctttatggactggacatgccgcctgccaccggagtggaaaaatgcacgtcttaatgtagagatgccccatgcttgaggcttgcgtcaggctccacccgttagcttacgtcacgtaccatatgacacgtggcaccaccgggaatctgcctgagcggggagcaagggttagaagcgtgtgtgggcatgacatctctggaccacgcctagccggggctccggaaggtgcttggggagcagtccgagcccctatggtactagcttggacacgtggcagaaccggacctctttaggccggaggttcgcatgcctcacactggccttcgggtcctcccctagacgggggtatggaaggtactcggggagctcggacccctccgatactagcatgcacatgtggtagcaccggacctctttaagttagaggtctcggtggcacgcgcaggtgtccgagaccatccctcgggggcccggcccccgggcatagctatagagagtactcattcttggggcacgtggcaagtttggtgcccttcggttggggatctagaaaggcattcgtggatgctggccccacctaaggccagcaacctcgatggatgggcctagcctataggccaggacagaccgccagcgactatgtgactaaggatagccctaggggtcccgtcttgacccatcagtagtgggtaccccaatcttgaggtacctacagaggcccagggcccacctcgggtgaggtagcaaacccacaggtggggccacaattgtgctttgttcctgccatgccgtcgacgggtggtgtcccgcggcttcgcatccgttgctgccacaccttgtggtgccttgccaccgctgcaaagac

SEQ ID NO: 54189 - DNA, 617 bp, Zea Mays
cgcgtggagatgactcaggtggcgccatatacgaaggaaccatccaagtatacccttggaacatttggctcggctgcggaccgtccgaccccttaagtcagactgtctgggtacatgtacacagaactaggggctacacaatatgcacagtttccacacccatcgcagcagcactacactaccccaccaacaacatattataaccatgccatgtcaccttatgtgcctagggatgaatatccttcgaccaccaaagagcccgagagatatagggcaggagggggtggcattaataggacacctaacacacattttgaacatccctgggaggaaagctgacaaaataatgtccgacaacctaaagttttcaccccaaacataatggatggtcatcagacgtggtggaaaaagttagggatgaggtagccgggttgatcagagacaagctcgatgttagtgtgtcaggcacatggcagtcatattggaaaccttataatcatcgatttgacgctgtgccatatccgcaagggaccaggataccgaatttctctaaattttccggtgaagtcaggaaaagcacgcatgagcacataagtcagttcttagcacacttagga

SEQ ID NO: 54190 - DNA, 281 bp, Zea Mays
acacaactcatcagctacaaataggtttttagaaacccagacctcttaaggtatgccgatgaactcgtaggctggacaaccacaacctcctccaatgatttgggatacacccacaaccctgcgtacgaccggcccgtccaggccttagctcgaatcgtccggtctagcgacggttggccccgtcctttgcgatgaacctccgagagtcgcgccagggccgtcgtacttcatgcaagggttaacaaacactctcgaaccgttcgactatacgtgtgaatcca

SEQ ID NO: 54191 - DNA, 327 bp, Zea Mays
caagttcacatcaagaagacacgaggacaatctgttgtggggaaaagacatggggacaagcagctgagaggaagaaggcatgtggacaagatgttgaggcacaaggcatggacacaagctgatgtgacgaagaagcatcgagaggacaaaaacgcagaggcgacagtgcaggaacgaagagagctacgacgaagaggagtactcggcggagactaccgacgagcgaccacagagtatagcgagggaggaagcgacaaatggagtactgcaatccgttttgagtaacgactagtgagcacaggggcattgtcgttgttacagaggtgc

SEQ ID NO: 54192 - DNA, 389 bp, Zea Mays
tgggactataattttgatacagagagttgaaccggttgatgtatgaaatctggaagaaaccgagcttcaagttgctctgtcagacccactgaataggcgcaacgatggtacactaactggatagagccgccaggtcagagatctcgccgccgacgatccctccgccgcgattcgtgccatcaccgtctcgattcgtgctctgggtaagtggataacgctcggagtacgtcgccgtggataagctacggctagtaaaatattccagccaccgtacagagctcgccgcggtggattctgataagcacgccggtgaccgccacctctcggccttgtgccgcgtgtctatacctttccactgcaacgccgtgacctgctctcgctctccgttg

SEQ ID NO: 54193 - DNA, 880 bp, Zea Mays
agtggatccaataaaaaagaaaagaaagaggtgttgggtcgacttgatatcttagacaagaaagcggaaacaggtcttctctccactcaagaggtagacatgagaaactttctccgtaacagattagctgcgatgttgagagaagaagaagttaaatggtaccaaagagcgaaaacaaaaggtttattggaaggggatgcaaatacgaaatactttcatttggtggctaatggtaaacacaggaagacgagaatctataaattgctggatggggacgaagtaataagtggggatgttgagcttaagaaacacatcacttcttattacaaaaacctgttcgggccggctgaggattccaattttcatcttaatgatgagcgaatagatgatattcctcagatatcggatgaggagaatgatagtcttactgctgattttaccatggaagaggttaagggtgcaatttttcagatggagcacaacaaagctccagggccggatggttttccggcagaattttatcaaattttctgggaaaccatcaaggatgatttgatggctctgttcgaagactttagtaagggctgtcttccgttgcacagcttgaattttggaacaataattttgcttccgaaattaagtgaggcaattaggatagaacagtatagacctatatgtcttctgaacgtgagtttcaaaatattcacaaaggctgccttgaatagattgacaaaagttgcacataaagttattagtttaacccaaactgcttttttacccgggcgcaacatcatggaaggcgtcgtggtccttcatgagactcttcatgagatgcaccggaaaaagcagagcggggtggtgtttaaggtggattttgaaa

SEQ ID NO: 54194 - DNA, 575 bp, Zea Mays
atgctttctgttttaaattttagagtttgaaattaattagagaaactgaccaaaccttatttaattaacgaaaatttgttatgcttctgtgctgaacttaagaaaatttgtagatgttcaaacctcatttaggcactgtttaaaaatagtgagcaccccagtattggaaatttaagtaggattatctattaaaagccatttttgcccaaaacttaggaaaatcagaaaggcattagaaaataatgaacagtgaatgcaattatttttcctagactacttgagtaacagagaacctaggaaaaataaagggacccctagtccagaacagattctaggtgaaatgttttattaagcattagtcaaactagaaaaacaattattggtattataaaaacaattctaaaattgctaataaaaacccattggacttgtaacccctagaaccccactacaaaaatgataaacacctcagtctatcattttaagtagggtaaacaaataaaacttgatattaagccatatttcaattaaatcataagtaagccaaaaagtgtgcaacagtgggcaaataaaat

SEQ ID NO: 54195 - DNA, 1355 bp, Zea Mays
tcacggtgtacatgaatttctgatcgtggcatgtgcatggttgccttctaaaactgggtgtgacaccctgtctccgacgacgaaccaaccgtgctgggggagaagcacccatagtgcgaggcacgtcaccgacggaacctctgtcgcaacatcttacatcaccatgcccctagggagcaggttctgacctagttgtttactagtatgaggcgtccgaggtcggtgagactcctaagcagctgtgtttcctcctacaaaagaactcccaccaccggagtgactgcatcgcccaagagcgtgaacataaggtggctgagcgtaatgctatacccccatgtgatcacttaccccttcctcgcaatctatagcccgagttcacttaggccatgtaaactctgagccaggttggatgagtactggctctgatcacaaacgacttaccatgcatgcccaacaaagagggttactaacagatcctcaataaggtggcataccaccttctttcaccagctcatcttgatggcgacatgcgccaccacctcaatagccgatgcaacacgtggactagcgttgagtcatcaggcagtcgatggcacaaagaagtgagaagccgagaggtgtgcgattagggcccgacgccccgctgcgggaagccgtgggttgaggagactccagtaccacctcgacgaacaacccagcaccacatcgatctgcctatgaccgacttcaagatctgcgtcacccggcaccgcaacgggactaactttgtaaccttgtccgccgtgatcacctagaggttcggggagtgttcgaggtctcagccttaacccccaaattgcgcatggtctagtggtcgcctaacttaaaggtctacaatgtcgacaagtatgaggccaagttggatcccgagggctggctgcccgtctacttgacggtggcccaaaccaccggggcaatggaggacgtaatgacggtgtatctctcgattgtagtaggacaagacatgctctagtggctccattatctccctcgccactgcatctaccattgggccaacttctttgaccggttcgtctccaactttcaatcactttctaacaagcctgcacagccatggggcctcaagtctgtcaggcacaagatgatgagtccttccgctctttcctcgagcgtttctaatccatgagaaattacatccatgacatcgtcaaaatggtggtgatcgaggacattaatcggggggctcatgatggggccttcgtacgggctatacttcaaaaagctccgacgaccttcgaacaacacttctgagaggttgacgtctatatgtgagctcatccacttgctcagctccc

SEQ ID NO: 54196 - DNA, 997 bp, Zea Mays
tcgccgtcgagctggaagccaccccggtcagccgcggtactcctccccttgctcaccgccggggataaagctgctcaccgtcgtcgtgccatcgccgttgtccaccgcgtgtcccaacctcgccaccgcatcgccgtgacctctcctaagctctccgttgatcgccggagcaattgccacgacattggacacccagccgctgcaccagtaaactccctctttctatgaccgccgcgcgtctcgctcaattcccggccaccgtcgaagccgcctataattgagccctcccctagctgcataacatcatcacccacccagccaccaacaatcgttagcaaccgtgcctccgagagcttgaattttggtttctccccaatccgggtttccgccaccgtgaactcacctcaccgcggccagcccctccccggtcagctcatcttcttctctccctcgtttaagccttctcatagctctgtgatgctcgacaacccatttaattaagctagaggtcctctggtcgccgggaacacgacgatctagtcgccatgctctcggtcaccgtggctagagctccttagttgatcttagatgcaattaagttgggggaaaagcttaggataagtctgatttggtgtctgttgctcgggagcgccggtcatcacctcaatcggccggtacagtggctcaccggagcgcggctgcgttcaccgtcgtcgtggacctcgggatgtaaagaattagaagtctggggacctatctgcaatctgtcagtgactctgtgcaatagtaaatgaccccgcttcgagttattcgtttgctcagggctctttctgcaaagacgccagcgcgcgcgggcgcgggcgcttttcccctctgaactgggccgctgggttgaaatcagcccagtactattcaccagttttccttttctttttattccagagccaaaacaattatagaaaatggtagaaaaatcctaaaattgtgaaaccaattt

SEQ ID NO: 54197 - DNA, 545 bp, Zea Mays
tgggcctcattttctggaaagtacaggggctaagacataaaactctcccagacacagctctatgccacagtggaccgcgggttgattcgctaaaaagtgaggggctcttttacaatttcggctcgacgaaggggtatggtgcgatctaagtcgttggatcgtaagccaagcgcccagattagattcatgagtcaatgaaccggtataacacgccatacgttggattggagatctacggtcagtatcataaggacacgtgttctaatccaagacgctagatctcaatcgaacgctccaccgcccttcctcccaatcggtatgccattttctaatctgaaccgttgtccacggatccgacggccacagacccatcttcccaaaccgagcacggtcgaagacacgcatcacgatggcagcggcgccgctgaccgcgaatctcgagcatcgccggggagccctaaacctaacccgatcttgtgtgaaatgaagagtaagaggtgatgaatatggaagtggtagttataccgctgattaggctcccagat

SEQ ID NO: 54198 - DNA, 1084 bp, Zea Mays
gttccaaacctgggttgaaaattgggatgttacaaacctaccccacttaaaggaatctcgccctcgagattcagacggggctcgagaaaaggtaagggtattccctcctcagagagtcctcactttcccaggtagcttcctcttctccttctctactccactgaaccttacagagtcttacttctgagttgcgggtctttcggactgctgagtcaagaatctttattggcttttcccgatactggagatctttttgaatctgaattgtttctgcttcgatgtggttctctggtacttgcaggcatttacgaagctgggacacatgaaacacattgtgaatatctgacatggattctggtagctcaaggcggtatgctacgggtcccactctgctaatgacgggataggggccgacgaaacgcggtgctagctttcctttcaattggaaccttttgacaccacgcatcggggagaccttgaggtatacgaaatctccttcctcaaatctgagttctctccgtctattgtcggcataattttctgtcgactctgagcttcaagtaacctcttgcggatcagggcaactttctcttcggcatctttaacaaagtcgggtccttctagtatcctttcccctacattggaccacattatggggggtctggcactttcgtccatacaatgcttcgaacggtgacatcttgatactggcctgatggctgttgttatatgagaattcggcatacggcaaactggactcccaattctagtcgaacgtcaacacataggctcttagtaaatcttcgaggaccttgttgaccctttccgtttgaccatctgactgagggtgataggcggtgctgaaatctaacttggtgcccatagcttgctagaggcttttccaaaattttgaagtgaactgcgtccctctatctgacactatctttcgaggaataccatggagcctgactatctctttaagatataaccgggcaagggtggctcctccaaaagtggtttttactggaatgaagtgggccactttggtgagacggtctattattgtggcggaactgcccgaatt

SEQ ID NO: 54199 - DNA, 698 bp, Zea Mays
ccggaagcattgatgcaatgcttgttgaggagtgccaacaggaacgatgttgaaagcacgactcggagagacctcagcttcatcagtaggtagcggactcctaacatccgggtcactagcctctaaggtgaccggaccgacgagagcagcaggtaaatttgtcaccacgagttcctcagattgaaccagtggtgatccggcgtgaacgttcatagaagctgccgaagaggagcttggcccaacaccctcgggggctaggtcacccttagcaccaccctcgatggttgggtcctccttagtggccacctccaaagctgaagctccctcaaccgtgcccagaggagccgggtgactctgatcagtggcgttgagggccagcatgtcctcacgagctagaccgccctccaaggtcaacgaagcacgagagactgtccgggttgcctcttgcccgacaggatcgcatggcaaaggaacatcgtctgggacctctgaacggatgatggaactgtcaacctaaggggactcccataaaaggttctcaaggatgatctcttctaacgcatggtcaaaatcagatgacaacccctggaggctgataagtcctgataaggcctgcatcgggatgtcactgctcctgctgcgacggttgttcttgcgaatcaagggaatttcttctttttcctcctcctcatcctcat

SEQ ID NO: 54200 - DNA, 300 bp, Zea Mays
gatccaacggccacaaaccccaccctatgtgatctaatcggagatgttcgaaccaagatcaagggttcactgccaccgcaaccctcttttcatccccggtcatccgagcggccaggagcagagccccacaaccacgacgacgctcaccgacgagccatcgcaagcacccaggcgacccaactcgacccaggaaggccatgttcgtttaagtgaatcccggccgggatcaggcccaatcccccgtggatcagcccggtctggaaaagatcccagcccacgacaaaacagcattcgtttcat

SEQ ID NO: 54201 - DNA, 558 bp, Zea Mays
tcggtggcttcttcagtcggtggtctctttcgtttctggcccatcgtggctaccagcatttcgtcgcgcctccgcttgtccttctttcttttattgggccgacctctagatcccccgtcaggttctttgtcgcgcttgactttctgcctgtggtggtcgaaaatcgcccccaccgtgtcctctcctgatgcgtgggttgtcacaatgtcgaggatctcctttgcggttcacaggcttttgcgcccaagcttgtgcaccagagtctcgctcgtggttctcgagatgaaagcactgataacatcggcattgatgaggctagtcagctcgttgcattgtcgtgagaaacatcagatgtagtcccttaaggtctcatcaggcttctgtcggcaattcttgaggtcccacgggttgccagggcgaacatacgtgccttggaaattttcgacgaagatttccacgaggtcggcccaattttggatgcaacctggcctcaagttctctagccatgcacacgccgaatctgccaaatacaggtggaggttgcggattatgaagtcg

SEQ ID NO: 54202 - DNA, 1641 bp, Zea Mays
tcagcctgggccaaatagttagcccagatcctaaagaactgggcattccttttcctttccaagtgactcagcaaaacaggatccggttgccagtcttgcgaaaacataaagttcaacctcacgttgttgtgtccattaacgttaggttccgccggctgggcatcaggaataacaatatccccaggcacatgaagaacaccctgaattggtgggccgtcaacctcctggggcccaatcatagggaggtcacccaaggcaaggggggcaggggcattaaagttgggcaccggccccacagccaccagatcctcagggatctgcccattctgaagcaaggcaccatgaatgtgaccagaagaactatctgaggacaggtccgaataggggttgctgatttgttgctcgtcaggtggcaggtccagatgaggctgctgaacaggtggaacattaacaatccattggtcccaatctccttgaatgttgtctgctggctgagcttggaaattgtcttctggcgggaaaataagatcccagcccaccgccggcacaagttgacccaaaccaaaaaaactcaaaagggagctgctgaccatcctccgggaccactggcaccgggtccttatcttgaggctgacccccagcaaagtttgttggatgatctcacactgcaccgtccacgagtcaccaataaagccatcagcttctgaaaaaacaatgaactgcgggacctcctccagagacgtgacccgcaccctgagcagagtcctgtaaacattgcgtctgtcctcttcccacaagatcaatctgccaaaagagccaatagccgcctgcaagtattctgatgaacgataatccagagggaatcccaacaacataagccagcattcccgattaaagtaaagggctctatgattccaagcatcattatgtcgctgagcagtgaaggaagcatcgaggtactgttgcgggccgagcagaacaagattgtctctttcaagaacgctgctaaactgaaccaaaacctgacccaggtgcgaccgctggatatctcgcaccccaagccgtctgtgctccacaaggtattctctaaccacatccctcaccgccgagaaagtaatctcatggtcaggtaaaggttgaatgctgataatagcccagtcctcaagcaatggcgggaggcaccgagtaactgacctggccataatctcccggtgaaggaccaccgaagcgctgaagcccggcgggagacagggttcaggatcaacgcgcctaaacgccatcggagcaggaaccgaggatcgccagctagcagacgaagacggagcaggttggggttttggtgaggtgacgcccaaagaaagcgtcagggactgaaggggtgtcgattcaaaattttttaatacctcccgggcgaactcctcgaagcaactgaatatgggcggtccactgatcagagacgcaaccggtgtgcgaaaccaggtactgtgatcaggagaattttggtttcccaccaagaaggcccgactcccaaaggcagggaacgaagtcagagaagaaccgaaggaagtatacttgctgggacaaaaaaaatccaagtgtccccggcccttacagaaatgacagcttaaggtcggcgggcct

SEQ ID NO: 54203 - DNA, 637 bp, Zea Mays
tgatcatgagcaccataggttctatttcccataatttgaatggctaacaaaagtagctttcaagatagaaataccttttgaagcagtatctacctgagggcttaggatattggaactgtgttctggggtggttttctttataaatttaagtttgcatgtactgcaattatacgcttttgggttggtaatttggatttaggagagaccgagagaggcccaaggctgtgaactttctgcacttaaaccagcagaaggaaattaggcacatatatttgaattcttttttggtggctagacaggcagttttacctgtggaaccctggattgatccattgtagctgatatgcaaaattctgaatagtataggcatatggagcagatccaaatgtggcattgtctatttacttgggtgccatgttctttgtttattatcaagtgaaaaatttaggagtgctgtccatcaatggcattcatcagtaccttattctttggaagaggttgatggctgtcgcctcggctccctgccctggcgcggcgccctcctcctcggaaccccaacccgcctgttcggcttccctcccagctccccttcccaccagcccctcgccggccatcactccggtaccagcgaccaccc

SEQ ID NO: 54204 - DNA, 1131 bp, Zea Mays
gacacatttgtccaatctagggataccttttagacaaacccaaacactgtgcaagcatgtagaaggtgtagaacgggatagtaagaagacaaagaaataagtcaaaagtaaaagaggatatcgaggcacttttttttgaacgaagatatcgaggcacgaggcacttaaatccatccttgacgccttcagcaaagtgtcagacccatgtaaactttgctaaaagctccatccacccaattcgttgtgaggacatagaccttgatcaagtgatctcacctttcttgggagccagaggcacttttccctgccgctaccttgggctacaatacataccaggcctctccaaaaagtgcatgtgcaacctctcatggaatgtggcagagacttccaggttggaaagtgttagtcagttttggtaagctaaaatcagggctagacatatgattaccttcccaatgtattctaaccagaataggtagggtatatgagctgattaggcaaggatcaatctgtgattgggtatttctataaaccctgtgatccttgcctatatatgtgtaacctctctaccctgttatgcaatgaatcaatgcagttctagcctcctcatatgttcctacagaaaggaaagctattaaacaaagtcaggtgtttgacattagtcacctcggttctgttgtccatgtctatatatcacctcaccatcttcccctcaaaatctgaagatcctttggaagggggaagagaacgccaacgaaggatactgcttagtaaagtggccaatagtgtccaagccaaaggagcttggaggacttggggtgtctgacctggacaaattccgaagagcatatgcctactttgatgccgatatagttagaccataggcccaaccaagagaaatcgctgcttggtgtgaagaggcagccaccaatataccaaggcaacggcggcgacatttcaacggggtggtgatatacacagtttgcaacatttagaaagcaagaaataggaggatctttgaaagcagcttgctagatgcacggcaggtggcctgtagagccaaggaggacattgacctacacacgagggtgttgagtaatttgccttagttgggtgtgtgcttaatgctcg

SEQ ID NO: 54205 - DNA, 1063 bp, Zea Mays
tccaaaatttcttctcaatgggacgccaggtaaatcaatcaggcactacaatgggctacgacagggggggtccttcatctccgatgttgttcatattagcaatggaaccgctgcatatgctactggaagctgcaagtagggcactaggcgtggcctgctgcaaccgatcagtgatgactctatcagtatgagagcaagcctttacacggatgatgcgaggttatttgtttgcccatctgttcacgacatcagcaacattcaaatcatccttcaacattttggaaatgcatccaaactaagggtaaacttcctaaaatcagaactgttcttgatctcgagcaatgggtcgcagccatcagtttggactcaacactttctgggaaaagtatcgcatttaccagcaacataacttggcatgcctctcttagaataggcagacctacgagaggcaatgaacaaaagttggtggacaagattgcaggtcgtttggcaacttggatgggcaaacttctaaactgcgcaggaagacttgcactagtaaatgtggtgctctccaatatgtcagtatattacatgactaccaacgctttatccaaacagacggtaaaaaattgacagaatcagatagaattttctatacaacgacgatgatatgggaggcagtaagtgttgcccggtcaattggagcataacttacagtgacaaaagggtgggagggttggggataaagaacattgaatgttttaatagagcactaaggttaaggtggctattgcaaaaataagtgcaccccaaaaaaacatgggttcaactgccactgtagttttccgatgctgagctcaaattgttccaagtttgcacattgatagaagtcgggaatggacataaaatgaagttttggaatgaccgatggcttcagggattcgccccaaaggaaattgcactgtgtaggatctagggcaccggctagaggggggtgaatagatgattttgactaaaataaaatacactagagaaatttaatcaaatcaacaagagatataaaattactagccttgataag

SEQ ID NO: 54206 - DNA, 462 bp, Zea Mays
gaagaaatcatcccttcgagataattccttcggggatgaaagttaattgttaagtgaataaattatggtttattaatgtgactaaatgaatacacaaggagtataaaaggatttatacatgagaactcaattaagatatattaataacatgttcacctttttataaattgactttacaattgtaccttcgacccttcagagaaaattacaatgaaggtgtcatagagaaagaattacacaacgatcgcccaatctgccaaaaggtactttatgcggggcactgttcatctatttatagggaatcatacagctccatatgaatttacactcacgcccttaagaattacatacaagatttacaaatgtcatagggataacattgtcttttgccttcggtgttcatgatgacaccttctccttgcacaacctttccattgttgttatgacgaagctaccttcatt

SEQ ID NO: 54207 - DNA, 673 bp, Zea Mays
tgcactgtttcggcatggaataggttttttctttagcttcttcgcatcgctgaaatcattccttctacatttaatttcgtgtgcccctaatagtactagtgtgtaggagtagtataccgtacgtacatgacaacttctagctaggcggctgtctgtatatgtacgctagctcgggccaatcgcctaccgacgactgtacgcagtacagtagtagaaaactagaaatagtggccctgggatggcaaaagcatgaaggtaagcggcagggtagctactactggcctactggcgacgtgctatgcaacgtcattctgcacgcacgcacattcgcttcgccgaaacgccggaagccgttggcggccgttttcgccccgactaccgtgctcttgtctccatgtatacatacatatgcacgtcgcacgtcacaacgtcaggtcgctctctaactttgtgctactctctctctctctctctctctgcatgcgagacaaagactggtcctcatcatcgtgtgagctgacctttgcactgtaacgtcacgtgcctatatatacaaacccggcaaacatggcagtcaaaactccaaacgtctgcaaccaccagaagccacgtttgttacgcacgttgcacggtcagcgcggtactatccccaccaacgcacgatatacccgtg

SEQ ID NO: 54208 - DNA, 590 bp, Zea Mays
tgtcaggctgccttgagtctgaaattagtcttacagtgtaaccaagccatctttggactaagattcagctttgatctagtaggcatttggcaataactgctgtggcaaaattgtagctgaatccttggtctacaactttgctgcagaaccttaagtgagttgctatagaaaatttggagaaatctggacctgaaaaatgcactgtcatgcgctctgaagattccttccatggtacagtgcaccccatctgaatcagatagcgagttcaatgctatcctcgtcgtcggtgatctttcgccgggattgttgattgatcgtcgcgattcgtgcaccgtggtcagcagataagcacgggtaggtaaaaatcttggcatctggatcagtttgagtctggccgcggctaagctcgccgtacctcccttgctcatcggtcgaccggataaccttcgccgccgttgatctgtcaccggtgcgcgacacgtgcttaagtgttggcccgcatcatggtgaatcacggagtgcatgtccggtgatcgccggaggagccgccacagtgaaagccatctgtcccaagtaccagtgcccttttt

SEQ ID NO: 54209 - DNA, 347 bp, Zea Mays
tttttgggtaatacaatttaagttctgaactgagtcatattcattatgcaaataaacaatatttcttgctataagaatatcgcaactcatggtggaatcatgctgggatgcacgattcgaaacctaaatataaacaagtggagtgggtaggcaaatggaagagaagaatcagttgcgtagcagcacggggatattctagggaaaaagtaaagtggaatctatagcactgagccaaaaaggcggccgcaacttgcattgtttgtactgctttatagggcccaaatgctctcggcgaccatatttctcatcagtatcacgttgtgaagccactaatctcgacttttttc

SEQ ID NO: 54210 - DNA, 579 bp, Zea Mays
ggggttggggcgcaagcgcagcgaggggggcgccaaggaagacgcgtcggaggagtcggtgtcggagtcggcgggcgaggaggagaagacgtaggggccgatctggaggaagttgctggcgaaggaggacaggccgggcccgccctcgagccagaccaggagcggcgtggcggccggcggggtcagcgggtgggtggcctcgtagaaggcgtagtacatggaagcgttggccgcggggatcgggaggtagccggacttggtcggtagcgcttctgtggggaatatggtggtgtccgagcctgcagcagagaccgcggcggtggtggcgacgaggacgacgatgaggagaagaggagctgccattgcgtctagcttgcttgcccgaacgctttgcaccatcagtccatcagatatgtaacgtaggtcgtgacaaaatctttggcaaagacgaaaggatgacaaaagacaaatgggatattggatcacgtgacttttgactagcagttgattgaatttttggtagcgtaggcgtgaagcatcagtgtctgttccagttacgcggcgccacgctgcattccc

SEQ ID NO: 54211 - DNA, 312 bp, Zea Mays
aattggtagaggtgctgtccggaagtttagtgggtgggcgaacagcagtagttctagcagtttctgagaatttttcgtgggtaattagtgataaacagtgagaatcaagtagggctttgtcatgcctttccaacgagtacttatgcgcccaattcggagttataaattaggagatatcgccgtttgaacccgggtatgtggctgtccaaagaaacagatttctgcaggtgggcgtacagcagtagtattagcagtttttggatatttttcgtggttaattagtgataaacagtatgataattatgtagagct

SEQ ID NO: 54212 - DNA, 655 bp, Zea Mays
atcgaagtcttcctcaaaaagactatccgtgcaaaagtcgcctaagggtgcagccggactagcacaacaagtgcgaaaaatcgaagtcttcctcaaaaagactatccgtgctaaagtcgcctaagggtgcagccggactagcacaacaagtgcgaaaaatcgaagtctacatcaaaaagactacccgtgcaaaagtcgcctaagggtgcagccggactaagcacaacaagtacgaaaaatcgaagtcttccttaaaagactacccgtgctaaaccctacaccaaactgtccgcacaaagaccgactacaggcgcgccagactgacataataaacacactagaccaagtgcgcaacgcctttatgagcatagccggatgcgcgaaggcgcacagcctcatcatacaagctatagttacatatgtacaacgagggcatcacaccttacattggttcaaccttcggaatgattcccatctccctatagttaaatagaattatcctcagctcctcaccctcaaaaagacttcgcagctccccctcacctacactcgcaacggccggcgaggacaacaattcctgcttgccagccctgcccacacgaagccgaccgccgtccgcctcactcactctacgcttcgcaaccgcccttcgccg

SEQ ID NO: 54213 - DNA, 613 bp, Zea Mays
ggccagagctccaagcatggccaacggtggtcatgggcacgggcatgggcacgggccaagaaatctgaactttggtctctcgggcgcggacaagggcaggatacctaaaattactaagtcccattgaccatgtaaagaagccgacttccgtgaggttattcccgtcgactaaagcaacggggcgatgggcgttatttattaccgtcgactgggtcaggcggccgacgtgcattaccctattgtcgttggcttgaccgtatggctgacgggcgttaccctattatcgtcgacttgagcaaaaaccgactcggatttccagtattcttgttgtgacacctgcgtaacccaaatttcaagacagttaggggtatttggtggatggcctttaaatatgatattatcgatgatgaactataccaccgaactcctagtgatattttgcttgagtgcttgaccctgatgatgctatattagctatggccgaagtacatgaaggcatttgtggtactcatcaatcaactcctaagatgaagtggcttttaaggagatctggtttctattggcctggcatgatatttgattgtttgccaagtgtgtcaaaagtttggtgatc

SEQ ID NO: 54214 - DNA, 457 bp, Zea Mays
taaagatcttggcatgggatcagcttgagctcggttgcggctaagcccgccgtacccccttgctcatcggtcgatcgggataagagctcgccgccgttggtcgatcactgtcgtgcgccgcgtgtccaggctctttaccacgtcgcgattagtcacgcttggggatccagtgatcgctggaggaagcgccatggtgaaaaccactatacacttgcgccagtgctcctccccttctccgaccgccgcccatcatcgctcaaattcctggccaccgctcttgcctagtataaattaaagccaccgtgagctccgtaggatcattacgtatccagccaccaagcatttccctcaatcgatcatcagtgagctccaattttggatttccccaaaaatactcaagaacaccgtagcaaggacctcaccgtggccagctcgattcaggtctgctcataccttc

SEQ ID NO: 54215 - DNA, 279 bp, Zea Mays
actaccaatcacctgcaggaagccatataattaattaactaacaagataagatgggtataagttgccttaaaggagacatgaaacagtaagctaggtttaccctatgtcaggactcgggagctttaggttgttcaggaaaaataagagacccattgtcagatttttatatataaccacccaactaagacgctaaaagatactaattttattttatgatgttactacatgcaatccgacttaaaacagatacaaggattgatatacgcctttcatttaca

SEQ ID NO: 54216 - DNA, 365 bp, Zea Mays
ggtcgcgggctggaggcgattttttaaaacgcgatatgggcgcaccggacagtctacagtgcctgtccggtgcacaccggacagcgcacaggagaaaggcattttagcgcgcggctgccggtgcaccggacattgcacagtgcagtgtccggtgcacaccggactgtccggtgagcccagacagagggaaaatttggattttttgaatttttctatctagttcccaaccaaaccaaatcccaacttataaacacacaaaataacacttgttgggacaggtattggcaccctcatgtattttctcatatttttcaaaatattttgccataggctagataatttttagagaaaataggcaaatggtg

SEQ ID NO: 54217 - DNA, 477 bp, Zea Mays
aaaagatccatcaggtggccagagtacgctcgactgcaagggtaactcgtgaaggagaggagactgaggccaccgagatagctccgatttccgaagtcatgagacagttgggcttagttgtgacagagggaaccgttgacgaaggtacttctagtgccgaagctgagcaggctgatattgaagaagaaaatgctgacgaagaagaggaagattatggcattatgatcccatcaaaacccaaccacttgaattttgagaaatctactgtgtctgaagccgagttgcccatgatgatgaaactgggttacttcggagaagctgaaaagaagcttattcgttttgtcgggtaagaaaccactctgacgccgaaggatgatgaagtaatagttttcaaaagctttttcagagcaggattacggtttcccctgaacaagatgattggagaagttttggatagttatgaaatttatcttcatc

SEQ ID NO: 54218 - DNA, 516 bp, Zea Mays
atcttgttgccctccctctctattgcgaatcgggggagggcagtgttttcactcactatcgcaacacgagagcgaggccagcaaacatgttacatcggctcagccttcggaataagacccgcttcccggaaattaaacaacatcatcttcaactcttcgccttcaaacagattacgcaaatccccctccccaatacatgccccagacgtcgagcatagtaaatcacgttggtcgccccgatctaatcgaagacgggatcgttccatacccatccgacgatgcctcccacttcgtgacatcccaccaacactatgcttcgacaccacctttcgctgacggtcgtcttgggccatcgccccagccggggggcggactcttcacgcacttcagcctacggcaaggactcggctgcggccaaatccaatgcagcaaaataatctaaatcttcatcagaagactcctcaatctatgaaaacaggctcccaaaatcatccatgtccgatgaccacaactcag

SEQ ID NO: 54219 - DNA, 811 bp, Zea Mays
tggtattccgccagtttggcactaatgtcgaccttggcgccgagccatgcatgaaccctagacaagtcctccattttgtcatctgttgtcttcctttctctttttatttcggatgtactactatgtagaagttggttttactttggacgaactgtagcattggatctcttgaattaaggtcgatatcatggaaaactaacagaaaaataagaactaattattgcacacatcctaatttgtttttttcaaccatttgaagaaacaaatcatttcaagcgctacataaacattacatgtgacgatatatggcttgtgtggaactttaggtaggtaaaactaaatagtctcaaaattgaatagcaaggtaactgtagctcctccaataccctccattccccttctcccaaacaagccctaagtgggtttatcgacccacccagtaggtccatcgcctcttagaagccaccatcattctactagcattatcacaagcaacacccgctcttagatcaaaagtgtgtttcctttcaatggctcacaactaaaacatgcagggagacaatgtcggagtgggctaggaagacattgacatcggggaggaccaaggagaaggcgaggatctggatgacagggaggtgacgttgacaccaagatctaccacttgggtgccttcgtcaacagcctcgacgccaagatctaacgcgccaagtcacccactatgtcggcactcgggcttggaatctcgacgcgaagactcatggtcatggcggcaagacatgtaactttgacgctatgagtcacgacaccgaac

SEQ ID NO: 54220 - DNA, 573 bp, Zea Mays
ctttctagaggaactagctttgatcttaccattcttgctgcttttatgctctgatgtgtctttgactacttgtcagcatttagtaccggcaatgcaccacgggatgtaccatgagatgcttttgtgagttggcaacatcaactgtagctcgatggttcactttgagatgtgacaaaacacgcgatttatacaggttcgggccgcgagatgcgtaataccctacatcctattggcggtgggtagtattgctttgatatctagaggttacaatgacggctaaggtttggatgtttgatgagagagagggggggtgtataagatcagatcgtctcaagacctctcttaggagggatccctagctcgccttatataatccggtgtggcttgggttacaagtaggtttccctatatatctcctagtcggtttagatttcattagagtcctcatcttgtgtgccaagtacaccctagaccgaggatatgcttcatgaggagccaggggttatctatccccgacaagcccccgagcttcaagttgacttgagaaacaatcagcttgaaggtccaaaatct

SEQ ID NO: 54221 - DNA, 712 bp, Zea Mays
gataaggaagtcaaacaagttcatacttttttccttcctcctttttcttcggcattccccacccaccagaggtcggaaacgtcctatttgccaagtattcttgcaccaagtccctagtgctgatatgctctgccacaactctaaattccacctcggctagtaggtagggggaccccaactacatgttacacaggggtcgagtcatgcgaagctcagtctcaagggacccgttaccatgctcatgagcttctccctcttcttttcgtcagccttcacataaaaccactcatttgtccacccggtcggccacttagtacgataaccaatcatgggggccttggtatccttttggtatgcaaaattgtagcacccgaagttcttgtccagaccatcggctctagccttcgtttgataatgaagttcgtgcactcgacagaacccttcggtattggcactttttccatggcttcgaacagcccaaatatacacgctaagtctaacaatggcattgagggtcagttgatgtaggtaaatttcgaacttcttcaaaacttcaccgatcatctcataaagggggaaccgaagtcctgccctgaagaaggttttgaagacgacgacttcatcctcttttggctctagaatcacctcctctccagcaaaacgaactagttcgtcatcattctctccgaagtatcctagtttctgccttaac

SEQ ID NO: 54222 - DNA, 507 bp, Zea Mays
ctaaaagatcgatcgattcaagatttatatgcttgactagcctagggctctatctctactatatttaagtgtgagtctattcgtgtgtttcaccttcccacgcttacgcgcgcccgtcagcaaacaaaaaaaaatgaaaaataggacgccagatcaaacccctactaccccttggaaagtttaggaggcgcgaaccaaacacccccttaattagtcatcaagtcaccagctggtttaaaggattttgagtcagactcttgtttcattttgagtcacgagctgcggtccaacagcgcatgaggcttgagaagagacaagtatatggcgcctatgcatggtaccagctaggcttatcgtgaaacacatggatgcgtgaaacatgaggacgatggggtcatggggacatgcatgcatgtcgttcctggcaaccaaccactgcacatatgaacaagattgatccaattaagatatgtaaggggtgattggtttgatggatcaacttatttc

SEQ ID NO: 54223 - DNA, 549 bp, Zea Mays
ggaattcccccctaatgtcaagaaccaaactgctatctttaattgcttcctagacagttcttgacctcacaaccttcttgttaacagcagcaaacaatgaaggagcccaatctgcaattgttttgtcgtgtaaccagcgatcgatccaaaatttggtgtcggttccactgcccaccactaactgaaccgatccagcaaaaagggtagcaacattggaatgaacttggacatccaagaaagcccacgaccactcatgttgtattttcttttaacaacaacatctcatattgagagagcggcacataacttcaagatttggaatacctaaaccacccaaattcaaaggtaaatacaccttctgccaacccactaaacagtgccccctttgacatctttgtggactttccagaggaaaccctgctaatcgtgtcaatggctttgatgacccatttggggcattgaagtgcaataaagtgataaactggaatagacgagaggacatatttgacaagagtagccctattgatcgggtgtttaagagtagctttc

SEQ ID NO: 54224 - DNA, 404 bp, Zea Mays
tagtgataaaaatgggtgataccaccgtcttcgccacaagcatcgccatttagggctcgaccacctcctcgtcctcatcctcttgctgacccactgtctacaccaccaccaagggatccacttctccacagccatcaaaggatccacgaccatcaaagaaatcgaaattttctacaccaaaattggtgtccacgtatgagaaaaagaagagtaaagctactactgctggcacaacgagatttttgtcagggattgcacaaagcctcacgtcagatactattgatttggccgagcattagaagtctgcaaaaaagaccgaggcaatgatcgtaaagataaagaagccaactaagacagattttaaaaatgtgtcgggcagacctctactcacttttcagaaacta

SEQ ID NO: 54225 - DNA, 985 bp, Zea Mays
ccgtgggcacgctagctagctcctttccgtaagggagcttctgccctgtgggtccgtggcgtcagggcttccttcaacccccagcactgaaatcgtcgcgtggatccctgcggtatttgcgtcaacaaatgccgcgtccggtccgggtggagtggagtctccgtgcgggcttctcgggatccctggtgtttctctctactcccctttggactctctccagggtataaaacaccaccgtgtcacgccgccattaaagcctagaatcgtaactacgagctgccacaccaccatccctaaccgcaaaagaaaccggtgtgatgggatcgcctggtgtttgttgtatcatcccgaggcgccggtaggatttcttgggtcggagcgtcgactgggaccaaggaatttcttgccagaattcatctctgccgcgactacgccttgcgtcgtgggtgcgtgtccctgcgacccaaccgctggtagggtttccctgccttgcacgccatcattctctgtgcgtgtagcacccgttagctcgtgaattagggaatcgggtcgtgtatctccgttgaggagcgccgccgtggggaatgatttccgccgcgcttgcttctcgggggtagatgatgaaatctgggccatgggatctgcggccgatggcggggatggaatctaggagtgatggtcccctgcgtagttggatggtgatcggaagaatccagggagatctcggcttcattaaatccttacccttgatcttagatccaagggtctctgctgcataccatttcaatgctaggacaacctaatctgggcggtctgtctttgatcgaacggcgctcaccgcgcttgcttatcgggggtagatgatgaaatatgggccatgagattagcggccgatggcggggatggaatctaggagtgatggtcccctagtgtgagaccctgtttggttttggtaattgattgacaacttatatggactaataag

SEQ ID NO: 54226 - DNA, 462 bp, Zea Mays
cgtcagcgttttagagataactgccgagtgaatgatggtaacgtcggtgttttagaaataacagccgagttagaacgggctgcatcggtcactttgaagataatagtcgagtgatgatgtggcacaccggcgtttttagaagtaaccgctgggtgatgacatggcacgccgatgttttagaagtaaccaccgggtgatgacatgggcgctttttggaaacggtatccgacccgggaaaaccccatatgtaccgcgccttcggccgcctctgctttccgtgccctagttcttgctttcctgcctccagaccctctctgtccttttgcaattcggctcccactctgttcgtcggtggagttgagatggcgcccaagcgaaaggcctcgagttcatccgctgcggtgattccccctatcgaccccaacaaccagtttcttttcgcaggtaaccgtatgtctattg

SEQ ID NO: 54227 - DNA, 1210 bp, Zea Mays
ttgaattaggagagagagaatctagttatattccaattccacggaattgattttctgattccaaatctcaatttcatgtgcaagcaaacgacagaatttcatctatatccaaacggggcattagatttttagaggaaaaaacaagcagatctcgcaggtgcctgcctcgtgcaatcaaatggctgcaacgaaaggtggtgacagaaatcgtcctggtcggttctggatgagaatgcatgttctatggtatcagttcacagatgcttaaaaaactaaattggttgtgtctgatctgaccatgtatcaatgacgggatgcactgcatacagtgagttctgtttgtacgctcatcttcttgtccaattccggttcgcagtgagcaaacgcgtgttgtgctgaccagcgctgcgtacgttcacttgaaacaagcagagatttccaagtacaccaggaatcttgctcccgccagtcgtgcaatcctgctgtcaggtcccgcaggtacattgtcatcttccgcttgtattggcactcctctcagccaatttgtttctgcttcactgaactaagactcaatgtcctgtcttgaagagctctaccaacagatgctagccagagctcttgcccactattttcaagcaaagttgctcttgctagatcctactgatttccttataaaggtcagtttggctgaaacagtctcccttcattcacaaatcatgtcgtttgtaaccaaatagtgtccttccttacagatccataacaaatatggcacaggtggcggcacagagaaggtaagaaggcctttgaacattccagctttctgaggtagtgaggttaccttttcttgtgacatgcccatagcgccattcaggtgtagtcattattaatagaaattactggtgcgttcagtttgcttttcattgatatgatgatgtaatacatctgcatattgttgccgaacttgatctttttgctcattcacagattctcatgcctcgattaattgctaacagaagagcactttttttccttcttggcagacatttaaaagatcaatctccgagacgacgcttgaacgtgtgtcgggattgtttggatctctttcaattcttccacaaaaggaacagcccaaaggtgacacctaagcatttaggaaacactgttcagctcatcattgtactgcagtatttggcttggtgctagtagtcta

SEQ ID NO: 54228 - DNA, 1344 bp, Zea Mays
tccatcttcagcagcgatggctagactttgacgccggtgatgtcccccagcagctgcacgagccatatagcctggcatgctccagctgcatccaccatatactctgcttcacaagttgagaagacctcagtttttgtttctgaaactaccaagacacatgcatgtctcctaagaagaagataacgccgccggtgattctcctctcatcgatgtctcccccaagttgtagtttgtgtattcggtcagcgtgtagcccaccaacctgaagtcagtgttgcagcgcttggggcagacaagaccgtagtcgactgtaacaacgaagcagtgtaggatgtgcttgacggtggctaagtgctcttgttgtggtctctccatgaaacggctcacaaaacccaccgcaaacataatgtctggcctgttatgaaccagatagcgcagacttactaccacacttttgtacatcgtcgcattgacctctagtgttgcctcttcgttgaaagcttcagtctggcctccattgacgtgtggcatcggttacaatcccacatgttggacttctccaacaacttgcggatgtacgccacttgccttaacatgatggaggtgtgtccttgcttgacctccatcccaagatagaaagataagagaccaaggtcactcatccgaagcagacgacgcatctcctccttgaatgcatcgacatccactagccttgctccaatgatgattaggtcgtcgacatagacccagaccagcacacgcaatgttgtggcgcccttagtgtacatcccatgctcgctaaagcacttgatgaagccgagtttgcgtaggttgttgtccagctttgcgtttcacgcccgtggtgcttagggaagtttgtacaacgccttatttagccatagaaccttcgctttgtgcctagtagtgacaaagtcgggcgtccgccagacgtacacctcctccttgagctcgccattcaagaacgttgtcttggcatacatgtgtgcacaagccaacccattgccacaacatcaagcagtatccacacatattacatctgtgcgaccagatcaaacacctcatcatagtctatccccggacctcggttgtaccccttggcgagaatctaggccttgtgcctgacgacgatgccctgctcattgcgctccagtttgtacacccacttcagaccaattgggcgatggcctagatgaaggtcgacaagagcccatgtctcgttctcctcaatggatgtcatctcctctatcgtcgccttgcaccagtgggaatcgtctcgagcctccttgaacgtagtcgattcataatcaccgatgataatgagca

SEQ ID NO: 54229 - DNA, 469 bp, Zea Mays
tttgctttctctacctttgccattaagcttccgcatttacattgattacataaattgcaattttagtattcttagcttagaatatttaggattggaacataggttgcataactctttttgtggtagagataacaacacttggacaaaacctactttgcaaattattgctcggttatgtaacaccctagtaattcctagagttcttctcagtgctaactcaagaaccattatttcaggtgaatcaaattgagcaaaagacactaaaaacttgagagcaaaagttcaactaaatcttttgtcctaagactcatgcctaaatcatatcatgcattcaaaatgggaaaaatgtttaaaccctagaacaaccctaattaggccatttaagtagaatggaagaaattggtaaaaagaccatgaaaaacatggaatcatggcttaggccaattataaaagttgaaatacactaatt

SEQ ID NO: 54230 - DNA, 308 bp, Zea Mays
gttgcattatgttacgtgtgtcaacgagttaaagccgaacaccaaaactagtaggattactacaacctctcaaggtaccggaatggaaatgggaagaaatcggtatggatttcatagttggactaccccatactcgggatggctatgattcgatatgggtcatagtagacaggttgactaaagcggcacattttatacctgtgaagacaacttactcaggagcccagttagcagagttatacatgtcaagtattgtttgtctacatggagtaccgaagaagatcgtatcagatcgaggaacctagttt

SEQ ID NO: 54231 - DNA, 361 bp, Zea Mays
aaaaattccaacaaaaaccccaaattaagcacccaagtgaagagcactcaagagcaaccaaattttctctaagttaaaaatcagccctcttctaaagatcagaggtgttcacttagttgctggcgccaaatctacatggtccaattgacaaaaaggagccaaattacccaaggcacacccctgaaaaatttgaaaccaaaccagaaccgtttggcatggtttgacacaaattttgtctcgggttgaacagtgccgacaaccctgacttggcgccaccatatctcccaaaccagacccgatcttcccttggaactcacatgaactaggtagccctaggtgcagagaagagatcttacaaaag

SEQ ID NO: 54232 - DNA, 761 bp, Zea Mays
tgttgtctccccccttgtggagccatggactgtcctatttataggcccagggagagctgtcttgtagacgggggccgactacatgctgtgtaggggtgtcttcatgtcctgtagacagtatgtcctgatactttgttgttgacttgtgcttgcttgttttccgctgagagccgaggccgaggccgagggatcgatcacgtatccgagcccctcctagcgtggggttgcccataccgtagtggttgacacagtgcctgccatgggaaaaaaaactcttacgggatgcgtcactccactatttttgatgacattgggaagtcctctgtcaaagatatcgagggaagagccgaactcgggcgaggcggaggtccgtccaaggttgcgaccgagccttgtcttgagacttgatgacgcgtgccacagtcgactaagtgaccctccacgagattcgagggagagccagtaccgaggcctggttcgggcgaggtggagcttgcgctcgaggttgagttgagcgtcgagcgaggcagaactcgcgcccgaggtcttggtccgcatcccgtcatattacgtggcctgtcaggagctgtcaggcggcgtgcgcacacgtaatgatgtagatgaatctttgacaaggctgcggtcctgttgaaagattcacctgcagcccggtgtagggtaggtgcgcgcattaaatgcggttgtctcccaacggccttcgagcaagctttgtctttacctgccctgggcaagctcagatg

SEQ ID NO: 54233 - DNA, 644 bp, Zea Mays
tttatggaggcgacgttgatcacgcctcgatggtacgtgcggaggcacgtcggaacatagggagtttatacatgtttgtgccgtgtaaacgtgtaataccctacgtcatgtatggtgttgagttttgagttgccttgagttcatatattacatgtggtttgcgaaaggtggaatatggagtctcctaatgatctaatggtaagcgagagagagagagtttttggtgggggtacctctgcagccttatatagccgactttagagatatccctgtacaagtcgttgagtctatctaagtctactctctgttgctatgagtatgcctactcctccggcgctcggttaccttctctggtttatcatccgagtgatccggtgtctggtcgcgtgagggacgcgtcttcagagctcaagtaacccttccgcaagacacgcaagctgatccctcctcaaggcacacacgccatcggtacacccatgcggtattcttcatggccttcatctattccgcgcgcttttacttcgatcaccccttgttccatcatgacgaggcccacaacacaccctactagactcagaggcctctcaggcggaccccttggagatgtatctacatcttagtgacccatgggatatctatctcgc

SEQ ID NO: 54234 - DNA, 2591 bp, Zea Mays
cttccttttcctggggtgtaaaagcacttggttcaacaagtcaagtaacaaaggagaatacaacattagtttcgaatgcactcacaacgatgtcaagaacaacacttataggatacaacaatatatatcaacaatcacaacaatacatattaacaacatcaataaagaattttagttccaagcaagttgggttttagttccaaacaagttagggtaggttagagttagaacccaacataaaccacaagtcaatgtatacgcacatgaataattattcttcatacccctcctattgaagcctaaatatttgagtatatttcatcttttcaagtattcttttactatctattcctacgctaattttggcttcctttgtttctcttcacattactatcgcgtcttaggttcccaatatacagtgatgcctctagaagtatctgttgaatgtgtccaaaccatctcaaccgatattgaataacctttttaaaattggtgttgctcctaacctatcacgtatatcatcattccaaacttggtcccttcttgtatggtcataaatccagcacaacatacacatttccagaacacttatctgttaaatatatcgtctttttgtaggccaacattctgcacgatactattggataaaatagaatccccaggcaccaattagggtaggctacgatatacataccaatagtgtatatgttggaccaaggcccattacaatgggagcacacagtccaacaaatacaaaatagcaggtttaattgtcgtttcataaaacctgtcttttagcttctgtggtactctcttttcatgtagaacgtcaaatacttgatgccactttatttatcctgctttgattctatggctaatatcttcatcaatattgttgtctctctgtagcattgatcctaatatcgaaaggtatcctttttggacactacgtgatcttttaaactagcatctcctttctcgtttgtagtaatgtcaaattcacatatcaaatgcataaagtaaattaattaagtcaaaccaaaataaagttatggatctttctaactgcattatattctatctagctctttcaatcagttccagtgtgtgaaagttccccacataatactagtctgtgtggagggagtaagggcgtgtttggttgaggtgtggtttttaaaaaggttgttgtgatctatgggctatggaaaaatagttgtgcgaatgttaaaaattgtttagttcaacaactgtagttttggaaaaaattgttgtcaacttctctcagtgacaagcagaccccacctgctagcctcatcttcttcctcttgatggatccctggccaaggtcgtgcttgcctgcgacggcatagccacgctctccgatatggttcaaaggcaatcttaaaactgaaacttaattaggcaatcttgatctaaaacaacacagattactatggtgaacatcatgtatgatttatttttatgttttttgagtgaataatttgtttaatgttccaaaactaccatttgctgtttgtagtaacttaatttccatggaacggtttacgaactaaaattaaattatatgatcattagcaaatttcagcagcttattaacatttaagacatcatcatatacaaacttaagttacttttatctccctcgtagttaacatatttgtataacaactgaatatactatatcttcttaaatatttgaagagtattactatattatctttgtatgaacttatgatttcaacaacattttattggcagggaacacatccataaaaagaccatgtggggatgctccattatttgcttttgttaaatcaaaaccataaagcaatacgtgctgcattatactgttcttgcaattcatgtttcttgagtttttttttttcctttgaacacgtatgagagcaacatgtccattcagtaggggtacccaaatatacaccatcagtcctcaccactactgtctacacacattaataccaagtaatcaacatacaccagataaccagacacacgaaccagccagtgccactagagcgggaagataaggtcattttccttaagttattacagtaaaaacatggttcccaattcccattctattgtcaaatagtgaagcatacatgcacaagccattaaattttataaaaaataccgtgatttattgctaaacttcaggccttgaaaagaccgctttacataaaatgctaaaattaaacaaaaggcatttgggattgtataataagaaagttggctgcaagagaagtttcggggaactcgtacaagtatagaacaatgtcaacaataaggaaaactgcaactgaaaattcagatcaacgtaatccacaatgacggggtgcactgccatacacgaacatttatatggtggaatgttataccttcagtaaaacatgtataggtacatgtgatattgagatgcatacacatccattcagaatttatctgtcatatttttcattgaaactgcaaagatctgattttttttaaaatatgtgaaaatgggatcaaaatagataggaaaacaaaactgagcatatcaaattatc

SEQ ID NO: 54235 - DNA, 284 bp, Zea Mays
ccccctatgggaccaaggatgtttggtgtttttcctaacacttttaggggcaaatgatgtaacactagtattcgtcataattttctacccccagtgttgtgtgatttgctcatcccatgcccttttattgatgcaggatggaggtctagggaacacatggctcatggattccagctgtttgctccacatgacaggaaactctagatggttctccatccttgaccccatgatcgataaggagtacatcgcttttgcggataacttgagaggtaatgttgtctctc

SEQ ID NO: 54236 - DNA, 273 bp, Zea Mays
gtcctaacgcacgaaacaagaggaaagaaaatgcagctttataatctgacaatgaaaatgtctagacctcagcgaccgcaaaagacatacgcatacttaaaacaaacagttcctgtaggatcagacatcggcaggggaggaacagcacccttagtagaatttggcccggcttcaggcggtgacacgggaagaaggatctccacctcaaaagaggaagccagcgccgcacttgggcccttgacagccgcgtcaagcctctggacctcggctaag

SEQ ID NO: 54237 - DNA, 623 bp, Zea Mays
tggaattaattgtccccaattgtgctcggtcaggcgctctgaataaggatcccattgtacagtaactgaaaaagatccccaggttcatcgcccctcgccgctggtgatctcgcgcccggattcgtgctggccactgcgattcgtgccccgcgcaagtggataactgaggggagtaaagatcttagcgctcggattggttcaggctcggtcactgttgagctcgccgtacccacttggactgcggctggccgaaatgatcctcaccggcgttagccgctcaccgatggtgcgccacatgcctaagcgcaataccacgtcacagtgaatcgccttagcttgtccgttcatcgccggtagccttgccacggtgaaagccacgaatcacttgcactagtgacctcccctctcttcggccgccagcgcgccttcgcaaaattggacgccacctccaatgggacctataaattaccgccccagtgagatccgctaggtaatcacgcatccagcgcacccaatcgtgtctcaaattgtccaccagagagctctaatttagagtttcccccaactcagttcaccgcgctgccgtgagtgagctcgtcgtggccagccttctgcaggtccat

SEQ ID NO: 54238 - DNA, 1065 bp, Zea Mays
cgaaattctccggctatggtggctaatcagaggcgaggagcagtgctctgtgttcgtaacaaactagcggaacaagccgaggcatcaatttatagagggtgaccatgagtaggacgaatttgaacggagaagtgctcgcggagataacggaatgagtcaccggagttcgctaacgtggcattcactgggcaaagacttacggccgtcactggttatcctacacaacccacgacgacgtggtgaaacggcttgaggagtgacgggaccgaagtaaatggcggcacgacggctgcagtcgtgtggccacgttgccggtcatgtaggtacgaccactgagttgtaacagtgccccaagttcatccccgcatgagatctttcaccgtcagccgttatcctcacactagagcgcacgaatcgcaacgcaggcaaggatcgtaatgcagagatcaccggcagcgacaaatacactgaacccgtgatcctgttcagttcactgtaccatcgtgattacattcagcttgttctgacagagcaagtctaggagcgtttttcttcaatttctatgtgataaaactaccgaccggattacatcaaagttattaacctatataccagctccaatttgatcataggaaccttggtcatttgcccacgcgatcaagcacaattcggctccaaatttcatccaagcacactgtcagtcgaggttcagttttcagtagtgactgacagtcaaactctcggtccaattttctccaatttctaagcagctttagggcttaaccacttaatcaaacttgtacccctatattacctctacaaacttgttgtagtgacctagggcaaaaccttcatggattaagaaatacaaggttccaaagtcagctcaatcacactgatttcagagttagccatatgggtgcccttgggaacttttacaaattactccaatttactccacaatacttgaaaatcttccaatgtaacagttgtttggtttgtgatattgtaccactttgatatggatactttggtccaaaagtgcctagaaatcaaaatcaccat

SEQ ID NO: 54239 - DNA, 1105 bp, Zea Mays
tttgcttccaaaagagctctgctcttagcgaatttgttgcggcgtcaccgttccgatagaggatacccatgaatctgtcgtttatgttccttttcttattcgtggtcttgctcttctcgtctccccctttttccgcggtctccttgatttctatgaattgaacttgacgcatcagaactctaattccattctacaaatttccattttcgtacatctgtgtgaggcctttctcggaattctcccccatttcgatctttggaaatacctttatcattgtcggcctgggatggctgggggacaacaccagcttgttggcgacacaagtctggagcttcgccggggaggaaagcagagtacctcgacattcctctcaaggacagcattaaggggtggcgccttgagtggttcattgtggagaaccactgcaagtccctcccccctcagtcagggagacagccagatgtccgcacaccgagctggatagaatcttcgaccccttcggagataacagaggctaaagtactgcttgccgagatctgcttgctgaaggatagaggtctgactgccgaatctatagttgctaacttcgttttcaagaacattcaacccttaaaggacagggcctaccctgcttatttgtacagcggtgtcaatgattctacccgggtcatgaatagaaaaattcccactgaagatctgatgagtcgactggacatgatcctgagagacagagtttcaaatgttggtgctcctgtggcctattctgcatggaacctgccacacttaggccattctctgagtttgtgtccaaccctcctgctcgtgatggtagcctgggtcttagagtgtgaccctcttctgaggacattgaggctttgattgccccacttcgaagtcttcgtgaggatgagaggcagactcattttgagatgtcggctagcactgatgacgcagagatagatgttgttcttagcttgctggctggggaatcatccgactcaacccacaccaagccaatggccatcacagctgggcaagaacttggtgaagaggtggaaactcggaaacccgaaggcgctcgcccaaagcgtccacgccgagtgag

SEQ ID NO: 54240 - DNA, 601 bp, Zea Mays
ctttcgtgcttgaaatagatgcttgtgaccagggcatcagagcaatgctaatgcaaggtggccacccactcgcctatgtcagtaaagcactaggaccacaaactagaggcctctcaacatgtgaaaaggaatacctcgccatattaatggtcgttgatcattagagagcttatctgcaacattcacagtttgttattcacatggatcagagaagttaagtccacctgaatgaacagcggatgcatataatttggtaatagaaagttttttataagctattggggctacaatattcagttgcctacaagaaaggtagtgaaaactgtgcaacaaatgctctctctagaaagccttctcgtgattccagttgtgcagccatttccaccgtagcaccatcatgggcttcatcagtggctgattcttatttgcatgacccgaaggatcatgaactattggttaaacttcccctggatgcctcctctgttccccacttctccctcaaggatggtcttttgtggtacaagaacagattttgggttgcctctgatcctcagcttcaccacaagttggttactgccttccaccatagccccgttggtgg

SEQ ID NO: 54241 - DNA, 1113 bp, Zea Mays
atcctttgtcgatggggcacaaatgcaaagtatcgcgtaggtctttacgcctctaggtgtcttcgccaggattttgcttcaatttggattcgcgcttaggcaagttttgcaccctgaggtgtcttctccaagattttatttttaatctagcgtcaccctaagccattttttgcaccctaaggtgtatttgccaagatattattttaatatggcgtcgccagtaagtggtttttgcaccctgaggtgtcttcgctaagattttattttaatctggcattgcccttaggtgtttatgcaccctgaggtgtcttgtcgcacgccataaacgagttttacctggtgcggtggtgacttccctcgtagctgaatgttcgttttgcatgggccttttcggctaggatacacattcgttggggggtttggtattttgttacaaggctccgcctcattaaaaatctcaccccttcacgaggaaaagagtacgggcccgattgttcaaagtttaaaaattacttgggtaattgagggcccttgcgaccgaagtctttatacacataaaacttgcgtaatttatctatgctctagatgtgatctagcggcatgcctgtttggctaatcagcctgtaggcgtatggtgagatcttcttggtggtgatgaaaggtccgggctcgagttttcctcttgcttgtattcgaggtgaccttatgcgtactaggtcaccctcatcgaactcttttgccttgatggacttgtcccttcatggttttgttgcttcttgatacctggctattgtgttgagggcctcaatccggtcgttttcgagtaagtctttggcaatggacttgtctgtgtttggggtcgagttgtcttccacttgaatttcagctcttgtggggtcaatgcctcatcatcgtacctgaatttgaagggggtgaatcatgtgcacctggtttctatcgtgttcaggccccatatgactttgggtggttggttgggccacttacccttcgtgtcatcatgtagcatcttcttgaccgttgtgaagatttttttcattcgctctctctactgtaccgttagtctgaggatggtatatggatgtgaagttaacc

SEQ ID NO: 54242 - DNA, 785 bp, Zea Mays
atgaataccattcattatttgtagaaaggacaaattgatctcagtataaatcgtaccatataaaaaacgaacggtgtggatgtctttgtaattggaataagggatatgctaaatagaagaaatgatacaagaatgcataaagcggtacaaggaattttaatatgtatttagatttcataaatgggcaatagtaaaccagcttaccttttacagactttgatactacagaggctgcaagaatcacctgtgatacataaacaggaaaaagattcaatagtcgtattcttatggtatgaataccaagacaataaattatgctcatcaattatttaatcgtagctgccgtctacttttgctaaaagagagtacgtactctgcggaggaaaaagaaacaaaaataattcatcatagttgttgtctactttcgcttaattacttagagaaagggtagaggatggatcgggtgcaatgtgaagccataccatctaaaacaacaccttagtatctattgacaaaatatagtgatgacaagaaacaactaattccttttgttccagaaaatggtattgacacgcataagtataaaacctatctgtataatgttcgtgtacactccaacacctacctatgtatgaacatctcaactgactaaaccagcgtgaattcatcggttcaaaataaatcaggggcgctctgaggtatctgcaacatcattgtttcaaatttgtgaggttattcatgcctaattttatagctttgtgcatgatttggttacacaaactggc

SEQ ID NO: 54243 - DNA, 550 bp, Zea Mays
gtgacatttgatgagtctaatggctcgcaagggcatgtttctaatgacattgcaggaaatgaagaaccaccttgtgaggccataaagaagcttgcaataggtgaagtaagacctcaagaaaaggatgatgaggaaggaaccttgtggatgaccaatgaggtttttgatgtgggcgcaagggtggtgggtgataaatccattactcaagcaaacccatcaacctcaagtcatccaaggcttgaagaaggtcatcaaccccaaaagatgccaaccctggtggaaggtgaacatgaaagtgttgatgatgaagtgcctcttgatcaagtggatgatgaagaggaacaaattcaaagacaaccatcagtgccccatcctcgagtccaccataccatccaaagggatcatccagtggacaacatcctgggtagcatcaggagaggggtaacaactcgatctcgttcagcaaatttttgtgaattttactcgtttgtctcctctcttgagacacttaaggttgaagaagcgccgggtgatccagattggataattg

SEQ ID NO: 54244 - DNA, 419 bp, Zea Mays
cttggatgtggctgaggcggaggcttctctgcgtgttgcggatgctgaagttttgcctggtccgagtgttgggcgtaggcggcgaagggtggtggcgaagcgtagagtgagcgggtttgatggtggtcggctttgtgtgggcggggctggtaggcaggaattgttgtcctcgccggttggggcgagtatgggtgagggggagttgcaaaggctttttgagggtgaggagttgaggataatgctatttaactatagggaaatggggatcattccgaaggttgagcctatgtaaggtgtgatgccctcactgtacgtgtgtaactgtggtttggatgataaggttgactgccttcgcgcagctggatgtgttcgtaagacgttgcgcacctggtctggtacattgttgtgtcggtccggct

SEQ ID NO: 54245 - DNA, 1219 bp, Zea Mays
gataagtgttctcgcaaggaagaccgccctctaaggtcgacgaggcacgagaaaccaaccaggttgtctcttgcccggcagaatcatgcgggagaagaccatcatctgggacctctgaatagatggtgggaatgtcagcttcacgaggctctaatagaatgtcttcaaggatgacctcttccagcgcttagtcaaaataggatattgacaacccttgaaggatgacaagtgctcacaagtcttgcgcaggaatgtcgctgcccctgtggtgacgactattcttgcggattagtggaatttcttcttcctcctcttcttcctcatcaatcacaccgccagcagcctgagcatcatcactacctccaacattgtcctcggggatggtgcacgccaggcatgacaactgccggagtcgccttttcttcttcttctcctcgataggtgcagctggatggttcacttggcatgaacgcttccggtgggcaccttcaggtttctggatttcctcatcttcgccaaactcttgcccagtcgcaattgtcatcggcttagtgcgggctaagtcaaaagattctccgaccagcaggctaagaatggcatccatttcagcatcatcggtactggatggcatctcgaaatgagtttgtttctcaacctcgggaagattccgaaggggagcaatcaaggcctcaatgtcctctgcggagggccgcactctatggcccgagctaccatcttgagcaggaggattggagacaaagtcagagaagggactatgcggaggcaaattccatgcagagtaagataagggagcaccagcattcgaaaccctgcccctcagtgtcatgtcaagtcggcttaataggtcttcattgggaatttgcctgttagtgactcaggtagaatcattgatgctagtgtacaagtaagcagggtaaactcaatccttcaaaggttgaatgttcttgaagacaaagtcggaaatcacgacctcagcagtcagacctctgtccttcagtgagcaaatttaagcaagcaacaccttggcttcatctgcctctgaataagtagggtactccacctagttgggcgtgcgaacgtcgggctgcctttttgatcgaggggggagggatttgttgttattttccatggtgaaccactcgagacgccatcccttgatgctatccttgatgggaatgtcaaggtattccactttcct

SEQ ID NO: 54246 - DNA, 422 bp, Zea Mays
tggaagccctgggcttccattagtatgggaagccccaatcaggtatatccacgcgcgcccgatcgtgtactggttctggctcgggcggattccagagtaaaacgtgagataaaacagcgtaaatgagtacgaaatttagcgcaaatcctatatctgttttgtaacagcaaacggggcccaaaattacggcatgaaaatcgcgtgcaaccgatcgtgcgtgggttctggctcgggtggattccagcgtaaaacttgagctaaaacagcgtaaatgagtacaaaatttagcgtaaatgctatatctgttttgtaatggcaaacggggcccaaaattacggcgtgaaaatcgcgtgcagccgatcgtgcgcgggttctggctcgggcggattccagcgtaaaatatgatctaaaacagcgtaaat

SEQ ID NO: 54247 - DNA, 1033 bp, Zea Mays
gagactcttgtccataacaccaacacataactgcagcctgtctaagtgcagacttagcaaaacacacaaaagtgcatctagttgtaggccacacaaaagtgcattcagttgtaggccacacaaaacaatacaacacaaaagtgcagacttaacaaaatgcatccactacagattcaagtccgagagttttctttttgccctggtgtatgaggcagggctttgcctttgaggtgtcttgcttctagtagacattgctggactatcaggtagtagtggaatttgtctctttttatttccttttgccttcgccttctccttctcttgtgccttctcttttgttttcaccttctttgctgtcggtttggaggtggtggtgtggattcagctaaggacaacaagggatactcaatggcaagttggtcaggttgatttgagccatgtccagacctacatatcagaagtgtatctgagaaaaagagtactgaatagtcaaaatatcatgttactgttcaaattgaattattttacctatgagagtttgaaccaaagcttcctgaggcaccttggctgcaatagagatacaaaattacaaagataggaaatattttataaaaaatcagaatgcacatatggacatatggatacatgttttaaatgatttgtcgaagtatgcttacctaggaggaaaacgcattgtcttgggtgttgaggcagcgatcacgatggcactctcacatgatggctcaacattctttttccttttctttggaggacccctgcaaggcatgaacaacaatgataacatgtataatggaccccttaatataatcataaaatcagaaaagtgaaattatataagacaacatagtgcttacttcacagctaccatagcagctatgtcttcagggttaccattcttacagttgtaccaacggtgaccatatgacttgcaaatggggcactggtgtgaccccttcttttttgtgctactgcctgcctcataacatcctttgaacctctcattatgtcttct

SEQ ID NO: 54248 - DNA, 680 bp, Zea Mays
gttttggggtaaaagggaagcttgcacctcggtacattggtccttttcttgtgcttgagcaatgtggaccagtggcgtaccgacttcagctacccgaaaccttgtctgctgtacataatgtgttccacgtgtctcaattaaagaagtgtcttcgggttcctgatcgaaccattgaagtaacagatgtttccttagagccagacttgacatattcaaaacaccctattcgagccttggatcaaaaggacagaattacccgaagaagaactctcaagttttacaagatacagtggaaccagcgttcagaagatgaggctacatgggaaactcgagactttttagaaaagaatttcccaggctttctagcctcatgtaaattgtgatatgtatataattgttgtaataaaggagtgagccccagaccacacctgccttgtactagaaataaggaaataaaagagtgaagcatttccttttccattacctaccctaggacttttaatctcgggacaagattcttttatggggggaaggatgtaacacccctagtgttactgttactaaaacttgagcataacatcatcagcattagcatttcatgtgtttgacccacctagagtgcattcactaggcaaaaacttcaaacaagttgtattgatatgaccttttgcaaataaaac

SEQ ID NO: 54249 - DNA, 513 bp, Zea Mays
atttgattaaagagttttggggtttgatgaccaacataaccatttaaactaatacaatttgctagtggatgtagttatagttcataggatgcggcatggacttagatgaaggcaaactggtgattgagaagatcaagacctcaagcaagacatgaaaaaactcattggaaacctagaaactttatacaagagtccaaggcacaagatagaaaaatcccggacaaagagatgcgaagaaacaaataaaacaagttggccagccatggaggccaacccacgttgtttttgggaagtcaactatcagacaagggcaaattgaagcgatgaaaggcaaatattttcatgatgtgtccatagtgagggctgggggggaaacaccgttccccttcctgaaggtgatgaaatggtggtcatcaggagcttcctgaaggttgggcttcgctttctgctccacaaaatgctagtcgaagttttgagacatttgagatataccttcatcagcttacccccgaa

SEQ ID NO: 54250 - DNA, 1765 bp, Zea Mays
tttggacatgagctctatataccacagttggatttgaggttaaagagtagcttggctttaggaggatggagaagttgtttttcgatatgtgcattagaagtggtgaagcacttagggtggttgagtatctctaaaccctaaactagggccccaaaagtggatttggagatttagccatactttttgaaaaagtgcatatatcaaagtggtagggtttggagagcctaacatttttcccatttggagatttccatatgttgtggagcaaattggagaaaagggtaaaaggttataggtgctcaaatattgaaaccctaagtaagaaaaaaatgatattgagccatgtttggaccctggtaactcttaatccgtaagtgctttgcagtgaatcactttagcaaagttgtagggctgctatagtagtgcaagtttgtgtaagggacctagccctaaaaccatgtggaacctagtgtaaaatgtccccaaagtgtggctgtcagactgagaatagttctgaaactgaagttcagtgacattttctcaactttggaatccaattgtggctgatccagtgggggtaaggtttgggtcactatgacaaagtggaagcctgtatatcaaagaacaactttgcaaaagggaggtaggtatgttactgcttggaacaggaagtaatagtgacctaaacttgctctgtcagacggtttttgggtgggattcagaatgaacagtaaactgcataagatctcggttcacggaaccttgacgtcggtgatctctacgccggtgatctcctcatcgtgattcacaccggagttaagatacgcgcctggataagagtggatagctgtccacggtgaaaatatcaggggagggggatggatgtggtctctggcgcgagctcatccatttcagccagttgctctcgtggtcggccgggacgccatcactgaagtttgatgttcctcgcggccacgccacgtaacagagggtgttaccacgtagctgggagtcttggcgtgaagccagttactacctgaagccattgctccactacgcgccacggtgaacacgctccagtgaagatcttttctgtcaccaccgtgagcacttccgtcccaaattcgcgaagcaagaaatccatccctttaaattgaggacactccctgctttgcctctctgttacgcgcacaaccacccctcactgccctagttcattcaccacagcccccagtcaccggtttttcccgagaaaggtcggtagcgccgtcgtgagaagttccaccgtggtcagtcctgtctgaggtaatcccagcccaactgctatctgttttagtttcctttaggtgtcgtggtgctcactggcttgggaatttgaactctactgcagcagagcgtcgagaacatcgcctcaccgttgcagagcaccgccgcagaccgcctacgcgtcgacccgctgctctgtctgacccccctcgtcctcttgccctttgttacggtgtcctggtgagtcactgatgctcgccatgccttcaatttgaactctaccgtgttgtcgtgttcggaacaggctcgtcggaatcttggttccgtcattaccgagctcagaggggtttctggtgtgtgatcgtttaagcagtacatggggtagcgtcgtcttggctcagcaatggtgggatgacgctcggttttgctagtcttcgccaccgtcggtgagtccaagagaggggcagggtggccggcggccgaccgcgccatgtcgggg

SEQ ID NO: 54251 - DNA, 1243 bp, Zea Mays
gaaaaataaggaatctaggaaaattggtttgatatttttaggatttttctaccattccctacatatttctaaagttggacagaaaaagaaaagggaaaacctgaacagtattgggcttaatctgatcgcaacggcccaagcccaggcggaaacgcgcgcgcccacgcccgcggtggagattttgcagaaagggcctcagcttattgatcaatccgaagtgggttcaattactattgcactgagtcgctgacggtttgcagaaaagcccttcacgttctattccttcaccgtgccaggtccacgacggtgtcgagcacgaccgagctccgacgagctcttggaccggccaaacggggcagagactaacgctctactttgctgaaaccgaattcacgccctaactaacgtttcccctgacctaatttcatcaatggctacatggtttgttttggccacggtgatcgagaaccatgcggacgaaggaacgtgttcccggtgctgggtgaaggtagtgttcaattgaaagggtcgaagagcttgaggagggtctagggacactagaacaggcaacggagggtcttgaactaacctgagttgagctggccgcggttgagctgttcttcgcggtggcggagaccagtttgggggaaatttgaaattccagagctcaggtgaatgatcggggctaattcttggtgattggatacttaactaccttacggagctcgtggcggggtcaatttatactacgggagggcggcggccgggaatttgatcggtgacgtgcggcggtcagagaaagggaaaatttactggcgcaatggcttggtgtccagcgccgtggcaattgctctggcgatcaacgaggagctagagtgagtcacggtgatgcggtagacaggttagagacacgcggcggacaacggcgacggcttaacggcggtgagaatccttacccgagggcggtgagcaaggggagaggtaccgcggctagccggagtggtttccagctcaccggcggcgatgatcttttaccccgtgatgctatccatcagctccaggcacaaatctagtcgccggtgacgcgaatcgcggcgaaggatcggtcgtcggcggtgagggctccctgcgctggcgtcctgatcctcacaaagcactctaccatggcgattttcagtcagatgaacctgacagccaatgttggggctaaattttctctcaaatttatataccaacatgtcca

SEQ ID NO: 54252 - DNA, 702 bp, Zea Mays
tctaatgaagtatggtttgattttgtctctgtgttctcttctttttagtgattttttcttcaaatgtttgtttgtgtctgtgtggccactataatgtaggtcttaaatgccaccaaggaatcagcaccgatgggcaacacttatgaggaaaagaaagaagataacgcgaagaaaaggaaggagattgcacctagatgagaagtatggtctcactttgtcaagatttgtgtttatggacacttgaagaaagggaaatgcaagtattgcagccgtgagatcaagtgtgacccaaatttgaatggtacatctgccctacgtgctcattttaatatttgcaagtgcaatcctcataaaaatagagacccaaatcaaagcaatttacaattatctcatggtgaaaacgttgcaatctataagtttgatcataaagcaattaggaaagcattttctgaaatggtcattgaagatgagcaaccatttgcatgtgctgaaaaggcaggctttagaaagttcattgttacaacatttgtgttttgctgtactgtgctcttaaatgaacagatcatgatatttgtatttaattgtattgtgttgttagaggcttagagcagttttattcgtatttggttttttcggttaaaccgaaccgaaatattctgttaactgaagattcggttttcgattttccgcagaaagtttcgg

SEQ ID NO: 54253 - DNA, 558 bp, Zea Mays
aaaaaaaaatcaccctcttctttggtcacaaatatgtccctatatatatatcatttttaaactaggatcggaatgcagtctatatactactgtaatctggagtatcatttaccacacaatgacacaagaaataagtaaatttattcaaaacaacacaagtgtgtggttcaacatcaaacaaaggggagaaagacgagagactagtacgtgtgctaagtagcgtgcgtagcacatcgaccaactaacacgacaagcaggccaagcaattcgtgttacattgcttcgtctacaatcatccaagcaagtcacctctcccatagtagtagctagtcgcaccatctacatccatagtatttatccaaacgaggggatgcatatcatccaccaatccactcacttaccgtctgattggttggccatcacatcctggaccaccgcgtgtgttgactctacctgagattttatttgattgcttgcacttgggatatgcagcctggctgagcggatgcaaaaacacattttgagaccatttgttgtatccgttgatacgcacagaac

SEQ ID NO: 54254 - DNA, 326 bp, Zea Mays
gcgtaataccctactccactgtgtgttatattgcttgagagcttgagttgtcttggatgacttgggtctaagcctcaagcttgagcttgtgttgtaatgtcgcatgcctccccttttatagctaaagggggacatgtacaagagtgttgagccccaacatgtgggcccaggaacacggcggatgtagcttctaatacttgctgctggagcgatcttcttgcgccctgacacccaagatctgtatagccttcgcgtgcagggggaagcttctcgtataagggatgagtacagtgcaccgcgcagcacgggcgcactgtttcggcaac

SEQ ID NO: 54255 - DNA, 337 bp, Zea Mays
cagccggaagcgagcggagaccgaggggagagggggtgaagaagcaacgagacgcagcgagcaagcgaaagcataccagagcaccaagcatagggacgcgcgcgcttctccagttctccctccctgccctgcaaggcggctgcaactgttccagctagcccctctcccagcctctgcgtcgtagacgtggtagtagcagccgcagcagcagaagcggcggcgagcatgctcttggcacccctccccggcgccgggcggatctgccggagggcggcggccggggcgcttggagcgcggcgctaaccgcgttcgaaggacctcgggatctgacgccgcg

SEQ ID NO: 54256 - DNA, 687 bp, Zea Mays
cgatgtcccagcaggagcagcatcaaaagagtcctcagccagcaaatcaagcatagcacttatctccgcatcgctaggattcaggggcacctcaaagtggacctgccgttcatcatcagggatctccccgagcgaggcaaccaaggcactaacctcttcagcagagggtcgcactctaagacgcaaactgccatcagtgacaggtggattcgacacaaaagggtgaaggctttgggaggaggcaggttccaggccgagtatgccactggggcaccaacattagacaccttgcctctaaggatcatctcaagtcggctcaccaagtctgcagagggaattcttctgttggtaacccgagttgagtcggctaggcctcgatacagataagccggatgcgccctgtctttgagcggttgaatattcttgaagacaaaatcagcaacaacagcttcagcagtcagacccctctccttcaacaatccaacttcagccagcaaagcacctgcctcagctacctcctgatctgtgggggactcagtccagctagaggtgcgaacatccggctgtcttcccgaccgaggggggagagagtttccataattctcaactatgaaccactccaagcgccaccccttgatactgtctttgagagggatctcgagatacccagtcttcctcccacggcgc

SEQ ID NO: 54257 - DNA, 728 bp, Zea Mays
gggagttgctggtgaagcgccgttgctaatcgaggggagattatcagagcggcaaccggaatttgtgctcggacaccaagttccgcggcactccgtggacaggatctccacgacttcaatcagcggtgagtaccttccgtagtaacaccccgccattaccgttgtctgttgctactgttgaatcggagtttagttgcgaggatcagagattcggtagttccggccatggcgccgccgtgctcagacttggcagaagagagggacggatttcgggccgttgatcggacaaggaacagtcccaattaaatcgcgcgtaccgattggggggaaaggcggtggatcgtccgatcgaaatctagcggcttggaatagatcgcgtggcattaggaaatcaccgtagatcttgattcgacggtcttgatcaactcgcacgtaacgattcgctagtgcgaaatctggccgtagatcagggatcgtgcggtccacgtcccgtaccggttcagtctcgggtcaaaacaatcctagccgttgaactctgatccgaggctctgaattacgctccgattcacttaagtctgaatctaatccttgccagtcgtttcagatcggacgaccgagatctgacgataccctttcgccatggttaaactgcaaaagagaccctctatttttgtaaaatcaacccgccgtccacatccgctattcactgagtcttaggaagtttacac

SEQ ID NO: 54258 - DNA, 479 bp, Zea Mays
gtgaggttaatccaaattttacaatgtatagtctatttctggttcttggagcagctatcagaagtctacattcttgatcataaatacacagacttccattcctcccctcatatttgaaccctttttcctctaactgacccaagctaacaatattgcttttcagttcaggaatgtagtaaacatctgtaagtaccttatgacctttacagcgatcctgaatgacaactgagcccataccttgaattttgacgcaagaaccatcaccaaaccgcactgtgcctcgaacactcggatcaagctgtgtcagcattgatcgagtaccagtcatgtgattgctagctccggagtctagtacccacatcccgtcaggtaccaactctggtgtagtcttctcagtcaggtgaacatgttggcatggtccgtgcacgacgtcgcacgttgccagcatgagagcgccattgtgttcaactccgccaacg

SEQ ID NO: 54259 - DNA, 667 bp, Zea Mays
gacctttagcttgtgcttaaccagctccctaggaaccccatacatgtctattggtttccttgcaaacatgtctcagctatcctataagaaccgaatgagtgtgtcttcttatttggcagagaggatggaattgatgatcgccatcttggatgtgttggggaggccaaggcctatcctcttggtttctttagttggctagattgccatagacaaagttgctttagtcaccaggatcggtagatcgtccttcgttagcgtggttgtgtccacagcaagctgcttttgcgcagcagaggtgtccatagtaacgaccatttggattgcttcctgatggcactccatagagctctagaaattttcccctcaccatgcggatgccctgtggccctggcatcttgaagaccaagtatggacaatgtaggatggccatgaatttggctagcctaggtcgtccaacgctggcgttgtaagtgtagttgaagttggccaccttgaatcgaagaactcagtatgaacatggttaggtgtgccgaaggtgaccagtaggtagatgtacatgtgcccaagcaaatattccccctaacccagtataatgccgaagaaggggctattcaactccttgagatctacaatggagtcccaagcacccgcacggccctcgggaagg

SEQ ID NO: 54260 - DNA, 402 bp, Zea Mays
atcaatagggaagttatcaactcataatgagttgatttgtaagtataaaaacttcccttaatgaagaacagtttcgtcccctctgtgcagatcatcttgttgttccgtttgtggcgtaacttagagtttttgagtccttcccccgcctgccttgtttatgaagttgactcctttgggatagtgatttaaataacttaggcatcatatcgccgcttcaggggtgatggccgagttattattgtcgatatttatgtatttgacatagagtccgagtgatgacgaaatcatgtcagcgtcggaataactgttgaccacgtcggcgctcttagatgtgacagccgagtgacttgtagcgtcgtcggcgttttagaagcaactgccgagtgactaaggatatcgttg

SEQ ID NO: 54261 - DNA, 545 bp, Zea Mays
atcggacgccttcagacggacacgaacccacaaggacaaacaggaggaggaggagcgccaacgagcaccaagagctagagccccgccaagccaagacttagctaggactccatctagcatcttctaagctccaattccaccccgataaagagacttgggagcctctcctcccactctcgaccgcttgtaacccctacaagagtttgatcatcaatggttccggtagagcaagccaccgatgacttgaattagggacgttctgctcgaaccagtattaatcttatgccctatatgcacaccttccagagcccgaaacacgcacaataaattttcttgttggagcgaggtacgaaccactaacaccatcattgaagaaaagatgaacaccgtacaataaacctgtatgccagaattcacgagtctacgtaagagactatcatatgacaatgagatgtgagcggtatacacacaaacatgtccaaccccttattatgaagtaatatgatatgttcatgcatctgtgttatggccttctgaggtttggt

SEQ ID NO: 54262 - DNA, 1167 bp, Zea Mays
cttaccgcttgtatagagccaaattgtactagtgttgcaacccttactgtataaatatataatactaatcaattgattttttgtctagaccgttttgaatatcgaggagttcgaacagcacaatttaaatccccagcccttctcaacatcacttcttaaagaacaacttgaaccgacgcttcctccagatgaagttctgaaccaaattaaattggtgagccccaatcagttttatttgtaataatgttataatgttcttttggtcattagttttatgttatcttatctttaattttccatacgcctattattgttcattcataaacttatacatgtatcttaacagatcctggttcctatgctacgccgtagtcactggaccctttatgcaatcaactttgaacgacgtcgaatagacatcttagattcaaatccttatgaacgacgtcgaatggaccctttatggcactacctgaaaacaaatccacaatgatcaaatgttgataaatggaacgaagataccttggtccagattaataatgagaagacttagcattgcgttacatgaagctcgacctgattcaactgtaccaaagtttggcaactacaagattgggcttcttctcaattgtccaaccatgttaccagggtcaaatgattgtgttttttttgtcgcaaacttcctccgatactacgattttgatgatggcgacttatcagaattttatactccggtatgttactaaattagtgttttgatcatgcatatattactccttcatatttaatcttagcattaattcgatattatgactatttcaggatgaaccattagaccaacgtgcctttgttctgcattacctgacctttcatcgcaacaacagggttgccccccttcctgcagaactgctgcctttcaagtatgctccaaggagacggcgttgtttgaaagccaagacttagatatcatagctgaacatgattccctatgggatccacaaaactgtttatgttacttattaagtcacttatgtcaggcgttgctcatgtgtatgatactccatatgccacttatgttcgatgtgtccagtgtctatgctacttcgtatcagtttttatttgaagtgtgtcaaacataagtgttaccagaatgtctagttatgttat

SEQ ID NO: 54263 - DNA, 964 bp, Zea Mays
tccagaagcgattaccttcaattctgacatcacgtactcggagggtaggattctgaaagcgcatgtcttgtagaagagcagatcctccgctagcattgaaatcaataacttcttcgtttggggaacggtgagcctaagctttgtgcagcaccaatccttggatgatgggggaatgagcaggaggaaggtccacaacgtcatctttgcctccatcatcatcacttgtggactcccaggcctgagggtttgttgcaggacgagaacgactagaagggtttcgagtcgttcgtccgcgagtaccctgagagctagaggcctcaccacccatcataacattgcctgatccttgcccacgcttggatcgagaccgagggggagtctcttcctaaatttctggcgaactatcatcggaatcagattcaatgacagatggatttcgacgatgaaccatccttaagatcaaacaaaatacatatggtgagagtgatattgatgttcaaggagtttaacgaacatgtttgaggaaagccaagtataatattgggcatgcacttcaactgttcatatgagcggtctagctacaatgaacaatatcaacctacttaactcaaaacaatgttcgagacaatgagaacagattaagtgtgccatacacctaaactacacaatctccttgaagatacacttaagataatcaagaaccgtatagatcaagtcaaaaatagggaagatgtaacaatacctcgatttgagaaaccgtccacgaaaatcccgaagagaagtggagagatggtggaggagcctgacgggatcgaatccacaacaatttccacgaagttttggatagatttggtgggttttggagggatttgagtggaggatgtgagagagagggagagagaaatgagggcgtcgacgactggaagaaatgagagagagatagaaagtggagaggaggggagag

SEQ ID NO: 54264 - DNA, 426 bp, Zea Mays
gtgctttactagaagggagatttgccaccacagaggtgatcccatcctcggtgaaaggggactccagattagttagatctatggaagcatccatagggttctgcaaatcgaagatcgtgttgttatgctccgtcgtaccgagtctatctttgtaagctttatacaacattgttgcttcattgtcatgatcagtaaccacttgacccaaaccatcctagagagttgcaatagtgttatacttgagcttaattgtggcattggtgtggaagaattttgtgtcgacatcaccacaagttgtcaacttaatgttcacccattgtttccaatatgttttctgttgttcaagcatgcttaagttttttgataagatatctcgaaagttccattattgcatggtatattccctagcttcctcaatgagatcca

SEQ ID NO: 54265 - DNA, 669 bp, Zea Mays
gtcctggactgccttgcgggcgtacggactcgcagatcccgcgtccaccgtatggactaaatcatcggtcacctcctctccacgccatgggcgcgtctggcagaaactgaaatccgccattcttatccggtttgttgcgattcgatgcaatctggggagttcgccgtaaatagatgcccgaagtttgctcggtatttcccattgcctcggtcatcttccatctcgcctacggagcttcaccacacgtgtaatctcggctgctattcttgtcatcgaccagatcagaaatccgatcaaaacaaactcgcgaagttgttgggattcggcatccgcggcgtataaaagtgccttggacttctccacctaggccatagctccagtaggatctccaccaaccctctgtgtgcctcggccgtgcttgcagactagtggacggatcaccagcgtgggcgctccgccgtaaatcatcctgctcgcgaggacagccttatcggcctcctcatctccagtaaagaaccacacacgattcgccctaacctcctctgcgtgttgagccatttagtttatgggttggatcacctgggcgtggcttggaatttcggccatggcgcctccatggcgggcgggtcgccgtcgtcaagacctggtgtctagaggagggagacagta

SEQ ID NO: 54266 - DNA, 564 bp, Zea Mays
cggcccaatatcagcaaaccttagatgctaccatgataaagttgtgcgacaccaggcattcacggtaggagacctggtgcttcatcgcatatagtcaagagaacgacggcacaaactatcaccaccatgggaaggaccctgcatagttgcagaagtaactcgacccagatcatattggttaacttagatggatgagactccggaagggaactcatggaatgtcgagcacctcaggaagttctatgcatagtagcgtcataaactctagatggtagactataatttgtaatttggttacctcattaccaataaagcttcttcattcatccacatacagacaaactctcaaggagcaatcggcttaagtcgaaaacaccttaagtctacactacatgatcacgcttacaaaacaaagggtgcctactataccctactaacagagcaatcgacttaagtcagaaacgcctaaagtcggtgctacatgctcacgcttacaaaactaagggtgcctactgcctactataccctactaacggagcaatcggcttaagttggaaacacctt

SEQ ID NO: 54267 - DNA, 763 bp, Zea Mays
caactcctcaacatctcagtcttcggcacatattttcccaacaattttaatggcctctgactccacctcccacacaaaggcggccgcatcctgcccccgcaattcaatagcaaagcctgggctccgcaccatctgatcccctaaggtcggctttcgacgaggtctaacttcgcccacatcccacccgtgcgccagcgaccacattccacaaggaacaaactcttccactaaatcccagtcgttgcttagccaagctgcgtagcaaagggcctcctcatttcgatcccccttcttcactttaaagtgtggaaagatcacatagcaatgcgagcacaaaatggtcgggggcaaggcaggcagtccttcgacatccccgggcgccacataaaaccaaaagtcccaccagttgccccacttattcttggcacaaggaataatctcaatcacttcagccgaagtattcccagtcctcggcgtgaacgtgcacgacccaaattgagcaatcaaaccacctatcttccttttctgccagtgcaggcaataattcttggcgaagacctcaacagacggttctccaccatatgatgatatagcccagacatactcctctagtgcaaccatagcattcggtttcaattgatgaatttgaatttcaaagttctgcagaacttccactacgaagcgatgcgccggtaagcgaaagccagcaacgaaaaactcctcgaacacaaccaacacccttctggctctgggacatcttcag

SEQ ID NO: 54268 - DNA, 587 bp, Zea Mays
gaggatttcaccaactagtgaaatgatgttgtgtgccctgcccagatgggtgatgcaacgtgacacaagtcgtttatcctggttcaggctagagaaagccctacttctaacagagggggatgtaacttatattacttgcaactaagtgcttgtagtatggagtacaagctattcgggagagtgaaggatcccaagtcactagagttgattgagacaagtgccaatatcatagtggagggggaaatcgtgaagtgttcgccctccctgcctgaagccatgtacgtacctatttattgcctctaggagggcttccaggagcgttggggtttgtcgtgtacggtgaggaggcgaaaccgagcccctgtagccagtatggcctgtggtatggtccttgtacttgctgtcgacttgtgccgagaggggatgtctggttcctgtatttgcatctttgactgtgcagagggccaaggcaagagctgagggctcggtcacgtacccgagccagtctaatgggaaagctgtccaaatcgcagtggttggagcagtggtaagtatggcaaaaagctcctggtaatatgttagctccg

SEQ ID NO: 54269 - DNA, 466 bp, Zea Mays
tgagggctcggtcacgtacccaagccctcctagcgtggggttgcccataccgtattggttgacacagtgcccatcatggaaaaagcttcctgtgggacgtgtcaactccactgtttctgatgacattgggaacgtcctctgtcacagatatcgagggaagaaccgagctcgggtgaggcgaaggtccatccaaggttgcgatcgagccttgtcttgagatctgatgacgcgtgccacaatcgatggagtagcctttcatgggattcgcggggaagaaggtagcccaggccgagctcgggcgagtcggagttagtcccgaggttgagttctgcgttgggcgaggcagaacttgcgcccgaggtctggtttgcatcctgttgtattacgcgtcccgtcaggggctgtcagacagcgtgcacatgcataatgatgttggtgaatcttttgacaagaacgtggtcctgtt

SEQ ID NO: 54270 - DNA, 586 bp, Zea Mays
gtggtccggcaacctacgggtccggttctagagaacgggcgcttatttcctggagtggtccggagctgtgtagccgcttagcctggtcccgtaccctaagcctacacctccaccactctgcaacgggtgccctattatttggagttgttaccttgtaggtccggacatcaggcttggcttcccagagtcaatcctgtaggtcctgttgcatgaatcaaaggatgactcataccagacgatgggttatatgggtgtgctactaacacttcctagccgaagttgtgtacaggtctaggtcccagttgaggctacctcctgggagccgggtcaccaactctttcttaggtgtactggtatccagcctcaacacgtcgagcctacatcccagaggggccaagtactgtggaggagttggtaacgccacacacagcaaagacaaataacatacagataagtgctaatactactcgataaaaagtactaaaaagtatcttacaaagaccaaaaaatattacaagctgcttcccagcgggacctttgccttctctctgcagattcggctactcgtcatcagtgggatcccgct

SEQ ID NO: 54271 - DNA, 486 bp, Zea Mays
cagatatcccccgggtccactagaaggcgaaagacccttgcatgggaccacagaccagttacctcgcaaggccatctcgtcgtgggccgggcaaagattacaagtggaatgggctgacccaagaaggcaatgggctcatgcccggattgtccatcgaatcgtgcacaatctcaagaaatcgtccatttccccatgccccgcgccctcgagtgtcggggtagttaggggtagagtcggcgggttttctagagatcggttaagttagttcgctattagctaggagatatgttgaaaagaacgtgatcttcatgtacgtagggggtatcccacggtcgtgtatataagcctagggggaaccccatcattttcatctcattagcctttctccattcaggagacgccacttgtaacacaccacacatacagacccatcccaagaagtagggtattacgcctctcaaagcgacccgaacctgcagaatatca

SEQ ID NO: 54272 - DNA, 635 bp, Zea Mays
gacgtgaagccttaggctaatagaaggttagctaggtggctaagtaactaggccttacaggccacttttacaggatgggagtttctccctattccttctatcttgttgtgaggccgttcaggacgagcacgcatgcattcataattaagcaaatgaataactgagtaaaagacttaaaaacaagataacaaccaactaggtccctagtgcctttttacttaactaaaggagggctgagtgttattttccttgttctttttacattcttttccttttacttacgcttaaccgtacacagatgacttcccacggatcctccgatgacggaaatgccctgacccacactgacggacttgcacgagagggcttccccgcattctgtgggaagtgcttcagggagctggatacacgacaccccctcagtacgcggtgcagcagttcgagaagcaccgagtgccccgctgtagggtgaggatgactctggagcctcatcccctgcagccaggctggcgctccttggattcagagtctttcgggtaccgggcagaggacacgatcgaggcaatcgcgctgcacgggttgactactttctgcggatttcatcccttagagctggctacccaccccattggctt

SEQ ID NO: 54273 - DNA, 513 bp, Zea Mays
aaggcatgcatatgtggcgcggtaaaactgcatacatatatatactttgaggtttgaattagtgcataaataaatacagtatgtaaaggaagcttcctttctgtctgctaccatgtgcacctagctagctagtacgtgtgctgttgtcatcctttctgacgactaaagataatgaaccctcagagcctgttggatgattgagctgcgacgaagaggagaaatagagagtgcaaatttcacttcctgctcagctgcatatatatatacacatctcaatccaaacagttgcatgcatgaatcaggcagctaaactcgtccgtcccgatcaaataaaccaaccagccagccagccagccagccagccaatgcaaatacttgtggatatatatgtgtttgtacaaatcaacattttcagagccagatgacaatatatatactactggaggggacagtacttgcgttcaatatcatacggttagttcctctcctcctccctattatattaatacttat

SEQ ID NO: 54274 - DNA, 821 bp, Zea Mays
ggaagcccgtgctcaggtaaatcatcttcatgttggagcaatctagagtagaagccagggtagggaaaggtttcatcctaagagttgaggtcaatattatgcatgaccctttcagttgtggatgaaccgtgggcatccgaggaaccaaagaggggttgttcgtcgcctatttcattgtttgcagtaaacaaaccatgagagaagaaatcacagaggttgtcccatggccttccatcagtgcgtaggttagggaatacgaaggggaaggtgcagtggtgggggaagggtaaggagatcttgggcgacggtgttcgacggagtagaactagggaaggggaggcgaaggagaccggggaaggggcagcggtgttcgacggagaagactgagagaatgggcggcgctgttggacggaggagaccgacggaagaggcggcgatggtccacgaccctagacgtcgaacctacacgacgttggacgagttgggtgacgaaacaaatgggaacgagtataggggaaggagtggaggtggtacacgaacctcgacggaggacaagcgaggaaactgtccaccagcgacaaatcagatgagacggcggcgtgagaactaagcactcggtagggaggcggtggcatgagaactgctagtcgggtatgcagctagaagaagggtaaaaggtggaaaaatccacttttagtcccttttagttaccctttgtgacaagaagactaaactttagtcaccccttttagtcccttttagtcaccctgtttgtttgtttatggactaaaagtgactaaagtttagtagtcacccgtaac

SEQ ID NO: 54275 - DNA, 506 bp, Zea Mays
aaacgtttcatgcgaagtacctcaaaggcctcgccgaccgtccgaattctgctgctgctggtgctcgactagtggtcgacaagtcctccaaatatgcacatttcataccactagctatcacacctttttcactgctatgcaagtggccatgcactacatggatcctgtctttaaactacatggtttttcagtagccaattatttcagacagggactgttcaccagtgccatttggcagacactttttaaactcaatggcatagatctaagactgagacctacttatcatccttagtctgatagtcaaacagaaaggatgaaccaatgctgggaaacataccttagttgttttgtgcattcttgtctcagaaatgtgttgggcgccaaattaatcggacggacggtccgcactggtggcgtggacggttcgcgcgcacacaggatcatttagggttccgagttttttgcgggattgattagctagatccacggaattagctcaggag

SEQ ID NO: 54276 - DNA, 278 bp, Zea Mays
gaaaaatgtgtgactcggcgatggcggtccgactcaacaggagtgatccgattaagcgagagagcgacatagcaatcacatgacgcagccaagttcgaacgacacaaatattgcgtcgtgttgccagagcgcagtcaatattcagctgatgccataactcagccgataataacatagtctgatcagtgtgtccgagtacccactataatatttaatcgctcggcgtgaatcagaaactcaacgcaccacaaatatttagagcgatttaaaaatacgca

SEQ ID NO: 54277 - DNA, 449 bp, Zea Mays
gaccgccgccgattccactgaaggtggcccggtccgattgaagtataccttcggatttagggagaagtttgatgagctaaacaatgactagctaaagtgtatcgaagctaccagtgatgagctacttggggcatactccaaggccgaagacaatgccttgtccgcagctttcgggggtcgaagcaagaaaagattaaacagggtattcgatgctattggcttcgtataccctgattatcgatactcgctgcgagggcaagggaaaaagagaaaagttgtcgcttcagaacctgccacctcggtcaccccagctgagccgaagagcaaaaaggtgaaggttctgacacaccggccgcgttacattgaaccggccgtagtatctgaatttggtgcgggaacctcttcagctgccgaagcagagaaagctgcttcgattgtgcagagtacca

SEQ ID NO: 54278 - DNA, 619 bp, Zea Mays
taagaatcggtctagacctccatatatatatatagggtttagggtttagggtgtggttatttggagcccaaggcttcaaatagttataggataggaagccctagtcggctccctcccgcacgacccacgtcggtgcgccccccaccacgtgattttagggcgcttgattttagggatttgtttttatggcagttatggacatgatgccagatttgagcgtaaaaatcttcacgtttgagcgcaaaatagtggcagacgtagcataaaatcttgtcttccgtcacctcgcatgtggggtcctatttttatggaagatatagtcgtcacccaccagatgtgaatgtggttttcgatttttatggcaggtgtggtttcatatctaaaaattatggcagattcaaaaattgttgtgcattcgaaaaaaattacatgcgggctactgtgtgggcgcaacccagatttgagcataaaaaggctcaagtttgagcgtaaataatgtatgatataacgtaaatgttgattcactcccaacaagagcctcggcttccatgcaaccaccataaatcaagggatttgattagttgagttgattaggggggatttaattagttgagttgat

SEQ ID NO: 54279 - DNA, 337 bp, Zea Mays
gcttttgtcattttatctcgaagagattctatcttattcttagagatttatcttgtcctaataagcatacttatccccaccactttgcttatctcataatagtgtaacaaacatggtctattccaaaataaattaagtagatcttatctgattacaccaatttaattctgatcccatctaatttgatcagatctaacctaatggacaaacatgttagataatactggtaaaataagattggatcctactcttataaatatgttttagtccgagttggactaagattccaatttagactagaccacatacaacaacctggccatatgcaactacctta

SEQ ID NO: 54280 - DNA, 282 bp, Zea Mays
gaaaccactttttgtaccttcgactgttccgtttcttgcaatggactcaaagctttcacttgctccacttctatcttcaattttggttcttcaaccgattccgtcttagcttcagtaggagcagggtaacttaactccaaggcagaagaaggcccctcaccaagcttcggcactcaggcgtttcaatgtgcctgggatgatgtgtcagaactttaatcttctttggcttcggcgcagtagaaatcaccgaagcggcagctcttcttttctttccttgctttc

SEQ ID NO: 54281 - DNA, 393 bp, Zea Mays
ctaatttgtgtcttaatttctttgattttctcatcagactcttgtcctttacgaatctcttcctccaaagtagattcaacctccataactatcgcttccatattatttagcattccaaggttgagttgttccatttcctagcacaattcctgtgacatcaaatgagtagtgatgttgttcacttgacctttacgactcaaagcatcagccactacatttgcttttcctaggtgatattgtatttccaaatcataatctttgattaactcaagccatcttctttgtcttaggttgagttctttctacgtgaagatgtatttcaagcttttgtgatccatgaagattttacacttgtttccaatcatgtagtgcctccaaatattacaagcgtgc

SEQ ID NO: 54282 - DNA, 432 bp, Zea Mays
taactaggcaacccaaaattgcaacttgtgctagaaaggtaatgagtttaccaagcgctaacacaaaggacttttgggttcctagacccttgtttactaaccttgacggacccatcaagcgatgggtaccaaaatgtgcttgacaagctttgtaggaggaggagatgatatgaaactttggggtgcttgagggagttaattcaattcttattaactcaagctatcaatcttcaaatgatctatatatttaagattgacccaaagttatttcaatttattatattcaaaactcatatcatctcgggaagatattaatgttgtaggaaataaagaatcatcatgtgcggaaaatcaaggcctacaacatggagaaatgtcaaaggatggtaacacttatgcttttaagtgcaagtatcttaaattattatttct

SEQ ID NO: 54283 - DNA, 283 bp, Zea Mays
tgcggctatatctttctcagcaaccacatccgatataagtctgtcgatttccaatagtgtggttgcaagattatcggcttcggctgcggcggtttcttcagcatcgataggcataattgctttatccgccaaagtatggggcggggtatgttcaataatctgcatcacattcatcatccgttgtctcttctgtcccccagctttccccttgacagccgaagtggtttcctttgactgaaagaagctagtcagatctaaccttagaggacttagcggtgcaaat

SEQ ID NO: 54284 - DNA, 848 bp, Zea Mays
ctttgatcacatacaaagtttggagaaaaataagctcaaagttgtgctgtcagtcactctactgactgaattttggtcaccagtgacattggccagacttttgggtcaaattagagtaagatctattgcttgattgagggtagttgctatagcagaattgtagctggtatgaagggctacaagtttgctacagatgtattggcaagttgttgcacaaaaaatcaagatctagacattgcaattcggtctgtcaggcgctcttaatcgggtttcaatggtacagtgaccagattagaacgccagctcagagaactcaccatcgacgaccgtgtgcccatattcgcacccgccgtggtgattcgtgctcggtgtagttggataacgcagaggggtaaggaaatatcgcgccatggattaactccggccactattctactccggccgccatacccgcctgagtcacagccgctgtggataggttcgccagagttagccaccttgcgaccttgcgccatgtgccctggcatcttaccacgtcgctgtagctcacgttatgcatatcaggtgatcgccggtgagctcgccacggtgaaagccactaatcgcttacgccagtgcatccccttccctccgatcgccaccgcgcaatcacaaattcatgggccaccgctcaagggccctataaattgagcacaccctcgactccgctatgtaattgcacactcaacacacccactcgtgcctccaattactcaccagagcccccgaatcgcttagttcccccaaatcagttttctgccaccgtgaacaagctctcaccgtggtcagtgcacttcaggtccaatctt

SEQ ID NO: 54285 - DNA, 366 bp, Zea Mays
aaaaggtgaggaatccaaaagcaaaacatatggggataacatgtattagcgaagtccctttagcatcggtctccaatcagcaagggggcgaaggcaacgttcctcactcaagttgtcaatcgatatccgctgcgaaacaaccaacctgacaccttaattacaacacaaatgctatgcttggaaagtaacataagacaaaacattattgttcaaggactaaggatctcccttttgggaagcaggccaaactgcctatagtaaaaaaaggagcagctcaagctcttcgcccttaaaaagacacctagtatcatcctcgtgaagacaaggaccatcggcccataccactaagtactttgcccgttgagc

SEQ ID NO: 54286 - DNA, 962 bp, Zea Mays
aaatgttggacacttgtacacttcaaacaacctatgaagggggtgtatatatagccccaaagcctaactagtcgttaccaagattctacactttatggtcgcctcagacctctcattgtagctaggtccagtgcaccgaacctctgactactttggtgaccgttggtaaagttgtcagctatcaagattcaccagactagtccaagggcacatcgggcctttgatgtcagcaccacgttagcaaatcgttggtctgtttgaatccaatcgttgggtttactattggtccgatggctcactggattaatctactgccccgtttgccaaagccaaaaaactatctctcttcatgcccggtctggtggctggtccggtgcaaactaaacccggcctagcgtgccaagcactaaagacccgagaacaggatctttgtgtgccaagttcggtgcataggtctggtgcacatcggacctactattgtgcatccagtgcactcaacaactgcttaaactatcaaaactcgagcacaacttctttggcttctcttggcttgtaccttgggcacttctatgacttagccaaatgtgtattgagttcatccaaacattcttagtgacctctttttgttgtaacccaaccttcacattagattgcacttttcatcaagccttcgctacaactaactcctataactctaaactctgattcttagcaaatctgctattccaatgagtcagcatgaacctatctaaatgctggaatgacccaaagtctatttctttttccatttctcaatttttgctatctttatcaaagtctacacatttagtgaacccttctatgttcttttctttgctaccttattccttagacttgtgaccatgcttcttctcttctctttgagatgtcataccttgagcattatgatttgaaccatctcatcacatatgagttaattccat

SEQ ID NO: 54287 - DNA, 609 bp, Zea Mays
cccgatgctgccacgtgttctacgacgcgtgacataagccatcgaggaaagcctaacgtcaatctctaggtgtaaagcacctttgcattaactgcgaatgagacatatacctacctaccctagtggtaggcgatgcgtccgcggtacgcaggccacacagtaactcgcgcgttaccgaggcgagaccattgacttcttgtgccgcttggctactataattatgacttccattttagctcgcacgttaccaaggcgaagggaaacatgcgaagaagacagaacgacgactcttgagcacccctacttatggtagcgcatcagcgtacgccgcaacctacacgtgcgcccagctccgattaggcgaagcaagggcgcggcaagccaggagatctacacgaagaccaagagaaaatattcgttttccacgaaccgtcgctccacctactccatatctagtaatagattactgggcccacttgtcggggctcggtcaccatgtacgtccctcccttgggctataaaagggagggcacacacacacggtactggtagacagactccctgaacagactccttggaagaccctcggacatagagactctcatgcaa

SEQ ID NO: 54288 - DNA, 644 bp, Zea Mays
ggataacttcgcggggtgaaaaatctttggcaagagatgaagatgggacaccgtagtcgctctgtcaccgtacccacttgccagcgatgtggccgagcggccatcgcctgggtgtacgctggtcgtcgtgattgcgccacatcatgacccttttaccatgtcgttactagccgtaatagctcaccagtgacagccgtagctccttagccagtgactgccacggtagctcatgtcagaggccttctcctttctctggcctccagcacgccttctccaaattggacgccaccgctgatggattctataaattgatgccctagtgagctccactaggttattacgcacccagtgcaccagctcccgcctctgatcatccaccatagcctctcaatttcccttttcccccaaatcgggtttccgcgccaccgtgaacgcctcgccgtggccagctctctgcaggttagttcaagcttctctgcttgatgttctagcctccctcaagcctcctgctactcgtagacccatttgattaagctagacctcactgaatcactaagaacacatcgatttatctctggttctcaccgccgtcgtgaacagacgaattctgggccggatttgtgcaattaacggagggcttaggg

SEQ ID NO: 54289 - DNA, 687 bp, Zea Mays
ctttttacccgcgaccgtaaccatacatatgtaaactacaacaagcaattcaccgtgattacgagcttaaccacgccatctaacaatttggttaactagagcaacgacatcgccgctaaataacatacacgtcaacttgccttttattgccgcaatccgagacataacatatactacaacattttataaacccacagattcacaaatatattcgcgcatcgaccaactcatatgaatcgtaaaccacaaatctccaaatcgcaatcaccacgcatttacttctcaatcatgaacacatacatgtttatcctacgaaccgagtatttcaataattattctaaaacaactaactccattacacacttgtatcacaaatctacttgacttacttgaagtgtctactcgaaatcgtgagcacaatcatacaccatatgcgaagcataatttaactagcgcataatacgcatcgttacgactcgacttataaatatagagaagtgactactactttggcatgtcaccacctctctatataagccaaaacaatttctactatcgactaagagttctaggtattaagcacgctattactttccacgcgcaaataaacctcaacttaacacaagtgacaccgatggatttttactaaactcatcatgcgcataacctcgtctcgcatacaaccat

SEQ ID NO: 54290 - DNA, 609 bp, Zea Mays
ctaggtcgtttgtacctagatcaagggcttacagccaacactctccctcactgtcccccttccgaccacccgtgcggccaggaacagggctccaaggcggcaccccccggtgagcaatcgaaagcgcccatgtgacccaatttgacctaggcacggtgtgtatgatgacgaaggggggcgaacacgaatcaagagcattacctgcaccaggggctatagagatgcccgaccatggtgccacgtcggctcactgcacctgccacaatccggcaagctgcaccctagctgctaattccctagagcaaggactcagacacctttggcacgctccagtgaacaccgaaacgcatgggacaaggtccagtcgatagcgtggccccaggtctgtggcaagcacaggcacgacaatgttccgccctcaattactctcaacacgcacagtgcttgcgttgatctggatagatgggcgaaacgatcatgaatcccaaattatatagcgtggagcccgatacgcccagccagagcgaacccgagattcccgagcggtggttgagattgccatgctcgtcttggggaaggtaactccacctgcccgacgcagggggccca

SEQ ID NO: 54291 - DNA, 1455 bp, Zea Mays
taatgacctcgtaagcttctggacatccttcatacaggccgaaggcctcattgcctcaatcgccctgatcttctccgggtttgcttcaatgcctcggtgtgaaaccaggaatcccagcaacttcccagcggagacactaaagacgcacttgtccgggttcagcttcgtgtgcgtcgcccacagcttgtcaaagaccagggtcaggtcttccaccagagtcgaccccctcctagtcttgaccacgatgtcatcgacgtatatctctaccctgtccctaatcaggtccccgaaggtcttactcatcgcccatacaaacgttggcaaggcgtttttcagaccgtagggcattacaacatagcagtaaagcccatccactgttacaaagtggtatgcttcctatcttccctagccatctggatctgatggaaaccagagtaggcatctagaaaggataagaggtcgcacccgaaagtagagtccatgatttgatctatgcgtggaagtggatacgggtccttgggacaagccttattcaggctggtgtagtcgatgcacatccgaagcttcccgtttgcctttggaacgatgactgggttagccagccacacagggtgatggacctctttgataaagccagcatcaagcagcttccagacctcttggcgaatgaagtcctgccgctcaacggactgtcttcgaggcttctgacgcaccggcttggcgtcggggtggatcttcagatggtgctcaatcacctccctagggatcccaggcatctgtgacggttcccatgcgaaaacgtcgacatttgcctggaggaaggcgacgagcgcgagttcctatttgtcccccagattgcccgcgaggcgggtggtctgggaggagtccgcgccgacctggatggccttgacgggtccactgtctgctccggacggctgcacctttggcaccttggcaggcgccttggtaccggaggtcgaggggtccttcccccattgttcaggcgagtagcttctgccgccagggcgtgcagcttctcgacagccgtcactgcagcggcgtgatcctcccacacagtgaggacctcggccggggtcggcatcttgaggaccaaatatccgtaatgggcaatggccatgaaccggtacagggccggcctgccaatgatggaattgaaggggaggttaacctccgcgatgtcgaactggacgttctctatgtggaagttttcctcggtcccgaatgttaccgggaggacgatgctctctaggggatacaccgattatgggcccactctaaagaatggacgagagggtcccagtcaggaccccgagatctgtagctgcttaaatgcagcgtggctaatgacattgagccctgccccgccgttgatcagcacatggtgcagccgcatgttggcgatgacaggggcggtgacgagcgatagtataccgg

SEQ ID NO: 54292 - DNA, 575 bp, Zea Mays
actcttatcgagtctgactaatataatgtccatatattacaactaaacataaattatttgataaaatgctagttcataatgtgtcttaatcaacacttcaacttcttcgggtatcaattgcattaatacaattgtaatgcaagtataagagataaaatataagcgtacctgattagatacttaggtaagaacttatcttatttattaggagaagagataaggcttatcttatctgattgttacgtgagataagatttatcttatctggttgctaggcgagaagtgtgagagagaacagatttacacatctatatatttcgtgtgtaacacacgatacagatcattgtcgaaactagtctaaaagtagaaatgttgttagttgacgggcatgcgaccaaagtttaaagcggttcaatgcccacgtaaggagagggtagaccatcccactagaggagccctaattcccctattacatctcctatcttatttttattttcaaactttactccgcaaatagtattaaatagtgtcatttacacattatcgtatcccttattttagacgatccaccaaag

SEQ ID NO: 54293 - DNA, 1015 bp, Zea Mays
ggaacaactctcagaccaaccaaaggtctagtgggaattcgcagacttgtcaaggtggcgccatgaacacacaggccaaaagcaacaacgcaccagtccaacccaatggctgtttcaagtgtggtgagcttggccattatgctaacaactgcccaaggcgcaaccaacagacaccttagaagaacagcggacagagaactgaccagaacacccccgctcatggatctgagcagaacaaaacgccgtagaaccagaatagaggaagggttaatcacgtcacagcggaatcagtgcgtgaggatgcagacgttgtgtatggtatgtttcttatcaactccatacatgcttcagttttattcgactctggagcatcacattcatttataactgagtcattcgtggaaaaacataacataccaaagtaccctcttaagaagatgttacacattagttcaccgggagacgacatgaagatcacacactcatgcctccatgttaatctcaatattcaaggaatagattttccagtcaacctagtggtcttaggatccaacggtattgatgtgattcttggatgcgactggttgaaaagttgtgatggagtgatacaatgtgccaagggaacaattatgttgacaagtcctcaaggtgaaagaatccaagttagtacagatatgtcaacatatacaaaaggagaaacaatggtaaatcacttggaagaaaagcccctggaaaatatcaaggtagtgtgtgaatacctagacgtatttccagaggaattaccaggtatgccatctgaccgtgatatagagttttctattgaattattatccggaactgcacctatctcaaaaagaccttatagaatggatgtcaaagatttagttgaactaaagaaacaaatagatgaattactagaaaaaggtttcattcgcccaagtttgtccccttggggagccccagttctatttgtgagcaagaaagatggttcgagaagaatgtgtgttgattatag

SEQ ID NO: 54294 - DNA, 882 bp, Zea Mays
cgtcggcacaccagccgtccgcaacccagagggcttacaagtaaccaacgacgctgaaggccatcgcatcgtcaacctcatcatgactgaagattggcgggccccaataaccctgtttctgcaaggatattaccacccaagtgacatcaatgaggccaaatgcctccagcaccgaagccaggacttcgtactagtcgggggccagctatacaagaaggggatcagtcagcccatgctaaaatgtgtgaccgaaaccgaaggcattcaaatccttcacgaagtccacagcggaacttgcggctcccactcagggcctagggccctcgctgccaaggtgatccatcaaggattttactggcccgcgataatctgcgccacaaatcgagtcacgaggtcttgcgaagcatgccataagttttctccccgctcgagcaacccttcgcggttcaccaaactgatcgcccacatatggccacttcaacgctgggggctggatattgtcggaccattacctacggctcaagggaacctgaaattcaccttcatcgtcgtcgagtacttcaccaagtggatcgaggccagggcagtatccacaataacgtcgaagaccgcccaaaagttcttctggcaaaacattgtttgccgattcagagtcccgtctgagctcacagtcgacaacgacaaacagtttgacaaccaggacttcagggatttctgcctctccatcggcaccaagcctgccttcgcctcggtatatcacccgcaatccaacgacatcgtcgagcgcgccaacagtaagattttcactgccatcaagaaaagacttatcgacaacagaaagggtaaatgggccgaccaactacctgaagtggtctgggacct

SEQ ID NO: 54295 - DNA, 401 bp, Zea Mays
cttgctttgagcttcattgcatgttgtttcatgcttgttgtcaggttgtgtagcttccttagaccattagtccgaggtagaagttcttgtgttgattaataccaataatggacccatgtttgaatggtggtgctatttggggtaccttggatgttttgctgggagtggtcgaattcgaggacgaattctttttaaggggggtagagtgtaatatctcaaaaaaatgttgaccaaaagttgatcttcggtgcgtggatgtgggaaaatggttgtgggccgttggaagttcggagtcagcagatgtgaagatctcttttaaacgatagcatttgagtattcatttgtttgaataggggcatagatgggggatttggttgtgagccgtcggtttcgcatcaagg

SEQ ID NO: 54296 - DNA, 622 bp, Zea Mays
attttggcagctcagagccgtcagaagagttatgctgatgtgaggaggcgggatctggaatttgttgtgggtgaccaagtccttctcagggtatcacctactaaaggagttgttcggttcggtgtctctggaaagctcagcccgagatacattggaccgttcactatcttggcccgagtgggcagcctggcttatcgcttgctactgctggattccatggcaggggtacacccagtttttcatgtctctatgttgaggaagttcttgcggtatttggaccatcagattgagatggaaccaattactgtgcagcaggatctgactttggagtgttgtccggtgcgtatattggaattctcggagcgtgtattgaggaagagatcaattaagtatgtcaaggtcttatggactaatcagtctgagcgcgaggctacgtgggaacttgaggagctgatgcggcagaagtatccggaactttttgttgtgggtaagtgttgttgattcattaatctttccttttgtcgttctgatagaagcgtcagaattcgaggtcgaattctttttaaggggggtagagtgtgatacccggtttgcaaagaagagaagttggaggttattcttt

SEQ ID NO: 54297 - DNA, 498 bp, Zea Mays
agaccatccagtacggtgtcctcgatctcacaaatgagaaaatccacaacatcaaactctgagtgagaaactagggcaccaaggagccaaagctgaatatgagtggaagcctccctgtaacccatccgtggcagaagcgtctgtctcatgagctgatatagaaacctggccgctgtggtgaagtctaccggagaacgtcgcgacccatcagagaagggtggtcggaacaaagccgcgacgtgagatgtaccaggagcaactccgttgtgagggcgacgaggagggtcagaggtgccatagcacatgctgtgaagatgagtcgatgactcgttgaatccaaacacctgacgaatctgactggcattaatggtaacatcctctcgctcaaatcggaatctcatccagtggtgatcagggtcgatccatacagtagcatagaaaactcggacccattcctcaacatatctgctgctggtagtcaaaagagtgagaagtcca

SEQ ID NO: 54298 - DNA, 564 bp, Zea Mays
tcaaaattcaaattcaaattaaacctagaaaggaagaaaataaaatgggaagaaaagataaaaggaaaaagaataaaagagctacatgggtcgactgcctcatttctggcccatctcgcttcacaccgcgccagcccatctccacgcattgaccgacgactgggccccactgtccagcccctcagccacctcacgcacgcgcttcccgcagtcactgccgtgtgggaccgactcgtaagaactgtctcctagctctggttcgttgcaaaactaccgccgagtatcacggaagctccccaactaattccttgctgctctctgtcttccgcacctgggttgccgtcctggactgcattgccagtgatggcaccgccgccgtgccctgttaatggccacgagttcgaccggagattgaagaagatgggcctggtcgtccgatgtgctatcgacggtttagatttgatcagcgcataccctttcgccgtattgaatcctcgccgttgatccaaattgtacggtcgagattagagcaaagaataaactgttcggttacattagttcctg

SEQ ID NO: 54299 - DNA, 1161 bp, Zea Mays
acaaagccaaagaacgtatcacgaagatttttaatgcctctgtcaactttgagttctcttctctcttcgttttaacctcttgctttaagttttcaatttcaagatcaagccgagagacattgtcactgtgacttgtttttgtcttttccatttcatttatcaattgttggatgtgtttatcttgctctacaatattttcatccttgagtttcttctctaattctatatctttgtttgatttttgagcttcggtcagatctacccaaagcgattgcaccatatcgtctttttccttgagtgccccttcaagatcttcaaccttgttttccaactcagaaataataaactcgttttttcggtcttctgcttctttgttgaagctttagagccttactcatcaaaaaactctgcaacaatgccaaagattaataatgttctaggtaattcgtctttgacacttcataaacacaaaaatacactgcataagttggtccataccataaaagttttgaataaactaaactactagtgatgtgatttttctataatttctcaattcattctccagcttcggaaaaccaataaactttgtcagtgtgttaaccactctagctccgtctcggtgaggaacacattctagcagctcttcgtctacaccaccaaaaaggatggcaccaagcttgtaaccacctgcaatgacaaactaccttagctcggacatgccctcaacgctcaactctccaccagccaggtgtcttaaatcgaaggccccctcctctctagaagaagccccaactttgttcaccattgaagccaaagctttcactacaactttcttctgcttcgaaaccttggttaccacaacttctttttcgaccgccttctcaggctctgattctgcgattatcctttcgatagcagccatggtagtcccatcagcacctctgttatctttggcttcctgacccgcctcagcaggcatgaccacttcaacattttcctaagcaatcgaagctttcttcttcacctctgctggtggggtcttgtcattacctctagtatctatgtaataccaacagataaagccgagggagttttagtaaccttctttggtaatgctgaaggtttcttgcatgcatggttaggcttcgtcactttctg

SEQ ID NO: 54300 - DNA, 538 bp, Zea Mays
gcactgttcaacccgagacaaaactcgtgtcaaaccatgtcaaacggttttggtttggtttcaaatttttcaggggtgtgccttgggtaatttggcgcctttttgtcaattggaccatattgatttggcacctgcaagtacttgaacatatctgatctttagaaaggggctgatttttgacttagagaaaaatgggtggctcttaggtgctttacacttgggtgcttaatttggggtttttatgggacccttttgcgataaatccctcactatttcttgtagagatttaagtgtgctacaacttttgcaaatggtttaagtcatgatttggccatctacttagcttttccactaatccaatcttggggctctaatggttccactagggtctagggtttgagcattttttccaaattggaatacaagaaaagctaggttatcccgtctgtcatgatcatcactcaattaagccatggtttctaaattttggtgctccttcttcccacttaaacacatgggataataggtcatatgtgca

SEQ ID NO: 54301 - DNA, 573 bp, Zea Mays
tcctacgggtctctgacgctttacaccgagccccccggatttctaattctttgcacgcccaagtccacgacgacggcagcgcggggagcactccggcgagcacctgtaccggccgactggggccacggctggattctctgagcatcagacaccaaattggatctacctcgagtattttccccaacccaattgcacgaatggtgaactaatttggtctggccacggagagcgcgcggatgaactcaagacccatgcgttccctacggtcagtagacccatagcccaattggacgggtcagtaagcatcgcagacgcatgagaaagcttaaacgaaggaaagggagggatgaactgacctagaaagggctggccgcggtgagcttgattctacggtggcggaaacccgatttggggcgaacgcgaaattcccgagctctggcgaacgattgtggctaattggcggtggctggttagctgatgaccctacggagctggtcacgggctcaatttataggagggaagggcggtggccagtgaatttcgggaggacacgcggcggccggaaatgaagaa

SEQ ID NO: 54302 - DNA, 512 bp, Zea Mays
agttgaagttattgagcagacgccgccgctagcatcagcgtcaaagactctagctattgagagctctgctgctgccgaagctgcacccaccgaagccaaaagtgccaaagctgaaaccgctgaagatgtgaatctagatgccacgctctctgaaattgatacaatgcttctagatgcggccgcggaagaagctgctgcagccgctgaagagattccgagcacagtggctgaaaaaggaaaagagaaagccgaggacatttcggaagaagaggacttcaacttccaagatatacttgggcaagaattgtcgaaggctgaaaaagaagaactgaaagaatatgctatatcttgcggatacaggccaggtgcgttactcttcgggggagtcagtgaagaaagcttaggatgccttcgggaccacactggggcaaaggttgttggcactatatcaaatagtgttggcctcccaaaggttgaagcagacctcagcaggtaccggctgcagcatatcg

SEQ ID NO: 54303 - DNA, 396 bp, Zea Mays
gaccatcccaggctgaaccatcacacagctcaagaacgcaacaaagtcactgtaatagaacccgtattcgctgtgatcctctctcccaaatcccaactgaacgccaactaggtgtccttaggaagtgaataaatactgaccctccctagagctccttgacctatccaacccaagagcggccatggttgcatagcggtccccggtgcggagatagcaaggagagggaaagagagggtcgccgcacctggaacctttcctcaccgacgcccggggttcagagggtggcggaagagcttcgccagcacatgaggtcacttgttctcgaatgttgtgaatcaagaacaaggcaacatagttgttaagaattaaggacctttgtccttcgaaacattatct

SEQ ID NO: 54304 - DNA, 2170 bp, Zea Mays
catgaatgacttaacagttcatgaaaatttgtcaagttatttcagggtgtgtgttcgtcacctaggttgacgaatagcgttgccctatatgtataggagcagtggcggagcacccgttatggctaactatggcttgaaccatacctaaaaatcatgtttggtgtaatggtaagttcaactgcttgcaatcaaaaggttccaggttcgagtcctatgtgttgcatcatgtttttctctttttttgtccttcttcagccatacctcattattattttgtcctccgccactgtataggagatctcgtggcttatgacaatagagccaaacgacatctctttgtatctctctaaccatgtacaagggtcggcttgctatacctgacacatatccataccatttacacccgcccatttaggtagtcgaacatatgcaagggacgacctgctatacatgacacgtacccataccatgtatacacacaccatatatggtagtctaacactccccacaatcacaacgtcgatgaggcaaacattgagactggactgaaactccgtgaagacagaagttgacaaccctttggtaaatatgtctgactgagacgtcgttggaatgtgaagtatgtgaatagaccctaaggctaccagttctcgaacgaagtggagatcaatcccaatgtgtttggtgcactgttgctgcacgtgatcggaagacatgtaatttgtgctaatattattatcacaatagaccaacgtggcaaagcacaatggagttgcagctcagctaggagctggcataaccaggaagcctcgacgattgcattggcaacgacacgttactctgcttctgcactggaatgagatatggtgttctgacgtttggatgaccaagaaatcaagttatcaccgaggaacacaacatagcctgaagaggacagccaatcagcatctaagtagaacacgaggttagactgactagaagaacatatgtgaagacccaagttcaaagtgccatgaacataacacaaatacatttgattgcttcaagatgaggctatctcgggtcatgcatatgaggacacacatgttggacaacatatgcaatgtccggtcgagtgaaagtgggtattgtagagcactagtgaggctgcgataatttatatgattggagatagtagcactatcagcacataacttcgaattgaggtcaacgggagtgtagcatgacctacaatcgaccattctagcacgacctagaatatccaaaatatactatcgttgagagtcaagcaaactagaagcagtgtgttaagtatgcatacccagaaaatgatgaagtctgcccaatccttcatagaaaactcatgttgaagagttccaatgatgcgacaaaggagaggttggaggaggcgatcaacacgatctcattcacatagagcaggaggtacgtaacatcatgaccatgatgaaacagaaacaatgaagtatatgtcttagcctccacaaactcaagctgaagaagagccgtcgaagcgattgtaccaagcacgaagggcttgtttgattgttttaggctttcagctcatagagtgacctatttaggcgacagacggagtctggataagaaaaaacttcaaatgtatctagaggctgggcacgatagactttgaaagggtgccatgaaaaaaagtgttattcacatcgagctgatggactggccaattgtgggactgccagtgagaactgtttggacgataacaagcttgatgacgacactaaaagtcttgccgtaattaatgccaagatgttgagtgaaaccatgaaggacccaacatgctttatagcgctcaggtgaaccatcacccttgaacttgtgcttgaacacccacttgccaatcaccacattggagtgaggtggttgctgaacgagatcccaagtgtggttggcaagaagtgttgagaactcttgcatagctagacgatagttagggtcaacgataacaacacagtaagatcgcaggatgggcgacagaggagccgcctagaagagcaccaggagccgaaggctagactttgcatgcgtcttcgtggtgtgctgatttaccataggaactaccaacctgattggttgcccgcatggtctcgttctgagccactatatgcggttactt

SEQ ID NO: 54305 - DNA, 525 bp, Zea Mays
agaccctttagatattaaacttttcatcgaggggcacatgggtacagatccggatcacttggaggttatgtgagatgagaatgcgacaaaaaagttggtaagtatgaatattgactcgagtctccaatttcaatgttttctctctctatgttgaaattaatatattttgcctttcacttaaaaacaatattttgtagggtcattatatttacatgtgtgagagaaacacggagaggacgtggacttgatgatagtcaggtttgacaatacatcaacttacaaggctggtggaggtatgtcacactttattttaataactgtgattttatttagtgtatatattatgatactgtatgcaggtttcctatcggcgacggggttgtgcaccaccaaagttatagtagacaatcatctccctctatcaggagtagctagccctaatgagcatctgcacgggaggaagatctacatgaacaacagtggcagatgcaacaaatgcaatagtagatgcaactaatgcaatca

SEQ ID NO: 54306 - DNA, 486 bp, Zea Mays
gtgaagtacgaacgtcgaggcatggattagggactagagaatttgtaggactggctgtaggtgactgacagctggagtcgttgataagtaagactgagttgatcaagtcaaggtagtagtcaatcaagtcaaatggaggtgccagaggacttggtgatcagacggttgagggttgatggtgaaaaacgtcaagatcacaaagaaagcatagaggatacactactctagagtgatttgggctttgaaaccactggacaaatgactcttagttttcggcctcaaaatccaggtggtgtttttatgggaatgggaggcatcattgtgaagcttgtgtcaatgccaaacaaagtcgttagatctattgatcttgagttagaccataatgcccccaaggttaagtggttcgactctgattacctagagataagctaggagtgtgtaatatccctataaataagcaagaagttgatctaaccagcattatct

SEQ ID NO: 54307 - DNA, 500 bp, Zea Mays
cagccctcgtcgccggaccctcggtagcacctccgacgacgaacgccgatgcatcacgaggggatgacctaacaatccccacaatgaatcatctattgaccatgcgaccaaccgaagaaaccaagagagtcaacctttgcttctccgacgaatgcaagatgtcgatcatcaattccagcctcaccgccaaataggaaggcacgctcgttcagtttctgcaagacaactaagatgtattcgcgtgccaacccacgaacatgtcgggagtccccagagagttagctgcgcacaaactgaaggtgtagcaaagctaatccggtagaaactgtgtcactttacgcccaataaaatagaaaccatacaggctgagttagctcgccttgtagtaggaggtttcattagagacgtaacacacccaagtggctttcgaatcctgttcttatacttgtttggggccttcctttttgaaggtcctcaaaaacacaactaacatgttttct

SEQ ID NO: 54308 - DNA, 533 bp, Zea Mays
gaaatgtgaataaatacatacacagagaattatggcacagaaaacgagagatatggcgatcgagaggtcaaacgacgcgaaaacggcgtttgaacgagaaatagtgccataggaggtttgaaattcgaattgaggtatgaaatgatgtggaattgagtcaatacttcacgaataggtttatatgggtaaatatgagtgaagtgtgtgcttggtttgaatttaggcaaggaaaatgaaatttaggcactcggctcggaattgatcgctcgaaacagggaattgtgtgaaattgaagcctggtatatcgaattggcgtgaaattgcgcgaatatgttactgaaggtgttgtgaaggtgcctgaaaagtttgggttcaattggagcaattttgtgtggtttgggcatttcaccgagcatgtggtgtgcggggatttaggttttgaatgaaatgtctattagagagattgaaacctcccaaggggagagatgaacctacagggatattcaagagacacataggcacacatctatgca

SEQ ID NO: 54309 - DNA, 559 bp, Zea Mays
caagaagaagctggtgaactcatattacacagcagaaaaacagtggtggctatatctttttttaacaataaataaattatgcagcatgatcaaaacatagactagcaagtagagagaaaagagtaaatttccaaggcaataatcaggtccacaggttggaacagaagcaatggacgggattctacttctgcatgctggcgtcgcggatatatgtgtcctggatcctaatcaggtccctctgaaatttagtaatacatgtccaggtgtcctggatcctaataacacatgatcaggtcgtcagaaatttgtagtttctaaagcctgaaatgctgctggggtatgctggctgcatacaccaagtgcactcagtgcgaaatgaatttgattttttataccaaaggccatggccctatttatattagagcacaaattactagggatatcattttacatttcattacaccaagaaaacctccactacaatgagcaaggaaaaactgtctgtcttaaagcagcctacagaaacaaaagatttatcacttgtataataatgtattat

SEQ ID NO: 54310 - DNA, 773 bp, Zea Mays
ggctaagtgctcttgcacaagatctctggtacctatgtagatgcataccgcgttaaaagctacaagggcatcttgagcttcatcactcataacgcatgtcgacctctttatgccgaagtgtagttttataggtctttggatgatattctcaagtttgttcgttacatagaaccattcccttgtctaagcattcgatcatttgcttcagtatgccaaggcagggtatcgagcatctttcaggtatgtgaagatgaggcaaccaaagtcgttgtgttgttgctccttcctagttgcttttatctgataatgaagctcatggatttagagaaaaaaacaacatttggctctacgctctagctcttcactgtctagataaatatccctaacctcattaaggcattcagggtcaacaaatgtaggtatatatcaaattttttcagaatctccactagcatcttatgaagtggaaatcaaagtcggcctttaagaagcttcagaacactaccacttcatctttcttcagaagaggggtggtatctttgcctccaagcctcacaatcgaagtatcgcctatataattagtattcttcagtacctcaatatgacccttcttcatggttgatttgccgaagataacatggctaggcttcaatggtcgaccttcatcatcagcatcgtctgcttcaaaatcaaactcttcattgtcgtcagaatcatcaaacaagccaaccaagatctctttagtaatcctttcaactctggccttctctgcg

SEQ ID NO: 54311 - DNA, 2298 bp, Zea Mays
atttaaatcaaataatacatttgactgttcggttatgggaaccatctgaaaatgttttgtctatttcttttctgatgcaggaatgtttcttctatcattgatggctaatgggtcgttagaagagcacaaagatttatatctccaatgatcctgtcacggtggctcaaatgcactgctgaatggttcaggcacagtaaggatttatcgcgggaagttccttcttgcaactactccgtactcgcttcagttcaccatgatgactcaagcggtgatgaaaggctgaattatgcttctgataatgagcctatccagaaacagcagaagtctttgagctcttacagtgttgtgcaggctctccgctgcctaaggaggaagcctgcagttgcatttgcctactttaaagatatacatagccttggttttaaccatgacttctcaacctactcagagatcatacaaattttatcccattcattccaggggaagatgttggtatccttgttttgtgagattctttcgggaactgctaatggtgacccagaaatcttaacacttattggtcacttgagcaaaacttgtgccacttctcacatactctcatatgcagtcaattgcttaatcaaggcatacactaacagccacgacgtacaagaaacagtagagatgttttgtcacctttgcaggcttggatttgttcctacactttgggcttgcagtttccttatcaaatttgtatcccagagtggtgattcagatatggttgttagagcttatgatcaaatgaagtgctttcagttgatgctggatactcaatcattgaacatagtcattaggtcgttttttgaagtaaataaggcagaagaatcatttcaagtgtgggttaggatgattgaaatgggaatgaaacctgatgcacatggatactcatcatttataattggcctttgtgattgtggaaagtacgatctagcttataacatggtaagcaaatacactgttcttcatgagatcacccaggaaagggttgcaattgagtccatcgcttataatatggtaattgatggactatgcaaagaaatgaaactggaggaggctgaaaaagtcttggacatcaagaccagacatggatctacccctgatctatatggttatagctatctcattcgtagttattgcaaaatgggtaacttagaaaaggtgtggcattatattgaagccatggtatcccatggcatcgagataaattgttacattgttggttaccttctacagtgcctcaagaagctaggcatgatatctgaagttattgttcacttccagaaatttagagatctaggactccatcttgacggcgttctttataacattgctatggatgcttattgcaagcttgggaacatgaatgaggcagttaagctactaactgaaatgatggcgggaggtttggtcccagacaaaatccactatacatgcctgatcaatggttattgtctgaaaggagaaatggaaaatgcctggcaagtatttgagcagatgctgaaggaaaatgtaaaaccagatgtagtaacatataacatattggccagtgggtatagcaggaatggcactgttattaaggtatatgaccttcttgagcacatgatgaatcaagggttggagcctaattcactcacctatggtgtagctattactagtttttgtagaggaggcaacttgagcgaagcagaggtattatttaatatagtagaagaaaaagggatagataatattgaactgctgtacagttctatggtttgtggttatttgcactcgggctggactgaccatgctcacgcactttttcttagagttgctaaacaaggaaatatggtggatcaattttcatgttcaaaattgataaatggcctctgcatagatgaaaaggttgaggaggcttcaaccgtgtgtagtatgatgctggaaaagaatgttattcctgatgtaatttcatatagcaaacttatttcagcttattgtcagaacagagatatgcacaatgctcacttatggttccttgatatggatgaaagaggactttctgatgtcattgtatacactatactgatgaatggttattgcaaggttggtcggttgcaagaagcatgtgacttatttgttcaaatgataaatttaggaatcaagcctgatgtagttgcatacacagtgctattggatggccacctaaaggagaccctacaccaagggtggcagggtatcgctaaggaaaggaggatcttttttcttagaacaaagcataag

SEQ ID NO: 54312 - DNA, 340 bp, Zea Mays
agatacatccacgtcaacgcttttcacttcagacaagtgatcctaatccaacggtcagaaacacgtatcacacaacccactgatatacggataacagatgcccttccgctcctaccggccaccggagcattctagatagtgcacgaaggggctgttggagaaaaagaaaaagccacgccgtcgtcgccgccacggggagacgacgatgccatcactctccctgtgcggtcccccatccattgcatccctcctgagtgttgcctttgccttcgtccttttcagcctcctactattcagtttgcgttctagacggattagctagccaatatacagtgcaaag

SEQ ID NO: 54313 - DNA, 699 bp, Zea Mays
ttggccgctcgggtgacaatgtgcttgtacccttccccttcgtgcgttggctgcagctcacacgcaaggagagcgctcccccgacttggcttaagggtttggattgcctggatgaactcgggctgcaggttgcgagggatgggcaaatgatcgcgtaggggccgtgagtggtgccctgctagctcgcgaccatgttcttaggccgcccgatgctgatgccgctgggtattcctctacagacggaactccgattcctcaggggtttcttcatcctcggacgcctcatcccagaaaactggctgagtcagatcatgttccccagcggcatggtgtcgtcggatgttatgtcgacggttccaatggcaatgggcatcacattgtgggggctcttcctctagtaaggtcgactcatcgtcggacataaggtcgatctccattcctctattgatgcagaggaggttgggttagtagtgggaggcctccggctttgcggacgcaaacgccgccttcggggtccgactgatccccgtggtagcttgccacgtgctcatgggcctgaaggcgttgaagacctcgattaggcccttcatctgagttatctggttctaggcttggatcaacgatgtagataatggggtcctttggaccagggacattgcaaagttcagcaaaggtagggatggcatgcctccacccggc

SEQ ID NO: 54314 - DNA, 1083 bp, Zea Mays
ctcagtttggaggacaaggttgggtgaatgggtgacacatcgatatgccataagctcagtgtcataatttatggcgccgatgtgttgccctatatgccacacacccatgtgggcttgcccgtcgcatgctcttttctttgtcatgctcatctcatgatacatgtacactaacgatcgtcaccctgcctcctcccattgtagttgcatctcttgctaccaagcctgtccattccctcctctcatcaccgtccccattctacgcctcccttgtcgtcaacactatgaatcaacaaataatagaaaaaattacataactacttaacatattgaggattgactgcataacctctaaactataatgactactattttagatacctttcaaatgatcccttgagatagtttgtcatactacaataacctcatcatgatgacttgattatcacatgagcatagttgtaagtgtgtacattcttttttacccttcattctcactgccccgtatgcatgcattcctttaccttatctttttctagcctaccacacctttttgcaagcaacttatgactgcttgtctcatgatctaccaccatcactcctcgatggcatctatgctcacacatagggcgtgcttggttttagagctaacctaacatgtgctcgttgggcaaggcgacccgaacctcacttgtgcaggagagcaaaatttgtccgcctcttttagcatggaaagtttgaaaaaatcaaggtgtaatttgtcgttgcctagaaactaaacctccatttcacccgaacttcttattgggcaaggcaacatggtatctagcaaggaaaccaagctcacccagagtgtctatgttaacgacatcccctccacatcctttttcactcccactttcttctatatggctagttcaccaatgagttccttttcttcctgtcccacaccaaccttagcaagctaggcatacttatcttatagatgtacttatgctttgacatttgtaatcaaaccaatatgtgacattttataatggaaatttagtctggcaaaaccattcagagacatttgaatgttagcag

SEQ ID NO: 54315 - DNA, 570 bp, Zea Mays
gttcttgacagtgacttcgttcaaagctctgtaatcgatgcacatcattttcgtgccatccttcttctccacaaataatactgggactgcccaaggtgtggtacttggtctaatgtatcctttctctagcacctcatcaatctgcttcttaagttccaccaactctggtctggacactcgataggctctcttagaaataggggcggtgcctgggataagctctatggcaaattcaactttcctttcaggtggcatgcctggtaactcttcagggaatacatcggggaattctgacacaatcctaattgcctcaatcggattagactctttgtcatctactgataaatggtgacaggctccttcttctagttcaggtaagtacagcttggttactacttcctttccggatggggacaccaatttgactgttctcttgtcacaactgacagtggcttgatttctgtgtagccaattcatccctaggatgacatctaacccttgagttcccattactactaggctagcggggaagtctgccccccttatttcaattcttagattcggacaaat

SEQ ID NO: 54316 - DNA, 861 bp, Zea Mays
gtaagaactggttccatgctgagaacattgtctattagcaatgatgaactatctacagttttgaactcactttctttgtgtgatgtgccaagttgctaatgatgacattacttacatcctgataccattgttgactagcaatgatgattactgctactcctacttctactttcctatgctgagattactgctacttctactttcctatgttaacattactgctacttctactttcctatgctgacattactgctacttctactttcctatgttgacattactgctacttctacttctattgtaagtaatggataacatggtctctgaggttgctacttctacttctacttcttcccctaattttttgcttgttccagctatggctgacatggtctctgaggttgctagccagggggctaggcctgctcttaggtggagtgccgcaatgtctgggtttgttctacgccattttgttgacttgataggtactggggtttagactaacaagggttttaaggaaatccaccttaactctgttgctaaaaatgtctctgagttctgtggccaagaagtaacaggccaacaagtgtacaatcaccttcgtaagtggaggtctaggtgggtcaaagtttgcaaactaaaggacattagtggcactctttgggatgaggatacctttgtcataagcttagaagagggtcattatgctgcttacatcaaggttaggaccaacaccttccatttctctaatttggtctaacttgaaattgctaacttgagttgctaactcaataggatcacccaaaagatgttgattacctcaataggcccatagagaactatatgcatatgcaaatcata

SEQ ID NO: 54317 - DNA, 517 bp, Zea Mays
cttgcatcggcttcattatcagccgaatcaattaagagaactttcctagtaaccccggacagtccagagtctttactcggacggtccgcgacctgggtaattggccctacacctgttatcagattttcaaagttgtgaaatctccctcgctttatccgataacctgatgcatcttgtgccaaattgttagctctatgattctcaactctagagatatgccgaatactgaatttgtcaaaagaatgaattatgccccaacatttttcaaggtaactatttagagtactatcaaaacattgatattcttctaacacatgttggacgaccagctgagaatcaccaaatgccttcacttgttttactctcatacaatttaaaagttccaagctgaacaaaagggcctcatattcagtttgattgttagtgcaataagttttcaattggctagagaagtcgaaggagacatcacttggtgaaacaagtacgatgccaattccttgcccttcattgcaaaccg

SEQ ID NO: 54318 - DNA, 489 bp, Zea Mays
gtttaagctcgctggggtccaattatgcatgagcttggccttccaccctcgatcggatggccaatcagaggtggtaaacagggtgatcctaatgtatttgcggtgtttggcgggtgacagacctcgcacatggttgcaatggttgtcgtgggcagagtattgttacaatacttcatatcatacgtccctcaaatgctcaccgttccaggtggtgtatggcagggaacctccatccttgcagtcttatgaacctgggagtgcacggttagcagcagttgacaaacagatgaaagacagggatgacttcttggctgaaatcaaagacagattgatacaggcacagattactatgaaacatcagcaagataagggcagaaggaaggttgagtttcaggtggggcagtgggtctgggtccggttacagcagcgtacagcggtgggagtgatttctccatctcattcaaagttgggaccaagattctatggccc

SEQ ID NO: 54319 - DNA, 420 bp, Zea Mays
gaaaaatgtctcgaggcatcatctagagaaaactcaataccttgctctcttataggccctttctcatctaatatatctattgctttattatcaagatgatcccaatttctaggatcatagatatcataagtataaatcggctcctcatcaacactagtaggttgtgtttgtgcatctgatgaattattgggattttgagtgccacttacattgttatcatcgacgttgtcggtgtcaacgtttccctcttcttcagaaatctcaatatctggttcctcttcctccacaacaactatcgccaattcattgtttggattcatcgatgcactaggattactctttacaaatttatccatagctcctctctgtgattcaatgaaatcatccacccgttttctctttttccttttttcactaccg

SEQ ID NO: 54320 - DNA, 595 bp, Zea Mays
atttcgacagtgcaattataggataggccatgagaccaagaactgaaggtaaatgtgcaaagaggcacaagaatttagataggtttggactctcgatgcgagataatacccttttatcctatgtgttggtagctattgctatgatttgatgatctgcccttatgaggcacttcactacaagaaacaaataaaggtttgtggggggaaattaagaacatggataccgacgaccttatttgagttaagttcaagggttggagtaaaaacgtgggtgctcacgaacttaacttaagttcatgtgccatgaccataaccgtcgaacttatctacatttttaatgtgaacttctaaaacattgtaatgaggtagttcctcgccgtggtgctaacagacctcatagctagacaaaatcattcttacaaagatctattgacatagtcctcctgtcataaaaataattgttccaacacttgctaaaagggcacctatcgtcggtaccatctctgatttaccaaaacacgatcagaaattcatcggtcttctcactcactagatagatcccctatcttcttacaaccttcatacatccatcgat

SEQ ID NO: 54321 - DNA, 427 bp, Zea Mays
gggggaagttgctgggtgcacgccggggggaatttcctccaccatacgtcctctagcgggtgctctggcacttttggccgggtgtgtggatccaagaggaggcaggattggcgcctccgaggccatagcacagcgggaattgttcaccagagccgggagttcgtgtcgtgaagctccccaccgcggtctgacctccacgcgacacctctgccggtgacagaagagctatgctgataaccggagaagaccactggaatttgaggagggtgaccacgtgtacctcaaggtgtcaccaattcatggaatgagaagattcaaagttaagggcaagttatccccacgctttattggacccttcaaaatctttaggtgatttggggaaatggcctaccagcttgagttaccagatcatttgtctgatgtacac

SEQ ID NO: 54322 - DNA, 785 bp, Zea Mays
gaaaatacaaaattgattgggcaccaaaattaacacatgaataaacagaaatatatacatagtacctgtgattttctaggagtcttctgtttaggagagttttttttgtaatgatattagactttggacttcttttcacactcggaacttgaggagaagggacttttatcttctttgcactgatttgttctgaaggagaaggtgaggcagatctgaattggcgcttcaacgatggagcatccatgaaatcgtcgtcggacagtgtggatggagcagaaggttttctttttaaacgacaagctaaagcctttatgcgaaaacgatggattggggctggttgtggctcattctgctcctgattttgtagaatatcatcttggtgagctgagctgctggatcttgtacgtctggaaatgtcaattgaaaaaacctcctgactggattcaatggttaatctttttggattacttggcgggcgaccaacagacttcatgattaaacactgaataaatctgttgaaaaaagttgtttttaaatacagtgatttatgcataaaaatatgccaaaaaagaactaatttttactataactatctacaatgcatactatataatgctaaatggaattacataacttaaactaccttttacatttatgtgacagcatttaatgaataatggttatatacaaacataaagattgatttaatatttcatataattgtaaatggatcatgataaaataagagccttttttgcatcaactaactatacaacatattttaa

SEQ ID NO: 54323 - DNA, 1193 bp, Zea Mays
ggaggtggtgcttgccctacgtatgagttcatctgcacatcatataatggttgggcctatgagggctcagtgctagcttcgtgcgatgggaagctaggaatagtaggtttctcgtatgcacgtgttagtattttgaatgatttttccatccttccaatatattgttttaattgatcttgttgcaaatctatatattgtctaaggaattggatgtcatcagatttacttacattgggggtttgcagcggaggtatgagagacacaagctcgatctccaaatgcttggtaatcttctagttgtgatccaccgtgaagtgtgataggaacttctcctttgcctcctcacaaaccttggcaatttggcggtgtgcattctcgtccacttggttcttgatatcttcgtattgttgctggtcattgatcgacatactctcaagtgtcggcctcaagatattgttttggtagacatcggtgcgatacttggaaccggccatttgcgaccaattttaatagacctgaaacgcactcgtccctaacggagtcgccaaaaagtatattggcacctctttctgccgaatactaactattcctaggacatgtgtgcagcgtacagaactttggggacttcattgtgggctggcggaccgtccatgataggtcaccagatcgtccgtggtagatcaccgggcaatacatgataagtcactgaaccgtccgcaatggcgtagagagcttcaggaagaacccagatcccacctcccgggagggactctgtcggggaggaaagatcttggggttgcccttaggttggtaggcacccaaagcgcctcacgacgatgtagagtcaaaacgaggtgaagattaagattgggaactacaactatggctagaattactcctagatctaatgcgtaaggaaataaggtaaaattggtttgtagatcatatcgattgttgcttaatttaattgatcgtaccccttcatatgtatggagaaggtctgaatccgtttctaaacgaaatacaacagaatcctacaagatattaagataaccccgcaagagatcagaactccggcctgaactaatcaatcctaagaccattcgagcagacacggtggaccgtccaaggtataaatcgttctagccataaaggtcggaccgttcgagcagacaccgcagatcgtccagggt

SEQ ID NO: 54324 - DNA, 750 bp, Zea Mays
gcgggtgcttcggcttcgtgattacatggcgcaatagacccggccatcaatttatagggttgttaagcggtggctgatgaatttggggcgagacgcgtggtggtcggaggagaggagtttactggcgcgcgtgattgatggccaaccccgtgtcatccacttcggtgatcatcaaacaggcaacgcacggttaactgcgacgtggtaaagcgtcaggacacgcggcggatgacggtggtggctcaacggtggtgagaatctcatccaagggatcggtgaacaaggggagaggcacggcggctagctggagtggcgtctagctcaccgacggcgacacctttcaccctacgacgttatctatccactccgagcacgaatcgggacattgacggcacgaatcgcggtggagggatcattggcggtgagagttctgtgctggcagcctgatccaattctggttactgtaccatcgcgagctcccatcagtgcacctgacagtcaatgtttgggcttaattttctctcaaatttccatggcaacatgaccgatgctctgcagcaaagttgtagtccaatataccatcttcatctttgttttagtattccaagaccaattcttactggattagccacaatttgtctccaaaggtgatccaatgccactgatcatataatcttcagattgttttagtctgacagcccatctttgggcttacttatctctaatttcttctcaataactatgcttaca

SEQ ID NO: 54325 - DNA, 491 bp, Zea Mays
gaattttagaattaatctagaaatttataatcataagttcatttagacccactaaataagtaatagaagctttattaacacttaagtgataagtagtacaatgttcataattattatatgagaactcagcatatggtagactcttgtcccaactgcctccatgctgaagggcacaagctctcaacatatcttccaatacttgattagtccttttagtctggccatcagttttaggatgatagtccgaactgaaactcggctttgtatccatattctcatgcatgaaagcttttccaaaatctggaggtaaactgtgagcctctatcagaaacaatattcttcggtacaccgtgtaaacacacaattcgagtcatatataattctgtcaactgagatcccttgtaagtagtcttgaccggaatgaagtgagctactttggttagcctgtccacgatcacccatatggaatcatacccctttgaggtgcgagg

SEQ ID NO: 54326 - DNA, 307 bp, Zea Mays
tgcaacaggaaaaaatagtgcaacaataaccgagatagatacataaaacatgagagagtatgcaagtacaaagggcttcataaagaatattaggcataatcgacatgaaagtttcagacatatgcttgtcatgtttttcagtaatcatagcacaaatacaacaacaaactgatcaatacaaaacgtcctctgatcagagccaacctgatagcttgagatcctctacacactggacaacaacgcggaacatacgaacaacaacgctcttggtggcaccatgcttcttccccaagatgccctcttgatg

SEQ ID NO: 54327 - DNA, 846 bp, Zea Mays
atttgaaaccggttgtttcaaagtccttgtgcttttatttgtgcgcacatttgcactaggacgttcaccttcaaggtgtgtcactactggaacatctgaaaggggcgtgttgcattctcttcagtaacttgatggtgcaggcgtccccgcttggttggtactgaatcatccggttttctcccccttttcctaggatggggagtacgagtagagtccataccctacagagatatctccactctctcaggtgcatttgccgcaggaatatgcgacttcgacactcctcttatatcagtaaaggcatttggcagagtatttgctaagtttcgcaggtgtattattcgttgaacttcaagtttggtttctctagtgcatgggtcaagcgattggatgctactagcacttcattctatttctcggcattctttattattaaggtacaatcctccccctaatgccgggaaatgctcttcgtcgaagatgctatcagcgtaccaagccgtgaacagatccccagttctaggctctaaatatttgattatggacagaaattcataaccaacaaagatccccaacttccagtgaggtcccatagatgtacgctcgggtggtgatatcggcacgtatacaacacaaccgaattttcgcagatgggaaaccactggttgttgaccacgcgttaactggtggggagaagcagagtggtaagcagatggtctatattggattaaggtcgcagcgtgcaaaactgcatgtccccaacaactggtcgggagtttgctatcttgtagaagtggcatggctatgaattttattcttttaattaaggactcggcaagtccattc

SEQ ID NO: 54328 - DNA, 957 bp, Zea Mays
ccctctacaacactaatccctcaactaatttcactaatccggaccggagcacgtctgcccacgacgacggcggaaaccgaggataatccaaggtgttctaggctatttaaggcggtctagttcaatcgaatgggtcggtgagctacagggaacatgaggaaggctagaacaccaattaaggaaacttgaactgaactgcagaaggctggccatgacgaggtgttcatgcggcggtattttgactgattttggggaaatgggaaattaggcggctctggtggataattggaggcaagtgctagtgcattggatgcgtaattacctagtggagttctctgaggcttcaatttatagaactcaacgaaggtggcgctcaatttggaggagaagcgctggcgaccggggagacgggaggttactggcgcaaggaattcgtggctttcaccgtggcaatttctcgggtgatggacaggcttgctacactggttcattgtgacgtgctaagcttccaagacgcgtggcgcatgatcgttaagcggctaacgccggtgaggatcatcccggccagctacagtttaagtgggtacggcgggcacaacgttgagcgagcccgaaccaattcgagcgctaagatctttgcttctctccgttatccacttgcactgggcacgaatcacagcggccgacgcgaactcgggcgctcgatcaccggcgacgaggggcggtgaacttggagatctttttcagtactgtactatggcgattaccatcagagtgtctaacagagggatttcaggagccaggatatttgaatttcatgtagtaactacttaatccatctataccaaatttgtagccctataatccagctacaatcttgctatagcaaccatagtcaaacaattactggatcatggtcgaatccaatctcaaagcttgcccaacttcactactacc

SEQ ID NO: 54329 - DNA, 661 bp, Zea Mays
tccaaatcaaacattgcaaacaacaccatcacatggttgttattattataagcataatattataaaggtgttcatcgtctaaagtgaattctaacttataaaaatatataaaaaaaactatagcagcctagtgatggatcctggttataaatagcggatcctcttgcggggaggcgataacgccatggcagggacttgaactttagggggattccttccacctagttgagctgccagggctgcgttccttgcctgtgcatcctccatctccaaatgtaccctagagaggtccagggtagcactatctaggtcgttgttaagacccgccaccacaccagctagggtgttgaggcaatcttcttcagctccacctagaacaatgctggtttggctttctccacgaagacgcagaggaagatgcctgtactttgtgttgtacagttgctgtcgataagtgtggttgagggaccatagagttcgcctagcagcatcgctgaccgaaacagcgtaggtggatagcggcgtcagagactcacgagctgacagagtcctgaaccctctatcacctgcatccatcaccctgacattaatgcgagtgatgtagtagcaagcccgaagaggctcgcacactcgcctggtctcatacaggggtcgaacatag

SEQ ID NO: 54330 - DNA, 1082 bp, Zea Mays
ctagccattgacatcggtgaacaagcagagtcacggacacgaagtgctcgaacggtggagccgccagactgggatggcgtgttgccgactcacgctcaggggcggtcggtgactcggcttgacagcgatgacgtagatgaattcatcaccacgtagggctttctcgtgggctggtcctagccgctcaggaagtagaggtcagaccgcctaagatgagccaaggtcaaaggtgcattgcgcagaccgcgccctgggcaatgtccctggtggcccaccccctagatctactggtggtgagaccatctatggtccgctggagaattcgaatgagtgagaccttggcctacgcgccaagctccactgtgatggtagcgcgcatgatggggcacgcacgccgctgggtgagcaaggtaggttggcgaaccatctcggtggcctgctcacggcaccatcgtggtgcatctcaaagatgagccacgcaacgtcgacgccttcggacccgtagccacaggccctttgttggctcaccgtgactgagatgcagtcgcccttgacgtagatgttgtgttgccatgtgccgagcacgtagaagaagcagcacaatgccatggccaccagcaggctcagcccttgagatgcccttgttcgccattgccaacctcacccctgccccattgatgcgaccaaccaatatacacaataccccaatgcggggatcagacggcggatgcgagagggagagaaaatacaacatgccaccagatctagcgcgcgtacctgagttagatggacctaggacagcaccaccatgactgctacgacatctgctttggatcgggcggcggcagtggtggaaaaccctagatgggggagaagccaggatgggattcagatcgtcgtaatttttctcctcgatagctctcatcaggaatgctctagcctgttgaagagaaaaggaagagatctcgctggaactcggatctagatccactgagggacggggagggggaggagtggatcgggggcagtctcacctatgctgcgctgaatgtgaaacccgaaggaggaattggggatcggag

SEQ ID NO: 54331 - DNA, 455 bp, Zea Mays
aactatctctagcagcttacatatccctatgtcaatattcaaacttcaatctacgaatacggtatgagtgaactgctggacacgactaaagagacctttgtttcatgtgttgtccattatctagtggcgaagctaggccgtagtggaagcctggacaccatatttcgttgttgtgcctttgagctggtgatgggacacgtgctcgacgacggaggccatgaccctgaagaggattgtatatgtccaaggagacgcccaagcttgattccacgtccggcaccgccgccagcagtttagcagcagtgcaggcgactaggactagctacggtctattgctgccttctttccactaccccgtttcacgcgcccgttcagcggagaccaacagactccgtcactactattattcctaacctcttcgttgtctatctctcttagagtgtgtccaaaagaac

SEQ ID NO: 54332 - DNA, 1094 bp, Zea Mays
agatcagatcaaggttgggttataaatcggttggtaaggtccacgtatgactcatgcatagcgggttgggttgatctgtgcctccatcttagatgtgttagatcaagttttttggggttgggtcgggttttggataaaaaaataatggtttgtacttgactcgtggattgttacaaataaaaactatggctcatgttcgcctgtcgcattggtcgaggtggcccatgctcaggtctattggtgaatgttgttgtcatcgttgtgaagaatcacttgtagcgttcggtgttgtcggcaatccgggcgacgacagagatactagggatggttgcaacaatgttgttgtcggtgttttgacccaagggtcctaaccaactagtgtatttgtgctacgtgtcacggcccagatgggtgatgcaagaagacacacgatttatcctggttcaggcaatagaaggctctacttccagcgagtggggatgaaacttctattatcttgcacctaggtgctcgtagtagggggtacaagctgatcgagagagggaatggatcccaagtctctatgagtgattgaggctagtgtcaatatcgaaagtggagggcaaaagatggagtgtggtcctctctcctctagggaccatagactcctccttttatagccgcaaggagggagcctaggagtacaagggttgtcgtaatgttgagaggtggcaagcctgagcccctgtagcagtatgcccgtcgggatgcccttgtcctggctattgccttcgatcaggaggagggtacccagttcctgtatcccgtattttgaccaagcagagagccggggctagggtcgggggctcagaaacgtacctaagcccatcttgtggacgagacatctgagccgtagtggttgaaatagcaatcagtatggtgaaaagtgcatggtaatccgccccatgtgtcatgcggaatggtgtaacacagacttgacaccggtcttgtggtttctatagccatcctgttgccagcggtttttgtggggagggttggcagcatcaggtgttcttttgttgatgttgttggccgaggccatgctcgggcgagat

SEQ ID NO: 54333 - DNA, 1429 bp, Zea Mays
tacttgaatggatatgtaggtgggcaaggcgaagaacgattttgattgaaaggtcggattaccaaccttgttctcttctcaggtccttgattggatctctcacccgcataaccctttgattttccatgtcccatatttttagcttcaactgccagtgttgtactgacagccctgctatagataaggtccagacatgttgccatttttcgctggagcctatcgtttaatcccctcataaaacaattcttcttcttcaagtcggtatccacctggtcaacggcatactgagagatgtggttgaatttgttgagatactgcatcaccgtatcccctccttgcctcaaccgaataaactcttctagtttcatctggagtactccctttggaacataatgttcctggaatgccaacttgaattcttcccaggtaacctgatgcccaataggttggattgctgaaaagttatcccaccaggtactgacaggtcctcttagctgttgtgcagcgaacaagggcttttgctttgatgaagagcggtgttcgagtctcagagaattccaaataagtagtatcacgcggtccttgaggggaactctgcctttgtgatgttgaaaattgttgcccgccatttcgcgcaagaagcgcgtattatcagcgttggcgttgactagggcagcgatagcctcggccaaagtaggtggtaccgatggtgggttaggagtatcctccccactgcgggatgtccccgcaccatcatgtgcacgagtccgggatgacatctgaggcaaagaaacatttggaaaatataacatgccaccatacaccatcatattacattgctgaaatgtaataatacatactccattatacaactcaacttttcttatttaacataagtacaatatttagactatactactctagtcttcttcatccttcgttgctccattgcctactgcaggagaccgttcgtcagcaaggttcatggaaggagggggcctaaaaaggtccaactccccatccggtgcttcattagctgttcctgatggtccagctcccattgcagcaacgtctggtggcacgtctgggtgcaaccgatcatacaatacatgtacttcttcgtgcaaagtgttgcagtatgcctacaagttttcgagagacacgctaagttctgccacacgggctagagctttcgcttcacagtcccaagcgaaagagcatgagttgacggcccagtcaatggccgtattgcgttccgaaatttcgtactgtaggcgactcactttggttgacaactccgcaatacggtggctatcccgctcacgtgccctattcctatggcgtagttctgaccgaagatgctccacctgggcttccaggtctcccattgggtcattactgccactattgcttccttcacgcgggaagc

SEQ ID NO: 54334 - DNA, 411 bp, Zea Mays
cgagcggccaatattggcttggacttgcagtcgcatgttttttttctttccttcactgcaccagccacatggccccatgtgtcaggtttctatttcccttcctagtgttcagttcgatcggcagtcggcacatgctggtttcgcaggtgtggcagccgcccttcgtcctcacgtcgtgccacactgactcttcgcctcttcgtcccgtcgccacgatatgccgctccagtctatgcgcaacggttcttctcctcccccacatcaaagttcattctgcagtgatttctcataatcttggcaagcgttaccaccattaatagccttcaatctccttcaaactggctgtatttctcccttccctctccagctataaaagtcgaggtgcgctcacctccttctcctcgcccctgc

SEQ ID NO: 54335 - DNA, 842 bp, Zea Mays
ctggcacgtgtgctcctctttgggtgcacaccatcatcaagagatcccactatggtgtcatgggaagacaaagccaggtctccactctgaagctcgccatcgactatgactctaaagttgtgtcctctaccctgctcatccttcttcctcccttccccttctgtaatatagattttgggggattttctaagttagggttagggttgggataggagtttgggttcttgcattccaatccctctaacttctctttttctctagcctctgctttctgtgttcgtttatgagggctagggttagaggatctccccgagccaccctaagtctagatttagggttagggtttggggatctttatcttcgaggtatccaattcgatcttaatattctactactcttagctcttcctgagttggggtcggggttaggattggggatctttcctgaccacttcagcctcactgagtccttgaaatttcttctatttctcttttcgaacaatctgtggacttagggtctggggaaaaggacaatagcgacttcgataccattctgaatatgtaaatccttaggatctaattgcctttatgtaaatccttaggatataatttcctttcccttctctaatcgtccaatctcttagccatagatatattcgatttcgatcttgtatcatagagagaggaaggagaggaatagttgttcatgccttcgaggtcgagttatatagccatggcggtcgtcgtggtgtcaggagttagtgtgtctgtttcttgccctccttgtgatctaaaagggaaatgtgctatatgtcatttctagtttcctctagtttgctatgt

SEQ ID NO: 54336 - DNA, 605 bp, Zea Mays
cagggccagctcaggtcgctggccccaagagagtcacgttcgccgcggcagccccgtcctctggacatcttctgctcaaagctcaaagctccgggccacagggcatggcagtgtcccttaagctcaaagctcctgctccggtctctccagagctccaagagaccccctgcttcgacagctccgactttcctccacttcaacaggtcgacatggtgaggtccagcgaccgctcggaacgcccgacggaatcgttcgccgttgctgcatcctacagggatatggacagcgagatggcgaggctcaacacccatgcggcgtgggcctggcttggaggtgttcgaccacctataggagcactaagagcaactccaacagtttatataaaatcctaggtaaatataggattttgcaatggagtttttaaaatagaaaactttcttttgctgaggataaccaacagactagctatttgttagcttttgtggtccacgtacccgcgcctgctcgttagctgccactgcacaaacatgaaacctaggacgcaccaaattttacgcttcatctaactagtacgatcgcatgacacgcgcacatgctctttccca

SEQ ID NO: 54337 - DNA, 807 bp, Zea Mays
ttgtgttgggttggtactcttgttaggttgtctcatgtgtttctcttgccttgttatcttgaaggtactgttgttgtacagcccattttgtccttaaccagcaaaaattgttgcatgttctgctcataataagacccccacttcaaacaacctcatggttagcaagtgaaacccctatataaaaatcacaaaaatcacatgcttgtgtaggtggtttctagctcttgtgtgttgcaccattgaatatgcacctgcacagcttgtagatccccatagcttgaccgctagatcgacctaagcttccttgtgcacttctttacgtcaaaatataaatcgtttagtgtcgtttgcgcaaaccatatctaggccctatttcttttgggaagccatgtccaaatcctcgctaaactcttgtctgctcatcctagaagctaatctcaattgacgacccctcttttcacttggatctagtaatcttttcctatatgaatcacattgtgaccttatccgccgaatctcttgatcattcattgaatctacttcgtcatcttgttattttctacaacccattctcaaagtatcagatgtctggtcattctcatactctttcttcgaggatcatgaggttgttttgtcaactgcacctataagcaacatatcccttggttctgtggattttttatggtctttggttctctcatgtctctgcaggtttatcagtcttaatctcatggttgcctcctcctcatatcccatctcgtactaatgtctgacctgataatctctgtggtgatcatgtaatagtgt

SEQ ID NO: 54338 - DNA, 544 bp, Zea Mays
gaggcaaggtagagacaccttgttcccgtttgagatgccttttggtaggggctcggaagctcagccaagatgcagggattcccaccaagagagcctcgactgagtcacaaccccttctagtcacattgaccttggcttagggtgaatattcaccatgggcgaaataaaaaagctagctttggaatctataaggtgcctaaagcttgacaagcatagaagcaacacatggacatcccattccataaccctgaggcattgttggccacccccttggcggtcacacggttagaaaattgatagtttgatttagtttcattggttagtgaaaactttggtttgcacaaagattgaaattggtccaaggtagaaagaaagagaaaccaacgacttcaattttggcttaaccaattcagtgtttggtttttcctaaaatttctccttcccttgccatagcgacatgcttcttcttgctacttgcccccactgttgggcgcttgtatgtggcatcgcctagaacttgcacaagtggtcatgccacccccaa

SEQ ID NO: 54339 - DNA, 666 bp, Zea Mays
acatacaacaatagaaacaaatgttatttgtataaatgagatataaaattacataatatatatgaaacttgaccattgaattgaaggtactatatgggaataatgagatacaaaattacataatatgcaacttgaccaccctctctcagccataataatgggaatatatatgctacttgaccaccctctctcagccattcagccaccaccctctctccgtcttcgagccctctcactctctctcccagccacttctatgcggtggcactgctgctccaccctctatcgcagccacttctaactatggaatgaaagcaacaggtgaacgagctggcaacaccgtagtcagtaaagacagtaaccctttttgacggagataaaggaggaaagcatgcatgtcaacaaatataaaagggtgtcaaggaggaattatacaaaagacaatttgaaacacctgaacacacagaaccagtccaaccaccagcccgcaaaggtaacagttcactggggagtaggtccacaaaatcctgcctcagcccaacagtgattgaccatggaaaccagattaacctaccccgcatcgtcgccgcagccgccaaccaaattaggcacgcactcctcgatttatcccaggactagtaacttctatacatatatccattaaaa

SEQ ID NO: 54340 - DNA, 753 bp, Zea Mays
caggaagcgtctcctcccaggcatcaaatcgtggcggcgcgcggttcttacacgacggcggcatcgctagggtaccaccaacccgcgccccaatgctttctcttcaatcaaacgtgtgctacgctacgagaggagaacgaagagcatcatagcggatatacttaccaatattattgcctcaagaatcctcgtcctcgtcgaagggcggcaccatggggctcccctagctccagcgaggaattgccgatcaagcacccactcatgcgccctgaaatcaccttgtacacgatctacactccctactgcaccatcttaacacttccctggcaccttggccattgagtaggtgaggaaccccagtgacggtgatctatctcccctcccgcaacccgccattgctcacggtcactagggctcaagaactccacctatttctagacccaatggacgagttaggggtacgagactccgccttaaagcaccgggccgcgaagccaatagagcggatgtggttgagattgcacgagttgcgcgcattctattaccgggcgtggaggaacaatgaaggggataagcctgacaaggttggcccacaccacagtggaacaagggcacacaagagactatgacaatgcaggtcccaccatgtcagcgacagaaagggctagcgtggcaccgcttcacagcccgaagagtgggcccacatggtggtgatcgtgactaggtgcgggcgctgggccacgtaggagcgat

SEQ ID NO: 54341 - DNA, 363 bp, Zea Mays
cggctgtcgttacctcgccagaatagtcccttgtcgccggagtgctccgtgattcgccacccaacgcggaccgccttctctgtccttcattccgcccattcccctgccatttaagcttctagtaagtccttaatgctcgccatgccttttaattggttattagcgcaccgtggtcttgggaccaagcccggcgaacctcggtgtccgccctaaaccaagtagcatgggtcgtagtccataatagtccgattgggggtaaggcgtgggtcggttatgctcagggaagttgttggtatgctcgtcgtttcgatggaggctgctgtgggggacagatatcccccaggtccacttgaagagtaaaag

SEQ ID NO: 54342 - DNA, 382 bp, Zea Mays
cccgaagtcatattcttcatcctaggtgtatcatttgattttggtgcacttttaccttcacgtgaacaatttatccacttactgaatgtcttctctctgtatttcgttagtggaaatccaacttcatatgcataccttttatagaatttatatgcatcatcaacatccttgaaagtcatccctaccattggcactatagttggatcaatgtttttttctgcaaattaattgacattgttgtttgtacgatggaatatgatcataacaatctaatcaatcaagaatcaaacacaacaattggacttacatgtgaatgcagtatttgaggcgtatccatctccctggagctaatattggatataggaggtcggaccatttgttc

SEQ ID NO: 54343 - DNA, 413 bp, Zea Mays
gacatctctcgtgccacgggcatctcagaagttgtcatttcattacttcggaccctacaaggtgttggctaaaattggtactatggcgtatactctggatctgccggcatctgctgcaattcaccccacattccatgtctcacaattgaaaagtgctctaccaccaatggctcaggtaacaccagagcttcctgattctactcttcactcacagtttccagtggctgtcctacagcgacgcgtcgtcacccgcggactatgaacaataccccaaggcttgatcagatggtcatcactgtcactgcctcttaccacctgggaatacttggagcccttgaagcaacactttccatcagccctagcttggggacaagctggtgctaaaggtagggaagatgtcagccaccaggagc

SEQ ID NO: 54344 - DNA, 301 bp, Zea Mays
cacgggtcgtaggagaatagaaggcagcaaaagctcaacgaccggcaggtcctggtggcaaccaccaatgctccagctccctatcggtggtcagagtacacaatcaccttcagtcaagtggattaatggcttaacttcgaccatccttgcaagtacctgctcctcgttgatccagtgatccgagagagtagggtaaagaaagtactagtggatgggggaagcagcatcaacgttaccttcccccggacgctcctgggcttggggtcacactcaaagacctcaccgagtcagacaccccttt

SEQ ID NO: 54345 - DNA, 613 bp, Zea Mays
aagagatccatgtccccataaggtcctccgccagctgctcctgatgttccagctcccattgccgcaacctccggtggcacgttcggatgcaactggtcatacaggacgtgcacttcctcgtgtagagtgttattgtatgcttgcagatttgccaaggctacgcttagctcctccacctaggctcgggcattcgcctcacaatcccaggctatagatcatgaatttacagcctagtctatagccctgtctcgctccacaacctcccgctgcaaacggtcaacctctactgacaactcagcaatacgacggctatcacgcgcacgctccctgtttccatggcgcagttccgtcgttagtcgttcaacccgaacctccagatcccctatgggatcattactttcgctactgctcccctcatgtcgaggagccaactggtgccgaggcatgcctcgaggttcggtcgccttctgctgagtagtcttggtacgtgccatacctctatatgagtggaaaattacttagtattgtttaaatatgatgcatgcataacctacgattatggaatcaacctctcgttgatcccatacctcctacacatagactattatttggc

SEQ ID NO: 54346 - DNA, 941 bp, Zea Mays
ctggggggtgggcccatcgtgcagcctctccaagccgtgtgatcacagtgtcatgctcacgctgaccgcgtggggcccatctccgtcttcctcgcgctggcgtgaacaattggtggcgtgatgccgcgcggactccgcatgtgaagatgccgagattcctggctgggtccgcgtctgcagggggtggttaggattcggtcgcagggtataagaccctccccatagtgccttctcctagtctccatagggtcgttgtatttgttgggatggaaggaccgccaacaccatggaccattgctggcagggccaaccgatgcggggaagatggccatggggcaggtcagggtcctcgtcgtcgcgtacaggagctaccgccgctttgagttcttcgatggagaccatgagggagggtgaattgctgacctggcctcataccccacggtcgacatgcctcgcgccatggccatgcaccttcgccatccccattggcggtaaggcaccctctatcaaattcacgagtatacgaatttcattttgcgcgttttcgtgggggtagattgatcgttgggcttgtggctgtgtgtctccggtgaggtgtagtcgcgcgctgcacgtttcgctgctgcatccggcctcggggaggaagaagcgacgcggaccgtggatccatacgtggtcgaccgagattagaccaaggcatacctcctcagtcgatggaatcaggaccatagatctggtagcgtacgtgtaggattagatcgcccttcataaaatctgggccgctgatcgagatctgacggtgaggattgcataccgtttcacaagaattctgatctaatctaggctactggatcaagatcgaatggccatggtcagcccattccccttcggccatggaatattgttaaagaacccctgcattttcatttattcaacccgcc

SEQ ID NO: 54347 - DNA, 790 bp, Zea Mays
ttttcctggaccgaagagtcttcagatgaagactttgattattttgctgcattagatgtggccgcagcggaatcctcaccgcgggtggaggttggcgaggtgtctgatcttcctagtgcgaggaccaagtgctggcgacgaagggtggtgtcgaagcatagcgttggcgaggtttcgcgaagtggtaggcgccatcggatggggatggagcgggatcgtcttcgagtagatcggtttggtaaacgagagctactgtcttcgccgattggaacgagcattggtgagggggatctgtggaatctttttgagggtgagaaattgaaaataatgttgttcaattatagggaggcagtcatcatcccgaaggttgaaccgatgtagtatgtggtgcccttgcgttgttctggcggtaatggagggtgtagttgtgtttatttgtgcggtgggtctagtgacccttcgtagagtgtatgtaactgcaacttgtattgtaatgtgtcctgttggtcttctttgtgtgagagacttcgtatcgtgcacttgttgtgctaatccggctgcacccttaggcgacttttgcacggagtgtccttttagtaaaagacttcgtatcgcacacttgttgtgctaatccggctgcacctttggcgacttttgcacggagtgtccttttagtaaaagacttcgattgacacacttgttgtgcttgtccggctgcacccttgggcgacttttgcatggagtaagacttcgtattgcacacttgttgtgcttgtccggctgcaccctt

SEQ ID NO: 54348 - DNA, 361 bp, Zea Mays
ctttgctgcagcattttggtctagttgccatgtgaaatcaggagaaaattcgtccccaacttggtctgtcaggccgactgaatgaacttcgcgatggtacagtgaccggattgggccgccagctcaaagacctcaccgccgatgatctcgtgcttagatctgcgccagcgttgcgattcatgcccgaccaaactcggataagcgctcctcggtaagaaatatcgcgctggagataaactccgaccactgttctcaccgccgtcgtgtcccgccatggttagtcgcgttggcatcaccggcgttcgccattatccggcctggctacgtgcctcagcgtttcaccacgtcgcagtgagtcact

SEQ ID NO: 54349 - DNA, 616 bp, Zea Mays
gaaggatgcaaagtggacttgaacatagacaaagtagctttgaacttagaggatcaacaccttaagaaagacattacgagcagtgttaaatacgtacaagtacatgcaaaagtccaagatacaagatggaaaaacctagatgacgacacatgaagaaacatatctcaatgggtgctatggcgcgacattgggtgtgtctagtgtatgctcagggtgagcactgggcaacaatagtgtcatgtcaaagagggtagactgcaaccaggggcatcagacaccaaggtgtacaccaaatctaatgcacagtacataagctaaattctaccaaagaggttgcagaaaatgttggaggcaatgaacatgtctagtgtgcagcggacgtagcactagactactacaacctctaatggttggcaatagctaggtgacgtggatgcacttatggagcaggtactgaagcaatgctttgagaaatcttcaaaataccaccacttcattcttttttggtaaagggataaaatcttccccccaagcttaaccatatcaatatcattgatatactttgtattttttcaaatcttcaatgtgacccttcatcattattgacttccagaag

SEQ ID NO: 54350 - DNA, 395 bp, Zea Mays
gccgtccgaaaatgggaggacaaattcgaaggattggagttccatcacatggaaagagaccgcaacgcggcagaagacgcgttatcgaagctgggatccagtcgggcctaggctccactcgggatcttcgtccaagaaatatcacaaccaagtatcctctcagatcagatggaagagtgcaacaccttgagccaaccagagtcggaccccaatgaatggagagagcctattatcaggtacataaaaaatgaagaagaaccggataacaaggcggtagcagaacgcatcacaagacagtcagcccactacaccctcgtagggggcacactgtacagaagaggtgtgacaggagtcctcatgaagtgcattcactcgactattgggaagcaactttt

SEQ ID NO: 54351 - DNA, 287 bp, Zea Mays
gctagaaggagggcttgaacctccgaccttgtggttaacagccacacgctctaaccaactgagctattccagctttggtgatttgaataaacccacagctatttatatgctagtacatactatttttctacttttatggtgctaagaaggtttgcattaagatgttttgtgaacctaatgccgattgaaactgaccaaaataagttggaacttaaagctaaactgatcatagagcaccacgtagagttccagaagttagaacaatttcaaaataaactcttaaccag

SEQ ID NO: 54352 - DNA, 1021 bp, Zea Mays
ttgtgagaaggacaggggctcttttacaaagaggctgcggcgaaagggtatcggatagtactggacgtgcgatctggttttaacatctcagattagacaggcatcataaccgaaccggtacataacccggactgtccgatcccgatcggacggtcgtgattttaaaacagcgccaaagcataacccacgcaggattagaatcggacgaccgtgatcaatcccaccgaagcggtatcccaaggggtaatccgagccgttatactaaaatccgacgacgcagcgctcgtcctccacccccgtgatccccaacgccgaacaggaacgacgccatcaaccccgcggtggcaaggagcccaccggtggtcaccgacctccacaccccaagccccaaccaccgactcgatcatcgattcgcgcggagaagaacaatgcgaacacctgagggggtacctttttggaagaaacggcaggaacactgttggccacggcagggagcggatgacggtgagggaaggggccctgatgagcgattcagtgagccggtgtgcaaatttgtccaggtgttgccaagacgagcttcagtacgccccgacaacaaaccaggaccacacaacggtctgtaaacaacgatgaagaccccggacggcggtggcggcccgagcacctacaccgtcaatttacggtgaacccgtagagcgaccaaggcaagtcccgggcggaatttataggggcccaaagtccgcggagagatgaattgctgattccgcacggctggcacggaggttgagccccaggatttgcggacggcgttgagaggatctcgcgtgatttggttgatacgaagtctggttggggagagcacccgagcggaactagtccccacgtgcggaatgaggttccaggtcggagcaggccccactagcgatatcctccatgagtgccccgaagaggaggggtcgtttgcgccagttggagccgcgaaccttggagcggctgttacagcggcgcccgactcgcgcgg

SEQ ID NO: 54353 - DNA, 1063 bp, Zea Mays
cgcttcaacagcttcatcagcagcagacgaggcaattctattttgtattaccggtgggggtattgcggacggccctcaccacagtcatcatgcgacgcttcttctaggcatcccctcgggcgtcgaaggaccctttttggtttctactttggcgacatccctagcacctttttcctttggctgtaataagctggttagctccgatcctagaggacttagcatggcgaaaggcaagggttcagtcattacctataggatttctgtcacgtcaatggaagatgtcgaaggagtttcaactgtatgcttcggcggagaagacttctcttcctcagagcggtttgattccacagtttactattttttggataccaaaagtttcggcaccatcttaggaatttcagtttctctaaaaaccttcggtctttttggtaacttcttatttttatccttctcgatggatctcattgcttgtattttagaatgcttataaccctcttcttctttacttccccggcctcttcgtcaagtttgtcataaccaggatattcgaaaccgagggcgtccatcacttgatttaatcttcgtttctaccgattgctgaaggcagcaatcatcaactggtcttctttcttagtatagttcccaagaatttcattgcacattgtttcgatcacttctagccattcggcacaagggccgctgaaggtttttttggaatataaagcagtatggtagccttacaagctcaagcttatttccttcatctttcctcttcggcattccgcattcgcctgatgtcgggaaagttttattcgccagatattcttgcacttaataccgagtactaatgtgctcgaccacaactctgaattgaactttagctaactggcatggagagccgagttgcatattgcacagtggtcttatcatgccgaagcccaactttaacagacacattaccatactcatgagtttttccctcttcttctcatcagccttcacatagaaccacttgttggtctagccagtaggccacttagtacgatatccaatcactggggca

SEQ ID NO: 54354 - DNA, 272 bp, Zea Mays
gaagaaaggaagttgttatcagatggctgttgatagcagtgaagcagatccaattgaaattatcaaggttgtgtccgagttcccagatgtgtttccaaaggacctaccaggtatgccacccgagcggaaagttgagtttgccatagagcttcttcctggaactgcccccatctttaagagagcatacagagtatctggaccagagttggttgagcttaagaagcagatcgatgagctgtcagagaaaggttacatccggccaagcacctcgc

SEQ ID NO: 54355 - DNA, 674 bp, Zea Mays
aataggaggtcttgtctcaatttcgtgcgatgctcgaaaaagctgcggcacgataccaagacgcaccggaaccgacccaagacgcaccggaaccgacccaagacgcaccggaaaccgacccaaggcgcaccggaattgaccgagacaaccaccgagaggtcaaggaaaaagaagcagagcgatcggaacagaggtcacagggggctaaacaagtttcctgacaagacatataaaatcgcagacgtgagcccgaatggtcagcccctagctccagaagaggcacttcctaagttctggaatgcacttgggttcttagttagagataatcttgacatcacaatctgacagtggagagatgtatcagatgatgtcaagaatcaaatgtggaataagctaataacgaggttcgttttgcctcgaggttcagaagaactcgtgaaaaaatacacaatgaagaagtttgcaatcaatttccgaaactggaggtctgagatgaatacaaagtttgcaaagaaagacctagacccgacgaaaaatataaaatctcagcaggtcagtgggcagtatttctagagcagaggagcagccctgatttcatatcgctaagtgaggcaaattcggaactatctaagaagaacaaataccaccaccaccttgtcacaagtggttacaag

SEQ ID NO: 54356 - DNA, 731 bp, Zea Mays
gctgcttgcgcggtggttcgcctccttgaccgctggttgcggcagagatgaaagggcgtataaccgtagggcggttgcatgctccttgtgcggcggttcgccttcttgaccgctggttgcggcgaagatggaagggtgtataaccgtagggcggttgcacgctccttgtgtgacgattcgccttcttcatgctttgggccagcttgtacgacatgtgaggcctggcccccatgtcataggaagggaaacctggtgcgcatcgggggagaccttgctcgtgatgcttcagggcgcgagcagggaaatctgcctttaaaaagggggtcatccctcgagtagcagccatgtcttgcttctttcccactcgcggtgtcctttcgcctccaagctctctgtgcccctttgccttcaaggtttccgctttgtgtcgccatagtttaccatggccttgtaacttcatgtcgagcgcacccagactgagtgactgctcgaaatggtacaccgcccgcttggatggaatgcgtcggcgcttggcagaaggatttgcgccggcgtcatccgccccgatgagcttgccgctagagagtttgtgccttttgtcctccctagcgggccggtgctaccggtcttgtttttcctctgttggaggtgcgcggccttgtgggagcggcgctcttccaccggtgcttggcttcaaggatgttcatcagcctcgcggtggtggggagcga

SEQ ID NO: 54357 - DNA, 356 bp, Zea Mays
atcgaggcactggtaccttttgttattggagtactcgaggaaaaggcaacgagtggaccgaggctcaagtttgtgtggagtggtggtggaggtgttgggatagcaggcacaacgaaaggcacagaggtgtttataggaaggggtggtgccgaagagggtgaataaatgtgtggggtgactgccttccttggaggggagacaattcaggagataggtggcagtgtagagacccttagctcagtaacgagcatgaagggaggcttgaaacaggaggatgcgaatgaggttggtgacgatgcaaatcatgccctcgaccttgccgttctaaggggaggtgtaaggacacgacattcgca

SEQ ID NO: 54358 - DNA, 645 bp, Zea Mays
tgttgtgtcttagtttttgcgggggatttttgcgtgtatattacatggctccgcctcattaaaaacctcaccccccgggaggaaaagagtgcgggccgaaatgataatgtttggtgaattaccagggcgcattagccctgaggattcaaacaaaaaatttgcggagattatcgatattccaggaatgctctaggtcctcgccggatggcgttgttagcctgtacgcgctgaggggacgccttcgtcttgacgatgaagggaccctcccactttggctccagcttgccccgtgactctgtccgagttgtccggatgagtacgaggtccccttcgttgagttctcttgggacgactgtgtggtcgcgccatgcctttgtttgagcttggtatttgttgagggcctgcagggcgaagacacggtcttcatcgatgaggtccttggaagttggttcgtctacgtcggggacggctgaagtgcttgtccacggtgacccatgttttatttcttgtggggtcatggcctctgatccatatagcaggcggaaaggagtgaatccggtcgcccggcactcggtcgtgttcagcgcccagactgcttcaggtagcaggtcggcccatttacccttcttgtcgtcgagaagcatt

SEQ ID NO: 54359 - DNA, 662 bp, Zea Mays
gcgctggatgcgtgactacctagcggagctgatggcatgctcaatttatagggcccgagggcggtggcgtccaattttgtgaaggtgtgctggcggctggagcgagagaagagttactggtggcgatctatcgtggtgattgcgcggtaataagctacgacggtcactgggtaacgaccacgagtcacggagacgtggtaaggtagccaaaggcatggcgcgaccgagaaaaacggcggtggccgcggtaatggccatgcggccacgtcgccggcaagtgaatgggtgacagagcggctacagggttgtgagctcatccatggtgaagatttttccatggtcgatcataatccatgccatagtgggcatgaatcgcggcgccagcgcgaatcagggcgtgtgggttgccggtggcgaggggggtgaacctaaagatctttttcagtgtattgtaccatgtgaaaccacattctgagcctctattagagcaatttgcagagctttgatctctaatttctatatagcaactagctaatccttctgtaacaaagttgttaatctacaatccaactacaattcgactatagtaaccatccccaaccaaccaatagatcctactccaattcgacttcaaagtcctgctaatgtcactagtggccata

SEQ ID NO: 54360 - DNA, 557 bp, Zea Mays
taacgacttgcggtaaaagatcttcgcgcgggaaggatccaccttatcaccggactgttcaccgcgccacttgccgcgcgatcggccgaagtgttctcaccggagttcgccactctttgtagccgtgccatgtgcttacgctcgttatcgtgtcgcaagatgtcgcaatggacaccccgtttaccgccagggtctttaccttgtcgagcgccacggtagtggtgctctggtgactcacctcccctccgaccgcaagctcatcccatcccaaattcgcgaaacactcgagcgatctctataaattgagtgttcagcatgctctgctagcttgttacgaacctatagcaccgctcctcgcttgggttcggagatgatgatctgatgctcggtttcggcgatcgttgccatttgaagtgaatcccagcgagggggtggcaggcggacgagcgcgccatcaccagggacctgatttgtgaagaaatagaagtccaggggcttaagtgtgattgtcagtgagacatcggaatagtgtttaggggctctttactggttattca

SEQ ID NO: 54361 - DNA, 951 bp, Zea Mays
tcggatgctatagctttgtgtacctgatgtgaggtgtcatgtgcgaacgtttcggaaaaaatggccaggctcatggatgaagcaatggttttatgttaaaaatgatctgagtgagagggaggatgtgaaggacataatccagcgccccgtacgatcacgctttggcatcaggaggcctttgatcgcaggtggaaatgaagctcaagcatgtttgaaggccttcaacactgtgtgtacttacattggcaccagagatttggttcaggagcacatttcttataaggtatggcctcttgttaatgattgggagatgcgaaggagaccgttgtttgttccagtgaaggtggcctggtttacctgaagtatagttagcgctacaaaagtcaatttggcgagccgaatgacgaatggattgaagtcgttgaggtaaccagtgatgagctgctggggacttatatgaaggcagaggacgaagccatgaacactgccttcggtgctcgaggcaaaaggagactaaacagagtttttgatgtgattggatttatttatcctgactactgctttcccactcgaaaacaaggaacaaagaggaaaatcacaactacgacctcttctgccacaccgaagccaaagagggctaaagtttttactcatcggtcatagctgcactctttagagaagactgttgcagtgcctgctatagagaagatggaagttgttgaatatgccaaagctacccctcagcttcggagatagtacatgctatgactgtcgaagctactgtcactcaggtagaagaagcagaaccaaagagctcaaagatagagcatcaaccgaagctacagagtcccccaaccatgacagggttgtcaaagttagcatctgctccagcatcgactcctaggaaagggaggagaatggccagcgttttggacgtttttctgaagtctt

SEQ ID NO: 54362 - DNA, 485 bp, Zea Mays
ttcttcttgatgtttggcctcttctaggttgacctctcttcatcttcatgaatttgttgaatttctttacaaatagagccatatctccatcactctcactttcattttcttcatcatcactatcttctttttcaattgccttagaagctttagctttgagagcaattgattcattcttcactttctttgccaaacttatagcatcggcttgagatttcttgaatatatcttgagtaagaatttcccccaatacttcggttggagaagttgtagatagatcacttcttactaacattgtcacaatggtctcatatttttccagaagagatctaaggaacttatgagtgaaatccacatccggtacattaaaaccaagtcccttgagttcattcactatctcatttaaccggttgaacatatcggatacactctcatcttctttcataatgaattgctcaaactttcctttacacacatatagcttg

SEQ ID NO: 54363 - DNA, 681 bp, Zea Mays
gggacctagtgaatgtttcccctaaatcaatttcatgaatggctacccaaatgtctctggccacgatgacagtgcggatactccaaagaacgatgcgttcccggtgattggtggcggtctagttcaatcgggtgggtcgacaagcatcacgggttcatgagagcactcaaacgagagagcagagaggatgagctgacctgtatcgcgctggccacgacgaggtcggttctgcggtgttcttgagtgtgtttgggggaaattcaaaattggaactcactggtgatcgactgggggcaatactgggtggctgggtgcgcgatgatcttacggagctcacggtggcttcaatttatagagattggccgcgagcacaacgaatttgagcggcgggttgtgatcggtatgaactgggtgagtcactggtggccgcgcaacgtggcctttaccgtggcggctcctccggcgatcaccgaatatgcatagcacggttagccacgacatggtaaagcgtttggacacgcgacggacgacagtaacggctcaacggcggtgagaatctatccgagtaatcggtgagcaagggggggagtacggcggctagccggaatagtttactggacgggccttatccacggcggcgtgactccgagcgtcatttgatcaacccgagcacgaatcgag

SEQ ID NO: 54364 - DNA, 429 bp, Zea Mays
atccgaagtgaatcaccattgagtaagtcaggaggtctttattgttgacataccacggtctacaggagtcagcagcaccacagatacaccaactgatgctcttgcagattcagtgttgcaaccacatgaaccgatggaggcataggggaatcagcacacagatcatcaacaatctccccgcattcgtcatggtatgaagagggcagctggtcgtgggcgaaaaaatcaggatgataaggcaagcatatgtgacgacgacgatgtcatgtctccatcccaagagaagtgtcgtgtcacatttgttgacatatcacggtcaccacctaaccccacaagaaaaaacatgtaacatccgcggacacaccactgtccccatcgcgacacactgcacgcagtcctaaaacaccacctcctgcgaagtaaaaacat

SEQ ID NO: 54365 - DNA, 377 bp, Zea Mays
gtttggcatacattttatgtaaataatttgtttaattatgataataatgtcttatagggaccaaggacaacagatacattgtataggttcgaagtgagagtctctagagcatacaccagagctgttatgaatagatttgaggaatcaatgaaatacgccactgcatacaaaatattaaaggacgcagacggttgtgataaagattggatcgtacaacatacaaaaaggtctaataaaattgtgtggggacaacatcaattcaagataacaacggacatagaagctggggagtatacatgcgagtgcaaacagtgggaacatacatgtttgtacatattatgttgattaaaagaataaatttgcatactaaagaattt

SEQ ID NO: 54366 - DNA, 540 bp, Zea Mays
gccaaaggctgctgtcattaattagtcttcctttttagtgtagttccccaaaatttcattgcacatagtttcaatcatctccagccattcttggcaaggctctttgaactgtttttcaaacttaaaacgataaggcaatcgaacaagttcatattttttctttgttccttttagcttcggcatgccccaatcacttgacgttggagatgtcctgttggccaggtattcttgcaccaggtctctggtgctgatttgttcagccaccaccttgaattctactgcggccagctggcatgctgaccctggctgcatgttgcacaaaggtctggtcatttcgaagcttaaagacaacgggcacatgaccatcgtcatcagtttccccctcttcttctcaccggccttgatataaaccattcacccttccagccagttggccatttggtgcggtagctaagaactagagccttcgtatccttgcggtatgcaaaattgtagcagccaaaattttcatgaagaccgtctgccctggcctttgtctga

SEQ ID NO: 54367 - DNA, 830 bp, Zea Mays
cgcactgtaggacctaaaggcagtatagtgcactcatgcaccgaaccgtcagtcgagtagtggctcgagggtagagtggccacacctccttaacgtggtcaacccggtctctccacatcaggtcatcctccttttcagtggagaatagaccgatggggtgagttgccatctccaacgggtgaaatccacagaaggtagtcagcgtgtgcatggctgcgacctctgtggtgtcatgggctcgaaaaccaagggtctcggagtctaatgaacgccatcctagatgcaaggggtggggctctaaggctagccacaccttacaaggaggcactccatgttcctcgaatagctgcacagtgtaccatggaggtgtgtggtatcctgcttcctgtagtacttcccacagaatgaggggaaagccctcttgagcaaggctgtcagtgtggcaaggtgcgtctcctcccacgatgggtgtgggtgaggccatcctttgcgaaggtgagtgtaagtaaggtggaaaacaaaaacacgaaggtggaaaaaataaaaggtaaaaactccataaaggtttggggcggccttgacttttactaatgtttttccttacccatttaggaccaggtcacccatttccatccgttcattttaagtgtttgagatatctctactctcgtttacatccaattttcattgtataatgatgcatgtaacctatatgtcctctcttcaatcatagggatgtaagacatccttcttataataatagcagcctacatggcatgcttaactagccacctagttacacatctacttcctaaggcttcacgtcctag

SEQ ID NO: 54368 - DNA, 1097 bp, Zea Mays
agtatgatgtgatgacttgaagtgcttcttaaccctagaatagggtacttgaccaagggatagaagtgtatgggtgtgtgtaataccaaattgagtgtgatctcaaaagttagtggaaatgctcataagagactaaacctgatggatttgagtggcacacaaaccctagaacacaaacctgatcaatttatagatcccgattgagctgatcacaaattttggatggggatcaagtccaccgtggcctagatatttctacggtggctggcttactgtggcgcgcgagggggaaacggttcaggggtgggaactagctgcttgccacaaccacgactgtacagggaagcaggcgactacgtgcctttcactgcgaccatggtgagcactggcggcgatattccaccgaccgtgcgacaagtgggtacggcggttatccagctcaggcctaagttctcctcacccaagatcttttgacccgccacagttatccacttcacactggcacagatcgtcgcggccggcgtgaattacgactcaagttcaccggcggcgacagattcactgaatcagtgatcttcttcaggtcacagtaccatgggagctccattcagagcgcctgaccgagcaagttgaggagccccgttctataattttcaggtaagagctccctaatccatctgtagcaaaattgttcttctacaaaccagctttgatttccttatagcaacctcgatcaaacatccactggatcctattcaaaatcaatctcaaagttcatctcagttcactgacagtcgaacttcagcttcagtggtgactgacaaccaaactttcagtccaattttctccaatttctaagtagctttagggcttaaccacttactaaaacttgcacccctatagtacctctacaaacttgttgtagtcacctagggaaaatctccatggattaagaaatacaaggtcccaaacttagcctaatcacactgatttcagagttagccatatgggtgttcttgtgaacttttacaaaacttcaatttgttccacatcacttgaaaatcttccaatgtaaaagttgtttagtttttgatact

SEQ ID NO: 54369 - DNA, 389 bp, Zea Mays
gcacataaaaaatattatcattggttaccctcgcacgctaaatatatcacgtagagtggttacttggaaggctctagacaaaagaaagataggaggcatcgggggacaagcatgatcggacacctgatcacggtcacatgtcctgcatatggcggacggtccggacactaaggtcaaacaatccgggacatgcacggacagtccggctacgaaggcaggacggtccgtgaacgactagaagcagcaaccttagaccgtcaaaccacaacatcctaaaacatgtacttggaatcaaaacacttccaagatgtctggccagctcatcagagtcggccctacttgtcgggtatctgggaacagggtacccaatgtaggaccatacctcccac

SEQ ID NO: 54370 - DNA, 840 bp, Zea Mays
ggttccgccattgctatgatcacatgagcatgctgcgggatggccacaccttggtgtgacgattgggatcatatttctagggcgaggcggtcgtcagagtgtttctcctgtgtgggtatggcaagcagtggtggcagaatccgcgttgccgccgacaatctttggcttcatagccaatccgactgtggctgttgctttgggagcttcgtctgtgcccaacggggtcgcgtgcgcaagcctcttggtgcggggatcttaggggcctagcgaattcctcatcggagttttgggggcgccaatgatccacagggcgccgtggtcgtcgtccttccaccacttttatcgccggtaagtcaatgttgccaagtcgccttgtccttctcattacatagcactcgttagtcacggattagggcatcggggcatctgccaggggctcgccggcaggctgcgccgttgtggatgtttgaaggagacacgtgtgggctgttggatcaaatgaggatgggcgagattataaggttgtatacccctttgttcgggccatcgatctcaaatcggacggatccaagacgatcgcatgtatttaaaatctaaaccgtggaggttagatctgacggctggggtgtgtataccggttcacttaaagcaccgtctaatcgtggtcgtagacttgtgatccaagggatcaaatcgcttgccagttcgttgttttaatctgagctttccatctcagatccgacggctagcgatcaccaataccccttcgccgagcacttttacataagaaaccctgggaaatagtgaaaccaacccgccgtcctacgtagtgggcctctg

SEQ ID NO: 54371 - DNA, 355 bp, Zea Mays
tggatttctcagcatgcacatggagagttttaagcccatcgagtatcagcaatattgttggctggcgttaatatctcatcgtaatactgtcactaaaagcctagtacctattactcttgattccaccactatcattgttggttaaaggcacaaactagctggtagtgttatactgtatgttatgtcatcagtagtgttgattaatttcaaagtaaactgaccgaccggcagtgattgcttatatattccgttgcatgcagtgtcgagcagagtgtttttcagtaattaatagagagcttaacgagagtggagctagtgtcattctctttggcgcctcgagcgagttggtcaccag

SEQ ID NO: 54372 - DNA, 568 bp, Zea Mays
ctaaaaaccaagaagatttttattttgagctggatggagtatttttttacaaaattatatcacagagctcagaaaatgttagcaacacagggaggacttgtttgagagcaagaaaattgaagatgattgaaggagctaataaatagcaagaagattttagcccctttaatcctccccaatctccttgctcctaaacatgccatgagaatggactatcccccctttgagtacagtagacttgtgtagcatttcactggagaagaagatgaaaccaaacacaagaatctagaacacgcatgctagtgaataaaaagaccaactctagcatgcaccagcagcacaccacaaagttcctcgctgttctgttatgaactctgatctgttgcatctatcatttggtttccccttgcatccctcgatgcttcttttgtttgtttgtatgttctcaaccccttctctttgtttcctgctccctctagttggtatgaagtatgaacatgtggcacctgctccctctagagaaaaaaaggttggcatcattgtcaacaatggctttgcttaacaagca

SEQ ID NO: 54373 - DNA, 479 bp, Zea Mays
gctggccaatagaaaccctgacgtatgactttaactgcaaggggcctcggtcctgaatgtgatccgcatgtacccctgtggacttcgtggagaagctctatgccttggcttcagttatgcatttcaacatgggttggcttattcctttcttgtaacgttggccgttgactatagcgaagtctttgcttctatgttttagccttttggcttcattgtggttagatggatggtagtgaccttgaaggtatatggtgattggagccccgccagtcttcggccattattagattgactatccgatgtccgtcggcgtcctgcgttatttgcagatgttcagggtttcttacggctgatgtgccgactacatgataaaatacatcagagggaaggggttcacccttcaccgctgctttggctaatgtgccagtctcttcgttcttgtttctctcgatgtgttgtagggtgaaacctttgaattg

SEQ ID NO: 54374 - DNA, 312 bp, Zea Mays
tcaaatggccagagttcgctctactgctagagtcgatcgagagggagatgagaccgaagctactgagactgttcctatttcggaagcaatgaagcgctctgggttggtaacaccggaggacatccctgctgctgaagcagagtgagctgatgttgaagagaccgattctgaagatgattatagcagcacggtggcgagcaaacccagtcatctggattttggaaaatccacagtctccgaaggtgaccttcctaagttgttgaaattgggctatttcaacgaagaaaagaaagagctgattcgctttggtgg

SEQ ID NO: 54375 - DNA, 540 bp, Zea Mays
tacctgttctgcaaggagtccaacctgtgtctcgtgctttccaagtgcaagtggctaatggttctgttgtgtcttgtcagcatcaactattaagagcatcctggacaatacaaggctgtgaattcgtgtctgatatgatatttctgcccctaccgtgttatgacatggtactaggcatggattggttggcatcttttagtcctatgcgagtggattgggaacagaaatggttggctattcccttccaaggatctactatggtgctacatggtcagtcatccggaattcctagctgcactgtggtggaactctgtgtgttgaatactgctacggcaccaatgactcagtcagttttgcatccccaaattcacgacattctcattcagttcgctacagtttttgaagatccaacagagctgcctcctagtagggaatgtgatcacacaattcccctcataccgggtgcacaaccaatttcagtcaaaccatatcggtatccccccaaactcaaagacgaaattgagaagcaagtcgaggaga

SEQ ID NO: 54376 - DNA, 547 bp, Zea Mays
gctctctgcagctcatttcagttttgacgactcctccagccaggagtagctgcctgggagcgagacggagcgctgccgggagtctccattgcttcaattggagtagctgcctgggaggagcacgagacgggggtacctgctactgcatagaactggtgaaacagaggtagtttgagctgcctggattttactgaactggagtagctgactggagtttactgaactggttgaaagttcccagtttgagctgccaaacagaggtagtttactgaactggtgaactcgacgcctttaacatcctcatataaattactattttataccagaaaaatccagtatgccaccattagcaacagctattttgcttagtagtatgcacttcggagatcagtccagcagggcaacaatactacgacccatagaataaataaacaatatcttagctgacgagcttgttgtctgttagactaggatcccagcgcagcagggcagcaacactatgatcccagcgcggcgggcaagcggtgatccgagcgacgcgggccgc

SEQ ID NO: 54377 - DNA, 1188 bp, Zea Mays
ctaagattcctcactctctcaagtctcaagtgtcaagaaaagcattggtgtggtggacatgggccaggaagtcacacaaaacctagtgaagttttttttaagataaagggaacaatattcagagatccctatatatatttctttcgagagtggccatatcttagttttttttgctgttgttcagtttagccttgcgacaaattcatcattgcacgcgcgctttagctagcaaggctcattggtttgttcacgtggtaggcgaggttgaggcctcggttgccgccagcactgatgctcgagacccccccccctcaacgatggtgatggtagtgccatttactctacaagaccacaagcaccctatcacaatcctagattgacgctcctctccaatctcaagccgcagtttcctgattctgccgattcactctcccttccaatgttctccactaaagacctgttcagttacatgggacccaagaagattgaatagattaaatctcttactatctaattttaactaaaaagagatttaataccctctaatcctctcttaaccgaacaaaccttaaccgggacttccctcaatccctctcacttctagtcttcttcactggtcatcacttccctctctatattctttcccacaagttaccaccctcgtctctcattggggaccaagagtttgggatcgagtgtgttcgcaacttcaatccccttgaaaggatcaagatgtccaagaggaaaggtggcgggggttctcaattttcttacatacattaaatcctaagctcaagcctatacttcacctcaagtgcctaatgatgtgataaatatttttgcactctaatgtccaatcttatactagcattgcaattctaatgatgtcaaagcttgaattgaatttctacacataaatgtataaactaaataaatgattaaaagattccttgatatttcgctgaggtcttggagagtcagtacttcccactaatacttataggagcacccatgcaagggtgtcgctctctgttgttagtgcaaggaccaaccgctctctacgagctagattttcgtcgctctagtatggtgaaccactaacaactatgttcatctaagcccaaggagtcgaaaaggttacacgttgctgagtttgttttgcctgctaaggccaaatcttttgctcgc

SEQ ID NO: 54378 - DNA, 349 bp, Zea Mays
ggcacattttcctttcagttacaaagcaaaccaaagtgccaaatgtatattaaagttatatgcaacataatcaaacactcaaaccttgcatacttgacctttttaccgttttgctccttttggcctatttgagctcggggttgaactccaaatcctcaagttaccataacttgaacttaatggtcatctatgagctccaacaccctgcaatggtcacaaagaacatttctaaacacaaaaatgacccaactaaaagttaaagtgtacttagctcttttgggtcccttccaggttatgactttgatacttctccactttcttgcgaccatgtcctactaattgagcaagg

SEQ ID NO: 54379 - DNA, 343 bp, Zea Mays
atgaagcgggaatcgaagcttcatgaagctcctgaagactaccacttcatcgcttcctggtagggggacagtatcctctcccccagccatcactatagatacatcatgaaagtatttcccctttatcgattcaatttggccttgcttgatagtagattttccaaaaacgacatggttaggcctccacggccgatcctcgaccccttcattctcgctctctacatcgaaactctcactatcgctggagttttcagatattccagccaacatctcattggtgatcttctccatgttggttttttccatagcttcgtaaaatccggccagcgtcgggtcaatgatc

SEQ ID NO: 54380 - DNA, 558 bp, Zea Mays
gagagggtagtaaagcgaacaacataaaggacaatttccttcctatgtccttttctgttgagaaagcataccttggtttaccgacaccaaggaataagtagcaaagatcactaataactgtattttaaaaaggggggaaagggtcaaaatctggaagcgcagtgagtaactgtccatgccgtagacaggggacaatgaagacgaaaatgtggctgcaatataaaacgaccaatgtatcccaaattctaaggtgcgaatggcatgaagcaatcgactaatcttggagaggaaaaatggatctggtagaagcatgaaacattgggggaaaaggaatacaaaccttgcaattgacgaatcttgcgaaggaaaatggatctagtaaaagcatgaaacgttggggaaaaaagaatacaaaccttttcctaacctgatgaatatgttggacgacggaactagctgtagatgaagaatacggaggatgtaaggacaaagaagagcgtgctagaaatggagagagtgaggaggaagatgggcgaagccagcgacgcaggcaacaga

SEQ ID NO: 54381 - DNA, 978 bp, Zea Mays
ctcaatcattcaaatgtcgattccgcagaaaatatccatccaaacgcgttcaaatttttgcacaacattcataatgagtagcactaataatcccaccaagcagatttgtaaaactattgctcaattctagatcagagaggaaatccgaataatcccaaatttgaagagatttgatgaaatccataagattatgaaataccgggatgacgacatgtttgttgaacttttccacaagctttcggactgtccgtgtgcaacttcgcttcaccgtccgtgcacaatcgacgaaagagactttttggcgagtggagagcgagacaggagaacaatgagcagaaatgacaagtttgctgcctctgcccggctttactgcctgtcgcgaacggtccgcgtaggggcggcagacggtccgcgccctgatgacttcagactgtctgcgcttctgaccgaactgtctagttcctgacactgcgaacggtctgcggtccatgggcagacggtccacggcctgatactcagtttttcaaattctgtccactctctgattttgaatttcaaatctgaattgatgctcatagatggacattttgaccaatcgaagggttagtatgcatgcatatacacattatgtatttgaggaatgcaaattttcatatcaaactacttagatcaatttaaaatgaaaaaatcatcaaaaataccaaataaatagcatagagagcatatttagagccgaaatgcaatactacacatgtgcgatcaacttcaagccacatttgagaggtcgatcacattcatttcacttcttagagaacaaaatctcgtttcatccaatggctttgtaaaaatgttggctaattgatcatccgtaccaatggaatatatagagatatctccctttccaacatgatcccttaagaagtgatgtcgtatatcaatatgcttagttcttgagtgttggatcggatttgtagccaa

SEQ ID NO: 54382 - DNA, 1209 bp, Zea Mays
agatttaggaaggactagagaaaagatggagaaaatctatgcgaagctcttcttctcttttccaggtcgcttcatcttctccgtggtgactctattgcactttgcacatctttatcactttattccttgtaactcaagtcaatgtatcaagagtcttgataagatactccgtgtaagtcaaatcatcctaaacactgagctcttccattggtaactgttcctgagggacacggggacacttcttaagttgagacacatgaaatacattatgcacatcagatagattatcaggtagctcgagttaataggccatctctccaacttgcctaaaaactcagaatagtccaatatagcgagagaacaatttgcccttaatcttgaatctcctcattccatgaagtgatgacaccttgaggtacacatgatttctttcctcaaattccagtggtcttctattatcagcatagctcttttgtctggtttgagctaccctcgaattctctcgaattatacaaacttgttcttctgcctcttgaataagttcaggtccaaagaactgtcttcctctagtctggtccaaaaatagaggagtcctgcatttcctgccatacagagtctcaaatagtgacatcttcagactggcttggcaactattattatatgagagctcagcataaggtagactcttgtcccaactactaccatgctaaagggtacaagctctcaacatgtattccaatacttgattagtcctttcagtctgtccatcagtatgaggtaggccgaactaaaattcaacttcacatccgtattctcatgaaaacttttccaaaatctgggggtaaactgtgatcctctatccaaaatgatcttccttggtacagtgtgtagagactcaatccgagacatgtataacttagccaattgtgatcccttataagtagtcttaaccggaatgaaatgagccactttggtcaatctatccataatcacccatatagcatcatatcctttctgggtgcgagacaatccagtaatgaagtccataccaatctctttccacttccactcgggtatctttagtgggtgcagtagtccagctggcctctggtgttcaaccttaactctttgacacacctcgcacatagccacatgtgtagccacatctctcttcaatccatatcacaagtacttctgcttcaaatccgt

SEQ ID NO: 54383 - DNA, 316 bp, Zea Mays
tgctacttcagttagatcttgtgcaagccttaatttatctttccatttaacgccttacaattgcttcatatgattaaacactggtaaatgtgattacaaaactaggtacaaagaaatgtttagggagctgccctatatgctttaactagctgatttcgtttcattcacttttcatttatggcagctgtttaaattccagtaaagcaaatgttcatgtcacatttggttactgttgtaccatgcttatactactgctatggccagttttgacatgagaagattacttatgtcaatgttcttttgttacagggtaaac

SEQ ID NO: 54384 - DNA, 688 bp, Zea Mays
ccactaatgcgcagacactaccctcaagggctccagcatgccagaaaacatcaccggtcaatcttgcaagctctatagcggtggtgtaatgtgcattagcatccacaggtgatccagccaagaggcaataatctcctattatcttctgtgcacgaccaagccttctttttttagccttaattacctaataaaaatacagaaggatgttgtcttgtataagtaatacaatcttggactatttatcatcaatatatactggtaaaaaatacttggaacacctatgaacctcctctgagccaagactggattgtgaatccaaaggggtcttcaaaatggttcctgtggattctgcacgcaagacccacttctcaaactccatcaacaaagaagcagcgagatcttggatcattgtaagcatatgaagttccagcgattgctgatcagaaggagggaacataataatatcgtccctcttcttcgctgacagctataaaaaaatacccagacaaaaagacattgcattagaggcttagagcatcaggtgatataacatgacaaagctagatgtgttacaacatgggtacaatattcattactgtttaggtaggttcaatcgcattacacaaagagggaatgactaagcacagtagtgaacataagataggccttaaaatactagcagaatgca

SEQ ID NO: 54385 - DNA, 502 bp, Zea Mays
atcattccaaccctcttcagttatatcatcaatcttaaagaaaatgtcataaaggtaaggtttcacacccacctcaatgataggaggaatcatagccacactcttgacatggactttgaatctaaccatatctttagaatctaaagataggatatcaacttcttcaacagcccctatagtagaacctatttcacaaatagcctgataattttgcaactcctctggtacattttcggccacaacccatactgcatgcaatttagacttaggtttggcctgagaactccaatgcgaaacagaaatttttgctcccgacattttcattttgagttcggggaagttaatcatttcatcaagtttctcttgagaaggaaaatgcataaggaaaccagcgtgacacttggtagctttccaagtcttgccccagggaaaatgaaacccaaagtctttctcaagatcttcagcagaaatcaaaccctccataacagtgactaaacctatg

SEQ ID NO: 54386 - DNA, 666 bp, Zea Mays
gaattgtatgtgttgttgggatgtgacaccatggtatcgagggtactagagaaaaatagaaagaaatggcatatgcctaggaccgttgcaacattgacatggtagtatacacatgcacaatgtagagaagttcaggcagtctgagcgtaatacacctacatcatctgtgtggtggatgtttatgtgcaagtccgaacaaagcttacatactcagataatgactaagctagcgagtaaaaacatcctaggtcacaacctttgtaatgttgatgacgaccctggtgtgtttttttagccttggtcgcaacctccacgatgttgacaacgacgatatgtaacttctaaaccttcattttatagcacaaaggataaagttacatccttgtctagacgacaggcctgaccaacagagatccaactacttttatcttatcagagatccaactacttttatcttattgtagttattgtatagtatatgatgcatgcctctggagtgccatcatggcaagtgtgccatgccatagtgataggtatgagtgtctgtaccgagtatgacgtagttggcaacagctctagctgcaagcagtgatcacggatacacatgtggcctcaagtgtagctacagtgatgcttttgaccgcaacatcgtcccttgcaataaat

SEQ ID NO: 54387 - DNA, 425 bp, Zea Mays
ggggtagaagaggccgactcataatgagtcggcttcgagtttgtgttaattcccccattacgaatgaaggatgaagttactccaccgtcacttgcattttgtttgtgtgcttgaaagtttatcggcattttagaggtaatgcccgagtgatgattgcagtccttacttttccgagttgtgatctggcactttagtagtaatgcccgacctaaggagccaacttatactcatgctgacgtgccttcttgagttccgaaccctaaatcttactttttcctctaccgcttcttcgttttctgaattctcgagcacgctcattccgcccgagagattgcgatggcacccaagcgaaagagacagagtgccgctgttccgatcattcaacccatcgatcccaacaaccagctttcattcgctggtaatca

SEQ ID NO: 54388 - DNA, 359 bp, Zea Mays
cggagcaattgacttaagtcagcaaagacttaaggcggtgtgacatgctcacgtttacttaacttagggtgaccactagaccctaccaacggagcagtcggtagtgacttaaatcggcacgacatgctcgcgactactcgattcagcataagcacgtttgcgattgctcgtcttagggcgatctctatgccccgcgaaataggaagtagtttcaaaaccatcacactacacttacttctgcaatcataacgactgttgaattcaaacaacagaaaaataataatagcgttcagtaccgagaacattttctaacagaatattcgagcacattgaccacatacacaatgcattcagtgttt

SEQ ID NO: 54389 - DNA, 879 bp, Zea Mays
tcgctgatcgagcttggcttggcggagctgagaggtgggtgtgggtggccggtcggccgtgggatactgggatgcggcgacaacgagaagatattggttcacctcagggtcagtgctagggccttttataagcctttgatgataatgacccggtgcgctgcaggatgctatgccgcatcgctcgtctaggtctgcttggaatattcgcccccatggtagctaggcgtaggagcaggattaacagcgcaactaccttatatatcctctctctctctctcgctgatctgcatgctgataactggcactgcctctcacctgtatgactacatgtccacgtgtgcccgacacgacgatctatcttgccatggctgttcggtgatcttatctctaaccacacccaaattgcatgtatctgctaaatgggtattagttaattgttgttgtttttgtttaaaactatacattgtgatgccttttttaaagggatttttacgtttcagccactagtctgcacactttactcagttctacccccacctcaattcactcctcagttttcccctcccaccatcgttctgcactcaggaatgtccctacagacgagttccgtccgttaacgctgcctgccatgtgggacctgcggcctgacatgtggaacccatcccttttctcccccaaatcagaggaaacagagccgacaacagattaccagatccccgtgctctcgttttcccgagcagcacatctccgaccaaccccgccgttcacgcccgtctgcccgcagaagtctcattgcccgatgcgctcgacatggctttgctgcacctgtgctagcaatccctggtagatggaaggagtagatggaaggagtagcacttg

SEQ ID NO: 54390 - DNA, 334 bp, Zea Mays
aagacttgaataggatgctctgaatatgtcaagtctggttctaaggcaacatccgttacttcaatggttcgatcgggaacccgaagacacttcttcaattgagacacgtggaacacattatgtactgcagacaaggtttcgggtaactggagtcggtatgccactggtccacattgttcaagaacagggaaaggactaatgtaccgggtgcaagcttcccttttaccccgaaacgtgatatacccttcatcggtgagactttgaggtagacataatccccaactagaaagtacaagggttgtcgtcgcttgtctgcataactcttttgacgagc

SEQ ID NO: 54391 - DNA, 500 bp, Zea Mays
caagaagggcaagtctcagcatcagtgccaccatccttaccgtggcaaatcttctgacttgggtacttctggaagaagtactcagaggtttcgggctgttgctaagcccgggctggggctagtgtgtttccgctgtggtgatgcatatcgccgtgcagagtgcaagtggagtggcaggtgttctatctgcagtcaggaccacaaggatgtggtgtgtaggaggaatcctaatgggaagctcagatgggagccggtgacttcctcctcttctcagggcactatcaacatgatgtcaagtgctgagcagcaattttcagttcctcttcctccgcaacaactttatgtgcctgggacttttcagttcgtgctgatgtagggttttcctcagtatcaggccgagcctactcctgcaccgtctactcctatgacgtctcagtttggagctccgcgtctgccttacccggcagctcagtggggttcttctgttaatttcactccag

SEQ ID NO: 54392 - DNA, 385 bp, Zea Mays
caagaatgttgtccactggatgatctctttggatggtatgatggactcgaggatgaggcaatgatggttgtctttgaatttgctcttcatcaccatcctcttgatcaagaggcacttcatcaacaacaacttcaagttcatcttccaccatggttggcagctcttggggttgatgggtttgcttgagtggaggatttatcacccaccacctttgcgcccacatcaaagacctcatttgtcatccaaaaggttccttcttcatcattcttttcttgtggtctcacttcacctattgcaagcttctttatgggcctcacaaggtggttcttcatttcctgcaatatcattagaaacatgcccttgcgagccattagattcatcaaat

SEQ ID NO: 54393 - DNA, 435 bp, Zea Mays
aaagactccgtgcagaagtcgcctacgggtgcggccggatcaacgaaggcgcgaagccttgtcatacaaattttggttacatacacacagccagggcatcatatattacattggctcaacatcatcctcaattcctcaccctcaaaaagatttcgcagctctccttcacctacactcaccccaatcggcaaggacaacaattctcgtttaccagtcctgtccacgcgatgacgaccactctccatctcgctacgatgacgtctaccactttgcgacaatccactcactctccgtttcgccaccgcccttcgccgcctatacccagtactcgcacccgggagcccctcggaaccctccacgcgtggcaaaggcttcgctgcagccacatctaacgctgcaaaataatccaagtcctcatctgaagactcctccgtc

SEQ ID NO: 54394 - DNA, 627 bp, Zea Mays
gccggcctagatacattgaaagggccaaggtagcgaagcttgttgaagggacaccttccaccgctgagctaggacagcctgctcctgccggctgcaaggaagaatcagatgaattgctagaaataatagggcaagagaaaaatcgaatcggccagagcgccgaagcattctaccgaagccacagaaaaaacgaccgaagtgccagagctaggagaatcgggaggattgcaaaaaatcctgagcccgccaccagagccggagttgccgaaggtgcccagagctcctgtaataactcccaagaagaggaggatggctagtgtgctctacgttgttttagagtcgacaagggtgtcaactcctgctcctggaaaggagactgctgaagctgctacaatttgcgttgaagccgaagctgggccctcagtgcccattgaaatagagcctgctggaactgggaagagtattgaacaaggaccttccgacgtcggtctggttttggagaaagaagacgcgtccgagaaggttgaatctcctactcccgaagcatctactgaagagcttgactttattattcaacatgcttcgggtaaaaagttgtctgaagaggaaattgcggaagccaaacac

SEQ ID NO: 54395 - DNA, 375 bp, Zea Mays
cgcttggcgtgctcgtgatgagcagcaatggcgccgtcgcggctagcgtgcgcgccgtcggctcggtaggggtgatggaggtagacgaggtgttgtagccgttagatggtcatcgtggggctaccatcgtgcgatgggaataccagttcggtgttttaatcgcaccgtggattgaggatcgggcggccgagggtgagcgttgtgaccgtgcgctgtggaccgcggatccgggatttgacggtggcgagtgggggctagaatttaaccagggtcaatctaatcgcgatcgtttgtagtggatcggacgacctagatcgtcggataccccttcgcagcgcacgctttgcagaaaagtatttatgctttagggaaaac

SEQ ID NO: 54396 - DNA, 449 bp, Zea Mays
cacacaatccaaggatttttcaaaacatctttacttggattcgcgaagctcctcaacatttttctctatcttggtcttccaccactcactaatttcttggctagcttttgcgagagcacaattttcattggcttcgacaagttttttacgaagatcttcaattttggctttataagcatcggattgagtattaaattttgcttcatcttcttttgctttatccgccaatgaaagtagaattttgtctttcttcgtggccttgtttctcagcctaatgacctctgatcgaaggttgctgagagctatagtgcagctctcgtcttcggcattcttttgcgcccttagggcgttgctaaggattaagccctgcaagaaagaataaaggattagcacgagaataaaagacttcattcccaagtccataagcctcaaaattcacttttgtacct

SEQ ID NO: 54397 - DNA, 706 bp, Zea Mays
agagaactctagatatgaggtgtctcgtggcccttaaggttgacctcttcctccgtgttgctgaaattgatttcccgcatttcacgcaggaagcacgtgttatcagcggtagcattgactaaggcagcgatagcctcagccagtgtaggaggtacaggtggtgggttggtagtgtcctccctgccgggggaagttcccgccccatcatgagcacgagttcgcgatggcatttgaggaagaaaaacatctgaaattattacatgccaaacatacaccatcattattacattgctgaattgtaataattatacatactcagtatacaactcgacttccatatttattttacataaggacattacttaaactatactactctaatcctctttgtccttagctgctccactgtccactttaggagaccgttcatctgcaaggttcatggaaggaggggctccaaaaaggtccaaccccccatgatatcctccatttactgttccagatggtccatctcccattgctgcaacttctggtggcacgtttgggtgcagccggtcatataatacgtgcacctcttcatgcaaggtgttgcaatatgcttgcaggttttccagggatgcacttagttctgcttctcgggctagagctttggtttcacaatcccaggcgaaagagcgcgaatttatggtccattcaatggtcgtat

SEQ ID NO: 54398 - DNA, 540 bp, Zea Mays
gaaggatgatgaagtagtggttttcaaaagttttttcagagcaggattacggtttcctctgaatgagatgataggagaagttttgaagaattttgaaatttatcttcatcagctgacccataacgctatcgttaggctcagcatcttcatctaggccatccgaagccaagtgatggacccagatgccaaagcattctgccgagtgcacgagttgcactaccagacaaaggccagggcagacggtttacatgaaaattttggttgctacaattttgcgtatcacaaggatacaaaggctccagttctcagctatcgcaccaagtggccaataggctggaaaggtgaatggttctatatcaaggttgatgagaagaaaagggggaaactaatgacgatagttatgtgcccgctaactctaaactttggaatgacccaacccctatgcaacatgcagctagggtcaccatgccaactggccgcagtagaattcagggtggtggctgaacaaatcagcaccagagacctggtgcaagaatacct

SEQ ID NO: 54399 - DNA, 456 bp, Zea Mays
gcgacgtggagctctggctttatcattaatctctttgtgccacactggccgatagccttcatagcctaggcctcagcatggctcgtcgtgttgcgggtcctgtatatgactagtgcgcttaggtctaggcttgataggtcatgagtgggtcgtaggcctaggagccagtaggtcatcagtggaaggaggaccgactctcctgctacggctcggtgccaggcacaattaatgcagtcaatcatttatggtggttcagtcatggaccaggcacagaatccactcgagtggcttcctctcggttcgattgatgtgtgttgcgttcttgctctctgtgttgtgttctacttctccctcttgcttctattggagttgttgctcccatctaactatttacaactacaagagactccaatctgtggagatccttgtgaggagataattataaggaagatctat

SEQ ID NO: 54400 - DNA, 352 bp, Zea Mays
gtcaggtcatcttgaacactaaggtcccccattggtagctgctcctcaggtaccctgaggcacttctttagttgggacacgtgaaagacatcatgtacatctgataggtgatcgggtagttctagttgatatgcaacttctcccactcgctttaatatcaagtagggtccaatgaagcgagaggacaactttcgtttaactttaaatctcctcataccccggatcggtgacaccttcagatacacgtgatcaccctccttaaactcgagtagtcttctccgggtatcagcatagctcttcttccttgattgtgcaattctcaaattctctcttatgattcgcacttgttctt

SEQ ID NO: 54401 - DNA, 532 bp, Zea Mays
ttttttgaagctccactgttcacagtgcacagaataggtagactggcgactgggctgggctccgatgcaaagcggctttctcgtccctcttctcacctatctgatcggcggcatgctcttttctttttctcattccgattcgtctgcgactcgtgtctctttgtgcagagaaagagaaagagagagagagagaggagggcaagggcagggccagtttgtctctcttttttttcatgcatgcagaagatacacagtggacgtactactgtactgctaggacggaagtggggttgggcttggcttggctttgccctttgcttttgttttgcggtggcttcgtgctccgtgctcccctccccgctacacacacatacatccctttcagtctttctgcatccggccagtaccgcccttccttttgtcccttttatctgttgccctctagctacctagcgccgcgcgcgtaaccttggcttgttagcgcatgcataccactctaccactaccagtagtactgctgccctgccctgcc

SEQ ID NO: 54402 - DNA, 736 bp, Zea Mays
atcaaatcctactctagaattgatgcaacagttggcgagtgtgatgtctgttcaacagatgaccattccacagatgcaaataattccagcagctaaattgccggcttccaccgattgtacgaccgtcccaagctctatgacgtcaacggaaataaggtccgttatccagttgatgacatcacaaggcctgagcagtgcacactgattataagatatggtattaacaatcatcgtacgaagaaagtagaaacatgtgttgtgatcctaggatgcaagtttcatggaagctacattttagatgattattgcagggtagaagtgacgacggtcgtccaaggatccaaggatgacatgctaaacatccctgggcccgaaggtatcgagacacttggacaagccataaacaattccatacgttggcctcaaagggatgtcgaattggttgatccaccaacgccgtcgtcgtcgcatccccaaccatctctgcctcctcaaactttaatacctattgtacatccataatcacctcctcaatattcacatgctgctctcatcctctttctaacctaccgcctccgccacaagcatcaacatttaggactccaccttctcctcatcctcttggagacccgctgtctacgccaccagcaagggatccaccttctccatagccatcaagggattcacggccatcaaagaaatctaaattccctataccaaaattgttgtccatgtt

SEQ ID NO: 54403 - DNA, 717 bp, Zea Mays
aactctagttaaactacctttgtatgatttcttgcaatgtttacactgccactcctttgttccaccaacattttttccacttggaacaccaataatattaacttcatctagaagtggatgtctcataccagtagccgcagccccatcttcgtcacaactgtctgcgtctgcaccgccatcttggatatctacaggcacctcatggatgacttacacatcatcatcatcatcatctttttgatccgcacactttcttttgcttgaagaatcgaaaccatgtctgcgttgagcttcaggtttgggttgggctgtgcattggcggattgagcgtactatttaaatggtgtgggactgtgggttgggctgtgcgtcgtcccttcttctccccacgatggcagccagccgcggagccgtctcagcttcctaatcccttcctcttctcctttcgtggccccgtcgctccctgtactcacgctgcagcaccgatttcccattgcaacgcggccgacggcccaatcgattcctcttctcctctggtggccccgtgccccgccgctatttcccttcctcttatgtcgcatcacatcccgtggccccgccgctattccccttcctcttcctgacacgtttatggtttcccccaccgcgtcctccatggaagactggaagagccttggtgccttgtccgcttgacgtcgatggtggctctgcgccttt

SEQ ID NO: 54404 - DNA, 328 bp, Zea Mays
gttatatttttcccaaatgtttctgtgcctcagatgccatcacggactcgagcacatgatggggcggggacttcccgtggtcgggaagatactcccaacccgtcactagtaccaccaacgttggccgaggctatcgctgccttggtcaatgccaccacagataatacacgcttcttgcgtgagatggcgggcaatccgttccaatagcatggaggcagagctcctcctcaaggactgcgcgatactacatattcagaattttctaagactcgacccccgctcttcatcaaagcagaagaacatctagaagctgatgagtggataagag

SEQ ID NO: 54405 - DNA, 699 bp, Zea Mays
gacgtcgcacggcggagaaccgagctccggcgaactcgtaccggctaagataagtaatggtcggtgccctaacttggctaagacctaatttaatacctaacaaacgtttcccctcaatcaattacacaatccgagctctaaatcgtactgcccacggagacagtgcgaactatggataaacaaacgtgtccccggcgatctagggcaatctagtttaattgaatgggtcggggagcatcagtggcaagtaagagtgctgaaacaagagagcagagggtatgatcggacctgaaatgagctagccacggtgaagactctttcacggtgacggaaacccgatttgggggaaatgagcaattcgtggatttaggtgagtaattggaggcacgagcaggtggattggatgctagaatacctaacggagctgagggtgtgctcaatttatagggctcttgagcggtggccggtgaatttgaactcgcgcggtggcggtcggagaggaggaggtgcactggcgcacgcgattggcggccattaccgtggcaacctcaccggcgatcactgatgacccaatttcagtcagcaaggtgactgacagcacaactttgggcagcattttctccatttttttgtataacacaatgcttaatcccttaagcaaagttgtactcctatagtagctttagatttttgatgtgt

SEQ ID NO: 54406 - DNA, 694 bp, Zea Mays
gtctgtttcgcagagacgtctgcatctctcgatcctagtcgttctgacctggtgccctgctcaccttgctgcctcactatcacatgtgtgggtacgccctagcatggtcgatagtaaagtacgtactactacttcggtaatcggccagctaactgggagcctgcaacaagtctcacgttcagtattccatatcatcatgacaaacagtgcggataaccgctcagtaggtcgcaatcgggtagcgtgagctggggaacgcagctcaaacgacgcaacagtgctgattgttaagaaacctttcttgggccagcaaggcccatgtgacccataaactctagttattgtctataaatatagagaagatctccatatcatgtaaccttggacagcagcaccatacaataataaagaatcagtcactctctacactattatctccttgtgttctactattattcagttaaggagcccttggactacactcggtagcaaggggttcttaacacgttatcacgcacatggctctactaaggagatcgagcaaaaggtctatggaggatatatgtattgtcgacagtggcacgacaaataccattttaagggaaacaaaatactttcacacgatcatgaagaacgttggaagtattaccacaatcgccggaagctattcatgtgtaataggctccggtaaagc

SEQ ID NO: 54407 - DNA, 606 bp, Zea Mays
tcggggaaacgacctgaattgctcactgtcgtcgttaacccgcagacctccgccgtgcgccgtgggcgggccttccggtgacctaatcctcggtaaagttcccacctctgtgttcgccatcttcctaatttcattttgcaccaactgatttagcaatcgactcttcgtgtgggcgaattgggtcgcctcggtcatggcctagccgcgaacgccgcgcggtgtgcgcacgccgccacccagggaaacggaggtaggtgatggcccctggaccgttagatcgggcgtgtacggtcaggattagaagcgggcgcagttggctcgggtaccgttgatctcgaaagtaacggtggtggttagatctggtttcataaactctgggccgtcgtatcccgatccggcggctggtaatgcataccggttcggggatgagcgatctaatctgagccctcagattctaatcgtgcggcccacatctacggataccccttcgtaggaactttttgcttaagaaaccctggttctattagaaataaacccgcggtcctcgggcctgtttccctgagtctagggaataattgtagactaacccctgcgttttctgataat

SEQ ID NO: 54408 - DNA, 1099 bp, Zea Mays
ttagtctttcctaatgacaaattaacatgtaattagtgtctattaaataaatttaatttatttaaaagtggattaagactttgtatggtatattatagactattgcaacatcatcatatgaaaatataataaaactttatagcttttaagctcatgcatcaagcatttatgcaagcaaccaaacatcatctcgtatgggccaagctaaactcatacaggcaaccaaacgagggatattgcatgttcttagccaggctatcaagagccagattccctagatacgagtcaggcccacccattcagacaaccaaacagacctaatgtggttaggcgcgcgcaaacatgaacatgatgcatacagcagattgtcaagagatcgatagataggctataattaattgatatggaacttggacacagtaaaattgacggaccggttatatgtgttctagcttgcattgcgtcagctcgatcggtttgggctgccaataatgtggtaaacgttgactttatttctcagagatactctccatattgctgcgcctagacacgtcatctgaatgcgcgtccatgcacgagcgctgctactagctggtactgcagtacagagacagatcgatgatgagtgattaaaaagggaattagctttgcatttcatatacatgaaaagtgggtgtatataagtccacgtacacaactcgctagagttcaagatgcatgcatgccagaagacttcactgacgaccaactgtagaacgatgcttacctgtacccgcggacagcaggacgcgcaaatgcatgcatgaattttacgtccgcgcgcgaccattaatttgtactagttgcacaaaattaagcaagccatgttcaaaggtcagttgataatcctgctactagtacgtaaatagtttcctcctgcgtacattatattattttcttcgatcggcgcccggttgtattaaaaccgacgatgataatgattatatggatgcaacctaatacggcctagcttagtgtatctgtatggtacgatgaatgtatacaagcgtgcacgacagacagacaggcctcggaacagcagtagctagtagtatgggca

SEQ ID NO: 54409 - DNA, 511 bp, Zea Mays
gtcccgaaggctgctccacatccgccatggcggagcatcactatctcctttggggcatccgactgccccgaaaacatggcaggggccggtatactaccactcatcaccacccctgtcatcgccaacatgaggctgcatcatgtcctgattgatggtggggcggggctcaacgtcatcagtcacgttgcgttctagcagctgcagatcctaggatcctgactcggaccctctcgtccattctccggagtgggccctcagccggtgtatccccttgggagcatcgcactcccggttacattcgggaccgaggagaactttcgcacagagaacgtctagttcaatgttgcggaggttaacctccctttcaatgccatcattggcagactggccctgtacctgttcatggtcattgcccattatgggtacttggtcctcaagatgttgtcccctgttggggtcctcaccgtgcggggcgaccgcgccgctgcgcttgcagctgtcgagaagttgc

SEQ ID NO: 54410 - DNA, 401 bp, Zea Mays
ctaacactctaactgtcggggggtaataattagggatacctgaaatatcccccgaagaacgcactcagagagataagaacgaaaccctcgaggggaaacgactgaggcctctccccgaggatctcctgcctagggtggaactccgcctcgcccgaggtcgccaccgccccgactgtcttgttcgagccaatctcaggcagataagacagaagcgcccgataacaggaagggaacacctgcatttaatgcgcgtacctacccaacgatgcggcagcagagcacagtggttgacaagacgacaatcacatctggacgcaacaacatgattacgtctccgctacagtacgcgcacgccgcctgccatcccccgatgggacatctaatacgacaagcagagcaga

SEQ ID NO: 54411 - DNA, 360 bp, Zea Mays
ggggtgggtcgtgaatgcagttaacttggaagggttaggtgtgaaagttgcaggccttgctggtgcggtgggcccgggatggcaggtgggcccaggagataaatatcttttagcttatctccgttatttagggttataggcataggcatggaaagatctggatcaagtgagtgagcttgcactgacgtgtcatttgccttcagcattggataagctaatgatcttcttggatactgcattagcgacggggtgtttggtactagttgtgtttagaaccttgcgttgcttagcaagctaacttgtctgggcaagctagcttttcctcgtcgttgaagcggacgggcggccaattcggctctc

SEQ ID NO: 54412 - DNA, 304 bp, Zea Mays
atctggtcttccatacactggttggtgaccatgtgatttgtcgtctctctcaacccgcctccggtggtcgtcaacgacacgatgcctagtgttcttctgtgcgtcgagtgatgctgtctgctgcgggtgagccgacagatgctagatcttatatgtatctcaatttctattgccgacgattactgatgggtggaaggatgggttcaggttaatcgacgcgttcattctcttcgacgcgtaggtatccagtactaatctatcttttgcttttcactgcatctagtttgtctcgtttgatcccttg

SEQ ID NO: 54413 - DNA, 400 bp, Zea Mays
attttatagtgcggcggtagagtccgatgtagggaaaacggtcggcgagagaaatccggccagcgacaagagtctgtgaatcggccgaggcgctcgtgattttggatttgccacgaattcgctgtttgttacgccggagagaggaaaacgatgacaggccgggtccacgtgatagaggaagaaccaagcctgacaggtgggtcatgcacggaagtgaccaaaacaaaagaagaaaagggaagaaactagagtgggccgtgcgggtgcaattgtcccattgggccacgcggagttggcccagtcggccgtagaagggaaatgtaggggcaatgggcagaagcagggaatccggccccatggacacagggtgagtattttctttttttattttttttatttc

SEQ ID NO: 54414 - DNA, 338 bp, Zea Mays
cgtgccctattcctgtggcgtagttctgaccggagttgctccaccctggcttccaggtctccaattgggtcattactgccactactacttccttcatgcctggaggctagctgatgtcgtggcacaccatgaggtccagtcgatttgcggtgggtagtcttagtgcgcgccatatctccataagaggggaagatttattagtatagttttaaacatgatgcatgcataatctaataattatgaaatcaaccttcgttgatcccccacttcctacatatattgcactctgttacccgactttacaagataagggactaccagaaagtgataaggtaaga

SEQ ID NO: 54415 - DNA, 492 bp, Zea Mays
tatcacgggtttgggtaaaccatggtatttaaatttgtattttacatgtaccaatcaaacaccttctggattctaatgccatggtaccatcaaatatcaaagtattgcctcaaaactgcaaacggtgcctaaatatgtgttttgatattgacgcaacacactcgtgagagtggtattgtatgaattgcttatgagtcaagtggtggacttgtgcttgtactctattgcaaggattatttatttataggtgttgattgaggcaaaataggccggcagcaatgacaaaaactaccttttggtacgaagtttagagaaagcgtgaccttttatctctactacttattaatgtggtaagaatagcctgtcattccgtgttctcattccttgttctatctttccgatttctccctcccgcaccttccattccaatgttctgccactgttctcattccttgttctgccttttccattcccctctccccgcaaaaccta

SEQ ID NO: 54416 - DNA, 338 bp, Zea Mays
aatgaaatagcaaacctggaatttctcaaatccaaaatacaacaccatgtaatgccactcgacgatgtctacatcttcaggcttgtttttcatcctttcagcataactattgtatgccttgtatgttgagcttaacattgatcgccatcctttgtatctctccttagcaatagaccagatcttttcatgcgcgtcctcattggttagaaactcccaccttcgctgtttcagttttgatataaagagaaaggttaattgtctagtaatttgggaatagtagaccactaatagttctagctaactgttagggctcaagtaaagaaatttcacataccagt

SEQ ID NO: 54417 - DNA, 487 bp, Zea Mays
aacataaaggctacaacttagatagtaatcctattaccaaattgccacccctgatgagcgaagatttgcatcaccgacacttataacctcctgcaggcatccttcataattttggcatcgtcttcatgcttttggagtagcgtctaagaatgacaccaataaattcctctgaagagtacctggatataagtttgtatagggcttttatcaaaaacaacatcatttctacacaaccataatgcccagcaaatggcagtagcaccaaccaaaatcaacgacctccacctaacatttacatttataagccaactattgtaaatgtcctcggtgttagtcggttcttttaggccaaaagtaaagctaacaacccgccaaataagcttggcataatggcaatcaaagaaaagatgttggatcgacttgtcgtctgaacaaaacacacactttctgttgccgttccaatttctttttgccaaattatccttag

SEQ ID NO: 54418 - DNA, 364 bp, Zea Mays
tgaagaagagatagattattccatcatgctgtctaaacccagccacctggaatttggaaagtctactgtctccgaggccgatatgcccatgatgacaaaactaggctactttagtgaagccgagaagaagctgattcgttttagcggagaagaaaacactccgaagccagaaaatgatgaggtggtagtttttagaagtttctttaaagcaggactgaggtttcctctgcatggaatgattgcggatgttttggaaaatttcgaaatttatcttcatcagctgactcctaacactatcgttaggctcagcgtctttatctgggctcttcgaagccaaggagtggagccgcttgccgaaaccttc

SEQ ID NO: 54419 - DNA, 531 bp, Zea Mays
tttttattcttctgaatataacatagttttttacaaaggatgttgacatataccttcctcaaatcatttggtatttgggattccaatagctgttctggagttccctagaaacagttaacaagacctgctcttgttgctagaattttgggcttttgagatactgaaattttctggcctttgcagtgaatgcaaaagaataattggtggtttcatagtgctgccttgcttttctgttacctacttaatcttcaagaacgacatggacagttgctgctgtcggcaaggaagaaaattgaacgttacggtagaaatctaaaaagaagagtatagagaaaagcttggacaagagatagtggcggtcactcactttggtagaaggttactcttgcatgtagtacgtacaggtacaatactatagaacactgcagcaactgacgtcgtccggggggctcgttagtgcaggcaatgctggcaggaacaggaggaataataccaggcaggcaccggagactagaatggacagttgggggg

SEQ ID NO: 54420 - DNA, 507 bp, Zea Mays
ctgcctgatctacctcagttcgactgcagaaccagattcaacctccattttctcctatttcttcataggaacagagctacccccacatcaaaattgttcactgaacattggtctttcactttgttgtaaacttccagggtcaataccttacaggtttcgagttatagagccctaaagtgaggcatatcacacagaaaccatattttcagtttactgaaactgaacccagaattgcagactgtcaaggcaactttaagggtattttactacttattttacatggtaccaagttaatcattgttaagtaaacttgtacaccaatatctactattcaacttttctataaagatcccagtccaaaactgtccagaacagccaccatatagttccaaagttaagccaaacactagaattcagatatgttcactattccttatctgaaaaattccaagcgtctgacagcccatctttaggggtcagtaactccaccttctatgtaaaactcaa

SEQ ID NO: 54421 - DNA, 466 bp, Zea Mays
ttcattggtaactgttcctcagggacacggaggcacttcttgagttgagacacgtggaatacatcgtgtacatcatacagatgatccggtagttcaagctggtaggccatcaccccaactcgcctaaagatcctgaagggtccaataaagcgaggggatagcttgcctttaactttgaatcttctcattcccacgaattggtgacacctgaggtacacgtgatcaccctcctcaaactctagtggtcttcatcgaattatcagcatactcttctgccgagtctgtgctaccctcaagttctcccgtatcatatggacttgttcctctacctcttggataatcttaggtccaaagaactgtctttctccaatctgatcccaatagagaagagtcctgcactttctgccatataaagcttcaaatggtgacatcttcagactggcctggtaactattattataagaga

SEQ ID NO: 54422 - DNA, 413 bp, Zea Mays
gtgcgagtgacaagcgcatgccgacgggggggcatcgctgtagctgcttgcggctggggcactgttccgcgccaccgaaactgacgtggcggcccggtcggcatcaacgaacccaaccacctgataacgcgactgcttgctttgctctgttttgtgtccgtgcgagctcatcgtttccactgcgacatggctgggctgggcaggttctctagccatctgggatcggtgcaggcagcagcggcgtgggttcggttcacgcctgggtaccgcaacagtgcgttcagtacggacatgtggtggtgcctacggcctgtctgtcctgtggtttgctctaagctccggatgtgggtgtgagcagacctgttgcttaacggcactcactcgtccaacgccttgacctcactctcttcgcg

SEQ ID NO: 54423 - DNA, 410 bp, Zea Mays
tgctgctgtgttgtggataaaaaggagctgagacttagagaggtggagggggatcacgtagtatatttttactgtccaaagactcagctgcttgtgacttgctgtcaaaacgtgttaaaccaccacaccttgtccctctattcatgggtcctaggtggagtaaggtagtgcaaccacatgtccataactatgtctttgctggtactccagaggccagagccctctttaaccggcttccagtgaactcagcagtgcacacctttgctttgattggagtgttgagtttgaaaccatcactgcttcactcccattccttcgattctggtcaccacacctctgtcaacccttcaccactgtcagccacttcaagggtataactccttcaccacggtcaaccacacctacaaggg

SEQ ID NO: 54424 - DNA, 777 bp, Zea Mays
agtaagagcaccacatataacagaacaaagctatgtatagtcggcacttaccgtcgggtgaagattccaagcaaagtaagaccgaggagcgccaacattcgagattctacccctcagcatcaactcaactcgtctcaagacattctcctcagatatctgcctattggtaatccgagaggggtcgttcactccgatatacagataagccggataaaccctgaccttcagaggctggatattcataaaaaaagtcaatgacaatagccttaatagtcaaacccttgtcctttaggctagatatatcaacaagcagaattctagcctcaccaagctccaactcagttgggacctctatccaactcgacgttcgaacatcgggctacctcctagtgcgggcggttagcgacttgttgtgattttccatggtgaaccactcaaaacgccatcccttgatactatccttcaatgagatgtcaagatactcagtcttcctatcccgacgaagttccaagctggcgttgctgaccaaccgatgcttccctccacccattttaggcttacagtgatataggtacttccacagaccaaagtgcggataaacccccaggaaggcctcatagagatggacgaaaacaacgatttgaagcacgaaattaggattcagatgagtcaggttgagataatagaaatcgaggagactacgaaagaagggagaaaccagcagacccaatccttgggtcaagaagggaacaaaaacaactgactcatgagtatcct

SEQ ID NO: 54425 - DNA, 652 bp, Zea Mays
cgtggtctttccgggtgcgattgtgggccaacgacgccgcaattgcccgtcgtagttcaagcgccgtgcggatccgtgctcctccatgggcaggctcgctacttcttcaatcgcgggtgagaacctccgttccgtgttcgccagcgcctgtatcgtgttttgcacatgttctcttctagggtagggcatccgacccctgtaacattcttcaccggcgaaaacctcgctggtatgccttgcggcgccgccgtggtcgggcagggaggtaggcataggcttcctggtcgttggatctgcaggggatggataggtttagatcagggcataccatttcgctggattaaaattggggcgttgcttcgtggatgtgtggtctagatcggatcgggatgtgggagttcctcaaccgttgataccggatctcgcgaccagggtggattgcggagttatgtaacacacatttctaatctgagccgaccatttcggatcgggtggccctggatggaggatacccctttggccgtggcattttactaaagagaccctagacttgtaggaaatgaacccgccatccctagtaactgtgcgctgagtctggtactccttgcgtagagacccctaggcttctctattttcatgtgcccagtctaga

SEQ ID NO: 54426 - DNA, 608 bp, Zea Mays
gtccattttctgaattgaaactaaaaagggcttacttgtgaaaaactttccccaaaagggccaaaaagcaaaaaagacggtcatccccaacctacctccccacgccacctccccgcgccctccgtccccactccacctccgccatgcctccgctcatccggatctccgcgcgacctccctcctcacttcaatgatccgcctgtcgcctcctcgcgacctccctccccacgccgcctctaccatgcctccattgtcgtggagcttccaaccggcccgagcgccctagaaatctcgcaacccctccgctcgccatgaacccacaagtaaccgcatgtgctccatccgcggcctcacaaaatccacatcatgcttcgttcttgccgtgtctgctctaaccgcgtccgtgcatgccgcacccgccattctcgcccacccgctgtctacgcattttgcgctcacccaatagccttatcacaccctccaccctcactagccctcgttcaacacatgcgccaaccttatcgtgcccaccatccttgctcgtctgcgttcccaaccgccgtcctggcagccttatgtagctcaccccacagtagccacgagctgga

SEQ ID NO: 54427 - DNA, 326 bp, Zea Mays
tgcagtccttctagatggaaccccaaacgtgggcaagccttagacatgaacttccgaaaacctagtctctcagcaaaagcaaatggaagctcatctgtaattaacatttcagtaaaagccaccctaagcatttctggatccaacctccaagaagtgatgctagacccactaccatcttcactacatgcttgcaaaacaagctgtttgtcatcattgatcttattaggattctttttgcataccttcaagtgtttgcctaatgcagatgtaccattgacttttgcctcacactttataacaatcttgcaatagttgcacctagcttc

SEQ ID NO: 54428 - DNA, 702 bp, Zea Mays
gagcgggagctgaattgcaaaaggacagagaagatctgaaggcaggaaagcaagaactagggcacggaaagtagaggcggctgaaagcgcagtacatatgggatattcccgggtcagataccgtttccaaaaagcgcccagtcatcacccgatggttacttctaaaacatcggcgtgccatgtcatcacccgacggttacttctaaagcaccggtgtgccatatcatcactcggctattatctacaaagtggccgacgcagtccgttctaactcggatgttatttctaaaacgccaatgttaccatcattcactcggcggttatctctaaaacgccgacgtcgtcagtcactcggcagttacctctaaaacgtcgacgtcgtcttcagtcactcggcagttacctctaaaacaccgatgtcgtcttcagtcacttggcagttacctctaaaacgccgatgtcgtcttcagtcacttggcagttacctctaaaacgccgacgtcgtctttagtcactcggcagttatctctaaaatgccgacgtcgtcataagtcactcggatgttacctctaagagcgccgacgtggtcatcagtcattccaaagctgatgtggcttcatcatcatccgggcactacttcagaagcgtaaatgttgacaataatagctcgtccatcacccccaaaagcgacgatacgatgac

SEQ ID NO: 54429 - DNA, 375 bp, Zea Mays
accctactccactgtgtgatgtattgagcttgagagcttgtatgaacttgtgagtttgagtgagtgtgagagcgtgtaagtgcctctgagagtctgagtgaatgtgtcagcttgccttgtaacgtcgtgtgccctcccttttatagctcaaggggggcatgtacaaggatactgagccctgacatgtgggcccaggggcaaaatggagggaatacactataaaagtatctcatgccagcaacgcctgggcaatctccaggcgccgtaatgtccgtagcccatacgatattaatatgtcgcgactgcttcctcggtaacgcgcgagtgatgatgagcatagtgtacgctgcagcacgggcgtactgcctaccaacg

SEQ ID NO: 54430 - DNA, 318 bp, Zea Mays
cagccaagtacttatatcagctcatgagacggacgcttctgccgcggatgggttacagggaggctgctactcatattcagctctggttcctcggagccctgatctctcactcagagtttgatgtcgtggacttccttatttgtgagatcgagaacaccgtgttggatggacttcgtgcccggcgtcagctgccatatgctcactatctctgccatatcttcgcacagctaatccagccaccacaattttagggcacccttgaggcctctcgcctcctctttggctcttatcgtccagcccctgaggatctagtgccag

SEQ ID NO: 54431 - DNA, 548 bp, Zea Mays
agcagttctccaacaacaaggtcatcccatagcttatatcaacaaagcgctgggtccaaaaaatatggggttatcaacatatgaactaagaaaacctggccgaatcgaggatacatccatacctcctgttgcctgccgatgatgagggagcaccttcgggtcgagattgcttgacgagtgcggggcgagaaacgagggagggaagaaaacaggcagggaagtggcagcacggggcgcccgctcagtgtatcgtgcccgtgtggcatggcgtcggggggcgaagcagtgacagcggtggagaggtgtcgcacgcagacctgtcgcaagcttgtgcgggtgtggccgggacgagagcatgcggagcggcatggatgtgctgtctccttggcggggcggaagtgcaccgaggggaacggagaaaaaggcaggtgcagggtatatgaagaacgactaccttcagcactggccgccacaacgcgcgatggcggcgccttctacggactcgcatgcctcccagcgatcacctctcaagccgcacaggcctcccg

SEQ ID NO: 54432 - DNA, 522 bp, Zea Mays
aatcagtattagtttgttatattctttctactaagtgtggctgcgggttgatttggattaaaggtaggggctcttatgtaaacataactggccgaaggggtatcaaccatcttcagccgttcagattagagtcaacggcccaaatggaatagagcaaatcggtacactccgtctaatcctaggcatcctatctatcaagcgacgactacattttaatgatacaaaggggtatattactatttaatcttggccctcaattctagatccgacggcacacatttcattgccaccccacgatgccaccatgcggcatcaacatggtccggtgtggcggtgccatggccatggtatggctctgagaaacctagtgaccctagctctaactagaatcacactatacattgctgagaaataggcgaataggtccatgcatcctcaccagtgattgggacaccaagcgtggtcgagacatggagtggtcagatcggcggcaaggatccgactccttcgaagaatccacgg

SEQ ID NO: 54433 - DNA, 583 bp, Zea Mays
caccgtagccgccgtgtgctctgaaggtcacgacgagggtcggccggcctatccttcgtgcagctagggaaaccatgctacaccgtacctcctcctgccccacaggggttcatgcaaattgcacactagtactactactccagaatccagatagcgcagccacttgttgcgaatctgtgctaaccactccagatagatgtaaacgcgcgcagacatgaatcgccatcgacccaccccacacacaggacagagcaactggggcgggcatccatcctgcttgcccaactgcttaataatcggagccacttgtggtctcaagttgcagatcgcgcgcgaggtagttttgagcacatatccatccactaatggcaggtgcttggttgcatcagggggcaagaccaattaagacgcatgatagtaggcagtagctactagtatgatacggtgcttaataatcatgacgacagctgcaacggtagacaactagctagacaagtgtatgtccggatggaatcgagaccccagaccacttggggtttggccagacctggccagctgatcacgtaaccagttgctgctgcat

SEQ ID NO: 54434 - DNA, 651 bp, Zea Mays
agggtgaccagtttatcatgagctagagcagtacatgtaggaggtgatgtcttggaatcagtcccttcgagaggaagtgaggggatgtcttggagaaaccatgttgagaatacttgaagtcacgacgacgaccaccattgtccacctcctactgcagctgagcaaggccataagcagtatctagatctcttagtcgttaactaaaatgatagatttaacatcatctttgaggccatcaataaatttagtggtgtaatacaatggatcatcatgagattgataggcttttaattggtcaacaagctaagaaaagttttctacataatccaaaatagtgtagtgttgtcggatatgcaactgatgtcgaaggattcgtgttggtccttcccaaggccctcatgaatgaggaatccaaactcatgccaaggcattgtagggagtttatgtttaatggactggacccaatgggcaatagggttggaaaacttcgtagtagctaccagaatccccacgactaggtcaaccccatacatggtgaaataactttcacaacgagattgcgacaacttagggtgttcaccatcaaaggaagggaagctggggcaactgcccgagttggttggcaaaatacgaccaatggacaacatctag

SEQ ID NO: 54435 - DNA, 605 bp, Zea Mays
gaattttcttccacacatccatttgggcataatgatagtccttccatgtagtgccaccgagatctataccatacggattcgaatctaaaatgtggatgcatcgattctggaggttgattacgtatagtgtccaatgccccctactaatcataggtaccattatctgtttatgaaaaaatatgtaaatgagttacatggtgttgtttcacaggcatggtgactaaatgtacagttaatatgacatgtgtttaaaaaagatgagtatgaaattgtaaatatgaacaatgctcaatactgttttgcattgatccaaattgaccaacgagggtagtgtgttgtgtaagcaattctatagcacggtttggtcaaacgcctgaggtgtcttactatgacgttcctgctcctcaaagtttagtagggcctaagtacaatatatagagtgtgtcagtatgtttagcagggcctaattacaatagttatgaaacaagaacctaccccaacattgacgtcaagtattaatctgttagtggtcatagttggatgatgatttttggaattatcgcgaacacattcaatgaaacactgcatgaacacgttgtcaagac

SEQ ID NO: 54436 - DNA, 1027 bp, Zea Mays
ctgaattatcagctgcagagccacaacttcccaaactttcagaccctgctcaacaaagcaattggcttggaaagcaaagggaaggagttagctgatcacaaaaggaagtttcagggacagtccagcaggaacacccgtcatcacaacaacaactcccaaggttctcagtttcgctctacaagtcagggcagaaacaatcaacaacatatgcaatgcttaggacaacaggtctagaggaacaatcagcagagaagaagttttcaaataggttaaaggtctggtgggtatccgcaggatcgtcaaggaagcaacatgaaaacaccggccagaaacaacaatcaaattaccccagtttagcccaacgaatgcttcaagtgcagagaaattggtcattataccaacaactgtccaaagcgcaatccacagacgccctagaagtacaacaatcaaaggtttgatcagttaacacctacttgtggtaatgtgtagaataaaactcagcagaaccagagtaaaggcagggtgaaccatgtgacaacagaaagtcccggaggatgcgaatgtggtgtatggtatgttccttataatctccatacctgcatcaattttatttgattttggagcatctcattcttttgtaaccaagtcatttgtggaaaagcataatatatgaaactatcctttgaagataaaattattaattagatcgcccggaggtgaaattagagccactcactcataccctcaaaccaagcttgaaattcgagaaatatacttttttagtagagctgataatcttggaatctagtagaattgatgtgatacttggtatagattatttaaccaagtatggagtaatatcttgcactaagaggatagttacattaacaagtccacaaggagaaagagttgaggtcaatgttagcatgccagcggaagcagaaccatggtaaatcatttggaagagaaatctttagaaccatcagagtggtatgtgagtacccaaacgtgttcccggaagaattac

SEQ ID NO: 54437 - DNA, 373 bp, Zea Mays
cgactatcttggaataagttttgactatacacgttgttaccttctgtgctcgtagtttgtggatccaaggatgacggcttcgtattttgctatattgttcgtgcatttgtctgattcaagtgcgaaactgagacgcgcgatgtatttgtatttgaggcatgtgggtgatgtaataattgttgcagtgcctgctcccacatgacaccgcgcaacgtcatagtggatggtccaaatggtctctatgcacgctggtgtggctccgaaggccctgtccagtctactataaagtctaccaggacctaggattttattgctatcctcggctcgaatgtaacgttgtatccagagagctcggctacccatttggctattc

SEQ ID NO: 54438 - DNA, 414 bp, Zea Mays
cacaagtttggaacacccccttgaaaaggtaaaatgcaaaggtacatcacttcatgtcacttctacattatctttgtgccatctaaggacccttttcatgatagtgtgtttaaatcttgcttaatcaaaatttcttccctttatatcctttgtatcctttttggagatttattacaaagggggagaaattatgtattaaagcttacctctagtcctatgtaactaagtgttagaagaattttgaaaaggggagaaataattgacaaaagggggagaatcataagtaaaacataagatgtgggagttgataagtgcattctatgtcatgagcatcacgtttattttatgacacactgcaccccatgaatagtatgctataagttgtgcattctatgtcatgagcatcacgtttat

SEQ ID NO: 54439 - DNA, 379 bp, Zea Mays
aatcgtagtgttgattgcatctatgacttggtttgagcttcattacatgttggttcatgcttgatgtcaggtggtgtagtttccttagacaattagtcgaggtacaagttcttgtgttaattaataccaataatggacccatgttttgaatgatgctgctatatggggtaccttggatgttttgtttggactggtcgaattcgaggacgaattctttttaaggggggtagagtgtaatatcccaaaaaaatgttgccaaaggttgatcttcggtgtgtggatgtgggaaaagggttgtgggccattggatgctaagtcagagtcatctgtggcgtcgtttcgtctctcccgcaaagaaaccctagtggtggccctttcc

SEQ ID NO: 54440 - DNA, 847 bp, Zea Mays
ctatgtttggacagttcactcacacaatttggctaaattttccatggtcgttattttattttgagaaacgatgtggcatattgatgtgttgtgtttttcttgagtggacataaacatcgtctaggtatggcttgaatagaggggattataggaaacctggtatcataaaaggtcattagctagcccaatgacgtcttcatccactagttgtactgtaataccctctcgtgcaattacaatgcccttgacattagggaaacatcatttgtggtttaaaaggtgatctattgttttgaatactttatattccaactttttagcaattgtatggtggaaaaaggtgccttataaccttaacctatgtttggacagttctctcatgcaatttggctaaatttcccatggtctttatttaattttgagaaacgatgtgccataatgatgtatggtgttttacttgagtggacaaaaacaccatctaggtatgccttgaatagaggggattgttggaaacctggtatcacaaaagtcattagctagcccaataacgtattcattcactagttgcactctaataccctctcgtgcgaatacagtgccctcaaaatcaaagaaacgtcatttgtggtttaaaaggtgatctattgttttgaattctttttattccaagtttttagcaacggtatggtggaaaaaatgtgccttacaaccttcacctttgtttggacagttctctcactcaatttggctaaattttccatggtcattgttttattttgagaaacgatatgacatattgatgtgtgttgtttttcttgagtggacataaacaccgtctaggtatacc

SEQ ID NO: 54441 - DNA, 352 bp, Zea Mays
gcttattgctgagtacaactttgaaacttcaacaagaagatgaagataggaagaatgaacttgttgtcaataaccaagagaaaagggtgaaagaacttgaaaattctctggcagagaaggattcaaagattaaaaatgtcgaaacaaacttggccaaagcccaactttggatccaggatcaggctgctcgcatttgtgatcaggataaagagcttgaaaaagcacattcaaaattaaaggaagctgaaaatcgttatgagcacgaggtcagaagcttgaagaataagatcgaagctaaagcagaaaagagttctaaattatatgaaggtctaatgttgcttcgagagacatg

SEQ ID NO: 54442 - DNA, 385 bp, Zea Mays
ctgggtcttctgcagcagccacctctaaggctgaaggcccctcagccacctccataggagttggatgactcggatcagtgtttttgcatggaagactgccctctaaggtcgacgatgcatgagacaccaccctggttacctcttgcccagcagaatcatgcaacgaaagaccaccatctgggacctctaaacagatggtcggaatgtcaacctcaggaggctttgataaaatatcttcaggaatgacctcttccaatgcctgatcaaagtctgatattgaaatcccttgaaggctgatgagtgccgacagggcttgggagggaatatcgttgccccgtcgctgcctctatagtgacggctgttcttgcggatcagcggaattttt

SEQ ID NO: 54443 - DNA, 714 bp, Zea Mays
tgccgcccgcggtcatcgctaggacggcccaccgcgcaaccagtatggcgcgcctgcatggctggcgcgtggggttacctagtcagccaaattccctccatggccgccatcttcgcaatagcttcctccgggtaggtgatcaacgcagattgttcgagctagttgtgcagccatcgtcgatcggccgaactgtggcctagggcgatcacgtggagagagtgaagagtgtcgcgagtttatgcctcgctgtgtcctgcgttcgacggtcggccggcgtgccaataacagtaagaccttttccccatgcctcaattcccacagcgccacacctatgtgggatgccgatgacgcgcgtatagggaggcgggtgttagctgggggaagaagatgacacagtgcgctgtccgatcgataatcgacggtggagattagaagatagaaccttcccatctcacttggatcggggccgtagattttgggggtggtcggttgtgatcataagccacaagctggttaggttggaccattggatcccgatctggggacccaaaggggtcactagttcattaaataacagatcaaatccgggctctcaaaataaaattggacggctagggatcatggataccccttcgccaagccgttatgctgaagagcccatctgaatggttataatcaacccgtcgtccagccttatgcagagaacagtacagg

SEQ ID NO: 54444 - DNA, 595 bp, Zea Mays
gcagtccgggatatagtgcgttctctgatccgatggtggggaaacagagagcgatgactgtcgccgctggtgcggagctctgctgcgctcagctatcagcggtggaagacgaccgatggaccgttagatcttggtgcacggctctgatcgagtctagacgtaagttgacgggccgttgatcccatagcaaacgactaggattagatctagacgaaataaatcctgagcgacggattagatatgggtggccacgatttgatttggcgtaccctttcgtctcaatgaatcgtggtcgtgtgtcgtggatcggatggatccagggggatctcgacttctttaaatccctacccttgattttagatccaagggttcctgctgcgtaccgattcgggagcgtaagattctaatccgagccatgtgttgccgatcggacgactcagatctattgataccccttcaccgagcaagacttgcaaaagagaccttatacttttaccaaatatacccgccatccctccattataggaagacttaacagttaggcccataactttatgcagagccccctaggctttgttcaaatagtgtccatagc

SEQ ID NO: 54445 - DNA, 344 bp, Zea Mays
ctgatctctgcctccctgctgatgaatttgattcccagccatttctcaaagaaaacgagtgttatcagcagtggcattaatcagaacagtaatagcctctaccagcgtgggaggtacaggcggcgggatcagagtttcctccccaccacgggaagttccatccctatcatgagcacgagttctggatggcatctgaagaagaaaacatacttgattattacatgccacgattacacaacctctgttacattattccaaacttgttctaattatacatactcaacttatacaactcacttttccatatagattacataaggaaacaacctactactatactaatc

SEQ ID NO: 54446 - DNA, 769 bp, Zea Mays
gtggcagcacctgtccagctaaacctcgacgaggcccatcatgggaccaccgcagcgtctactgctttgagaaagcagatcgacgagggcacctacgggtaacaccccctcctccctaattgatctggtgattattctacctgtctactctcctaatccactgattcacttcattacttggccaccgctggcagtgaagtgtacatggcgaaggagacggactggatctgcatgatgttacatgagcatgagggttgtggacttgaattccacaattaatacacacatgaaaaaactgccagggattaagtctgactgcgtgatgatgtctgacgctcctgttcagcaggtaaggtagccatcatccttttatagttgtatatttggattttcttttgcaaaaaactgtaccacctatcaatatcaccctagaagatggtagatttcatatgagcagtggtggaagagctgtcgatcagccaccgcatcaacacatcctggtggatgcacgccccttgggtatgacctggtcctagaaaattaatagtcgattcatatccagtggtgctgcttcgtctttcgatcaagatgggcaacctataggtagggtttagtgtagtccatgctgggccacaatgatctgtctgtgtccatatgagtaatttgtctgtaattaatgttttgattttttttctttctgctataaattttcattagactttcactcccttttcttttgaaaaaggaaggataaaaacttacaaacaag

SEQ ID NO: 54447 - DNA, 526 bp, Zea Mays
acgaagcttcactctgcatccacatggggcttttgtgtgcatgtgcaagaaaatccagacgataggaacattgacgtcttctgttgcattcaacctggagaatgggtgcacaagcacaacactaccagcgccaaaatcaccctgcatatttttttttcacagagaaatagtgacatggagcaaacgagagaagatactatgaaatctaagaacactatgacgcttacagcgatggaggggagatagagtgacttcatttatagtcacaaaatatttgcctaggttaattgtaaacagatagtccttgctttagccgtaatctggaagttaaacagtgtactgctgtcttttttctactctagtatggcgacgaagatcatatcggcgacggcgtcggcggcgatggcgaacgggcccaatcgctggggcgcaaaatttttgtggcccatgaagattgacgccccaaaagtaaaatgagaattgagaacccgtcaggtgtaaatttggccaattttttggagacccc

SEQ ID NO: 54448 - DNA, 883 bp, Zea Mays
gtgtgcaagtagctcatttatctgcaccggcttacctaacctgggatgtttttgtcaggcagtttgagaggcggttttacctaatcacttttctggagaaaatgaagatagacctgcaatcatataagtaggagggaaggacagttgcagagtatgaagcgggctttaacaagatggttcgctttgttccacatgtggcttagaatgagatagaaaaagcgatctagtttcatcaaggcctgagaccttctatcaggcatgctttgagcgcttttccattggtggattttcacactactgtggagcaagccttgggtctggagatgcagcatcaatacacaaatgagtcatcacagaagtcttcaggtgttgaccaatctcgtggccaagaagagaagaatggccacactgtgtgtctagctaataagaaagggaagtttcagcgccaccacccatatcacgggaagtccacgaaatctagtgctttaggagggagtactccatagtatcgggctgttcctaagcctggtatgggtttggtgtgctttcgttgtggtgaagcgcatcgtcatgctgagtgtcagtggaatggcaaatgttctatttgcagcgaggatcacaaagttgtggtgtgtagaaagaatccgaatggaaaggttaaatgggagctagtgacttcttcagcctctcgtgacactatcaacaagatgacatccactgagtagtagttccctgtaccaccccttagtaaaatttctctatgccagtgactcaacagtacctgtccatgtcgttctttcctcactacatggcagctcccactcctgcatcgaccactcctttgtcgcctcagtttggagctctttgactgcctccgcctacg

SEQ ID NO: 54449 - DNA, 578 bp, Zea Mays
ttagtggaacttttattctcaagttgtttggtgtcttttgcccaatttggttcacgtgaaataatgattctcgagttagcactgagaagaactctgggaattgctggggtgttacacttcataccagatttctcgaagattgccaaacctatgactcgatgttggagaaggatcgtaagttcacctggacagcggagtgtgaaacaacttttcgtaccttacgaacgttgttgagcacggcacctgtcttggctcaaccagatattgagaaaccctttgatgttttctgtgacgcatcgaggattggacttggttgtgttcttatgcaagatggcaaggtgattgcttatgcttcatgctagctaaggaagcacgaagttaattacccaatgcatgatttggaacttgccgcagtagttcatgcattaaaaatttggaggcactacctacatgggaatgtgtgtaatatcttcacagatcacaaaagcctaaaatacaccttcacccaacccaagcttaacatgaggcaacaggatggctcgagtagatcaaggaaggctaatgttatggctgatgcc

SEQ ID NO: 54450 - DNA, 449 bp, Zea Mays
ggccgtcagctcgtggtaggcgctcaactttgccttgatctcgcacgccatcggagagatgcaggtcaggagtcaagactgaggagtggtagtggaatatcggtgcgtgaaggtggcgtggagttttggtgggaaatggcggtttaggacgacacatatttgtatgtggagggaggctagatggacggggtctagaagtggacattgtttttttgtcatcctgtattcatgtgggctatcgatctgatgtctgcaaaacagtgccataaacatgtgcggtttcaacaacggtagcctgaagaagtgcggggctcattatccatttgggcagccgagagaggtccacacatcgtggcggcgtggctttattgttgtgggctacatcgtggcctgctgttgaaattgccacgtacctatgtgccgtgcgatgtgcaaatattccaaaaaca

SEQ ID NO: 54451 - DNA, 474 bp, Zea Mays
attgtatgcttttctagaaggatcacaagaaagagaataagtgtctaaagtgtggcaagtcgagatatgtagaggttgaaaacgtggatggtgacatcaacgatagctcataagcaactttgttacatgcctcttgtgactcgggtgaagcatttgtttatttcaaagaacacggctaggcacataagatggcacatagatcatgatcgggacgacccttaggtgatgatgcaaccatccaacaatgatgagtggaaggctctagataactttgatctagattttgctagtgaggcgagaaatattcgaattgtgttggcggccaatggttttacacctttaaatatgacatcgacatcatattcttgttggcctgacttgcaattccatacaaccttccagatcatatttgtatgaaatattattacaagtttgtttgtctaattgttcctagttcgaaccatcctagcaaag

SEQ ID NO: 54452 - DNA, 586 bp, Zea Mays
ctgtgatagtctgattggtcagcaagggatagtgtggggggagttgctgtgtgaggcaaaatctagcacatccagggttgttgttgtagtaggaaggagaaaagggaaggaagcctagtttgattgtgcagcctggttcgattgagcctttgcggtgacagtggaagagatatagtgggaagggatggtgagtccgtgagagttagaaacaaagaggtcggaggaagaggcaggaaaaggggcagcaattgaacaacatggtcgtggcaagcgtgaagaggatccactaatcacaaaaggtgagatgagaaatgagatgaggtgtatgattcaggagcttatgggactaggtgtgattggctccaagatggtgcatggaccatctgaattgaaattgtaacttatgccaaatgatgtgaaagctagaagggagcaagaatgatttgagttggtctaggatagtgcaagtgctcttaggaggtaaaggagtggaacactatttggaagagggttgtgttaagcatgttgataaaatcaaccctgaatggaaggtttggtataccactaactcggttattgtggcatg

SEQ ID NO: 54453 - DNA, 1214 bp, Zea Mays
aagatggccacctacgtgatggagttggggttgaagttgtgtaactccacctcgtagtagtgcggcagggcccgcatgaagcaccggaactccgaaacctcgttcatggaatgaggtgaaattgacgatgtagtccgtaggcgaatctgacacctgctcgtcatgcggcgcgatccactaaggttgcgggctggtggatcaaggccgaagtaggccaacttcgaccagtgcctctagatccccatcgatgacgaaggacacaggccatgggtcacggggaggaagtacagtgatcttctccgccatcaaaatgagggaagaggcgagaggagacgaagggctctgtaggaagaaggcgagaacgacgttcgaaggtagaggactagaacaacaaaggtaacggttcgacgcctccaccttggtcacctttatagggacggacggagccaccgaagcgtgaatcgaaaacatccggacgacggatgttcgaatcccgtgtgcatgtgtgccgcgaacggtctgctgaccggcagtatgtcccatcgcattaaatgactgtgtcccctctgaggaaaaactcgtcgagcgccattccacatcccgcctcaaaaggtatgccctctaccctcgactactctgccctttatcctctcggcaattgaactagaaagaaacgtcttttgcctcaggcaacccccctcaaaaagggagcaacgaattggaaaaagtcgtcttctgcctcggcatgtcactccaggaggaaaaaaggcatggaaaaatattgtttagaggtttgaaggttcgacccttggcagaaccgcctcaggacttcagggctccgagcccaatattgataagggttttgaaggttggcccctctgaaggtctccaaaacttccctagagcatagagtcagggatgactataggtacacccatacatggccctagttcaggtcgtgacccgaggtaccttaagacatatctgagaccctcgggagcgattcatgatggtatcccatcgtagggaggcatcgagccctcagaccccatcgaacgggtctatgaccacaagaatcacccgcagataccttttggggcgtgtctccgaacctcaagctgatttcgatcgaaaggagctcagacccctgttcggatcacccgttaacagctcaatggaaacgtcatgcgcgttacccatcaagggtagcatga

SEQ ID NO: 54454 - DNA, 621 bp, Zea Mays
acccccttaacagaaatctcgtccccgagatttgtaagaaaaggatttgagctttcagtttctaattatttcaaagatcaagagcctcattttttttgagtgattaggaaagcatgggtatccatatgtatagtctttttattatgtaggacgaaagatgggttggttagggcaagaatatcctggtgtaagaaagtttatggtgagacataactccgtgttgggtggtaatgcatctgaagattgagtttgacttctctccttccttgacgaggttgatcttgttcttttccggtcttggtctcattgattcgaggttagtgtgtatcatcggggttggggaatatggttaagatagatatggatgagatagactatatgatgtaggtcaaaatcttgtttgatgttaggtggggatagacagattggatataactagattagactagttaagatctacttattttagaatagatcatagttgttacacttagtacgagataagcaaagtagttaggatatgacaagataagataggatagaatcttttaagatgagatgaatctattaagataagagaaaatcttttaagataagatatattttaattaggataagtta

SEQ ID NO: 54455 - DNA, 529 bp, Zea Mays
aaaacagaaatggaaagaaaaaactaagaaaccataatacaatacactgttcgcatgtccctagtttaattgggagggtggataaaaatctcttttcctggctcaatgtggcaacatgcattaccagctgctactagacggacagtatggtcccgttctgtcagagctttattattaggttgactatttaaggcccactaaccgtgctgctagctaatcaagcagcctgcaaacatgaatggccctccctctccttcgtcgtcgtctcgtttatccgtagcgcttcttctaatgatcactgtgctcgcatgcggcttcgtcttggcttcctctggtcgaagctacgcccatgctgactacgctgatggaagtgaccaagagctgctgatgtcgacggagtggttccgcttccatgcctggatggcagctcatggccggtcatacccgacggccgaggagaagctccggaggttccatatataccgtgccaacgtggagctcatcgaggccacgaaccgcgacaccagca

SEQ ID NO: 54456 - DNA, 407 bp, Zea Mays
gcaaagggtgcgtcattacctccgaaatttctataacgccaatagaagatgtcgaaggggtctcatctcagggacctgctttggaggtacaagtattttcttctcagcacggccaaccttcgatgattttcgctttttaggggcaggggattttggccccgattgtgaagactcaccttcatcagcaatctttcgtttcttcggaaatatccttttctttttgtcctcttgaactgacctcatagcttgtattttcataatacttagaactcttttccttttcactccaccagcttcttcttcaaacctttcgtaatctagataatcaaattccagcgcgtccatgacctgcttcaatcttcgtttatcccgatttccgaaagcgacagtcattagttggtcctctt

SEQ ID NO: 54457 - DNA, 675 bp, Zea Mays
ctctttagcaaaagcacgagccgaagaggtacacagccaccccagccgctggaccatagactagcggctcagattaagtctttgaccaaatgaaatggtacgcgccacaagcctttggatccaagatccatagcccacaatcccaccccgccacaacccatctgatccgctcgtccgtcgatatgtggcccagatttaaaatgccaaaacgacatcatgcatctaatcgtggccatccacggatgaatcgatggcatggatcagacgtagcgaaagggtacacttaggtctaatcccagccgtccacgggcccatgcatccatggtccgcggccaccgcaaccaccccgactccggcgacggcagcgcaaggcccttccctgcggtggcgccattactgcgagctcaagaactcgccccggtgacctaaactcggtgctaatctgtgcatacgaaagttcatgcaatgtataaaaacagggataggaactcacagataaatgcgctgccagaagccccgcccacggcgcaacggcactcggcagcgatcttgaactccgacccagatgctcctaagaactcccttggtctccgctttcccccttcgagcaacagggcaggcgcagagcgacgacatcggtgctgcattttctctcgtcagttcactctaaccttc

SEQ ID NO: 54458 - DNA, 508 bp, Zea Mays
cgaggttggagcaagaataagaggttagagccgttgatctccttctgggcgactctgattagaacatggagatatccctttgtgcattaaaccgtagtcgtcgggtttggatcggaggaataggataacattttggctagatcagatcttggtcataagatggagcgttagtggattagattagatctctccctaataaaatctagatcgtatattcaagatcggacgaccctgattagaaattgagataatgtttcgatccgatgaaaactgggcgtcaatcggggatctagcagtaggaaatccataccagttcagcgaggggatctaattcatgcccttagttgaagatctagcggccgagacacgctcatacccctttgggtattgtggttttgcgtaagagaccatgcgttcctcaaaaagcaacccgcagtccaccctagtgcaaagactcttacgaattagtcctaagaattgtgacttagaccctacagtcttcaaaaat

SEQ ID NO: 54459 - DNA, 657 bp, Zea Mays
ccttgttgcattcagtctcatatatagttcttgttgtacacggtctctatcctgtatcggtgtatatattcgaatctagtgcccccatattgattgagtgcaattcataacatggtatacagagtcaaaaattaaggttaaagttattcctcttttcctaatcgttccactctcacatcgcttggcggctttgtccatcgccttgcggctctacacatctttacagttggctactttggcctggtggcgctcatcttcgcggccgctcactagagtttggtcatctgttgcgacgacccgtctgccgatgctcgctcctgtccgcctggctgccccttgctcgtgcgcccacccactagcacatgtagcaaccacgtgtcaatgtccactcctgttggctggctcatctgtccacctcacgtcgttgtaggccgacatccgcactagctacctctgctcgcccacgtcagtcaactctgcttggtcaagcaccgtgtgcaacctcctattccattcctctgtatgtgaactcatcaagttcacgatcttgtgattgttaagtccttgaaaaaagttcagtgcctacttgtacaagatgtcattgtcttcctccaacatcattgttcccgccctttgctatttgatgggaccaactat

SEQ ID NO: 54460 - DNA, 574 bp, Zea Mays
gggaagggagggacttgttatggttctccatggtaaaccactcaaggcgccatcccttaatactatccttcaaagggatatcaagatacttaactttcctgcctcgacgaagttccatgctagcaccgctaataagctgatgttgtcctccagccatcccgagccaacagtggtagaggtacttccaaagcccaaaatgaggaagaattctaaggaaagcctcacaaagatgaacaaacacgacaatttgaagaacagaattggggtttaaatgagtaagatttagagaataaaagtcaagaaggccgcggaagaaatgagaagccggtagggctagtccccggatgtgaaacggcacgaagataacggaatagtgggtatcctctatcggaacagtaaccccgtgccagattcgctaggaacacaattattttggcggaagaacaccaatttcaacgaggtgtagaaggtcagcttcagaaataacagacatgtggttaccgacagatgggagttggctgttgggatcaattggcgggatgatcggaatagcagcactctgtttcctcctctt

SEQ ID NO: 54461 - DNA, 364 bp, Zea Mays
actacaagaaaaaaggcaaggagtgtcggccaaaaccccacactcttactgaaataagccgacactctaagtataagagtgtcggttgaccgacactcttagccgtcactctaaaatggacgctcttattcgtatagaagtgtggggaccgacgctcttatgttaaaagtgtcggttcaacacgcaaccgacactcttatgttaaaagtgtcggccagtaacgtggccgtcactcttactgcgcgcacgaccagcaagctacctgggcgcatataagagtgtgggggccgacactcttagtgaatatttttttttaatatccaattttatttttctccctccccggatgggaagcctccataac

SEQ ID NO: 54462 - DNA, 500 bp, Zea Mays
agtctcgccgtgcttcggggattaatctggtggcctcactgcggtgggtgtgcggccggtgaccaccgaattcgtcgccatagaacagagtcgggagccgccatggtggtcgagtgctttcgccatagtcgcgggctctctgtcgggtcaaggtgactcgcctaaaccttgtggatgctcccatggcgtcttcgggcggttggggccactggctcagacggaatcgctcgtcggaatccgtggtggtgcgctgggccgctaccgctgtggccggtgatctacacgcctcgacttccggtaagaaaaactatgtcgcgttcgcattgtcatacactacgtgattgtttgatcggtactagggattgagctatgtggccggggcacattgctcgccggcgaggcggcgaagttcgccgtgaacagggagcgacgccgctgtctcagtgagctgggaaggtaaaacgctgcgggccattgattctttaatctacggtgtagat

SEQ ID NO: 54463 - DNA, 610 bp, Zea Mays
ctgcatcgtcctgcgtgcaggcatgcacttttcgtgcgaagaaatccaatcgaaatatctgaattgctcaccggagtcaggcgtttcacccccgtgccactgctcacgtgggcagcatcgcccgcactacaacacctggtaaatatatgcctccttagctcgcattatccttcgcaatcttttacactgtgattgggtcagaaaagatagcccgacagcggagtcatggtgtcggcaatggctatcaccgcgggttggctttgcgccacccgtctcagtcgtcgagggaggaagaaggcctctagccattggatcctcgtcgtgtggccaggattagaagccatatggcatttcggctggttgatctggtccgtgtgatctagatccaacgcatgtgaatcgattccttttattttaaatcctcgacgttgattcaagatctgaaggtcgagagttgataccggttcacgtgggcttgatccaatctggacccttgatttctaatccagcggctcacaatggacgatacccttccactgtggcttagttgcaagagaactcgtgcactttaggaaaactacctactgtctctccagacataggaatcgtc

SEQ ID NO: 54464 - DNA, 419 bp, Zea Mays
gaaggaaaaaataatagcttcgtaggtagagagactcaattctctccctcctgaaaaatgatgtcccgtgcttggcactgtacccctatttatagtgacgaactagagtaaaactttgtacgaaattgcattcatgtcttcagtcctatacacaaactacaagatcaactgagggtgttgtcgtctgtttcttcgtagtcctgttgagcaagctttgaagatttcatcctttgttttttgttgacacgttcatactgtggagccgacactttttgctctgtcttcgattgcatgtcaatcctagacgaaggtaaccttcaccaatcgctctgttatacctaaaacaaacttaggaagaactgacaaaccaatgttttgaggacctttggcgaaagcaggcccccaatagtagcccctcg

SEQ ID NO: 54465 - DNA, 460 bp, Zea Mays
gtaccatattgccaaggtcaaccaaataacaaagagcatgcttctataggaataacatcgcaatcagcataatcagaataagaacccagcgaaaagaggacacgtaccgaacgtgttacctttattttaccaccatcattaagccattgaatgtgatacaaatgtgggtgtgtgcgagtgggcaaggataatttctctaccaaagctgtacttgccaaattgttgcagctgccactatcgatgatgatgcgaatcgaccgttcgtgcacaacgcccttggtatggaatagagtgtgtcgctgatttttttttggcctgggcaacctgtgtactgagaacacgctgcacaacaagactctcatacctatcggcgtcaatgggatcaacgtggacttcctcattttctgcatggttagtggcaatcatagcatgactagtttcctcggaatcactggctgaa

SEQ ID NO: 54466 - DNA, 513 bp, Zea Mays
ttatggtgttgccaacagggcagatatttctcctcatattatataccaacttgttctataaagcattatttcgatctcttcattgttcagcaaaaagagaagctttggaatagaacagacaaggccaaggattcatttttatgtgggaaaaatcaccatataactagcttttcatgaaacaaatgatgataactgcttggcaagaacgaaacaagactggtatccgcctaggatccgtcttcaacaacagatagtgctgctctcatatgaaggaatcatccggtctccacaagatcttcatagttatatcataaattaccatcaccaatagtttagtggtcaagaattatggatcttctggcgccacggaccaatgacatattaatgtccaatttcgcttcaagctctatggtaatatgagattttatggctattttctactcttcttactcctggtagatcagagatagattacggtaagaatgttaaagggtggaattcagtgtagttcgg

SEQ ID NO: 54467 - DNA, 352 bp, Zea Mays
aaaaaagggactctgcgggggtaggttccaagcacagtatgacaagggggcaccagcatttgaaaccctatcccttagcatcaagtcaattcaactcaacaggtcctcattaggaatttgtctattggtaactcgggtagggtcgttgacctcggtgtgcatataagctgggtaaaccctatccttcaggggttggatgttcttgaaaacaaagtcagcgaccatagcttcagcagtcaggcctttgtctttcagcgagcatatctcagcaagcagcaccttggtctcggaccggtgggggactctgtccagtcgggcatgcggacgtcgggctgtctccccgatcgaggag

SEQ ID NO: 54468 - DNA, 365 bp, Zea Mays
tttaacgtctgcgagagcaccacctttatgccaagttatccaagtgtgatttttggctaaaggaaatcaaattcttgggtcacactatctctcaggctagaatagctgttgatcctgataaagtgcaagaggtgatgaactggaggccaccaacaactgttcgtcagattcggagttttctgggattagctggttattaccgaagatttattccggacttctctcgaattgcgaagcctattactgagttgctgaagaaagaagtcaaatttgtttggagtcagaagtgcgaagatgcctttcatgctttaaggcagcatctgaccacagcaccagtattggcgcaacccgacagcagcaagcct

SEQ ID NO: 54469 - DNA, 972 bp, Zea Mays
tgacaagtcggtgagaagttaccatagcattcatgctattgcaccgttgtgctgctgaaaattttcactaaagccgaagcttgctgctttacacttcggacaaacgtttcaccgctcaagtgcaacttcatctactagagtctgaacaccaaaatggccagagtaaggttgactgctagggtgacacgcgagggggatgaggctaaaaccactgagacaactcctatctcagaagtgatgaaaccttctgggttggttgtgcaggaagaaactattgccgaaggtgttgctgacgccgaagctgaacagaccgctgccaaagctaaaagtgacaatgaaagttaggatgatgacaatatcctaagcccgagcaaacccagccatgtcgagtttggaaaatccacagtaaaggcagaggatctagttttgatgaagaaactaggatactttggggagaatgatgatgaattggttcgtttcgctggagaagagacgattcccgagctaaaagaggatgaaatcgtagtcttcaaaagcttcttcatggttggacttcggttttccctttatgagatgaacggtgaggttttaaagaagtttgaaatctacctacaccagctgaaccctaatgccattattaggctcagcgtgtatatatgggctctttgaagccaaggaaagagtgccaatgtcgaaggttctattgggtgcacgagcttcattatcagacgaaggcaagagccgatggtttgcacaagaactttgggtgctacaactttgcataccgaaaggacactaaggcccccatgattggctactgcaccaaatggtcgaccgggtggacaaacgagtggttttacgtgaaggccgatgagaagaaaagggagaagctcatgagcatggtaatgagtcccttgagactgaacttcgttatgactcgacccttgtgcaatatgcagctggggtcccggt

SEQ ID NO: 54470 - DNA, 745 bp, Zea Mays
aaaacaaataccacatatattattgatctcaatctaaaaaattctttgacaacgaccaatgatacatactatttccattctcacttgcattcaagaaattcatatacatgttacatgtaagtaaccaagtcagttgtccacgacgttatgacgagcatcaatgcggtaatcctaggctttaggatctaggattttgggtgaatctatggaaattaaatcaacaaatgatgaaggtaggaaaactgatggaaccaaaactagaatcgtccagaaacttgcagagcttgagaaaatagtcataaattatcggagcttgcgatgacatggctagatcgagcagaccatgccccgccgctagcgtcaaaagctaagttgatcagttggtagtgtctacgtccacggcccccctacgcctccttgagttcccccttggccaccggcttaagctagaaggcgatgatggggaaggcgtgtccgagccatgcggggtgtggaacaagatcttagtgctggaggggaccttcttatggctaagagtggaggcatgcacatatgtttgttagagcggggtggcggccaggcgcggcatgcacgaaggcttgttggagatgggtggcggacaagcgcgacatgcatggcgggaccttgccacggagtcgcgggcgagcggcatcctgtgtcagtccagcgaggtgggaggtgcgcagtttgagtgggctgcggcatcccttcaccgaacacgaca

SEQ ID NO: 54471 - DNA, 832 bp, Zea Mays
caaaaggataggatgaataaaaatcctatttttgtaattggaaaggtgaatctttgcaaataaatccaacatttacagaaacagttgagatgcatcaaatcaactgaaaccattaaaaggaattctaactgcagtcaggattgcatgctttttctctcttaacattaccttgtggttattaattggaaaatcaagcacagcagaaacatcatcaatcagcaaaaaagtttcaacttttgaagatcataacattatccaaatgactataccatattattgtaatgaccttgatgtctaatcagacacaacaaaaggctttgagatctttctgctcaactaaaactcatataccttcaatacgaacacaaaggcagtgagcactgtgcaactgtggctctcggctgccacaatcaagcagcgaatgtgtcaagggcgttggttcctaaggtagctggccctcgactccgcaactcgtagtctcggtccgtcttcgctggcagggttataccccctagccgtcggcttgatagggaaaagaggaagaagactggatgactaaattcttgcttaattccctcaagtgccggttacagatatatatagccttggcatgcaaccactcccctaaactttaggatctaattccttatctttctattctagcaactaatctgtttctgaaacaaactcctaaactttaggatctaacaaactcctaaaatttaggatctaattccttctctttttattctatccaataatttgttcctaatttccttcctgggcgctggacctggacgcggcgcgctcagcggcccatcgaacatccctg

SEQ ID NO: 54472 - DNA, 572 bp, Zea Mays
cttcctccccaattgagttagtcgtggatttatgtgctgccgcggtgcccccactgattcaatctatccacccgtgtagcatggtacgatttggttcttcttcagtgcacctagatcgacattagtcaacgccatatgtcaatcaacgtgccgaaccatttgggtgttaactgaacctcttgctcctgatcagtgttacgggggtgttaccgtgttagacctgtttggttttcaagagcgaacagcttaactgcttaagtttggtagttcacatcgaaccggtgtctatgatttttctctgtcagacctttttataaggattcaaggtggctataatcatgtctgagaaacgagaactttacaaactaattttcctgtttccaaatagatcgtttttcttatttccaaatagatcgtttttcttatttccaaatagatggtttttcctgtttacaaatagatggtaaaacagagtacctgtaatcaaacattttaaaccggttgccattagtatgcacaatgcactgaagtatttagatcatgtcagtttagctgacattctaccacggaag

SEQ ID NO: 54473 - DNA, 785 bp, Zea Mays
gaatgattggagtagattataagtatggtgctaatttcatataaataataataattgttgctaatttatggtcaagttagtaggataataatttagtccccagaacaaaatgtattgttaagtcttagcaaaagttttaaataaaattgggtgccatgtccgtctggatgcaaaaaagtgaccactttctgcttcgtgctcgcttgcgtgccgtggtggtgcagcacatttgtgcctagaagaagcgggtggcgatgaaggggctacagggtagcgacagttatgtgccttgttttcataattattgccgttgcaatgcacgggcaccgtactagttacatgatgatgtggaaagaaggtatgatccacattaattgcattgtatatcatacttttgtcatgcatagctcccacttgacccgtagacacatatgtcaaccacatgtcgaaaacacaaattgcaaggatgttttgagttggcatcactatttccccaatataccttgcttgggcaactgatggaagagaaacatgaatatttatgcaatctatagcaccaacacaatctttaaaatatggatttgctcgtctatcatctcttatttttgtatgaacagtagaaaatgggatcttcttgcctaataaaatcctttgacattgacatcgaagatttaagagcctcaataagttttctataaatactttacctgaatgtttgaagcaatttagacgttttgactcgtctcatttccaatacatgtaaataaatgagaggcaggctcggt

SEQ ID NO: 54474 - DNA, 734 bp, Zea Mays
gttaaaccaaaacacctttgctcagtctgtgattctatcctctcattcaataggaaaatccttcattcttacaaatgtttatgatccctgcactcctgatagaaaattgacatctctagattggtttagaaattgtgaaattcaggaagaccaaccttgtctctttgttggagatttcaacctcattagaaggatagagaatagaaaaaaacctagggggacattggtgtcatgtttgctttcaatgatgccatcactagattgggctttattgaattacctctaaagggcaagctttcacttggacaaataaacaacaaacacccctccttgaatgacttgactagttctttgcctctaatgcctggtctgctgattacctaggtacatttgttagaaatattgccagagacacctcagatcatgttccatgtgttatcacagtgaagactgatatcgccaagagtaaggcctttagtttgaaaactactggcttctacatgaagacttcaaacccattttccatggctgctagaacaagccttgtcctatattagacttggctaagaagctcatggataaacttaaaagtactaggaaaacccttaagggttggtccaacaacctctagattctctcatgctattgacaattgtaagcttattcttctatagctcttacacatgattgaagaaatcagagatcacctcatacaagagtgaaatctcataata

SEQ ID NO: 54475 - DNA, 833 bp, Zea Mays
ttccctttcacttttctctcggggtgcttggattccgaggaagagggcggtccgagctttagttgggacttgtccgggttgtgagatcctgagtgcatgttgcaattcctatatgcatgcgacaaaatgctttctgagagctcaaaaggttacatcactgatggggagggctacgacccaacccgagaatgcctccacatcgattcagagatccctggcgaaggagatcacctcggcttgccgcagtaaggtgacgtgtgccgaggtccctagcgagaagttcggtgcctcgaacacaagttcttcggcctagagctcaatcatgtcgtgcagcggtacaacgaggttgcagacgaactagcaaaaatcgcttcaggatggaccactgtcccctcgaacgtctttgctagggacatctacaaaccctcgatgacacccaaggaggcgcccgaacctgacccctacaacgacacacccccagccaatgggcctgatgccatgtagattgacgaagacaacgacagggccgccctagccgtatactggaagaagccatacctagagtacctcctctgaggggagctccctatagggaaggccaaggctcgatgccttccccaccgagcaaaaaccttcgtgctaataggagaagaggagttgtatcgacgtagcccttcgggaatcctctagcgatgtatacctttcggccaggggtaggacctattgggagaaatccacttgagtgcttgtgggcaccatgcggcaccccgaaccctcgtcggcaacgccttcaagcaagggttttactggccgaccgtggtcgccgacgccac

SEQ ID NO: 54476 - DNA, 509 bp, Zea Mays
atcactcctgcatcccgtgatctagagaaatggattttgttcacgtttcccatgagtatgttgagcgcttttacaccccgctggactggcccaaaccacgcttgtgtctggtaagggctttgccggagattattgttggccagttgtgcagtgagcaattggctgccaatagttttgccgggactctgtattgctactgctaggaaggcttaacttgtgattggttgggtgcatatgggtttatccaggctttggtgttcaattcctcttccagtctttctcatttcatttgtctctctcggttcctctcatcgtcgcagcttcctctcccagctgccccaccttggatctagggcatcatggctacctgtgttcaccagagttggtgcccattatgtttaagctagggatgcctaggctgccggtgtttatcttgatgttctacaatggcacaataaattgatctattccctcaagaatctctcatactacttgttaggatctgattg

SEQ ID NO: 54477 - DNA, 939 bp, Zea Mays
tgttcaagcttcttttgttgctttagtccttcatcgagcagtacatagaagagtccttgacccttcatcgataggagacctaggagcagctttactctaggtccatggtcaaggagccaggggcaaccaaagctcggggtcacactgaggtggttgaggaaatgctcacccatgcactagaaagtcatgcacgattcaacaccatggagaagaatactgttgtcgctctggttcgtgcaaagactacaaaagcatagatcaggatagagcgagaagtgaaggacaaggtggtcgcctcgttggcgacatcgtggacagacttggggaaagcctaggcccgagttcggtccttggatgctttgctcgggcaggagcaatgaaaaggttctacctaggccttccaaggacgatgagattcgtctctcccctccctgcttattagtccctaaacatgtcgattcttatggtgtattttgaacaaagctttggggtaagcttcacttggtagagggctagctaagggcactcgatgccaagcacgctggactatgtgcgatcgttgatgttgtatgcgatcagctcgggattccatggtcggaggcgcctaccctagctgcccggttagaacttatcatcgaccacatacatgagctagaaatggacgtgttttagcttgggattaactgcgccttcgttgttgctcggtcgcactatgaggactcgatcaagctagatcaagtaagccatagatatgttgtcgagtggtaggacgacgagcttgaatgtctagaggtggcggtcgaccccttcacccaacatttagcagatagttttgttgatctaatattccctagaaaaagtcacaagagtcagtttctagagaaaggttcagaataaattaataattaatgtgaggcatcattttttgttgttatgttc

SEQ ID NO: 54478 - DNA, 579 bp, Zea Mays
cagccaacaagtacgacgatctggccttatggctcaaacaattcgctcctcagtccgtgtgtcaacctggatagtataggattagattaggtcgggctgaagtccttattcttcacgggattattctaataactcacgaggaactgttgggttttttttaggaacgggtccagactccctacatatacaaaggggtacgatcgattaaatcaaccaacaatcgatctataaagtagttttttactttttttttcttatgcattagatctagaagttgttgtagccatagtttaactatagttgtagtttctaatcttaatctttatcttgcttcggctctatgtcatttttaatcttcaccgtcccacacctcatgctggaatgtctgttgtgaccggaatatgaaagtcatatcggaagccatatgaccaccgatttgacaccatcccatacccgtaagagactagaatattggatttccaaaagttttctagtgagtgtgggtaaaatcacacacaatcgcacatgccaatttctagcataactagaagaattggaccatagagaagctttctgttt

SEQ ID NO: 54479 - DNA, 555 bp, Zea Mays
ctttttctgaaggtcctcgatcagtattctgttcaataattttaacaaaccctttttctatgggcactgagggtccagcttcgacttcgggagttgtagtagcttcggcggcttcctttgcagaggcagggggttggtgcccttgccgactccaggacagcgtccagcatgctagccattctcctcttcttgggagttatcgcaggagctttggattccttcggtaactctagctctggtggcgggctcaagatttttggcaatcctaccgactctagttgtggctcctcgatcgttttttctttggcttcggcaggacgctttggcgcttcaaccgattcggctttctcctgtcccattgctttcggcgctttagccgattcgcccttggcaccggtagggccagggtattctggcgcagtggcggaagaagtccccttagcaagcttcggtaccctggccgtttcaatgtacctaggccgaagcgtcaaagctttgatctttttccccttcggcgtagcagagatggtcaaagtagcagcttttcttttcttt

SEQ ID NO: 54480 - DNA, 296 bp, Zea Mays
taaacctttggttttgatgatgtcttgagtgtagtttgtttggtagatttattagaggttatgattgtgatggtgatttggttggttgagttttgtaaatttaaactcatggactatatgatggtatatacgtttatcatcttggttgtgtattattcaggtatatataatagctacagaaaaattatatacgaacattaatgatcacgctatagtaaaggagatgcagccccagcaccatcatggcacacatgacacgattctatatttaacaaagtccacccctcccgtcgtcg

SEQ ID NO: 54481 - DNA, 523 bp, Zea Mays
ctgaggctacgtaaacgtgttcttcttcattcatcgatcgtcagctatttgacaagtgagaagcaaagatatataaggtcgttggcaggttgttaattacgttaactatatgctgctgctgcaggttagctatagctataggtcgttgctgtatgagttgtgatcagccgcaactacattaatttaatgcatggagcatggaagtacttgtcagttgcaacgattagtggatgacgacgaccctgtgccaatcatcgtgccctagtcagtagtagtcgcaatcacaccaacctcggatgataggatagatttccgataatcgtgctgcaaccgcaactgcatgcaatgcaactactggtaggttctaggttgcagctcacccaataccagggccagactgaataggagcatctaagttaggctgaacagtggatctcacggtgaaaatctaggttctactacatacaacaaataaatgagtgaggtatgtgccttcactaggctctacctaagtccgtcccag

SEQ ID NO: 54482 - DNA, 765 bp, Zea Mays
aacaagcccagtggatatctcaaggcacgcagtgcagggttgacacataggaacaccattggaacatacagaccagtcaccagtcgccgccgatatcattaaattcaggcctaaggccgtcctcagcagatcgtgcatatgaccgtgcaaaacactattttgcaatgtagactgcactgtttacaaaataaagtttgaaataggaaagatgcggaatctgctgaagatagcctaaccatgttcaagagaagtccacaatatggatcttggtctcctttaggctcactacaagctgttaatctattgttctaacctaatccttatgttgtcattttattattgaagttacattacattatcagactattattcaagtctgcagcgcccattcctgaattctggtatcgtggtaaaatgtgtattgaaaaataacttcaagttctgccctaaaactcctacctcatgccataggattgtattattacatcaagagcaagtaaacatcgaaaagcaagaatggaagctgatattagttagccataaaaaaaattagcaaccttttttcccattacagtttgttgctcaactaatctcgtgtgaagatcaaccactaacttatggaacacagtggcaaaagaatgaaggacagaatggctagcaaagcaaaatggcagttacggacataccatcaagattcatggtcaatgattcataagggtgaattgatcttgtaatgtaatatggagctcatggcaaacaaaaaat

SEQ ID NO: 54483 - DNA, 458 bp, Zea Mays
ctgggagttcgattgcgtggacggaggagtcttcggatgaggacttggattattttgcagcgttagatgtggctgcagcggagccttcgccgcgcgtagagggttccgaggggctcccgggtgcgagtactgggtataggcagcgaagggcgttggtgaaacggagagtgagtgaattgtcgcgaagtggtgggcatcatcgtagtgagatggagagtggtcgtcttcacgtggatgggactggtaaacgagaattgttgtcctcgccgattggggcgagtgtaggtgaacgggagctgcgaaatctttttgagggtgaggaattgaggataatgctattcaactacagggagatgggtatcatcccgaaggttgagccaatgtaatatatgatgccctcgctgtgtgtatgtaaccgtaatttgtatgataaggctgcgcgcctttgttgatccggc

SEQ ID NO: 54484 - DNA, 965 bp, Zea Mays
cgcgaggagagctagggcgacgccacacattcacatggtcacgatctgcagtaactgaaggcgaaggtaactgatggacgaacaggggttgcggtgggaggaagaagggagagagaggtggagccacgggagggtggcacgtgcaaccacaggagagcgacatccacaacaaccaaagcgcacgctgcagtccgaacgaaatcgatgggagacaaatcgattttggatagggaagaggcggagagagcgaggaggatgagaaacaccacgacgtgggtaaagagaggcgaggagggagaaagcgtcggtcagaagcgtcgagagccgaagcatcgagagccgaaaaggagagaaggaggtgaggagacataaacgtgagccgttggttggagatcgagcgaggaggagaatttgcggtgacgtggacatcgcgagaaaggccgttttgaaccgcgtttcatatataggaaacgccctcccatttccgggcttgttgctttttaggtctctcttcgttgccgcttgccaaaataccccggtattcgttgcgctcgtctaattaccccacttaaaccccttttctagctaaaataccccactgcactaattacctgttataatggacatttatacccttacaccgtttcttaacgtcacgttctcgtttcttcattttctcgtccatgattcacttccctcgtcgacgcctgtacttacaatttcatcgtccatgatcgcttcatagtaaagaaaagccattgtttatatttatatgatcatagaaattaaatatgcaggcgacggatgatagttttaggtacctgggatgctctacgtaactatcactgagattaaatctgatgtcctactcaagtgcaggttgtagaacgccaagtacctggcaagtctaccagccgcacgggatgaagaacctggcaaaccaaaattcacattcttattagtgg

SEQ ID NO: 54485 - DNA, 561 bp, Zea Mays
ggggaacagaccaaaaaatagatacggtcgtaggacacttcggaaactgggccgctgcatgctggcagactcttgccgccatcgttgcgacttgcgaggccgtgtacatgtcattgattgattgggctggccacgatgaaccagcgataatgcgagatgggcccgtacaaacgcaggacggcaagcgcatgtgagatccagaataatggaaagggcagagcaacgcggctggcctacaaaacaaatgaaacaatgatgatcgccggtgcggtgcgcacaggcgcaacctggcacgtactgtgcaacggcacttcggatggacacgaagcgaggcaggcaggcagggtcacggtgacaggcgtgcgtacgtacgtgtctacctacgtgatgatgatgttgccgctacactggatttggttggccgtgcatatgctactccgatcccatgatagatctcattcttctcgccgcccgcactgttttcacttttcaccgccgccgttgaggtcgcattacgtcaagcaaggccgtaatgaatcagcaaaacccatcaaacccatc

SEQ ID NO: 54486 - DNA, 422 bp, Zea Mays
atcctctcccgcctcgacgttcgatccgtgctcaccactgctgcctgtcgtggacattgaggagggcgcctatgctgccagggttggggcccagccgtgcaggtgcaggcgcacgcaaccgccgtctgtaaatgcctccatctctgtgttccctcctcgaaggtcagtgcagagaaaaggaagtacagcccatctccgtcgtcgtcctcttcatcgattcggtccctcgtcatcgaggaaggtgaaatacctctcctcactgccctcttcgcttagatctgtttcatttgtacacagatagatttagggttcatatacgcgtagactagcagatgtgtcgattttgttacattaatttggatctggggtactcgtgtattcatcatgaattagtccagagtcataccaccccctaccctcag

SEQ ID NO: 54487 - DNA, 512 bp, Zea Mays
gtgaggttgtagaatgggaaaaaatactgcaagaaaaaaatgcaagcattgcaagaagaagaaagaaaaagacaaatacctagagaagaaatgaggaaagaaatggttgctgcccatgctacagcacaacaggtataaaatttgatatttgtatctttttagcaccattgctattagaaacttcttcaacataaattgtttgatcaattgtttaatgcagtccaaccgagaaagcatcactccagtcgatcctcctttagtgatcccaactaaaactcttagactcatcccagctgatcctcttgcacctacaccaagtagtgaaaacaacattcgtaccccagacacaaacaacaagaaagacaatgtgccagtgaactatattaactcttacactctaaggaatggtgtgacaagacgtatgcaggcaaggggcaacaaaagaagcgaatgtgtatggaatgcaaatgttcatgtattttggtcatataaactattttacaacattcttt

SEQ ID NO: 54488 - DNA, 432 bp, Zea Mays
cgtaaaaggcctttggaatcaggaatatcatagccccgaaccaccatagttacatgaccaaatttcaggccaatgatacctggagcaagatttcgccctcctccaaagaagaagaatcagcaacagggattcatgggtcagaaagcatttaaggtggccctaccatgtgcaaaggctggaccaggaagttcaacgagtggtacagctcaagtgaagggaccatgctacaactgtggatagatggggcacttcgccaagttttgtcctcgccctaagaagaagaacgacgtctatcccgctcgagtgcatctcaacactgcatacgagattgctgacggagaacttgtgatggctggtacgtttcttgtgaacgatcaccccgcagttgtactatttgattccggatcttctcattctttgatgagtactgct

SEQ ID NO: 54489 - DNA, 635 bp, Zea Mays
aagcccatcttctctggccttcgtctgataatgtagctcatgcactcggcagaaagcttcagcatttgggtccattccctggcttcgaagggcccaaatgaagatgctgagcctaacgatagcattaggagtcagctgacaaagataaatttcataattatccaaaacttccccaatcatttcatgaagcggaaaccgcaatccagctttgaaaaagcttttgaaaactactacttcgtcattttttgctctggggtggtttcttcgccggcaaaacgaagaagcttcttctctgtctccccgaagtagccgagcttcatcatcatgggcacatcggcctcagagacagtagatttttcaaaatctaagtggctgggctttgctgggattagagtgttgtagtcttcctcttcatcagcattttcttcctcaatatcagcttcttcagcctcagcagtatgtgcatcttcgtcaatagccccctctgtcacaaccaatcccgattgcttcataacttcggaaatcggggctgtttcatggctttggcctcctctccgtcacgggtcaccctagcagttgaacgtactttggccatcaggtgttgaatttcttgcagttcttacgaagttgatgat

SEQ ID NO: 54490 - DNA, 410 bp, Zea Mays
gttaatttgtagaatcacacggatatgaatgagagtggtggccatgaacaaaatgatcatgccagaaaggtaataatggtattagagtgaatgtgggactgcataatattatgtgttgaaaaaactgtacttttgaattgcagaaactggattttgcagtcaatggtataagcttggcaagaccaaataactcaaaacccaagggaagaacaatcaaggggagtgaacaaaaggttattaaattgggcgcaaaaggtacaaagaaaatgaacaggaaatgccagaagtgtggtattgccgatggtcacaacagtaggacatgtttgtcattggaggagaatagagcatggttggctagccttgctggtcgtaagagaggtcgacctcctggatctatgaacaaggttgga

SEQ ID NO: 54491 - DNA, 466 bp, Zea Mays
ccgttagattgcgggtgatatactgaggcgaaggcaagcttggtgccgatggagaagcagaagtccctgaagtcctagctatcaaactatttgccattgtcgactgtgagctcggacgggacttcgaaccggcaaacaatgttttgctagaagaatttctgggcagtcttcgacgttactgtggatactacccttgcctcgatccacttggtaaaatacttcgacggcgacgaaagtgaacttgaggttcccatgagtcgtgggtagtggcccgccaatatccagcccccagcgttgcagtggccatgtgtgggcaatcagctttgtgaattgcgaagggttgcccgaacggggagaaaacttctggtaggcttcgcacgacctcgtgactcggtttgcggcgcagattatagagggccagtagaacccttgacggatcaccttggcagtgagggccctaggcccc

SEQ ID NO: 54492 - DNA, 825 bp, Zea Mays
agaaaaagcatgcatagaaaaaaaaggcaggttcaaaatgggctagctctcctcgatcatatatgaccttgccaagaagtacgagaagttttttttttattgacaccatggaagtggatgcggtggcacggcgaggcgagaggtgcctgtacccggccgcagaaagtatgcggtcctatgcggctctgcccaaatcgaaattcagattcagactgcatatatgctgatgggacgacctcctccctactacacagctcaaggttctcagaccaaactcattggttattttctacaattcaacacagactatatatagactcggtggtgtacaggaaatttcgaggcaaagattttttttgattttttttcttaccagcacaactaaatggagtgccttttttcaacttgagaaatattagaacaatcgttggcccctctgataattattactgctaggaaggaaatcttgtcatgcatgcatgtgtgtgcctacaagtctacaaccacgcgacaccacttgcacgtacgtacgtagttcaacagcaattcagacgtttcactttcataacaaatacggcaacacgcacgcgtatgtagatctccatgtaattccattaaaaaaagagagagatggatgataccgcttgctcacagttcaaggttaggacagaggactctcgcagtaccgaatcgaccacgaaagttgacggagggagagggaagccgctgctggatatttctgatagatttagcctccctctttatttcaaccaacggcagtgagcagtctcaccatgtggattggattattaggcaccctgagac

SEQ ID NO: 54493 - DNA, 428 bp, Zea Mays
gttgaaaaaggtgtagaagaggagaagaagactgcttcggtgaccgagggaaatgagggtgttccgaagaaacaacatatgatggctgtgacgagggctccttaagaccctacccccagtcgcgacagaaaaaattgttgccaccaccgaggtaggagctgatgaaatggccgctgaagctgaaaatagcggaggccctttggaaccacaatgtcggagatggacaggattatagctgatgtggttcccgagagggaaatagatgaagttaccgctggtaaggctacacccttaaatatgaaagaattggaaggagcttcttcggagagcaaggatttggacctacgacacttgggtggccaggaactctccgaagaagataactttgaactaaaagagtttgctattgtcggtggctacaagactag

SEQ ID NO: 54494 - DNA, 603 bp, Zea Mays
attcgatacgttgatgaatggattggagatagatgagatacaccaaaatatgagggagatgaggttgtggatgcgggacactaattttttgggaagaatgagagaactgttggagtaagaaaaaccactatttttaactaatatctattttggagttaatttacacgttcttttggagttgctctgactgcattcaccagtgcaagctcctaacctgtgagactgtgttgccacaacttatcttcttcacaccgggacgttgcatcagctaggccattgccatgtattttttagtgattatttatgcatctagccggcctttgtgtcagcatgacgttagctgggacgtcagtcatgcctttcggtcgttcacggtgagtcgctgttaggtgggaccctaccgtcatccggttgggacaaacgagccgagccggagcgttggaccattggctggtggggatctccttccgcagactttggctaaccatcgcgtacacgtcaatgtgatgtcagagggcccgaatgtcagctccatcaccgtcgtgacttgcgctcgccgtaaacggatttctgtgcgcctgtacgcgtatccaccgtggcgcg

SEQ ID NO: 54495 - DNA, 345 bp, Zea Mays
cacgcacaagcgaaagcgcgcccgcacgtgcacgcggtgtcagctttgcacaaaggactatggcgatttgaaaaaacccataaagagtctgtagcactatttctctatgtcactgacattcgcagataggcccttcccgtttctatttcttcacaagtcgagaccccccgaccatggacggcggagcagcggctccggtgagcctgtaccggccggaaaatgcaacgactggcgcgctggtgtggctgacacctaattctaccaataacgaccataatccctcaatcaatttcaaggttttagctcacaatcacgctgtccacggtgacagcacgaactacggat

SEQ ID NO: 54496 - DNA, 348 bp, Zea Mays
tcgcgattgggtattcactagtacattttggcagcaattattccatttcacgggtactcagttgtgcatgagttcagcgtatcacccccaatctgatggtcagacggaacgggtgaatcaatgcattgagacgtatttgcgatgttttgtgcacgcatgtccaaacaaatggttttagtggcttccagtggcggaattctggtacaacactaactttcactccgccatagccagatcacctttcgaagtgttatatggacatacacctagacattttggactccagatcggttcagcagttgcagcccctgatttggcgacatggctccaagagagggaagtggtgtc

SEQ ID NO: 54497 - DNA, 476 bp, Zea Mays
ctgggtcagggtgtcgctggcgtgtgtggggctagggcatggttagtgagtgtgtggcgagggcgcagacgaaagaaacaagcgagagaaagaagagccgaacaaccaacaacggccctatatacgactattttttgtggttgatagttggccacaaaaactaagcaccttattttcggtggttgataggttattttcagggggtcatgaaccaaaaatagaatcaggtggacaattctcacgtgaacaaaaatttccatgatttgcttattgtcttgaaattttgatatggatcacacatgttatcccatgacaaatacttttcgctctcggtgcaacaaacaatcagttatagagttatagtacagggaaaagtatgtggagttgagatgacattttaaggctatctctaaccattccccctctcaaatccccccaatttgtactttctattcatattaaatacatcattctca

SEQ ID NO: 54498 - DNA, 905 bp, Zea Mays
attcataagcccaagccaagcaatcctgaatagatctgcccttgatgaaaccatattggttcctatgaattaaacgagacatgaacggctgcagacgatttgccaaaagcttcgttaggattttcatactattgtttaataacgaaattggcctataatctcccacattctgtggattctcctttttcgggatcaaaacaatgaaggacccattaatacttctcaggcaaacttcatcatgatagaatttttcacaaagatcatagaagtcttgagcaatgatatgccaacatttcttaatgaagttggtattgaaaccatcaggaccaagagatttatccaaaggtaatgaatttataatgttgtcaatctccaacttagtgaacgaggtgtctaactcatgaagctcctcattacggattaaaagctctggaaggtcaaaatcaattcctgagaaatcggacgatcccaatctgcatttgaaagcatcccagaggagactagatttatgttcgtgctcatagtgaataatcccattctcgtcagtcaaagtggcaattgagttcttcctgtgtttaatggtggcatgagcatggaagaaacgagatccagtgtcaccatcagttacccacttaatagccgcccactgcttccaataaattttctggatgttcagcagaccggccactttttactgtagaatatctctgaaattccattcctcaatagaaagatcccggtgctcttccatattgtctacaaattcaattagaagcttgatattttgcaccattttatcaatttttggaagcaatctctgccaatccttcagaacctttcgaacacatttaaacttagcagtcaggtttttagccttgtcaggaaggcaagggagcccagcccac

SEQ ID NO: 54499 - DNA, 607 bp, Zea Mays
ctgcaatagggtaattttcttgccgtttgcatacgggaatagtttggggaacgataaggcagggattgctgcactccacctgtcatgccataactgaatagagcatctagaaatacctttatatgttttgagcaacttgagtatgtcattctaccaggaggaccacttttttggttgaagggactgcctcggatctgtaatgattgttctagattaagttcacccaatgtaaattctgtctatagaagaatttgtctagatttttcattagcaatgcttcattttgtgtcctaaggttgatgactcctagacctccatgttttttcggtttgcacgcaatttgccaggctgcctgtggtggcctttttgcgtttatgtcagcacctctccatagacaatgcttcatatatttgtcaatttgtttgatcatcgaacttgaaagtttgagggtgcatatgaagaaagtaggtaacgaggagaacattgaatcgaccaagttgtaacctcccagcttctgacaagaatattgaagttgatgataaacgttgttcaatcttccgtcttttaccactctcggtccatcgacacgaaactgcatgaccttcac

SEQ ID NO: 54500 - DNA, 680 bp, Zea Mays
ctcgacaggcatgaacatctttgaagggaactaatttagttatagcacaagcttgatctgaaaaaatgttgcattgggtttccttctctcagctgctaaggtggtgtcctctgcaggcatgaacatctctgaagcggccagcgctggtgtcatcaagtctatcctctgcacggtaatcactaaccaatttatttgaattgcctgctcccgattgccggttagcatggttgattatctataatgtgtcttgttgttgactgctgactgtgactctgggttgcgagatccccaggctgcacgccccgtgccccgtgctcgattatttgcctgacgacagaaaatgaaagctagggggttaccatgatggcatttgtttttctcccttttttggtgaatactaggtagtttttccttcatataattgtgccactagcattgatctgtcatataagtactcagtcaaatactattggatctcggagtgctcgacaactaggggttaccgtgatggcatttgtttttctcccttttatgatgttatctctctaattttaaagctagtgttttgtttctatagaaggcacactctatttcgcaacattttattttttagtttaccagataaaaataagtatctatagaagtaaacaatgttttgatgtcttagaaaactgaaaaca

SEQ ID NO: 54501 - DNA, 628 bp, Zea Mays
cggctacagtattgtttggtgcatctgttcggcggcatcgtgttcgggtctaggctgggtgcacgctggtgaaccatcggagaaagagagagttccagggagagcgcggcgtctaacctgggcggaatggctggggagaagtcttaggttgaagatgatcccggtccgttggttctcagatgtgtggatgagagatagtcaagctgtagtgtcttcaggattaaatctgggccgtatattaggaatccgatggtgtctggtgagagagggtttaaaatagttcgatctaatcgtgatcgttcacagtggatcgggcggccgagaatgcgccatacccccttcgtgggtcacttttgttaaagaaccctcgggcttttagtgaatcaacccgccgtccagtgcacagttccctgagtcttagatttaattgcgccgtagcccctgcgctttgcagtaattgatgcgaaatccagagacccaggaaattcaataattaaatgtagaaattgatttttatgtataaataattgctagaaacttgatttaatcatagaaaatccattctagctccaaattagtatattccagttcctaaaattttgtaataatgttgtttattacatagcac

SEQ ID NO: 54502 - DNA, 1055 bp, Zea Mays
ctaccgagacagctccgatttccgaagtcatgagacaatcgggcttagttgtgacggagggagccattgaagaaggtgcacctgttgccgaagctgaacaagctgatgttgaggaagaaaatgttgatgaagaagaagaggattatagcattctgatcccatcaaaacccagccactttgattttgaaaaatctactgtatctgaagccgacgtgcccatgatgatgaaactgggctacttcggagaagctaaaaagaagcttattcgttttgccggagaagaaaccactccaaaacagaaggacgatgaagtggtggttttcaaaagctttttcagagcaggattacagtttcccctgaatgagatgattggagaagttctagacaattttgagatttttcatcatcagctgacccttaacgctatcgttaggctcagcatcttcatctgggcacttcgaagccaagggatggatccaaatgccgaagcattctggcgagtgcatgagttgcattatcaaacgaaggccagagaagacgggctacatgaaaattttggttgttataacttcgcgtatcgcaacgatatgaaggctctggtcctcagctatcgcaccaagtggtcaactggctggaagagtgagtggttttatattaaggccgatgagaagaaaagagagaaactgatgacgatggtgatgagcccgctggctttaagcttcggggtgaccagacccttgtgcaacatgaagccaggatcagcatgtctgatggccatagcagaattcagagtggtggctaaacaaatcagcaccaaggatctagtgcaagaatacttggccaacagggtatctccaacgttaagtgactggagcatgccgaagctaaaaggaacaaagaagaagaatgaacttgttcggttgccttatcggtttaagtttgagaaacaattcaaagagccctgccaagaacggctagagatgattgagactatgtgcaatgagattttgggcaattataccaaaaaagaagatcaactaatgactgcagccttc

SEQ ID NO: 54503 - DNA, 283 bp, Zea Mays
caggaataagggtgtaatagaagtagagtagtgtattgtagggtattgtagggtgtattgttatataatgggtattgtatcctgttaataggttcaacttttgtaaaatgggtatagtatcctgctgtgtaatattgaatctgtatcattactcttcatagtaatgtaaaacggaaggtttccttgggcatatgatgtttattcaaatgtttttgcctcagatgccgaccaggactcgtgcacaggatgcagctggaacatccgggggtcgggacgttacccc

SEQ ID NO: 54504 - DNA, 484 bp, Zea Mays
ggctgttctttgcgatgcggcagaccaatttgggggaaaacggcgtcgcggtggctctggttgaaattggttttggggattgaggctactgggccgtaagaagctgtgctttcaccgtgcgcaaacgatttgggagaaggtggagggggcggtgcgaatttgacttcgatctagtcactgtgtttgcgatgatcacccttcgccgtgaacccaatggctatttatagtcgtggcggtccggcgatcaccacacggccacggacaacatcactagcgcatgccaaccacgtcggtagaaggtacagtgagggagaactacggcatgagcgccaccgcggcagaattcactgagtcacggcggccgccggtgagtaactccggccgagctcaggagatggtgccacgtacgagttacccctccccgacgttatccactccattccgcactcaaatcaggacggcggcggcactaattttggcgcag

SEQ ID NO: 54505 - DNA, 301 bp, Zea Mays
catgtacccatttaaaccaatatgtttttgtgatataaatggtgtgcatatgttctctttccattgttggttgttctttttgttgtgcagttttgagctatgtccaccaccccattccaaaagctaacaatcaaagcgtgaggctatttaaattgcatggtatgttgtttcgaaatattatgaagacactttgacttcattctttcatttctagtaaattttacttttttcacatgatgcgatataaatgaatatatgcaaagtcaagattgaacgtaacgtacaataagttttattgaac

SEQ ID NO: 54506 - DNA, 556 bp, Zea Mays
aagacttagttaggactccactctgtagcccttagcttcacttcctccaccacaaagagacctgtgagtctctaatccctctcttgcccgcttgtaactcctactaccagcattgatcagcagtggtgctggtagcgcaagctaccgatgaccggatgtagggacattctgcccgaactagtataaatcttgagaagcccagacatgcacacagaaatatacttgtcggagcgaggttcaaaataccgacaaacttcctttcacaagttagcatcaagagctgaatatgcatcttctatagttttggagtatcataaggtatataatataatcatcaccaaaagactttgtggtcctctgtaacttacttttttgagtgactatagtagtatcctcctctagattttccacatgggtttcaaagtcagcatgtattactagtttaggtatctcaggtataaaatgcatagcatctctagattccataattgcaccaacattcagctcaggtactctagagtctattattaaaaatatataagccacaatgttagaa

SEQ ID NO: 54507 - DNA, 661 bp, Zea Mays
agagcagcaagtcagcaacccccattcggacctgtcctcagatagttcttctggtcacattcatggtgccttgctgcagaatgggcagattcagaatgggcagattcctgaggatcttgtggctgtggggccggtgcccaactttaatgcccctgccgaccaccctatgattgggccccaggaggttgatggcccacctattcaggatgtacctcttgtgcctggggatatagctattcctgatgcccagccggtggaacctattgttaatgggcacaataacgtgaggttgaactttatgttttcacatgactggcaatcggatcctgttttgctgagccacttagaaaggaaaaggaatgcccagttttacaggatctgggagagatattttgctccggctgacagctcagtgacctcggtgcaggttcccaagaagtgggcgccctttttcttatccaacttgatgcacgaagattcctttagttggtccaaaaaattcctgtcttcagatattccttcagctttgttggagccagagactgtgacactcccttttgtcatccccagaaagtgtcctgatggcaagtttcttgatccggtcgtttctgaggaatctgctgacgacatctctgtcccctcggacccgacctactccaag

SEQ ID NO: 54508 - DNA, 580 bp, Zea Mays
caaaggaagatggagggtggtttaatgtaacagtttcttgcacaaaggtcacgacaattaaatatcggtggaggtggctacggggctaccccaccgattttggcaccagacatagattcttaggagatgatgaggcagacgcccacacacacagccggaagcaggccaagggaagggctaaacctccatcccttggcacaagccccacaagccacaaccaccacctccacctccaccaccacctttaaaagaagggtgctaaagggctgtcctgcgaagaaaaggagaggagtgcccctagcctttccttgctttccactgaaatctcctatctgcagccatgcagttgctcaatcctggcctcagatgaagcccaaccattcattggtatataagtcgctacaacctttgcaatttcccactacttcagaacatcgtcgaagaagctctgtgctaccggagaaggtgttcgtcgtcgtgcataattatacattccgcagacctgtaagctctgtgagtttggttggagctcccaggttctgcattgcgttgagatggggaggcattcttgctgctacaa

SEQ ID NO: 54509 - DNA, 1179 bp, Zea Mays
ggatggactttgggagctcttttgaagataatccagtgagtgtttgagcatggttactatagcaacattgtagctggattatagggctagaactttgttacagagagattaataagttgccacacagaaaacggagattaatgccctgcaaatggtcctatcagacagactgaatggtgttctgattgtacagtgactgaaaaagatcttctggttcagtgaacctcactgccggtgaccccgcgctcggattcatgccaggcgccacgattcatgctcaacggagtgcagacaactgctcgaggtaagaaatatcgcattgaggatggacttagggcactgttctgccccggccgccgtgtcctcttgactcacgaccggttcagataagctcaccggagttagccgtctgccgctcggatgccacgtgcctagatgcagtacttcgtcgcagtgactcgctctagcatgtccggtcatcgctgatggtcaggccacggtgaaagccacacatctcttgcaccagtgctctcccctctctctggctgccagcgcgccattccaaattcacgagccaccgccctcgggccctataaattgagcatgccgtgagctccgctaggtagtcacgcacccaacacaccagcccgtgcctcagatcgttcaccagagcgctccaatttcaaagttcccccaactcagtcaaaactctgccgagtgagtgcttatcatggctagctctctacaggtccattcatgtcttcctcgctctcgtttcaacatctctgtgtgctgtagatgcttagcagcccgaccaattgaattagatcacgctagatcaccgggaacatctcggattatcctcggtttgcaccatcaccgtggacagagtgattgtgagccagaaccttgcaattgagtgaggggaaatggtcgttaggggcagaattaggtgttgtgcaacgaggaagcatagccgttgcgttttccagccagtatgggctcgctggagtccctgctccgccgtccatggtcgggggtctcaacttgtgaagaaattgaaaaagggaggatctgtttgcgattgtcagtgacacagagaaatagtgctgcagactctttaagggttttttcaaatcatcagggtcttctgtgcaaatctgacgccgcgggcgcgcg

SEQ ID NO: 54510 - DNA, 454 bp, Zea Mays
gcctccgccgtggggtgtggcggtgaggccgtcggtcagccggcggtaggagcgtgggccaagcatgttcattggatacgcaatcgacggatgagattagagataggcataatggttcgcgtgatcggggtgtagccatcggattgagatctgaggatgcgggggagagagagttgttatccgtagatcgtaatgaacggaccggattagatcgtagtcacattaaatcctaggcgtagaaattagatccgagggctcgtattgcttatcggttcaagtggggcggatttaatctatgcccttgtttcctgatcggatggccaatactcgcccgtaccccttcggtcggtgcgtctttcaaaagagaccttgcgcttatcaggaattaacccgcggtccatagatactgtgcactgagtctagtaagaattgcgctggggcccctggcttttcc

SEQ ID NO: 54511 - DNA, 467 bp, Zea Mays
atttgtgatgtgtgaactgattatgtggttgtaatgtgaagtttttgtgaactatgtcaatggatgtgttggtaatgtgaccaatattgatctatgttttgtctgtgatgatatatatgttatgtgtgttgttgtgtagaatattgtggagaaattaggcctcattggttgctggtttgcagtaggaaaggttaattctagtcggcttgtccatagtcgaaaagaattaacagctaattcccatgggccagttaattcccatcggccaagcgtggccaacgagaactattcaagtaattcacatgggccagctatgatcgacgggaattaacttattcatttccgttggtctagctaagccaacaggaattatttctcgtgggcttctgtagagccgacgggaattaactaaccccgaccaataacttccgttggccacgaaccgacgagaattacccatataccga

SEQ ID NO: 54512 - DNA, 401 bp, Zea Mays
ctcaatattccatgaattccccacttcggtgccatccatctatgtgagccagtagcaccccggtcgtgtgacctccatgacgatgaatggtccttcccatggtggtgatactttgtgtcgtccctcccccgccagcactcggcggaggaccaaatctcccactgcgaaggatcaatgtcgcactgctttgtcgtggtagtgcctcggggtctgctggtatctagccgactgaattaccacatttagtcgttcttcttccagtacattgatgtcctccagcctggttgcttctgcttcggctatgctttcgaatgttaatctgggtgctccaaagatcagatctgctggtagcactgcttctgacccatacaccatgaagaatggggtgttttcgtgcaaag

SEQ ID NO: 54513 - DNA, 304 bp, Zea Mays
aaagacatgacaacggaccaaaaaccaccattattatccatgctattaatcaaatatagagccagataaacagtaagccatcttaaagaacatcccatgaattagggcctctaaagaaatccatctaaaatatacaatgagactaaacatgtaatacatgatgatacatgtatatcgacctcttgtgactgacgtgcgagagacaaacatgagcaactggctgcgagaacaatggtgtatctcttatatttgatatctttcgatgtcttcctgacgttaacttccaacaatcctaggattagct

SEQ ID NO: 54514 - DNA, 967 bp, Zea Mays
ccacgacggtgagtggcgtgaggccgatctccgatgatcctgtaccggccaaattacgcaacggctagcccccccccattgctggataccgaattccaccctttatgactatttcccctaaattaatttctggattggagccctacagtgctctgcccacggtgatagcagcaacaacgggccactcagcgcgttcccgatgatctaaggcagctcggttcaattgggcaggtcgataagtatcacgggcatgtgagatcactcaaacaagggagcagaaggtttgaactaacctcagttgcactgaccacgacgagggtgttcttgcggtgggatgaaccgatttggggaaaactcgaaatttgtgagctctggtgaacaattgagggtgggagcgggtgcttcggcttcgtgataacatagcgcagctgaccaggccttcaatttatagagggcttacgcggtggtgcgcaatttgaccgagcagtgctagcggccggagagaggggagattactggcgcagtggattcgtgtcctccgtcatggcgacttcaccggtgatcaccagatatacttaacacgacctactgcgacgtggtaagatgcccgggtacgtggcaaccgaccggcagtcagccaacaccggcgaccttatctgttcaggccgcaattcatgggggcatgacggctggccaccggagttatcccaaggtgaagatcttttgccttggagtattatccggtcactagggagcgcgaatcataacagcgacgacgattcacggcgaggattcaccggtggtgaggttcactgaacctgacccgaccagggaactgtaccatggtgatgatcttcagttgcctgaaccgcccatcttctcccttcttgatctccgaattcttgttaggaacagagcaatctcccttaataaaatttgttcaccatatatcagtctacaaactaac

SEQ ID NO: 54515 - DNA, 772 bp, Zea Mays
ctggaatatgagttggaacggttggctcaccctgaggttggggaaacggacgaggttgccgccggtgaaacggaggacgagcgtcgcgggaatcgcgcgagtaggtctccagatccgcctccacctcgcgctccattgagaggtgtgcgacggcttttcctgtagccgcgatctgctgcgcaaggagggactggtccttcagaacttgatccatggctttggctctcagctcctggttcacctggatctgctcttgtaacctcgtcacgtcaccgagccgagtgaagaggagatcgatgctctctgaaatgtgcgtccaacgcttttcatccttctgctcgacaaccgccatttcgtcgaggacgaatcgcgtctgaacggatggcttgggtggcgccgtagtgctcacccgcaaatcggaccaaaatggcggaggatttacaggaaatcgatcaccgtcgctggttcagcgcggcaaacggtgagatctcacaaaccaaggcctttgtcggtgccgatcgacggagtagcggagcaccgggcgtgccaagccgaggaacgaaggtctctgataccaactgtcgtgaccccgtggccgccgcacactgcgaacgacgtgaggaaggaagaatgcgtggggaagaagatatcgccgggtaaggtttcctcccggtaggaagtggttttgtatatttcttttctgatgtgtcctctctcagttctgtgatccttatttacatagtattgtggtcacggggcccatagacggtgc

SEQ ID NO: 54516 - DNA, 636 bp, Zea Mays
ctgtagtccaggttcttggtttgtgattgattaacataaaatcaatgttgaggacaaggtgacccaaaagcgtacaaccttgttttgttcctaggatttgggggatttagaagtttgtcttttaataataaaatgtgagtaattttctatgtgcacaagctctgatgagttaaaatgttttctatggattgccaccaagaggtccttaagagcatcaacctcgactactatgcttgctggccactgagaaccccggcacccagcccagcccgtcggagttggaggtttctcgaatcttgaagccacgacctgcgacagtagatcacctgcaatttcgactgtacgtctttcccccatccctcggttgcatttcgatttggatccactgatgggtgcgtcgctgctgcttaccctttcgtgcatttttgtgatgtgatttggatcctctgatggacgcatcactactgcttaccctttcggtgctcctgtgcgagcaatgcttatcccaagtgaattgctgcatttatgtactacagaagatgatacaagcaaatcattagtgaacagtgatacattattcctacttactttgtaaaggtctaagaccttgagttgaaacactttgtgcaggacctg

SEQ ID NO: 54517 - DNA, 600 bp, Zea Mays
aagtgttgttctcctcttccccatgtaatcctgcctcaacgagcacgatgagctcactcaaccttgaagtgttgttctcctcttcccaatgtaatcctgcctcagcgagtgcgatgagctcactcaaccttgatgagtcgtctccattagctccatcctcgccattttttgttgaacatatatatcttgcatgagcctcgtctgtgatatagttcccgatgcatctagtctctacaaatatattgagacaaataagttagcaaagacaagataattacaatgtacgagcaaaaccaacatgtctttttctcactcacttgcactcagacgaccagcaagattcctcaacatctgtttattggctctagccgcctctatttcccttgcctcctatgctctcttcttgtttgccaccttcaatctcctcggcttagcatgcatcgggctgtcataacccattgattctgtgaacctacgcatgtcctggctccgatctttaatgttggaattgacgagctgagatccacagtgtatcttctctcccatgagtctctttgactttatggtatgcatcacctcttctttgtcgacgtatctcct

SEQ ID NO: 54518 - DNA, 990 bp, Zea Mays
tgcacgtgttccgcagcgtgacctgacgctgacatccgggtcccatgtgttagacgcagcggcacgccagtgcttccgtttttccactgacttgagggcccgcgtagcagtttcattttccaccatgctctgactggagtgtggggccacgcggtcagaccttccttcaacggagctgcccgcatcctcgagacgactggcgcacaacacggaattctcggtcaaggccgcccagatcctgtggccttgtcgcgcatataaaacaatcggtcgcctcacgttcccgtgaccgattcaagcgcgtagacgaccagagcctaaatcgagaggggggcggcgaccttgcatcgatttgaccgtgccgtcaacgaaattcctctgcgctagtgtcccatccctggtgcgtggccgagtgagtgcgccagcatctgggaagtccgttcgtgccctcaggtcaagctgagcggtttcgaatcgaagagaattcctcaccggagtgcgagtctaggtcggaacaaccccttcgcatggacggctcgcttgcgctggtgattcctggtatggaggcctcacctgtgttcgccttcattactgcaacaagtaggaccgttgaattgaagtttggtgcgcctatgcgaggattagcctcgtcagcgatggcttcactgtcgtcctctattttgggggaaaatggtcggggggagacgggtgttggacggtcgatgggcagatcgacagtcctgggccactcgatctggaatgggcactagagattagacgaagggtagaggttcgaccgcgtcgatgtgagccatcggatcctgatcagaggggtacagtcgaattgcgttggaaatgaatcctagccgtcaaacgttaatcgagcgggtcagagtgcgtatcgggtcgcgagaatgatgatttaatctggagcgtcggcattagatcggacgactgatatatgtagataacgtttcggctgtgcgcttt

SEQ ID NO: 54519 - DNA, 424 bp, Zea Mays
tatgagtgaaatccacatccggtacatcaaaaccaagtcccttgagctcattcactatctcatttaaccggttgaacatatcggatacactttaatcttctctcataatgaattgctcaaattttcctttgcacacatatagctttgcactcttcacaattgtagttccttaatgaatttccattagcttaatccaaatctcatgagcagttgtgggattcttgatacggttgaactcatttatgtcaagagcatcatagaatacattcatggcttgatcatttgtaagaatgttttcattgtcactagccgatggttcatcttgtttcaacgcaacaaacccatccttgataattggccaaatttttccacccattgctctaagatgcattgacattcttattttccaatagtcatagttatt

SEQ ID NO: 54520 - DNA, 324 bp, Zea Mays
ttaaaccaagatattaccaattgaaagacaagaacatagctatgatcattatcaatggaacttcaagatatttaataaaattgcacagttccattttccatacctttgcctttatgagagcacttgttatcaccaattcaggactccttttgctcacacacctcatagctcaaaagggcacgacatggatttgaaattcacacaatactaaactagggtaatcatgtgaacatgcactaaacaaaatgtcatatttgcacatagcatgacttacaggtttatccatatacaccaagagagttaatcgttgtggatataacaaat

SEQ ID NO: 54521 - DNA, 312 bp, Zea Mays
ctttactgggaggcggaagcggtagcgtttttagtgaggcgaaggccagccaacgaggctagtaacctcagactagcaggtatggattagcagatttagtgtccagctcaccaactgaccctccctaagtagggtttaggcccaccaataaaaggcagggggtcggtttgggggttaaagaggataggcaacaagaaggcggtcatcgggcagcccttttgttgtgcaacaaataggccgcccataggagattaggaacctcctgcgatgcgaaacgacgtcggctccataccgggtggtaaaacacaaatg

SEQ ID NO: 54522 - DNA, 400 bp, Zea Mays
gaaaatgaagattgatttacagtctttcaagcaagagaagaagtatgtcacatagtatgatgtgggctttaacaagatggtccgctttgttcctcatgtggcttacaatgagttggagaaggtgaaccagttccatcagggcctgaaaccttctatcaggcatgctctgggcgcctttccgttggtggattttcgtactatagtagagcatgcattgggtgtggagatgcaacgccagtacaccatggagtcatagaagtcttcgggtgttgatcagcctcgtggccaggacacgaggaggggcaacactgggggtccagcccacaagcgggccaagtcacaacaccagcgccaccacccctaccgtggcaaatcctctgaatcgagtacttcaggagga

SEQ ID NO: 54523 - DNA, 633 bp, Zea Mays
agtgtaccaacttgcaggaagtaagcagtgcatatgccatctttataatatgaaaatatcttagcttagattcatttagtacctccgagacgatgtagactagaaactggaccacatggatgttatcaggactctgtcattttaccaccaatgttgtgctgaaacatgcattgtatccaagatgtacaactacaggattcctcctacccttaggttaaccaacaccaagagattggttagatatttcttgagctcgtccaaggcttattgggcctcactggtccattcaaacttgtcttgtttctttgttaacttgaagaaagggaacccacacataccgagccgagatatgaatttgcttagtgatgcaatacatcttgtgagccactagatatctcagatgtagctgagaggcttcatccttaggatggcgactaccttctctagattggactcaatccctctatgtgaaacaaggtatccaaacaactttctagatggcacaccgaaagtgcaattaccgagattgagtttgatgctagagttccttagattgccgaaggtttctactcagactgacaccatatcccttttggccttcgtcttgattactacatcatcaacataggcttc

SEQ ID NO: 54524 - DNA, 710 bp, Zea Mays
aagtgttcttttgggcaacaggaaataacttatttgggacatgttgtcagtaagacaggagtctctactgatacttccaaagtagcaactgtggtttcgtggccagtgcctgctacaataaaagcactccgagggtttttgggactggcggggtactatcgaaagtttgtcaagaattttggagttctagcgaagcctctaacggaattattaaagaagaatgttgtatttgtgtggacatctcagcatgataatgcctttcaagccctcaagcaagccttatcctcggcaccagttttggcattgcctaattttcacaagcctttctccatagaaactgatgcttcaaggaagggtattggagctctcctgcagcaagatggtcacccgctggcatttgtgagcaaagctttgggaacaactaacatgtgccttttagcttatgaaaaagagtacttagttattcttctagttgttactcagtggcgtacttatctgcatcatgccaaattttgcttctacagtgatcaacgtagtttgatccacttaaatgagcaaagcatgcataccccttggcaacaaaaagtgtttaccaagctcttgggtctgtaatataagtgattgaaagttgccttaatgggggggtggataggcaagcagatttttttccaacaaaaactagaaacaaactgagtaaaactggttcaacc

SEQ ID NO: 54525 - DNA, 389 bp, Zea Mays
tcctgctactgaaggagtgcctgcgactggacttactgacgttgaccccaatgggtgtacccaatctgctgctgatcccaatgggggtgctacttgtgttgtcaacgtggataatgaggaggaagaagatgaggttcctttgactcggaaaaacagtcggcagttcatcgccagtggtgagagtagtggagttccatctcctgctttgtctgccctcattggtctgcaagaactgtcccgggccaactttgatcagactcttgaggatatggtcccagaggacttgttatcggagctagtggatgatggtgcaatggaggcttgcgttgacgtgcccgatgttgggttgaggtcatcccgtgcctcgtcgaccttagaacgcgatctcg

SEQ ID NO: 54526 - DNA, 671 bp, Zea Mays
aagcggctaagggcggccagtgaccccgtaagcttctggacgtccttgatttgggccggaggcctcattgtctcaattgctttgatcttctctgggtttgcttcaatgccccgcgtgcgaaaccaggaatcccagcaacttctcttcagagacaccaaagacgcacttttccgggttcagcctcatgcatgttgcccgcagcttgtcaaagaccagggtcaagtcttccactagggtcgaccctctcttagtcttgaccacgatgtcatcaacgtatacctctaccctgtccctaattaggtcaccaaaggtcttactcatcacccgtacaaatgtcggcaaggcatttttcagaccgttaggcattacaacataacagtaaagcccatccacagttacaaaagatgtatgcttcctatcttgcttagacatctggatctgatggaaaccagagtaagcatctaggaaggacaggaggtcgcacctaaaggtagaatccacgatttgatctattcatggaagtggatatgggtccttgggacaggccgtattgaggttggtgtagtcgatgcacatccgaagcttccaattagccttgggaacgatgactggattggccagccatactgggtgatggacctcttcgatgaagccagcgcgcagcagcttcc

SEQ ID NO: 54527 - DNA, 623 bp, Zea Mays
cggagatctcgccgagccgttctctgtgactcgtgcgacttgttacgctgttaggtgggccccgcatgccaggatcgcctccttcctcggctggtcgttgcacccacctcgcgagaaaccgggagcggaccttgcgaccgtggcgtcttggggataaaaaaaccttctgggtgcccggtcgtgctatcctagcgtccgcaggcaataccaaaagccaacgccacctcgaattgcgcggagaacctgcgccgccattgtaggagagagtgccgccgtcagtgaggaacctatagtttgccgccgcactagaatctcgagctcaacgcgaccgtactcacgtcgagtgtccaattgggttcgcccggtcttgggaagggtggtcaactactttccgtggacgaatcgtgctccagcacctcggaatttcccaccggacttcgttcggcggcgaccatccgccccatgccgtggccggcccccttcgcgacccaatcaacaggtaatacccttcccaattgattcactgcatcgtctcgtaggtatttccatcgtctgtgcgcgctttagggcatcgggtaggggacgggaccctgtaattccgccgccgctgcggtagaccggcc

SEQ ID NO: 54528 - DNA, 802 bp, Zea Mays
gtggttgtgttggacaatgtgctatggattggtgaatgccaggactactataccttgcttgttgagatcatcaaagaaagaaatacaactttgtctgaggtagcctagctcagggaaacacaggcaacctgatgtagcagctgaacaatgcataagcttagaatgctaatctacatgaggaggttcactagttgtatgcccagtttaatccagtcaacccgccagaaccgaagaagcagatgtcgccgcagccgatgatggatgtgtagtctctgaggcctatagcgtgcatgagtagatgttagctgtcgctagaggataggctaacccttttggatagtgttcctaggagcagttacatgatttatggtgaaaggccgatgtaatgatggcttctgacgcgtgtgtgcgtgtgggaggaaaaacactcttttggttggttgtgcatgtgaggggaacaatttgcttgtatgtgcatttatatatattatgaagtatgtgatgatgttgttgcgcatgttaggatgtgattcttgccttacgattcttcacatgaagttttcttctatgagatattatatggcatgatttccttatttcacatatgttgcaacatgactcaccgcctacttataatgaaaatgtgcagatggtgactaatcgacgcattaacctgggagtcgttggagcttctagaagtggtaactaggagggcgaccaagaagcatcacttcctccacctccgccatacacaccaaagcagttcttcgcacaatttcttggagctcagaggaacatggag

SEQ ID NO: 54529 - DNA, 1539 bp, Zea Mays
agatatgtttatatctgtttacgcaaaaatgtttcattttacgttgtaatctctttgtcttgaatcttgattgtaatctctttatgtcttgattcaggagggaagtttgtaagaggaagatgaatgggtaaagaaacagaggtcaatgaatatgaactacaaagggctgccaacataaaagaaaatttgaagaggatgagatctcttaatctccatgtacctagtactatggttaatgaagaagcaaatggatcacatcgagccaataagaaacataaggttaatgtatttccctatttaataagcatgttttttacatttaatttaatagtaccacaatctatctcaatacatgtggaactagaattttctttcttgtagaaggaactagaattatagaaggaactagaattttctgccataggcatataaattcacatgtgcattctgcagtctctacttcttgtactgttttcaatatttcagtttcagactttcagttcttgtactgtctatgtatcccagtaaagatagttctgttcctcctcctttcttgagtttaagaccataatcaattgtaccagcaatgtatcttacctgacatagctctactcatgtttaatgtgtgcgtcatctgcccctttcaactgtgtgcgtcatctgtgtaccagcaatgtaccagcaatgtatcttacctgacatagctcccagtaaagataattctgttcctcctcctttcttcagactttcagttcttgtactgtctgtgtgcgtcatctgtccataggactatcacagggattacatcctttcatctgacatagctctactatttttgcagcataagcactttgatagacaattagttcctttcttgcagatagcattcccagccaccaacagtgagtcattagttcctttcttgtagagtcattacatcctttcatttgacatccacataaacccctaccatcaacattgaatcattagttcctttcttgtagacaacatcctccacactgcacttatcaaaacccagagtgactaacacagaatctttgtgcttcaatacattccctgattcaatacattcccagctgcttcaatacaatcccagctgcttcaatacattcccaactgcttcaatacaatcccagctgcttcaatacattcccagctgcttcaaccaccacttcaatcctatagctctatgccctttaggcaaatctggccaagaccaggtgttgttgttttctatggcctgcagctctgaattcattgcatctctccaattctggtctgccaaggcactctctacaccttgccagacaacttgtcaatttcagtagacaccttgccatctccactactgtttgatttcttctctcgacaactccattctgttgaggagaataaggcgtagtagtgtaatgcttgatgccacactcaagacattaccgcccctaaaaattcagcttgtcctcaagttgacgttttgtaactttatatgtgcaactcgtaccaccaggatcccatgga

SEQ ID NO: 54530 - DNA, 311 bp, Zea Mays
tcctctctaaaaaagccaatgaaacactaagctttggagacagctccctgggaagtaagcaaagattaggtaggaatgcttgtgcaggtttcccgggtaatcaataaaatactcgtagaacctaatgattcttgacctaaccgtcaggcatgcaagcatatgctggtaaaagaaataattcaaagatttagctagattgatgaatagtttgacaatgatgttgccacagttgcatggatggcatcgagccgtggcggctggtcaaacaatccatttgattcacctaacgtgtcgttcgaagtggttgtttt

SEQ ID NO: 54531 - DNA, 1177 bp, Zea Mays
ctttcccaaagattctactttcatgaatcaactgagcaccatgaggtaaaagagcaagcccagtctctataatgtgtcgatgtttccgttcggccaagctattttgctggtgtgtgttaggacacgagagacgagacgcgatgggcaatacccatggagcggaaggaagtgttgtgtattttttatattctccaccccaatcagattgagtacatttgatctttctatcaaggagaagctctacatgagtcttaaactctatgaagatacgaggagcatcagtacgggcatgcattaagtaaatctagcaaaattggctaatgtcatcaataaaactgatgtaataagaaaaaccaacaacaaagctaggacagggccccaaacatccaagtgaatagtctccaaagcagaagtagaatgatgaacaaaatgtgtataatgtaactgatgacttttagcaaggtgacatgcattacaaactgacgatgaattatctctagaacacgagagtttatttaaatgcaaaatagaccgaactacttggggtgcatgatgtccaagacatgcatgccaatgagagtatgttgtagatcttgctacaagagcatgtttgagcgcaaaaagatttgtggacttgattggatagagcctcaactcacatctcccatccagaaggattttccttgactgttggtccttaatggaaaaaatgccaaggatgttattcaaaaaatacgtcattatctcgtgaaaatttatgcactgaaacaaggtttttagtaatgttgggtacatgaaggatattacgtaagacaagaggacgattgccagtattaagagaggaatgacaaatatgtgtaattcacaaacctgatccattgccaatgtggacttgttcattatcgtggtagcgttcacggacggcaagacgatccagatcactagtgatgtgttcggtggtgctggtgtcagcgtaccagtcggtatcaaccttcgaggatgcggtggcgacgtgtgcggaaggaggttcctcggagtaggagtcatccatgcggtactagtagcgtatggtcgtgtaaccttccttatcgcaaatatggcagatggggcgagaagtagagctaggcaggcgacggtcgttgggacgtgatggagcacccccaccaggccgcccacc

SEQ ID NO: 54532 - DNA, 364 bp, Zea Mays
cttcaatttccgagggttttttcttagcaggctctgaaggcccagcttcggcactagcctggctcattgcagcttcgacttcggtcagttttgttttagcttcgatttgtattttcgaagcctcggcaattttccctgaaggagtagagcttgaagcctttactgtttctagcacatctagtacatttgccattcttcttcttttgggagttgccgcaagacctttttgtatctttgccactgttacttccaccgaagggcttaaaattcctaacattttttcagtttttggctcttcggccttatctttaccagtctttgtctcagcttgctcggctgagggtgccttcggcatggtggctgg

SEQ ID NO: 54533 - DNA, 317 bp, Zea Mays
catatgtatgaatataatgaaagtagcacaagatattcaaatacacagtagcgaactaaacatttaattgtacgacaccgtagacaacacacgttagttttagttatttacacgtcatcggcgatcaacattaacaccattaaaaagatgacaacattttatatatttatgcaatacaaaaatgacatcacaagtacgcgcattttatttatttgaatactgctttttcattagttctcctattgatcgcgcaaaagcatcaccgaccacacaagtccaaccaagacaacgtaagcttgaatacgacataggcatca

SEQ ID NO: 54534 - DNA, 474 bp, Zea Mays
taagttacttaatcctgttacaaaagataaggccatactcctaattcacatatgcctaaattggtgacttagatcaattcgaccacacccaacaacttgacctacaaaacaggttacataactaatcccatctagcatatagctacctactaaaccctctacctatttgttgcatacagatctatcttaacctcttgtcccaaacccggatgaagacatcaagactcgagaagaaggagatcaaactcgttgaggaataataagaatcaagccatacttccaaaggaatcaagatccactatgcattatggagtccttccttactctactatgtcctacccaagcctatccatgctttaaagacatcgttttacacatttggtggttgtacatatatactcatgccttcataatcacctactcatttgtataaaaaatttcttgattttggtaccaactaaaaactaaaagcta

SEQ ID NO: 54535 - DNA, 630 bp, Zea Mays
ttgcatttcatgttggttctttgaattttgcatttaaatttaggttttaaaaccaaaacagatttggattttatttgaaagaagacacaagaaataaaaaataataatataaacagaaaaaggagaagctttatctgcgtgggccaaaactcaccccgcgacccatttcacctgcactctttccccaccaccagtctcatggcccactatcctccctttctcttctttttttggtaaattacatgtgtcgctgttgggtgggccactcttgtcaagagtcatcctcaacctggagtctgccttgacctggcgccgagatccgctcggtattacccacacctcttaacccgaggcacctccccaagggtctccaacctcaggcaaatctccgcctcgcttgaggtcaccaccgctccgtccgtctcgcccgagctaagtccgacagataagacaaaggcacccgaaaactggtggggaacactcgcatttaatgcgcacacctactccacgcagcggcacaagagcacagtggctaacaagctaagacaacaatcatgttcgagcacaacaacatgattacacccccgctactgtacgcgcacgccgcctgccatccccggtgggacatct

SEQ ID NO: 54536 - DNA, 655 bp, Zea Mays
tagtttttcattagatatatccaccatgattaactctttgtgtgttcgtgaataaacatgtatccctttgtgagttacgctatatggttttaatgattaacctatgtgcaagtatgacattttgtttagtttatgttcacatgattactctagtctggtattgtgtgaataccaaatccatgttgtacctctaatgcaccctcttgagctataaggtgcatgagcaaaaggagccctcaattagtgacaactggtgctctcatggcaattcaggaaaaggcaaaggtatggagaatggaactatgcaatttcattgaatatcttgaagttccatcgattgtgatcacagctatgttcttgcctctgaattggtagtatcttggcttaggtgctccttactttaaaatgttgttccttttggtgtacctaaggaaccttcttaattatggtgtgcttagacattgtgatttatatgcatgatcttgtaattttcaattggcatatgtggtgcgatgattatcatgtatggagcatgcctaggctgcttgtaaaatgttatactccttgaagcatgcattgttgtattaagtcaattattcaattggtatctctttatgatgaaattgatagagtatgccttgaccaagatatgttg

SEQ ID NO: 54537 - DNA, 623 bp, Zea Mays
ctggccacggcgaggtcgttttcacggtggcggaaacccggtttggggaaaattcgaaattggagctccctagtgaacgattgagggtgattcttggtggctgggtacttgactaccctacggagctcacggtggtatcaatttatactgatcgatcgcgagcacagcgaattcgagcggcggattgtgatcgatatgaactgggtgagtcactggtggccgcgcaacgcagcttttaccgtggcggcacctccggcggtcatcggacatgcgtagcatgattagccgcgatgtggtaaagcgtttggacacacggcggacgacagtgatggctcaacggcggtgagaatctatccgagtgatcgatgagcaaggggggggggtacggcggctagccggaatagtttactagccgggcttatccatggcggcgtgactccgagcgtcatttgatcaacccgagcacgaatcgagacggcgacggcatgaatcgcagcggagatcgtcggaggcgagctaagctggtgaccttatctatttcagaccactgtaccatggcgaagcccattcagtgcacctgacagtcaaagtttagggccaaatttctctcaaatttctatggc

SEQ ID NO: 54538 - DNA, 423 bp, Zea Mays
cgttcagtttcacggtacttcagctacagaaacaaaaatagaacatggttataataaagaatgcatcgcatttgcaaaaaaaaatgcatgacacatggaagaaggattacagtgggagccggcagaactctagcctgaactgaagtaggacaatagtcaacctccatgccaaattcaatggcacgctcagctctactgtaggcattacgctcaacaaactaagaaaaaggatttaatttgtttaaccacagtatagatcaggtaaaacagaagaaggagaaaaagcagaaacagcgagaacctgacgaattttcttctcacgtgtatctgggctctggcaggttaagttcgctagattagagacctgtttggcatccaacttcttgcggtttttctgtccagctactatcctgcaaacctgaa

SEQ ID NO: 54539 - DNA, 531 bp, Zea Mays
accttgagtcagataggggaggaaaatattagtaaaatacagtagcggtgtttaaacttagcacactgtatctttgaatgaactaggaaaatgagtcatataatttggtcggcctgttaaaaaccttgagtttgcttaaacgagatgccaacaatcacattaatgaaagtttagagattcaatgacacatcatgtcaagtttgagggcctaagtgatacagaatgcaaagttagaaaatccaagtgactctaacgtggcacatcaagctcggttatggacgagtctttttataatttgagagttcagagaactaaatgatatagggggtaaactccatcaactctgctcccaaaaaacgtggagttggggtgaactccattttggtgaagcaacaaaaagtgtactctagaaaactcgttttcagatctaaacgtggagttcagggttaattacccaccaataacactcgttatggtgataaaataacgcttcgtccttttctattttctcgcgtacgcagccatttgctc

SEQ ID NO: 54540 - DNA, 342 bp, Zea Mays
aaaatatttgtacagaaggtaactaagaactgacaatgaaaatcaatttctactgacggttgggctaagaaaagagctggtgaattttttccagaaaacataaaatgtatgttggaaataacgaaaaatattttaattaggggagccctcaccccgcctatctcggtcgaagttcgcggcatgttttgcgcaaaattcacgtgctacgtgaccggtgggaatcgaacccccgactcaccctcgcgtagcccctctatcattccacctatcacttactttgtgtctatattgcatttttgttgcccacgaacgagaacaatccgaatataaattgactatttg

SEQ ID NO: 54541 - DNA, 314 bp, Zea Mays
ctcgtatactagcaggttgcagtccacgctggagtagcagcagtagatctagagcttcacgatgttcttgtgccggatgctgaccagcgtatccacctccatgtggacctcacgatcgtcgagccaccgccaccgatgtcactgtctctgctgctgctactgttggtggtggtggtcaccacggcagccgccatctagtcaattgcctgttgctcgtcccacacagcagccacttcgacgacgacacccacaacttcttcaccgctaccagctcgccgctgctagctcgatcttgtacatggtcccagatctgc

SEQ ID NO: 54542 - DNA, 1055 bp, Zea Mays
ctccgttagtagggtatagtggtcaccctaagttaagtaagcgtgagcatgtcgcaccgtcttaagtctctgccgacttaagccgattgctccgttagtagggtatagtggtcaccctaagttaagtaagtgtgagcatgtcgcaccgtcttaagtctctgccaacttaagccgattgcttcgttagtagggtatagtggtcaccctaagttaagtaagcgtgagcatgtcgcaccgtcttaagtcactaccgacttaagtcgattgctccgttaacagggtatagtggtcaccctaagttaagtaagcatgtagatcgataataaatagttcgagagcttttgagaatgaagtctttttattgatgacgtacttttccaattacagaatacaatgctgccccaatagcttttgaaatctagctaggggtaaaacttcctgaggtgatctatattccatgaattccctatttccgtgccatccatttgagtaagtcgatacgatcctggccgagtgacttctgctatcatgaatggcccttcccatagtggcaacagtttgtgtcgtccttcccccgttagaattcgacggaggaccagatctcccactacgaaggatcgatgtcgtatggccttatcatgatagcgcctcagagtttgttggtacctggttgactggattacagtattcaatcgttcttcttccagcatatcaatatcctccagtctagtagcttcagctttagctatgttttcaaagatcagccttggtgccccaaacctgagatcagcaggtagtactgcctccgagccatagagtatttccatgcaaggctcgactaggttgagttcttaagctccagaccacatacggcaattctctgatccacttccctatgaacttttcattcttgtcgaagactttattcctgagcgcttccaatatcattccattagccctttctacctgaccgttggctcttgggtgtgctactgatgcatatttgatctggatgcttctttgttcgtagaaatcaaagaattcttagctagtga

SEQ ID NO: 54543 - DNA, 464 bp, Zea Mays
aagacccccaacaggtgggttcctccatttccttcctcgagagggtctcaaatgcagttgttgcatgggtctcatgtattgtgtcctccaaatgggcacttgtcttggagaggaggtattgttcctttttaccattcaacaaccaccgatgcatggacttgtttagtggccatttgtgtcttgtctagatcaatgtctagggtcaatggttgcccccaaagaagattcaatagctggtaatgtagaaacactttacattagcatcctctaggctaggtcagtgaaaatgtcaccacttcgtgggcctcaacaaagttcgcatggtgagccctactagcaccatagtggagagctttaggggacgatcaatggtgaagatcacttagtctattgggtcgacatctcccccatgctaggagcaaatgatgatggggatccaccaactatggacatctcgtctaaag

SEQ ID NO: 54544 - DNA, 388 bp, Zea Mays
aaatctttttaagcgaaacacataaatgatacattataatagacacttatacagtgataagggggcctaatttttctaagggagaaagtaaaaaaacgggaagaaaaaatgggtcgtatagttgaatgcatgtttcaagcaatgtaaagccctcactaatttgccaatgcagcagcagtgtcactcctccgagcgttcagagccttcgtcgctgtcgttgcaagggacggtgtagtggatcacgacacaggctccggacgacagcctgcacgaaggattcaaagcacaaccctcaataccagccctcgatgccactgcgtcaagacgacgacggggcaaaaaacaagaaagcatcgatcgagtgcattaccgagcactgacaaagagt

SEQ ID NO: 54545 - DNA, 642 bp, Zea Mays
gcccgatctccatctacgtgcctcaatcgagctcacagtccgatgagttgaggactctcatagtcatacgcttgttgtccaagcgttagttgacggtgtcacgctcgagcgctgaataccgaacgatgacagaaatgtgacgacttagcgcatctggctttgggtaagtactcaatgagcttcatcgcggaatcaccaaagccactggcgtactgcgataacgtctcagtcgtctacatgtcgtccaactccgtttatcacaaaccacaagcgcacaacacatgttgagctagatattcattttgtctaggaacgtgtttacataggcgagctggcgacagttcacgtcgttaccatgcgctcactagtcaccccgaaggctatcggtctgattggttgcctgctactcgacaacctggttctatacatgcgttgactatgcggtagtctttgattggatgcttacatgagaactgcgtaattggttggccgcccgcgccctggtcctttgcatgcgttgaccacttttatgcgtatgtttgattaactgcacagcaacatttggacctgtacgcacaactgcaaatatagccttttttatcttcgttggcctgtacgcgtggagaagtaaaattcgtccgt

SEQ ID NO: 54546 - DNA, 486 bp, Zea Mays
gtgggtttaggatatatcttttcctatagatgtagtgacacgatcgatatgcgtttagtactaggaaaaaattagggataacgtgttctattgttttagcatcaaatatggtgggtgatgaccgtcgatagatgtatgaaggttggcgtatgaatgatccctcggcgaagtggataagaaagacaaagaattttattgatcgtgctttttctttgttaagaaccggcacggatgtgcggtgtccatgtcatatgtgtcggatttgtagatgtcaagacaagagaactctatcagcacacctttgcaaaaaatggctacatgtctaactatgaagtctgggtgtatcacggtgaggagttttagctgaaaatgtgatgaaagcccacatcaatgacgaaatggaatatgatagaatggacgagatgtttgaagattttagagaggatcatgatttagtgtttccaccaaatcctgaggtgccaccac

SEQ ID NO: 54547 - DNA, 624 bp, Zea Mays
gcaaaatggtgaattgcaaatgaaaagtaattatgatagtcctgaactccttactattgccacatttttacaaatcagaccaaaacctgcgtaaggaaatctattctagataccaaaatagttgcgcagattatcaaaattagaccaaaacctttcctgatgactttcatatatactcgttagcggactgaccttggacaagtatgccggcgacgacgggtggaatgggggacggggtccaaagccccagtcagcctcgtgccatcacctcctccgctaccgtggcaggtgggtatggcttcttctctagtgtggccactgtcgatgcgaagagttcggcgctggcgggactctgatgggagactgccacacccctgatatagtcgctgcaaacaatgttacatggtgactgcattctaggaaaggacgacacccgatgcaaacggtgttattaatcttactccatgcattcgagataaaatttgtcataaatatcttgcactatgtagatgctagtatataaaaaccctttgctgaaaaaactttagctagtatattctacatgtaaatacaaacctttgctttaagttatcaaaaaagaacctgtaaaagcataagaaaaat

SEQ ID NO: 54548 - DNA, 1413 bp, Zea Mays
gttgggagctgtagaaacatttctagatgctattccgtcagctggatttttccaaggtactcgagcaagttttatcttggtttttatatgaatatttttgcgtggatggtcaatttgtatatgctgaaagacaataccatagaatgaacagttcaatcattctatgtccattgttgtcaacgatacacgtaatgctaacatgctagtcatatagtttgtttgtacatgcactttatgtgcatgttcccataaaaatagctactaccaaatttaaactaaaaaagcctatttacccttggtgctaagagcaataactaaattgagatttgatcacaaatttgttataatagtttggtggaactatggaatttggatgtttctttgacattatttgtcaaatggttgcaattgtggtggaaagggtcgagggaaacctgatgtcatttttcattgttctttttatccaagccagatggatacactattataacgaccaccgttttgttgtatccactagctcaaaaccaatcttaggaagtgcctgggcaacaaataccggaaatttgtggagtttaaaaattacatattcatatttcacatgggttgggataattgaaggtgcaagtataaattataaataatttattgtttatgaaataaatatctagaacattatttgttgcatttgtaaaaaatacaaaaaaagtttaaatcaaacagttagtagcacaagggaacttgtttcttccaagtgctgaatttgtggaaatctaacttttgcagtgaccatgttcttcatcctaagatttgtctatctaacattttttatctgaattaactcgtgtaaatttatttaaaagcagagactataacggtggtcaacaacacattagtaaatggtacaacaaaaagtggcgcaacaactatatcaacaccaagtctgcatgacctccagatctacggtgtgatcgtgaccatattactctgttttattgtattcggaggcgtcaagatcatcaacaaggttgcacctgctttcttggtcccagtcctcttctcaatactatgcatttacattggcgtctccattgcgccagagcctggtgcttcaagtaagcagtccttcgactattagtattttgtctcgttttttttgcattcaacctttattgatgtgctttctacctagagggaatcactgggttgagcatcgtcacacttgcggagaactggggttcagagtaccaacctacaaacgatgctggtgttcctgatccaaatggatcgatatactgggatttcaagtaggactttctctgctcttgaaacttaccttttgaaaccttccaattagtggcatgatagtgtgaattattcatatttatttatctataatccatgaacacctactca

SEQ ID NO: 54549 - DNA, 619 bp, Zea Mays
ctgattcagctctttgagccttggaatccccgaatcttctctaggacaccgaagaaggcaaacagccgaagcttgagtggtcaaggatcaacctgattgatcgggcttattcggctgcagttaagagcatgcggtctgtttggttggctccacaacgggagctagctgtctgggccaagcgctagtccgatttcgaacagataggctcaggatcaatgatcataagcctatccaagcactgcctgcgaaaccatcatacgtgacctatagtgttgacgatcacgtcgtttactactacaagaacatcagttaagctcagaaataatctaaatacaactggggctctaaacttacctttgcttcgccgggagctattctagcaacagttcttttacaacggaaagtatcaacggcgtgcatcgaatcttacagaatgagatgaaaaaaaacagttggggcaaaattcaaaaaaaacgtcgacagcagggttcgaacctgcgcgggcgtagcccaacagatttcaagtctgtctccttaaccactcggacatatcgacgattggtgaaaaatgattgaatatacatcgtgttatgttttattcgaacactttcaattagtt

SEQ ID NO: 54550 - DNA, 644 bp, Zea Mays
gcaggactttgaggtcgaattggagtaggatctagtgatcgattggggatggtgactatagtcaatttgtagctagattgtagattaacaattttgttacaaaaggattagctagttgctatatagaaattagaaatcaaagctctgcagagtactcggacagaggctctgaatggggtttcccatggtacagtgcactgaaaagatcttcacttgcattctcctcgccgccgatgacccgtgcgccgtgattcgtgccctctgtggcgtagactatggtcgaccatggaaacatcttcactgtggatgagctcagaaccctgtagccgctctgtcatctatccactcacgccggcgacgtggccgagcggccatcgttgtgttgtacgtcgttcgccgtgatcatgccacaccgtgaccatctcaccacctcactgctagccgtaacaactcaccaatgactgtcgtagctcctcaaccagtgatcgccacgatagatcgccgcggtgactcctccctgtctccggtcgccagcgcacctttgtgaaattggacgccaccgtcctcgggtcctataaattgagcgttccatctgctccgctaggtagtcaagcatccagtgcacccactcatgtctcggattg

SEQ ID NO: 54551 - DNA, 819 bp, Zea Mays
aagacatgagtgtcagagttaatatattagtggtcgcgccacattggttgaagtgtctcgagtgcacgccacaatatggttgtatgcgagacagggttatgcgcatgataagttaagtaaaaatccatcggtgtcactggtgttaagttgaggattatttgcgcgtggaaagtaataatgtgtttaatacttagaactcttagtcgatagtagaaattgttttgacttatatagagaggtggtgacatgccaaagtagtcgtcgccttctctatatttataagtcgagtcgtgacgatgtgtagtatgcgttcgttaaattatgcttcgcatatggtgtatgattgtgctcacaatttcgagtagacgcttcaagtaagtcaagtagatttgtgatacaagtgtgtaatggagttagatgttttaggataattattgaagtactcggcttgtatgataaatatgtatgtgttcgtgatttgggaagtaaatgcatggtgattgcgatttggagattagtggtttacgattcgtatagattggtcgatgtgcgaaattacttgtgaatatgtgtgtttataaagatgttgtaatgtatgtagtgacaggcaaaccgacgtgtatgttatttagtgggctatgtcgttgctctagttagccgaattgttagatggttcggttaagctcgtaatcatgatgaattgcttgttgtggtctaaatgcgtatggttatgttcgcgggtaaaattagtggtgctcatgtgatgtctaatttaaaatgcaaattattgtgtgaagagcgcatcgataaacacattta

SEQ ID NO: 54552 - DNA, 523 bp, Zea Mays
cgacggagaagccgatcgagctagcttagcatgcatccaccgttcttgaattcggttgactcgtttatatggccatcgatcagtcagacctgagatttggacgcccatccgagacttacctgctgcatgcagcggaccattgctacacgttcacaaggcagtagtggctctccgtaatagcaaaaatctccatgcaggcagggtactcgtagttatatgtcaatttttaatctgaagaaaacaacggatgccaacttgtattacaggactccggtagtgttgcgaatctctatccaactgacgaccagaagaaccaggcaaccagccttccctggttttaacctgtgcaaggccagcaagctatttaccagtaaccacacccgccacctctgctccggcccttttctcggatcgttgatagtgattctttgatgttaagggttttatggccttacctggttttaacctgcgcaatgccgccaaactgtttaccagtgaccacccccgccacctctgctccggc

SEQ ID NO: 54553 - DNA, 371 bp, Zea Mays
gaaaaagcacgagtaggcatggcaattctgtccgcaggcacgggtatccgcgggtttcgtacccgatgggcatcgatacgggtaagaaatctcgaccacgggtaaggatacggacaacatttctcacccgcgggtaattgacggatataaaatttcgcccgcgggtattacccgttacccacttaatttactagcccatcaaaatatccccatgccaccggcccataggccacaacctagtcgcccactcgcactcgattcctaaatccctcagtatggtatattctggcgcccagttggaactatgttccttgccattatattatgtctgtcaagttgttgatgttcttggtgaaacgaacatgaccaca

SEQ ID NO: 54554 - DNA, 288 bp, Zea Mays
aggagaaagatggtttttcaggcctgatatggtaaaagaaacagaagagaaggttcaacgaataatacataatttgaaagaagcacaagctcgtcaaaagagttatgcagacaaacgacgccaacccttgtactttcaagttgaagattatgtctacctgaaagtctcaccaatgaagggtgtatctcgtttcggggtaaaagggaagcttgcaccccggtacattggtccttttcctatccttgaaagatatggactagtggcataccgactccaattacccgaaac

SEQ ID NO: 54555 - DNA, 547 bp, Zea Mays
ggctcttggatgaagcaatggttctacgtaaagaatgatctaaatcagatggaggatgtgaggggcatcattcaacgtcccatatggtcacgtttcagcattagaagaccataaatcacaattgggaatgaagtacaagcgtgcctgatggctttcaacaccgtatgtacttacatcggtaccagggatttagttcaagaacatattgcgttcagagtatggccttttgcgaatgaatgggaaatgctgaatgaggctgctgttggctctagtcaaggtggcttggtttatcttaagtacaccgattggctagatgctatagaggcaaccagtgatgagctacttggagcctactcgagggcagaggacgaggccatgactattgccttcggcgctcgagggaaaaggagactaaataggttttttgatgtaattgggtttgtttatcctgattactgttttcctgcccgaaggcaaggaggaaaaaggaaagttgctactttgacctctactggtgcgccgaagccgaagagggccaaggtcctaa

SEQ ID NO: 54556 - DNA, 321 bp, Zea Mays
cgacacgtctgtgtcccgtgcgctatcctgatctacgcagcctcgattgcgatggcgtcaaaacacggtgaggcacttcattatccttgcgtgctttgtgttcgatgaaatgccaaaccaataaatcgatgtcgttgtttgtagctagctattgattcatgcctcgcgcaccatgtgttcgacgaaatgtccaagccaagtggacatgcatgtgcgactcgagttgatttcgccaggttgtgtagttgtgatttattctccctgtgtttggtcgatgtcatgcatatacatgtatgtatgtgtgtcaatcaaattacgtag

SEQ ID NO: 54557 - DNA, 647 bp, Zea Mays
cagactgaaccgggggaaccgagacaccagaatgttgtagcataagagccatgaatgccctgctctcagcccgatcctggagaagctgctgctgaagagaatcttgtctgtcctgtatggtctgaaacatagagagcatcctctcggataactgctgatgagctgctgcttggcgggtctgctcggctgtcaagtgagcctgctgttgagtgagtgtctgaagaatcgaagcaagtgcggggtcaatagcatgaggggcagcaggggtagcactagaactctcagcctcatgatcatgtgagcgtggaggcatatgaggtggaggcggaggtggaatcccaaaatcatcatcatcatcatcatcatcaacaactgctgcatcctgagctttgaactgatgaatagtagcatcctcggcctgagtgtcgaaaacaggagcagaagctggcacaggatcctcaggcgctggacggtaggatccaaaaacaaggcgtgaggcctcaagtgtgccctggaactgtggaggccgaatcagttgagcaaaaatgtggcacaagtagtgaacatatggcagctgacgtcgagcacgcataccatccaatacagtgtcctcaatctcacaaataaggaagtcaacaacgtcaaac

SEQ ID NO: 54558 - DNA, 563 bp, Zea Mays
ggcgagacgtggaggaggagcgatggtgagccaaaggatcggcgctactatgccggtctcctgctgtagattagggatggggtggatgaggaggccagaaagggtgcgcgcgggggtgggagcatcgtgagccatgcgtgtcacggcaagacggacggggggaggagggctgggtgcctatgcacgggcgtgggagggaggcagaggcaggggcacggcgagggcgtagggtgaggacgctgacgatagagtcttaatagagtagtatagatagccagaaaaaggcatgcgagagattccccatctcccttgtttagtagaactaagcactttttatcgaaaactgaaccaaaatatcgattttttggtattttggttcggttttagttttataagcatgaagttcggttctcagtatcgagtttggttatcatcttatacaacaccgaaataccatattaccgatctccaactagcaccctcctatcctttgtgctccagcggtcaagcctgtcagcccatgtagctggccctgcccactaaggccttgttcggttattccc

SEQ ID NO: 54559 - DNA, 347 bp, Zea Mays
aattcctcaaaccttaaccctgcctacttcatggtcattctatagttcataaattgtaatctagagtacatatgacatcttgaagacttcataaattccttactcaggtttgtgatcctttgttaccaattcatggtacaatatatgtttgttctttcatatagttcatcagtacataatgagaagtacaagttctcttcctattattcaccaatataagcctgttaacattcatcatcagtatgtgagatatatcatgcttccattatgttatttatgttcctcccctcaatataagtcatgctttcattatcattacatgtccctgcctacattttttgttcttg

SEQ ID NO: 54560 - DNA, 913 bp, Zea Mays
aagggacacgcgagccagtcatctatggtgggtaagtccgggaccgggcgcgagatccactcgagtggttcccttccaacacgtccatcctcccttgtcaggcttcaccatgcccggccctaggctcgatgtcatgaggttcgatcgggggcgggtccttctagggttggcgcaccttcctcttctgactgactaacgggccctggcgatcaggagctctttcctcagtgtgctcactgaccagtgggtcctagggactggtggttgttcccccggcagtagcccccgagcccccaaagggggagtatttatcttttggggtggatgacaggtcagatggtgtcttgtctgttcgtttcccgagcaattgtggcgttcccttggaaattggtgccacttctgtggagaccgtccccctcttgggctggagtcgggtgctcttctaccctctttataaacctcgggtggtcgctccctgccagtcgttcttgaagtgtctttctaactcgtctccaaccggctcagcggttgatccttgagcttatcaagatatcgcattccatcggtaacaagccgaggtaggcttctttcctcgggcttgcttacctcctctttttgtctgatttttctctatcctttcctcccacttgaaggtgcttctcagccaagctccatgtctcttccttctcccactcgggtgatcgcaaggaactgcaatgcctttcacgcggcgcaggaggccaccaaggtcaaagccgagctgctacgggtgcatctcaccgaggccgacggtcgcgtcactagtaaattgtttgactctcattttttctatggttttcctcctttacccccttttcttatactgttcgtttcttgtggcagccttggaagcggaactcgggatgctgcggca

SEQ ID NO: 54561 - DNA, 421 bp, Zea Mays
ttcggacaggaatcagcaaagaaaggataagatttgattgcttcatgcacattgaaggggggaaattatatggaatacaaatgccaagccaaacactatagctaacattcatgctcctaaatggattaaagccatcagttgcaaatgctagacgaatattccggctatctgctgcaaactctggatgttttgtatcaaagtcttgacataaaggtgaatctgtaggatgccttagcaaaccatcgtttatccagtcttcatcatgtcatcttgctagacctgctactttaggggtcatgaatggcctttggagcatttttgctattggaatgtagcggagaacctttctaggaaccttgtatatatgtttcccatctagactcctccttattgatttccaacgtgaaaccttacaatttag

SEQ ID NO: 54562 - DNA, 620 bp, Zea Mays
ccgctgtgcatatacagcagtgacgatgtgcatatatatcagtaccgatatgcatatatataatactacgggtatgtaaaataatatctacaaactcgggaagaaatacctgaaacggcgacgttgccgaagtatttgaaggtcgagcgataccacggagctaaaagaactgcagaggctcttcaatcggggctccagaatccaagagagatgcaatgagagttttttttaagataacgcgcccgattggagaaatatgcaaacggattcaaatcacgcatagcttataactaagggaacaacttcaaatcgacaaaaatacctcaagcggcgacggaaacctcgatgtgtttcaagttggagcgataacctggaacttcacgggaagcaatggctcttcaatcagggctccaaaaccacagattgatgcagcggagatggatggaagaggcggaagtcgcctggccactcgcctcggtcgccgggattcagggtctccttcctgttcggcggatgcagatgctagaaaacactatggactcgcgcgggtttatctcgagtgattgcgcgaatacagttttggaaaccgggaaacggggggaagacgtgcgtggctaacg

SEQ ID NO: 54563 - DNA, 327 bp, Zea Mays
acaccaaggaccctcgggggtactttagatccctagcataatgctgcacttcggcaacctgcttttctgataactgttttcccgaagcatgtcgaacaataaattccagctctctagcagatgctttaggaccaggagatttggatttctcagaagcactctctttctccagcgttatcggggcgctttccaaaggtcgagcttcggcaagaactcctgaaggtccagtttcagtaatagtttgagccatgttagcgtcgtcatttttcctgaaactttagcctctgtgctaaatgcttcggaaagaagcaggagttgatgttttca

SEQ ID NO: 54564 - DNA, 286 bp, Zea Mays
gcagatgcaacaaaacctgatggatcctcagttaccttctgcgactgggttatccctgaactcatcagaagacctttcctaccaaattcaacatagaccaaggatgtaggttcactcgatatgtttaccaaaccactaaaacataaacatcatgtgctacatggggaaagacaagctatcttagcccatcaaaatcaacaatttgaagcaaccattacaaggaatgtggctacttcgcttgaggatactatcgataacgcttcggaaagggacgattggacacagc

SEQ ID NO: 54565 - DNA, 750 bp, Zea Mays
cgatttggagattagtggtttacgattcgtatgagttggtcggtgtgcgaaaatacttgtgaatatgtgtgtttataaaaatgttgtagtgtatgttgcgtctcggattgcaataataataggcaagccgacgtgtatgttgtatagcgggttatgtcgttgctctagttagccgaattgttagatgacttggttaagctcgtaatcacggtgaattgcttgttgtggtctaaatatgtatggttatggtcgtggatgaaaagtagtagtgttcatgtgatgtctaagttaaaatgcaaattagtatgtgaagggcgcatcgataaacatatatgtaccgggaagattattgtggtagatgtgtggttaattgtgaatagaaattctaggcacaaaataactggtataaaattagtaagtctacttgttggtcctaatttgattaatttaactctaacaaatggtaaagtgttagaataattcaagtttctagaacgcggcaattctggaagtaattaggagctgaattttattagttgctgttttgggctgcacgcactgttttcgtggtactatttgtttaatgaactaaattgcgttttctgtagaaaagccatatagaaaagttgtagataactttattatcttacttgtgttaaaatttgacagccataagtctgatcgtttagaagttgtgcttttcacaaattcagtaactgaatctgtccaatttctgtacagatttcagag

SEQ ID NO: 54566 - DNA, 537 bp, Zea Mays
gggactgcgcgtccagcgggtacagtcgccacgcagttattgcctccctcgtccgattcttcatcatgacgctagctatatagtacaacaacagcgccttatgtcacctcgtccactgtggcagtacagcgcctcatgtcacctcgttcactgtggcagtacactctctacaagacaacgcgtcacggacactgctgtaaaaagaaagaaactacgtcagaatcagaatcacaaagataatcatgaagggagaaaaagcttgcaaaaagggatcagatcacaaagacaatcacgaagctagactgaactaagatttgggatagcaagtcacttcgaatcggccagtagatgctgttgtggtaattgaatttaagtttactatgatcttttattttttttgtggcaagcagagacgacggagctatcaacacaagctgctgaatttagctatcttaattactgctataaaccaacatcaccgatcccaattccttgcactagcagaagacaataaattggcatagctccagatctttt

SEQ ID NO: 54567 - DNA, 383 bp, Zea Mays
cgttgagcccgttctagatctcgtgtccttttcgtgagatcgtgaaccacctctctcgctcgatcaggatgtgagcctcaataaaattggcaaccacgtcctacgtcctctcctttatatatatttgtctttctctcggcgagcataatatccaaaatccgcaaaccattcctcacataccacatcacaatcgttgccgcaccatccacaacgcatttgtgtcgcccttcagacccatttgtcatatgcccacatcttctttaatctctactttcgtccaacatccaaacttcccttgactcacagcctcacgcacaaccctcaacttctcttcccgtatcactacctcctgcaactcccagtcctgtcctagccgatcaaaa

SEQ ID NO: 54568 - DNA, 614 bp, Zea Mays
tccctatttctgcttcaaatgcacaccggggcatacgtattgtcataaacatttcattaactcattcagaagccaaaaataatgtaatagggtaccaatagttcaaattaaactagaagaccaagaagaactatagcatatggtacgaagaagggaaattgttctcttggcgttcttgctcaaccagtttctaaaacatataataatgtttttgcaccagttcataatagaagtaaatagataaccaaccttgcttcatcgagcacttcattaatttgtattgttcggcgaatcaaaatctatatatcgaaacactctccctgctactagtgaccaagctcagctagatagaagaggagacagataacaaaagctgccataaatgctgaatggtgcaagcaacagaacatggttaagaaatatggagagaataggattagcagctaacgaatatggctactgacagtggttggtgccctgacagttgaattaggtacggattaaacataggaggtagaaggagaaggtgggaagcaactacattcaacctcagtgagtggtacatgctacaatgattcaggttaatgaagtggagatggagataacagagaagc

SEQ ID NO: 54569 - DNA, 309 bp, Zea Mays
accagctgcactaaaggcagattctgaggacaccgtactcacacgaatagccaagaaatccctagccattaaacacaatattggataagcatctgaatttttcttccaccatcctaaaacattgaagcattcatctggcttgataaggatcctagggtcctccaagcatgtatccatttctgttcgctctggacgggcattcgcattttgagatgcaaattgagcaaatgcatgttctacccttcttttaccgcaaagaggtgaagaggtagaaggctcacttctcatctaatcatcgggagtaataaa

SEQ ID NO: 54570 - DNA, 488 bp, Zea Mays
caaggcatcaaggaccgggaatcgaactcaccggcggaactcagtcgcgtccggggtacagcgccgccgtggtcagctctgtagaggaagatgagcggtaaccgtgggatgctagatgaacgcccaggattaggtcatcaaataacgtttgcttgaattctatcgtcaccgtttgttggcgatcggaccactcctaggcagttttgggtaagaaggatttatggccgtcagatcatggttgcgcagttgcaggatggcgcttcagtcatggctcatcgtggccgtccatcgatgaatggaggggcgaggggtgaccctggtgttttaaatccagagcattgatatcaaatcctagggctctggatgcatacctcttcattttctaatctgggctcttgatctttgatcaagcggccaaggcgcatccgggatacacagccttggtgtttttacaaaagggccctcggggaaaaggcaaatcaacctgt

SEQ ID NO: 54571 - DNA, 291 bp, Zea Mays
aacattgttgagtagacttgaaaaaacagactagactgcgggcacaacattgaggccctgttcgtttatattgaattgagacccagaactattccagctaattaatattaatacagataaatatgtcaatccagctgaaacgattccaaaggaaccatttcagagtaagcgaacagggcctcacggacttccaacattcggggtcgggggcaagggaaccatcaaccctgtttagataaacaatgccattggcactggagtcagttcattcatcttcgtgtgttcccattc

SEQ ID NO: 54572 - DNA, 680 bp, Zea Mays
tggagcgcgagctccccctatagtacaccaaacatggggtggagggaggtgtgggggagcccttggaggtgggcttagatgatgacatgatgtgattgtttgatgcctaaaaatgatagcctcttaatcaaacttataaatagttagatgggttgtgtttgatgggcgacctgaggcatgtcctatttaatagtgtcgtggtttggatctgcataatttaaattggacacgtgctagctcggcacgagggtcgtgtcgtgcctagacaggctttttggcgcatcgtgttggcctagcttggcatgatttagatcgtctctcccctcatagtgccttagatttgcctaaggagaggacgtcgtgtgttcaggtgagtcttcccaggcagcagcaatatacacctgttagccaatagtccataatgagaaaggtcaaggccttaagaagctgtctgagggtctactcgacacgtagggggtgctcaaagagacatcatcagctcaagagatcaagaccaccacctagcaacatggtctagcaacatggttcatgacgaaattctctaaacataccacaatgatccttcctacacatggtacaatgccaagaggcagacttacatgcttgcatccttcctagatatgttaatgggtacctgaaatctgaatactcaacggatt

SEQ ID NO: 54573 - DNA, 454 bp, Zea Mays
caaaccccaaacctagtttctttcaaaggtttcaagtttctcatgcatagcatctacctagtttgagtccaaaagtgcatgcccaacatcccgaggctcaaaagaagcaacaagtagaatgagcaaaatggaaaatttggtgtgacataaatcttgtagtccactcatgaagatcaccaatcatctgttgaggtggatggcatcgtcgaatgtgctaaggcacttagctctctaaagtagccttcggtcgatattagcttgctcttatcctggtcctactagcagttcaaatgacaccaatgtagtgcaagtaatggaaaatggtatgtcagccaaagtagtggaagcatgctcaactgggcaatcgatggggatgacttgggaccacacgaatcaacatcttatagctccccctccaagaaaattctctcaccaagctcttttgtcacatgca

SEQ ID NO: 54574 - DNA, 699 bp, Zea Mays
ctcggcatggggagaggtattggtagtaatcatctatgggacatattcagttttactgccagaagccttggtagaagaaggaggcggcgttttcacatattctacaatagcttccaagacactagtcatcctccttgtccttggaattcctatggtagctggcagcttcgacagtaatgtcaccttcatcttcagctgctcttgtactttttctgctaccttttctggctctggctgtctggccaggtctgcaatagttccaataggctcaacaagaacagtctctatggccagggggttgtttgcaccctttcacttaacttcggcacatcggtcgtctcaatgcgcctaggtctacgtgtcaaaatgttgtttttctttgacctcgacacaccaatagatgccgaggtagcggctttccttttcctcttttgcttccaggcgggatagcagtagtctgggtaaacaaacccaataacatcaaacactctattcaacctatttttgccgcgagcgccgaaggctgttgtcatagcttcgtcttctgccttcgaatatgctccgagtatctcataacttgttgcttctatgccatcgaaccaatcatcatttggctcgtcaaactgattcctgaaccgaaaagtgtacttcagataaaccaggccaccctggctggaaccagcggcggtctccttcggc

SEQ ID NO: 54575 - DNA, 973 bp, Zea Mays
cgaacccgtatttttccggaaatccgaaaacgggcggatcaaatgtggaaaatggggcgggtcgggacgggattttttccgtccgttttcatccctaagcccactggcgcggccggaagcgtgggtccagcggactgctcttggggtcggcggtggaggagcgccagccgctgcacacggcgcggaggtccatgtagtagtcgatgtcgtcggtggacaggatacgatcggcgatgcggttgacgaggtccgccgggagcgacgaccagtccgccattttgcagctcggttggaggattgaagcacaactgcacagggttcatgcatgtgcgacgaattggatgggttcaagatataacccatcgtttgcagcgcattcgaggagctggaactccaaacgtccacccggtacaacggcggtggcggtcaatactccaattcttgggaagatgcggcatgcatgagcacgccgttccaatcatcggtattattacgaggggcgatcattgaacttccaagccccgatgacccacacgtcagttctcctggcttgcaattgggttccatgcccactctgcttgttttttaaagggctcgcacatttgttggctgggcagtggctggacactcaccgtccccacatcaatagacgataagaagaccgttttcaacagttgataagaagacggtcttcaacagttgatgccatccttcctcccaagtcccacctatgttttaggagtttccctcgactatatattttaattacctcgttcttttacgatattaatcatgtttaagctctataggagtaacttggtaataatatgtgttatggtattataaatactctctttgtcagtctgttcgcttagctatatatgcagctgcaacggtccaaacagctggctctacttgataataatatttgtcattctcattttttgagtagtcaatcatttttaacgttgac

SEQ ID NO: 54576 - DNA, 435 bp, Zea Mays
ccagacctgatctagtgggattcggaccttaccacatacactcctgctccccgtctaggcggagacccgatgctgccacatggcctactgcgtgcggcgtaagccaacgggcggagcctgacataaagcctcggggctacgcgcgtcttagcatttattacggataagacgtgcgtctgtccattccagtgacaggcggcgcgcccagtccacgttgcgtggactgcacagttactcacacgttaccatagcgagggcaatgattcaccattactcccgcgttaccacgaaaagagttactacctatcaatgttgcatggactgcagccatcatgactcccgctgattactcatgcgttactctgtcagcattagttattcacataatgtatttcttccattatgctcttgggcccgcatgtcggggctcagcat

SEQ ID NO: 54577 - DNA, 479 bp, Zea Mays
ggcgttctggtgcttgtggtgcccacggctggcgcggttggtggaccgcggggaaggaattgctcgccgtcgtacacactctgccgcggacccgccattctccgtggccagcgtcttctgccactcccagtctctggtaaggccttcgatcggattctatatcttcctagcgtcgtgtagagtcgttcagattagggtcttaggtcttcgcgcgctagataattgcccacggcaatggcgccgccgttgggtcctgttcgccgtcggtgagagagacagagttgagaagacgcgcgctgaccgttgatccggtattggacgacggagattagttggtggcgtagcgcttcagccaaataaatctggccggagatcagctagtgtgcggccgagaacagatcgggcttggggaccgttggatctagatcgcgcggcgcttagtctgattaggttattttaaatctggtgtgttccttgat

SEQ ID NO: 54578 - DNA, 1822 bp, Zea Mays
cttgagggaatgcgtgggcttgttaaacttcatcacttacagctagttgattgtttgaatgattgtggggaggaactaaggcaagtgatgtgtttggggaacattgatcatctgcgatatgtaaattatgggtcgcgtagaattggtgagtttccaattggtagactcacttcacttcaggagctgcacaactatcgggtacagggaggtgaaggtaacaaaataagtgatatcaagaacctgggtgctcttcgcgaactagatgttttcagcattgagaatgttgaaagtcttgaagaagctgataatgccaagttaaaagaaaaaccatatctcaactctctatctctcatgtggtcagcacgtgctgatgcgaaaaatgggaaagatgatttgattcttgatcatcttgagccacatgcccacattcgaaacctgaatatttctggttattgtggtgcaaggcctcctatttggattgaaaatctccatgtgaagaacctggtgtcacttgagttagcaagatgcatgtattgggaacagctgccttcactcggagaattagaatgtcttaagaaacttttgttggagtgccttcctagcctacaacagattggtcaaccatctcaactttccaacattagctgtattggttcataccttcctccacatcttgacacattgattataagacattgcaaagaactgaagcagatccctatcctaccaccctgcttggttcatttggaaatatgtagggttgggttgaccgaattcccaagtataggcaatatacatggtgagagtatcgaaagcaggccatctaaaatgcagtttgtcagtgttgaagaatgtgaaagtctgaccttacctaaaggaagccctctgttgcaaatacactacatcagaacaatccatgtcctacacattagtgactgtaaagaactggaatctgctcccctgttcgatgaaatgagaaaccttagagagctcagcatcataaattgccctaagctgagggcatcaagcgaaactgaaggcaagaacctgtcaccatcactaaagaatcttataatcaagcagtgtggtgatctagtgcattttcttattaagtcactacatggtctcgttaacctttcagagctggtactagaaaattgccccggccttctatcccttccgtcagctgatgtgttcaagagtctcaagtcgctgaagttcttggaggtaattgggtgtgagaatctttcgtcatttggtggactcagttccctttgttcccttgttacactgaagattagctcctgcagtaagcttgcagctccacctgtactgggtggtgctgcgtctggtcctgctaattatgatgatgatgttatagaagaagagaatatggtgttgcctgttaattccttgcagatcgactatcttgaagttgatctcccatgtgtattgaacattgaacctctcagtagactttgccacaccaaaggattggtaattggaggcgggacacagatggtgagcttgccagagcaatggcttctacagaaccacaaagaactgcagtcactaaaggtgttatgtgccagttcattggagtctctgccaccaagtatgcgagccctgagagcgctcaacttcttcttgttgtcaggagctgggaaacttacatcacttccagacatgccctcctccctacaatggctccatgtcataggctgctgtccagagctggtgacccagattagagtgaaggacaaccctgaatggagaaagatctccacagttcccaaggtgcacatagctgctgccaagactg

SEQ ID NO: 54579 - DNA, 621 bp, Zea Mays
aatcagtattgagctaggttcctaggttccgaaccgtctgggtggagacatcgaaccgtccgcgtatgtgtcgaaccatccgaacgaggtcacctgactatccgacactaatagaaacattgccttgttggattcggttaataatatagccaatgtagttgattggaggatgtctttggttgcataccctatgtggtccatatattagggcatataggaatatttgcacgatttcttttaagtgggttctcattaatgataaactttactgttgaactcctaacgatgtttagcttatgtgcttgggtcccgatgatactatattagctatgactgaagtacatgagggcagttgtagtactcatcaatcgatgcaaaaaatgaagtggcttttgtgaagatttggattctattggcctgacatgataaccatttgttttaggtactatagaggttgtcaagtatgtctaaagttcggtgatctataattagtgcatatcatcaaacgacatccttttattaaaccttggccctttaggggtggggtttggactttgtaggagagattcatccttcatcatcgaaggggcatcagtttgtggtagtcaccatagattattt

SEQ ID NO: 54580 - DNA, 596 bp, Zea Mays
atcagggaccctagtgtttggacccgaggacctaaccaactagtgagataatgccgcgtgccctaacccagatgatgatgcaagttgacagaagtcttttatcctggttcgggcaaggagaggccctacttcgagaagagggggaataagacttatattactcgcacctaagtgctcgcagggaagctctagtggcacccccatgttgatgagagggcgcctaggacaagcatgcatgcatcataacgttaaaatattattattaaaattttgcataaaagaaaagtcacctcaacccattgaaacttgtctaaaccatggttaggtaaataagataaataactaaaagaagtcttaattaaaatgggaagtcaaaaccttgagattttctagacttattcctcttagtctcattttctcccagtttcccactcacttacacttaccatgcacaaatggcttcacctactcctatcgatggaggagacgcccctttcagcaccgatcgccttacccaggagggcttcccctctatcttgtaggatgttctgagagaggctagctaccccatgcctccccagtacacgatgcagttg

SEQ ID NO: 54581 - DNA, 650 bp, Zea Mays
aggaaaaggagaggaagctggaggagcagatccgccagtttgaagcggcgcaggcagcaccgggtcccaggcaatggtggccactagaaaggccctcaaagatctccaagcagaacaccgcgccagggtctagcgcattgccgagtgggccggcgaggcaagcacggcactggtgcactagggatgagccccatcctagtgtcagagccggcagtgtcgatctctgatgccctctcggtgctggactctaccgctgatcgcctccagcgcctggatcagatcctcggtgtccgcttgaaggcagagggcagcaacctctgccgggcggtggtagactacgtcctgacgtgcttttggagttaagactccgccatatccttggtgccggtgatcgatggtttggtaaccgccacagaagatgccgcacaggagagtgtacaatatgcagtggagatggtggccgcgcgctttcagcgtgatcctgccgactccgaatagctgaacctgtagagacaaggcaagggttccgctgggggcggctgtaataacttttggccatgtaacatattttaagaaccgttaatcaagtagcactagaacttatctgtatgttatttgcccttgttatgtgtagcgtcatcaacttccac

SEQ ID NO: 54582 - DNA, 920 bp, Zea Mays
gtcatggtcttcacactcgtcagcctatagatcgctatggttttagccctgttatatggtagggttttgtcagatttgttctttctaagccaacttcttatgctgagatattcttcatcttgaatggcaacttggggttgtctaaggaaattgctactcttgagcttactagcactcagagattgttcctcatgcctatcacctgcaagtgggtctataaggttaaggaccgctttgatggttctcttgagcattataaggctcgtcttgttgcccatggttcctagtaagaacattgacgtgattatgatgagacttttgttcatgtcgctcgtatgaccactgttcacaccttccttgctgtgacttatgttcgacagtagtccatctctcagattgatgtcaagaatgcctttttttaatggtgagttgtgtgaggaggtttatatgtagccaccatctggatatcctgtttctaaaggcatggtttgtcgccttcgtcgttccctttatgacctcaaacaggcccctcgtgtttggtttaagcattttgcttctgtggtcatttatgctggtttttctgccagtgctcatgatcgtactctgttcgtgcacacttcatctcgtgttaggactcttcttctcatttatgttgatgacatgattattacaggggatgattctcagtaaattgcctttgtgaaggcgcgtcttagtgagcagttccttatgtttgatcttggtcctctttggtatttccttgggattgaggtgccctctactctggagggcttatatctctctcaggagaaatacattcaggagcttcttgatcgggcttctcttacttatcaccacactgttgagactctcatgaacctcaatgtttgtctttgtgccactgatggtgagcctctttt

SEQ ID NO: 54583 - DNA, 580 bp, Zea Mays
tacacgaaaaaaatggaggctgaatcgggtgatggatgccctgggcttcgagttccctcactatgaaagacttgacgaagaagtcggggggttgaaaagaaaaagggttgtaagtgtgttgaagaggacaagaagaaaaggttgacaaagaacccaaagttggcaccagagccttcgacaccaaagaaaaggaaggctatgtcatctgaccgcggagaagaagagagaccttctccgccaaagcattcagaagagaccccttcgcagcttccattggcgtgaccaaaattctagaggtaatgactgcaccctacctttcccaatgctaagtcctttaggatcagatctaacaagcttattacagccacagaagaaaaatgttgagagaactgccaaagtagaggtaaacaaggatccttcggcacctggtggagggaacactcagaagaagcgtaagatgatgaatgtgatgagggctattcttgacacccctcctcctccacctccagttattcgaaaggagattactcctgctacggctgacgaaggtcctcaacaagctaacaacagtggtggtccc

SEQ ID NO: 54584 - DNA, 387 bp, Zea Mays
caggggcagcactagaactctctgcctcgtgatcatgtgagcatggaggcataggaggcggtggcgggatcccaaaatcatcatcatcatcatcagcggtgccctaggtctcaaactatctgaatgcctcatcctcagcctgagtgtctggcactggatctggtactggcactaggtcctcaagggttggacaataagatccaaactagaggcatgaggcctcgagggtgccctggaactgaggcagccggatcagctgcacaaagatgaaacaaagatagtgcgtatacggcagctgtcggcgagcacgaagaccatctaacaccgtgtcctcaatctcacaaataagaaaatcaaccacctcaaattcttagtgtgagatcaagg

SEQ ID NO: 54585 - DNA, 498 bp, Zea Mays
attattttgtggttacaggtaattgacgcatcctctaatgacctgattatactctataaaggaaaaataaacacatcacattccgtccgactgcaccacctgcaccatctggcctagcgaggtgaacgagcatgcacacatgtgacacaccaatcgcctttttcaacttcacaacaaatgtacactggtccaccttataagttagtcaaagccttcctcaactaggcaatgtgggattaattccttaactctctagcattcattatgggtcatgaaatatttgattgtcttgtggcactgttgctattgaaggtgtaaccgtccatcctcagtcctgtggcactgttgccagcacgtcgtgggtggtaaatgtcactcgtgcatcgtggatggagtaagtcatcactagacgtggcgatcgtcacccatgcatgcgcccacaatggcgcactattgccacgcctaagatgtatgggcctaaaaaccagcagggcataa

SEQ ID NO: 54586 - DNA, 464 bp, Zea Mays
ggcctgagttatagtcttaacatgatcacagccagccttctccaggatagttgcaattcctcgagcaccggagaaggcgcagatgtccccgcggtcatttagtatttcttcgaaagcttcaacttctccacttatccattcaataacaccttcggggtcgcctcggataaaattttcttcagaagagtaggcgtccactttggagaagctagtttttaatctcttcacgcaatccaagaatttttcaaaacacttttccttggactcacgaagttcttcaacatttttctctagcttatttttccagtattcactaatctcttggttggcctgtgcaagcgcgcatttttcattagcttcagacaattgccttcgaagatcttcaatctcggttttttaggcttcaatctaagcatggtagttagcttcatctttttcactttatttaccaatgaaaccaaaat

SEQ ID NO: 54587 - DNA, 700 bp, Zea Mays
gtttgttactgtataggatgccaagatatgtgactcaactagaccaccaaagaaatccaacagttacctcatgatgggctgaaatcgagggtactgggcatgtttgatgcaccactagagcccacactggcactcccaagtcccaacgactataaactagcattttacagagtgccaagtatccgatgcccgcactggatacgccatcggacacaactagtgcatgttagagtgaatgtgtgtattttacctgctctttgagttccctatccagtgccatctcaggtgacctttttgagttgatgtgcaagtttatgtgctctctgagtaccctacatcctctttgtggtggatggattgatacaagcagagacgaatattacatgctcatatacttgtcttagcagaggaccaactagctctccctttactttggttctagtgagagttctaaactaagtccctaacgtctttgtcctttatctttcctcgacttgtgttctacgttgcccaacttgagttgacattgagtttatttaattgaatcttacttgtgattgaatgacccccatctacgttgctctactcctcccttttataacacaagggagggcagagttacatgcctactgaatgatggaccctgcagggattcaattacacccatcatgtcatagtcgtggagttgtgccacaatgtt

SEQ ID NO: 54588 - DNA, 1358 bp, Zea Mays
gctatccaattcacaatggtgtgttagccgctaccacttcacatgactcgtctataggcatgactttgactttatcattgacccacaacatctgatattgatgcattatagatggcacataatagttggcacatatctattctcggtctagtagagccgagtatagcccctgattatccaccatgaagaaggatgtaatgttggccttactgcctattggaacttccatgttgagcactccctttgatgtggtggcactgccattgaagtcgttcagggatatgttgatcttgatctagtcttgctcagacctcctaatattgcgacatattgaataaggcatcacgctcattttggccctagtgtgtaccaacatcgtgctaactgacttgccatgataaaacctttaatttatagggggttttaggtgcttatgcttcttcttatctggctttccataaatgatggcagctacactaacgtcgagctaggcaacccattcttcctctggtagtgcacgaaacctttctcgtagcatgaacaccatgtcgatgtccgcagcatgcaagtgcgaggccaggatttgagtttgggggacaaatcagattagggggctactagagggtattttgcattatttatatggtgattagctaagaaaattaatggcttctacgaaattaggggagaattggggacactgccccctctgccccatgtctttgccactgctagcatgtgctaccccctcaccatcatcctcttaaggcttctaccactagaccagcccttcggggtgggtggtagttccactgtttggagtcgtggaagattcttggatgtttaacactgacctgtctgaggagctgaaggtactcctctcctacatgatccattctccacaattgttgcacattatgtttctaggaatgtgactggtcatctaggcaccatcaaagcctgtgggtgttcccttctgcctctttgtcatatactggctcatgccaacgcgttgctagttgagcatgcgtccgtcattgtggcaatgtccaatatattattcctatcatagcggctctgggttaaaccattggaatactaaaatgcgacctcatcattttcattgtgcctccatgcatttagggtagtcattaatggtgtacatcatgcaattcttatgttgatcatgttgataccactcttccacatgccttagttgtctatcatgatggtgacactcttgctccaatgccctgtgtcacgtgtgtcggtgcaactcctcgttgtttgaactcatgggtcgtcttgcgtacttagcaaccaaatacaagaactctagtcgacatcgacaaaatctt

SEQ ID NO: 54589 - DNA, 982 bp, Zea Mays
caacaaggtgatcaataaaaacaattagagaagctataagatcacaaaccagcgttggacgccttcaggtcatcaatctgtttctggagtagcaatggattccattgcatcagagacagagcttgtttgggaacagtggcaccacaggatctcagctgagcagacattccatcaacaaaagtctgtgatcaaagatagatgagcagaagaaagataactcactaatatgaacaatgtaagagcaagaggccgactcacctgaagattggagaagaacagtggtagacccaaggcaggaggagttgtgtcatggctcgacgagggaagatcagtaggaacaatctaaagggcatcatcaggggtgattttagccccgccagcagacatcaggctccttgcatctaactcgccgacctctaaggcgacttgtccgtttaaaactgtggaagcatgtaccgccgtcgccccatcagaccggggtggaggtgacccaacatggacatccatggaggcgtgggaaagagagcccacctaaacacccttggggactgggttatagcttgcactaaccaccagagctagatcactaccggcaacaccctcgggggctgggtaactgccggcaccaccctcgagggctgggtcttctgcagtagccacctctaaggctgagggcccctcagtcgcctccatgggagtcaggtgactcagaccagcgtcttggcatcgaagactgccctccaaagtcgacgatgcacgagacaccgctcaagttacctcctgccgagtggagtcaagcaaggaaagcccaccgtctgggacctctgaacagacgaccgggatatcatcagcagttggctctgacagcatatcttcgaggacaacttcttccagtgcttgatcaaagtctgatattgaaagtccctgaagactgacaagagccaatagagctggagaaggaatatcactacccctctcgcta

SEQ ID NO: 54590 - DNA, 461 bp, Zea Mays
acacaattggatctaattttagcagctttaagaaggaactttgtaaatatatatgaaaacaacttttagcgtttttagtagcttccaccaaatgatttttagtttttttatagctcacaacccataacagttttttcacagccacaacccaaccaatcagaccctaaatgctgaaaagttacttagtgaaaagcttacaacgctcaacacatggagacaagagtaatataccatataagctgagttggatatggtctatggatatcgcaagtcaaaattaaggatggacattggtaagtgggactcaatgttcatgacttggagacaattggtcgaaccaaggacaaaacaaggtgctcttcgaggtactagagcaagggagaaggtcaagaagactaaggtacctaaaggcaagatgaagaagcattacaacaaaactggaaaaaaatgtcggactagtt

SEQ ID NO: 54591 - DNA, 761 bp, Zea Mays
cgggcgcgcagggacagcaagccaatcagactttagccccacctgcaggctcatatcctcccctgaggcgggcccgggggccactgtcggtaccctgaatcagggataccccgtacaacagtatgaagacgcggtgcccatatgacgttccctagccgaacggtgaacaatacccgaccccaccacgtgggcggctcaaggggcaccgtgtggcaagaaaatatggtacatcccaggatgtatcagttggaccggacctccgcgagggagcaccggacccctgtacgcacaacccggacccccaattacggccaagtaagcatgtcaggtccctcggatggggttccagatcccttcaagtaaggtccgggccacaacaaggtcccgggacaggggagaccctggcataagcaagggtccggtactgacacgtgtccaggccttatcctgtgcgcttgcgctccccgctcagtcggagacccgatgctgccacgtggcttgttgcccgtgacataagccaacgggcggagcctgacgtaaggcctataggacgcgcggtctctgcatttattgcggagaggacgcgccgcctgtccaccctgctgacaggtgatgtgccccttccgcatttaatgcgtcctgtccactccgctgacagacggtgtcagggccatcctgcagacggtgcacctgtccaatccattatcaatcagtgcgcccgtgccgcgtggcgtattgtgtccatcatcccttatacgaga

SEQ ID NO: 54592 - DNA, 387 bp, Zea Mays
cccaaggagttgagtaaaggctcaggggatgctgttgggaacctaggaacatggtgcctaaacgaggcccatgaagtccctgtcgagcaaccttgcgagatgaagcggacgaccaagtccccgtcgggcaaccttgcgaggcggagcggatgaccaaatccttgttgagaaaacttgtggggcggagcgggcgaccaagtccctatcgagcagcctcatgaggcggagcgggtgaccaagtccttactgagcaacctcatgaggcggagcaggtgaccaagtccctgccaagcgacctcatcagagactggcgtaagaaaatattgacccaatgatacgagctcacgtcagcaggacaaggtgggtcgtcaccaaactacgttcggg

SEQ ID NO: 54593 - DNA, 515 bp, Zea Mays
tagagaggtcaaatagaagataataagcattgcatatgagagacatgaaggtaaaacagacgactcatcgttgttgaatattacttttctccattttctagtgtataacatacaattacaatggtatctttggctttttacaaatgacaatgcgaaggtaagaagggaatgtagcttcgtaagcagagcgaaccagacctaagtcgaaaaagtgtgccttgtgcacgacattgttcctctatttatagtggtgaggtacaacttcgtaaaaattacaaccataccctcaagcctatacatatgagctactaagatggtaaagggtattgttgtccttttctgttgtagtattgttgaacaagccttggggatttcatcattctcgtgccagctccttcatcatatgagtaccttgttgatcccaagattgtagcttcagcttttgcaactgtgatcactacgcatttgtaaacgaaggtatccttcggcacattgctctctcatacctaaaacaa

SEQ ID NO: 54594 - DNA, 379 bp, Zea Mays
attagaagtggcgtaccctttcgccgcgactcgatctggtccgtaggattgatcggacggctcggagtataggaatctttcattaaatctgcaccgacgatcaggcattggacgatcgagattgtttaccggttcgtataaaacgtaggtctaatcttggcgactgatttctgatcaggcaactcagattaaaagataccgcttcggtcgcacgttttataaaatagacccctgggaactaaagaatcaacctgccatccaggggccctgttctctgtgtctggattattttgcgccagagcccctgcgcttcatagaaaatgaggcccagtccagagctgatttaaaattgaataaatgaattgaaaatagattttta

SEQ ID NO: 54595 - DNA, 568 bp, Zea Mays
tggaccgggtaaaaaccacatttctctatataattcttctctttatacactatgatgataacatattttatcactaaatacaataatacatgctccctccatcctggaacataaacaatgcgataagcaaagaggcattcttgttattcaaagaagtgtgattatagtaagctgaactacaaaagaacttatcatgaaggttacattcagatccgctttgctttgagatgttagtgtgatgatattgttgacacacattttttaataatgattatacactggagtctgataacaatttgataactctatctgcatgtttgatggttagaacattagcctaaagtatgtccttgcaaggtattcctgcttgaggcctttgagccttttaatgcaatattagtgcacataggtagcagattaaccagactgtgatgattattaaaaatggtaggtgacctgaatgaactatctgatttctaagatggtaacaccgctgatgatatgcaaatgcaatgcatggtagatctgtgtgccgatctgcccggacatcgttgaaagtagcctagag

SEQ ID NO: 54596 - DNA, 712 bp, Zea Mays
gaatcccttcccctctagatcctcaaggtgtcttcgagtgatggagaacagaggaaaggaattcatgagcacgaagagggggtgctcggaggagtgacaaacacgagggagcaggaaagcttctagggaaaggaggagacagacacttgggtgcaaaaaggtgtggtaagcgaaactgaccccaagcaccctccctttctatttatacgcaggagcagggaagccaagcggtgtctgaagaagtgcgcccccacaaacaacacaggaggatctatcgccccaatccataattgctttaggtgccatgctagagactacacattctgtcgggttcacaccacctcgaacggagcgccaatggagcatgcagaaggggaagcgtcaataaagggcataacggttaaccaccctatcacgcaatctatgtgcgatacgacgaacgagtcatttcacgtcccatcaagatgcccacgatgagcggtgtcatgatgatcccttttttaccatgtcgccacgataactatctcaagacgaccaaggtaaaaatcgaaactcaccccgactcctcacgtagagcgagggatggaccaacaaagctcccaatgagccgcaagcttggtgaccgggccataggtcatttgctcgtcttcacgtccaaggtcgtacctcacattctctcgcggtaactcggatgacggggtggccacgaggt

SEQ ID NO: 54597 - DNA, 550 bp, Zea Mays
ctcggctaatttgtagaagtggggcagtggtaggacgaatgaaaacaggctgcttgaacggataggagggtggacgaggcgaagaacgattctgattaaaaggtcggattaccaacctggttcgcttctcaggtccctgattagacctgtcacctccaaatccctttgattttccatggcctgtgttcttagcttcgactgccagtgctgtgctgatagctcggttgtaagtaaggtccagacaggttgccattttcctccgaagcctatcattaagtcccctcatgaagcaattctttttcttcagatcagtattttcttgattgatgacatattgggacagatgattgaatttattgagatactgcattacagtatctgccgcttgccttaaccggatgaactcctcttgcttcatatggagcagtccttctggaacatagtgttcataaaagactagcttgaattcttcccaagtgatctagtgtccagctagttgaattgccacaaaatttgcccaccatgtactggcagatcctctcagttgttg

SEQ ID NO: 54598 - DNA, 366 bp, Zea Mays
atttgatccaaagctacacacatcaaatattacagtcttgttacaataaaagtacaatgtccattctagtgtctcatacattgaccatttcaaaatgtttttacaataagagctattcctctttgaggaccttttctgcaacttcgttcagtaatttgttaacaacttcatcaacaatagattcagccatattaatgatctccagtgcttccttcgtttttggatcagccaggggatcgaacggttgccggcggcggagataattcagctgaagtgggaaaaattaattagtccgaagccacaaaaacaaatgtcgaagctgaaaatcaaaagatattacctatacgcttttcgtgctctacagct

SEQ ID NO: 54599 - DNA, 475 bp, Zea Mays
agcgaggtggcacaagaggtggtggtggttgaatctctagatcctgatcatctaaatatgaagaggtgtcagcaaccataccctgatcctcaagctgatggatcgtctcgtcctcaacctaatgctcgggggccaaaggatccataggagtagaactggagagtgttgcgagccgcctcatcagctcatagaggaccttcgctacagtggtgaaatctgcaggagagtgtcgcgagccgctagtgaaaggtggcctgaagagcgctgagacatgagttgtgccaggagcaactccgccatgagggcaacaaggagggtcttaggtactgtagcagagacggtgaagccttgtcgtcgactcagggaaaccaaagagttctctgatctgagcagtgtgaatcgtgacatcctcgcgctcgaagcgaaacctcatccactgatggtcggggtcaatccagacggtagcatagaaaac

SEQ ID NO: 54600 - DNA, 596 bp, Zea Mays
ggggcgtcacaggttcgcagactggtgggtgctgaattggctgatgcccaaacgaaacagaagcttctcccatgccattcttgatcacccgttgtgcttgtgcatgcatggcccacgacgctgctgccgggtaaacagtaataaataaaagcataaaaaatgtgagattccagcagatgatgacggtggtggattccggctgcatttcctaggtttctgctaactacatgtgtcaaatcttagcagaaacaagattaccagcccacaaaacgccacgattagcgaacgtgatcggagtgcccaaagaaaggaaaatgacggctgcatctgcatttaaaagttcagcgagaaatggcgggcgctgtgctggttcaccgcttattcttgaggacatattcaatcaaagataatttttccaagtgtacgttcaccgcaacctttttcgaattcaaatcactcaggacgtgtgtgacagcgtgtaattcaaatcacaagctcgatcccccccccccacccccacatttccataactcctggagcataccgaagatcacatgtctcgaagtgatcacggacaaatgtcgcatttgccattt

SEQ ID NO: 54601 - DNA, 429 bp, Zea Mays
caaatgttggggtactgacaagtgggtcccaacaattcggggtaagcgagaatccaatgtgcgataaaaccttaggtagggatctatagcggctcatcaagtgtgttatgtccagttacagagcgggggtatttatagggtaaataggggttggtaacctaaagtacattcatacccctggtaacaactacattctcagaataggttgtataatggggtaattaaagggtggtgaaccccaggccgaacacaccaaagtatctgcccgtcagccactctaacgggcggacctgaggggggcgggccacctggtttaggcatctatactccatttaggtcttcgtcttcgtggtgcctccgcatccgactgtttgagtgccttgctacccttccatccatcgacagagtcgtttgacttgccaaacccta

SEQ ID NO: 54602 - DNA, 626 bp, Zea Mays
tccgttgacagggcatagtggtcaccccgagttaagtaagcgtgagcatgttgcaccgtcttaagtcgtcgccgacttaagccgattgctccgttagtagggtatagtggtcaccctgagttaagtacgtgcgagcatgttgcaccgtcttaagtcatcgccgacttaagccgattgctccgttagtagggtatagtggtcaccctgagttaagtaagaatgcaggtcgacaatgaataatttgagcgcccttgaagcctttctattgatgatatatttcccagtttacagagtacattgtcgtcccaatagcttttgaaatacagctaagggtaaaacttcctgaggtgttctatgttccatgagttcccaattttcgtgccatccatctgagtgaggcgatatgatcccggccaagtgacttctgctactatgaatggtccttcccatagaggtgacaacttgtgccgtccctcccccgttagaattcggcggaggacgagatctcctactgcgaaggatcgatgtcacatggtcttatcgtgatagcgcttcagagtttgttggtaccgtgctgattgaattaccgtgttcagctgttcttcttcgagtacatcaacatcctc

SEQ ID NO: 54603 - DNA, 829 bp, Zea Mays
ggaaagggaagatgcgatcatcctgtaatggcgtccgtcgaggcttgggatcgtggtcgctgggcgaagttcgcgggagcgggggcaggcgggggcaccagggctgtggacgccctccttacattcttaatagagtagtaatagatatatacgtgcgcgcgtgtgtatttcaattgttgatttgacaaggtggattaggaggggatggttttaataaacaagggatctctgtggttgggttgggtagtgctaaggtcagcacgagcacggctaaaaacggtagtccaaagcgtggcgaaataatatgatacagattaacattgctcaaatgcggagcctaggccggcacggttcaacgaagtcacggtgtggtttagtgtcaggctggaccattatttttacacttcagactggcacgataagactcaaaattttttgtactttcttaacctgaacccgtttggcacgaatgaacggagtgagaatgactggtcaactcggtccaattcccagcactaggtggcggcatatagagcagggaaggagggtaatccatggtgcatatgtgtgggactgtggggttcattatttctcaccctgcaggctgcagccaagctcttgactttgaccgtccttgcggtaactctggcggtacatcgtttacaacaaggtagaaaacgaaggcagaccaagcaagtgcaacaactcaatatgcaaataaaaaaagtgtataggggtgccagtttatatatccacgtgtccgcgtcaagtgcatgttcatctgttgctgctagctagttagcttatctctacgtgtgcgaacgtaaag

SEQ ID NO: 54604 - DNA, 690 bp, Zea Mays
gatggcacgtgcggatgcacatcggatcacacacagaggtttatacaggttcgagctgctagaatgtgtaacaccttacttcttgttggagctgagtatttgagtatcactggtgtacaaaggttgcagataagccatgagcggaggagagtgagttctcctatcgatctagtggcgacgtggttgctgtgagaaagctaatgagctatgatgtggtgacaagctaagatgtgctgtgagtcgagctgagagatcagagatgagataggtgttcataggcataccccctcagccttatatagatgaccagagagttatccctttacaggtcgtgatcactctctaaccgaatcctccttttaatgtggcacaccttccagcttatccggaattcagttgcccttcatccgagtcgtctttgggtatctagcacttctagtacgctcaacctccttgcccgaggtagcagcacatgactcggtcgtctggtctttagcttcccgagtcgagcgctcaacctccctgcccgaggcatcaacacatgactcggttgtccggcttggttgtcgcccgagggcatgcatggctttctaggcaagtcatcgggaggcccatcaagcggcccatggagtgtttctgcgttcttgtctgaggtcaaccttgggcaagtcgtgactgcatctcccgccc

SEQ ID NO: 54605 - DNA, 380 bp, Zea Mays
gggggtaagcaaaaactgagaaaaactctaatagaactcctcccagcttcctccccgtcctcctgctgttcctatcttccttccgtctcctccctcttctaacaattggtatcagagctattccaaccccctacctccctaccacccagccgtttctgtgatcactcgatcccactagtggagggagcaaggctagtgtcaatccgcccctatcgattctctccagccatgaaggatgagatcgagtctcgagtccaagaaatgctaagcaatggtgttatacaacatagcagcagtgctttttcctcccccgtgctgttagttaaaaagaaagaccagtcctggcggttttgcgtggattaccggcatcttaatgctct

SEQ ID NO: 54606 - DNA, 519 bp, Zea Mays
gaggaggtatttaaatatgaattgaaagtatgaatgtgggaatttaggagagggaaatcttatctgactaggctgccactaaaaagtcctgattcggctgacctctttttttttttgatgagctaagttagcactttagctcttgaacgtgattctcttgttattaatcctattgaatatggtcgtgagcacgctcggcgattgattgcaatgctgataattgcacacgagtattcatttgggaaggtagagcacaaataaaatattgatcaagtgggtggtgaattataataataactatggaacacaaatgtttcaatcagcctcatcttcaaaggatacaatcatacaagcagttcattcgcttctgttgtgatatagaaagctcgaagccaaggttactcatttatctgggcaaagctaaatgtgttgttacatttgggggggtgtggaaatcaacttccttaatttttggaaggtgaatgctcacagattcatattgtaacagagcacgatgaa

SEQ ID NO: 54607 - DNA, 647 bp, Zea Mays
atcaattgcgtgtttttttgatgttgttgtctcattccaatgaggagcgttacttccaaccttgttcctagatccaggaggtcgtcctctcttacgtccagcaaggctagccaaccttactctattctcctccaatgacaaacatgtcctactgttgtgaccatcggcaataccacacttctggcatttcctgttcattttctttgtaccttttgtgcccaatgtaataaccttttgttcactccccttgattgttcttcccttgggttttgagttatttggtcttgccaagcttatcccatcgactgcaaaatccagtttctgcaattcaaaagtatagttttttcagcacataatattttgcagtcccacattcactctaataccattattacctttatggcatgatcattttattcatggccaccactctcattcatatccgtgtgatcctgcaaattaacctgtacccgccaacacattttaagctcaaacataagccaataacacaaaccaataaatcatttgtatgtacaaccacaaatcaatatagttgttaaagttattacctcatcaaaggaacgtacggtatagggatttgaacattgtccacacccccttcaagtatattagatacttcttgaatt

SEQ ID NO: 54608 - DNA, 591 bp, Zea Mays
tgtcgcaccaccttaagtcatcaccgacttaagccgattgctccgttagtagggtatagtggtcaccccgagttaagtaagcatgcaggttgacagtgaacaatttgagggcctttgaagtctttttattgatgatatatttcccagtttacataatacattgtcgtcccaatagcttttgagatatagctaggggtaaaacctcctgagatgttctatgttccatgagttaccaatttccgtgccgtccatttgagtgagacgatatgatccaggccgagtgacttctgctactatgaatggtccttcccatagtggtgacagtttgtgccgcccttcccccgtaagaattcgccggaggacgaggtctcccactgcgaaggatcgatgatgtatggccttgtcatgatagcgccttggagtttgctaataccgtgctgactgaatcaccatgttcaatcattcttcttctagtatatcaatatcctccagtctggtagcccagcttctgctatgttttcaaagattaaccttggtgccccaaacttgagatcagcgggtagcactgcctccgaaccatagaccataaag

SEQ ID NO: 54609 - DNA, 2645 bp, Zea Mays
tttttttagtcaactgcatactgttgacattccatttggcatactactgatctacagcatgagtattaggcaatacatctgatatgatgaaacatggacagcttagcctgagcagatatttgacatacaattaatattaatttgacaaaatagcaactactgatctattgacattcacagagaaagtagtaccttccaactggcctgatttagagataagcttgtgtgtgtgctcttggtatttatacaggttattaccaactaccgaaatagcatcacacagaaaagggatcacaatgtgtgataatttattaggtgctccaattcttaggttctctcttacacaccatttggcctcataaccaggcaagaaaaccaaccatgcatcaatctctgtgaagttatgatcaaaagcacccgaacttgccatagcagctttaactaaaatatatgcttgatcacggatgttcttaatctgtgaatgcaacatgatataaaccaagggttgcagatacttgtacattgattctggaactctttctgggtccaaacatcctctagattggcctgaatattcaagtaaaaaagataacagggactgttgctcatccatggacagatccaatgggttaggtggtataatcttaaagaagtcatatgatccatcaaaagagctgggcatcaccccctgaaagaaaattagatgttggaaatattaatgatataaactgctaatgaatcacatcaattatagaagtagagattggggacatgcacccaaaaaatcaggtcaaggactcaaggtaacaagaattcagaacatccagcaagggcacacagagcattggatttagctgcacctaccaaataaagcctgagaacatccagcaacttcgagtggaagacattttccacaacatttgcatctttcgtctttggatcttgtttatctaagctccatatctcacacaaggtggttgtgcggtcattttttaattccaggccttgttcttcagatgcgtccttatcctgctcaacatcaatgccaccaataataatatcatcaacttcacaggaaggactgcatcttcgtttcttttgaggaggctcagaaagttgagcattattcttttgtatgctctgagaataactttgatgtttttggctggtagaagagagtaacttgagaaagacttgaggatcaggcatagctccatgaacttcatcttggatgtattctcttagagatgtccacctcttgacctgcatttcatctccctggtgaacctcatcaactaaggatgcatctgtagcatcagaacagcttaatactgggaaaccatctattttcatggttactttctctgagccaatgaattctgacttcagtctcccttttgataccatgcaattgatggattcagtgatataacaaagcaggttaactgattcaaaaacaagcctcagagaaccatgcttcacaagatcatcagaatgcagcaaccccctatttatcattgctcgagagcatacattgggcaccatgcacttcaagactacctgaacttcttcatcatctacagataccagaccatgtgaactggatgaaagagtttgaacaatgctattgcattttgctgaagctatgacatcagctgcaagggagatggctgaaaacctgcaaataataacttgaccagcatgagcatactgcactacaaaaaaataagcacgtaaatgctcagaagaactaaccatgaaggagacgaacgtggttcaatattgtaaggaaactcattcatgtacgccgaacaaagagacagtctattactcacaatggccagtaacaattttttgtgatgaacaacctcagtagctttcaactttttcatgagatctagtaagcgtttctcattacctctcaaatttgatcctggcatcaatccattttttggatcagtgcacaccatgaccaatacctcatgagcaatgtcagctgcttcccctgattcaagatttcctgagatcaagctcagctgctccaatgtgacacttccaaagaggacactcctgagccctggtgggacaagagactcatctaccaggacattgtctcgcaaagttgagaggacatagatgacagtctcagcatcatcatttccaatcccacgaagcacccctgaatatacctccttctgttgaaggacccatctaagcagccttggattcccaacctccaaaaatgacatggcaaacccaataaacgaccgccttgtggacccaaagtcggcacccttccgccgattccttccatccctgctccccttcttcttcattgtcccagccagctgcggcaaaataggtatcttaaaatcaaatctctcagcgacctcagacgctagaccccctccacgcctgacaattgcagcaagcaaatccagtgctgcattctgccgtcggaactcaccactattcagctccaaatacacatcccccatcttctccttatcctccagtatcatcctagcgacaccgtccaagctcttcttaaccgaaccatgtcgccgcagcttaccatcagggtggcccaggacagctgcaaagagcaaaagtatgtgcgccatccccgggttctcccggtggag

SEQ ID NO: 54610 - DNA, 411 bp, Zea Mays
aatccgagaaactccacttgaagaactcgacacaaactactgccgtcaatgcgttatgttccatgatgcctcatccagcaccctgttcgagtactccttgtgagtcgtccattcaagtagtcgcctccaacagcccttgtatgaagggaaaaggcaagaacaccaattggtacaaaggaagacacaaagctgatccacatccttcggcacatcttctgtcgcctcccttcctagcaatggaacatggatcatgacagaagggtgtagtccgatcttgcgagaggtacaataaacttaattgggtggatatctcaacattgatgatccaaggctctagcgaacagctacttgcaatcactacactgctctcttggttaccacctatgacatacaaatgacctcaccaagaag

SEQ ID NO: 54611 - DNA, 639 bp, Zea Mays
tggctgcccaccaactttctgggatggccctagcctggtcggacaccttcaacgtcaccatcagggatgctacctgggcggaatttgaagcagctttccgggagcaccatgtgccccaaggactggtacagcttaaggaggacgagttccgagaattgactcaagacggaaggtctatcagcgaatatgtgcacaagttcactgagtttgcccgctacgcgccagatgatgtcagtaccgagagcaagaagatggcccgtttcctgaagggactcaagccagaactcaagacaattctggctagctaagacttcctcaacttctctcacctttccaacaaggccatgcaagttgaaagggctaaggaggaagaaaaaggacatctcaaaaggaagttccaggttctccaggcacagcagcaggaccggcaccagaagactcgatcatttgggtttccacccaaggggcccaacttcagtagaccagctggacccactccatcatgattcagccagcagagtcagagctctttccattccccctcagtggcaagcaaccaacccccggcaaatgcatgttggcactgcggtgatccaagtcacttcaagaacaactgtccgcagctgaagccaccaggac

SEQ ID NO: 54612 - DNA, 479 bp, Zea Mays
cgggagttgaagtacccgaagggggccttggagtacaatggcaccgacgaagatgattttctatactgtctccaggacaacaaggaaatatttgtctaccgggagatggcgaagaatatgggatttccgaagcttgaagttggcctctctgcatgtcgaaggatgacctcgcagacagccttgcgtacaatagtctgaaggtacaaaagttatagacataagtagattgttttttgtcttttattcttgtgctgatcctgtgtctcccttcttcgtgcagggcttaattctgagcaatgctttgagagcatagaaagataccgaggatgaaagttgccagatagcccttagcaaccttcgggtcagaggttatcagactgagaaatgaagctacagagaaggacaaaattctgctttccttggtggacagagtcaaggctagtgaagccaatattgccacgcagtccgaagctcataga

SEQ ID NO: 54613 - DNA, 775 bp, Zea Mays
gctggatcggatcgatccagtttaggagcattggaataacatatcttgtattcaagtgcaagtattgtaaggaacaatggaaggagggcggtgctactcgttttagacaataccttacatcacgtggacgaaatgtgcaaggttgtcgcaacgttccgtcggacgtttgcaattactttcgacgggagcttgacaagggacaatatagaagggaaagcaagaatactggaggaggtatgaaagttagcattggcgggttcacctcaatgatgacgatgttgagttgcaggtcgcattacatgctttaagagatgaggaggaacttaggaggcatgcttgcgcgagtagtggcacgtatgagagggtgatggctcctcccatgggggtgttcatggcatgtttggaagaacaccttttaggaaggagaaaccacgcatggtccgaccaaggattgataaggcctcgttttcgaaggcagtaaggaatgacgtccatttcattggtaagcctattggacccccgagtctggtagtgatagacaaggttcatcttcaccccttcttccctatatcaattatccaattggtgaagtgactcagtaacccatgaggtgggtgtatcaatgggaggagcctgagtactaaatattaatggactcatggagtacgacttctgcgtggaccagacagacttggacggagtacaaaggaatgttgatgtgtgagcaaggtattatattattctcatcggaagggtataatgtgacatatgatca

SEQ ID NO: 54614 - DNA, 716 bp, Zea Mays
gatcggattactcgagggaggactcctcagaggaggaggactccgaggagggcggcgatgacggcgagggcgacgacgatggtgacgagggcagtggcgacgacgacgagggcagcgacgacggcaacaacgccggtggcaagatgccaccggcataattagtagtacaatatagttttagatgtagaagtatgagtagtagttgtagtttagtagtagtagtagtagtaatagtaggttaaggaaatcatggtcgtcttataatgagtcagtccttttttccttttgtaatgctctccaaccagttaagtgaaatccgtcagttgcctatctgctattgcatagtttgtgtctttgcttgccaatttgattccagtgaaacttgattgatgactttagcttttgaaaatgctcaagtgtatctgaccaaagacactgcccgacccattctgctctgctatgttgaaaacatgtccgagctaccagcctaccacgttgcgcccgacttaatgcgctaacttatatccttgtcaacggtttcttggtgcatgaaccctagctttgtttctccttcgccgaattctagccttccgaactcccactctttcttgcgttgctcttgagctattatacctgcggggtcacaatggcgcccaggaaaaagaaacaggatgctgccatgccggatatccccccgatcgatcctgatagtcaac

SEQ ID NO: 54615 - DNA, 832 bp, Zea Mays
ggtattgctagattttaccctcatcttctttttcttggatgaggattgcattgaccatgctgaatgatgacatgacatataacaagaatgttgttgctaggtctagacttaccagagttgtgaggtctacaaggtatgacttgagtgactcaaagacagttgcctactttaggccctaattgaagtatttggttccacacaaagtattgtgggaaaggtaggccatgatcagccgagcacgagatgaatatgtttagcgctgtcattctacctatcagtctgtatgcatctcttatcatttgcagggacatcattcctgttattgcctttattatgatcatcagagctctagtgtagacttcgcaaataagaagcaggaaaagatcactatcaaagggtcaaccatgtcgttgtaacaaggcatgtagtccaaactaagtggtctcatgttccgctaacatttgatgcgagggacgtagatttgtaaagtggcccacacattgacgcgatggttgtaaattgcaataaagtaagttaggagcttcataaggccctcattgacaacagcggccagacaaacatcatattcatgcatgccttcaatcgaatgggcatcaaccataatatgctgcaactagccgacaatccattatgtgaatttggtgggaaagccaccttccccactagcaaaataagactaccattatcctttggcacctcccccaatgcgaggatagagaaaattaccttcgacatcatggacatgggctacccctacaatgtcattctcgatatgggttcgataattacacttgaagcaaccattcatgac

SEQ ID NO: 54616 - DNA, 1166 bp, Zea Mays
caaaaaggtctcaaattcaaatttggaattcaaaataaaaaggagacataataggaaaataaaaatataagaagaaatggtgaaatctcactgttgggcccgaagccacccattcagcccgactcttcttttgacccgcgtggcccaactccgatggtgcgcagcgtgccgacagctaggccccagtggccagtcagtctcccccgcactcattccttcttccgccctatgacgtgtaggcccgtgttgtcagcgctcaccttcaactgtcgtgtcgcgcatggcggagcttcaccgggagtttcggagctgttcgctgagtgcgactggtgcggtctagggggatttaagtgcagagggaccgaagcctggaccctctcttttcaccacgccgctgtcgacctcgtcgtggaacggtttgagagagaaaggggggagatttagatcgccgtcgtgcctgtccgtccatacatcgtcgctagaagtcgtaggtgaggtcgggaaccatcaccggtgtacgccgaacacgtgcgccgggatctagggtaacagcccgtgccctcgattcgagctgtgcactgctaggactcgaggaatttctcagcaatcgacgaggaggacgccgcaccgcgcatcatcacggactgcgccacatccatcagcgttgcaagtaaatctctcatctctgagtttgctgtcacccccgcatcgagtaggctcaatcggcgttgtaattagggctcgaagtcacctagtcgtagatcgccgacggaagcccctccgtggaacgcagcaccgccgcgctcgagctggagatgggagaagacaagtccatcgccgtctgatcctcttcggatggctgatattagatgtatgtaccccttcgcgcatagttagatcctagtcgctagcgctggattgtgcggagcatattagatcacccatatttgaaacctaaaccatagatcgccgatccaacgaccagagtcacgtaccggttcggtatgtggatcttttaatcctatgcgtcgacttcagatctgacggccagcgcaccctatatctccatcggccgggcacttttgtgtttaggtccccggatgtttctgaaaggaacccgcaatctgcaacagtgatagtctgagtcttaggacatttttttcatg

SEQ ID NO: 54617 - DNA, 599 bp, Zea Mays
gcctccgaaggccgaaggttgaaattgacgaatccgctgaagcatgtcagaaggcatttggtactgtctgcttctttattggtacgagacatttaattcaagagcacatagcattcagagtatggccgcttgtagagagctgggaaatgccgaaggggaccatcaccgaatctagtgaaggtgaactggttcggctgaagtatacattcagatatggggataaattcgatgaaccaaacgatgactggctaaaatgcatcaaagttacaagtgatgaactgcttggatcatattccaaggcagaagacaatgcattatccacagccttcggaggccagggaaaaaagagattgaacagagtttttgatgccattggctttgtttaccccgactaccgctatccactgcgaggtcatggaaagaagagaaaagctgctacttcggccactcgagacgagcatgtgccgaagggcaaaaagttaaaggttcttacccaccggtcgcgttatattgaaccgaccgtggtgcctgaatttggcggggaggcttcttcagctgctgaaccaagagaacatgttcctcccacgcaaaaggctgaa

SEQ ID NO: 54618 - DNA, 323 bp, Zea Mays
cctcccactgtacgtgatacatacgctcggtatggtgtattgtcctatcttttctgatgtgtgggccaccgttgagactcctatgctgagatctcctccgactaaggttgtccgtccttatggggtaatctagggcatgtctgaactatttgcaggggcgtacaagcgtgctgaggatgaccctcgaggttcgtcttgtgcagtgtgcacgcgttcaggcatggcgtggcgatgatgcgtcttatcgtgatgggtgcgagttcgcaccaccgggttcagatctccacctcatgggtgcaggtacttggtcggtagctctagcg

SEQ ID NO: 54619 - DNA, 602 bp, Zea Mays
cctccaaaggatcggccgatgtaaacccctgtcctagtttatcaagatctctaaattcctctatcatgtcccccatagaggaatcagatgatctttgtgtgatggcgggctttccagtctcggggaccggatcatccgtgacactgtctttacgttgcggtagatgttcggtcttaaagtccgaactgttttgtgaaagaccagaccatccggccttaggagccgaactatccgtgaccaaagactcatgaactttgtgtgtactcaccatttaaactttatttaggatttagccgattctccatcggctctagcataacaggaatgaaacctttcttatctatacttatgaactgataatcagaaaaatctactcctgtgagacatgtagcagtctcataagtccagagtacaggggcatcgaccacaacaatacaggccgatacatccgcatgtacttgttctacatcatcgcctacccattgtatcaacatttgatgtaatgtagacggtatacattgattggcatgaatccaatctctgcctaggattaaactgtaatttccttctacatcagcgacgaagaatgcagcagcaagggt

SEQ ID NO: 54620 - DNA, 544 bp, Zea Mays
atttcctgaggtgttcaatattccacgaatttcccacttcggttccatccattcgggtaagtcgataggatcctgtccaggtaacttctgcaacaatgaatggtccttcccatgggggtgacagtttgtgtcgtccttctctcgtcggcactcggcggaggactagatctcatactacggaggatcgatgttgcactgctttgtcgtggtagtgcctcagagtttgctggtatctggccgactgaatgacaacattcaggcgttcttcctctaatatatcaacatcttccagcctggatgcttctgactcagctatgtttttaaatgttagcctgggtgctcaaaagatcagatccgctagtaatactgcctccaatccatataccatgaagaatggggtgtttccatgcaaggcccagcttggctgcgttcacaggctccagaccacatacggtagttctctgatccattttcctgcaagcttttcgctcttgtcgaacacctttttcctgagtgcatcaagtatcattccgttggctctttc

SEQ ID NO: 54621 - DNA, 546 bp, Zea Mays
gctgtttagactgctgcagctgtaatttataaagacaaaataatataaaactaatagaagtcagtatggattaaagtcgagtacggattaaagtcacggattcttcttgtattttttgggtattaaatagggttgtacataccctaatgattaagataattgctcatttaatgaaactataaggaagtttttgccttcagagtcctagccagttcaacatctttccgaaaaggatggtgcattctagatgatctggcaagcgttgcttatgaagatgctgggaacaaaattttgtatgtattctttttaccctcaaaacctgagaaaggaaaaaaaaaaggaaggcatgtgtgtttttttgtcttcgctgattgattcagctaaatatgtttttattgacagtttgtcatgctttaccagttacacagaatacatatgcgaatattgtgtaggtgcagaaacgacctacacttggacatttacaaagtaattagtataaactgaaagactgaatgttgagtagagactgttggagttgctacttga

SEQ ID NO: 54622 - DNA, 627 bp, Zea Mays
taatgtccccaactttggagctctctaacctgaagtatgttgagttttagctggtatcctttaaatctaattggagagtgatcttaggagagaaattcctagtaaggaagtgtatcaagacgatatatggaattgagagaaggttgggctagaaaatttcaggttcaggcatgtttctatgctctgaatgtgatttcagactcaggctgcccgctggccatgcgttttcgccctccttgatctgtctccatttctcagattatttccctttgaggttagtctccaaagcaaagagtggcggtgtttatcggtgatcaattatgtttaatcagttgccgtcgatgctaggatggatggacacaccgtggttgtcgtggcgcaagtaacatggggctgagcgcaccctgtgaggactgtctcgattcctttcgttgtggtggctcagtttgggcagtagggggcggcggcgccagtaacgtcggctggcttgtttcccgtatggtcgacgccggttaaaaaaagagatcgctacctatccagcccagctgtccgtgggcgtcaaactgcagccacgttccttggcttgcttaaccaggagctggcaccatcgtgcccagcagctcgtct

SEQ ID NO: 54623 - DNA, 429 bp, Zea Mays
ggttgtgacaccccagtgtcacctagggttcttccctaagctaatccaacctattatcacatgtaaattcagtaaaagggtgaacatcaaaagaaaattcagaataaaggtttataatgaatcttcttaaactctccttaatcttgttatgaactttgagagagaaagaacctcaaaccctaataaaccctaagtaagccaagttaagcataaagggtaattgggagaagtcatgagggaaaatgcaaaattttagatatgatcaaattacaaagttttagttcaccaaataactaacaaatcatagtaagagagtttggccttttggtctttttaaaattcccaaatcagcccttaaaccaggaacccttggagaaattcagatttctgaatttctgaaattcagacctcttttcaaagattgactgc

SEQ ID NO: 54624 - DNA, 616 bp, Zea Mays
ggcggcagcgatgtgcagctctggaatgaggacgatgaacgtagcaaaaggaaggggagaaggcccaaacatattcagttatattacatccaaaggtattatagttccaaattattattactagaaaaggtagcaccccatcaggcgctatacttgccgcctccctctcctgtttcaggcaatttctaagcaaacaaaacaaagtattttatccaataacaaggaaccatcacatctgtatggaacaaacatagtaagcacaaaaccgcaacatgcacctcggtgcaggtatctgctacaaaggttgtggattcctagaattgagctatattcccctaatacaaaagtaaggaaatgcagaactaagaaaaatgtgtctcttagagtgttgtagaagctgtttctatttttgaagtgcggtgctcactggtcgtattcgtgataaattgctcctgcaactgcaaattgtgggtaaatctagacatccagttcaatagcacgcacatgatctcattcaaaacaacaacaaaccaaagaggaacaaaatcaaacaacttgaaataaattacagaatattatgtcatcatatatgtgcgaatggctaatttgatcaata

SEQ ID NO: 54625 - DNA, 490 bp, Zea Mays
gcatcctaagctctcttcggcaacaccaccgaagagcagcgcccctggctggtacccgcaagatataacatagtccctcagttcttctttttcagtcttagacaactcttgcccaattatgttttgaaagttgaaatcttcttcttccgaagcatcttcggcaatctccttctcttttccaggcatcttctccccttctttcaggcactgtggccggggtttcctcagcagctgcagtagtttcttcctcagccatattcaaaatcatttcatcaatatcagtaagtgtgttttccaagtttgtggcttcggctactgcagcttcggaagtggaagcttcggcaggagcagtcttcggctgctgctgtttttggcgctgaggccgacggcggtgtttcttcaatagcctcaatgacagtaataattcttcgcttttttggttcagccggcttctcggcagccgaaggctccttcttcttctgtaaaagcc

SEQ ID NO: 54626 - DNA, 401 bp, Zea Mays
ctctcatcgaaagatcgggcacccgtttatcaaagggctatccaaacatgcttagccgaccactggggcaagcgagtggaagcctatgttgatgatgtagtaatcaaaactgaaaacccggatagcttcatcgaggatttgcagtaggtcttcaacaggcgctaccgatggaagttgaacccagaaaaaagcgtgttcagagtgccgaccggaaagctgtttggttttattgtcagccatcgaggaatagaggcaaacccagaaaaaattgaagccataatgaggatggagccaccatgatcatagaagaaagtacagaggctcactaggtgcatagcagcactgagtcgtttcatttcaaggcttggcgaaagaggaatgccattctataaactgctcaa

SEQ ID NO: 54627 - DNA, 684 bp, Zea Mays
catacgttcgtttaagggccaaccccttccttttataggcagaggaagggggtcggctagcagtggcttcctcaggaaggagccaccgggtagaggtaaaaccaaacattctacctcgggtgaagcaacgcgtgctcatgggcccaaggtcacctggttgtcccgtattctttatgacaaacgcgagtaatgtggggatcgagcgtcatcattttgggctataccgacccctgacattttgtagcctggggctcggtgcttttgtcatgttgcgcccttccagcggtatgtgcactctggcctagtccgataaatcatgagtgcgccgcaggccgtaggtgtgtggtccgtaaatgtgacgtagttctagggattagtaggtcataagtgggaggtggaccagtgccaccaccgtggctcgttgccatacgtagttaatacggccggtcacttatgatagatcggtttcgagccatgcgcgggatcactcgagtggtttcccttcggtgtgccctacccctgtcaggttctgccatgcccgaccccgggctcggtgccgtggggtttgtccgggggtggatgcctcaaggttagatgttacctatctcctccagctaaccagtgggtcccagttaccagaggcatttccacagtgtgctcgctgaccgacgcgtcctagagacc

SEQ ID NO: 54628 - DNA, 507 bp, Zea Mays
tggggaggctctgcgccgccgtggtttgggtctgctgagcggctgggaggagaaacgcacatgtgtcattgatcaaggcatcaacgaccaggattagagaaccgtaccgctttgtgcattgactcctggccgttggatccaattctggtggccagaattaaaaccgcgatacccccttagcagcatttagatctggccgttgatcggcaagccaatggtgtagaccagacttgagttaagaatagtatggaccgttggatcgaaatccaatgacttcactcagtggccaatccaaatctgatctagcgcactcatttctaatcgtgtgtctctggatggaggatacctcttcggccgtggttttttagtaaagagaccccacagatgttagatatcaacccgcagtctagggctactgtgcgctgagtctagaaagttttacgctgggacccctggactctctggattttatgcgcccagtccagagattaaagaaaacatgaaaag

SEQ ID NO: 54629 - DNA, 761 bp, Zea Mays
cggatcggagtatacatcatcgaacactttgcacggcaccgattccgggaaggaaggaggccgtgtggcttggtaccatctccacatctccagtcacttcgggattcaatgcctcaatgatgggggtgcatggactttcctagctggcgcgcctagtgtagctagctgagatctatagactatagtaggagtacggcaaaagctaacgccttgctttgctgctggtacggctgctgtgtttgttttcatttcacgcgatatgctcggcgaaaaattacctttccacgcgatactgctagagtacgggcgtgggggacaaagcgaaggacagcgagatcgaggagacatgactgctgctagctgcccttctctcgatctgcccatgcatgctttttcatgtgttctcaacttctgacgagccatgacgatgcaacttctctcgatcgatctcgtgcgcttgggatcggagccaagccagaatgaatgccataccgggacgggatgggggcgtcttgcattggatgcaatatgcatggcagcatggtgctgtcccatgcatcacacaaccttttttcaatatacattggccggcctggcccccgtacttttgttccttccttctattgggactgccttggacatgtacacttccagccacggacatatctgtctctgactgattatcgctcatcctgtccggggacgattaccagatgtgcaccttttgcttctttcttgatatattgcacgcacatatatcg

SEQ ID NO: 54630 - DNA, 438 bp, Zea Mays
gaccaaggaattgaatcctttttaaaatctttggggatagcagcggtggctttacaccaccaggtccaaacctggctagaggaaatggggcgtgggaccatatcaagcctaagtttcctcaaaatcccttcccaaatttctctggacagcacacaggagactaggatgtgatttatggtttcctccgcctggtcacaaaatgggaatgctgcttgatgtggtaaccctcgcctagccaaccgggctgaggactgaaggttagccaagaaagaatgttacctgcttgctagggcggggcagatgaatgctagctgagtgttatgtgtgggttaaggtcgtgtatccctctgtttatagaggtgtaaattggtagttttaggctacgctttaggcttctttcggtttttctgtaacctttagtcctcttcttcttaatat

SEQ ID NO: 54631 - DNA, 332 bp, Zea Mays
ggagactgggttgagggctccggggttatacccggagtgtctttccatatatggtgtcacctgggcagcttgcgcgtagatcggtgtggggtcggattgtccagcaaaggatgtcggatggttcatgtggtggtcatacgtttcgagataagacctgaacagtctggtcatgcctagatccggtcgcgtgctaggtgtgagtggcggtggttgtgatgatgttgcgctcatgttcattggcatatcatacaatgactgaatttatgtggactcatttacagtcgatgtttttagtgaggtaggttttaccgcgacttcatgtgatgggaaac

SEQ ID NO: 54632 - DNA, 492 bp, Zea Mays
ttgagatggcgctaaagagtggcccacaatttgatgttgatggcaaaggcttgcatacagagttaatgttcctgcaacggtttatctctaacaaagacatgcaacctcgtgatattctaaagtttgtaaagcggatgtgttgttttcctaatgcatatattgcatacagaattttgttgactattccggtgacagttgcatccgcagaatgaagctttgcaaaattgaagttactcaggtcctacatgcgcactactatgacacaagaaaggttgaatggattggcaataattgcacttgaaaatggtattctggagaagattaaatatgaagatgtaattgaagattttatttcaaagaacgcgagacgcaagatactctttactagaagttaagtatatcagtgtcatgcacctttatttcttaacattaatgttcgatgctgacttgctgttctaaatattgagatgaaaatagtgaaatgaaatttat

SEQ ID NO: 54633 - DNA, 483 bp, Zea Mays
ggcctgttgacgaggcggcctccggcggcatggtgctggtggtgtaggtgcgctagctgcagcttggaccttggtcggtcaatttgtaggcatggaatgaacgtgaacactggcatggcatccgaggagtaaccgtcgcccaagtttacgtgacaggtcagcagctatatctgttgcggttttgatcggtttccctttcacatgggcatggtgattctttgacgagcactgagggaataaaaagcgcgaggaagacatgctgggtaggctacgtagttctcttcgtgtgttgtagtgtaggagcacatacatatgctaccttttcgattcttgccgccgccattggattggaggaacaaagaaaggtgatgaaaaagatcggaggacacacaattttcaaaggtcctgtctagtacgctgtcaaaataagctagtctgagtcacggctgccattggaggacgggcaaagaaaggtgacgaaag

SEQ ID NO: 54634 - DNA, 404 bp, Zea Mays
ttcgtaacttctccggatgttgttggttgtcgaagtggtctgaatttctcaccgacgtcgaggtccgccacgtagctgcttggaggcaaaggtgtgagtccctatgctaccaatctcggtgaggatgctccttccgatctcgtattgctctcctctgcgaggataagccctctgcgctttgtttcaaggcaagatttggccagatgtcactaccccggtgatgctccgccgtgggggccgtgggcaccgccgtcgctggttgtcgtgggggaggagatgaccattggttgttgatcaggaaacaaacgactacgattagattagagggaagtgtttcactattttgaatctagacagtagatcaaggaatgcatggctctagccgcgtacccttttgaccttct

SEQ ID NO: 54635 - DNA, 546 bp, Zea Mays
ttcgatgtcaactaatgaatctgaatttgaaatttccgcataacttctgctatgaatcgatgcgctggcaagcagagtccagcagtgaaaagggcctcgaacacaaccaactctccttccgactcgaggacatcttcagcccctagcgctcgcccaactccattcccaaaataaccaaacgctgcatctcgtgcacgcggcccgagtaaatcctcgatgtaccaaactccaccgtgtggccgggctgtagctccacaaccgccgtcggatcactaatcgtcttctccgacgatgacgcgttcgaggatgcagtcgcagcgaacgacgacgaggaagaagatgatagcatcacgtaccgtcggtggcggtggactgtctgcttaacacgggccagatcaccggtggcgcgagacaaagagggcaacgagcagaaagcaagaaggctagggtttttctgcacgaagatgggtaaaactcccgcagcgccgtgtgcgcagctttttatacgcaagggaaaatgcctcaggaactcaacagccccacagt

SEQ ID NO: 54636 - DNA, 338 bp, Zea Mays
gtcgactgtcggtggcttctctgtatgcgccttgtcgtctagttgtctctgctcgtgctcatcatgacggatggtatgggcggcgtgggtcctactgccattattacatctctgtgccatgttgacccctgacatccgtagcctaggtctcggcgtggctcgtcgcgttgcaagctccgttgccgggccgcgtattcaggtctaggctcggtaggtcataagtaccccgcaggccgaggggctcgtatgccatgagtgggttgttgacatgcaaatcgcataggtcttactcgcttctcacctaacaatgtgtccaataatatgttacaccatagata

SEQ ID NO: 54637 - DNA, 2253 bp, Zea Mays
tagccttgcttgtactgaaagatctcgaggaagcgacagttctgtaggaaagtaacagcttaagaatggtaatgatcctgtcaactcatccactttcttttgtgacagacagcacgattctactgggttttgtaacaaattagagaactgtttgtaaggatacgatgggggattgggggtaggaatattttgcacgggtttttattcagaagctgagaaaataaagagaagcctgtcatagacgacctactgaccgttccagcaatggccgaagccttttcatttgagagcaatgtcgagaaagaaaactgcagctatacttggatcaaatttccttcaaattgcagcacagcgcagcaaaaacaaaaaaagagcctgtcagacaacccatgggctgacccaggaaagaaaacaactgttgcgacaggaacagtttgatcaaatttccttcaaaatgaaacaaagcaaaaagaacttggtccattaattgcaaatggaatattttgatcaaatttctttgatggtaaaaagcaaaatgaaaaccaaagcaggaaaaaaaaggagcctgtcagacaacatatgggccaggctcccccgtttctgaactggtacgactagagcgatccgtggtccatgaaaattctgagcacccagttaagtggaggttgctgacaatctagaaaaaggagctttgttgtcgaagaacataaaacggttaccagatggcaggtgatggttgaagagagagctgctccagcgccaaccatcagtacatgttagctgaagaattgtactctaggtgccaaagaactgtgtgttggagacttggagtaatgcagttgcgatgtgctattgtaagactcccttgtgggcaattagccttcttattatcctcttatgtcatgcccggcagtattggataccacgactgactaaaagcccacctttctaactctgtctatatctctactcctttaaagtacgagtttcgtgcattgtctattgtgcgtcacatgcaaagtgagtaaggtgatctattttctcccctacatctcggctaataaataggttgttaccttctagatagggccgtgagaaacacctaagcctaatatgatacgaaaccacacgcaatacaacgctcttagatagtaccatctcactaggtgaaggaggaaaagcgaccgagcgagctacaaaaaaagaacatgtctctttttaactcatacttttctcgaccttttacctaagataaagtgcaatatctacaatttaatatatggtatgtgagttaatcatgtccactttaattttattttttgggggtctattttaattttaaatttatttttatggagatggtctatcaaactggcttgctactagaccctcgggcgttgtataactattatactatatcatcaaatgcctcagcaacacacgggcattacactataaaacccttagggctagtttgaaaatgatggagatggaaatgaactagtttctccctcaatgctctctaattattaaggggatttgagtttccaaacaagccattatagattagaaaggaaaaccaaacttctcagattgtggaggtgaaagaaaaaaaaaataccaataaggacctacagtacactgatgtggctatgtatgcatgcaagattattacattgaaatagctgggacctaggagtggctttggaacacgaaagaattgcacaaggccattgttaatttgaaaactgtgtgggtcagactagcttttcgtcacctttctttgcccgtcctccaatggcagccgtgactcagactagcttattttgatagtgtactagacaggacctttgaaaattgtgtgtcctccgaactttttcatcacctttctttgctcctctaatccaatggcggccgcaagaaccgaaaaggtagcatatgtatgtgcccctacactacaccaacacacgaagagaactacgtagcctacccagcatgtcttcctcgtgcttttcgttccctcagtgctcgtcaaagaatcaccatgcccatgtgaaagggaaaccgatcgaaaccgcaacagatatagctgctgacctgtcacgtaaacttgggcgacggttactcctcggatgccatgccagtgttcacgttcatgccacgcctacaaatcgaccgaccaaggtccaagctgcagctagcgcacgtacaccaccagcaccatgccgccggaggccgcctcgtcaacaggcc

SEQ ID NO: 54638 - DNA, 447 bp, Zea Mays
gacttctgatcaccagcaataaaaaacaaggcaagggaaaggcgacagaggcagcttaggttctctctaaaatgcgtacaggtgtagggtgcacctttggttagccttccttctataacccatggacctgcactatctctatatgaaggaccggtgagacgattagagggggtgaatgggagccactaaaaattctttgcttgataacaccgtgacttaatcccaaattcaaacacaaaccccataggacacaaaaagcataaaagcattgtgcagatcaatctagtgtcaattgactacaccaaaatgctagagaagaacttgctcgactatctggagaaaatcaaaggcaaaataacaaatcagagggagcggtagtgccgcacagtaggctgatagtgctagggagcgataatgtcacgcaggaaaacttgcgctgaaggaaag

SEQ ID NO: 54639 - DNA, 647 bp, Zea Mays
cttctatagaagtatgatgtgaccatcagttccactgagttcctccggatcgacacctctaccatccttagtgatggtgatgaagagatgattgtgaactacttctacgttgccttgattagttctactcgatcatggctcataaaccttttagaggccttcatctagtcttgggaagagctttgtcggtagttcgtgtccaactttgagagcacctacttctgacccagcataaagtctgactttcacgcagtttagtagcaacctagtgagtttctatatatctttgtgcaacatttttgtgacgttaggaacatcatttcgtgtgtcttggtagaatttgttgttgtcgcctttcaataaggtgtgtgggatgaaaagatgttggagaaactagccacccacaacatccatgacgttagagagttgttctccctaatagataagtgtgtgtgtgggcagccgagggtgaagcgtggcaaacttcctaagaaatctagctagggctagcaggtgttaggcccttctaggctaaggctcgaaaaaaggctaggcctcctcaattgtaccaccatggggagtggtagtgagcctgcccccatgaagacaagcttccccacatggcgccttagcgcatcgggaaaaag

SEQ ID NO: 54640 - DNA, 506 bp, Zea Mays
gtttgaggagtgatcccgtctgaaattagtgtatccggtatgtgttggtccgactatttctagaggaataagtagatgtcgtgaatatactagcgtagagtgcagtcgcatggcgggcagattagttccctttggcaaaccaaacaacttatcgagattcgaacgcaggatcggacaactcctcacggtgtcattccgtgaaccaaacacgtcgtaaaattcaccgaaccaggaagggattcagcggttccctcccttgtcgcttgatcaacttgggtgtctcaaaaagtagtctattcggttaatccccagcacctacaactgagctctcttgtgcttacacaaaactgagcaaaaagaaacgggcacagaaaactccatacacataaaaaaaactcggctgacataaaaaaaacttggcccgtagaggaaagaccggtctcacggtattatattaagaagaaactcaatcaaaaccctggtcgagaaagatcatgaaagctacc

SEQ ID NO: 54641 - DNA, 278 bp, Zea Mays
gaggagcgtctatcttaggaggttcagtggtaagaggggcatcaacggatggctggtatggaaatgaaggaggaggatagagatgtgaaaatagaggttatggaatcaaggaatggggacaagcaggaacgtcctcctatcgatgatggacgggagaaatatcattgaagaagacatgactcacacctgcatgggtctcgggatgttgtgaagattgcgtagtgaacaagtcgatgaacgtaccaaagttcggactccaccttggatctatatcaaaa

SEQ ID NO: 54642 - DNA, 448 bp, Zea Mays
caaggtcgattgaccacagactgctgcacataaggttgcactttcaacaacacctcctctcccacctgaaactctcttggtatcctcaaatccgcataatgcttgaaccctttgttgtgccttagataaatgctccttaaacatagcactgtggagttccctctgctgcacccattctctagcagtctcatcttcatcatcttgaactgctagagcccatatgactaaagcctcatacccatacaatgccttgaaaggtgaacatcccaaagacacatgatgggaagtgttataccaaaactcagccaaagccaaccaaactttccatttttaggggtagcagatacaacacatctgagatacatctctaggctctggttaaccctcgcattttgcccatcaatttgaggctggtaagtagtacttagagcaaacttcacttccaaca

SEQ ID NO: 54643 - DNA, 472 bp, Zea Mays
gcatccttttgcgcctttaaagtcttgctcagaataagcccctgacagcaacaaatagaaaataaagagagtaaataatacagaaaatatatgaataatcaataaaaatataagagaaaagggagcacgaacctttaagttattatatgtcaggcaatccgtaaggtgacccttcggcatagcggataatccaagctctagcttcggatagcccatgttgtccatcatttcacgacaaacatcaatttctttgttgtctgggagatagtatagataatcatcttcatcattgcctccatatactagagaacctcgaggatacttcaagtctcgagcataatgctgaactttgacaatttgctccttggtcaacttttccccgaagcatggtgaatgatgtactcaaaatcttcaaatgacgttgctttgggtgccagcaaattttccttctccggcaacttaccagactcac

SEQ ID NO: 54644 - DNA, 528 bp, Zea Mays
taggtcacacccattgggttccatagcagtcgggtcacacccattggggtcagcttcagcaaatgcaggcatcggcacttcctcatcagcaggaacagaaggaccagcatcctgatccaagctagacactcgacgaacacgtctcttcttctttttcttcccctcagcaggagaagtaggctgattggctcggcgagaacgcttcgggcgaacactgtcagacttctgaatatccaaagcttcgctagcctctgggatgggcgctaccaccagtgtttcagcaggggctgcatcagaagaatcttcagctaacatatccagcatggcacttatctctgcatcactcggattcaaaggcacctcaaaatgaacctgcctctcgtcgtcaggaatttcttcaagtgaggcaaccaaagcactaacttcttcgggagagggtcgcactctaaggcccaaaccgctatcaccagcaggaggatttgacacaaaactggtaaaggccttggaaggaggcagattctaggccga

SEQ ID NO: 54645 - DNA, 531 bp, Zea Mays
ctggcaggtaagaaacttaagagcgacacatagctagataatcattctaaaaatacttgtaggataacaaaaaaagtaaatttacatcgaagcttcttttaaaacttcttcaaccacctccattggcattactgttgcaagtgcctattacatgcatgaatggataatcaaaatcataatctgtctaggcataaaaacatatgaccaccctagacaatggtgcagaaactatcatacacacctcagatgcttgcttcttacataaggacctctttagttctttctcaacaataggaaattcatcaactgcataggataatagctcttgtgaaaatgatcaaaacaaccaaacatttaaaatacaacagtatccatgggaggaagtatttaaatagcatgccttttactcctagtaattctgcttccttcagaatgcctgtcaactcctcaacaacattgtgatagtcactcgtagcataaagttttctgagtatgttcttagcacgactcacccaagagcaacaatttgag

SEQ ID NO: 54646 - DNA, 562 bp, Zea Mays
cccgggtgcgctagggctacgcacgtgccttctttcgtgcggctgctcgacttcttcctgttcctgacacctattgtcgaggatgtgccaggtgtcgcgaatgcctccgatgcgatgctttatgtggacatgtgtcaaagtagattgggaggcctgcgccctcttgctccaggatgaggttgtgtgtgtgccacggctctctgtgccggtgtgctgccgccaatcgacctcgacttgtaccacagctctctccaccggattgcggaggttccaatacatcgcctttgcctcgggctcgtctggatcaaggatcgatcggagcatcatggccgcggcgaccatgttttgcctgggttgaggaagtattgcccgccatcgctactttcagcgatctagtcgcatgtcttcctcgtctggggcttttctgtttttgaggcatctctgctcaatgttgtcgaaaacccagttcagcctctcggcgagtgtgttgaggtcctcctcctgctatcggagggtggcttcgtgggcgaggatgcacgcctaatgctggcgctagtattcc

SEQ ID NO: 54647 - DNA, 645 bp, Zea Mays
ggagagagagagagtatgggagatcgccctaggtattctgccatagtctaatacgcacgggagatcctctgtaaaggtctcgtagagaaccctaccatgcctcacagaaagaagtgaaagatcttgcaaacccaggcaagtgggtaccacgacttgtgggtaaagttgtacaacctctacaaagtgtcaaaaattggttaatgagacgtgctcatgatcaagaacaaccttgatgtcctcacatattagtgttttggttttcagaaaccttaaaatttcacaatgtgacttggtgatatgtccactgtgagatgttgtggatggccctcggtgagatgcagcggatggtcctccgcgagatgcaatggatggtccattatgggatgcaattgatgtgttttcaaaacttttgccatgagacttagcggatggttcattgtgaagtgcaatgaacgtgttttcaaaactttcaccctaagttgtgatggatggttcattgtgggatgcaatgaatggtctttcaaaagattactttacagcgacgaattgccatggacttggtggacaattcatcatgggaagcgatgaacgttgaagttactgcattataacggacctatatgcaacaaaatgctttacaaaaag

SEQ ID NO: 54648 - DNA, 810 bp, Zea Mays
caatattctctactttaaagaatatgtcatacaaataaggtttcaccccaacctcaataacttctggaatcatatcaatacttttgacatgaactttgaacctaaccatatctttggattccagcgagatcagatctatttcctcaactgccccaattgttgagccaagttcacatatagcctggtagttaagcagttcctcaggaacattttcagcaacaacccaagtagtatggagcctagacttggcttttgcttgagaagaccaaggtataacactgattttaattccaaatattttcatttttaattctggaaagttcacaacctcatctaatctttcttgagaaggaaactgcattaaaaaaccagaaggacatttggtggctttccaagttctaccccatggaaaatggaagctaaaatcctgttccagatcttcacacttaacctcaccctcaagcactttcaccaaacctaagaaactttttctaggttttttagcagcatttttagcaaactgagaagcataaaaccctaatccatcagccgccatacccacaattggcatagtaggtttgctttgcttaggccagacacatttagcagtgacatgagtttctttcctacaaatctcacaccaaagaggcttgaaacaatccctggcgtgatgcccttcatcgccacatttttggcaaaaaagacgacgaccaatatcaagatccatgcaggaattgccatgtatacatgacacgagatcgatccgcattgcatatcaaccgtacacataacacgtacgctcccagcaac

SEQ ID NO: 54649 - DNA, 574 bp, Zea Mays
ggacatcccctgtaatcagaatttctggctataaatactatttactcgttcacgatgacttctcgcactatttgtggacttttcccttacatcagaagtcggacgcctttcccaccctgtctcacttcttcgcttgggtctccactcagttcagtcacaccatccagagtatccagtgcgacaacgggcaggagttttataacaatacgtctcgtgacttctttctctcccacagtgtccaccttcgtatgtcatgcccctacacatcccctcagaacagtagggctgagcgcatgattcgcacagcgaacgatgtcatgcgctccctactctttcaggcctcccttcctgctcactactgggatgaggccctcaccactgccacctacctcctcaactgtctgcccaccaaggaggttgctcaccccactccttacttcgctctcttcggcacccacccctcctacgatcatccacgtgtcttcgggtgtgcttgctatcataatctcgcctccaccactcctcacaagttagcgccccgttccactcgctgtgtctttcttgggtactcccc

SEQ ID NO: 54650 - DNA, 391 bp, Zea Mays
ttcgtctcatacaaaagttcatgcatgttgcaaaaacaccttgtgcttagttccaatccttggcttctcacagcccaaataaacaatcccatcctgattatagcttcaggggtaagttgatgaagaaagatctgaaacgtcttcagtacttcaaccaagaatctgctcaacgggaaccgaagccctgctttcaaaaagcttcggtaaataaccacctcatttacttcaggagtaggagcagcgttatctcctccaaccctcacaatagtcatgtcgtggaagtatctccctctcatagcatcaacatgactttgtttgatagtcgattttccgaacatggtatggcttggtcgccacgatcgatcttcagaatcttcgtctccactctctg

SEQ ID NO: 54651 - DNA, 750 bp, Zea Mays
caaagttctcgtgcagcccatcttctctagcttttgtctgataatgaagctcatgtgcccggcagaagccttcggcaagcggttctgccccctggcttcggagaccctagatgtagacgctaagcctaacgatggcgttaggagttagctaatgaagataaatcccaaacttatccaaaacatccgcaatcatctcattcaaaggaaatcttaatcttgctttaaagaagcttttaaagactaccacctcatccttttctggcttcggagtaatttcatctccaccatagcgaatcagcttctttttggcttcactgaaatagcctaactttatcaacttaggcatatcatcttcggtaatagtggacctcccaaactccaggtggctgggtttagatggcagggcactgtaatcatcttcagattcaccttcctcagcatcaacctgctcagcttcagcagcaggtgcaccttcattagaaacatcctccggcactaccagccccgaccgtttcatcacttcggaaatcggagcggtttcagcagctttggcttcttctccgtcacgtgtaaccctggcagtggaacgtacccttgccatttgatgatgaattcctcacaatttttgatgaagttgttgactttttttaattttctcgaagctcttcctgttgtgacgaagcaaaaccaacagtggtgcttcggttgagtgcggtgaacaagcttcggctatggtcaaatttttggcag

SEQ ID NO: 54652 - DNA, 657 bp, Zea Mays
gttcttctcgtgaagtgttgctctaatgagtttgcataataaacttgggagcgacacaagatgattagaatgaaaatcaatgtaggagaacttagggaggaaggaggaaaataaatcgtaaagcatcaaacacaagagacacaacaatttgtttaccggagttcgattttcaaacaaaacatacttctctattggggtgtcccaaaggaccgagtttctttgaaccctctaaagtgattctaatagtcatctctcttttcccattctcaatgaatagatcgaagtctcagcaaggcgctccacaagcttggaggctcttgctagcctttacaattgatgggagtcaaaactcaaagtagatcatatgaacaacacacactctttgatatggctctctctctctcaagccactatcacttatcacacaaaggaactagctctatttgctcaattctctcttttgtggaacttggaaggctttgatcacttgtaagtgttgctctagtgtattagggttattgctcaactcttgtgtattgaatgagctggttggggtgtatttatagcctcaaccatccaaatagtcgttgggatcaaatccaaaatctgctctttctgtgggtgcaccagacctcctacagtacaggtctagtgcac

SEQ ID NO: 54653 - DNA, 712 bp, Zea Mays
aaaggaaaagactgaatagtattgggctggtttcagcccaagcggcccaatccagagggaaaagcgcgcccgcgcccgcgcgctggcgactttacagaagggtccctgtcttcttgaatatcccgacagagtccaaggcactatttatcacagtcgctgacaattacaaagacaccctcgcacttctatctattctcggtttgaagtccacgacggcgttcgcgcacatccgagctccggcgagcacctgtaccggccgactggggcaatgactagggtctctgagcggctgacacgcaattggatccatcccgaccatttccccaacccaatttcatctaaggcctattggtttgctcgggccacggtgaccgtgagcatcgcggcaagacagtcgcgttcccggcgaccagagggttcctaacccaattgtgtgggtcggcaagcatcatagtcataagagaaagcttaaacgagggagagaggagtatgaactgaccagaaagggggctggccacgatgaggttggttttgggtggcggaaacccgaattgggggaatccggaattagagctcgctggtggagggtttggggtacaggtaggtgcagaagctgcttgattacatgacagagctgagggcacggtcaatttatagagcccgcgagcggtggccgcgaatttgggcgacgacgcgcggcggccggaggaaa

SEQ ID NO: 54654 - DNA, 1579 bp, Zea Mays
ctcatgtctaacttatgtgacggggtgctgctattctcacctacagctatgtcatcaacaagcctactgctaggtacgtactcgtcaaagtcgcgatcgtgtatcgcactatctggaatgaagttatacaacgtcatgcatcctataattatcttcgattgcttcgtcaatgaaaatgaaggtaggctaagcaggattctccacttcatcttcaacaccccaaacggtcgctctatagcattcctcagcgacgagtgcgcatagttgaatacctctttcgcaccaattggttgcgtcccatgctgccattcagaaatgtggtactttaacatttggaaggtgctaggtaccccttcctgtaagggtacctggtgtcaacaagataatattttcctataatacaaatttatcaaggtcaacgacacagttacatacgtattgttagttgcaaatgaaacaaacgtaggttgttgccgtaccttcaggtggattgggcaacctatcgccgtaggtgacaagactatcctgcagtactcacgtatcgttcacagaaccaggccaaccagtcacgaccaatgtgtaccacatattgaagtcacaaatgaccatgacattctgtgaagcatatctgtgacgaccaatatatttgggttgctcaaacaatggtacagaggtcggaaagtggctaccatcgatagctccaatgcaatccttaaaatgtggccaaaatcgggactattgtagtctagggtgaatatcaaagaaatgcacatccttgggcttaatcacagcattggacatctagtatatggagttaagtacttcactaaatttctggctaattgtttccaatgagtgaccaaacttatttcttatttctcgaaaagattggggtccctcgcgcgcccacataaacatagcaagtgcctcctttgtacttactccacgactcgctacgaggccataattggtgaccaacgtttcatggagacggcggaacacaatacgacgcatgcgaaacatgtcgtagaaatcatcactactctccaaggtccgctcaacccattgtatacatgtttctgccatggctcttcttgaaaccccacttgacgagctcccacacatatccaaagcaactagaggaactatgaattcctcagtaatttcgtcatcattttggtcatcatcaggccgcaacatctgcaaacaaacacacaagtatacaaacaataataagtggcaacaataaccaatactcttgaatcagcagtacaccaaagcatgaactcacatattacaaacattgtatcatcataagtccaacatgtttgacacaaaaatgcagtgctcacacatacaaatgtttttattgcaaatagttctccaacggacaacaaactcaaactacgaacagttctgcaaaacttaaacgactcagttttaaacacacttaaacgacgaacaggactttgaccgacaacacaaaacagtgaccacccatgacaccgcaaagacagcttcacctccatcccaccaccaagagctaactggacttctcatgcttctcgttcgcccggtg

SEQ ID NO: 54655 - DNA, 484 bp, Zea Mays
atagatgtttccttctcagtacctgctgtctacttgtgcacagggataaaagtacaagatcaaacagttaaagtacgtaaccagtagttaacctagatagtagatactcatggaagaatgaaaactcgtgactagagttgatgccatgtgtgggagaaattacactaactaatgtttggcaccataatcaatgtcactgataactggatgagacatatgactctggctccattaaacagtgtagtggatcacaatgacatagtttggcagaacatgttttgatacgtgacttttcattagctagttttccctaagtcatgttggaaatatctgttgcattacaaaaatgtgagtagatgccaaataaaagccaagtgagagaaaataaaagagcaaccattcgataacagttgtaaccaatagtctgatttaccaaatggtgcaccaagtcttttggatctggttttcaacatgagttttaaag

SEQ ID NO: 54656 - DNA, 556 bp, Zea Mays
ctccagctctagccctggcagcgccgccgtcgcctatcgttgatagacttgctagtccatactactcccatctgccactgccactactctgctcttgtatacggtacattgttgtcttcttcaacagtagacgactcgacgccaagcttctgtgacaacgcgccaacgccagtgatggcacccaccggaggagcaccgtacaatgcgacctctagatctgtctcagcccctcgtctcttgttggagacgccttcacctcgtcttccattaattgcaggccaaactgcaccttcaggtatgtctaaatgtctcattccagttagcttttgttagactttatgattgcaatggaccctgagctttgctccatacactttaataggtagtgttgcggcatcaacttcaagtgcaaatccaatcgttagtcctgtggtgactgaaagtagtggcattgcacaagcatcacaaccaattctagtggattctgaactagttaatattaaagatgacgatgatgagcatggtgcaaagaggcaaaagaagtgcacatcagaag

SEQ ID NO: 54657 - DNA, 333 bp, Zea Mays
ccgccaggccatcggaataggaggaaggcgctgccgctgtgtactataaccagtcttctcattgccaaagcttcaataagaactctctctctacttccccaccttccccgtaatgaattggcccgtcgaagtcaagagccgagagacggattgttgagtctgttgctcgccggcgagttcaccacgattgccatggagcgacgccgcctaagcaccatcgagggaaggaagatgaacgtgagtcatctatctggagatagatggatgagattagaacgtagataactcttcacgttttaaaagcagcactgttgatcttgacgccaagggtct

SEQ ID NO: 54658 - DNA, 315 bp, Zea Mays
gctggacaccacttggccatgaacttcaatgcccctacagattagacttgtgcttggtgaccacatttggacttcctccaattcagccgatcttcccctttgtcgtggtatattcattgcgtatatgttgcaggtctcactgcttcagaaaatctcagagaatccaggcggtacacccaatgggtgtgcccaacgggtgccagcccagtaaaatatgtccatcgcgtaatcctaaaatagtaacttgatacgatggagaggtgtaatactctgcctaagcagttgacgttgaggaacagaggcttgactgctgaa

SEQ ID NO: 54659 - DNA, 362 bp, Zea Mays
tgaggacctactccttccacacaacattgacgtgatgcacactgaaaagaatgttgccgaggcactttgggcaacaattatggacattcctgataagtcaaaggataacgtaaaggcaagagtggatctgaccaaaccaagagatgaagccgcctagtggtggaaagacatggagaaggcctaaggccgatttcgtcctaagcagggcccagaggaaggaattacttcagtggatcaatatgttgatgttctctgatgggtatgcagctaacctgagtagggggggtcaacttatctactctgcgagtcttagagatgaagagtcttgacttccacatatggattgaatggattcttcctgc

SEQ ID NO: 54660 - DNA, 427 bp, Zea Mays
ggttgcttgtcatgggagtgctttatgcactttatcttgctttactctaatatttctcaatacggtagcaagctcctttattaatagctgatgagctcaaatttgtttaagctttctcttctttttcatttaccggtatattcatatcctgaaggcacctcgctagcaggctgctctccaattactagctctcaactagttccccattatttcgttggggtgttttgtgaatggactatggtaaggtctcttatccatttttctccaagcatccctgggtacttgagattagagtaactagatttcctatccttttctttgaggcctcgaaataggatgaggaatatcattcatggtacttaagtcctctctagtgcactaaacaatagtgcgacttgatcacgctctacaaatcacaaaacaaaat

SEQ ID NO: 54661 - DNA, 830 bp, Zea Mays
gcaaggacaaaatctgatcgggaacaggagcaccacaagacctcaattgagccgacacagagctcagaacattctgcaaacacaaaagttagcaaaagagactgtttgtcgacataagtaacgcagggcaaagatcagctcacctgaaggttagaaaggaacaaggaaatcctagagccagaggcatcgacgtgctatatgacggtggagtatcggcagaagcaatattgagagcagactcgagcctcaaaggaggattagagctcatgcccaaggcatcactctgggagacctcagctctgacagcagacagcggattcctagcatctgggtcactgacctctaaagtgatcgtaccgacaagagcagtaggacttgtcatcacgggttcctcagattgaaccagtggcgatccggcatgaacgtccatggaagaagccgaagaggagccgagctcggcacccttgggggctaggtcatcctcagcagcaccctcaggggctgggtaatccttagcggcacccttggaagctgaagcaccctcgatcatacccatagaagctaggtaaccccagcctgtaacctcaggaacagatgtgttcccatgaactgggccgcccttaaacgtcgaagaagcgtgagaaaccgttcgggttatttcttgcccgactggattacttgctgaggggatgacattcgagacctctgtacggatgtcagcaccttcagtctcaggaagctccaataaaagatcctcagggataatctcctccagtgcatggtcaatggcagacattatcaatctctggagactaactagtcctgataga

SEQ ID NO: 54662 - DNA, 817 bp, Zea Mays
ttcagtttcttgtgtcagaacagccccaatgaccttatcttcagctgcaatgtataatctgaatggtactcctgcttgtggtgcttttaatacgggagccgaagacaagtattttttaatgagatcaaatgcttcctgctgctctgcccccaagcgaattcggcatcattcttaagccgaaggataggggtgaaggcatcaatcttctgggctaagttagagataaaccttcgtaaataattcaccttgctgagaaacttctgcacttcgaccttacaggtcggaggtctcacattccgaatagacttgattcggtcagggtctatctctataccatattcatggatgacaaatcctaaaaacttaccagtcgacactccaaaagcatatttacgcgggttcatcttcaaaccataccgacgcattttatcaaaggctttgcgcaaatcagctacatgagaactaaactcagccgatttgactacaatatcatcaatgtagacttccatagtgtttcccaatagctcatggaagatcaaattcatagccctctgataagtagcaccagcatttttcagaccaaatgtcatgaccacccactcaaataaaccaatgaagcctggacatataaaggccgttttagacgcatcttctttggccataaaaatctgattatatccggcattaccatcaagaaagctaataattctatttcctgatgcattattgattaatgtgtcggctatgggcataggatactcatctttaggagttgctctatttaaattacgaaaatcaatgcatactctaagcttac

SEQ ID NO: 54663 - DNA, 683 bp, Zea Mays
atttgaacttgggctatatgtgacatttctcaaactttggatctaaattgtgaacaatccattaaggtttggaccatgacctctgtaacaaagttgtaggccccttatattagtggacaaatcccttggaaggagttagacccggtattgttcaaaaattgcggtaaaatgcccccaaagttgggctgtcagacaagctgagatggggttcatactggaacagaaactgacaaagatccaaggttcgctgaaccttgccatcggtgatcgtgcgccgtgatccgagctcgccgcagagattcgcaccaaatttggagtacatgcccaaggtaaaagatgtttagggggaggaacataggcacttggtcggcttatccatgacatccacttgcactgtggcctgccatgctgtcgacactggggatcgccatccatctctgtcgcgccacataatagtgtatttcaccatgtcgttttaagttgtggcaagaagccagttaccaccttgagccattactcctcgcgcgccatggtgaatgggcctagtgacaaaatcttgccgccatcgtgggtactctcatcccaaatctgcaaagcacgcgatcggtccctttaaattaagtgttatcctcgttgcgcctctctgttacaaattcattccaccctcaatcagcccctctcgt

SEQ ID NO: 54664 - DNA, 811 bp, Zea Mays
actgcaacatgtcaggaggaattccaatgaactgaacccaaactttcttgagttccgacttggcaagagacttccccgatgcttcttcaattttcatcactgcattgtatctggtatgcaccgctccccattctaacatatgagccagatcatcatgagacgggaaaaatgtcctgaacaagttaggaccgactttcacaacctcccaattccacttgctggagaccagcctttccaattcagaaatgatctgagcctcagaaagcgtgccatcagagaccctcacagaagcagcctgagcttcgaccttctgaatctgctgatgaacgaaagggatgtagaaaaaacccaaaccatccactgcgtaaccacacgttaatgcagatggtttatctccccgaaactgcgaacacctctcagtattatgtgcctcagatcgacatatgtcacaatagagtttggctgtgcaaaccttcatgacatgccccttagtaaggcacctgtagtagtatggtgtcttgccctccttcgctgctggtttctctgtcccaggaggcttgactacaagatgctcatccgacactccttttcctttatcctctcaagaaaattgtgactgaccaggcaccatggaagcagcagccgaggtaatatgaggcctcggtgggttaatagcctggctcaacagtgccactgcttgagccaaaaggtcagtggtgggagcagctaccccagccaatttctgcgcatccgagactgatggcaaaaagaccggctgattgaggcccctgccaccctggatactgccccc

SEQ ID NO: 54665 - DNA, 562 bp, Zea Mays
gttggcaagagctaattaaatatgtgcaaagccagccagactgcttgtggttgcattggatgatatgccacccgctatagcacgaatgcatgcatgatggagcttctctaaccagcagagtttctggccgagggctgagcaggtatggagctgggatagtagtaacgtgcagtgctccagcgctttccgaaagctgtacgtgtcatcgatctgttggtgcacgcacacacacacgtacgtacgtagaaatgcatgacaagctagccaacagtcttggcaactccattggccaccacgaggttctcggttgttgtgcctaggctgtacatagagttctctctactctcacaatcaaccttacaaatattttagaaagtcagcaaaaagtaggcaatgtgctcaaatcttgaataagcaattaatgtattttagtttgaatgcacccacttttaagttagatctgctgctattgtttcggacaggataaggaccaacaaaagtgattaattccctgttgccgggcccacacactagtccccgtcggtatttattcttgtgggta

SEQ ID NO: 54666 - DNA, 816 bp, Zea Mays
gtacgctcgactgcgagggtgacccgtgaaggagaagagactgaggctaccgagacagctccgatttccgaagtcatgagataatcgggcttagttgtgacggagggagccattgaagaaggtgcacctgctgccgaaactgaacaagctgatgttgaggaagaaaatgttgatgaagaagaggaggattatagcattctgatcccaccaaaacccagccacttggattttgaaaaatctactgtgtatgaaactgacatgcccatgatgatgaagctaggctactttggagaaactaaaaagaagcttattcgtttcgccggagaagaaaccactccaaagccaaaggacgacgaagtagtggtttacaaaagctttttcagggcaggattacggtttcccttgaatgagatgattggagaagttttggataattttgagatttttcttcatcagctgactcctaacgccatcgttaggctcagcatttccatttgggccctttgaagccaagggatggagccaaatgctgaagcttttttgccgagtgcatgagctgcattaccaaacgaagtccagagaagatgggctacatgaaaattttggttgttataacttcgcgtatcgcaaggatacgaaggctccggtcctcagctatcacaccaagtggccaactggctggaagagcgagtggttttatattaaggctgatgagaagaaaagagggaaacttatgacgatggtgctgagcccgctatctttaagcttcgggatgaccagacccttatgcaacatgaagccagggtcagcatgtcc

SEQ ID NO: 54667 - DNA, 411 bp, Zea Mays
cataccttactatattgtacacatataaatttctatatatattagggcctcccgttgagttcgatctggagccccatattcttggagacggccctaatatatatggtagttgcaaacacggcgagtgctacttgctagtattcgtatgaaaatcagaatatgcaaggatattcacctagagtcaagtagttgtagacacgtacaacctaaatatggtagttgctacttgctagtattcatatgaatatggtagttgctacttgctagtattcatatgaatatggtagttgcagttgcagcgtatgaatatagcaattgtagttgcagcgtatgaatatggtagttgcagctctctatacactgtgatatgatacaatggctagagatggtgaagcttcacctccacagaag

SEQ ID NO: 54668 - DNA, 504 bp, Zea Mays
gaaaactctatatcacgattaggtggcatacctggtaattcttccagaaacacgtttgggtattcacacactattctgatgtgttccaaagatttctcttccaacagatttaccattgcctctgctgttattggcatactgacattgacttcaattctttctccttgcagactggttaatgtaaccatcctcttggcacaagatattactccatcatacttggtcaaatagtctattccaagtatcacatcgattccactcaattccaaaattatcagctctactagaaagcttaggcctctaatttcaatcttagtctgaggacatgagtgagtggctctaaattcacctctcggtgatcgaattaatagtttcttcttcaagggatagtttggtatattatgtttttccacaaatgactttgttacgaaggagtgagatgctctagaatcaaataaaactgatgtaggtatggagttaataagaaacataccatacaccatg

SEQ ID NO: 54669 - DNA, 320 bp, Zea Mays
tagtataatatgtaattgtgattgaactatctcctcatgtgtgttctctgggatgtatgcttgtagtagaatgatgtggatgattgtaaaagccgattaagtaaatattccctattgaagtaagtttgtctgcatgacgtttaggagtcacagtgaatgtacgcgtgcctaagtagtttaataatataataactaagaaaggataaaggtgaacgtagtaaatgcgtgtacttgtgatgtcgtagtcgtgttgcgtaaataaataaaatgttgtcgtctttttattggtgttaatgtgaacaccgataacgtgtagatat

SEQ ID NO: 54670 - DNA, 570 bp, Zea Mays
tatgatccctattttataccgtctattgactactgtagaccgtctaaagatgaaaccatctaattgcatgtctgaatgtttgcgtggctaagaaattcatgtctccttttgctctgcttctgtagatatagagttgggacttggatgcataaactagtggacccttaactcgaatttatttcgctgctttgcaacgctatccagctacatttttctgcatattctctttctgagaaagtgggtggagcgcttttgcgcttctcggatgtggatgtatcgctcccatccccactttcaccctctgcaacttgccaatccacctcccaccatggaccccatcaaacttgcttttgtctcatacctactgttcaactctttcagaaacgtaaactaaggtcctgtctgctaatagttagctctttgattcaaacaagtgtacttaaatagtttagcaaattattgaatatctaactaaaaacaactttaaaagactttatatatccttttaaagactatccaattagtaataaaatattttggtaaaattattctttatcctttttaaatgag

SEQ ID NO: 54671 - DNA, 660 bp, Zea Mays
tcacaaagcactggatactaagttgctccatagttcggcctatcatcctcaaaccagtgggtagactgagtgggtgaatcaaatacttgaagacatgctacgggcttgtgctttggaattcccacagaaatgggatgattgtttaccattagcggagttctcatacaataacagctatcaagaaagcatcgagatggcaccatttgaagctttgtatggtcgacggtgtcgcactctgttaaactggtctgaacccgatgaaaggagtttcttcaggccagacatggtaaaagaggccgaagaaaaggttcaacgaataattcataatttgaagaaagctcaagctcgttagaaaagttatgtagacaaacgacgaatgcccttgtattttttggtgggggattatgtctatctgaaggtctccccaatgaagggtgtaacacgttttgggtaaaagggaagcttgcacctcgatacattggtcctttccttgtccttgaacaatgcgggccagtggcataccgacttcaactaaccgaaaccttgtctactatacataatgtgttccacatgtctcaactaaagaaatgtctccggattcccgatcgaaccattgaagtaacagatgtttccttagagccagacttgacctattcagaa

SEQ ID NO: 54672 - DNA, 537 bp, Zea Mays
gttggaacaaggcgctccacgacgacctcgcggttcctcggacgacggggtggagaacgaccgcggcgctgcggcgtgcgcgagcgctcaggaggaagcgacatgcctctgataccacatgtcggatctgacctggacaactaccggagttgagaacgaagctctctactcactatcagctcacacacagttgtaaaactggaaccaagagagacagagtttttgtgccgcgagagcttcacgacgttttctgtttcttctatttattacagtagaagtggaacgtacatgcagtaaaataagctgaccgagtaagccgcgcgacgtgctcgagtgcgcgtccatccccacgccgcacgctgcgcgagttctccgttgtggataacaaactggacctattctacaggacatcggcctccacaaatcggagctcgacccttgactgataatatagactaactgaactaactaactcaaatgcagacatgtaacttaactgaatatgcaatatgcagtaactgaactaactggagctgg

SEQ ID NO: 54673 - DNA, 337 bp, Zea Mays
cgttgcttcacgcccggcaagagagaagccattcgtgctgagctggctcgcttggtcgcggccggattcattagagaggtgttacatcctgagtggttagctaatcctgttcttgtactcaaaaagaataaagtggattggcgcatgtgcgtcgactatacggatctcaacaaacactgtctgaaggatcccttcgggcttcctaggatagaccaggtggtggattcaaccgccggatgttctatgttgtctttcttggattgctactctgggtatcatcagattagcttagcaaaagaagacgagaaaaaaacagcattcatcaccccgttcggag

SEQ ID NO: 54674 - DNA, 667 bp, Zea Mays
attctgatttaagtccgttgttgcctctaaggtgagacttgggcacttaaagctagaataatctagacggttccgccacatcctcttgccttcttcacagaaatcctgaggttcctcttcgaacggatcctgattttcaactagagttccatgaactaaggaacgaaggtgctcaatattccatgaattcccaactagagttccatccatccgagatagcctataggattctggacaggtaacttctgtgactgtacatggcccttcccaaggaggggatagtttgtgatgtctttctccacatcggtgacatgatgtagggtttcgcttttttcgacgatgcaggtaatagatctaaagtgaaatgtttcacctagggcaaagttgacggcattggggaagaggatggccatggagttaaatggtgtcaaagttgcctcccctatctgacgcacggctatcggtgtttagcaccggcaatgccctacatggtatcccacatagtgcttttgtggttggcgagatcgacaattagctcgatggttcatgcctaagcacaatgggacacaatataggttcgggtcgcagagatgtgcaataccctacgttttatgtgtttctatgatggatctgctcttgagtttaagattacaaagggtgtggatac

SEQ ID NO: 54675 - DNA, 829 bp, Zea Mays
aaaataattgagcaccatgtgtgctactatcatatataggaacatgataagcttcttaggggtccaagagtcgaaaataataaaccacaatgaggggattatagtgaacttacatcatgatatcatcctgaactgagttgaagcgtcgtgatgttgaaatgagcataccttaaaaatgaatttaataaaacatcactttgtagggtgtatatattccatgaattgaaattttgatgtagcagaccttatgggtagtagctagtctattaggaaaaaacatcatgacgttagcccatacaacagacattttggagagatacaagtcacataaacagactattaaaaatgcagtgcattgtagcatagcagctgtccatgcctatcgtccaagattttagaaccaacgatcatttcgaataggaaataacaatataaacatcaaattttcatgaggtctgtcaggttgaccgtgttgtgaggagcagcatgcccaatagtgcctaaactgcaatagcatatggttccggttagtcaatgaagtttagccaatccaaaactcccaatgattgcttcagataattcatcaagcaaaatctgagatacagtgccttcttattgcagtggtgtttgcaaaaacaaacattaactattactacactttgttcagtaaaaaacgttcaaataggatacaagcaacatatataaaaaggttttaaaatacaatatgtgcttacaacgtgctttgctagcctgcatcagaaagtgaacaccgacaactatctcataatcatattgcaacagttctaacagaatatacacaacaaaatta

SEQ ID NO: 54676 - DNA, 1444 bp, Zea Mays
ctttgaaccatttattccatcttactatcaatgttatcagatcatatgattgaggctagcagtaagatcaccgatcagaagagtaatcatcgaggttagaaaaagcgttaggcagtttctaggcgatgacccaccgcctagagcctaagcacgcctaggtgttttgtaggcgtttttgccaaatttgcattcaacatgtatagctgaataaattatatatataaagagagaaggaccaatagacataccttggttgatacaaaagtgatattcctacttagttgatacaaaagtgatgttcctacaagtggacaacagaccatatcaacaatataaatgatacaaaaatagggaaatagggaattgcaagttaggtacttatctgaatgatctcatccttctcccatccatcagatattatcaccagcaaacgatagccatttgaaatcacaatcatgtacggatagcagcaaagaaaattaaatggatagtagactagcagtagacctgatcaacccgatccgacccacccgaaaaaacccgacccgaccaatgcgacgggcgggtacagaccataatttttgacccgcaacaatcaacgcgccgtgttttttgacccaaaacccgacccaaccatacccgaaaaaacccaacccaaagccaaaaaacccaaccctacccgaaaaaacccgacccgacgcgcccaatcaggaggcacgggccaacacgacccggcccgacgctatgcacgggtcgggcgcgggccatgccaaacgacccacgacccgaccttgacccgacccgaaccaacgtttgaacgggtctaactagcagtactgtacaacacatgattcagttctcacaacacagaatacaggtacataacaggcatgctggagtcctaagttcataagttaaaagataagacatgacatgacatgacatgataaagccccactaccatatcctcttcaatagggttccatatggtcatcttcatcaaacttccttcagagtcaaattcttctccttcgtaaagctgtttcactcttgtacttctacgcaactaagttgttcttctgcttccattgctgtcacgacattgtcgtatcacgtggccgccgccgccgaagagcagggcttgagactccgatgaactcaccttgccgctccttcacgaggaagacgactggaaactctgttctcaatatttttctttgattcctcatctcatgtttaggctgtcctttttgtatcaactcttgcatctcgtgttctggctgtcctttcttcgacgagtccgacattcccttctctgtctcccctttgttgcctcctcctctgagtacgacaccctcctcgaggcggactctgtggtcccccttactccctcgtttcctgcacaccccattgtgccatgtgcggctccgctaccccccgtgtt

SEQ ID NO: 54677 - DNA, 325 bp, Zea Mays
ttgtgcttgtgtaaccatttatgttattcttgctggctgctgacacctcctgccttgcttggtaagaacatgtaagaacttgaatggacaagtgtgagtgaacatatagtgtgccaccacctatttcctttagttggtacgcaacttcttgtgactttgtttgttgcaagctaaccatggcaggtacagaaagtgaggatgaggatggtggaggtctgcttacacctcacaccaaaggcattgtacaacattttcaaaggcaagtgagggagtacacctttggaattgataatgatttgcaggtgataaatgagaagattgggaa

SEQ ID NO: 54678 - DNA, 494 bp, Zea Mays
cctaggttgtgggcggggtcatgaaggctcacattgaatattttgatgatagtatgttgtcgacattggtgggatgttcacatcattaaaggatggggcaaggctctaacacatggtgaggcatatgtcgagctgtaccatcactaggatgagggagccaatggggaacatgttattccctgtcagtcgaatgaccccctaggactaaccttggggccatcataggggatgggaggcctctactagtgagggagctaacgaggaaggaaagaagacaacttatgtgaaggatgtgaacccctaaaccaccaaagcttccatagcctccagtgtcaacaaaggtggagtgcagtgaaagagtaggccaagcaaaagcggcgatagttccacccccaaactagggatggcaatagggcgagtgggggtggggaccgtcgttccctgaaactcattccccatccctgccccatttagcttaatggggacaaactcat

SEQ ID NO: 54679 - DNA, 271 bp, Zea Mays
gaattttctgttgaataggtcactgcatcttcagggacttcatgcaacatccaaatatggtttccgtcatgctgaagttatttcttttgctccaatttggcaacttcaaattcatgcttacgatagctctgatgttccactttattatctccttttgtgtagcttgttttggttgtcccttgatctcttgatatggtgacttgtgaagactttggatgatcaaaatgtgtgaggattaggctttggtcaatttgattgtgccttcctgaga

SEQ ID NO: 54680 - DNA, 461 bp, Zea Mays
tggtcttgctgtcgtttctgctttttgttatactgtgctggctgcgcccttaggcggttcctgcgatagacttcggatttttgcgcgtttgtgcttggtccgactgcaccttttaggcgacttctgcgcggatagtcttcgcgatagacttcgttttttgcgcacttgttgtgctgagtccggctgcacccttaggcgacttctgcgcggatagtcttcgcgatagacttcgttttttgcgcacttgttgtgctgaatccggctgcacccttaggcgacttctgcgcggattggtcgcacgcgagggtggctagcgcttagcctcgcggtgacttcgaattggtcgaatgccgaagaccgttgttgcggtcttttttcgacacatgcttttgcgggggattttttctcacatatattacatggctccgcctcgttaaaaacctcaccccccgggaggaaaa

SEQ ID NO: 54681 - DNA, 565 bp, Zea Mays
acagaaacttctatcaacatcatgaagaacaacaaaaggaatagaaaaatgtttggatacatgagtagtccacctcaaccacaagcaaaaccccaaaacacatggatacccaaatagaagaatcaagccagactcagctatatgagatacagacacccaatcatcccttatcacctattggtcaagcaaagttgactcgcaaagaactaaaaatgcaagacgtgcttgctactactgctaggatgaaggacatataatccgctgatgccacaagaagtgtctagaccgacttataaaaaaggtcatgaagcaagacccaaatagcatcgagacaacgacccaagcaataatttagaagaccaaccagtttataagtacgatgataaaggtcacctgattagtatacattgcaaaatgaagaaggaatgagttcagtatggaagaatccattaacctataaataaccatgtgacacctttgttttcttgctagccttccctaatctcgaggacaagattctttttgggggtagattttgtaacaccctaaatctatcaattgaaac

SEQ ID NO: 54682 - DNA, 299 bp, Zea Mays
caaaacatacacaccttcaggttgttgtaagcaagactgtccgcaagttgatccttcaacattgcagataagccgagttcaagcttcggatagtctatgttgtccgccatttcccggtagacatttatctccttattgtctggcagaaaataaaggaaatcatcttcatcatcgccaccatacaccaaggaccctcgggggtacttcagatccctggtataatgttgcgcttcggcaacctgcctttctgatagctgctttcccgaagcatgtcgaacaatgaattccagctctctagc

SEQ ID NO: 54683 - DNA, 403 bp, Zea Mays
tcgtttctttcgggtgccaaaggctgtagtcatcaattgaccctttttcttggtgtaattgccaaggatttaattgcacattttctctattatttccagccattcagcacaaggaccggagaaagtattgtggaatttaaagtgatatggcagtcttacaagttcatacttcttcccttcatattttcttttcagcattccccatccacctgatgttggaaaagttttgttcgccaggtactcttgcactaagtcccgagtgttgatgtgctcagccacaactctgaactaaacttcagctagctggcaaggggagctgaggtgcatattgcacaatggccttgtcatgttgaagcttaactttaagggactcatcaccatgctcatgagtttctcccttttc

SEQ ID NO: 54684 - DNA, 395 bp, Zea Mays
cggaactgtgtaaggtttgcaatgagtttcctaatggctaacttgttgaggatgttactaactagtgcttgaatcacctaagacagaatctgaacaacctgtttaaatactaatagataaaaagcaaaccgacacagcagtaaagcagtagagagtcatgttcccagaatggtttgttcagataacaaccacaagtagtgttttgttgctttatccaacactttgatgttatgcagtgcaagccagcgcatggatcaaactttgctttatctttgcttacataaggatgcccttgtcaggtgtcagcacagatcccattagtactttggaggcaaagtcatggggatgctgtgatgtagctatgtggcagactctataatctttcagtacagtac

SEQ ID NO: 54685 - DNA, 473 bp, Zea Mays
gtctagttaatatgtgttgatatgcaatgaaccattcaataataatgaaaaaaataaggaatgttagacctttttctagcatggttaattcttcaaggttttcttcaatatcaataggtattgaccacctcaaccaatcttgtgcgcatactagagcttcaagcatgaatggagtaagggagctatggaagtcatctaaaatgcgcccacttgtgctaaatgctgactctgatgctacagttgatattggtatagcaagcacatcacgagccatgcgagctagtattggaaatctctgctcagatgccttccaccatactaggagatcaagcttcatttctgtgtcttcagtttcttcagaaaggtatttgtcaagttcagacttagtgttgttgcttgaaccaatgcctttgcctagcctcattttcttagcaacaatttccttcagcttccctcctctacctctaccttcc

SEQ ID NO: 54686 - DNA, 349 bp, Zea Mays
actgaagtgtcacgacttggtaagctactgtcttcagaggattctgtcatcaaggagttgcgcgcctcaaagaaatttgtcatgcaagagctaaaagcaatgtgcgataaagccatggacaaggttgtccacactgggcgaatcctgacgagaaggcctggtgttgtggtgcctgaggacgttctcgctgcacctgctggcatgagcaaaccttcttcctctgctactcctcctgacgaggcttcctgcaaaaatgctcctgcatagtgattcgttcaaatgagaaaatacttttcatttagttagtattctttagcaagctagtgtatcatggatttcatgtgcgtgt

SEQ ID NO: 54687 - DNA, 518 bp, Zea Mays
gccatgtgtgggcgatcagctttgtgaattgcgaggggttgcccgagcgggaagagaacttctggcaggcttcgcacgacctcgtgactcgatttgcggcgcagataatagcgggccagtagaaaccttgacggatcaccttggcagcaagggccctaggccccgagtgagagccgcaagtgccgctatggacttcgcgcaggatctggatgccttcggtttcggtgacacatttgagcatgggttgactgatccctttcttgtatagctggccctcgataagtgtgaaatcccgacttcagtgtttgaggcgcttggcctcgttgacatcacctggatggtagtatccttgcaagaatagggttattggggccctccagtcttcagccatgatgagattgacaatgcaatggccctcggccttggtggctatttgtaggccctctgggttgcggacggctgaagtgccaatgacgtggtagaatacgttggagggcagggctttgcctctggctgct

SEQ ID NO: 54688 - DNA, 316 bp, Zea Mays
gagaaggtggtgacaaaggttgcacataaacagcttcggtacatgcctctcactcctagagtgaaatgtttgtttctctcgaggaagaccgctatgcacatgaggtggcataaagattgtacggacagacaagatgggttaatggtgcacccgtcagatggtgatgcatggaaggctcttgacaaatttgatccagattttgccagcgatgcaaaaaacgttcgtatcggcttggcaactaatggtttcacgccgttcaatatgaccgctgcatcgtattcatgttggcctatcattgccataccatacaaccttc

SEQ ID NO: 54689 - DNA, 446 bp, Zea Mays
acgtcatgcccctcatgtgtaacagtctgtcaaggtaatagacgacgacagagaggcaccaaagggtattcgggtgaagaagcaaagcaccagagtatttgggctagattggacccagcaatgggggtacactgttggcgagcgtatgtaactgaggccatgtgggagttggagacttagcttggggaaggagttggcgctggttgtgtctagacggtgacgtcatgtgtgagtgaatcccttctgttcgtcgagaattctagtaaaactctataacttcgtgagagaaggatagtttcaggggcggggctcgctatcatcaccatctatctctcacaattggtattagattcttgttgcgatcctagcggatccatctgagtatactcttcgcccttaaaatcaggcaagggggcaaaacaaatcgacaacatggagaagagttt

SEQ ID NO: 54690 - DNA, 780 bp, Zea Mays
agctttaccagagtggtccggccacggagcgcggagacttgtgctcgccggtgacagagaaaaggggaaaatgacgttgcgacggctctggatgaaattgggaggcgagattggggctacacggccgtaaggaactctagtttcaccgtgcacactcaatttgaagagaggtggagaaggccgtgcgaattttgggtttttctcaagcttgcggttgaggctgtgagtgcctcgccgtggtccatgccgctatttaaagccacgacggaccgactagcgatcagcggccgcggatagcattgctagcgcatgttcaccacgtagaagagaggtacagtgagggaagagcagggtatggatgacaccacggtggaggtgaccgagccacggagaccgtcggtgagataacaccgaccacatgcggctgggttcgcggagtcgtgccacgtccaaggttatccttctcgcgatcaaatccacaccgtttcatccgagctcatccaattccacagtgcggtagatcttttccccctgcgttcttcagatatttcagtgcacgggatcttcagagttcgcctgaaccgacctcctttctctcccctttctctggattcttgctaaggacagagcaaccttccttaataaaatttattcactaaacatcagtctacaaatttactataagatacttgggtcaaaaccgagcgaattcaaagatatggcgcgcccaaactggtcccatatcactgtgaccatttctggttgtagttttagtttcag

SEQ ID NO: 54691 - DNA, 569 bp, Zea Mays
ggaaaagtcaggggctctagcgtaagttttctaagactcagagcatagtgcaattggacggtgagtttattcttgaaaagtaaagggtttctttagcaaaaaggccaacgcaaaggggtatcagtggttttcggccgtgagatcaacagcggacggcttggattagatccatcccaccgcgaaccggtacgcaaccgcagccacgagatcagatatcgacggtttggatttaaaacgctaggatcacatcgcggctgtccatttacgatctaacggaccagatcgagacatggtgaaagggtacggacggactaatcacagccgctgaattaagatccaacgccagggagatctcccccaacctcccgacggcaaccgagcagaggcgctccggtcacggcggagctctcaccggcgccacaaaaccataccgcttcggcgacccgctatggctaagaatgtatgcaaaatgaaattaagggctaggcgaccacggtggggactcacttgtggtcgggcgaggtgaggtggcgcccgtcaacggagaagggcggaggcaggggcacgat

SEQ ID NO: 54692 - DNA, 585 bp, Zea Mays
aatgactcgagaggttccgtcacaggttttatgttaaaaataatctgattgaaagggacgatattaaggaaattatacagcaccccatctggtctcgcttcagcctccgaaggccgaaggtggctattgaaagtgacatcgaagcatgtcagaaggcttttagcaatgtttgtgctttcattggcacaatggacataattcaagagcacatagcctacagagtgtggccacttgtggagagttgggatatgccgaaggagactactgctgaatctagtgaaggtggactagttcgattaaagtaaaccttcagattcagggaccggtttgatgagtcaaatgacgattgcctgaaaagtattgaggctattagtgatgagctgcttgggacatattccagaaccgaagatgatgccttgtccgcagcctttgggggtcgaggcaagaaaagattgaacagggtgtttgatgcaattgacttcatataccctgattatcactacccattgcgaaggcaaggaaagaagagaaaaactgccgcttcggccaccactgctgtgctgaagggcaagaaaatgaaggttc

SEQ ID NO: 54693 - DNA, 627 bp, Zea Mays
cgagaccctacctcaccggagcagcgggatcaccctcgccgaacttcggccacccgccaccgcgcgtagaccgggctaccaggtacaccattgtcaaattgcttacgcctacgacttccctgacctcccatgaagctccccaactcactggattgagctattccactgtggttaggccgggatcctcgtcgccgatgagcttcccctcctgcgcacgaggttcgaccaactccggccatccccgacgacgacctacacaccgatgtgaccgctgtgacctcccctacatcatcgaccatgtaacaccccaggtgttacccaaagccctggccaagggagcacacttgtgtcctactcacactatatgctagaatggaaagtgaaggaactcaaagttttagaggcatggttaagataagcattaatcataacaagaaagaaaccctaaccatgggagtaaaggagaaagagtgggcaattgaccaaaacataaaaagggacctttaccaaagataaagtgtattagtaaatctacaaaatttattaagagaagtattacaaaaaggcccaacaaaaacctcaaaacaattcaccaagtgggggagcacactagagccattcaaaaat

SEQ ID NO: 54694 - DNA, 610 bp, Zea Mays
aactccaacatcctccaaaggaggtaggttctgttatttattttccattgcaactgattttcagatccagtgcaatcggtatcattgacctattgatcacattaccgcctataataaatacaatagtatgtttatatgcttacaccattgtgcgtcggccagggctagggccacacatgagtgtcacggtggccaagaccgatggcacacgaccataaaaattacagtcacatatgcgagctggaagaagacatcgagggagaaactgaaagaaaaattaaattgtaatatgacatgtgggtcttatatatttggagagattgttggtgatctgctagagaatattccccaatagtctgaaaaatagtattggtgatcatcaatattgtcctatcgcggatgaagtattggtgagctgttgaagatgctcttcccccttacggtggtgattgtctaatttgttagtacatgtggtcaaagctagctatagagaatatttttggataaaagcaatttcattgcaataccatgatggtacggttgatagattcgccaaaatgaaaaatgatattagttatcttctcatcctttcattgtttgggcctcattg

SEQ ID NO: 54695 - DNA, 1166 bp, Zea Mays
ggtcgttgatgcaattttccttttcgtcccctgctttcgagccagaaaacagtagtcaggatagacaaaaccaataacatcaaatactctatttagccttttcttgccacagacaccaaaagcaatgttcatggcttcatcttcagctttcgtgtatgcccccagcaattcatatgtagtcacctcagtggcctcaaccattcgtcatctagctccccaaactggcttctatagcggtatgtatacttcaaataaactagaccaccttcacttgaactattagtggtctcctttgacatttccaattcattaacaaggggccataccttaaaatctatgtcctcttagaccaagcctctggtgctaatgtaactgaaaatagtgttgaacgccaccaggcaggcttgagccttatcattgttcataatcgagggccttcgaatgccgaagcgtgattgtattggacgctgaattatatctttcacatcctccctctcaatcaaatcattcttaacataaaaccattgcctcatccaagatcctagccatttcttatgaaacattggcacatcgtgtctcacattagaacggtatacgaaggaataacagccaaagttgttgtgatactgttccttccccattgcctttgtctggtaagataatttgtgtatattgcagaagcagtcgacatctggttctagcccctaactcctcattgcccaaataaaaacccaaattttaattaaggcttcgggggtaagctgatgaaggtatatctcaaaccttttaagcacttagaccagcatcttatgtagaggaaaccgaagaccagccttcataaagcccttgaaaactaccactttgtcagcttcaggaagaggaacaatgttctctcctccgtccctcactatagttgtatcacaaaaatatttacccctcatcgactcaatttgttcttaacagtggattttccaaacacaacatgactaggcctccatggccgatcttcggcatcatcgttgtcactctcaatatcaaaatcatcactgtcactagaatctccaaacatcccggctaaaatttcattagtaatcttttcaacattggtcttttccatagctttgtaaaaaccaacttgtgtagggtcctcacctctcttgtcttcg

SEQ ID NO: 54696 - DNA, 406 bp, Zea Mays
tgtcgactcccaatacttcccagactcagaaagatgaagatccttggcttcatctctagtaggctgccggaaatcatgaatcttgatcttgtcgccagaaatatcattgtcagaaaagccaagaatgtgagcaaatcgacgacagctcaccttataccaactaccttcaatgtagaagttcaaataagggtagttgtaatgactctcctcgtcagctagctttatccataaagtggagtaaaattgagcaataacttcatcattccaatcatattggaatgtcatgatactcttcatctgcttcctttcacaggccctcaatgcctgtgtcatctctgggtccccaatggcttcacaaccttcccagttgatataacgttgatgcaggataggttgatgcttcttg

SEQ ID NO: 54697 - DNA, 1188 bp, Zea Mays
tttcggctctctggctgggagtgcaatggcttcaacaggcatagcaggagcagtctctgtcactagggggtagtttccgccctttcaattagcttcggcacatcgaccgtcttgatgcgcctcggtctacgtgtcaagaccttgattttctttgtttttggcgcactaatagatgtcgaagcaggtattttcctttttctcccttgcttttgcacgggatagcaatagtctgggtaaacaaacccaataacatcgaaaactctattcaacctctttttgccgcgagcaccgaaggcagccgtcatatctttgtcttctgccctcgagtatgatctaagtacttcaccacttgttgcctctattgcatccagccaatcatcatttggctcatcaaattggtttctgaaccgaaaagtgtacttaagataaaccaagctgccctggctggagccagcggcggcttccttcgacatttctcattcgcttgcaagaggccatactttataagcaatatgctcttgaactaagtctcttgtgccaatataggtgcatacggtgttgaaagcaacttggcacgctagcacttcgtttccatgtgcggtggatggccttctaatgccgaagcgtgaccatataggatgttggataacgcctttcacatcttccctctcattcaggtcattcttcacataacaccattccttcatccaataatctagccacttcttccgaaacgtgggcacagggtaattttccttagatcgaggcactaagttgtaacaaccaaaattgttatgatactgttcctttccgattgccttcatctgataagacaactcatgaatattgcagaagcatctcgcatccggctccagtccttggctcctcatggcccagataaaaactctcactctaataagagcttcgggggtaatctgatgaaggcatatctcaaacgtcttcaaaacttcgaccagcatcttgtggagcggaaagcgaacgctcgctttcatgaagctcctgaagactaccacttcatcatcttctagcaggggaatagtgtcttctcctccagccctcactatagacacatcatgaaagtatttgcctttcatcgcttcaatttggtgttgtttaattgtggactttccaaaaacaacctggcttggtctccacggccgatcttca

SEQ ID NO: 54698 - DNA, 629 bp, Zea Mays
cttcttgatgtttggcttcttctagattgacctctcttcatcttcatgaatttgttgaatttctttacaaatagagccatatctccatcactctcactttcatttttttcatcatcactatcttctttttcaattgccttagaagctttagctttgagggcaattgattcattattcactttctttgccaaacttatagcatcggcttgagatttcttgaatatatcttgagtaagaatttcccccaatacttcggttggagaagttgtagatagatcacttcttactaacatggtcacaatggtctcatacttctccggaagagatctaaggaacttatgagtgaaatccacatccagtacattaaaaccaagtcccttgagttcattcactatctcatttaaccggttgaacatatcggatacactttcatcttctttcataatgaattgctcaaattttcctttgcacacatatagcttggcactcttcacaattgtagttccttcatgaatttccattagcttaatccaaatctcatgagcggttgtgagattcttgatacggttgaactcatttatatcaagagcatcataaaatacattcatggcttgatcatttgtaagaat

SEQ ID NO: 54699 - DNA, 636 bp, Zea Mays
caaatgcgccgtaccattgttataatggcttccattgtctagggctttacaaatggtctctttggatagcaacatggaggtggcggttcttgtggggtgctattccaaatttccaattacttgtgaacaagttttgacaaagtcacgtttaggacttgttcggttacatccggatcgatgaagattgaaagagattaagtttcccctaatcaaaattaaatagaaggagatttcaggcgtaaccaaacaatatcttaagaaatagatggcaaacgcaaccgaacaatatcttagactgtccaatacaaatgtgccacctattttagcgtgctcccctcccctcttcttggcttaaaagagactgtcggtttctcgcttcctaccaaaatcaagtatcatcagctcagatatattaaaaatattaatacttagattatataatgagtaccttgccgaatatgttttatgcggtagacttatctaaagatataaatattagtaatgtaatcttttggcatccgcggggacttgcacggaggaggaggtggtggtggtgggtacggatttaggcacacgacacacggtgcgtcggtgccagtacaaaaccggtgaacaaacagacggaaacgctgttta

SEQ ID NO: 54700 - DNA, 485 bp, Zea Mays
gggacagtgcaattatatcaacagaaatatgcctttcttctatgacaggagatccaatgcaacaaatgatgctacatgtcaccatgtgcgcttagcagcaatctctggccgtgtttgcccccattttaagaataagttggtttagagttgtgcacaacaatgaagacaggatcgttgcaaagttgccagattataaaccctaaacaactgtggggatttaggtgccctacaacctagtggcacaagacgggaaagaagttctacaatcccagtatacgagtggacaagagccgtgataatgtaacatcagtcaaaacagaaagcaccattcctcactataaaccaccaaaatagctgtatggagctcggtgttacccacattattaggaagcaaccatccatgtacacattagattttcagttccaggcttccagctatgacatatcagcgttctatggctcgctcgctccctctcgcgttttcc

SEQ ID NO: 54701 - DNA, 752 bp, Zea Mays
gtcaaatcgaagttgaaatatgtaagatatgaattttcaaagttttctgtgcattttatagtaattttcatgcctgaaataaactacaggggccaaactgttaaaaacaggacccaattgtaatacttttagaactataagggactgtgggttagttttaataaaacaaagggtctcttttgaaagaagtgcacggcgaaggggtatggatgaatatctgccgtccgatcagattcaacgacacagattagaagttactcataccgaaccggtatgcaatccgagccacccaacgagcgattgacgtcccagatttaaaacaacccagaaacgatctcgctcgtccgtccacgatcagtggcccagatcagatcaaagtcccgtgaaccggtactcgatttccaccgttggatggagatcaaatggcccgagttttatcgcccagatccaatccgaaccacccattaagatccaacggtctcaaagctcacggtcgaaccgtacgtgtggcttaatctggggcgttcatcgctgaaccaagggccaccgcatcgcccccaactacaccctggcagccaggcacctcccagagatggtggtgctgccgcgcgacgaggtacgccgatgaacggccgaatcaaagccgtggcgcaaaattggtcacggttgggtgcaacataccgaggagggtcatccgaattgattaaatagtttctcaccggtaatggaggcagcaacagggtcccccacgg

SEQ ID NO: 54702 - DNA, 639 bp, Zea Mays
cttagggtgaccactataccctactaacggagcaatcgacttaagtcggcgacgacttaagacggtgcaacatgctcacgcttactcgacttagagtgaccactataccctactaacggagcaatcggcttaagtcggtgacgacttaagatggtgcaacatgctcacgcttacttgacttagggtgaccactataccctactaacagagcaatcggcttaagtcggcgacgacttaagacggtgcaacatgctcacgcttactcgacttagggtgaccactataccctactaacgaagcaatcggcttaagtcagcgacgacttaagacggtgcaacatgctctcgcttactcgacttagggtgaccactataccctactaacagagaaatcggcttaagtcggcgacgacttaagacagtgcaacatgctcacgcttactcgacttaggatgaccactataccctactaacggagcaatcggcttaagtcggcaatggctcaaggcggtgcaacatgctcacgttgactcggcttaggggaactactataccctactaacggagcaatcgacttaagtcagcaatggcttaaggcgctgcaacatgctcacgttgactcggcttaggggaaccacta

SEQ ID NO: 54703 - DNA, 371 bp, Zea Mays
gatagttcaaattttaaaatgaattagagtgtacagagtgggagacccatccaacaatcctacccaagagttggccatgacaagaagattcacctggcaagaaaaggctagcctcgtagggatattgtatgtaaatcgcgtaggttgacataggcttgatcatgacataccagcctattgcttcttggtaagctagcattgacccgtgtaaagcatgcagatgttccatgctttacgaagacttttatcatggctatgtgctacgtttgcataaagccgtttggggtttcatttgcttggttgaccgcgttttgaatgcgagattggtgcccaaactgctggctttgccgagtctgtggttggaagtgcgt

SEQ ID NO: 54704 - DNA, 995 bp, Zea Mays
tgcggtgtcgttagcgtctgttcgtgctgcggggagtagcgcttcgtgctccatggaggcgctgggcgtgcatggcaggaacgatgaaatggttgtggtcatattctgtccacacaaccgttgtcatcatctagtccttctcaggttaggagaggatgtagtacaccaaaacaaagcctaatctttgacacaacgatgagtcattgcaatataaattaattatttgtcggttagaatgatcaaatcatttgatctggtataaattatgtgtcattgtagtactcgacgtttgtacctgaatgtgatgatgtattcaagccaaaagttggaatgttgtttgacgagatgggagacaagatgcaagaggtaaaaataaacatgttttgtatttcttctttgaatcattacaatactacatcctatctaaccattttttaacatgtgactttagagagattgtgtttgacgacgaaggcaatttattggaggaaaagcccgaagatcctaatgaggtggaaaggaggaaaaataaagcagcagtgcggaacaacgttgaagatttgattcaaagagcgaagagttcaaaagacggcatggatttcttgcgttcaagtgtgaagagcatagagacttcgtttggtcgaattgttcctaccacagtccaagctcatcaacaaggatatgagtcctttattggttgcacaattccataagaaattgaaatccatccaccaaccaatgttctttcgatgggaaggagtaaaagaatcaagagagccaaagaattaccaaagccacggaagagcaaaattgctaagaatggcacctaaatatagttcatgctatgtatgcttagtttatttggtggtgtagattttagattgacatgttttgattgtgcctggatgctgttaaatttgacatgttttgattgaaccctacacttaggcactctctctgtttccccccacttagtagctctgtttgcttccccg

SEQ ID NO: 54705 - DNA, 472 bp, Zea Mays
gtttaccattagcggatttctcatataataatagctatcaagaaagcattaagatggcatccttcaaagctttatatggacgacaatgtcgtactctgttaaactggtctaaaccaggtgaaagaaatttcttcaggcctgatatggtaaaggagacagaagagaaagttcaacgaataattcataatttgaaagaagcccaagcccaacaaaagagttacgcagacaaatgccggatacccttgtactttctagttggagattatgtctgcctgaaagtttcaccaatgaagggtgtatcacgtttcggggtaaaagggaagcttgcaccccggtatattggtccttttcctgttcttgaacaatgtggaccagtagcataccgacttcagttacccgaaacgttgtctgatgtgcataatgtgtttcacgtgtctcaattaaagaagtgtcttcggattcccgatcgaac

SEQ ID NO: 54706 - DNA, 519 bp, Zea Mays
gccttgttaggtctgaaattaatttgttcggtcatagattggacgcgtggctggttgaggcatatggctctcagctggacatcaccctgctctgtgcttcaatgcctctgctgattggacttgcagttcagtagctatatttggacttcctcccatctcagccgaactcttcctttcgtcacagtacattcattgcgtatactgtgtggatatgacttctttagaaaaccttttgaaaattcttggcgacacacccaatgggtgtgcccaaggggtgtcttggtacatagagtgttcaccacactgtcctggagtagtaacttgatgtgaccgcggggtgtaatcatattgcctgagtagttgaccttggtccaaacggtgtcgcgttacgcgaagcggcgcctgttgcctgactcattttcaggcggcttgaattgcttattgaatacttgcgactgttcggcgagcgtggtaggaagtggacggtcacccctggcctctataaatagcctgcttgcc

SEQ ID NO: 54707 - DNA, 362 bp, Zea Mays
aaaccgagcgcgttcaccttaatctctatcccaaaaccctaagctcccattgacaaaaatgtgcttaactaacccctctacctcatacctgaagatgacattaggacgcgtgccctagacacgtcaaacccgggattttctctcggtgttcggcagtgagacaaacccaattcatccctccatatctcttgatccagtcagcgaaacccataagcctccacacacaaacaacaaaaaaatgtcaggggaagagatctctcaacgggatcatggccataatctcaaagatttggagccaatccgcgcttgaacatgacctctctctacgctgcctcgtgctcgacgccgtgcccagacgctag

SEQ ID NO: 54708 - DNA, 390 bp, Zea Mays
gaaaaagtgaaaaatattgtgaaaggggattgtgttgcagtgtgttgctgaaaatttcagtttacattgatttggtgagaatctttccagcaacaatttcatatcttttagcacgtcaacacacttggttgaagtaccatagcccatcttgatcagcctcctatagctccactaaaaacctgaactaggacgtttgacttgtgatcctttcgaccgctctaccacctctgtcgaagctatcacaccggcaccatcacgatcctagagatcaggaaagagcttgggtaagtaagaggtgagatcgagtgttccacaaatacttccatattctagtttttcttgcttccctctaacatggtaggatccaattcaagtgttcacggtggaaac

SEQ ID NO: 54709 - DNA, 698 bp, Zea Mays
tgattttttgaggcgagcatttttctcaagtctcaccgaccattaatagaggcaacatgtattatgttcggctccattaatccacctaccccttgccttaggcctacaccatctctagttctccacccactccctagtgagggtcatcacacctagtatttaaaggggccaagcattcataggcaatagcaacaccatgtcggcagagatgaaggcattgcttgagattttcaccaacgacattgctaagcacatggacatggtctaggagcaattcatcaatgttgatgcccatataagaaacatgaataaaggaggctccatgaaggaccctaacgccactgtcatagccaaggcgaagttgaaacgtgatcccaccaccaaagagctcaagatggagaccaagcaagatatggataccactagtaaggagaagatggaaggctccaagtcatctaggacccaagaatgtggagcttgtgatgaacaatttgtttgttaccccattagaactagaggtgccacatgtggcacttatgcacccatcgtatgatcacccaacaacaacctcatgatccttattggtactccgactctgctaccacatgttgttgttcatgatgtatgatgacaaggaggattatccgtcatatcttaatctttataatcattttgttagtccaaaaaagataacgaga

SEQ ID NO: 54710 - DNA, 617 bp, Zea Mays
gtcagcggaggtccatgcccgactgctgcagcgacgacggcatctaagcctagcggcgtcgggatttctctcgagtcctttccacggtgcggtcggtacacatgagagcatggcattcttggccggacgagaaggtgcttgagggtccgttcatatagcgcagggaggcacagaggtcgttgaagggagtccggccgatacgggaggagggggtccagtcaacaggcgagctccggtttgctaggggcggtttgtttcaacagccaccgagatttctgacgggggcaacagactgagttcggtggggaagatagaagagacttctgcgccgttggcccacatggcggtcaaggtgagaccgagcggctgagggggaatgggtcggctaacgcgggttaggaggggattttgggccgaaatggggtctgaggcccaggtagcttcccttccccttttttatttccttttcttttccattttgtatttccattttgaattcaaattcaaattttgagtttatatttgtggagttcatacttaagttaaatttaaataaccaaatctagttattttatatatctattttatctcatttgtatagtatttcttctcttttc

SEQ ID NO: 54711 - DNA, 633 bp, Zea Mays
gccacaaaattgatggtaccgctagctctgttgggttatcacgaagccagagcacccacccttgtctccgattagccaccactgcgcccgaatttcctttttcccccaattcagttctccgcgtcgccgtgagtgaactcgccgtggccagccttaattggtgttctagcctccctcatgtccccggtagctcacagacccattcgattgaactggatcacactagattgccctgaacaccatagtttcctctcggtttttgtcgtcgtcgtgagctgacgtgctctaggccggtttagtgcaattggtggagggattagtgttgtatagggtggaattcggtgtcggtcaagttagggctctggtctttgagcatagcggccagtacgagctcgtcagagggcgtgctcaccgtcgttcgccatcgaggactcaagttgtgaagaggaagaagtctaagggccttagtgcagatgtcagtgagacaggggaaatagtggaaaggattctttatgggtttttcaaacagccaggggcctctgtgcaaagatgacaccacgggtgcgcgcacagcgcgtttcgcctgggcatgggccatatcgggatggtttcagcctgttactattcattctt

SEQ ID NO: 54712 - DNA, 448 bp, Zea Mays
gtgagtgcgacttctccgtgtcctgcgtcgaactacgcgtactcgaactggttggtgccatttttcttctttgtgagagaccgagagtgacatttttccttatgttcttacgcaactttttcaacagggtgagaaccaaccgtgttaattcggcaaatcttaatgaccttaattccacaacagcaccaacagtgaacagtcaatcgttgccctccaacggcagatcttaatgctaattccacaacagcaccagtgattgtgtgtctgggtgaagtatctgcggtttttagtggtggttgataactatttgctttcttcaggttattagtctcgttaactacgcaagaagaggatggattgtcattgtctgttcctagagatagttgctatcactcttgatcttatcgattttatgtgatcttgctgcctcatttatctcgcatttttt

SEQ ID NO: 54713 - DNA, 716 bp, Zea Mays
actattcttatgtctcaccgacagttacacaaaaatcctcctatttctatttcttcacagctctaggcccccgacggcattccggtcgaatacttggctggagtcgcatgtactagccggcagcgacatgttcaggtggtgtcgagtacatggactgtatctctgacactacccgaacacacccatagatttaatttgactagtccgccattaatttaggtgtgtccgcgacaaccgcggaacaacatctcccgcgagcccgttccggtttacacgagtcagttgtattcaatccaaggactcagaacgaatcagtgacatactaggactatggtgcttgcgcgattttggacaggggcaactcagaacgtccggtcgacatgagcaatgtccacgacagcgttcctgggtgacaacgcgtcttccttaagctatggcgcggtagcgttcaattggccgagatcaggagcttcactggtagtaaggaatgctaaaacatgagtccggaaggcatgaactgacctgggaatagctagccacggcgcgatgcctcacggcgacgacggtgaccaaagttgggggaaattctgaattctcgagctacggtgattggtttgaggcgaggagtggtgctctgggcacgtaacaaaaagacggagcagggagagccttcaattttatagtgatcactcgtgcgcttcgcgaatttgggatga

SEQ ID NO: 54714 - DNA, 703 bp, Zea Mays
cccaagccatctggttgtcgctcagaggaggaagaggtagacacctcctatcctgccgatggggccaagacatgagtggtaatgccctagagatgtgtcgtagggcaaggcataccaggtgctagaaaccccatgtgtacagtgcatggttatgcatcctggtagctagctggtctaagggtacgttgatgaccagggaccttgagaatcaggtacccgtaatggatcactgccatgaacatgtggagggcagggcctcctaggatggcgttatagggcaggcggagcctagccacatcacaagtgatgaatttagtgtgttggttgttgttgacactgaatgtaatggaaagtgttacctacccaatggtgtgtggatatgtcatgggatacctcccatggaggggacaagaatcgagcagtagcatgggagctgtagccaccaaaatgcacggactgatagaacattctcccttactatgctagccatgaggatatgggaggtcatggtgtcgatgtggtggtagtgaccaggagcaggaggacatatgcccaacgtaactaggacggtcggagatgttgaaggcgatgggggtagcggtctagttgaggcaaccacacccctgggaccttggcacaatggttagctcatcgagtcgaggcaaggtgtttgtatgacctaccttagtaatgggtaggccac

SEQ ID NO: 54715 - DNA, 335 bp, Zea Mays
atccccacttttccccttctatttgccggcaatacgcaaccagaaagggccgccgtgtgcgtgctcggcgccatcgtcaccccaaacctttggtgctacgccagcattatcctcaagccaaggaaggggagatcgtggccgtgccgctcgggagctaccacctgggccacttgaattgctcaccggagcaacgtcattctcgtccacccgctctgcgttgtggtggggcctccaccgagctgaatcacggtatgcaataccttcatcgtgctcgccgtgttgtagcccgcgtgtagctttaagcctttgcgaatttggtgcgggttataggtcga

SEQ ID NO: 54716 - DNA, 321 bp, Zea Mays
gtaaagaagaagcatgctccaagatattaggaccttaccagattactgagagaaagggagaagtggcctacaaaatttagttgccagaggacatgagcacaatttttccagtatttcacgtctctcaactgaagaaatgtctcagagtacccgaagagagaatagaagccaaagatatgaagattgggtcagacttagtgtatcaggaacaacccattgaaattttggacactaaggaccagatcacaaggaatagcacggtcaagacgtataaagtactgtggagacaccacgatgagtgtgatgcaatgtgggagatag

SEQ ID NO: 54717 - DNA, 442 bp, Zea Mays
tcgcattcatgccagggtaatggatgcaggtgatagagggttcaggactctatcagctcatgagtctctgacgccgctattcacctacactacttcggtcagcgatgctgctaggcgaactctgtggtccctcagccacacttaccggcagtagctgcacaatacaaaatacaagcatcttcctctgcgtcttcgtggagaaagcgagaccagcattattctaggtggagctagagaagatcgcctcaacaccctagtcggtgtggtggcaggtcttaacaccgacctggacagtgctaccctagacctctccaaggcacatttgaagctggaagatgcacacgcaaggatcgtagccctggaagctcaactagaaggaagggacccccctgaagcccaagttcctaccatggcgttgtcccctccccacaagaggatccgc

SEQ ID NO: 54718 - DNA, 508 bp, Zea Mays
gtggacctgtggcatggtcgtggatagaggtttcacgtccgtcgaaagcgaggtttcgcgtcagtgtgtgtcggacccatggtgtagcccgccgaacatggacaagcgttcaaaacaggtgaggttttaatatctccgattgtggcaacatatataatcatgctaagcacacacatacctttaagatgtagaggttccaggtttagatggacagttactgctatatggtgtttcttgagacttggtagtggcaacatccttcccttttcctttgcctcgaccaccaaattctttaattaattctaaaataaatgaaatggtatgcatctagaagttggtaatgatgccacatcaaatatataaaataaatgacgtaatattgtacctttttctatgatggtaattcctccatattttcttggatatcaatgggagtagatcttctcaaccaatcttgtgtacataccaaaacctctagcatgaatggaataagggaggtacaaaaatc

SEQ ID NO: 54719 - DNA, 306 bp, Zea Mays
gtctaggaagctgttttgtttgttttgcggtgaagacaaagggcataccacaatgacgtgccaagttatgattcagaaacagaaagaaaacgcccaagccgaagcacggcagaaccagccgaagcaggtcatgtgtaccgcttcgtgctattctccttatatctcggaatatgtaggcaatcaacagcctacgacctctgtcgcttcggcaagccattctcaagcttcctggtcccagttaccaccaccaccaccgctagcacctgccatgcttcgcggtcaacagccagaagggcatcaccacgc

SEQ ID NO: 54720 - DNA, 304 bp, Zea Mays
atctcactcttgtggttgcgacatctttgtagatgccccctgaccatatcctttagtcttttgggactctttcctcgtccattattaaattgctaccatttgacctctattccgttttgttattgacatgctcgcatccttacatttttaatacccttatcccttgatctaaagtacttacccttgtacctatgttgcctatttaaacagtttagtttatgtgtccatgaccttcttgtcttctgagatcctttcttattttgttgttaagtcgctatctttcggcaatttctatgcccctggc

SEQ ID NO: 54721 - DNA, 397 bp, Zea Mays
tggactgctacgccctgagtctcgaactgatgaaaaacggtatcctcggcctgagtgtcaatcacgggagcaggtgccggcacagggtcctcaggggctggacgataggagccaaagaggaggcgagaggcctcaagagtgccctggaactgtggtggctgaatcagttgagcgaagatgtggcagagatagtgagcatatggcagctatcgacgagcacgtagaccatccagtacggtgtccttgatctcacaaataaggaagtccacaacatcaaactctgagtgagagaccagggtaccaagtagccaaagtttgatatgagtagcagcctccctgtaacccatccgtggcagaagcgtccgtctcatgagctgatataaaaacttggccgctg

SEQ ID NO: 54722 - DNA, 454 bp, Zea Mays
ctcatggcaattcaggaaaaggcaaaggtatggagaatggaactatgcaatttcattgaatatcttgaagttccattgattgtgatcatagctatgttcttgcctttcaattggtagtatcttggcttaggcgccttatgccttaaaatgttgtttcctttggtgtacctaagaaattacttcttaatcatggtgtgcttaaacattgtgctttatatgcatgttgcaatgataatcatgtgtgaagcgtgcctaggttgcttttaaaatgttgtatatcttgaggcatgcattgtttccattagtcataaagtgtattaggtcatctattcaattggtatctttttgtgatacaattgagatattatgcctagaccaaggtatgttgtgatcccctctagttctgaggacgtgcaaagtgcaagtcattcaaatacttgatgcacaactttag

SEQ ID NO: 54723 - DNA, 494 bp, Zea Mays
acagacaccccctcctcctgctccattgccattaatccaaacaatcgccgctagctagctagctctagtactgtcgtctacgcacaccagctgctcctaatcacctgcctgaaatatttacctggcagttgacattatattccaggtccgttattagtgttggcctgttgggtcgtcgtcggcggcagcattattatgtttgctgctgctgcggccgccgccgcttcttcttcctcctcttcctgtccgtgatcgcgtcccacatataagtactcatctttcagctctttcttaccatccatatcctggctagctgttgctgcctgaaccaaaacacacacacacacaaaacacgcaatgggcgccatgactctgccgcccggcttccgcttccacccgaccgacgacgagctcgtgggctactacctcaagaggaaggtggacaacctcaagatcgatctcgaggtcatccccgtcgtccatctctacaaatc

SEQ ID NO: 54724 - DNA, 797 bp, Zea Mays
catgaggtccgggagttgttccttgcgggctttttccacaagtcttgctgtctctgggtctaggcgttgagctttgtatatgaggtcttccagcattggcttgacttcgagactaccgctgtttcctagacatgtattcagttgagctgattctttcttccaatcttctaaaaacttggttccctttattccgaatggttttcgactgagggcgtctgttaccacgttggccttcccggggtgataatgaatctcaaggtcataatccttgatcatctccaaccatcttcgttgacggaggttgagatctagttgagtgaagatatacctcagactcttgtgatcggtgaaaatgtgacacttgttcccgattaggtaatgcctccatatctttaaagcgtgtattatggctgccaattccaaatcgtgggtggggtaattctgctcatgcggcttaagtaggcgtgacacataagcaatgactttttcgttttgcatcagcacacaccctaagccttgcctcgaggcatcacagaaaacgacaaaatcctgatggatatctggtagtgtcaaaacgggtgcggttgtgagtttctcctttatgatctggaaacttccttcacattttggggtccacacaaatttatggtctttcttgagaagctctgtcataggtctcgctatgctggagaatcctttgataaagcggcggtaatatcctgccattcccagaaagcttcgaacttcactgacgttggtcagttgcctctgttttgatactgcttccactttggaag

SEQ ID NO: 54725 - DNA, 488 bp, Zea Mays
gtaatattcatcgttaggaacaggtaacctcccgtgcggcgataccttatacacaacatcccaacccttaagatgttctttcgtttggcacgcatatgagagataatacacttgtgtggcctgttggtccacgatatagacatcgtctcctgctaaggtggaatcttgttgaatttcgactatcccaagattaaattgtgtccgtctcgtcacttgagggtcaaacaatgacatttgaatatcactggagtaagaggtttgggaccataaaaattgagctcatatatttctttgattcgtccaaaataatcgacattgtcaaggccaggcgtaaagactccagaacatgttgttttccgatttggccaacttttgtcgtagtttgttgtgcgaaaacggtatccattgacgtcgtacccagaatatttcttgaccctataagcaaagtcgttggctacttctctcaactcggcactcatagacggatc

SEQ ID NO: 54726 - DNA, 471 bp, Zea Mays
aatgtttttccccttttccttctctcagaagtcagatggaggtccgttgccaaaaccagcttttgccagaatgaagatggtttccccaagttgttgagagcatgcacagttcgcctcggaatcaggagccagccagagtatgatggtcgtgaattcatcgagcatggcacagagaagtgtgtcatgactgtatacattggatccagtctgcaccatgtggaatggagtgtcactactgctgggcacagatttaaagacacctgccaagtcgtcgcccgcaaggcattgagggccctgtgtcagatctatgaagaagaagtggctgacacaccgctcagattctttccgccctttcagagagaccgtccagtttggatggccaggatgcgtgcattggaagggaagcagttgcttgaggatgaccccacagtcgtgtacctcactgcatacctgctcaccctggatgcacaa

SEQ ID NO: 54727 - DNA, 676 bp, Zea Mays
tggagaggggtgccgatggcatattgggtttgccactacagaacacgaacacacaagcttttggtcaaacaatgagcaagtagcaaatactctatgtactcgcaatgggctctgtggcagtgacccaaccaatataaaagaaaagggaaagcgagcagggaaaagtggccactccatttgttctattttctggatgatgtcaaggcctcctcacagatgaccattcttggtgccttgcactttatcattgatgtcactctccaaccagtatcttatactcttcatccaatcgagccaaagcaactcagccgcaaacaagtgcagctttaaacaaccgcatgatgtcctgtcacaagaaaacagactaactagctcagaaggaacaccagattaaaggtaaacccgtaaaagaccaggcttccatgctagattaaaccagaatggcagcatcttcaaactaaactgtagcctgtaaagtactaaccttcatgtgcgatttacccatgccattctttccccctgaaaacactgtcaaaatactagaaggaaactaaaattttgaaagttaatactcctatataaaaaggaaggattctattacaccaccactactactactaggcctgtactatcctggcttgttgcatcacaaagaggcatcaagattcctgtacat

SEQ ID NO: 54728 - DNA, 483 bp, Zea Mays
tgtttgctttgtcttctttgttgtctatcataaaggagtaggtggagagcctcagggatgaggagcggcacttctggccagtcggttcacaagattctacaacaaccaccagaactggcggcatggcagatcgaaggatggaagcttcaactgcagcaaactgttgtacctaaggatggcaccgtcgctcctgcttcctaacgtttctgactctgattttcaacaataagttaggtccgcgtgtattttggtttttggtatagtcaaacgacaatggtttgcattgtactatgatctgctgttttgagtccctcaaggtttctaggttgagctttgggatcaaagtcacgtgctcgcaagtcaaaaaaatttagtggctcccattcaccctcctctggtcacctcatcggtcctacaacggcatatttctatttaataaaagtacctaaaccaacatttatatttccctttcctcatgcagct

SEQ ID NO: 54729 - DNA, 354 bp, Zea Mays
gtagatatatgatcgagcagcaacccccggggcggaagggatcaggcatttagtgcgggaactagcagataaaaagatagagattcccatcgcaggcataacgcatcacactcgtgcacactctgactctgcactggcgcgaagaatccacatgccactgggcctaagctggggcacggcatatacccacccagcctatgaacccaaccgcctgcttgcttgcatcgcagtcccaccctctctctctccccttctttgacttcaccgattccatcgtcaccactcgccatggccaccgatggcggccgcgaatatccaccccggcccctccgcagtcgtccccgactccactcc

SEQ ID NO: 54730 - DNA, 745 bp, Zea Mays
gctctaatcaaacttaatttttttatgattatcaataccatcgcgatacctctttagagaaccgaatggattatgttttacccgtcctagttggggccgacaagtcggccgtccaaaggcaacaaggttgcctttacacatgtatacatgcactaaggccattctcaatgcatagtttcatgtaaagatgtaaagttttatacagtgcgacatctatttttagaaccgaatggattatgttttacccgtcctagttggggccaacaagtcggccgtccaaaggcaacaaggttgcctttacacatgtatacatgcactaaggccattctcaatgcatagttttatgtaaagttttatacattaattagagtgcaacatctgttttttggatgacatgatactatatttattatgaaataggtgaaagtagtttcatcaccatgaaactatgtcaactcattgccaacaaattggaaaacttataataccaccatcgagagcaatttatttcatctccattcatttcttatatttctattgcctatttagatgcaacattttattgaaattttagcctatgaaattgtaaaatgaaactttgtattgagagtgtaggttttattctccatttcgtctcactcttgatgatgtggcagtatttgaaataatgtattgaaactctcattgacaatggcctaagagtaagtttaataatacaacctaccgctggccgtgaggatcattg

SEQ ID NO: 54731 - DNA, 283 bp, Zea Mays
ttgggcattgaatcataaccatggatttgacatcatgacaaagaccatctaggaatcgcatggtatagtaaagaggatccgacatgggttggtagctattcaattggtcaactaattgagcaaaaaggtcaacgtattcagctacagaccctttttgtctaatatgaaacagttgatgctcaagttgggcatgttgatccttgccgaaacgctcacacaggaggtgacaaaactcataccatgtcatgtggtctaacttgtgctcaacagactgcaaccaact

SEQ ID NO: 54732 - DNA, 851 bp, Zea Mays
ctgagatgctctatattccatgaattccccacttatgtgccatccatttgagtaagccgatacgatcctggctgagtgacctccgataccgtgaatgacccttcccataacagtgacaatttgtgccatccttctcccgttagaattcggcgaaggactaagtctcccactataaaggatcgatgtcgtatagccttatcatgacagcgcctcagggtctgctggtatctggctgactgaattactgtattcaatcgctcttcctccagcacgtcaatatcttctagcctggtagcttctgcttcagctatgctttcgaagaccagccttagtgccccaaacctgacgtcggcaggtagcactgcctccgaaccatagaccatgaagaagtgggtgtttccatgcagagctcgactgggttgagttcttaggctccaaaccacataaggtaactctctgatccacttccctgtgaacttttcattcttgtcgaagactttcttccggagtgcttccagtatcattccattagccctttccacctgaccattagctcttgggtgtgctaccgatgcatatttgatctggatgctccgttgttcacagaaatcaaagaattcagagctagtgaagttggatcccaggtcggttatgatgttattcggtatcccaaacctgaatattatatcttgtatgaattccactgccttggctgaagttagagaagcaatgggtttgtactctatccatttgatgaatttatcaatggcaaccaacacgtgagtatagcctccctgagctttcttgaagggtctaatcatgtccagtccccagcacgcaaatggccatgt

SEQ ID NO: 54733 - DNA, 433 bp, Zea Mays
cacggctgtcaactgttggcatcgatgtgatgaaaattacatccctgaagaacgccatgctgctgctgcgacaagctcttacacaatagacacaaactggtatactgacagcggagctactgatcatattaccagtgagctagagaaactgtccatccgagataaatacaacggggaagatcagatccacaccgccaacgacaaaggtatgaaaatcagccacattggtgattcctctgttagcacctctagtcgtaatcttcatttgaaaaatattctatatgttcctgaagccaagaaaaatcttgtttctgttcatcgattaaccacagataattgtgccttcatagaatttcacccagatttctttttgattaaggattaggcaactagacgcactctctttagagggccatgtcgccatggactgtac

SEQ ID NO: 54734 - DNA, 542 bp, Zea Mays
gaaaccgagacaatgctgaccgaagccgaagctatactgagccaggctgacgccgaagctgggccttcaatgccccgccaaggagaaatcctcagaaactggagaaaaggtagtggaagaagaaggtatagagcagattttgcctgaaaaagctgccgctcctgctcccgaagcgtcttccgaagtccttgattatattattcgacacgcttcgggaaaaagattatctgaagaagaaatttttgaagctaaacactatgcccgagaactgaaatacccgaaaggggccttagtgtttaatggcacagatgaagatgacttcttatattgcctcccagacaacaaagaattatctgtctgtcgggagatggccagaagtatggggttcccgaagctttaagctggcctctgcgccatgacgaaggacgatcttgcggatagccatgcatataacaataagaaggtacaaaaaatgtgtatttggaggtttatgaattttgaattattcgtttgttcttatattaatccattcattcttttca

SEQ ID NO: 54735 - DNA, 361 bp, Zea Mays
tctgctctctccgtctcctgtccccttttagccgtgcatcctctccagtctctagtagttctcacgtcttttttccttggagatttagaggccagtcgatccatgcgaacccgatctctgatagcctctggtgacagaatcggatgtgccagtttcatttcggtacgatcatcgtcattgggttctccccatgtgcctggtgatcattttccttccttttgtttatatatgtatataattgggggtttacgatgagtcatgcatattttggtgggtcgaaatgggataatgcagaatggctcaaccattcgtcgggatgcttgaatgaacaaagagctactgatttgctaaattaaattgg

SEQ ID NO: 54736 - DNA, 765 bp, Zea Mays
atcatgtatggtcttgatctggcatgcatccttctgatataagcttcatcgttcgaatggtgattgccttggaggaaagatatgatttatgtcgtccaatcttcactatgtgttggtgatattgtgagcacagctatttctatgaggtctactgaaggtactaagaggatttcaaaaatctacttattcattatctcctcttgggatattctttactgtgagcacagctatctctagtggaagaggcagcccctgtgctatcgatttggccaacatatctacttattcattatctcctcttgggatattttgtactgaaaaaccttcaaaggaagcttccatcctttgaactgtgtcgagatatttttctagctttagatctcttgctctagtgctcttgtctacatgccctttaattacttgggaatcagactttaaaattgcccttctttttcccatggccttaagttttcgaagccttaacaacactgcttcaaactctttaatgttatttgtacattgaaactcttgtttagctgcataagaagtcttcattttttatggtgagatcaaaactgcagtggcacctgcgccgaaggtaccccatgaccatcacaaaagactccatacttcttcgactggtgcccgtgcttcgtcctgagcccctggtgtccaatcgataatgaaatctactaatgtctaggattatattgatgatcgatgtacaaagtcaatgatgaattaattgatctacacgaccaatgc

SEQ ID NO: 54737 - DNA, 880 bp, Zea Mays
cccgtttgcagctagtgcactgtttgggtcaagacattatttttgggaaccttttctgtacaaattgatgctagttcaaatacatttatgaaatcacaaaggaaagtgcagtgatcgacatgacaagggaggaattctacctaacaataataagataaggagccatttttatggtgaataaagcaagcaggtctgaagggcagaccagaacaaatagctcctattatacatacaatacaagataattatacatattaaaaattctaaagagatccattttttaggatacctttggacagtttgcgccgacaaacgtctgcaagcaattgatggcagcaatagcaacctccttgctaccgtttaagatgctattttttataaaactgagtaaaagcacccaacctgaacacatttcaatacaatgagaagctacttggaatttgataaccaatcatcaacataagataggcaaacaagaaaggtttaccagaagaaaattttctcagttgttggaggtaagagaaaaaagaacgcaaaagccgtgcaataccaccaagtacaagaacaatggtttcatcccattgcttttgtgctgtatttcgactggaaaaacaaagaattcaaatagattagaagaaaggacaggaaattagccagaagaacaaacactttgccactcttggacttctgatctctcttcctcgcagggggtaatttgccgacttaagattttaaaggaatacaagcttaaaaaaatcagtagtccaagattatttaatgcgaaagctattaaacctgcagggaacactagaaggtaaaatctagtatctaggtgtgctactaatcaagttaatttaaatcataaactattgaatttctg

SEQ ID NO: 54738 - DNA, 409 bp, Zea Mays
tttcatgctaacaaacaaaagtgagtagcacgattgggggatagaaacagaaacatacctaggttagaaacatggtgatagagccgatgtgtagagattgtacttgagagtgaaacctttcatcattgctggatatgcgagtttttgcgcgaaagtcaccagagaccgggtttacaaggaccaaccctaccaagctggacaacagatggcaccgagactaggtttacacagacgggccttaccggaccgggacccgagcagcttggcttaagggcaatacttttcctttgttgtctcccaggtgcttttcttttccgtgaggtaatttcaattatttggtggaaacacaagaccagagctggtgctagacacagcatgggatcgaagcttagcaaggtacccatgagat

SEQ ID NO: 54739 - DNA, 415 bp, Zea Mays
gcctagcagatggtcaagctctaatggtgaattatactataaataacaacgagtacacaatgagttagtatcttgccgatggtatatatccctcttgggctacttttgtgaagacaattccgttaccacaaggtaacgagaagaaatatttttgctattgtacaagaagcttgtagaaaagggtgtcgaacgagcgtttggagttctacaatcaagatttgcaattgttaggggtccaacatgtttttgggatgaagacacactcagacaaatcatgagggcttgtgtaattatgcacaatatgatcgtggaggatgaacgtgatgatgaaaatgacatacattatgagggtgtggaggaagaagttactgcttctcatgaaggaacaccagaactcaaggagtttatacaaaac

SEQ ID NO: 54740 - DNA, 648 bp, Zea Mays
atgacatcgaatacttgatttaaccttctctttgctcgtgccctaaaggtgcatgtcagaattttgtcctccttttttagtgaaggttcctaaaacttcattgcactttgatttagtgtcctctagccattcatcgcatggctctgcaaattgattccaaaacttatatgtatacatcaaatatacaagaccccttttctcagcatctcgcttcgatgggatgtccacctttggctctggcatttcccatttagcccaaagtgaccagacactaaaggccagatgttattaaacaaggtctcttgttctgatgtaactacacacgacattaaaggccaccaaaatagcttcagcttcatcattcatatggcacattggccactttatgttgaagttatactagaggcctctagatggtatctctaatgtcctccctcttctcgaagtcattttcacatagaaccattcccttgtccaaatgtttgcccacttgctgaggtatgatagaactagttaatggacctctttttggtattagaacgcgtagtagccaatgttattgtgaagttgttctttcccagtgtccttcgtctaataatgcagttcatagatttgatagacacattctgcatttgactccaagccttg

SEQ ID NO: 54741 - DNA, 675 bp, Zea Mays
gtattctggagctggttttctagatcttcgagggtgtggtttctttcttctgcctgttcttcaagctcacggatttgggcactcatttgctcagtctagaggtccttctctaccaactcagttgatagatccaccaccagatcctctcggtcggtgatggtgaccttagcatccttagccaagcccatcagctgtgacatggcctcgcgctgtagatcctgcaggcggtagagtgcactcatgcaccgaactgtcagtcgagcagtggccccaaggaagagtgcccacacctccttggtgtggtccacccagtcttgccacatcggttatcctcctttgcagtggggaatgacccaatggggtgtgttaccatctccaaggggtgaaatgtgcagaaggtagtcaacgcgtgcatggctacgacctcggtggtgtcgtgggcccggaaaccaagggtctcataatccgacgattgccacccgtgctgcaaggggtggggctctaagactagccacaccttatgtaataccaaaattggtaaaggcataagaaatgagattattttccctatatgtgttgcctttattcattagtacatgtgaacaaataccacaaaagtaattaattaactaatgacacctaaaacaatatgtgcatcatgctgagaactttatt

SEQ ID NO: 54742 - DNA, 973 bp, Zea Mays
catttcgcgtagaggaccttggtcattcaaataaccggtaaagaaccctgcgcactattcatctgtgtctctgacattcacagttaggcccctgcacttctatttcttcgcagcgccaggtccacgacggtggacggcgacgagcatgcctccggcgagcctataccgaccaagacactcaatgaccagcgccctagcttggctgacacctaattccacccttggcgacactaattcctcaactaatttcactaatctggcccggaattcgtctgcccatgacgagggcaaggtccaaggagaaactatggtgttcagggcaattcagcgcggtctagttcaatcaaccaagcctacaagcaacatgagacctaaaagatgctagaacatctaacaaagaggcatgaaccaacctgaggagggctggccacggtgaaggactctcacggcggggttctgactaatttgggggaaatggcgaattgggaggctctggtggacgatcagaggcgagagctggtccttttgatgcgtaataacctagtgaagctcactggggcagcaatttatagactccatcggtggtgacgtccaatttgaagaaagcgcgctagcggccggagggagggactaagtcactgcggcgttctaccgtggcattcactggctgaggagctacgacggtcactggtgaactattacggctggcaacgacatggtgaaagggtcacgtcgtggtgcaatcacggcgaacgacgtacacctcgacgacggccgctcggccacgtcaccggcaagtggatgatgcgacagagcggccacaatgctccaacttcatccacggcaagatcttttcaccaggagtcattatccgtgtgttactgggcacaaatcgcagcgccgacgcaaatctaagggcgcgggtcaccggcggtgaggtgggatgaatctgaagatcttttcgtgcactgta

SEQ ID NO: 54743 - DNA, 755 bp, Zea Mays
caatacaataaaaaaatcattcatattgaaaataagtatatatatggttggtaaattgtatcgtcttggacaatcaaagagcaactctcctcttggcccatttaataatatggagggtagggctagctgtctactagaatacataaaaaacatattatagtgtagaaacatatagacaaggatttatagggactgtttgctttagcttttttcgggggagctttcgtagggagaatctgacggtggagaatatctgactatcgtggatattacgtgcagagaaagataattaaaagagtccatacggtttaagatgtagaaagtgacgatttcgcaacgactcacccgattctgtgtttacgttgatttttggaagatttttactaaagtgatttttataaaagcggactgaaaacttacgcatttgctcgtttacaacagcttctggtgggcagaagatgaaaaaaaagaaaacacaaatagggcgatattccaatgactctacttggctttggtatagaacaacggaaaacaagtatatttgggctaccaataagaaatgggcacattggatgaactactagtagtaggcacgtgccactccattgcactgttgcacccccattcgattttttatagaaggtcgtccttcgctagctatataatcaccatgcatcccccgtagagccttagcctcttgttgtctgtccgtcagcctatccccttcacgtctttcgtgtccacttctacttgcc

SEQ ID NO: 54744 - DNA, 1103 bp, Zea Mays
ctgggttggttgttcgagaggaaggagaagcttctcttgaggaagatacccgtaatgccgaagctgggattgttgttgccgaagctggaagcgatgatgaagaggatgatggtatactgagtccaagcaagcctagccatatcgaatttggcacatccactgtgaagccagaggacttagttatgatgaaaaagcttggttattttgggagaaatgatgataacttggtaaggtttgcgggtgaagaagtaattccagaacctaaggatgatgaagtggtggtttttaagagcttcttccatgccgagcttcgattctcgttgtacgagatgattagcgatgtgctaaagaggttcgagatatatcttcatcagctaacaccaaatgttatagtcagactcagtatctacatatgagctctccgaagccagggaaagattgttaatgctgaaggattttgcagagttcatgaactccattactagaccaaggcgagagcagatggtctgcacaagaacttcggatgctataattttgcataccgaaaggatacgaaggcccctgtgattggataccgcaccaagtggcccacccactggacaaatgaatcgttttatgtgaaagcttatgagaagagaatggagaatcttatgagtatggtgatgagtcccttgaaactaagcttcggcatgatgaggtcattatgcaacatgcaactctgctccccatgtcaactagccaaagtagaattcagggttgtggccgagcatatcagtactcgggacatagttcaagaatatctggcctaaaaaacttttcccacatcaggtgggtggggaatgccagagaagaaagacgaaggaaagaaatttgagcttgttagatttccatatcgctttaaatttcagaaaaccttcaacagcccttgtgccgaatggttggaggtcattgagacaatgtgtaatgaaatccttggaaattacactaaaaagaggaccagctaatgactgctgcctttggcacacgagagaaacgaaggctaaatcgagtgatggattcccttggcttcgagtatcccactctctaaggcgctctaaggactt

SEQ ID NO: 54745 - DNA, 656 bp, Zea Mays
gaaataccaaaggtcagcacttggctaaatgagcatcacgacagtctttggtaccgaagtggcttcaatacgaacatcaagtgcgactacgtaaccaacaacattgctgaggttttcaacaattggattaaggattggaaagatctgcctgtttgtgacttggctgacaggatcagggaggaaattatggagttgtttcacaggaggaggaggattgcacaaaagttgcaaggacggattttaccatcggttctccatatcctacacgccaggacaagaggtttaggtcatttagcagtacggaaagctgacaactacattgcagaggtaaggaataacaatgatgtgcattcgaagcacattgtcaatgcttagctgtgggaatgttcgtgcaaagagtggccgcacacagggcaaaccatgtatccatgccctgtgcttgataacaactccggaatttagggatgtcaggatggaggattttgtcgacgagtactactcgctagctatgttcaccacaacgtactcaagggtggtccagccaatcggtgacaaatcgttttggccagatgttccttttgcgaaagaagtgggtgctccaattgggaaacatgttgtgggtcgacagaggaaaaataggatcaaaggatgccttg

SEQ ID NO: 54746 - DNA, 866 bp, Zea Mays
ctaactttgaagtggcaaaaaaacaagacgaagaaagcactactgaaatcaagcaggcgcttgacattcaatgggaagctcttcgcactgttgatgaggaattggcctctgctgaaaagcagcggacagaaaccatgacgactattgagaaacttaatcaagttttaatggaggtagagcaaaagagagcgtgacttgaagaaatgcgttctacttcagatttggaggtgaggaaattggagcaggacttgtgtgatgcaattgcagacgcgagcaagaaggctattgatgtttttcagaaggaaacaacggaactgaatcagcgggctgagcaacttcttattgatttaaatagctgtcgatctagcaataactagggtcccgactgtttgggacgatctatgaatgttatttctctttattattatcaaacatttgtttttttttgtttttttttgttcttcatttaatcatgaacgtgttagaccttttattatatattttttttagaaataaaagtggcatctttttttatatactctgtggcgtgtccttttgtgtgtgtatttggcgttcgtatggtaatgtaatatatccatttatttgtttatttattctgctcacaacaatagaatttatatatatttagtcactcgtaatctaggctcagtgagctccatcatatctgaattttatcgatgaactatgtgatttttaagctcataaaaaaaattggagcatgtttttttattgcttacagtttaagctcatgaagcgttggagcatatgatggatttatttttattatttatttctcgctaacagtttaagctcatgagcgatggagcatgtgtacttttttgttg

SEQ ID NO: 54747 - DNA, 827 bp, Zea Mays
gactgtgggggcgggggaagagagagaaaacagatagaaccctaaacctagctttggtaccaagttggagaatggaaaccctaaccctaactagggttaggagtgcatatatagagatagtcaagtgggccaaagcccattacaaagggccaaacatgtagctcttacatagtactctaacaatttaatgccatggagtggcatgaaaatgaactagtttccaatttttcaatattttgagtggcatgtttccaactgaccctaaaaattaatatctactaaaccgagtgtcaaaatcgaaagttggtttcaccgtcgtgttcgtcgtgatgaaagcatcaaaactaaatctaacttggcatatttatctcaaagtcaatttttctcagggtcggtcattatagttattagtgtcagtcattctatcttttggcctcggtcattcatgaggattactcacataacagtcatttagtgagtaagtaattctaaaaaactgacattacattaaaagaagtgaacaaactcagtatgaatgaatactcagtcattccatcttttagcctttgtcattcatgagaattgttgagatactagtcatttagtgagtcagtcgttctcaaaaacaggtattacaggaaaggaaatgaacaaactcagttcaatcattccatctttttagcctcagtcattcatgagaataactaagataggagtcatttattgagttcagtcattcttaaaaaaagacataaggggaaagaatgtgaacaaactcaatcatgctatgaatactcagtcattcctataggaatatgaagtactgg

SEQ ID NO: 54748 - DNA, 476 bp, Zea Mays
ccggaccttcctttgtcgtttatgtgtggcggcttatagattttgttgactggagccaaagatatggggtgatcaaatcgggtttgtctcattgcgtgaatccgagctaaaacccttgacttgacgtgtctagggcataaagctcgatgccatcttcacacacgttgcagaggggttaatttagcacaactttttcaatgggggcttaatgtttggagttagggatcaaggtgaacgcgctcgagttctaggtgaaggctgaaattcagaaatcttaattttcatatttccctagagagcttccacttgcatggcctttttgggattttaaacaattattttggccaaacttttctagtagttattgtagcttaattggtgtatttcaacttttataattagcctaagccatgattccaagtttttcatgatatttttaccaattccccccttttcattgaaatgacctaattaag

SEQ ID NO: 54749 - DNA, 476 bp, Zea Mays
tccgggttttacaaagctatggaagagaccaacgcataaaagattgctcgtgagacgctggaatatctgaaagttccagtgacaatgaagattttgatgtagagagtgggaacgaaggtgccgaagatcggccctggcgacccagtcatactatcttcgggaaatcaaccatcaaacaaagtcaaatttatgcaatgaagggaaggtacttccgtgatatttctattgtgagggctagaggagatagcagtgtccctttgcccgaagctgacgaagtagtcgtttacagaagcttcatgaaagcgggacttcggttccctttagataaattgttagttgaagttttgaagacttttgaaatattccttcatcaactcacccctaaggccatcatcagaatggggatttttatttgggccatgaggagccaggggttagaaccgaatgcaagatgtttttgcaatattcacgaattg

SEQ ID NO: 54750 - DNA, 296 bp, Zea Mays
tcgccggtggaaaggggcaggggacagcgagaccacactagctcatgcacatccgcgacgagatatttacccggtgaacgaaatccatacgcccgtggcatgaatcccggcgaagaggtcaccgccgttgagcattctgcgctggcggtctgatccttatcagatcactgtaccatggcgagttcctttcagatgaactgacagagagatttgaggctagattttctctaaattttacttggcaactcatccgaggctctgcagcaaaattgtagaccaatgttccagctacaatg

SEQ ID NO: 54751 - DNA, 471 bp, Zea Mays
ttctaacaatttgtattggagtgagatagtcgagaaccttcactagaaagatgctttggtggttacatactagataagattgcataatgctagacatcaatcatcatgacagatattggtgcgagtggaatcaagcacatcattagctattactattataagacgtgtttcaaatcctaactaaaaggttgatatctgtgggaggttgttgcgggaacgtaaattgtggctcctgtggaggagagggatggtggtaagctcatacataggtggaagactaaagttggtaaaggcatgttcatgttcaatgctgaaagagaaataggattaacctttttctcaaagtgtttttggtgcttgatgaccatcactaccttatggactaacttgtttccccagtctttgattcacaagtgcataagtccattcaattcagttctaagtcaaaacagctcaaaaccaacgtaaaag

SEQ ID NO: 54752 - DNA, 483 bp, Zea Mays
gggcatattgctaaatgtgcaaagaggggttcagctcagttgaatgcagtagtggatgagggggtgtctgaaattttgaccgatgagattctacatcagctagaacaggaggatcaaagtggggaattatgttgtcatctctcttttcaagcagtttctggtactgacaatgactatagcatgagagtgcgatctattgtgggtaaacagactatgttgatgttggtggattctgggagttccatcaattttattagtcagcatatggtgcaaaagttggggttagctgtgacatcttgtccatctatttctgttaaggtggccaatggggaatctatgatcagccaggctatggtgaagaatttggaatggtgggcacaagagcatttttatcacactgacatgagaattctacctttgggggcttttgatgctattttgggttatcagtggttaaggcaacacagtcctatggagtgtgat

SEQ ID NO: 54753 - DNA, 510 bp, Zea Mays
ggaaagtatcggtgaacccacctcaagaacgtccttgatcttccctccgatgtctagcctgccttccagcgttcctctccgtgccgtggggctctggctctccgagcttcggacccgatcgtaggaccagcgagattcagaggtctggaaatttccatggatattagaactgacaaaaggatcacgtcaacgcgcctgatgatggctcttccttctccttttggtttcagagttgttacctgaatgcgtggggtgccattctcgtcgagcatgaccttggctttctgagccagaagcccccagaacccatgcttcgtgtgctctttcttggatagctcgaggtcgtacttgggcccctcgtcgtttaggcaagttggcgatgtgtagagatgggtgacagggtcctacgattgttggacaagaatacaatgcaagatgatcgttcacggacagggtctaatctattttgcaaaagaacaatcactgcatgctcgtctacgtataccacca

SEQ ID NO: 54754 - DNA, 341 bp, Zea Mays
ccaacaaagtgacctcgctcgtctacctaggagagacaggtgaaagcaattgggtcatctcaaaaaacaaggcaggataaatcggcctaaaacattgtccaactagtaccaaacacaacagcatggacacctccatctcaatatatgtatatatattcaccaatttatccacctacatatgcacacccaccccaccatatgcgccaaatcaaatgtggggaatgctgccatatccttatgggatgccacaacacccggcttgggggcaccccaaacctttgtgtttgatagattagcgccaccagtacaaggctgatggaatcctcctcgatccggtcatc

SEQ ID NO: 54755 - DNA, 759 bp, Zea Mays
cttggcaccagcaatctcccattgcatcctttcctcattagcagctctaagactcatggcaacactagggttgcagccatcaaaaacgcatttgtttctatgcttccacaaggtccaggctcctagaatgataagggaatcaagcccttttctagtgagcccagcatcaatattccccaccgattcccaccagcctagatatgagccaacatcaggttgaggagccaaagaatgcagatcaaaattccgtaacaacaggtaccagaattccctggagaaggaacatgtaacaaggagatgatcaatagtttcatcttctagatcacaaaaggggcacttctcaggatgactcagccctcttttagcaactctatccgctgtccaaagacgattttgtgcaaccagccagatgaagaaatgacattttggcaaggcccaagttttctagattttcttgtaatgaggaaaaaatacagaccccaaaaagaagccctcgtaagcaatctttgctgaatagatgcaattaggagcaatactgaaaacatgtttatcctcaacctcaggctgcagctgccaacctgaagtcaagtcccacaactgaagataatctgttaagactcccactgtcagaggacctttaatactagagatccattttctgtctgtaattgcctcatagatctaatctggtaacttagttctttgagaatccaactctctataattacaagtgtgccttccttatttgttagaatcatg

SEQ ID NO: 54756 - DNA, 476 bp, Zea Mays
gttggcttgagagacgaatattttctagtgcaaaacgagttacttctggatttttatcaactctttccctaagaagttcaacttcttgtgataaggttttgttttcctccagtagatatgattgtgctggcaatttactgttcacaagaacctccattctatgaatcttatcatcccgaaacttaagcatcatcttagccgatcttgtgtcatcctctctttgtcgaacctttgaacacatcataaaacaataattatgccgtcttacaatttgttatcggttggtaatgcaaaacatatttttttccaccagaaattaccaattcattcaactgctcaatttgaagttcaagttcctttatagtattttctgcagttgattctctccgtaatgctccggcaagtgcttcttccagtgacctcaccttcaataaatttatgtatatataagcgaacaaatttctactttaatcgat

SEQ ID NO: 54757 - DNA, 734 bp, Zea Mays
accgaacttgcgcaagagcttgaagaaaggtagcgccctctcagtcagcctcgaaatgaagcggttaagggcggctaacgaccccgtcagcttctggacatccttgatgcgggctggaggcctcatcgccttgattgccctaatcttctccgggttttcttcaatccccggtgcgaaaccaggaatcccagcagcttcccggcggagacaccaaagacgcatttgtccgggtttagctttgtgcgcgtcgcccgcagtctgtcaaagaccagggtcaggtcttccaccagagtcgaccccttcctagtcttgaccatgatgtcatcgacatatatctctactttgtccctgatcaggtccccgaaggtcttactcatcacccgtacaaatgttggcaaggcgttctttagatcatagggcattacaacatagcagtagagcccatccactgttacaaaagcggtatgcttcctatcctccctagccattcggatctggtggaaacccaagtaggcatctaagaaggacaagaggtcgcattcggaggtagagtccacaatttgatctatgcgtggaagtggatacgggtccttgggacatgccttattcaggctggtgtagtcgatgcacatctgaagcttcccgtttgcctttgtcacgatgaccgggttagccagccacacggggtgatggacctcttcgataaagccaacgtcaagcaactttcggacctc

SEQ ID NO: 54758 - DNA, 855 bp, Zea Mays
tagaaaccgtagcaatgtatagatatttgaatagtttaatactattattgagttcatgagttggtccccataaaatggtcttcagtacgacgcgcaaaagtattagactgcacaaacaatacgactaatgaaattatagccgcacatacatatatatatatacaaagataagtttgaaaatttttgtttcatcatcataagtcgatggtcatcaccaagcattgcctagcatatattggcatctatgtttcagctgcaaactcggccttcaacaactagttttcagaaagaagaaaaaaaaacttggtcatcaggatttgccaatgtcttactatatcgatcactatcgacagcaggactacattatattgccgtttaatttgtctgtctcattgatgcgcaacctaataaagatccattgtatttgcacccccgccggccagatcgatgacccagccaatgactggtttgacaaaatgtcgtcgttgcatcaatcatccattaatgtgaagagtcgtcgattaataagtcatgatgtcaaaatgtgtatgcaaattcagctcattactgtctaatactgttcgatcaaaagttgatgaatgggcaaataattcaccgaaatcattcaagaattggtgagctaagcattatcaaaccacaccgaaattcagtgcatgcaccatgcatggtaccaattgatgtgctagaacgacaaaagttgcaactctaaatttttttaaccccccctagctaataataacccaccaaaacatgcatgtgtccacttgggctttatattttatttttattgccttcgtgctcttggaccaaagacctttactcgattggggagct

SEQ ID NO: 54759 - DNA, 618 bp, Zea Mays
gaaagatgcatgtgccttgaattgccatgacgacgcagcaactaaaaggtctgggcaagctaggagggtggtgcagctaggggaaaacacgacaactagggaagggcggtgcagcaatgaaggactacaggggcagcccttgctgtgcgacggaagtagcggtccttgctgggcgacgcaagcaagatctatgtatgaaaaatttgtcacttaccaccaccaaggtctgtgcgtgttgtttctccaaccatccttctagggggcatcttgatctcggcccggcagcgaagaacggatcgacgacgatggtggatggggcgacgacgaggaggtggacggatggggcaatgctgacgaggatggggcagtgaatacagcagcgagttggatgatggggctgtggcgacgaggatggggcggtggatgcggcggcgaggtggatggatggtgcggtggatgcagttggctgcaaaatttcttttaggtttagagttataggcgatggtgtatatagaatacgctagaatttggtggtaggatggctgatttggtgtgattatttggcgggaataaaaatttagaggctatttaacaattattaaattgtagactcatatt

SEQ ID NO: 54760 - DNA, 2127 bp, Zea Mays
cctcacacctaggccccccacgtcgccggctcccggcgatggcgccgctgcccttcctgctgggtttcctcctcggcgccctggcgctggcggctgtcgaggcggcggcgatccttctgctgctccgccgcctccgccgcagtcaggctgcggcgggggacgcgctaccagccgccgacgagctgcccggggaacgccccttcccctacgagaagcaggtgagtggggcacgccgcgcctagcttagctctcccttcggtttcggctcgctcgctcgtggccgcctttagggcatccattgccgtggcggcggagcaacctgcctttgctggagtggagatgcggtttctaggaatcccatcgagccctacccgcttggccgcttgcttgatttccgagcgagcggacgctcactccaggagcttttcctcatgtcgactaattatctccccaaccgtttgatattcgtttccagaaaatgagaaaatagtctgggagtctgcgtctcaatcatacaaagttttagtcgctgctaagtgctaataaaaccagtgctgctgctttcttaattcttactgcaaattgattccaaagtcctctagtctgtacaatctgtttgctctgccgctgaaagatgtaatcccaacgtgcgtcacatttatcgatttatcatagatgcccgccctttctcagctgtattttgtctaattacgaactagattacctctgacactgacaggtcgcgctatatgttttcagggttttctgtggatactggagccagaaaaaatgccaaaactcagtaatgaccgcttatcggctggaggtcctagagagacaaaagacaagaagaatattgtggaagtttttcctgcaaagaagatggctaaaatcaagggaaactctctttgtttgtctggtcctgatggctcccaagcaaccattgagcttttgaactgcacggtacttgcagtttctgcatcaagtatgccctcgcgtaaatggttagtgctcgcactaaataccattcatgagctactcgtcaatcactacttgttgtgttaacatgacaagtttattgaatttgaccgcgcattcttagttaccagatagatataaccgttggttatattattaaataatatggacactggaagctttgtcttagggttatgtatatgttgcaatcggctaaatttaagtccattttatttcttgaaaaaacttctataaaaacgatattcgtcttccaatgtagttaactgtcaagggcgttggttcctaaggtggctggccctcgactccgcaactcgtagtctcggtccgtctttgctggcagggttataccccctagccgccggcttgatagggaaaagaggaagaagactggatgactaaattcttgcttgattccctcaagtgccggttacagatatatatagccttggcttgcaacaactcctcctaaactttaggatctaattccttatctttctattctagccactaatctgaaacaaactcctaaactttaggatctaacaaactcctaaaatttaggatctaattccttctctttctatccaataatatgttcctaatttccttcctgggcactggacctggacgcggcgcgttcagcggcccgtcgaacgtccctggcgcgacgtcttcgggtgtaggggagaccccacatgacatctctctcccccctcgacgaccagctcgtcctcgagctgaaaggacgagtacttggcggtgaagtcgtccaggtcttcccatgtagctacagaaaccggctcacccttccagcgtaccagcacctgttgcacgccacgagccagtcggtagcacaccgcacgctctggagcaggcaccaataccccattgtgcacctcgggcagcgaaggaggaacgtccggcggcgcgcccacccattttttaagaggcccacttggaagacgtcatggagcttggcttgggccggtagttccagccgtacaactacctcattgatcatttccgagatgcggtatggaccgaaaaagcgaggctggagcttccccttcgacgcctgggacagagaagtaatcggccgattgcgtagccgcagcaggacccagtcac

SEQ ID NO: 54761 - DNA, 493 bp, Zea Mays
taaattttcacctcaagcggggcaccttcacagttcacaaagctgatcacccacacctggcccttacaacgatgggccttgacatagtcggaccactacccacagcacaaggcaacctcaaatttgcctttgttgcagtggaatattcaccaaggggattgaagaaagggccgtatcaacgatcacggcgaaaacaacacaaaagttattctagcagaacattgtctgtcgctttggtttacccacagagttgacagtggacaacggaaaacaatttgacaaccaagttttccacgaattttctacggttccattggctcgcgagcagtctttgcatcagtctaccacccacgagcgaatggtaaaatcttcaccacaatcaaaaaatactattagaagataaaaagggaaagtgggcagagcaattacccgaagcagtgtggccactcaacacaactgagtcctgtgcaaccgggttcaccccattcagatt

SEQ ID NO: 54762 - DNA, 532 bp, Zea Mays
caaattataacttgtcatggcacaatataatctaaggataaattggtcacaagattgaatttaaactagaatttaaatttgaacttgagaaatctaaaaagaaaataagaaaggaaaatagaaacaataaagaaaagaaaaaaagggggggaaaactcaccttgggtcgaatcccacggtcaggcccaaaaccccactccaccgccagcccactctgcgttctttccttttctttttcttgtgtggcacttacatgtgggtccacttcgtcagtcgtcttcctcctcaggtcggactccccgctgtgaacagaaccgcggaatccgcgcagctcaaacggctcgaccgaggtttgcacgatttgcccccccacagctcttgctgtcgccgcgcggcactataaattcatcgcgccctcgtccatctgtctatggctcgaccaaaactggaggcagagaacccctcctcctctaccatcaacgccgggtgggagctcgttgtcgcctccacaaccttgctgcggaaattcctc

SEQ ID NO: 54763 - DNA, 863 bp, Zea Mays
gtcaggagggaggccgggtgaagcagaattcttcaccaggtcgttgtgccgcaccgtactatgggtagggctccactcgtggccatacacggtaagaagacctccgttgtgttcgcttttgtctctactacgagtagcaccagggaatcaaagcatgaaggtttgtgagcgaggatgatgaactccgatgatgtctccaccatggttggggtttgctccgtcggccagggcgggtgaataggtgagaggggggaaagatgggcatgtgtcgttggtctgtggagtaacggcctcgattagatgagagtagagcaattcgggtgggcagatctggagcattgatctgcaattgtgtgactaagaagagaccgaacttaattaaatctggagtgttgattcgatgatcaacagacccaactacttatcgattcatgcatgggagatctaatcaggggcgtccatagccgatcgtgcgtcccagtttccatcttaccccttcgaacatcacaatttttctaaagaaacccccgataacaggtaatcatcccgcagtccgccccaataggaagaatgcaacaactaggtcctgtttttatcactttagcccctggcgtcttcagaaattgagtttggagacagagttctcgatctattcataaatcaaatatagaaaatgaattttcaatataaaaataaatctagaaacttagataattcgtaacttcatcgttttaacttcaatttaattcgttccaagatgcaatagctttgtaataatattgcctacgcagtaatagccttaattgtatcatatctcatactattataattagatatttgtttatctttagtagatttatctt

SEQ ID NO: 54764 - DNA, 412 bp, Zea Mays
gccaacatgagtatgaagctacacttacatcaaaagccgtgaaaccatcagtcaccaattaggttcgaatatatatagggtcattggcgaagtctagatcaaagttctccagtgccttctatgcatttcaccatttgatgggtgcaacatcacatcgccattctcatgaacacatttgtactatcacatatgcttggttgtacaactagagaaaagcaactatttcatacaatcttcaaggggcatcatttgaagtgccttatgcagaaccatggtcatcaaattctcaccgtcatcattgacgacctcagtgtacttcgatttgccacacactttacacttcttctctttctcattatcttcctagaaaagcataaaaccatatttacacacataaaccctctcataaggc

SEQ ID NO: 54765 - DNA, 470 bp, Zea Mays
ggcgttgttgcctccgatacttattagttaggcccaactgttaaaatccggacaaaacgggggatgctgcatctctaattttgctcgaatttatgtacgttggatgcatgttcccgtctattatccctctcatccacacaactaagaatagccgaatgaaaacaagcctcttcttcacctctcccatgcaagacctccagtgtctctcctcccattttccagaagcaaagcgacgtcaagaaacaagaagagagggaggttgatccgtccaaataatagatgggattccaatcaaatggcagcaatggcacagcctagttagccgacagatcatcacttgatttgtcagcaacagcatccgattctaacagacagcgagcccgaagacatgacggcggtggcgaacctgtcgtcgggggcgctggaggcgacggcgaagccgctggcggcggcgtgctacgacaacaacc

SEQ ID NO: 54766 - DNA, 922 bp, Zea Mays
atttgatccattggacaagctgtttgaccatacaaccatggctcaccaatacaatattatgataaaataatctcaaaagctatcaaattgaagtgatcccaaatccctcaagtggtagtagtagctgactatgcagctacttctgaactaacataggatgaaaaaatagaaataacatattgcaatttagaaaataacagttaacctatttgcatagtgcaatttagaaaatggctaactgaggatatcaagactgatattggatctagaatggttaaggtcatcaactgcatctccttttatattagcgatccaaaaattagcaatccaaaaatcatttgctattgtttgtgaatagcataaatctaatgaaatgatcatgagcatgactatacttattaaaataaatctaatgaaatgatctacgcaacactgtacttattagaattaatctcatgaaaacatccacgcagcactgtaccaatgagatgcagtaggccgacatacctggctgtagtattcctgggaccgtgccgagaaggatgagggttgatctgctcgcccacgcttgtcattttatcggtccaatgatgttgtcgatggaaaccttgcgtcgaagcatggatggaatgttacgccgcgtccaaaaactcgtcggccttccatggagagcagatcggttatggggggagtggatcgagctgccttccatcggttgggcaccgtgggcgggattggcgtgcacagtcgtggatcgcgacgaggaggagaccgtgaccccagtattccatagcacgcagatcagtgggggagtggatcacgccgagtttttggatcgcgggggagaggcgacctcgcctcggtattccatagagagatcggtcacgggggagaggccgaggaggacactgcaacacgggag

SEQ ID NO: 54767 - DNA, 955 bp, Zea Mays
ccaccatcgtgccaaccgtagggagagaaagtggagtaccaccggggttgatttcatgctggggcattgttgggtatggctggtgttgtctgggaggcggccgaccctgtcgatgggcatggtgcagtcgccgtgctccgggatacgcgggggagttgtggttcctcgctggggctgtcctctgccaggggctgcgtctcgctgctcgtcggtgccgttgtttgggcacatatgtgctcaggatacttcattgatggcctgagggtgtccctgtgtggtgttgggcggctgcggatgatcagtgctcaacgaattgctcgccggagattaactccgccgctgatttgatgctatcctgtggccagcgatctccgtcgcaccttttctattgagctttctcccatcctgtccgtgttggccttagagtcgtttagcgtgtttcaatttatcaagtagtgcaccagagccgtggatcaccgcacgacggcgggagctccgccgtcgttcactgctgcgccgccgtgttcaggctgggggtagaagatcatacgcagaaccatggatccatagatgggcggcccagattaggtttagcatacctcctagggcattggatctgtgccgttggatcggtatcctatggctcgaaacagatcatgttccattaagttgtagccgttgatctccgatcttgcggctgatagctataccggttcagtaaacgtttggatctaatcctcgccacgaatcgctgatccaacgaccattgctcaccgataccccttcgccgcggctattttgttaaaaagccctcagcgatttaagaaattaacccgccatcctctggctgtataaaataaatacgggtgggcccctggaatttatagttttgcccccgaacctctgataattagtacccgcggcccagagcttaaataaatccagtaattaatat

SEQ ID NO: 54768 - DNA, 684 bp, Zea Mays
tgcaggtgctttgttttgaatcaaggcattttgggcaaattcgagtcatggtattctaacagtgtttttcttggttatgcattacactcttgtgtttatcgtgttcttaaccataacactaatcgaatcacagagacttgtgaggtggcctttgatgagactttgcctagtccatctcatgtttttgggaccatgggtctagatcaggtgggtgaaaccatctttgtggaggagaatgacaacgctgactagggtgatccaaagccgactccaccggttaccctagttgagcctacttccatgacctcgaacgatggacctaacatgtctacttccaccactaggggttcactcaagatggagggtgctgatcttggaggagttgaggctactattgagggggaggttacctccatgagggatgctccataccacgtacactgagctcaccctccccaacaaatgattggtgagcttcatgcgtgagtcacttgctctagatatcatgagatgtcccactttgctcactcaacttttgttgcgtcttttgagcctcgggatgttcgacccgctttgtctgatcctagctgggtcaatgttatgcacgaggagtttgaaaattttgagagaaactaggtttgggttttggtgccacctcattcaaattgccatccaatcggtaca

SEQ ID NO: 54769 - DNA, 382 bp, Zea Mays
caaatacccccaatggtaacaccctcatatcagtatgatagaaatgtccatgtgactaccactccaagtttttaaccatagtgttacaatccaatgcatgcccactagccaccttaactttcactagctgatagtgttccactttcaaacccaacatatgcaccatatgttggctgatgaaattagaggaactgccataatccacaagcattaacatggtatgttttcccaccactgacctgatcttgatgctttgttcattgttagttcctgatacagcctaaaaggatagccgacagcagtgatcctccctctcatcctcctgggcaagtttctggaaaacgtcatcaatgagttccattggctcctcctcagtaaccac

SEQ ID NO: 54770 - DNA, 626 bp, Zea Mays
aaatggttgtgggtgattcaccatgctagagtggtaaagaatcaattcatatagagcactagaaccttacgcgaatggtggacgatgacatccttgtgcagaagctgcaatgaggaatagtggagagtatcgactctccgatgccgtgggaaaacatcactgtgtttctaacccttcttaactttgagcatctatatctaggaaatttaattattgtctttatactactagaattaacatgctaaaatagggttagaacatagggtgaatttttttatgatcgaacagaaaacactcttaggcataagaggtgaagtggattatctaataggatttatttgttagagttttttagtttatcccaattcacctctcttagacatctgaattctttcaattggcatcaaagcctcgtgctcattggtttaggcatcattcacttagacaaagatgtccgatggtgatggacccctcccatgttcgagggagatgatttttcttgttacaaaaatcatatagaggcatatctagttgccattgatgtgaaagtctttagagtcaccataaaaggacttccaaaacataaggacccaccatcctagttggtgataaggtacactatgaga

SEQ ID NO: 54771 - DNA, 794 bp, Zea Mays
gctaggatactgagtcaaaagctttagtaatgtctagcttcaaaaggattcttgtttgtctttgctgatggagaagtctggcagtttgttgcacaatcataaaattgtcttggatgaaccgacctttgatggatgcactttgcctttgagagaccatagattgtagcttatcccccattctgttagctaggattttagtgactagcttggccatgctatgcactaaactaataggcctaaagtccttgacttggtcaccaccctccttttttggaataagggtgacaaaagctgaatttaatttgctaaagtgaccaaatttcctgtcccaaatagctgccaaaacctgcatcacattttccttaatggtaggccagcaagccttgtaaaatctttctatgaacccatcaggtccaggagctttgtcggacggcatctctttaatggcttcaaagacttctttttctgtaattggtaagtccaaatccttcagattatgagagggcagccccaagtagttaagattaatagtgacagttctattcaatcttgttcccagcaggcttctatagaaatcatctaccagcatggctttgtgagcatgatcagtaaacacattatctccagagaccaattttgccacaaagttcttcttttttctatatctggcgtgcaatggtgcgcttaaatgaggcaagggctaaggagtgcttttttagtccacatctcagccaatcctccataggggacaaaagcctgaaatcttgggctatttcaagtctgtgaagaatctc

SEQ ID NO: 54772 - DNA, 744 bp, Zea Mays
gaatcaagaatcttcactggtttttcacgatactgaaggtctttctgaatttgcactgtctcttcttcgaggtgactttcttgtgcttgcaggcatttgcggagttgggatacgtggaacacattgtggatgtcggacatggattctggtagttccaggcggtatgctgcgggtcctaccctgccaatgatgggacagggacctataaaacgtggggctagcttccctttgacttggaacctcctgacaccgcgcattggagaaaccttgaggtagacgaagtctccttcctcaaatcggagttccctccgcctgttgtctgcgtaactcttctgccgactttgagcttcaagcaaccttctgcggatcagtgcaactttctcttccgcctatttgacaaaggcaggtccttctagtgctttttcccccacgttggaccacatgagaggggtctggcatttccatccatacagtgcttcgaatggcgacatcttgatgctggcctgatagctattgttgtaggagaactctgcgtagggtagactggattcccaacttctatcgaaagctaacacacatgctcttaacaggtcttcaaggactttgttgactctctttgtctgcccatctgtctgagggtgataagcggtactgaaatctagcttggtgcccatagctttctgaaggcttgtccagaatttggatgtgaactgggttcctctgtctgacactatcttccatggg

SEQ ID NO: 54773 - DNA, 411 bp, Zea Mays
gctactttcaccattcaatcatgttgcactttgagttactgaagactttggaggcgaagtagacatggtattgttggagtttcttgtccttgaatttttcttggaccagagatgcgctaactgcaccataggatgctgcgacacacaatagaagtgcggaggtggggtttggactgactaaggttgtgagttctgataggtattccctgactgactcaaaggctactacctgctcagggccccaaatgaagtcctttgttcctcgtagcgtccaaagaaatggtagatttcattctacggattgcaaaatgaatctatttagtgctactaatcttcccattactccctgcacatcccttgttgattgtggaggctgcatgtccattattgcctttattttttggattagtt

SEQ ID NO: 54774 - DNA, 527 bp, Zea Mays
aaataacaccccttttataattacaagagttagtgaaaaattaggagaaaacaaaatcatgcatgtttcatggaatgcttgagttacaccttaaaactaattagagatttaatggttatgtcatggtgtcctaaagataaatattagtagtacttcatcgtagttttgtgtgatgtcggacatgcgtgtcgaaatgctttatttggtgaatgcgtttgttaattatatggtaactctagcgcacgaaatgacttggataaaaattagtaagtcgacttattggtcttcaaatgattatttcaactctaataaatggtaaagtgttagagcaattcaagtctttagaacacgacaaattcttgaagtacataagagctgaaatttatagttgctgttttgggctgcacacattgacttcgccgtgttgtatgtttgatgaactaaatcatgttttctgtagatatgtgctatataaaagttgtagttcacttgtatatctagcttgtcctaaaaatgcatgagctaag

SEQ ID NO: 54775 - DNA, 394 bp, Zea Mays
caattacacgggaatatggacgtacgagtgggtgaagagaagtaaacccggccgccatgtgggagaacaagaacatacataagcacaagtacggttccataacacctgccatagattgccgcgcgtatggcctgccaaaatcacggaggccagaggtgctgtagtcgactaaaccatgtagagggagagagtgagtagctgtaggctgcaaagcgagaggtcgagagccttttgggcgctatgctttctttctgctttctttttattttatttagttgggaagttgaagagaaggcatgttagcggctgattcgttgtatcgccaaggtgaagtgatatgggacacgtgtgcggaggagattttttaagcgacgtggatgctgcttttggtcgc

SEQ ID NO: 54776 - DNA, 359 bp, Zea Mays
actggcatattagttgttacagtcaagcatcatgattatgaatctagattttattaatgagtcaagcatcaagtacttatgttaaatactcttgcttgcatggacttcttgagcgaaaacactatgtgacgctgtttgcaggagacatactttgctacagattctcaaggagacaacaacacaaaatcatgtatgatgctttctttcttcattgattttacataaatgtttgaaatttcttcaacaattttttatgtagataaaacatagtaccaaacatgaatggcttcaaggctagcaaatgttcgaggacacttgatctgcaccaatgaggacacttcaaggtgtgtttttaactt

SEQ ID NO: 54777 - DNA, 564 bp, Zea Mays
ggcgctcaacacgacagagtgccgagcaacgggattcacacctttccgcctgatgtacgaatccaaagcaatgacaccacaagagttaaagcatggttccccccgaacaaacgaatcagccgtccccgatatcgacgaaccgacctccaaagatctcattgacggagaccgcgtcctcgcccctgcaggccctcaacaagtatcaggtctagaccaaagcatggcgtgacaacactgtcgtcccaagggaattcaacgaaggggacctagtacttgtaaggaccaccaggacagagtcccggggcaagctagagccgaagtgggaagggccgtacatagtcaagacaaaggcatccccaaatgcttacagactagcaacgtcatccggcgaagacctagaacactcatggaacatcaacaatctccgaaaatttttcatttaagatccaaggcccaagcgcctttgtaattcttcaaacaatatcattcagggccgcactcttttcctctgggggtgaggtttttaacgaggcggcgccatgtaatataccaacgaaaagcccc
